United States Patent Application Publication US 2020/0163878 A1 - sequence listing, part 57

SEQ ID NO: 217434 - RNA, 1410 nt, Artificial Sequence
  derived and/or modified CDS sequence (opt5) from neuraminidase__InfluenzaA__AHZ40432
augaaccccaaucagaagaucauuaccaucggcagcgugucccugacaauuucuacgaucugcuucuuuaugcaaauugccauccucaucaccacagucacccugcacuucaaacaguacgaguuuaacagcccuccgaauaaccagguuaugcuuugugaacccacaauuaucgagagaaauauuaccgaaaucguguaucugacaaacaccacgauugagaaggaaaucugcccuaaacccgcugaguaccggaauugguccaagccucagugugacauuaccggguucgcccccuuuucuaaagauaacagcauccgccucuccgcgggaggcgacaucugggugacaagagagccuuaugucucuugcgauccggacaaguguuaccaauucgcucuggggcagggaaccacacuuaauaacgugcauagcaauaacaccguucgggaucgcacgcccuauagaacacugcucaugaaugaacugggcgugccuuuucaccuggggaccaagcaggucugcauugccugguccucuagcuccugucaugacggaaaagccuggcuccacgugugcaucacaggcgaugacaagaacgcuaccgccagcuucauuuacaauggccggcugguugauucuguggucuccuggagcaaagagauccuucgcacccaggaaucugagugugugugcauuaacgggacauguacgguggucaugaccgacggauccgcuagcggcaaggccgauacaaaaauccuguuuaucgaggaagggaagauuguucauaccuccacacucucuggaagcgcgcaacacguggaggaaugcuccugcuaucccagauacccuggcgugcggugugucugccgcgacaacuggaaggggagcaauagacccaucauugauaucaacauuaaagaccacucuaucgugucccgguacguuuguagcggacuggugggcgacaccccgcgcaagaaugauucuagcuccucuagccauugccuugacccuaacaaugaggaaggcgggcacggagucaaaggcugggccuucgaugacgggaacgauguguggaugggaagaacgaucaaugagacaucccggcugggcuaugagaccuuuaagguuauugaaggguggagcaaccccaaaucuaagcuccagaucaaucgccaggugauugucgacagaggagaucgguccggcuacagcggcaucuucucuguggaggggaaauccuguauuaacagaugcuuuuaugucgaacugauccgcggacggaaggaggaaaccgaggugcuguggacaagcaauuccauuguuguguucuguggcaccucugggacauacggaacgggcagcuggccugacggggcugaucucaaccugaugcccaucuga

SEQ ID NO: 217435 - RNA, 1410 nt, Artificial Sequence; identical to SEQ ID NO: 214218
  derived and/or modified CDS sequence (opt5) from neuraminidase__InfluenzaA__AHZ40444

SEQ ID NO: 217436 - RNA, 1410 nt, Artificial Sequence
  derived and/or modified CDS sequence (opt5) from neuraminidase__InfluenzaA__AHZ40456
augaaccccaaucagaagaucauuaccaucggcagcgugucccugacaauuucuacgaucugcuucuuuaugcaaauugccauccucaucaccacagucacccugcacuucaaacaguacgaguuuaacagcccuccgaauaaccagguuaugcuuugugaacccacaauuaucgagagaaauauuaccgaaaucguguaucugacaaacaccacgauugagaaggaaaucugcccuaaacccgcugaguaccggaauugguccaagccucagugugacauuaccggguucgcccccuuuucuaaagauaacagcauccgccucuccgcgggaggcgacaucugggugacaagagagccuuaugucucuugcgauccggacaaguguuaccaauucgcucuggggcagggaaccacacuuaauaacaugcauagcaauaacaccgugcgggaucgcacgcccuauagaacacugcucaugaaugaacugggcguuccuuuucaccuggggaccaaacaggugugcauugccugguccucuagcuccugucaugacggaaaggccuggcuccacgucugcaucacaggcgaugacaagaacgcuaccgccagcuucauuuacaauggccggcugguggauucuguuguguccuggagcaaagagauccuucgcacccaggaaucugagugugucugcauuaacgggacauguacgguggugaugaccgacggauccgcuagcggcaaggccgauacaaaaauccuguuuaucgaggaagggaagauuguccauaccuccacacucucuggaagcgcgcaacacguugaggaaugcuccugcuaucccagauacccuggcgugcggugugugugccgcgacaacuggaaggggagcaauagacccaucgucgauauuaacaucaaagaccacucuauuguguccagcuacguuuguucuggacuggugggcgacaccccgcggaagaaugauagcuccucuagcucccauugccuugacccuaacaaugaggaaggcgggcacggagucaaaggcugggccuucgaugacgggaacgauguguggaugggacgcacgaucaaugagacaagcagacugggcuaugagaccuuuaagguuaucgaaggguggucuaaccccaaauccaagcuccagauuaaucgccaggugaucgucgaccggggagauagaagcggcuacucuggcauuuucuccguggaggggaaaagcuguaucaaccggugcuuuuaugucgaacugauuagaggacgcaaggaggaaaccgaggugcuguggacauccaauucuaucguuguguucuguggcaccagcgggacauacggaacgggcuccuggccugacggggcugaucucaaccugaugcccauuuga

SEQ ID NO: 217437 - RNA, 1410 nt, Artificial Sequence
  derived and/or modified CDS sequence (opt5) from neuraminidase__InfluenzaA__AHZ40468
augaaccccaaucagaagaucauuaccaucggcagcgugucccugacaauuucuacgaucugcuucuuuaugcaaauugccauccucaucaccacagucacccugcacuucaaacaguacgaguuuaacagcccuccgaauaaccagguuaugcuuugugaacccacaauuaucgagagaaauauuaccgaaaucguguaucugacaaacaccacgauugagaaggaaaucugcccuaaacccgcugaguaccggaauugguccaagccucagugugggauuaccggauucgcccccuuuucuaaagacaacagcauccgccucuccgcgggcggggauaucugggugacaagagagccuuaugucucuugcgacccggauaaguguuaccaauucgcucugggacagggcaccacacuuaauaacgugcauagcaauaacaccguucgggaccgcacgcccuauagaacacugcucaugaaugaacugggggugccuuuucaccugggaaccaagcaggucugcauugccugguccucuagcuccugucaugauggcaaagccuggcuccacgugugcaucacaggcaacgacaagaaugcuaccgccagcuucauuuacaacgggcggcugguugauucuguggucuccuggagcaaagagauccuucgcacccaggaaucugagugugugugcauuaacggaacauguacgguggucaugaccgacggcuccgcuagcgggaaggccgauacaaaaauccuguuuaucgaggaaggaaagauuguucauaccuccacacucucuggcagcgcgcaacacguggaggaaugcuccugcuaucccagauacccuggggugcggugugucugccgcgacaauuggaagggaagcaacagacccaucguggauauuaauaucaaagaccacucuauuguuuccagcuacguguguucuggccuggucggcgauaccccgcggaagaacgacagcuccucuagcucccauugccuugacccuaauaacgaggaagggggacacggcgugaaagggugggccuucgaugacggaaaugauguuuggaugggccgcacgaucaacgagacaagcagacugggguaugagaccuuuaaggugaucgaaggauggucuaaucccaaauccaagcuccagauuaaccggcaggucaucguggaccgcggcgauagaagcggcuacucugggauuuucuccgucgagggaaaaagcuguaucaaucggugcuuuuauguggaacugauuagaggccgcaaggaggaaaccgagguucuguggacauccaacucuaucguggucuucugugggaccagcggaacauacggcacgggguccuggccugacggcgcugaucucaaucugaugcccauuuga

SEQ ID NO: 217438 - RNA, 1410 nt, Artificial Sequence; identical to SEQ ID NO: 215426
  derived and/or modified CDS sequence (opt5) from neuraminidase__InfluenzaA__AHZ40480

SEQ ID NO: 217439 - RNA, 1410 nt, Artificial Sequence; identical to SEQ ID NO: 216864
  derived and/or modified CDS sequence (opt5) from neuraminidase__InfluenzaA__AHZ40492

SEQ ID NO: 217440 - RNA, 1410 nt, Artificial Sequence; identical to SEQ ID NO: 214218
  derived and/or modified CDS sequence (opt5) from neuraminidase__InfluenzaA__AHZ40503

SEQ ID NO: 217441 - RNA, 1410 nt, Artificial Sequence; identical to SEQ ID NO: 214218
  derived and/or modified CDS sequence (opt5) from neuraminidase__InfluenzaA__AHZ40515

SEQ ID NO: 217442 - RNA, 1410 nt, Artificial Sequence
  derived and/or modified CDS sequence (opt5) from neuraminidase__InfluenzaA__AHZ40527
augaaccccaaucagaagaucauuaccaucggcagcgugucccugacaauuucuacgaugugcuucuuuaugcaaaucgccauucucaucaccacagucacccugcacuucaaacaguacgaguuugacagcccuccgaacaaucagguuaugcuuugugaacccacaaucauugagagaaacaucaccgaaauuguguaucugacaaauaccacgaucgagaaggaaauuugcccuaaacccgcugaguaccggaacugguccaagccucagugugggaucaccggauucgcccccuuuucuaaagauaauagcauucgccucuccgcgggcggggacaucugggugacaagagagccuuaugucucuugcgauccggacaaguguuaccaauucgcucugggacagggcaccacacuuaacaaugugcauagcaacaauaccguucgggaucgcacgcccuauagaacacugcucaugaacgaacugggggugccuuuucaccugggaaccaagcaggucugcaucgccugguccucuagcuccugucaugacggcaaagccuggcuccacgugugcauuacaggcgaugacaagaaugcuaccgccagcuucaucuacaacgggcggcugguugauucuguggucuccuggagcaaagagauucuucgcacccaggaaucugagugugugugcaucaauggaacauguacgguggucaugaccgacggcuccgcuagcgggaaggccgauacaaaaauucuguuuaucgaggaaggaaagaucguucauaccuccacacucucuggcagcgcgcaacacguggaggaaugcuccugcuaucccagauacccuggggugcggugugucugccgcgacaacuggaagggaagcaacagacccauuguggauaucaauauuaaagaccacucuaucguuuccagcuacguguguucuggccuggucggcgacaccccgcggaagaacgauagcuccucuagcucccauugccuugacccuaauaacgaggaagggggacacggcgugaaagggugggccuucgaugacggaaaugauguuuggaugggccgcacgauuaacgagacaagcagacugggguaugagaccuuuaaggugaucgaaggauggucuaaucccaaauccaagcuccagaucaaccggcaggucauuguggaccgcggcgauagaagcggcuacucugggaucuucuccgucgagggaaaaagcuguauuaaucggugcuuuuauguggaacugaucagaggccgcaaggaggaaaccgagguucuguggacauccaacucuauuguggucuucugugggaccagcggaacauacggcacgggguccuggccugacggcgcugaucucaaucugaugcccaucuga

SEQ ID NO: 217443 - RNA, 1410 nt, Artificial Sequence
  derived and/or modified CDS sequence (opt5) from neuraminidase__InfluenzaA__AHZ40539
augaaccccaaucagaagaucauuaccaucggcagcgugucccugacaauuucuacgaucugcuucuuuaugcaaauugccauccucaucaccacagucacccugcacuucaaacaguacgaguuuaacagcccuccgaauaaccagguuaugcuuugugaacccacaauuaucgagagaaauauuaccgaaaucguguaucugacaaacaccacgauugagaaggaaaucugcccuaaacccgcugaguaccggaauugguccaagccucagugugggauuaccggauucgcccccuuuucuaaagacaacagcauccgccucuccgcgggcggggauaucugggugacaagagagccuuaugucucuugcgacccggauaaguguuaccaauucgcucugggacagggcaccacacuuaauaacgugcauagcaauaacaccguucgggaccgcacgcccuauagaacacugcucaugaaugaacugggggugccuuuucaccugggaaccaagcaggucugcauugccugguccucuagcuccugucaugauggcaaagccuggcuccacgugugcaucacaggcgacgauaagaacgcuaccgccagcuucauuuacaaugggcggcugguugacucuguggucuccuggagcaaagagauccuucgcacccaggaaucugagugugugugcauuaacggaacauguacgguggucaugaccgauggcuccgcuagcgggaaggccgacacaaaaauccuguuuaucgaggaaggaaagauuguuaacaccuccacacucucuggcagcgcgcaacauguggaggaaugcuccugcuaucccagauacccuggggugcggugugucugccgcgauaauuggaagggaagcaacagacccaucguggacauuaauaucaaagaucacucuauuguuuccagcuacguguguucuggccuggucggcgacaccccgcggaagaacgacagcuccucuagcucccacugccuugauccuaauaacgaggaagggggacauggcgugaaagggugggccuucgacgauggaaaugacguuuggaugggccgcacgaucaacgagacaagcagacugggguaugagaccuuuaaggugaucgaaggauggucuaaucccaaauccaagcuccagauuaaccggcaggucaucguggaucgcggcgacagaagcggcuacucugggauuuucuccgucgagggaaaaagcuguaucaaucggugcuuuuauguggaacugauuagaggccgcaaggaggaaaccgagguucuguggacauccaacucuaucguggucuucugugggaccagcggaacauacggcacgggguccuggccugauggcgcugaccucaaucugaugcccauuuga

SEQ ID NO: 217444 - RNA, 1410 nt, Artificial Sequence; identical to SEQ ID NO: 214218
  derived and/or modified CDS sequence (opt5) from neuraminidase__InfluenzaA__AHZ40551

SEQ ID NO: 217445 - RNA, 1410 nt, Artificial Sequence
  derived and/or modified CDS sequence (opt5) from neuraminidase__InfluenzaA__AHZ40563
augaaccccaaucagaagaucauuaccaucggcagcgugucccugacaauuucuacggucugcuucuuuaugcaaaucgccauucucaucaccacaguuacccugcacuucaaacaguacgaguuuaacagcuccccuaauaaccaggugaugcuuugugaaccgacaaucauugagagaaauaucaccgaaauuguguaucugacaaacaccacgaucgagaaggaaauuugccccaaaccugcugaguaccggaauuggucuaagccccagugugggaucaccggauucgccccuuuuagcaaagacaacuccauucgccucucugcgggcggggauaucugggucacaagagagcccuaugugagcugcgacccugauaaguguuaccaauucgcucugggacagggcaccacacuuaauaacguucauuccaauaacaccgugcgggaccgcacgccguauagaacacugcucaugaaugaacuggggguccccuuucaccugggaaccaaacaggugugcaucgccuggucuagcuccagcugucaugauggcaaggccuggcuccacguuugcauuacaggcgacgauaagaacgcuaccgccucuuucaucuacaaugggcggcugguggacuccgucgugagcuggucuaaagagauucuucgcacccaggaauccgagugugugugcaucaacggaacauguacggucguuaugaccgauggcagcgcuuccgggaaggccgacacaaaaauucuguuuaucgaggaaggaaagaucgugcauaccucuacacucagcggcuccgcgcaacacguggaggaaugcagcugcuauccuagauaccccgggguccggugugugugccgcgauaacuggaagggaucuaauagaccuauuguugacaucaacauuaaagaucacuccaucgugagcucuuacgucuguagcggccuggugggcgacacgccccggaagaaugacuccucuagcuccagccauugccuugauccgaacaaugaggaagggggacacggcguuaaagggugggccuucgacgauggaaacgacguguggaugggccgcaccauuaaugagacaucuagacugggguaugagaccuuuaaggucaucgaaggaugguccaacagcaaaucuaagcuccagaucaaucgccaggugauugucgaucggggcgacagauccggcuacagcgggaucuucuccguggagggaaaaucuuguauuaaccggugcuuuuauguugaacugaucagaggccgcaaggaggaaaccgaggugcuguggacaagcaauuccauugucguguucugugggaccucuggaacauacggcacggggagcuggccugauggcgcugaccucaaccugaugcccaucuga

SEQ ID NO: 217446 - RNA, 1410 nt, Artificial Sequence
  derived and/or modified CDS sequence (opt5) from neuraminidase__InfluenzaA__AHZ40575
augaaccccaaucagaagaucauuaccaucggcagcgugucccugacaauuucuacgaucugcuucuuuaugcaaauugccauccucaucaccacagucacccugcacuucaaacaguacgaguuuaacagcccuccgaauaaccagguuaugcuuugugaacccacaauuaucgagagaaauauuaccgaaaucguguaucugacaaacaccacgauugagaaggaaaucugcccuaaacccgcugaguaccggaauugguccaagccucagugugggauuaccggauucgcccccuuuucuaaagacaacagcauccgccucuccgcgggcggggauaucugggugacaagagagccuuaugucucuugcgacccggauaaguguuaccaauucgcucugggacagggcaccacacuuaauaacgugcauagcaauaacaccguucgggaccgcacgcccuauagaacacugcucaugaaugaacugggggugccuuuucaccugggaaccaagcaggucugcauugccugguccucuagcuccugucaugauggcaaagccuggcuccacgugugcaucacaggcgacgauaagaacgcuaccgccagcuucauuuacaaugggcggcugguugacucuguggucuccuggagcaaagagauccuucgcacccaggaaucugagugugugugcauuaacggaacauguacgguggucaugaccgauggcuccgcuagcgggaaggccgacacaaaaauccuguuuaucgaggaaggaaagauuguucauaccuccacacucucuggcagcgcgcaacacguggaggaaugcuccugcuaucccagauacccuggggugcggugugucugccgcgauaacuggaagggaagcaauagacccaucguggacauuaacaucaaagaucacucuauuguuuccagcuacguguguucuggccuggucggcgacaccccgcggaagaaugacagcuccucuagcucccauugccuugauccuaacaaugaggaagggggacacggcgugaaagggugggccuucgacgauggaaacgacguuuggaugggccgcacgaucaaugagacaagcagacugggguaugagaccuuuaaggugaucgaaggauggucuaaccccaaauccaagcuccagauuagccggcaggucaucguggaucgcggcgacagaucuggcuacuccgggauuuucagcgucgagggaaaauccuguaucaaucggugcuuuuauguggaacugauuagaggccgcaaggaggaaaccgagguucuguggacaucuaacagcaucguggucuucugugggaccuccggaacauacggcacggggucuuggccugauggcgcugaccucaaucugaugcccauuuga

SEQ ID NO: 217447 - RNA, 1410 nt, Artificial Sequence; identical to SEQ ID NO: 217165
  derived and/or modified CDS sequence (opt5) from neuraminidase__InfluenzaA__AHZ40586

SEQ ID NO: 217448 - RNA, 1410 nt, Artificial Sequence
  derived and/or modified CDS sequence (opt5) from neuraminidase__InfluenzaA__AHZ40598
augaaccccaaucagaagaucauuaccaucggcagcgugugcaugacaauugggauggccaaccugauccuccaaauuggaaauaucaucuccauuuggaucucucacagcauucaggucggcaaccagucccagaucgagacguguaaucaaucuguuauuaccuacgaaaacaauacaugggugaaccagaccuaugugaauaucagcaacacaaauuucgcugccgggcagccugucguguccguuaaacuggcgggaaacucuagccuuugcccgguguccggcugggcuauuuacagcaaggacaauucugucagaaucggguccaaaggagauguguuuguuauccgggagcccuucauuagcuguucuccucuggaaugccgcaccuuuuuccucacacagggcgcccugcuuaacgacaagcauuccaauggcaccaucaaagauagaagccccuaucggacgcugaugucuuguccuauuggggaggugcccuccccuuacaacagccgcuuugaauccgucgccuggucugcuagcgccugccacgacggaaucaacuggcucaccauuggcaucuccgggccggauagcggagcuguggccgugcugaaguauaauggcaucauuacagacaccaucaagucuuggagaaacgauauucugcggacacaagaguccgagugugcgugcgucaaugggagcuguuucaccaucaugacggacggacccucugauggccaggccagcuacaaaauuuuucgcaucgaaaagggcaaaaucguuaaguccguggagaugaacgcuccuaauuaucauuacgaagagugcucuuguuaccccgacagcuccgagauuacaugcgugugcagagauaacuggcacgggagcaaucggccuugggucucuuucaaccagaaucucgaauaucagaucggauacauuuguuccggcaucuuuggggacaacccccgcccgaaugauaaaaccggaagcugcggcccugugucuuccaacggggccaauggaguuaagggcuucagcuuuaaguauggcaacgggguguggauuggaagaacaaaauccaucucuagccggaagggcuucgagaugauuugggaccccaauggguggaccggaaccgacaacaacuuuuccaucaaacaagauaucgucggcauuaaugaauggucuggguacagcggcuccuucgugcagcauccugagcugacaggacuugacuguauccgccccugcuucuggguugaacugauuagaggccggcccaaggagaacacgaucuggaccagcgggucuuccauuagcuuuuguggagucaauucugauacagugggcugguccuggccugacggggcugagcucccguucaccaucgauaaauga

SEQ ID NO: 217449 - RNA, 1410 nt, Artificial Sequence; identical to SEQ ID NO: 214218
  derived and/or modified CDS sequence (opt5) from neuraminidase__InfluenzaA__AHZ40609

SEQ ID NO: 217450 - RNA, 1410 nt, Artificial Sequence; identical to SEQ ID NO: 215447
  derived and/or modified CDS sequence (opt5) from neuraminidase__InfluenzaA__AHZ40629

SEQ ID NO: 217451 - RNA, 1410 nt, Artificial Sequence; identical to SEQ ID NO: 215429
  derived and/or modified CDS sequence (opt5) from neuraminidase__InfluenzaA__AHZ40641

SEQ ID NO: 217452 - RNA, 1410 nt, Artificial Sequence
  derived and/or modified CDS sequence (opt5) from neuraminidase__InfluenzaA__AHZ40653
augaaccccaaucagaagaucauuaccaucggcagcgugucccugacaauuucuacgaucugcuucuuuaugcaaauugccauccucaucaccacagucacccugcacuucaaacaguacgaguuuaacagcccuccgaauaaccagguuaugcuuugugaacccacaauuaucgagagaaauauuaccgaaaucguguaucugacaaacaccacgauugagaaggaaaucugcccuaaacccgcuggguaccggaauugguccaagccucaguguggaauuaccggcuucgcccccuuuucuaaagacaacagcauccgccucuccgcugggggagauaucugggugacaagagagccuuaugucucuugcgacccggauaaguguuaccaauucgcgcugggccaggggaccacacuuaauaacgugcauagcaauaacaccguucgggaccgcacgcccuauagaacacugcucaugaaugagcugggagugccuuuucaccugggcaccaagcaggucugcauugccugguccucuagcuccugucaugauggcaaagccuggcuccacgugugcaucacaggggacgauaagaacgcuaccgccagcuucauuuacaauggacggcugguugacucuguggucuccuggagcaaagaaauccuucgcacccaggagucugaaugugugugcauuaacggcacauguacgguggucaugaccgauggguccgcuagcggaaaggccgacacaaaaauccuguuuaucgaggagggcaagauuguucauaccuccacacucucugggagcgcgcaacacguggaagagugcuccugcuaucccagauacccuggagugcggugugucugccgcgauaacuggaagggcagcaauagacccaucguggacauuaacaucaaagaucacucuauuguuuccagcuacguguguucuggccuggucggggacaccccgcggaagaaugacagcuccucuagcucccauugccuugauccuaacaaugaagagggaggccacggggugaaaggaugggccuucgacgauggcaacgacguuuggauggggcgcacgaucaaugaaacaagcagacugggauaugagaccuuuaaggugaucgagggcuggucuaaccccaaauccaagcuccagauuaaucggcaggucaucguggaucgcggcgacagaagcggguacucuggaauuuucuccgucgaaggcaaaagcuguaucaaccggugcuuuuauguggagcugauuagagggcgcaaggaagagaccgaaguucuguggacauccaauucuaucguggucuucuguggaaccagcggcacauacgggacgggcuccuggccugauggagcugaccucaaccugaugcccauuuga

SEQ ID NO: 217453 - RNA, 1410 nt, Artificial Sequence; identical to SEQ ID NO: 215447
  derived and/or modified CDS sequence (opt5) from neuraminidase__InfluenzaA__AHZ40665

SEQ ID NO: 217454 - RNA, 1410 nt, Artificial Sequence; identical to SEQ ID NO: 215447
  derived and/or modified CDS sequence (opt5) from neuraminidase__InfluenzaA__AHZ40677

SEQ ID NO: 217455 - RNA, 1410 nt, Artificial Sequence; identical to SEQ ID NO: 214218
  derived and/or modified CDS sequence (opt5) from neuraminidase__InfluenzaA__AHZ40689

SEQ ID NO: 217456 - RNA, 1410 nt, Artificial Sequence
  derived and/or modified CDS sequence (opt5) from neuraminidase__InfluenzaA__AHZ40713
augaaccccaaucagaagaucauuaccaucggcagcgugucccugacaauuucuacgaucugcuucuuuaugcaaauugccauccucaucaccacagucacccugcacuucaaacaguacgaguuuaacagcccuccgaauaaccagguuaugcuuugugaacccacaauuaucgagagaaauauuaccgaaaucguguaucugacaaacaccacgauugagaaggaaaucugcccuaaacccgcugaguaccggaauugguccaagccucagugugggauuaccggauucgcccccuuuucuaaagacaacagcauccgccucuccgcgggcggggauaucugggugacaagagagccuuaugucucuugcgacccggauaaguguuaccaauucgcucugggacagggcaccacacuuaauaacgugcauagcaauaacaccguucgggaccgcacgcccuauagaacacugcucaugaaugaacugggggugccuuuucaccugggaaccaagcaggucugcauugccugguccucuagcuccugucaugauggcaaagccuggcuccacgugugcaucacaggcgacgauaagaacgcuaccgccagcuucauuuacaaugggcggcugguugacucuguggucuccuggagcaaagagauccuucgcacccaggaaucugagugugugugcauuaacggaacauguacgguggucaugaccgauggcuccgcuagcgggaaggccgacacaaaaauccuguuuaucgaggaaggaaagauuguucauaccuccacacucucuggcagcgcgcaacacguggaggaaugcuccugcuaucccagauacccuggggugcggugugucugccgcgauaacuggaagggaagcaauagacccaucguggacauuaacaucaaagaucacucuauuguuuccagcuacguguguucuggccuggucggcgacaccccgcggaagaaugacagcuccucuagcucccauugccuugauccuaacaaugaggaagggggacacggcgugaaagggugggccuucgacgauggaaacgacguuuggaugggccgcacgaucaaugagacaagcagacugggguaugagaccuuuaaggugaucgaaggauggucuaaccccaaauccaagcuccagauuaaucggcaggucaucguggaucgcggcgacaaaagcggcuacucugggauuuucuccgucgagggaaagagcuguaucaacagaugcuuuuauguggaacugauucggggcagaaaggaggaaaccgagguucuguggacauccaauucuaucguggucuucugugggaccagcggaacauacggcacgggguccuggccugauggcgcugaccucaaccugaugcccauuuga

SEQ ID NO: 217457 - RNA, 1410 nt, Artificial Sequence
  derived and/or modified CDS sequence (opt5) from neuraminidase__InfluenzaA__AHZ40725
augaaccccaaucagaagaucauuaccaucggcagcgugucccugacaauuucuacgaucugcuucuuuaugcaaauugccauccucaucaccacagucacccugcacuucaaacaguacgaguuuaacagcccuccgaauaaccagguuaugcuuugugaacccacaauuaucgagagaaauauuaccgaaaucguguaucugacaaacaccacgauugagaaggaaaucugcccuaaacccgcugaguaccggaauugguccaagccucagugugggauuaccggauucgcccccuuuucuaaagacaacagcauccgccucuccgcgggcggggauaucugggugacaagagagccuuaugucucuugcgacccggauaaguguuaccaauucgcucugggacagggcaccacacuuaauaacgugcauagcaauaacaccguucgggaccgcacgcccuauagaacacugcucaugaaugaacugggggugccuuuucaccugggaaccaagcaggucugcauugccugguccucuagcuccugucaugauggcaaagccuggcuccacgugugcaucacaggcgacgauaagaacgcuaccgccagcuucauuuacaaugggcggcugguugacucuguggucuccuggagcaaagagauccuucgcacccaggaaucugagugugugugcauuaacggaacauguacgguggucaugaccgauggcuccgcuagcgggaaggccgacacaaaaauccuguuuaucgaggaaggaaagauuguucauaccuccacacucucuggcagcgcgcaacacguggaggaaugcuccugcuaucccagauacccuggggugcggugugucugccgcgauaacuggaagggaagcaauagacccaucguggacauuaacaucaaagaucacucuauuguuuccggcuacguguguagcggccuggucggggacaccccgcggaagaaugacucuagcuccucuagccauugccuugauccuaacaaugaggaaggaggccacggggugaaaggaugggccuucgacgauggcaacgacguuuggauggggcgcacgaucaaugagacauccagacugggauaugagaccuuuaaggugaucgaaggcuggagcaaccccaaaucuaagcuccagauuaaucggcaggucaucguggaucgcggcgacagauccggguacagcggaauuuucucugucgagggcaaauccuguaucaaccggugcuuuuauguggaacugauuagagggcgcaaggaggaaaccgagguucuguggacaagcaauuccaucguggucuucuguggaaccucuggcacauacgggacgggcagcuggccugauggagcugaccucaaccugaugcccauuuga

SEQ ID NO: 217458 - RNA, 1410 nt, Artificial Sequence; identical to SEQ ID NO: 215436
  derived and/or modified CDS sequence (opt5) from neuraminidase__InfluenzaA__AHZ40737

SEQ ID NO: 217459 - RNA, 1410 nt, Artificial Sequence
  derived and/or modified CDS sequence (opt5) from neuraminidase__InfluenzaA__AHZ40749
augaaccccaaucagaagaucauuaccaucggcagcgugucccugacaauuucuacgaucugccucuucaugcaaauugccauccugaucaccacagucacccuucacuuuaaacaguacgaguucaacagcccuccgaauaaccagguuaugcugugugaacccacaauuaucgagagaaauauuaccgaaaucguguaucucacaaacaccacgauugagaaggaaaucugcccuaaacccgcugaguaccggaauugguccaagccucagugugggauuaccggauuugcccccuucucuaaagacaacagcauccgccuguccgcgggcggggauaucugggugacaagagagccuuaugucucuugcgacccggauaaguguuaccaauuugcucuuggacagggcaccacacugaauaacgugcauagcaauaacaccguucgggaccgcacgcccuauagaacacuccugaugaaugaacugggggugccuuuccaccucggaaccaagcaggucugcauugccugguccuccucuuccugucaugauggcaaagccuggcugcacgugugcaucacaggcgacgauaagaacgcuaccgccagcuuuauuuacaaugggcggcuuguugacucuguggucuccuggagcaaagagauccugcgcacccaggaaucugagugugugugcauuaacggaacauguacgguggucaugaccgauggcuccgcuagcgggaaggccgacacaaaaauccucuucaucgaggaaggaaagauuguucauaccuccacacugucuggcagcgcgcaacacguggaggaaugcuccugcuaucccagauacccuggggugcggugugucugccgcgauaacuggaagggaagcaauagacccaucguggacauuaacaucaaagaucacucuauuguuuccagcuacguguguucuggccuugucggcgacaccccgcggaagaaugacagcuccucuagcucccauugccuggauccuaacaaugaggaagggggacacggcgugaaagggugggccuuugacgauggaaacgacguuuggaugggccgcacgaucaaugagacaagcagacucggguaugagaccuucaaggugaucgaaggauggucuaaccccaaauccaagcugcagauuaaucggcaggucaucguggaucgcggcgacagaagcggcuacucugggauuuuuagcgucgagggaaaaagcuguaucaaccggugcuucuauguggaacugauuagaggccgcaaggaggaaaccgagguucucuggacauccaauucuaucguggucuuuugugggaccagcggaacauacggcacggggccuuggcccgauggcgcugaccugaaccuuaugcccauuuga

SEQ ID NO: 217460 - RNA, 1410 nt, Artificial Sequence
  derived and/or modified CDS sequence (opt5) from neuraminidase__InfluenzaA__AHZ40761
augaaccccaaucagaagaucauuaccaucggcagcgugucccugacaauuucuacgaucugcuucuuuaugcaaauugccauccucaucaccacagucacccugcacuucaaacaguacgaguuuaacagcccuccgaauaaccagguuaugcuuugugaacccacaauuaucgagagaaauauuaccgaaaucguguaucugacaaacaccacgauugagaaggaacucugcccuaaacuggcugaguaccggaauugguccaagccccagugugacaucaccggguucgccccuuuuucuaaagauaacagcauucgccuuuccgcgggaggcgacaucugggugacaagagagcccuaugucucuugcgauccugacaaguguuaccaauucgcucuggggcagggaaccacacucaauaacgugcauagcaauaacaccguucgggaucgcacgccguauagaacacugcugaugaaugaacucggcgugcccuuucaccuggggaccaagcaggucugcauggccugguccagcagcuccugucaugacggaaaagccuggcuucacgugugcaucacaggcgaugacaagaacgcuaccgccagcuucauuuacaauggcaaacugguugauucuguggucuccuggagcaaggagauccuccggacccaggaaucugagugugugugcauuaacgggacauguacgguggucaugaccgacggauccgcuagcggcaaagccgauacaaagauccuguuuauugaggaagggaagaucguucauaccuccacacuuucuggaagcgcgcaacacguggaggaaugcuccugcuauccucgcuaccccggcgugagaugugucugccgggacaacuggaaagggagcaaucgcccuaucguggauauuaacaucaaggaccacucuauuguuuccagcuacguguguucuggacuggucggcgacacccccagaaaaacggauagcuccucuagcucccauugccucgacccgaauaacgaggaaggcgggcacggagugaagggcugggccuucgaugacgggaaugauguuuggaugggacggacaaucaacgagaccagccgccugggcuaugagaccuuuaaagugauugaaggguggucuaauccuaaguccaaacugcagaucaacagacaggucaucguggaccggggagaucgcagcggcuacucuggcauuuucuccgucgaggggaagucuuguaucaauagaugcuuuuauguggaacucauucggggaagaaagaaagagacagcuguucuguggaccuccaacucuaucguggucuucuguggcacaagcgggacguacggaaccggcuccuggcccgacggggccgaucuuaaucugaugccuauuuga

SEQ ID NO: 217461 - RNA, 1410 nt, Artificial Sequence; identical to SEQ ID NO: 214218
  derived and/or modified CDS sequence (opt5) from neuraminidase__InfluenzaA__AHZ40773

SEQ ID NO: 217462 - RNA, 1410 nt, Artificial Sequence; identical to SEQ ID NO: 208800
  derived and/or modified CDS sequence (opt5) from neuraminidase__InfluenzaA__AHZ40785

SEQ ID NO: 217463 - RNA, 1410 nt, Artificial Sequence; identical to SEQ ID NO: 208800
  derived and/or modified CDS sequence (opt5) from neuraminidase__InfluenzaA__AHZ40796

SEQ ID NO: 217464 - RNA, 1410 nt, Artificial Sequence; identical to SEQ ID NO: 208800
  derived and/or modified CDS sequence (opt5) from neuraminidase__InfluenzaA__AHZ40807

SEQ ID NO: 217465 - RNA, 1410 nt, Artificial Sequence; identical to SEQ ID NO: 208800
  derived and/or modified CDS sequence (opt5) from neuraminidase__InfluenzaA__AHZ40818

SEQ ID NO: 217466 - RNA, 1410 nt, Artificial Sequence; identical to SEQ ID NO: 208800
  derived and/or modified CDS sequence (opt5) from neuraminidase__InfluenzaA__AHZ40829

SEQ ID NO: 217467 - RNA, 1410 nt, Artificial Sequence; identical to SEQ ID NO: 208800
  derived and/or modified CDS sequence (opt5) from neuraminidase__InfluenzaA__AHZ40840

SEQ ID NO: 217468 - RNA, 1410 nt, Artificial Sequence; identical to SEQ ID NO: 208800
  derived and/or modified CDS sequence (opt5) from neuraminidase__InfluenzaA__AHZ40851

SEQ ID NO: 217469 - RNA, 1410 nt, Artificial Sequence; identical to SEQ ID NO: 208800
  derived and/or modified CDS sequence (opt5) from neuraminidase__InfluenzaA__AHZ40862

SEQ ID NO: 217470 - RNA, 1410 nt, Artificial Sequence; identical to SEQ ID NO: 208800
  derived and/or modified CDS sequence (opt5) from neuraminidase__InfluenzaA__AHZ40873

SEQ ID NO: 217471 - RNA, 1410 nt, Artificial Sequence; identical to SEQ ID NO: 208800
  derived and/or modified CDS sequence (opt5) from neuraminidase__InfluenzaA__AHZ40884

SEQ ID NO: 217472 - RNA, 1410 nt, Artificial Sequence; identical to SEQ ID NO: 208800
  derived and/or modified CDS sequence (opt5) from neuraminidase__InfluenzaA__AHZ40895

SEQ ID NO: 217473 - RNA, 1410 nt, Artificial Sequence; identical to SEQ ID NO: 208800
  derived and/or modified CDS sequence (opt5) from neuraminidase__InfluenzaA__AHZ40906

SEQ ID NO: 217474 - RNA, 1410 nt, Artificial Sequence; identical to SEQ ID NO: 208800
  derived and/or modified CDS sequence (opt5) from neuraminidase__InfluenzaA__AHZ40917

SEQ ID NO: 217475 - RNA, 1410 nt, Artificial Sequence; identical to SEQ ID NO: 208800
  derived and/or modified CDS sequence (opt5) from neuraminidase__InfluenzaA__AHZ40928

SEQ ID NO: 217476 - RNA, 1410 nt, Artificial Sequence; identical to SEQ ID NO: 208800
  derived and/or modified CDS sequence (opt5) from neuraminidase__InfluenzaA__AHZ40939

SEQ ID NO: 217477 - RNA, 1410 nt, Artificial Sequence; identical to SEQ ID NO: 208800
  derived and/or modified CDS sequence (opt5) from neuraminidase__InfluenzaA__AHZ40950

SEQ ID NO: 217478 - RNA, 1410 nt, Artificial Sequence; identical to SEQ ID NO: 208800
  derived and/or modified CDS sequence (opt5) from neuraminidase__InfluenzaA__AHZ40961

SEQ ID NO: 217479 - RNA, 1410 nt, Artificial Sequence; identical to SEQ ID NO: 208800
  derived and/or modified CDS sequence (opt5) from neuraminidase__InfluenzaA__AHZ40972

SEQ ID NO: 217480 - RNA, 1410 nt, Artificial Sequence; identical to SEQ ID NO: 208800
  derived and/or modified CDS sequence (opt5) from neuraminidase__InfluenzaA__AHZ40983

SEQ ID NO: 217481 - RNA, 1410 nt, Artificial Sequence; identical to SEQ ID NO: 208800
  derived and/or modified CDS sequence (opt5) from neuraminidase__InfluenzaA__AHZ40994

SEQ ID NO: 217482 - RNA, 1410 nt, Artificial Sequence; identical to SEQ ID NO: 208800
  derived and/or modified CDS sequence (opt5) from neuraminidase__InfluenzaA__AHZ41005

SEQ ID NO: 217483 - RNA, 1410 nt, Artificial Sequence; identical to SEQ ID NO: 208800
  derived and/or modified CDS sequence (opt5) from neuraminidase__InfluenzaA__AHZ41016

SEQ ID NO: 217484 - RNA, 1410 nt, Artificial Sequence; identical to SEQ ID NO: 208800
  derived and/or modified CDS sequence (opt5) from neuraminidase__InfluenzaA__AHZ41027

SEQ ID NO: 217485 - RNA, 1410 nt, Artificial Sequence; identical to SEQ ID NO: 208800
  derived and/or modified CDS sequence (opt5) from neuraminidase__InfluenzaA__AHZ41049

SEQ ID NO: 217486 - RNA, 1410 nt, Artificial Sequence; identical to SEQ ID NO: 208800
  derived and/or modified CDS sequence (opt5) from neuraminidase__InfluenzaA__AHZ41060

SEQ ID NO: 217487 - RNA, 1410 nt, Artificial Sequence; identical to SEQ ID NO: 208800
  derived and/or modified CDS sequence (opt5) from neuraminidase__InfluenzaA__AHZ41071

SEQ ID NO: 217488 - RNA, 1410 nt, Artificial Sequence; identical to SEQ ID NO: 208800
  derived and/or modified CDS sequence (opt5) from neuraminidase__InfluenzaA__AHZ41082

SEQ ID NO: 217489 - RNA, 1410 nt, Artificial Sequence; identical to SEQ ID NO: 208800
  derived and/or modified CDS sequence (opt5) from neuraminidase__InfluenzaA__AHZ41093

SEQ ID NO: 217490 - RNA, 1410 nt, Artificial Sequence; identical to SEQ ID NO: 208800
  derived and/or modified CDS sequence (opt5) from neuraminidase__InfluenzaA__AHZ41104

SEQ ID NO: 217491 - RNA, 1410 nt, Artificial Sequence; identical to SEQ ID NO: 208800
  derived and/or modified CDS sequence (opt5) from neuraminidase__InfluenzaA__AHZ41115

SEQ ID NO: 217492 - RNA, 1410 nt, Artificial Sequence; identical to SEQ ID NO: 208800
  derived and/or modified CDS sequence (opt5) from neuraminidase__InfluenzaA__AHZ41126

SEQ ID NO: 217493 - RNA, 1410 nt, Artificial Sequence; identical to SEQ ID NO: 208800
  derived and/or modified CDS sequence (opt5) from neuraminidase__InfluenzaA__AHZ41137

SEQ ID NO: 217494 - RNA, 1410 nt, Artificial Sequence; identical to SEQ ID NO: 208800
  derived and/or modified CDS sequence (opt5) from neuraminidase__InfluenzaA__AHZ41148

SEQ ID NO: 217495 - RNA, 1410 nt, Artificial Sequence; identical to SEQ ID NO: 208800
  derived and/or modified CDS sequence (opt5) from neuraminidase__InfluenzaA__AHZ41159

SEQ ID NO: 217496 - RNA, 1410 nt, Artificial Sequence; identical to SEQ ID NO: 208800
  derived and/or modified CDS sequence (opt5) from neuraminidase__InfluenzaA__AHZ41170

SEQ ID NO: 217497 - RNA, 1410 nt, Artificial Sequence; identical to SEQ ID NO: 208800
  derived and/or modified CDS sequence (opt5) from neuraminidase__InfluenzaA__AHZ41181

SEQ ID NO: 217498 - RNA, 1410 nt, Artificial Sequence; identical to SEQ ID NO: 208800
  derived and/or modified CDS sequence (opt5) from neuraminidase__InfluenzaA__AHZ41205

SEQ ID NO: 217499 - RNA, 1410 nt, Artificial Sequence; identical to SEQ ID NO: 208800
  derived and/or modified CDS sequence (opt5) from neuraminidase__InfluenzaA__AHZ41251

SEQ ID NO: 217500 - RNA, 1410 nt, Artificial Sequence; identical to SEQ ID NO: 208800
  derived and/or modified CDS sequence (opt5) from neuraminidase__InfluenzaA__AHZ41266

SEQ ID NO: 217501 - RNA, 1410 nt, Artificial Sequence; identical to SEQ ID NO: 208800
  derived and/or modified CDS sequence (opt5) from neuraminidase__InfluenzaA__AHZ41284

SEQ ID NO: 217502 - RNA, 1410 nt, Artificial Sequence; identical to SEQ ID NO: 208800
  derived and/or modified CDS sequence (opt5) from neuraminidase__InfluenzaA__AHZ41295

SEQ ID NO: 217503 - RNA, 1410 nt, Artificial Sequence; identical to SEQ ID NO: 208800
  derived and/or modified CDS sequence (opt5) from neuraminidase__InfluenzaA__AHZ41306

SEQ ID NO: 217504 - RNA, 1410 nt, Artificial Sequence; identical to SEQ ID NO: 208800
  derived and/or modified CDS sequence (opt5) from neuraminidase__InfluenzaA__AHZ41317

SEQ ID NO: 217505 - RNA, 1410 nt, Artificial Sequence; identical to SEQ ID NO: 208800
  derived and/or modified CDS sequence (opt5) from neuraminidase__InfluenzaA__AHZ41328

SEQ ID NO: 217506 - RNA, 1410 nt, Artificial Sequence; identical to SEQ ID NO: 208800
  derived and/or modified CDS sequence (opt5) from neuraminidase__InfluenzaA__AHZ41339

SEQ ID NO: 217507 - RNA, 1410 nt, Artificial Sequence; identical to SEQ ID NO: 208800
  derived and/or modified CDS sequence (opt5) from neuraminidase__InfluenzaA__AHZ41350

SEQ ID NO: 217508 - RNA, 1410 nt, Artificial Sequence; identical to SEQ ID NO: 208800
  derived and/or modified CDS sequence (opt5) from neuraminidase__InfluenzaA__AHZ41369

SEQ ID NO: 217509 - RNA, 1410 nt, Artificial Sequence; identical to SEQ ID NO: 208800
  derived and/or modified CDS sequence (opt5) from neuraminidase__InfluenzaA__AHZ41380

SEQ ID NO: 217510 - RNA, 1410 nt, Artificial Sequence; identical to SEQ ID NO: 208800
  derived and/or modified CDS sequence (opt5) from neuraminidase__InfluenzaA__AHZ41391

SEQ ID NO: 217511 - RNA, 1410 nt, Artificial Sequence; identical to SEQ ID NO: 208800
  derived and/or modified CDS sequence (opt5) from neuraminidase__InfluenzaA__AHZ41402

SEQ ID NO: 217512 - RNA, 1410 nt, Artificial Sequence; identical to SEQ ID NO: 208800
  derived and/or modified CDS sequence (opt5) from neuraminidase__InfluenzaA__AHZ41413

SEQ ID NO: 217513 - RNA, 1410 nt, Artificial Sequence; identical to SEQ ID NO: 208800
  derived and/or modified CDS sequence (opt5) from neuraminidase__InfluenzaA__AHZ41444

SEQ ID NO: 217514 - RNA, 1410 nt, Artificial Sequence; identical to SEQ ID NO: 208800
  derived and/or modified CDS sequence (opt5) from neuraminidase__InfluenzaA__AHZ41455

SEQ ID NO: 217515 - RNA, 1410 nt, Artificial Sequence; identical to SEQ ID NO: 208800
  derived and/or modified CDS sequence (opt5) from neuraminidase__InfluenzaA__AHZ41476

SEQ ID NO: 217516 - RNA, 1410 nt, Artificial Sequence; identical to SEQ ID NO: 208800
  derived and/or modified CDS sequence (opt5) from neuraminidase__InfluenzaA__AHZ41487

SEQ ID NO: 217517 - RNA, 1410 nt, Artificial Sequence; identical to SEQ ID NO: 208800
  derived and/or modified CDS sequence (opt5) from neuraminidase__InfluenzaA__AHZ41498

SEQ ID NO: 217518 - RNA, 1410 nt, Artificial Sequence; identical to SEQ ID NO: 208800
  derived and/or modified CDS sequence (opt5) from neuraminidase__InfluenzaA__AHZ41509

SEQ ID NO: 217519 - RNA, 1410 nt, Artificial Sequence; identical to SEQ ID NO: 208800
  derived and/or modified CDS sequence (opt5) from neuraminidase__InfluenzaA__AHZ41520

SEQ ID NO: 217520 - RNA, 1410 nt, Artificial Sequence; identical to SEQ ID NO: 208800
  derived and/or modified CDS sequence (opt5) from neuraminidase__InfluenzaA__AHZ41531

SEQ ID NO: 217521 - RNA, 1410 nt, Artificial Sequence; identical to SEQ ID NO: 208800
  derived and/or modified CDS sequence (opt5) from neuraminidase__InfluenzaA__AHZ41542

SEQ ID NO: 217522 - RNA, 1410 nt, Artificial Sequence; identical to SEQ ID NO: 208800
  derived and/or modified CDS sequence (opt5) from neuraminidase__InfluenzaA__AHZ41553

SEQ ID NO: 217523 - RNA, 1410 nt, Artificial Sequence; identical to SEQ ID NO: 208800
  derived and/or modified CDS sequence (opt5) from neuraminidase__InfluenzaA__AHZ41564

SEQ ID NO: 217524 - RNA, 1410 nt, Artificial Sequence; identical to SEQ ID NO: 208800
  derived and/or modified CDS sequence (opt5) from neuraminidase__InfluenzaA__AHZ41586

SEQ ID NO: 217525 - RNA, 1410 nt, Artificial Sequence; identical to SEQ ID NO: 208800
  derived and/or modified CDS sequence (opt5) from neuraminidase__InfluenzaA__AHZ41597

SEQ ID NO: 217526 - RNA, 1410 nt, Artificial Sequence; identical to SEQ ID NO: 208800
  derived and/or modified CDS sequence (opt5) from neuraminidase__InfluenzaA__AHZ41608

SEQ ID NO: 217527 - RNA, 1410 nt, Artificial Sequence; identical to SEQ ID NO: 208800
  derived and/or modified CDS sequence (opt5) from neuraminidase__InfluenzaA__AHZ41619

SEQ ID NO: 217528 - RNA, 1410 nt, Artificial Sequence; identical to SEQ ID NO: 208800
  derived and/or modified CDS sequence (opt5) from neuraminidase__InfluenzaA__AHZ41630

SEQ ID NO: 217529 - RNA, 1410 nt, Artificial Sequence; identical to SEQ ID NO: 208800
  derived and/or modified CDS sequence (opt5) from neuraminidase__InfluenzaA__AHZ41641

SEQ ID NO: 217530 - RNA, 1410 nt, Artificial Sequence; identical to SEQ ID NO: 208800
  derived and/or modified CDS sequence (opt5) from neuraminidase__InfluenzaA__AHZ41652

SEQ ID NO: 217531 - RNA, 1410 nt, Artificial Sequence; identical to SEQ ID NO: 208800
  derived and/or modified CDS sequence (opt5) from neuraminidase__InfluenzaA__AHZ41663

SEQ ID NO: 217532 - RNA, 1410 nt, Artificial Sequence; identical to SEQ ID NO: 208800
  derived and/or modified CDS sequence (opt5) from neuraminidase__InfluenzaA__AHZ41674

SEQ ID NO: 217533 - RNA, 1410 nt, Artificial Sequence; identical to SEQ ID NO: 208800
  derived and/or modified CDS sequence (opt5) from neuraminidase__InfluenzaA__AHZ41685

SEQ ID NO: 217534 - RNA, 1410 nt, Artificial Sequence; identical to SEQ ID NO: 208800
  derived and/or modified CDS sequence (opt5) from neuraminidase__InfluenzaA__AHZ41696

SEQ ID NO: 217535 - RNA, 1410 nt, Artificial Sequence; identical to SEQ ID NO: 208800
  derived and/or modified CDS sequence (opt5) from neuraminidase__InfluenzaA__AHZ41707

SEQ ID NO: 217536 - RNA, 1410 nt, Artificial Sequence; identical to SEQ ID NO: 208800
  derived and/or modified CDS sequence (opt5) from neuraminidase__InfluenzaA__AHZ41718

SEQ ID NO: 217537 - RNA, 1410 nt, Artificial Sequence; identical to SEQ ID NO: 208800
  derived and/or modified CDS sequence (opt5) from neuraminidase__InfluenzaA__AHZ41729

SEQ ID NO: 217538 - RNA, 1410 nt, Artificial Sequence; identical to SEQ ID NO: 208800
  derived and/or modified CDS sequence (opt5) from neuraminidase__InfluenzaA__AHZ41740

SEQ ID NO: 217539 - RNA, 1410 nt, Artificial Sequence; identical to SEQ ID NO: 208800
  derived and/or modified CDS sequence (opt5) from neuraminidase__InfluenzaA__AHZ41751

SEQ ID NO: 217540 - RNA, 1410 nt, Artificial Sequence; identical to SEQ ID NO: 208800
  derived and/or modified CDS sequence (opt5) from neuraminidase__InfluenzaA__AHZ41762

SEQ ID NO: 217541 - RNA, 1410 nt, Artificial Sequence; identical to SEQ ID NO: 215461
  derived and/or modified CDS sequence (opt5) from neuraminidase__InfluenzaA__AHZ42564

SEQ ID NO: 217542 - RNA, 1410 nt, Artificial Sequence; identical to SEQ ID NO: 214218
  derived and/or modified CDS sequence (opt5) from neuraminidase__InfluenzaA__AHZ42575

SEQ ID NO: 217543 - RNA, 1410 nt, Artificial Sequence
  derived and/or modified CDS sequence (opt5) from neuraminidase__InfluenzaA__AHZ42587
augaaccccaaucagaagaucauuaccaucggcagcgugucccugacaauuucuacgaucugcuucuuuaugcaaauugccauccucaucaccacagucacccugcacuucaaacaguacgaguuuaacagcccuccgaauaaccagguuaugcuuugugaacccacaauuaucgagagaaauauuaccgaaaucguguaucugacaaacaccacgauugagaaggaaaugugcccuaaacccgcugaguaccggaauugguccaagccucagugugggaucaccggauucgcccccuuuucuaaagacaacagcauucgccucuccgcgggcggggauaucugggugacaagagagccuuaugucucuugcgacccggauaaguguuaccaauucgcucugggacagggcaccacacuuaauaacgugcauagcaauaacaccguucgggaccgcacgcccuauagaacacugcucaugaaugaacugggggugccuuuucaccugggaaccaagcaggucugcaucgccugguccucuagcuccugucaugauggcaaagccuggcuccacgugugcauuacaggcgacgauaagaacgcuaccgccagcuucaucuacaaugggcggcugguugacucuguggucuccuggagcaaagagauucuucgcacccaggaaucugagugugugugcaucaacggaacauguacgguggucaugaccgauggcuccgcuagcgggaaggccgacacaaaaauucuguuuaucgaggaaggaaagaucguucauaccuccacacucucuggcagcgcgcaacacguggaggaaugcuccugcuaucccagauacccuggggugcggugugucugccgcgauaacuggaagggaagcaauagacccauuguggacaucaacauuaaagaucacucuaucguuuccagcuacguguguucuggccuggucggcgacaccccgcggaagaaugacagcuccucuagcucccauugccuugauccuaacaaugaggaagggggacacggcgugaaagggugggccuucgacgauggaaacgacguuuggaugggccgcacgauuaaugagacaagcagacugggguaugagaccuuuaaggugaucgaaggauggucuaaccccaaauccaagcuccagaucaaucggcaggucauuguggaucgcggcgacagaagcggcuacucugggaucuucuccgucgagggaaaaagcuguauuaaccggugcuuuuauguggaacugaucagaggccgcaaggaggaaaccgagguucuguggacauccaauucuauuguggucuucugugggaccagcggaacauacggcacgggguccuggccugauggcgcugaccucaaccugaugcccaucuga

SEQ ID NO: 217544 - RNA, 1413 nt, Artificial Sequence
  derived and/or modified CDS sequence (opt5) from neuraminidase__InfluenzaA__AHZ42599
augaaccccaaucagaagaucauuaccaucggcagcgugucccugacaauuucuacgaucugcuucuuuaugcaaauugccauccucaucaccacagucacccugcacuucaaacaguacgaguuuaacagcccuccgaagaauaaccagguuaugcuuugugaacccacaauuaucgagagaaauauuaccgaaaucguguaucugacaaacaccacgauugagaaagaaaucugcccuaagcccgcugaguaccggaauugguccaaaccucagugugggauuaccggauucgcccccuuuucuaaggacaacagcauccgccucuccgcgggcggggauaucugggugacaagagagccuuaugucucuugcgacccggauaaguguuaccaauucgcucugggacagggcaccacacuuaauaacgugcauagcaauaacaccguucgggaccgcacgcccuauagaacacugcucaugaaugaacugggggugccuuuucaccugggaaccaaacaggucugcauugccugguccagcagcuccugucaugauggcaaggccuggcuccacgugugcaucacaggcgacgauaaaaacgcuaccgccagcuucauuuacaaugggcggcugguugacucuguggucuccuggagcaaggagauccuucgcacccaggaaucugagugugugugcauuaacggaacauguacgguggucaugaccgauggcuccgcuagcgagaaagccgacacaaagauccuguuuaucgaagaggggaagauuguucauaccuccacacucucuggaagcgcgcaacacguggaagagugcuccugcuaucccagauacccuggcgugcggugugucugccgcgauaacuggaaagggagcaauagacccaucguggacauuaacaucaaggaucacucuauuguuuccagcuacguguguucuggacuggucggcgacaccccgcggaaaaaugacagcuccucuagcucccauugccuugauccuaacaaugaagagggcgggcacggagugaagggcugggccuucgacgaugggaacgacguuuggaugggacgcacgaucaaugagacaagcagacugggcuaugaaaccuuuaaagugaucgagggguggucuaaccccaaguccaaacuccagauuaaucggcaggucaucguggaucgcggagacagaagcggcuacucuggcauuuucuccgucgaagggaagucuuguaucaaccggugcuuuuauguggagcugauuagaggacgcaaggaagagaccgagguucuguggacauccaauucuaucguggucuucuguggcaccagcgggacauacggaacgggcuccuggccugauggggcugaccucaaccugaugcccauuuga

SEQ ID NO: 217545 - RNA, 1410 nt, Artificial Sequence; identical to SEQ ID NO: 216864
  derived and/or modified CDS sequence (opt5) from neuraminidase__InfluenzaA__AHZ42611

SEQ ID NO: 217546 - RNA, 1410 nt, Artificial Sequence; identical to SEQ ID NO: 214218
  derived and/or modified CDS sequence (opt5) from neuraminidase__InfluenzaA__AHZ42622

SEQ ID NO: 217547 - RNA, 1410 nt, Artificial Sequence; identical to SEQ ID NO: 217405
  derived and/or modified CDS sequence (opt5) from neuraminidase__InfluenzaA__AHZ42634

SEQ ID NO: 217548 - RNA, 1410 nt, Artificial Sequence; identical to SEQ ID NO: 217448
  derived and/or modified CDS sequence (opt5) from neuraminidase__InfluenzaA__AHZ42646

SEQ ID NO: 217549 - RNA, 1410 nt, Artificial Sequence; identical to SEQ ID NO: 214218
  derived and/or modified CDS sequence (opt5) from neuraminidase__InfluenzaA__AHZ42657

SEQ ID NO: 217550 - RNA, 1410 nt, Artificial Sequence; identical to SEQ ID NO: 217165
  derived and/or modified CDS sequence (opt5) from neuraminidase__InfluenzaA__AHZ42669

SEQ ID NO: 217551 - RNA, 1410 nt, Artificial Sequence; identical to SEQ ID NO: 214218
  derived and/or modified CDS sequence (opt5) from neuraminidase__InfluenzaA__AHZ42681

SEQ ID NO: 217552 - RNA, 1410 nt, Artificial Sequence
  derived and/or modified CDS sequence (opt5) from neuraminidase__InfluenzaA__AHZ42693
augaaccccaaucagaagaucauuaccaucggcagcgugugcaugacaauugggauggccaaccugauccuccaaauuggaaauaucaucuccauuuggaucucucacagcauucagcugggcaaccagucccagaucgagacguguaaucaaucugucauuaccuacgaaaacaauacauggguuaaccagaccuaugugaauaucagcaacacaaauuucgcugccgggcaguccguggucucugugaaacuugcgggaaacagcucccugugcccuguuagcggcugggcuauuuacucuaaggacaauuccgugagaaucgggagcaaaggagaugucuuugugauccgggagccguucauuucuuguagcccccucgaaugccgcaccuuuuuccugacacagggcgcccuucugaacgacaagcauuccaauggcaccaucaaagauagaucuccuuaucggacgcucauguccugucccauuggggagguuccuagccccuacaacucccgcuuugaaucuguggccuggagcgcuuccgccugccacgacggaaucaacuggcugaccauuggcaucagcgggccugauucuggagcugucgccgugcugaaguauaauggcaucauuacagacaccaucaaguccuggagaaacaauauucuccggacacaagagagcgagugugcgugcgugaacgggucuuguuucaccaucaugacggauggaccgagcgacggccaggccuccuacaaaauuuuucgcaucgaaaagggcaaaaucgucaagucuguugagaugaaugcucccaacuaucauuacgaagagugcagcuguuacccugauuccagcgagauuacaugcgugugcagagacaauuggcacgggucuaaccggcccuggguguccuucaaucagaaccuggaauaucagaucggauacauuuguagcggcaucuuuggggauaauccucgccccaacgacaaaaccggaucuugcggcccggucuccagcaauggggccaacggagugaagggcuucuccuuuaaguauggcaaugggguuuggauuggaagaacaaaaucuaucagcucccggaagggcuucgagaugauuugggauccuaacggguggaccggaaccgacaacaauuuuucuaucaaacaagacaucgugggcauuaacgaauggagcggguacuccggcagcuucguccagcaucccgagcuuacaggaauggauuguauccgcccuugcuucuggguggaacugauuagaggccggcccaaggagaauacgaucuggaccucuggguccauuaucagcuuuuguggaguuaacucugacacagugggcugguccuggcccgauggggcugagcucccuuucaccaucgacaaauga

SEQ ID NO: 217553 - RNA, 1410 nt, Artificial Sequence; identical to SEQ ID NO: 214218
  derived and/or modified CDS sequence (opt5) from neuraminidase__InfluenzaA__AHZ42704

SEQ ID NO: 217554 - RNA, 1410 nt, Artificial Sequence
  derived and/or modified CDS sequence (opt5) from neuraminidase__InfluenzaA__AHZ42716
augaaccccaaucagaagaucauuaccaucggcagcgugucccugacaauuucuacgaucugcuucuuuaugcaaauugccauccucaucaccacagucacccugcacuucaaacaguacgaguuuaacagcccuccgaauaaccagguuaugcuuugugaacccacaauuaucgagagaaauauuaccgaaaucguguaucugacaaacaccacgauugagaaggaaaucugcccuaaacccgcugaguaccggaauugguccaagccucagugugggauuaccggauucgcccccuuuucuaaagacaacagcauccgccucuccgcgggcggggauaucugggugacaagagagccuuaugucucuugcgacccggauaaguguuaccaauucgcucugggacagggcaccacacuuaauaacgugcauagcaauaacaccguucgggaccgcacgcccuauagaacacugcucaugaaugaacugggggugccuuuucaccugggaaccaagcaggucugcauugccugguccuccucuuccugucaugauggcaaagccuggcuccacgugugcaucacaggcgacgauaagaacgcuaccgccagcuucauuuacaaugggcggcugguugacucuguggucuccuggagcaaagagauccuucgcacccaggaaucugagugugugugcauuaacggaacauguacgguggucaugaccgauggcuccgcuagcgggaaggccgacacaaaaauccuguuuaucgaggaaggaaagauuguucauaccuccacacucucuggcagcgcgcaacacguggaggaaugcuccugcuaucccagauacccuggggugcggugugucugccgcgauaacuggaagggaagcaauagacccaucguggacauuaacaucaaagaucacucuauuguuuccagcuacguguguucuggccuggucggcgacaccccgcggaagaaugacagcuccucuagcucccauugccuugauccuaacaaugaggaagggggacacggcgugaaagggugggccuucgacgauggaaacgacguuuggaugggccgcacgaucaaugagacaagcagacugggguaugagaccuuuaaggugaucgaaggauggucuaaccccaaauccaaguuccagauuaaucggcaggucaucguggaucgcggcgacagaagcggcuacucugggauuuuuagcgucgagggaaaaagcuguaucaaccggugcuucuauguggaacucauuagaggccgcaaggaggaaaccgagguucuguggacauccaauucuaucguggucuucugugggaccagcggaacauacggcacgggguccuggccugauggcgcugaccugaaccucaugcccauuuga

SEQ ID NO: 217555 - RNA, 1410 nt, Artificial Sequence; identical to SEQ ID NO: 214218
  derived and/or modified CDS sequence (opt5) from neuraminidase__InfluenzaA__AHZ42728

SEQ ID NO: 217556 - RNA, 1410 nt, Artificial Sequence; identical to SEQ ID NO: 215461
  derived and/or modified CDS sequence (opt5) from neuraminidase__InfluenzaA__AHZ42740

SEQ ID NO: 217557 - RNA, 1410 nt, Artificial Sequence; identical to SEQ ID NO: 215429
  derived and/or modified CDS sequence (opt5) from neuraminidase__InfluenzaA__AHZ42751

SEQ ID NO: 217558 - RNA, 1410 nt, Artificial Sequence
  derived and/or modified CDS sequence (opt5) from neuraminidase__InfluenzaA__AHZ42763
augaaccccaaucagaagaucauuaccaucggcagcgugucccugacaauuucuacgaucugcuucuuuaugcaaauugccauccucaucaccacagucacccugcacuucaaacaguacgaguuuaacagcccuccgaauaaccagguuaugcuuugugaacccacaauuaucgagagaaauauuaccgaaaucguguaucugacaaacaccacgauugagaaggaaaucugcccuaaacccgcugaguaccggaauugguccaagccucagugugacauuaccggguucgcccccuuuucuaaagauaacagcauccgccucuccgcgggaggcgacaucugggugacaagagagccuuaugucucuugcgauccggacaaguguuaccaauucgcucuggggcagggaaccacacuuaauaacgugcauagcaauaacaccguucgggaucgcacgcccuauagaacacugcucaugaaugaacugggcgugccuuuucaccuggggaccaagcaggucugcauugccugguccucuagcuccugucaugacggaaaagccuggcuccacgugugcaucacaggcgaugacaagaacgcuaccgccagcuucauuuacaauggccggcugguugauucuguggucuccuggagcaaagagauccuucgcacccaggaaucugagugugugugcauuaacgggacauguacgguggucaugaccgacggauccgcuagcggcaaggccgauacaaaaauccuguuuaucgaggaagggaagauuguuuauaccuccacacucucuggaagcgcgcaacauguggaggaaugcuccugcuaccccagauacccuggcgugcggugugucugccgcgacaacuggaaggggagcaauagacccaucguggauauuaacaucaaagaccacucuauuguuucccgguauguguguagcggacuggucggcgacaccccgcgcaagaaugauucuagcuccucuagccacugccuugacccuaacaaugaggaaggcgggcauggagugaaaggcugggccuucgaugacgggaacgauguuuggaugggaagaacgaucaaugagacaucccggcugggcuacgagaccuuuaaggugaucgaaggguggagcaaccccaaaucuaagcuccagauuaaucgccaggucaucguggacagaggagaucgguccggcuauagcggcauuuucucugucgaggggaaauccuguaucaacagaugcuuuuacguggaacugauucgcggacggaaggaggaaaccgagguucuguggacaagcaauuccaucguggucuucuguggcaccucugggacauauggaacgggcagcuggccugacggggcugaucucaaccugaugcccauuuga

SEQ ID NO: 217559 - RNA, 1410 nt, Artificial Sequence; identical to SEQ ID NO: 215447
  derived and/or modified CDS sequence (opt5) from neuraminidase__InfluenzaA__AHZ42775

SEQ ID NO: 217560 - RNA, 1410 nt, Artificial Sequence; identical to SEQ ID NO: 214218
  derived and/or modified CDS sequence (opt5) from neuraminidase__InfluenzaA__AHZ42787

SEQ ID NO: 217561 - RNA, 1410 nt, Artificial Sequence
  derived and/or modified CDS sequence (opt5) from neuraminidase__InfluenzaA__AHZ42799
augaaccccaaucagaagaucauuaccaucggcagcgugucccugacaauuucuacgaucugcuucuuuaugcaaauugccauccucaucaccacagucacccugcacuucaaacaguacgaguuuaacagcccuccgaauaaccagguuaugcuuugugaacccacaauuaucgagagaaauauuaccgaaaucguguaucugacaaacaccacgauugagaaggaaaucugcccuaaacccgcugaguaccggaauugguccaagccucagugugggauuaccggauucgcccccuuuucuaaagacaacagcauccgccucuccgcgggcggggauaucugggugacaagagagccuuaugucucuugcgacccggauaaguguuaccaauucgcucugggacagggcaccacacuuaauaacgugcauagcaauaacaccguucgggaccgcacgcccuauagaacacugcucaugaaugaacugggggugccuuuucaccugggaaccaagcaggucugcauugccugguccucuagcuccugucaugauggcaaagccuggcuccacgugugcaucacaggcgacgauaagaacgcuaccgccagcuucauuuacaaugggcggcugguugacucuguggucuccuggagcaaagagauccuucgcacccaggaaucugagugugugugcauuaacggaacauguacgguggucaugaccgauggcuccgcuagcgggaaggccgacacaaaaauccuguuuaucgaggaaggaaagauuguucauaccuccacacucucuggcagcgcgcaacacguggaggaaugcuccugcuaucccagauacccuggggugcggugugucugccgcgauaacuggaagggaagcaauagacccaucauugacaucaacauuaaagaucacucuaucguguccagcuacguuuguucuggccuggugggcgacaccccgcggaagaaugacagcuccucuagcucccauugccuugauccuaacaaugaggaagggggacacggcgucaaagggugggccuucgacgauggaaacgacguguggaugggccgcacgaucaaugagacaagcagacugggguaugagaccuuuaagguuauugaaggauggucuaaccccaaauccaagcuccagaucaaucgccaggugauugucgaucggggcgacagaagcggcuacucugggaucuucuccguggagggaaaaagcuguauuaaccggugcuuuuaugucgaacugaucagaggccgcaaggaggaaaccgaggugcuguggacauccaauucuauuguuguguucugugggaccagcggaacauacggcacgggguccuggccugauggcgcugaccucaaccugaugcccaucuga

SEQ ID NO: 217562 - RNA, 1410 nt, Artificial Sequence
  derived and/or modified CDS sequence (opt5) from neuraminidase__InfluenzaA__AHZ42811
augaaccccaaucagaagaucauuaccaucggcagcgugucccugacaauuucuacgaucugcuucuuuaugcaaauugccauccucaucaccacagucacccugcacuucaaacaguacgaguuuaacagcccuccgaauaaccagguuaugcuuugugaacccacaauuaucgagagaaauauuaccgaaaucguguaucugacaaacaccacgauugagaaggaaaucugcccuaaacccgcugaguaccggaauugguccaagccucagugugggauuaccggauucgcccccuuuucuaaagacaacagcauccgccucuccgcgggcggggauaucugggugacaagagagccuuaugucucuugcgacccggauaaguguuaccaauucgcucugggacagggcaccacacuuaauaacgugcauagcaauaacaccguucgggaccgcacgcccuauagaacacugcucaugaaugaacugggggugccuuuucaccugggaaccaagcaggucugcauugccugguccucuagcuccugucaugauggcaaagccuggcuccacgugugcaucacaggcgacgauaagaacgcuaccgccagcuucauuuacaaugggcggcugguugacucuguggucuccuggagcaaagagauccuucgcacccaggaaucugagugugugugcauuaacggaacauguacgguggucaugaccgauggcuccgcuagcgggaaggccgacacaaaaauccuguuuaucgaggaaggaaagauuguucauaccuccacacucucuggcagcgcgcaacacguggaggaaugcuccugcuaucccagauacccuggggugcggugugucugccgcgauaacuggaagggaagcaauagacccaucguggacauuaacaucaaagaucacucuauuguuuccagcuacguguguucuggccuggucggcgacaccccgcggaagaaugacagcuccucuagcucccauugccuugauccuaacaaugaggaagggggacacggcgugaaagggugggccuucgacgauggaaacgacguuuggaugggccgcacgaucaaugagacaagcagacugggguaugagaccuuuaaggugaucgaaggauggucuaaccccaaauccaagcuccagauuaaucggcaggucaucgugggccgcggcgauagaagcggguacucuggaauuuucuccgucgagggcaaaagcuguaucaaccggugcuuuuauguggaacugauuagagggcgcaaggaggaaaccgagguucuguggacauccaauucuaucguggucuucuguggaaccagcggcacauacgggacgggcuccuggccugacggagcugaucucaaccugaugcccauuuga

SEQ ID NO: 217563 - RNA, 1410 nt, Artificial Sequence
  derived and/or modified CDS sequence (opt5) from neuraminidase__InfluenzaA__AHZ42823
augaaccccaaucagaagaucauuaccaucggcagcgugugcaugacaauugggauggccaaccugauccuccaaauuggaaauaucaucuccauuuggaucucucacagcauucagcugggcaaccagucccagaucgagacguguaaucaaucugucauuaccuacgaaaacaauacauggguuaaccagaccuaugugaauaucagcaacacaaauuucgcugccgagcaguccguggucucugugaaacuugcggggaacagcucccugugcccuguuagcggaugggcuauuuacucuaaggacaauuccgugagaaucggcagcaaaggggaugucuuugugauccgggaaccguucauuucuuguagcccccucgagugccgcaccuuuuuccugacacagggagcccuucugaacgacaagcauuccaauggcaccaucaaagauagaucuccuuaucggacgcucauguccugucccauuggcgaaguuccuagccccuacaacucccgcuuugagucuguggccuggagcgcuuccgccugccacgacgggaucaacuggcugaccauuggaaucagcggcccugauucuggggcugucgccgugcugaaguauaauggaaucauuacagacaccaucaaguccuggagaaacaauauucuccggacacaagagagcgaaugugcgugcgugaacggcucuuguuucaccaucaugacggaugggccgagcgacggacaggccuccuacaaaauuuuucgcaucgagaagggcaaaaucgucaagucuguugaaaugaaugcucccaacuaucauuacgaggagugcagcuguuacccugauuccagcgaaauuacaugcgugugcagagacaauuggcacggcucuaaccggcccuggguguccuucaaucagaaccuggaguaucagaucggguacauuuguagcggaaucuuuggcgauaauccucgccccaacgacaaaaccgggucuugcggaccggucuccagcaauggcgccaacggggugaagggauucuccuuuaaguauggcaauggcguuuggauugggagaacaaaaucuaucagcucccggaagggauucgaaaugauuugggauccuaacggcuggaccgggaccgacaacaauuuuucuaucaaacaagacaucgugggaauuaacgaguggagcggcuacuccgggagcuucguccagcaucccgaacuuacaggccuggauuguauccgcccuugcuucuggguggagcucauuagaggacggcccaaggagaauacgaucuggaccucuggcuccagcauuucuuuuugugggguuaacuccgacacagugggauggagcuggcccgauggcgcugaacugccuuucaccaucgacaaauga

SEQ ID NO: 217564 - RNA, 1410 nt, Artificial Sequence
  derived and/or modified CDS sequence (opt5) from neuraminidase__InfluenzaA__AHZ42834
augaaccccaaucagaagaucauuaccaucggcagcgugucccugacaauuucuacgaucugcuucuuuaugcaaaccgccauucucaucacaaccgucacacugcacuucaaacaguacgaguuuaacagcccuccgaauaaccagguuaugcuuugugaacccaccaucauugagagaaauaucacagaaauuguguaucugaccaacacgaccaucgagaaggaaauuugcccuaaacccgcugaguaccggaauugguccaagccucagugugggaucacaggauucgcccccuuuucuaaagacaacagcauucgccucuccgcgggcggggauaucugggugaccagagagccuuaugucucuugcgacccggauaaguguuaccaauucgcucugggacagggcacaacccuuaauaacgugcauagcaauaacacgguucgggaccgcacacccuauagaacccugcucaugaaugaacugggggugccuuuucaccugggaacaaagcaggucugcaucgccugguccucuagcuccugucaugauggcaaagccuggcuccacgugugcauuaccggcgacgauaagaacgcuaccgccagcuucaucuacaaugggcggcugguugacucuguggucuccuggagcaaagagauucuucgcacacaggaaucugagugugugugcaucaacggaacguguaccguggucaugacagauggcuccgcuagcgggaaggccgacaccaaaauucuguuuaucgaggaaggaaagaucguucauacauccacccucucuggcagcgcgcaacacguggaggaaugcuccugcuaucccagauacccuggggugcggugugucugccgcgauaacuggaagggaagcaauagacccauuguggacaucaacauuaaagaucacucuaucguuuccagcuacguguguucuggccuggucggcgacacgccgcggaagaaugacagcuccucuagcucccauugccuugauccuaacaaugaggaagggggacacggcgugaaagggugggccuucgacgauggaaacgacguuuggaugggccgcacaauuaaugagaccagcagacugggguaugagaccuuuaaggugaucgaaggauggucuaaccccaaauccaagcuccagaucaaucggcaggucauuguggaucgcggcgacagaagcggcuacucugggaucuucuccgucgagggaaaaagcuguauuaaccggugcuuuuauguggaacugaucagaggccgcaaggaggaaacagagguucuguggaccuccaauucuauuguggucuucugugggacaagcggaacguacggcaccggguccuggccugauggcgcugaccucaaccugaugcccaucuga

SEQ ID NO: 217565 - RNA, 1410 nt, Artificial Sequence; identical to SEQ ID NO: 214218
  derived and/or modified CDS sequence (opt5) from neuraminidase__InfluenzaA__AHZ42846

SEQ ID NO: 217566 - RNA, 1410 nt, Artificial Sequence; identical to SEQ ID NO: 214218
  derived and/or modified CDS sequence (opt5) from neuraminidase__InfluenzaA__AHZ42858

SEQ ID NO: 217567 - RNA, 1410 nt, Artificial Sequence; identical to SEQ ID NO: 214218
  derived and/or modified CDS sequence (opt5) from neuraminidase__InfluenzaA__AHZ42870

SEQ ID NO: 217568 - RNA, 1410 nt, Artificial Sequence; identical to SEQ ID NO: 214218
  derived and/or modified CDS sequence (opt5) from neuraminidase__InfluenzaA__AHZ42882

SEQ ID NO: 217569 - RNA, 1410 nt, Artificial Sequence
  derived and/or modified CDS sequence (opt5) from neuraminidase__InfluenzaA__AHZ42894
augaaccccaaucagaagaucauuaccaucggcagcgugucccugacaauuucuacgaucugcuucuuuaugcaaauugccauccucaucaccacagucacccugcacuucaaacaguacgaguuuaacagcccuccgaauaaccagguuaugcuuugugaacccacaauuaucgagagaaauauuaccgaaaucguguaucugacaaacaccacgauugagaaggaaaucugcccuaaacccgcugaguaccggaauugguccaagccucagugugggauuaccggauucgcccccuuuucuaaagacaacagcauccgccucuccgcgggcggggauaucugggugacaagagagccuuaugucucuugcgacccggauaaguguuaccaauucgcucugggacagggcaccacacuuaauaacgugcauagcaauaacaccguucgggaccgcacgcccuauagaacacugcucaugaaugaacugggggugccuuuucaccugggaaccaagcaggucugcauugccugguccucuagcuccugucaugauggcaaagccuggcuccacgugugcaucacaggcgacgauaagaacgcuaccgccagcuucauuuacaaugggcggcugguugacucuguggucuccuggagcaaagagauccuucgcacccaggaaucugagugugugugcauuaacggaacauguacgguggucaugaccgauggcuccgcuagcgggaaggccgacacaaaaauccuguuuaucgaggaaggaaagauuguucauaccuccacacucucuggcagcgcgcaacacguggaggaaugcuccugcuaucccagauacccuggggugcggugugucugccgcgauaacuggaagggaagcaauagacccaucguggacauuaacaucaaagaucacucuauuguuuccagcuacguguguucuggccuggucggcgacaccccgcggaagaaugacagcuccucuagcucccauugccuugauccuaacaaugaggaagggggacacggcgugaaagggugggccuucgacgauggaaacgacguuuggaugggccgcacgaucaaugagacaagcagacugggguaugagaccuuuaaggugaucgaaggauggucuaaccccaaauccaagcuccagauuaaucggcaggucaucguggauaaaggcgaccgcagcggcuacucugggauuuucuccgucgagggaaagagcuguaucaacagaugcuuuuauguggaacugauucggggcagaaaggaggaaaccgagguucuguggacauccaauucuaucguggucuucugugggaccagcggaacauacggcacgggguccuggccugauggcgcugaccucaaccugaugcccauuuga

SEQ ID NO: 217570 - RNA, 1410 nt, Artificial Sequence; identical to SEQ ID NO: 214218
  derived and/or modified CDS sequence (opt5) from neuraminidase__InfluenzaA__AHZ42906

SEQ ID NO: 217571 - RNA, 1410 nt, Artificial Sequence; identical to SEQ ID NO: 215447
  derived and/or modified CDS sequence (opt5) from neuraminidase__InfluenzaA__AHZ42918

SEQ ID NO: 217572 - RNA, 1398 nt, Artificial Sequence; identical to SEQ ID NO: 215526
  derived and/or modified CDS sequence (opt5) from neuraminidase__InfluenzaA__AHZ59750

SEQ ID NO: 217573 - RNA, 1398 nt, Artificial Sequence; identical to SEQ ID NO: 215526
  derived and/or modified CDS sequence (opt5) from neuraminidase__InfluenzaA__AHZ59762

SEQ ID NO: 217574 - RNA, 1398 nt, Artificial Sequence; identical to SEQ ID NO: 215526
  derived and/or modified CDS sequence (opt5) from neuraminidase__InfluenzaA__AHZ59774

SEQ ID NO: 217575 - RNA, 1398 nt, Artificial Sequence; identical to SEQ ID NO: 215526
  derived and/or modified CDS sequence (opt5) from neuraminidase__InfluenzaA__AHZ59786

SEQ ID NO: 217576 - RNA, 1398 nt, Artificial Sequence; identical to SEQ ID NO: 215526
  derived and/or modified CDS sequence (opt5) from neuraminidase__InfluenzaA__AHZ59798

SEQ ID NO: 217577 - RNA, 1398 nt, Artificial Sequence; identical to SEQ ID NO: 215526
  derived and/or modified CDS sequence (opt5) from neuraminidase__InfluenzaA__AHZ59810

SEQ ID NO: 217578 - RNA, 1398 nt, Artificial Sequence; identical to SEQ ID NO: 215526
  derived and/or modified CDS sequence (opt5) from neuraminidase__InfluenzaA__AHZ59822

SEQ ID NO: 217579 - RNA, 1398 nt, Artificial Sequence; identical to SEQ ID NO: 215526
  derived and/or modified CDS sequence (opt5) from neuraminidase__InfluenzaA__AHZ59834

SEQ ID NO: 217580 - RNA, 1398 nt, Artificial Sequence; identical to SEQ ID NO: 215526
  derived and/or modified CDS sequence (opt5) from neuraminidase__InfluenzaA__AHZ59846

SEQ ID NO: 217581 - RNA, 1398 nt, Artificial Sequence; identical to SEQ ID NO: 215526
  derived and/or modified CDS sequence (opt5) from neuraminidase__InfluenzaA__AHZ59858

SEQ ID NO: 217582 - RNA, 1398 nt, Artificial Sequence; identical to SEQ ID NO: 215526
  derived and/or modified CDS sequence (opt5) from neuraminidase__InfluenzaA__AHZ59870

SEQ ID NO: 217583 - RNA, 1398 nt, Artificial Sequence; identical to SEQ ID NO: 215526
  derived and/or modified CDS sequence (opt5) from neuraminidase__InfluenzaA__AHZ59882

SEQ ID NO: 217584 - RNA, 1398 nt, Artificial Sequence; identical to SEQ ID NO: 215526
  derived and/or modified CDS sequence (opt5) from neuraminidase__InfluenzaA__AHZ59918

SEQ ID NO: 217585 - RNA, 1398 nt, Artificial Sequence; identical to SEQ ID NO: 215526
  derived and/or modified CDS sequence (opt5) from neuraminidase__InfluenzaA__AHZ59930

SEQ ID NO: 217586 - RNA, 1398 nt, Artificial Sequence; identical to SEQ ID NO: 215526
  derived and/or modified CDS sequence (opt5) from neuraminidase__InfluenzaA__AHZ59942

SEQ ID NO: 217587 - RNA, 1398 nt, Artificial Sequence; identical to SEQ ID NO: 215526
  derived and/or modified CDS sequence (opt5) from neuraminidase__InfluenzaA__AHZ59954

SEQ ID NO: 217588 - RNA, 1398 nt, Artificial Sequence; identical to SEQ ID NO: 215526
  derived and/or modified CDS sequence (opt5) from neuraminidase__InfluenzaA__AHZ59966

SEQ ID NO: 217589 - RNA, 1398 nt, Artificial Sequence; identical to SEQ ID NO: 215526
  derived and/or modified CDS sequence (opt5) from neuraminidase__InfluenzaA__AHZ59991

SEQ ID NO: 217590 - RNA, 1398 nt, Artificial Sequence; identical to SEQ ID NO: 215526
  derived and/or modified CDS sequence (opt5) from neuraminidase__InfluenzaA__AHZ60003

SEQ ID NO: 217591 - RNA, 1398 nt, Artificial Sequence; identical to SEQ ID NO: 215526
  derived and/or modified CDS sequence (opt5) from neuraminidase__InfluenzaA__AHZ60015

SEQ ID NO: 217592 - RNA, 1398 nt, Artificial Sequence; identical to SEQ ID NO: 215526
  derived and/or modified CDS sequence (opt5) from neuraminidase__InfluenzaA__AHZ60027

SEQ ID NO: 217593 - RNA, 1398 nt, Artificial Sequence; identical to SEQ ID NO: 215526
  derived and/or modified CDS sequence (opt5) from neuraminidase__InfluenzaA__AHZ60039

SEQ ID NO: 217594 - RNA, 1398 nt, Artificial Sequence; identical to SEQ ID NO: 215526
  derived and/or modified CDS sequence (opt5) from neuraminidase__InfluenzaA__AHZ60051

SEQ ID NO: 217595 - RNA, 1398 nt, Artificial Sequence; identical to SEQ ID NO: 215526
  derived and/or modified CDS sequence (opt5) from neuraminidase__InfluenzaA__AHZ60063

SEQ ID NO: 217596 - RNA, 1398 nt, Artificial Sequence; identical to SEQ ID NO: 215526
  derived and/or modified CDS sequence (opt5) from neuraminidase__InfluenzaA__AHZ60075

SEQ ID NO: 217597 - RNA, 1398 nt, Artificial Sequence; identical to SEQ ID NO: 215526
  derived and/or modified CDS sequence (opt5) from neuraminidase__InfluenzaA__AHZ60087

SEQ ID NO: 217598 - RNA, 1398 nt, Artificial Sequence; identical to SEQ ID NO: 215526
  derived and/or modified CDS sequence (opt5) from neuraminidase__InfluenzaA__AHZ60099

SEQ ID NO: 217599 - RNA, 1410 nt, Artificial Sequence; identical to SEQ ID NO: 214218
  derived and/or modified CDS sequence (opt5) from neuraminidase__InfluenzaA__AHZ60111

SEQ ID NO: 217600 - RNA, 1410 nt, Artificial Sequence; identical to SEQ ID NO: 208474
  derived and/or modified CDS sequence (opt5) from neuraminidase__InfluenzaA__AIA26299

SEQ ID NO: 217601 - RNA, 1374 nt, Artificial Sequence
  derived and/or modified CDS sequence (opt5) from neuraminidase__InfluenzaA__AIC64891
augaaccccaaucagaagaucauuaccaucggcagcgugugcaugacaauugggauggccaaccugauccuccaaauuggaaauaucaucuccauuuggaucucucacagcauucagcugggcaaccagaaucagaucgagacguguaaccaauccgucauuaccuacgaaaauaacacaaauuucgcugccgggcagucuguugugagcgugaaacuugcgggaaacuccucucugugcccugucagcggcugggcuaucuauuccaaggacaauagcgugagaauugggucuaaaggagauguuuuugugauccgggagccguucaucuccuguagcccccucgaaugccgcaccuuuuuccugacacagggcgcccuucugaacgacaagcauucuaauggcaccauuaaagauagauccccuuaccggacacucaugagcugucccaucggggaggucccuucucccuauaacucccgcuuugaaagcguggccugguccgcuucugccugccacgacggaauuaauuggcugaccaucggcauuagcgggccugauaacggagcuguugccgugcugaaguacaacggcaucaucacggacaccauuaaguccuggagaaauaacauccuccggacacaggagagcgagugugcgugcgucaaugggucuuguuucaccgugaugacagauggaccguccaacggccaagccagcuauaaaauuuuucgcaucgaaaagggcaaaauugugaagucugucgagaugaaugcucccaacuaccauuaugaagagugcagcuguuacccugacuccucugagauuaccugcguuugcagagauaauuggcacgggagcaaccggcccuggguguccuucaaucagaaccuggaauaccagaucggauauaucuguagcggcaucuuuggggacaauccucgccccaacgauaaaacgggaucuugcggcccgguguccagcaauggggccaacggagucaagggcuucucuuuuaaguacggcaaugggguguggauuggaagaacaaaauccaucagcucccggaacggcuucgagaugauuugggacccuaacggguggaccggaacagauaauaacuuuucuaucaagcaggacauuguuggcaucaaugaauggagcggguauuccggcucuuucgugcaacaucccgagcuuaccggacuggacuguauccgcccuugcuucugggucgaacucauuagaggccggcccaaagagaacaccaucuggacaagcggguccagcauuucuuuuuguggaguuaauuccgauacggugggcuggagcuggcccgacggggcugagcugccuuucaccaucgauaaguga

SEQ ID NO: 217602 - RNA, 1350 nt, Artificial Sequence
  derived and/or modified CDS sequence (opt5) from neuraminidase__InfluenzaA__AID48084
augaaccccaauaagaaaaucauuaccaucggcagcauuugcauggugacagggauggucucccugaugcuccagaucggaaaccugauuucuaucuggguuagccacuccauccauacgggcaaucaacacaaggccgagccuauuucuaacaccaaucuucugacagagaaaaccguggcuagcgugaagcucgccgggaacuccucucuguguccgaucaauggaugggcggucuacagcaaagacaacuccauuagaaucggcagcaagggggauguguucguuauucgggaacccuuuaucucuugcucccaucuugaaugucgcacauucuuucugacccagggagcucuccugaaugacaagcacagcaacggcacagugaaagauagaucuccucaucggacccugauguccugccccgucggcgaggccccuagccccuauaauucucgcuucgaauccguggccuggagcgcuuccgccugucacgacgggacgucuuggcucaccauuggaaucagcggcccugauaacggggcuguugccgugcugaaguacaauggaaucauuacagacaccaucaaauccuggagaaacaauauucuucggacacaggagagcgagugcgcgugugucaacggcucuugcuuuaccgugaugacggaugggccguccaacggacaggccagccacaagaucuucaaaauggaaaagggcaagguggucaaaucuguugagcuggacgcucccaauuaucauuacgaagaguguagcugcuauccugaugccggcgagauuacaugugugugccgcgacaacuggcacggguccaauagacccugggugucuuuuaaccaaaaucucgaauaccagaucggauauaucugcagcggcgucuucggggauaacccucggcccaaugacggagcuggcuccugugggccggugagcucuaacggagccuacggcguuaagggcuuuuccuucaaauacgggaauggaguguggauuggccgcaccaagagcacaaacucuagauccggguuugagaugaucugggauccuaauggauggaccgaaaccgacagcuccuucucugucaaacaggacauuguggcgaucacagauuggagcggcuauuccgggucuuuuguucagcaucccgagcugacgggccuugacugcauucggccuuguuucuggguggaacugauccgcggaagacccaaggagagcaccaucuggacauccggcagcucuauuuccuucugcggggucaacagcgauaccgugggauggucuuggcccgacggcgccgagcucccuuuuacaaucgauaaauga

SEQ ID NO: 217603 - RNA, 1410 nt, Artificial Sequence
  derived and/or modified CDS sequence (opt5) from neuraminidase__InfluenzaA__AID70507
augaaccccaaucagaagaucauuaccaucggcagcgugugcacaacgauugggauggccaaccugauccuccaaauuggaaauaucaucuccauuuggaucucucacagcauucagcugggcaaccagaaucagaucgagaccuguaaccaauccgucauuacauacgaaaauaaaaccuggguuaaccagacauaugugaauaucucuaacaccaauuucgcugccgggcagagcguggucuccgugaaacuugcgggaaacucuagccugugcccuguuuccggcugggcuauuuacagcaaggacaauucuaucagaaucggguccaagggagauguguuugucauucgggagccguucaucagcuguucuccccucgaaugccgcacauuuuuccugacccagggcgcccuucugaacgacaaacauuccaauggcacgauuaaggauagaagcccuuaucggacccucaugucuugucccaucggggaggugccuucccccuacaacagccgcuuugaauccguugccuggucugcuagcgccugccacgacggaauuaacuggcugacaaucggcaucuccgggccugauaauggagcuguggccguccugaaguauaacggcauuaucaccgacacaauuaaaagcuggagaaauaacauccuccggacccaagagucugagugugcgugcgugaauggguccuguuucacggugaugacagauggaccgagcgacggccaggccucuuacaagauuuuucgcaucgaaaaaggcaagaucgucaaaagcguugagaugaacgcucccaauuaucauuacgaagagugcuccuguuacccugauucuagcgagauuaccugcgugugcagagacaacuggcacggguccaaucggcccugggugagcuucaaccagaaucuggaauaucagaucggauacauuuguucuggcaucuuuggggauaacccucgccccaaugacaagacaggauccugcgauccggucagcuucaacggcgccaauggggugaagggauuuucuuucaaauauggcaacggcguuuggauugggagaaccaaguccaucagcucccggaacggauuugagaugauuugggacccuaauggcuggaccgggacagacaacaaauucucuaucaagcaagauaucgugggaauuaaugaauggagcggcuacuccgggucuuucguccagcaucccgagcuuacgggccuggacuguauccgcccuugcuuuuggguggaacucauuagaggacggcccaaagagaacaccaucuggacaagcggcuccagcauuucuuucugugggguuaauuccgauaccgugggaugguuuuggcccgacggcgcugagcugccuuucacaaucgauaaguga

SEQ ID NO: 217604 - RNA, 1410 nt, Artificial Sequence
  derived and/or modified CDS sequence (opt5) from neuraminidase__InfluenzaA__AID70508
augaaccccaaucagaagaucauuaccaucggcagcgugugcaugacaauugggauggccaaccugauccuccaaauuggaaauaucaucuccauuuggaucucucacagcauucagcugggcaaccagucccagaucgagacguguaaucaaucugucauuaccuacgaaaacaauacauggguuaaccagaccuaugugaauaucagcaacacaaauuucgcugccgggcaguccguggucucugugaaacuugcgggaaacagcucccugugcccuguuagcggcugggcuauuuacucuaaggacaauuccaucagaaucgggagcaaaggagauguguuugucauucgggagccguucaucucuuguagcccccucgaaugccgcaccuuuuuccugacacagggcgcccuucugaacgacaagcauuccaauggcaccauuaaagauagaucuccuuaucggacgcucauguccugucccaucggggaggugccuagccccuacaacucccgcuuugaaucuguugccuggagcgcuuccgccugccacgacggaauuaacuggcugaccaucggcaucagcgggccuaauaacggagcuguggccguccugaaguauaauggcauuaucacagauaccauuaagucuuggagaaacaauauccuccggacacaagaguccgagugugcgugcgugaacgggagcuguuucaccauuaugacggacggaccgucugauggccaggccagcuacaaaaucuuucgcaucgaaaagggcaaaauugugaaguccgucgagaugaaugcucccaacuaucauuacgaagagugcucuuguuacccugacagcuccgagaucacaugcguuugcagagauaauuggcacgggagcaaccggcccugggugucuuucaaucagaaccuggaauaucagauuggauacaucuguuccggcauuuuuggggacaauccucgccccaacgauaaaaccggaagcugcggcccggugucuuccaauggggccaacggagucaagggcuucagcuuuaaguauggcaacgggguguggaucggaagaacaaaauccauuucuagccggaagggcuucgagaugaucugggacccuaauggguggaccggaaccgauaacaauuuuuccaucaaacaagacauuguuggcaucaacgaauggucuggguacagcggcuccuucgugcagcaucccgagcuuacaggacuggacuguauucgcccuugcuucugggucgaacucaucagaggccggcccaaggagaauacgauuuggaccagcgggucuuccaucagcuuuuguggagugaacucugauacaguuggcugguccuggcccgacggggcugagcugccuuucaccaucgauaaauga

SEQ ID NO: 217605 - RNA, 1410 nt, Artificial Sequence
  derived and/or modified CDS sequence (opt5) from neuraminidase__InfluenzaA__AID70509
augaaccccaaucagaagaucauuaccaucggcagcgugugcaugacaauugggauggccaaccugauccuccaaauuggaaauaucaucuccauuuggaucucucacagcauucagcugggcaaccagucccagaucgagacguguaaucaaucugucauuaccuacgaaaacaauacauggguuaaccagaccuaugugaauaucagcaacacaaauuucgcugccgggcaguccguggucucugugaaacuugcgggaaacagcucccugugcccuguuagcggcugggcuauuuacucuaaggacaauuccaucagaaucgggagcaaaggagauguguuugucauucgggagccguucaucucuuguagcccccucgaaugccgcaccuuuuuccugacacagggcgcccuucugaacgacaagcauuccaauggcaccauuaaagauagaucuccuuaucggacgcucauguccugucccaucggggaggugccuagccccuacaacucccgcuuugaaucuguugccuggagcgcuuccgccugccacgacggaauuaacuggcugaccaucggcaucagcgggccugauaauggagcuguggccguccugaaguauaacggcauuaucacagacaccauuaagucuuggagaaauaacauccuccggacacaagaguccgagugugcgugcgugaaugggagcuguuucaccauuaugacggauggaccgucugacggccaggccagcuacaaaaucuuucgcaucgaaaagggcaaaauugugaaguccgucgagaugaacgcucccaauuaucauuacgaagagugcucuuguuacccugauagcuccgagaucacaugcguuugcagagacaacuggcacgggagcaaucggcccugggugucuuucaaccagaaucuggaauaucagauuggauacaucuguuccggcauuuuuggggauaacccucgccccaaugacaaaaccggaagcugcggcccggugucuuccaacggggccaauggagucaagggcuucagcuuuaaguauggcaacgggguguggaucggaagaacaaaauccauuaacucucggaagggcuucgagaugaucugggauccuaauggguggaccggaaccgacaacaauuuuagcaucaaacaagacauuguuggcaucaacgaaugguccggguacucuggcagcuucgugcagcaucccgagcuuacaggacuggauuguauucgcccuugcuucugggucgaacucaucagaggccggcccaaggagaauacgauuuggaccuccgggagcucuaucuccuuuuguggagugaacagcgacacaguuggcuggucuuggcccgauggggcugagcugccuuucaccaucgacaaauga

SEQ ID NO: 217606 - RNA, 1410 nt, Artificial Sequence
  derived and/or modified CDS sequence (opt5) from neuraminidase__InfluenzaA__AID70510
augaaccccaaucagaagaucauuaccaucggcagcgugugcauuacaaucgggauggccaaccugauucuccaaaucggaaauaucauuuccaucuggauuucucacagcauccagcugggcaaccagucccagauugagacguguaaucaaucugucaucaccuacgaaaacaauacauggguuaaccagaccuaugugaauauuagcaacacaaauuucgcugccgggcaguccguggucucugugaaacuugcgggaaacagcucccugugcccuguuagcggcugggcuaucuacucuaaggacaauuccaucagaauugggagcaaaggagauguguuugucauccgggagccguucauuucuuguagcccccucgaaugccgcaccuuuuuccugacacagggcgcccuucugaacgacaagcauuccaauggcaccaucaaagauagaucuccuuaucggacgcucauguccugucccauuggggaggugccuagccccuacaacucccgcuuugaaucuguugccuggagcgcuuccgccugccacgacggaaucaacuggcugaccaucggcauuagcgggccugauaauggagcuguggccguccugaaguauaacggcaucauuacagacaccaucaagucuuggagaaauaacauucuccggacacaagaguccgagugugcgugcgugaaugggagcuguuucaccaucaugacggauggaccgucugacggccaggccagcuacaaaaucuuucgcauugaaaagggcaaaaucgugaaguccgucgagaugaacgcucccaauuaucauuacgaagagugcucuuguuacccugauagcuccgagauuacaugcguuugcagagacaacuggcacgggagcaaucggcccugggugucuuucaaccagaaucuggaauaucagaucggauacauuuguuccggcaucuuuggggauaacccucgccccaaugacaaaaccggaagcugcggcccggugucuuccaacggggccaauggagucaagggcuucagcuuuaaguauggcaacgggguguggauuggaagaacaaaauccaucucuagccggaagggcuucgagaugaucugggauccuaacggguggaccggaaccgacaauaacuuuuccauuaaacaagacaucguuggcauuaaugaauggucuggguacagcggcuccuucgugcagcaucccgagcuuacaggacuggauuguauccgcccuugcuucugggucgaacucauuagaggccggcccaaggagaacacgaucuggaccagcgggucuuccaucagcuuuuguggaguuaauucugacacagugggcugguccuggcccgauggggcugagcugccuuucaccauugacaaauga

SEQ ID NO: 217607 - RNA, 1410 nt, Artificial Sequence
  derived and/or modified CDS sequence (opt5) from neuraminidase__InfluenzaA__AID70511
augaaccccaaucagaagaucauuaccaugggcagcguguggaugacaaucgggauggccaaccugauucuccaauccggaaauaucauuucuaucuggaucagccacuccauucagcugagaaaccagucucagaucgagacgugcaaucaaagcgucauuaccuacgaaaacaauacauggguuaaccagaccuaugugaauaucuccaacacaaauuucgcugccggccagucuguggucagcgugaaacuugcggggaacuccagccuguguccuguuucuggaugggcuauuuacuccaaggacaauagcauccggauuggcucuaaaggggauguguuugucauccgcgagccguucaucuccugcagcccccucgaauguagaaccuuuuuccugacacagggagcccuucugaacgacaagcauucuaauggcaccauuaaagaucgguccccuuaucgcacgcucaugagcugccccaucggcgaggugccuucccccuacaacucuagauuugaaagcguugccugguccgcuagcgccugucacgacgggauuaacuggcugaccaucggaauuucuggcccugauaauggggcuguggccguccugaaguauaacggaaucaucacagacaccauuaaguccuggcggaauaacauccuccgcacacaagagagcgagugcgcgugugugaauggcucuugcuucaccauuaugacggaugggccgagcgacggacaggccuccuacaaaaucuuuagaauugaaaagggcaaaaucgugaagucugucgagaugaacgcucccaauuaucauuacgaagaguguagcugcuacccugauuccagcgagaucacauguguuugccgggacaacuggcacggcucuaaucgccccuggguguccuucaaccagaaucuggaauaucagauuggguacaucugcagcggaauuuuuggcgauaacccuagacccaaugacaaaaccgggucuuguggaccgguguccagcaacggcgccaauggggucaagggauucuccuuuaaguauggcaacggcguguggaucgggcggacaaaaucuauuagcucccgcaagggauucgagaugaucugggauccuaacggcuggaccgggaccgacaauaacuuuucuauuaaacaagacaucguuggaaucaaugaauggagcggcuacuccgggagcuucgugcagcaucccgagcuuacaggccuggauugcauuagaccuuguuucugggucgaacucauccggggacgccccaaggagaacacgauuuggaccucuggcuccagcaucucuuuuugcgggguuaauuccgacacagugggauggagcuggcccgauggcgcugagcugccuuucaccauugacaaauga

SEQ ID NO: 217608 - RNA, 1410 nt, Artificial Sequence
  derived and/or modified CDS sequence (opt5) from neuraminidase__InfluenzaA__AID70512
augaaccccaaucagaagaucauuaccaucggcagcguguggaugacaauugggauggccaaccugauccuccaaauuggaaauaucaucuccauuuggaucucucacagcauucagcugggcaaccagucccagaucgagacgugcaaucaaucugucauuaccuacgaaaacaauacauggguuaaccagaccuaugugaauaucagcaacacaaauuucgcugccgggcaguccguggucucugugaaacuugcgggaaacagcucccuguguccuguuagcggcugggcuauuuacucuaaggacaauuccaucagaaucgggagcaaaggagauguguuugucauucgggagccguucaucucuugcagcccccucgaaugucgcaccuuuuuccugacacagggcgcccuucugaacgacaagcauuccaauggcaccauuaaagauagaucuccuuaucggacgcucauguccugccccaucggggaggugccuagccccuacaacucccgcuuugaaucuguugccuggagcgcuuccgccugucacgacggaauuaacuggcugaccaucggcaucagcgggccugauaauggagcuguggccguccugaaguauaacggcauuaucacagacaccauuaagucuuggagaaauaacauccuccggacacaagaguccgagugcgcgugugugaaugggagcugcuucaccauuaugacggauggaccgucugacggccaggccagcuacaaaaucuuucgcaucgaaaagggcaaaauugugaaguccgucgagaugaaagcucccaacuaucauuacgaagaguguucuugcuacccugauagcuccgagaucacauguguuugcagagacaauuggcacgggagcaaccggcccugggugucuuucaaucagaaccuggaauaucagauuggauacaucugcuccggcauuuuuggggauaauccucgccccaacgacaagaccggaagcuguggcccggugucuuccaauggggccaacggagucaagggcuucagcuuuaaauauggcaaugggguguggaucggaagaacaaaguccauuucuagccggaaaggcuucgagaugaucugggauccuaacggguggaccggaaccgacaacaauuuuuccaucaagcaagacauuaucggcauuaacgaauggucuggguacagcggcuccuucguucagcaucccgagcuuacaggacuggauugcauccgcccuuguuucuggguggaacucauuagaggccggcccaaagagaauacgaucuggaccagcgggucuuccaucagcuuuugcggagucaacucugacacagugggcugguccuggcccgauggggcugagcugccuuucaccauugacaaguga

SEQ ID NO: 217609 - RNA, 1410 nt, Artificial Sequence; identical to SEQ ID NO: 212329
  derived and/or modified CDS sequence (opt5) from neuraminidase__InfluenzaA__AID70514

SEQ ID NO: 217610 - RNA, 1410 nt, Artificial Sequence
  derived and/or modified CDS sequence (opt5) from neuraminidase__InfluenzaA__AID70515
augaaccccaaucagaagaucauuaccaucggcagcgugugcaugacaauugggauggccaaccugauccuccaaauuggaaauaucaucuccauuuggaucucucacagcauucagcugagaaaccagucccagaucgagacguguaaucaaucugucauuaccuacgaaaacaauacauggguuaaccagaccuaugugaauaucagcaacacaaauuucgcugccggccaguccguggucucugugaaacuugcggggaacagcucccugugcccuguuagcggaugggcuauuuacucuaaggacaauuccauccggaucggcagcaaaggggauguguuugucauucgcgagccguucaucucuuguagcccccucgaaugcagaaccuuuuuccugacacagggagcccuucugaacgacaagcauuccaauggcaccauuaaagaucggucuccuuaucgcacgcucauguccugucccaucggcgaggugccuagccccuacaacuccagauuugaaucuguugccuggagcgcuuccgccugccacgacgggauuaacuggcugaccaucggaaucagcggcccugauaauggggcuguggccguccugaaguauaacggaauuaucacagacaccauuaagucuuggcggaauaacauccuccgcacacaagaguccgagugugcgugcgugaauggcagcuguuucaccauuaugacggaugggccgucugacggacaggccagcuacaaaaucuuuagaaucgaaaagggcaaaauugugaaguccgucgagaugaacgcucccaauuaucauuacgaagagugcucuuguuacccugauagcuccgagaucacaugcguuugccgggacaacuggcacggcagcaaucgccccugggugucuuucaaccagaaucuggaauaucagauuggguacaucuguuccggaauuuuuggcgauaacccuagacccaaugacaaaaccgggagcugcggaccggugucuuccaacggcgccaauggggucaagggauucagcuuuaaguauuccaacggcguguggaucggccggacaaaaucuauuagcucccgcaagggguucgagaugaucugggauccuaacggauggaccggcaccgacaauaacuuuucuaucaaacaagacauuguugggaucaaugaauggagcggauacuccggcagcuucgugcagcaucccgagcuuacagggcuggauuguauuagaccuugcuucugggucgaacucauccggggccgccccaaggagaacacgauuuggaccucuggauccagcaucucuuuuuguggcguuaauuccgacacagugggguggagcuggcccgauggagcugagcugccuuucaccaucgacaaauga

SEQ ID NO: 217611 - RNA, 1410 nt, Artificial Sequence; identical to SEQ ID NO: 215230
  derived and/or modified CDS sequence (opt5) from neuraminidase__InfluenzaA__AID70516

SEQ ID NO: 217612 - RNA, 1410 nt, Artificial Sequence
  derived and/or modified CDS sequence (opt5) from neuraminidase__InfluenzaA__AID70517
augaaccccaaucagaagaucauuaccaucggcagcgugugcaugacaauugggauggccaaccugacgcuccaaaucggaaauauuaucuccaucuggauuucucacagcauccagcugggcaaccagaaucagauugagaccuguaaccaauccgucaucacauacgaaaauaacaccuggguuaaucagacauaugugaacauuucuaauaccaacuucgcugccgggcagagcguggucuccgugaaacuugcgggaaauucuagccugugcccuguuuccggcugggcuaucuacagcaaggacaacucuauuagaaucggguccaaaggagauguguuugucauccgggagccguucauuagcuguucuccccucgaaugccgcacauuuuuccugacccagggcgcccuucugaaugacaagcauuccaacggcacgaucaaagauagaagcccuuaucggacccucaugucuugucccauuggggaggugccuucccccuacaacagccgcuuugaauccguugccuggucugcuagcgccugccacgacggaaucaauuggcugacaauuggcaucuccgggccugauaacggagcuguggccguccugaaguauaauggcaucauuaccgacacaaucaagagcuggagaaacaauauucuccggacccaagagucugagugugcgugcgugaacggguccuguuucacgaucaugacagauggaccgaaugacggccaggccagcuacaaaauuuuucgcaucgaaaagggcaaaaucgugaagucugucgagaugaacgcucccaauuaucauuacgaagagugcagcuguuacccugauuccucugagauuaccugcguuugcagagacaacuggcacgggagcaaucggcccuggguguccuucaaccagaaucuggaauaucagaucggauacauuuguagcggcaucuuuggggauaacccucgccccaaugacaaaacaggaucuugcggcccgguguccagcaacggggccaacggagucaagggcuucucuuuuaaguauggcaaugggguguggauuggaagaaccaaauccaucagcucccggaagggcuucgagaugauuugggauccuaacggguggaccggaacagacaauaacuuuucuaucaaacaagacaucguuggcauuaaugaauggagcggguacuccggcucuuucgugcagcaucccgagcuuacgggacuggauuguauccgcccuugcuucugggucgaacucauuagaggccggcccaaggagaacaccaucuggacaagcggguccagcauuucuuuuuguggaguuaauuccgacaccgugggcuggagcuggcccgauggggcugagcugccuuucacaaucgacaaauga

SEQ ID NO: 217613 - RNA, 1410 nt, Artificial Sequence
  derived and/or modified CDS sequence (opt5) from neuraminidase__InfluenzaA__AID70518
augaaccccaaucagaagaucauuaccaucggcagcgugugcaugacaauugggauggccaaccugauccuccaaauuggaaauaucaucuccauuuggaucucucacagcauucagcugagaaaccagucccagaucgagacguguaaucaaucugucauuaccuacgaaaacaauacauggguuaaccagaccuaugugaauaucagcaacacaaauuucgcugccggccaguccguggucucugugaaacuugcggggaacagcucccugugcccuguuagcggaugggcuauuuacucuaaggacaauuccauccggaucggcagcaaaggggauguguuugucauucgcgagccguucaucucuuguucuccccucgaaugcagaaccuuuuuccugacacagggagcccuucugaacgacaagcauagcaauggcaccauuaaagaucggucuccuuaucgcacgcucauguccugucccaucggcgagauuccuagccccuacaacuccagauuugaaucuguggccuggagcgcuuccgccugccacgacgggaucaacuggcugaccaucggaauuagcggcccugauaauggggcuguugccgugcugaaguauaacggaaucauuacagacaccaucaagucuuggcggaauaacauucuccgcacacaagaguccgagugugcgugcgucaauggcagcuguuucaccaucaugacggaugggccgucugacggacaggccagcuacaaaaucuuuagaauugaaaagggcaaaaucgugaaguccguggagaugaacgcucccaauuaucauuacgaagagugcucuuguuacccugauagcuccgagauuacaugcgucugccgggacaacuggcacggcagcaaucgccccuggguuucuuucaaccagaaucuggaauaucagaucggguacauuuguuccggaaucuuuggcgauaacccuagacccaaugacaaaaccgggagcugcggaccggugucuuccaacggcgccaauggggugaagggauucagcuuuaaguauggcaacggcgucuggauugggcggacaaaauccaucucuagccgcaagggauucgagaugaucugggauccuaacggcuggaccgggaccgacaauaacuuuuccauuaaacaagacaucgugggaauuaaugaauggucuggcuacagcggguccuucguucagcaucccgagcuuacaggccuggauuguaucagaccuugcuucuggguggaacucauucggggacgccccaaggagaacacgaucuggaccagcggcuccuccaucagcuuuuguggggucaauucugacacagugggaugguccuggcccgauggcgcugagcugccuuucaccauugacaaauga

SEQ ID NO: 217614 - RNA, 1410 nt, Artificial Sequence
  derived and/or modified CDS sequence (opt5) from neuraminidase__InfluenzaA__AID70519
augaaccccaaucagaagaucauuaccaucggcagcgugugcaugacaauugggauggccaaccugauccuccaaauuggaaauaucaucuccauuuggaucucucacagcauucagcugggcaaccagucccagaucgagacguguaaucaaucugucauuaccuacgaaaacaauacauggguuaaccagaccuaugugaauaucagcaacacaaauuucgcugccgggcaguccguggucucugugaaacuugcgggaaacagcucccugugcccuguuagcggcugggcuauuuacucuaaggacaauuccaucagaaucgggagcaaaggagauguguuugucauucgggagccguucaucucuuguagcccccucgaaugccgcaccuuuuuccugacacagggcgcccuucugaacgacaagcauuccaauggcaccauuaaagauagaucuccuuaucggacgcucauguccugucccaucggggaggugccuagccccuacaacucccgcuuugaaucuguugccuggagcgcuuccgccugccacgacggaauuaacuggcugaccaucggcaucagcgggccugauaauggagcuguggccguccugaaguauaacggcauuaucacagacaccauuaagucuuggagaaauaacauccuccggacacaagaguccgagugugcgugcgugaaugggagcuguuucaccauuaugacggauggaccgucugacggccaggccagcuacaaaaucuuucgcaucgaaaagggcaaaauugugaaguccgucgagaugaaagcucccaacuaucauuacgaagagugcucuuguuacccugauagcuccgagaucacaugcguuugcagagacaauuggcacgggagcaaccggcccugggugucuuucaaucagaaccuggaauaucagauuggauacaucuguuccggcauuuuuggggauaauccucgccccaacgacaagaccggaagcugcggcccggugucuuccaauggggccaacggagucaagggcuucagcuuuaaauauggcaaugggguguggaucggaagaacaaaguccauuucuagccggaaaggcuucgagaugaucugggauccuaacggguggaccggaaccgacaacaauuuuuccaucaagcaagacauuguuggcaucaacgaauggucuggguacagcggcuccuucgugcagcaucccgagcuuacaggacuggauuguauucgcccuugcuucugggucgaacucaucagaggccggcccaaagagaauacgauuuggaccagcgggucuuccaucagcuuuuguggagugaacucugacacaguuggcugguccuggcccgauggggcugagcugccuuucaccaucgacaaguga

SEQ ID NO: 217615 - RNA, 1410 nt, Artificial Sequence
  derived and/or modified CDS sequence (opt5) from neuraminidase__InfluenzaA__AID70520
augaaccccaaucagaagaucauuaccaucggcagcgugugcaugacaauugggauggccaaccugauccuccaaauuggaaauaucaucuccauuuggaucucucacagcauucagcugagaaaccagucccagaucgagacguguaaucaaucugucauuaccuacgaaaacaauacauggguuaaccagaccuaugugaauaucagcaacacaaauuucgcugccggccaguccguggucucugugaaacuugcggggaacagcucccugugcccuguuagcggaugggcuauuuacucuaaggacaauuccauccggaucggcagcaaaggggauguguuugucauucgcgagccguucaucucuuguucuccccucgaaugcagaaccuuuuuccugacacagggagcccuucugaacgacaagcauagcaauggcaccauuaaagaucggucuccuuaucgcacgcucauguccugucccaucggcgaggugccuagccccuacaacuccagauuugaaucuguugccuggagcgcuuccgccugccacgacgggauuaacuggcugaccaucggaaucagcggcccugauaauggggcuguggccguccugaaguauaacggaauuaucacagacaccauuaagucuuggcggaauaacauccuccgcacacaagaguccgagugugcgugcgugaauggcagcuguuucaccauuaugacggaugggccgucugacggacaggccagcuacaaaaucuuuagaaucgaaaagggcaaaauugugaaguccgucgagaugaacgcucccaauuaucauuacgaagagugcucuuguuacccugauagcuccgagaucacaugcguuugccgggacaacuggcacggcagcaaucgccccugggugucuuucaaccagaaucuggaauaucagauuggguacaucuguuccggaauuuuuggcgauaacccuagacccaaugacaaaaccgggagcugcggaccggugucuuccaacggcgccaauggggucaagggauucagcuuuaaguauggcaacggcguguggaucgggcggacaaaauccauuucuagccgcaagggauucgagaugaucugggauccuaacggcuggaccgggaccgacaauaacuuuuccaucaaacaagacauuguuggaaucaaugaauggucuggcuacagcggguccuucgugcagcaucccgagcuuacaggccuggauuguauuagaccuugcuucugggucgaacucauccggggacgccccaaggagaacacgauuuggaccagcggcuccuccaucagcuuuugugggguuaauucuggaacagugggcugguccuggcccgacggggcugagcugccuuucaccaucgauaaauga

SEQ ID NO: 217616 - RNA, 1410 nt, Artificial Sequence
  derived and/or modified CDS sequence (opt5) from neuraminidase__InfluenzaA__AID70521
augaaccccaaucagaagaucauuaccaucggcagcgugucccugacaauuucuagaaucugcuucuuuaugcaaauugccauccucaucaacacggucacccugcacuucaaacaguacgaguuuaauagcccuccgaacaaucagguuaugcuuugugaacccacaauuaucgagcggaacauuaccaagaucguguaucugacaaauaccacaauugaaaaagagaucugcccuaagcucgcugaauaccgcuccuggucuaaaccccagugugacauuaccggguucgccccuuuuagcaaggauaacuccaucagacugucugcgggaggcgacaucugggugacgcgggagcccuaugucagcugcgauccugacaaguguuuccaauuugcucuugggcagggaaccacacugaauaacgugcauuccaaugauaccguucacgaccgcacaccguacagaacccuccugaugaacgagcugggcgugcccuuccaucucgggacgaaacaggucugcauugccugguccucuuccagcugucacgauggaaaggccuggcugcaugugugcaucacaggcgacgauaaaaaugcuaccgccucuauuaucuauaacggccggcuuguugacuccauugugagcuggucuaagaaaauccugcgcacacaggaauccgagugugucugcaucaaugggaccuguaccguggugaugacagauggaagcgcuuccggcaaggccgacacgaagauucucuuuaucgaagaggggaaaauuguccacaccucuacacugagcggauccgcgcaacacguugaggaaugcagcugcuacccuagauaucccggcgugcggugugugugccgcgauaacuggaaggggucuaacagaccuaucgucgacauuaauaucaaagacuacuccaucgugagcucuuacguuuguagcggauucgugggcgauacaccccggaagccggaccgcuccucuagcucccauugccuugauccuaacaaugaggaaggcgggcacggagucaaaggcugggccuuugacgaugggaacgacguguggaugggaagaaccauuagcgagaagucucggcugggcuaugaaaccuucaaaguuaucgggggaugguccaaucccaacagcaagucucagauuaaucgccaggugaucgucgauagaggcaaccgguccggcuacagcgggauuuuuagcguggagggaaagucuuguaucaauagaugcuucuaugucgagcucauucgcggccggaaagacgaaacggaggugcuguggacaagcaacuccaucguuguguucugugggaccucuggaaccuacggcacagggagcuggccugauggcgcugacaucaaucugaugcccauuuga

SEQ ID NO: 217617 - RNA, 1410 nt, Artificial Sequence
  derived and/or modified CDS sequence (opt5) from neuraminidase__InfluenzaA__AID70522
augaaccccaaucagaagaucauuaccaucggcagcgugucccugacaauuucuacgaucugcuucuuuaugcaaauugccauccucaucaccacagucacccugcacuucagacaguacgaguuuaacagcccuccgaauaaccagguuaugcuuugugaacccacaauuaucgagcggaauauuaccgaaaucguguaucugacaaacaccacgauugagaaagaaaucugcccuaagcucgcugaguaccgcaauugguccaaaccccagugugacauuaccggguucgccccuuuuucuaaggauaacagcaucagacuguccgcgggaggcgacaucugggugacacgggagcccuaugucucuugcgauccugacaaauguuaccaauucgcucuugggcagggaaccacacugaauaacgugcauagcaauaacaccguucgcgauagaacgccguaucggacacuccugaugaaugaacugggcgugcccuuucaccucgggaccaagcaggucugcauugccugguccagcagcuccugucaugacggaaaggccuggcugcacgugugcaucacaggcgaugacaaaaacgcuaccgccagcuucauuuacaauggccgccuuguugauucuguggucuccuggagcaaggagauccugagaacccaggaaucugagugugugugcauuaacgggacauguacgguggucaugaccgacggauccgcuagcggcaaagccgauacaaagauccucuuuaucgaggaagggaaaauuguucauaccuccacacugucuggaagcgcgcaacacguggaggaaugcuccugcuauccucgguaccccggcgugcgcugugucugcagagacaacuggaaggggagcaaucggccuaucguggauauuaacaucaaggaccacucuauuguuuccagcuacguguguucuggacuugucggcgacacgccccgcaaaaaugauagcuccucuagcucccauugccuggacccgaacaaugaggaaggcgggcacggagugaagggcugggccuucgaugacgggaacgauguuuggaugggaagaaccaucaaugagacaagccggcucggcuaugagaccuuuaaagugaucgaaggguggucuaacccuaaguccaaacugcagauuaaucgccaggucaucguggacagaggaaaccggagcggcuacucuggcauuuucuccgucgaggggaagucuuguaucaauagaugcuuuuauguggaacugauucgcggacggaaagaggaaaccgagguucucuggacauccaacucuaucguggucuucuguggcaccagcgggacauacggaacgggcuccuggcccgauggggcugaccugaaucuuaugccuauuuga

SEQ ID NO: 217618 - RNA, 1410 nt, Artificial Sequence
  derived and/or modified CDS sequence (opt5) from neuraminidase__InfluenzaA__AID70523
augaaccccaaucagaagaucaaaaccauuggcagcgugucccugacaaacucuacgaucugcauuuucaugcaaaucgccauucucaucaccacagucacccugcacuuuaagcaguacgaguucaauagcccuccgaacaaucagguuaugcuuugugaacccacaaucauugagagaaacaucaccgaaauuguguaucugacaaauaccacgaucgagaaagaaauuugcccuaagcucgcugaguaccggaacugguccaaaccccagugugacaucaccggguuugccccuuucucuaaggauaauagcauucgccuguccgcgggaggcgacaucugggugacaagagagcccuaugucucuugcgauccugacaaguguuaccaauuugcucuugggcagggaaccacacugaacaaugugcauagcaacaauaccguucgggaucgcacgccguauagaacacuccugaugaacgaacugggcgugcccuuccaccucgggaccaaacaggucugcaucgccugguccagcagcuccugucaugacggaaaggccuggcugcacgugugcauuacaggcgaugacaaaaaugcuaccgccagcuuuaucuacaacggccggcuuguugauucuguggucuccuggagcaaggagauucugcgcacccaggaaucugagugugugugcaucaacgggacauguacgguggucaugaccgacggauccgcuagcggcaaagccgauacaaagauucucuucaucgaggaagggaagaucguucauaccuccacacugucuggaagcgcgcaacacguggaggaaugcuccugcuauccuagauaccccggcgugcggugugucugccgcgacaauuggaaagggagcaacagaccuauuguggauaucaauauuaaggaccacucuaucguuuccagcuacguguguucuggacuugucggcgacacgccccggaaaaacgauagcuccucuagcucccauugccuggacccgaauaacgaggaaggcgggcacggagugaagggcugggccuuugaugacgggaaugauguuuggaugggacgcaccauuaacgagacaagcagacucggcuaugagaccuucaaagugaucgaaggguggucuaauccuaaguccaaacugcagaucaaccggcaguuuauugucgaccgcggaaauagaagcggcuacucuggcaucuucuccguggaggggaagucuuguauuaaccggugcuuuuaugucgaacugaucagaggacgcaaggaggaaaccgaggugcucuggacauccaauucuauuguuguguucuguggcaccagcgggacauacggaacgggcuccuggcccgauggggcugaccugaaccuuaugccuaucuga

SEQ ID NO: 217619 - RNA, 1410 nt, Artificial Sequence
  derived and/or modified CDS sequence (opt5) from neuraminidase__InfluenzaA__AID70524
augaaccccaaucagaagaucauuaccaucggcgccguguggagaacaauuagcacgaucugcuucuuuaugcaaauugcuuuccugaucaccacagucacccuccacuuuaaacaguacgaguucaacuccccuccgaauaaccagguuaugcccugugaaccuacaaucauugagcggaauaucaccgaaauuguguaucugacaaacaccacgaucgagaaggaaauuugccccaaacuugccgaguaccgcaauuggucuaagccucagugugacaucaccggguuugcgcccuucagcaaagauaacuccauuagacugucugcuggaggcgacaucugggugacacgggagccuuaugucagcugcgauccggacaaguguuaccaauuugcccucgggcagggaaccacacugaauaacgugcauuccaauaacaccguucgcgauagaacgcccuaucggacacuucugaugaaugaacucggcgugccuuuccaccuggggaccaagcaggucugcaucgccuggucuagcuccagcugucaugacggaaaggcuuggcugcacgugugcauuacaggcgaugacaaaaacgccaccgcuucuuuuaucuacaauggccgccucguugauuccguggucagcuggucuaaagagauucugagaacccaggaauccgagugugugugcaucaacgggacauguacgguggucaugaccgacggaagcgccucuggcaaggcggauacaaaaauucuuuucaucgaggaagggaagaucguucauaccuccacacugagcggauccgcccaacacguggaggaaugcucuugcuauccccgguacccuggcgugcgcugugucugcagagacaacuggaaggggagcaaucggcccauuguggauaucaacauuaaagaccacuccaucguuagcucuuacguguguuccggacucgucggcgacaccccgcgcaagaaugauagcucuagcuccucucauugccuggacccuaacaaugaggaaggcgggcacggagugaaaggcugggcuuuugaugacgggaacgauguuuggaugggaagaacgauuaaugagacaagccggcuuggcuaugagaccuucaaggugaucgaagggugguccaaccccaaaagcaagcugcagaucaaucgccaggucauuguggacagaggaaaccggucuggcuacuccggcaucuuuagcgucgaggggaaaucuuguauuaauagaugcuucuauguggaacucauccgcggacggaaggaggaaaccgagguucuguggacauccaacagcauuguggucuucuguggcaccuccgggacauacggaacgggcucuuggccugauggggccgaccugaaucucaugcccaucuga

SEQ ID NO: 217620 - RNA, 1410 nt, Artificial Sequence
  derived and/or modified CDS sequence (opt5) from neuraminidase__InfluenzaA__AID70525
augaaccccaaucagaagaucauuaccaucggcagcgugucccugacaauuuggaucauuugcuucuuuaugcaaaucgccauccucauuacgaccgucacacugcacuucaaacaguacgaguuuaacucuccuccgaauaaccagguuaugcuuugugaacccaccaucauugagagaaauaucacagaaauuguguaucugaccaacacaaccaucgagaaggaaauuugcccuaaacucgcugaguaccggaauuggagcaagccccagugugacaucacgggguucgccccuuuuuccaaagauaacucuauccgccugagcgcgggaggcgacauuugggugaccagagagcccuaugucuccugcgauccugacaaguguuaccaauucgcucuugggcagggaacaacccugaauaacgugcauucuaauaacacaguucgggaucgcaccccguauagaacgcuccugaugaaugaacugggcgugcccuuucaccucgggacaaagcaggucugcaucgccuggagcuccagcucuugucaugacggaaaagccuggcugcacgugugcauuaccggcgaugacaagaacgcuacagccuccuucaucuacaauggccggcuuguugauagcguggucucuugguccaaagagauucugcgcacccaggaaagcgagugugugugcaucaacgggaccuguacaguggucaugacggacggaucugcuuccggcaaggccgauaccaaaauccucuuuauugaggaagggaagaucguucauacaagcacccuguccggaucugcgcaacacguggaggaaugcagcugcuauccuagauaccccggcgugcggugugucugccgcgacaacuggaagggguccaauagaccuauuguggauaucaacauuaaagaccacagcaucguuucuuccuacguguguagcggacuugucggcgacacaccccggaagaaugauucuagcuccucuagccauugccuggacccgaacaaugaggaaggcgggcacggagugaaaggcugggccuucgaugacgggaacgauguuuggaugggacgcaccaucaaugagacguccagacucggcuaugagacauuuaaggugauugaaggguggagcaacccuaaaucuaagcugcagaucaaucggcaggucauuguggaccgcggaaacagauccggcuacagcggcaucuucucugucgaggggaaauccuguauuaaucggugcuuuuauguggaacugaucagaggacgcaaggaggaaaccgagguucucuggaccagcaacuccauuguggucuucuguggcacaucugggaccuacggaacaggcagcuggcccgauggggcugaccugaauaucaugccuaucuga

SEQ ID NO: 217621 - RNA, 1410 nt, Artificial Sequence; identical to SEQ ID NO: 211590
  derived and/or modified CDS sequence (opt5) from neuraminidase__InfluenzaA__AID70526

SEQ ID NO: 217622 - RNA, 1410 nt, Artificial Sequence
  derived and/or modified CDS sequence (opt5) from neuraminidase__InfluenzaA__AID70527
augaaccccaaucagaagaucauuaccaucggcagcgugucccugacaauguggauuaucugcuucuuuaugcaaauugccauccucaucacgaccgucacacugcacuucaaacaguacgaguuuaacucuccuccgaauaaccagguuaugcuuugugaacccaccauuaucgagagaaauauuacagaaaucguguaucugaccaacacaaccauugagaaggaaaucugcccuaaacucgcugaguaccggaauuggagcaagccccagugugacauuacgggguucgccccuuuuuccaaagauaacucuauccgccugagcgcgggaggcgacaucugggugaccagagagcccuaugucuccugcgauccugacaaguguuaccaauucgcucuugggcagggaacaacccugaauaacgugcauucuaauaacacaguucgggaucgcaccccguauagaacgcuccugaugaaugaacugggcgugcccuuucaccucgggacaaagcaggucugcauugccuggagcuccagcucuugucaugacggaaaagccuggcugcacgugugcaucaccggcgaugacaagaacgcuacagccuccuucauuuacaauggccggcuuguugauagcguggucucuugguccaaagagauccugcgcacccaggaaagcgagugugugugcauuaacgggaccuguacaguggucaugacggacggaucugcuuccggcaaggccgauaccaaaauccucuuuaucgaggaagggaagauuguucauacaagcacccuguccggaucugcgcaacacguggaggaaugcagcugcuauccuagauaccccggcgugcggugugucugccgcgacaacuggaagggguccaauagaccuaucguggauauuaacaucaaagaccacagcauuguuucuuccuacguguguagcggacuugucggcgacacaccccggaagaaugauucuagcuccucuagccauugccuggacccgaacaaugaggaaggcgggcacggagugaaaggcugggccuucgaugacgggaacgauguuuggaugggacgcaccaucaaugagacguccagacucggcuaugagacauuuaaggugaucgaaggguggagcaacccuaaaucuaagcugcagauuaaucggcaggucaucguggaccgcggaaacagauccggcuacagcggcauuuucucugucgaggggaaauccuguaucaaucggugcuuuuauguggaacugauuagaggacgcaaggaggaaaccgagguucucuggaccagcaacuccaucguggucuucuguggcacaucugggaccuacggaacaggcagcuggcccgauggggcugaccugaaucuuaugccuauuuga

SEQ ID NO: 217623 - RNA, 1410 nt, Artificial Sequence
  derived and/or modified CDS sequence (opt5) from neuraminidase__InfluenzaA__AID70528
augaaccccaaucagaagaucauuaccaucggcagcgugucccugucuauuagcacaaucugcuucuuuaugcaaauugccauccucaucacgaccgucacacugcacuucaaacaguacgaguuuaacuccccuccgaauaaccagguuaugcuuugugaacccaccauuaucgagagaaauauuacagaaaucguguaucugaccaacacaaccauugagaaggaaaucugcccuaaacucgcugaguaccggaauuggucuaagccccagugugacauuacgggguucgccccuuuuagcaaagauaacuccauccgccugucugcgggaggcgacaucugggugaccagagagcccuaugucagcugcgauccugacaaguguuaccaauucgcucuugggcagggaacaacccugaauaacgugcauuccaauaacacaguucgggaucgcaccccguauagaacgcuccugaugaaugaacugggcgugcccuuucaccucgggacaaagcaggucugcauugccuggucuagcuccagcugucaugacggaaaagccuggcugcacgugugcaucaccggcgaugacaagaacgcuacagccucuuucauuuacaauggccggcuuguugauuccguggucagcuggucuaaagagauccugcgcacccaggaauccgagugugugugcauuaacgggaccuguacaguggucaugacggacggaagcgcuuccggcaaggccgauaccaaaauccucuuuaucgaggaagggaagauuguucauacaucuacccugagcggauccgcgcaacacguggaggaaugcagcugcuauccuagauaccccggcgugcggugugucugccgcgacaacuggaaggggucuaauagaccuaucguggauauuaacaucaaagaccacuccauuguuagcucuuacguguguagcggacuugucggcgacacaccccggaagaaugauuccucuagcuccagccauugccuggacccgaacaaugaggaaggcgggcacggagugaaaggcugggccuucgaugacgggaacgauguuuggaugggacgcaccaucaaugagacgucuagacucggcuaugagacauuuaaggugaucgaagggugguccaacccuaaaagcaagcugcagauuaaucggcaggucaucguggaccgcggaaacagaucuggcuacuccggcauuuucagcgucgaggggaaauccuguaucaaucggugcuuuuauguggaacugauuagaggacgcaaggaggaaaccgagguucucuggaccucuaacagcaucguggucuucuguggcacauccgggaccuacggaacaggcucuuggcccgauggggcugaccugaaucuuaugccuauuuga

SEQ ID NO: 217624 - RNA, 1410 nt, Artificial Sequence; identical to SEQ ID NO: 211590
  derived and/or modified CDS sequence (opt5) from neuraminidase__InfluenzaA__AID70529

SEQ ID NO: 217625 - RNA, 1410 nt, Artificial Sequence
  derived and/or modified CDS sequence (opt5) from neuraminidase__InfluenzaA__AID70530
augaaccccaaucagaagaucauuaccaucggcagcgugucccugacaauuucuacgaucugcuucuuuaugcaaauugccauccucaucaccacagucacccugcacuucaaacaguacgaguuuaacagcccuccgaauaaccagguuaugcuuugugaacccacaauuaucgagagaaauauuaccgaaaucguguaucugacaaacaccacgauugagaaggaaaucugcccuaaacucgcugaguaccggaauugguccaagccccagugugacauuaccggguucgccccuuuuucuaaagauaacagcauccgccuguccgcgggaggcgacaucugggugacaagagagcccuaugucucuugcgauccugacaaguguuaccaauucgcucuugggcagggaaccacacugaauaacgugcauagcaauaacaccguucgggaucgcacgccguauagaacacuccugaugaaugaacugggcgugcccuuucaccucgggaccaagcaggucugcauugccugguccucuagcuccugucaugacggaaaagccuggcugcacgugugcaucacaggcgaugacaagaacgcuaccgccagcuucauuuacaauggccggcuuguugauucuguggucuccuggagcaaagagauccugcgcacccaggaaucugagugugugugcauuaacgggacauguacgguggucaugaccgacggauccgcuagcggcaaggccgauacaaaaauccucuuuaucgaggaagggaagauuguucauaccuccacacugucuggaagcgcgcaacacguggaggaaugcuccugcuauccuagauaccccggcgugcggugugucugccgcgacaacuggaaggggagcaauagaccuaucguggauauuaacaucaaagaccacucuauuguuuccagcuacguguguucuggacuugucggcgacacgccccggaagaaugauagcuccucuagcucccauugccuggacccgaacaaugaggaaggcgggcacggagugaaaggcugggccuucgaugacgggaacgauguuuggaugggacgcaccaucaaugagacaagcagacucggcuaugagaccuuuaaggugaucgaaggguggucuaacccuaaauccaagcugcagauuaaucggcaggucaucguggaccgcggaaacagaagcggcuacucuggcauuuucuccgucgaggggaaaagcuguaucaaucggugcuuuuauguggaacugauuagaggacgcaaggaggaaaccgagguucucuggacauccaacucuaucguggucuucuguggcaccagcgggacauacggaacgggcuccuggcccgauggggcugaccugaauauuaugccuaucuga

SEQ ID NO: 217626 - RNA, 1410 nt, Artificial Sequence; identical to SEQ ID NO: 211590
  derived and/or modified CDS sequence (opt5) from neuraminidase__InfluenzaA__AID70531

SEQ ID NO: 217627 - RNA, 1410 nt, Artificial Sequence
  derived and/or modified CDS sequence (opt5) from neuraminidase__InfluenzaA__AID70532
augaaccccaaucagaagaucauuaccaucggcagcgugucccugacaauuucuacgaucugcuucuuuaugcaaauugccauccucaucaccacagucacccugcacuucaaacaguacgaguuuaacagcccuccgaauaaccagguuaugcuuugugaacccacaauuaucgagagaaauauuaccgaaaucguguaucugacaaacaccacgauugagaaggaaaucugcccuaaacucgcugaguaccggaauugguccaagccccagugugacauuaccggguucgccccuuuuucuaaagauaacagcauccgccuguccgcgggaggcgacaucugggugacaagagagcccuaugucucuugcgauccugacaaguguuaccaauucgcucuugggcagggaaccacacugaauaacgugcauagcaauaacaccguucgggaucgcacgccguauagaacacuccugaugaaugaacugggcgugcccuuucaccucgggaccaagcaggucugcauugccugguccucuucuuccugucaugacggaaaagccuggcugcacgugugcaucacaggcgaugacaagaacgcuaccgccagcuucauuuacaauggccggcuuguugauucuguggucuccuggagcaaagagauccugcgcacccaggaaucugagugugugugcauuaacgggacauguacgguggucaugaccgacggauccgcuagcggcaaggccgauacaaaaauccucuuuaucgaggaagggaagauuguucauaccuccacacugucuggaagcgcgcaacacguggaggaaugcuccugcuauccuagauaccccggcgugcggugugucugccgcgacaacuggaaggggagcaauagaccuaucguggauauuaacaucaaagaccacucuauuguuuccagcuacguguguucuggacuugucggcgacacgccccggaagaaugauagcuccucuagcucccauugccuggacccgaacaaugaggaaggcgggcacggagugaaaggcugggccuucgaugacgggaacgauguuuggaugggacgcaccaucaaugagacaagcagacucggcuaugagacccugaaggugaucgaaggguggucuaacccuaaauccaagcugcagauuaaucggcaggucaucguggaccgcggaaacagaagcggcuacuauggcauuuuuagcgucgaggggaaauccuguaucaaucggugcuucuacguggaacucauuuggggaagaaaggaggaaaucgagguucuguggaccagcaacuccaagguggucuuuuguggcacaucugggaccuauggaacaggcagcucccccgauggggcugaccuuaauuucaugccuauuuga

SEQ ID NO: 217628 - RNA, 1410 nt, Artificial Sequence
  derived and/or modified CDS sequence (opt5) from neuraminidase__InfluenzaA__AID70533
augaaccccaaucagaagaucauuaccaucggcagcgugucccuggccauuucuacaaucugcuucuuuaugcaaauugcuauccucaucacgaccgucacacugcacuucaaacaguacgaguuuaacagcccuccgaauaaccagguuaugcuuugugaacccaccauuaucgagagaaauauuacagaaaucguguaucugaccaacacaaccauugagaaggaaaucugcccuaaacucgccgaguaccggaauugguccaagccccagugugacauuacgggguucgcgccuuuuucuaaagauaacagcauccgccuguccgcuggaggcgacaucugggugaccagagagcccuaugucucuugcgauccugacaaguguuaccaauucgcccuugggcagggaacaacccugaauaacgugcauagcaauaacacaguucgggaucgcaccccguauagaacgcuccugaugaaugaacugggcgugcccuuucaccucgggacaaagcaggucugcauugccugguccucuagcuccugucaugacggaaaggcuuggcugcacgugugcaucaccggcgaugacaaaaacgccacagcuagcuucauuuacaauggccggcuuguugauucuguggucuccuggagcaaagagauccugcgcacccaggaaucugagugugugugcauuaacgggaccuguacaguggucaugacggacggauccgccagcggcaaggcggauaccaaaauccucuuuaucgaggaagggaagauuguucauacauccacccugucuggaagcgcccaacacguggaggaaugcuccugcuauccuagauaccccggcgugcggugugucugccgcgacaacuggaaggggagcaauagaccuaucguggauauuaacaucaaagaccacucuauuguuuccagcuacguguguucuggacuugucggcgacacaccccggaagaaugauagcuccucuagcucccauugccuggacccgaacaaugaggaaggcgggcacggagugaaaggcugggcuuucgaugacgggaacgauguuuggaugggacgcaccaucaaugagacgagcagacucggcuaugagacauuuaaggugaucgaaggguggucuaacccuaaauccaagcugcagauuaaucggcaggucaucguggaccgcggaaacagaagcggcuacucuggcauuuucuccgucgaggggaaaagcuguaucaaucggugcuuuuauguggaacugauuagaggacgcaaggaggaaaccgagguucucuggaccuccaacucuaucguggucuucuguggcacaagcgggaccuacggaacaggcuccuggcccgauggggccgaccugaaucuuaugccuauuuga

SEQ ID NO: 217629 - RNA, 1410 nt, Artificial Sequence
  derived and/or modified CDS sequence (opt5) from neuraminidase__InfluenzaA__AID70534
augaaccccaaucagaagaucauuaccaucggcagcgugucccugucuauuuacaucauuugcuucuuuaugcaaaucgccauccucauuacaacggucacccugcacuucaaacaguaugaguuuaacagcccuccgaauaaccaggcuaugcccugugaaccuacaaucauugagagaaauaucaccgaaauuguuuaccuuacaaacaccacaaucgagaaggaaauuugccccaaacuggccgaguaucggaauugguccaagccucagugugacaucaccggguucgcgcccuuuucuaaagauaacagcauccgccucuccgcuggaggcgacauuugggugacgagagagccuuacgugucuugcgauccggacaaguguuaucaauucgcccuggggcagggaaccacacuuaauaacguccauagcaauaacaccgugcgggaucgcacacccuacagaacccugcucaugaaugaacugggcguuccuuuucaccuggggacgaaacaggugugcaucgccugguccucuagcuccugucaugacggaaaggcuuggcuccacgucugcauuacaggcgaugacaagaacgccaccgcuagcuucaucuauaauggccggcugguggauucuguuguguccuggagcaaagagauucuucgcacacaggaaucugagugugucugcaucaacgggaccuguaccguggugaugacagacggauccgccagcggcaaggcggauacgaaaauccuguuuauugaggaagggaagaucguccauaccuccacacucucuggaagcgcccaacacguugaggaaugcuccugcuaccccagauacccuggcgugcggugugugugccgcgacaacuggaaggggagcaauagacccauugucgauaucaacauuaaagaccacucuaucguguccagcuauguuuguucuggacuggugggcgacaccccgcggaagaaugauagcuccucuagcucccauugccuugacccuaacaaugaggaaggcgggcacggagucaaaggcugggcuuucgaugacgggaacgauguguggaugggacgcacaaucaaugagaccagcagacugggcuacgagacguuuaagguuauugaaggguggucuaaccccaaauccaagcuccagaucaaucgccaggugauugucgaccggggaaacagaagcggcuauucuggcaucuucuccguggaggggaaaagcuguauuaaucggugcuuuuacgucgaacugaucagaggacgcaaggaggaaacagaggugcuguggaccuccaacucuauuguuguguucuguggcaccagcgggacauauggaaccggcuccuggccugauggggccgaccucaaucugaugcccaucuga

SEQ ID NO: 217630 - RNA, 1410 nt, Artificial Sequence
  derived and/or modified CDS sequence (opt5) from neuraminidase__InfluenzaA__AID70535
augaaccccaaucagaagaucauuaccaucggcagcgugucccuggccaugugcacaauuuguuucuuuaugcaaaucgcuauucucaucacgaccgucacacugcacuucaaacaguacgaguuuaacucuccuccgaauaaccaggccaugcccugcgaaccuaccaucauugagagaaauaucacagaaauuguuuaucuuaccaacacaaccaucgagaaggaaauuugucccaaacuggcggaguaccggaauuggagcaagccucagugcgacaucacgggguucgcucccuuuuccaaagauaacucuauucgccucagcgccggaggcgacaucugggugaccagagagccuuauguguccugugauccggacaagugcuaccaauucgcccuggggcagggaacaacccuuaauaacguccauucuaauaacacagugcgggaucgcacccccuauagaacgcugcucaugaaugaacugggcguuccuuuucaccuggggacaaaacagguguguaucgcuuggagcuccagcucuugccaugacggaaaggccuggcuccacgucuguauuaccggcgaugacaagaacgcuacagccuccuucaucuacaauggccggcugguggauagcguugugucuugguccaaagagauucuucgcacccaggaaagcgagugcgucuguaucaacgggaccugcacaguggugaugacggacggaucugcguccggcaaggccgauaccaaaauucuguuuaucgaggaagggaagaucguccauacaagcacccucuccggaucugcucaacacguugaggaaugcagcuguuaucccagauacccuggcgugcggugcgugugucgcgacaacuggaagggguccaauagacccauugucgauaucaacauuaaagaccacagcaucgugucuuccuacguuugcagcggacuggugggcgacacaccgcggaagaaugauucuagcuccucuagccauugucuugacccuaacaaugaggaaggcgggcacggagucaaaggcugggccuucgaugacgggaacgauguguggaugggacgcaccauuaaugagacguccagacugggcuaugagacauuuaagguuaucgaaggguggagcaaccccaaaucuaagcuccagaucaaucgccaggugauugucgaccggggaaacagauccggcuacagcggcaucuucucuguggaggggaaauccugcauuaaucgguguuuuuaugucgaacugaucagaggacgcaaggaggaaaccgaggugcuguggaccagcaacuccauuguuguguucugcggcacaucugggaccuacggaacaggcagcuggccugauggggcugaccucaaucugaugcccaucuga

SEQ ID NO: 217631 - RNA, 1410 nt, Artificial Sequence
  derived and/or modified CDS sequence (opt5) from neuraminidase__InfluenzaA__AID70536
augaaccccaaucagaagaucauuaccaucggcagcgugucccugacaauuucuacggucugcuucuuuaugcaaaucgccauucucaucaccacaguuacccugcacuucaaacaguacgaguuuaacagcccuccgaauaaccaggugaugcuuugugaacccacaaucauugacagaaauaucaccgagauuguguaucugacaaacaccacgaucgaaaaggagauuugcccuaaacucgcugaauaccggaauugguccaagccccagugugauaucaccggguucgccccuuuuucuaaagacaacagcauucgccuguccgcgggaggcgauaucugggucacaagagagcccuaugugucuugcgacccugauaaguguuaccaauucgcucuugggcagggaaccacacugaauaacguucauagcaauaacaccgugcgggaccgcacgccguauagaacacuccugaugaaugagcugggcguccccuuucaccucgggaccaaacaggugugcaucgccugguccucuagcuccugucaugauggaaaggccuggcugcacguuugcauuacaggcgacgauaagaacgcuaccgccagcuucaucuacaauggccggcuuguggacucugucguguccuggagcaaagaaauucugcgcacccaggagucugaaugugugugcaucaacgggacauguacggucguuaugaccgauggauccgcuagcggcaaggccgacacaaaaauucucuuuaucgaggaggggaagaucgugcauaccuccacacugucuggaagcgcgcaacacguggaagagugcuccugcuauccuagauaccccggcguccggugugugugccgcgauaacuggaaggggagcaauagaccuauuguugacaucaacauuaaagaccacucuaucguguccagcuacgucuguucuggacuugugggcgauacgccccggaagaaugacagcuccucuagcucccauugccuggauccgaacaaugaagagggcgggcacggaguuaaaggcugggccuucgacgaugggaacgacguguggaugggacgcaccauuaaugaaacaagcagacucggcuaugagaccuuuaaggucaucgagggguggucuaacccuaaauccaagcugcagaucaaucgccaggugauugucgaucggggaaacagaagcggcuacucuggcaucuucuccguggaagggaaaagcuguauuaaucggugcuuuuauguugagcugaucagaggacgcaaggaagagaccgaagugcucuggacauccaacucuauugucguguucuguggcaccagcgggacauacggaacgggcuccuggcccgacggggcugaucugaaucuuaugccuaucuga

SEQ ID NO: 217632 - RNA, 1410 nt, Artificial Sequence; identical to SEQ ID NO: 211590
  derived and/or modified CDS sequence (opt5) from neuraminidase__InfluenzaA__AID70537

SEQ ID NO: 217633 - RNA, 1410 nt, Artificial Sequence
  derived and/or modified CDS sequence (opt5) from neuraminidase__InfluenzaA__AID70538
augaaccccaaucagaagaaaaucaccauuggcgccgugagccugacaaugugcacggucuguaucuucaugcaaauugcuauccucauuaccacaguuacccugcacuuuagacaguacgaguucaacuccccuccgaauaaccaggugaugcuuugcgaacccacaaucaucgagcggaauauuaccgaaaucguguaucugacaaacaccacgauugagaaggaaaucuguccuaaacucgccgaguaccgcaauuggucuaagccccagugcgacauuaccggguuugcgccuuucagcaaagauaacuccaucagacugucugcuggaggcgacauuugggucacacgggagcccuaugugagcugugauccugacaagugcuaccaauuugcccuugggcagggaaccacacugaauaacguucauuccaauaacaccgugcgcgauagaacgccguaucggacacuccugaugaaugaacugggcguccccuuccaccucgggaccaaacagguguguaucgccuggucuagcuccagcugccaugacggaaaggcuuggcugcacguuuguaucacaggcgaugacaagaacgccaccgcuucuuuuauuuacaauggccgccuuguggauuccgucgugagcuggucuaaagagauccugagaacccaggaauccgagugcguguguauuaacgggacaugcacggucguuaugaccgacggaagcgccucuggcaaggcggauacaaaaauccucuucauugaggaagggaagaucgugcauaccuccacacugagcggauccgcccaacacguggaggaaugcucuuguuauccucgguaccccggcguccgcugcguguguagagacaacuggaaggggagcaaucggccuaucguugauauuaacaucaaagaccacuccauugugagcucuuacgucugcuccggacuugugggcgacacgccccgcaagaaugauagcucuagcuccucucauugucuggacccgaacaaugaggaaggcgggcacggaguuaaaggcugggcuuuugaugacgggaacgauguguggaugggaagaaccaucaaugagacaagccggcucggcuaugagaccuucaaggucauugaagggugguccaacccuaaaagcaagcugcagaucaaucgccaggugaucgucgacagaggaaaccggucuggcuacuccggcauuuuuagcguggaggggaaaucuugcaucaauagauguuucuauguugaacugauucgcggacggaaggaggaaaccgaggugcucuggacauccaacagcaucgucguguuuugcggcaccuccgggacauacggaacgggcucuuggcccgauggggccgaccugaaucuuaugccuauuuga

SEQ ID NO: 217634 - RNA, 1410 nt, Artificial Sequence
  derived and/or modified CDS sequence (opt5) from neuraminidase__InfluenzaA__AID70539
augaaccccaaucagaagaucauuaccaucggcagcgugucccugacaauuucuacgaucugcuucuuuaugcaaauugccauccucaucaccacagucacccugcacuucaaacaguacgaguuuaacagcccuccgaauaaccagguuaugcuuugugaacccacaauuaucgagagaaauauuaccgaaaucguguaucugacaaacaccacgauugagaaggaaaucugcccuaaacucgcugaguaccggaauugguccaagccccagugugacauuaccggguucgccccuuuuucuaaagauaacagcauccgccuguccgcgggaggcgacaucugggugacaagagagcccuaugucucuugcgauccugacaaguguuaccaauucgcucuugggcagggaaccacacugaauaacgugcauagcaauaacaccguucgggaucgcacgccguauagaacacuccugaugaaugaacugggcgugcccuuucaccucgggaccaagcaggucugcauugccugguccucuagcuccugucaugacggaaaagccuggcugcacgugugcaucacaggcgaugacaagaacgcuaccgccagcuucauuuacaauggccggcuuguugauucuguggucuccuggagcaaagagauccugcgcacccaggaaucugagugugugugcauuaacgggacauguacgguggucaugaccgacggauccgcuagcggcaaggccgauacaaaaauccucuuuaucgaggaagggaagauuguucauaccuccacacugucuggaagcgcgcaacacguggaggaaugcuccugcuauccuagauaccccggcgugcggugugucugccgcgacaacuggaaggggagcaauagaccuaucguggauauuaacaucaaagaccacucuauuguuuccagcuacguguguucuggacuugucggcgacacgccccggaagaaugauagcuccucuagcucccauugccugaacccgaauaacgaggaaggcgggcacggagugaaaggcugggccuucgacgaugggaaugacguuuggaugggacgcaccaucaacgagacaagcagacucggcuaugagaccuuuaaggugaucgaaggguggucuaauccuaaauccaagcugcagauuaaccggcaggucaucguggaucgcggaaauagaagcggcuacucuggcauuuucuccgucgaggggaaaagcuguaucaaccggugcuuuuauguggaacugauuagaggacgcaaggaggaaaccgagguucucuggacauccaauucuaucguggucuucuguggcaccagcgggacauacggaacgggcuccuggcccgacggggcugaucugaaccuuaugccuauuuga

SEQ ID NO: 217635 - RNA, 1410 nt, Artificial Sequence; identical to SEQ ID NO: 211590
  derived and/or modified CDS sequence (opt5) from neuraminidase__InfluenzaA__AID70540

SEQ ID NO: 217636 - RNA, 1410 nt, Artificial Sequence; identical to SEQ ID NO: 211590
  derived and/or modified CDS sequence (opt5) from neuraminidase__InfluenzaA__AID70541

SEQ ID NO: 217637 - RNA, 1410 nt, Artificial Sequence
  derived and/or modified CDS sequence (opt5) from neuraminidase__InfluenzaA__AID70633
augaaccccaaucagaagaucauuaccaucggcagcgugugcaugacaauugggauggccaaccugauccuccaaauuggaaauaucaucuccauuugggucucucacagcauccagcugggcaaccagucccagauugaggcuuguaaucaaucuguuaucacguacgaaaacaauaccugggugaaccagacauaugugaauauuagcaacaccaauuucgccgcggggcaguccgucgugucuguuaaacuugcuggaaacagcucccugugcccugugagcggcugggccaucuacucuaaggacaauuccgucagaauugggagcaaaggagauguguuuguuauccgggagccguucaucucuuguagcccccucgaaugccgcacauuuuuccugacccagggcgcccuucugaacgacaagcauuccaauggcacaauuaaagauagaucuccuuaucggacccucauguccugucccaucggggaggugccuagccccuacaacucccgcuuugaaucugucgcuuggagcgccuccgcuugccacgacggaauuaacuggcugacgaucggcauuagcgggccugauucuggagccguggcggugcugaaguauaauggcaucaucaccgacacaauuaaguccuggagaaacaauauccuccggacccaagagagcgagugugccugcgucaacgggucuuguuucacaauuaugaccgauggaccgagcgacggccaggcuuccuacaaaaucuuucgcauugaaaagggcaaaaucguuaagucuguggagaugaaugcccccaacuaucauuacgaagagugcagcuguuacccugauuccagcgagaucacgugcgugugcagagacaauuggcacgggucuaaccggcccugggucuccuucaaucagaaccuggaauaucagauuggauacaucuguagcggcguguuuggggauaauccucgccccaacgacaaaacaggaucuugcggcccgguuuccagcaauggggcuaacggagugaagggcuucuccuuuaaguauggcaauggggucuggauuggaagaaccaaaucuaucagcucccggaagggcuucgagaugauuugggauccuaacggguggacaggaaccgacaacaaauuuucuaucaagcaagacauugugggcaucaaugaauggagcggguacuccggcagcuucguucagcaucccgagcuuaccggacuggauuguauccgcccuugcuucuggguggaacucauuagaggccggcccgaggagaacacaaucuggacgucuggguccagcauuucuuuuuguggagucaauuccgacaccgugggcuggagcuggcccgauggggccgaacugccuuucacaaucgacaaauga

SEQ ID NO: 217638 - RNA, 1398 nt, Artificial Sequence
  derived and/or modified CDS sequence (opt5) from neuraminidase__InfluenzaA__AID70635
augaaccccaagcagaaaauccugugcaccagcgccacagcuauuaucauuggcgccaucgcggugcucauugggaucgcuaaucugggacuuaacaucggccugcaccucaagccuggguguaauugcucccauucucaaccggagacgaccaacacaagccagaccauuaucaauaacuacuauaaugaaacaaacauuaccaauauccagauggaggaaagaacaucccggaacuucaauaaccugaccaaaggacuuuguacgauuaauucuuggcacaucuacggcaaggacaacgccguccgcauuggggagagcuccgauguucuggugaccagagaacccuaugugucuugcgacccugaugagugucgguuuuacgcccucagccagggaacaaccauccgcggcaaacauuccaauggcacaauccacgacgggagccaauauagagcucugauuucuuggccccuguccagcccucccaccgucuacaacucucggguggagugcaucggaugguccagcacgucuugucaugauggcaagucccgcaugagcauuugcaucuccgggccuaacaauaacgccucugcuguugugugguauaauagacggccggucgccgaaauuaacacaugggcgcgcaauauccucagaacccaggagagcgaaugugugugccacaacggaguuugucccguggucuucacagacggcuccgccaccgggccugcugauacccggaucuacuacuuuaaggagggaaaaauucugaagugggagagccuuacaggcacggccaaacacaucgaagagugcucuugcuauggcgaacgcaccgggauuacauguaccugcagagacaauuggcagggauccaaccggcccgugauccagauugauccuguggcuaugacacauaccagccaauacaucuguucucccguccugacggacaauccgcgcccuaacgaucccaauaucggcaagugcaacgacccuuaucccgggaauaacaauaacggaguuaaaggcuucagcuaccucgauggggccaacacauggcugggaagaaccauuuccaccgcgucucggagcggcuaugagaugcuuaaggugcccaaugcccugacagacgacagauccaagccuauccagggccagaccauugugcucaacgcugauuggagcggguacucuggauccuuuauggacuauugggccgaaggcgauuguuaccgcgcuugcuucuacgucgagcugauccgggggagaccgaaagaggacaaggugugguggacaagcaauucuauuguuuccauguguagcuccacggaauuucugggacaguggaacuggcccgauggcgccaaaaucgaguauuuccucuga

SEQ ID NO: 217639 - RNA, 1401 nt, Artificial Sequence
  derived and/or modified CDS sequence (opt5) from neuraminidase__InfluenzaA__AIG44695
augaaccccaaucagaagaucaccgccauuggcagcgugucccugaucauugcuaucauuugccuccugaugcaaaucgccauccuuacaacgaccaugacacugcacuucagacagaacgaguguucuaauccuagcaacaaucaggucaugccgugcgaacccauuaucauugagcggaacaccguucaucucaauuccacaaccaucgaacgcgagauuuguccuaaaguggcggaauacaagaacuggucuaaaccccagugccaaaucacaggguuugcuccuuucagcaaggacaauuccauuagacugucugccagcggagauaucugggugacccgggagcccuaugucuccuguagccuugacaaaugcuaccaguuugcccugggccaggggacgacccucaagaacaagcacucuaauggaacaacccaugaucgcacaccucacagaacccugcugaugaacgagcucggcgugccguuccaucuggggacgaaacagguuuguaucgcuugguccuccucuuccugcuaugacggaaaggccuggcuucacgugugugucacaggcgaugacaaaaaugcuaccgccagcauuaucuacgauggcaugcugguggacucuguuggguccuggagcaagaacauucuccggacacaagaauccgagugcguguguaucaauggaaccugcgcggucgugaugaccgauggcucugccagcgggaaagcugacacacgcgugcuguuuauuagagaaggaaagaucaucaacauuagcccccuuagcggcucugcccagcacgucgaggagugcuccuguuauccucgguaccccgaaguucgcugcguguguagagauaacuggaaggggagcaaucggccuauccuguauauuaacauggcugacuacucuaucgagagcuccuacgugugcucuggacucgucggcgauacgccccgcaaugacgacagcuccucuagcuccaacuguagagauccgaauaacgaacggggcgccccuggggugaaaggaugggcguucgacgauggcaaugacguuuggauggggcgcaccauuaagaacggaagcagaucuggcuaugagacauuucggguggucaauggguggaccauggccaacuccaaaagccagaucaauagacaggugaucguugauuccgacggauggucuggcuacagcggcauuuucuccguggaagggaagaaaugcaucaaccgcuguuuuuaugucgagcugauucggggaagaccccaagagccucgcgugugguggacaucuaauagcaucauugucuucugcggcaccuccgggacguacggaacaggcagcuggcccgauggggcuaacaucaauuuuaugcccauuuga

SEQ ID NO: 217640 - RNA, 1410 nt, Artificial Sequence
  derived and/or modified CDS sequence (opt5) from neuraminidase__InfluenzaA__AIJ10793
augaaccccaaucagaagaucauuaccaucggcagcgugucccugacaauuucuacgaucugcuucuuuaugcaaauugccauccucaucaccacagucacccugcacuucaaacaguacgaguuuaacagcccuccgaauaaccagguuaugcuuugugaacccacaauuaucgagagaaauauuaccgaaaucguguaucugacaaacaccacgauugagaaggaaaucugcccuaaacucgcugaguaccggaauugguccaagccccagugugacauuaccggguucgccccuuuuucuaaagauaacagcauccgccuguccgcgggaggcgacaucugggugacaagagagcccuaugucucuugcgauccugacaaguguuaccaauucgcucuugggcagggaaccacacugaauaacgugcauagcaauaacaccguucgggaucgcacgccguauagaacacuccugaugaaugaacugggcgugcccuuucaccucgggaccaagcaggucugcauugccugguccucuagcuccugucaugacggaaaagccuggcugcacgugugcaucacaggcgaugacaagaacgcuaccgccagcuucauuuacaauggccggcuuguugauucuguggucuccuggagcaaagagauccugcgcacccaggaaucugagugugugugcauuaacgggacauguacgguggucaugaccgacggauccgcuagcggcaaggccgauacaaaaauccucuuuaucgaggaagggaagauuguucauaccuccacacugucuggaagcgcgcaacacguggaggaaugcuccugcuauccuagauaccccggcgugcggugugucugccgcgacaacuggaaggggagcaauagaccuaucguggauauuaacaucaaagaccacucuauuguuuccagcuacguguguucuggacuugucggcgacacgccccggaagaaugauagcuccucuagcucccauugccuggacccgaacaaugaggaaggcgggcacggagugaaaggcugggccuucgaugacgggaacgauguuuggaugggacgcaccaucaaugagacaagcagacucggcuaugagaccuuuaaggcuaucgaaggguggucuaacccuaaauccaagcugcagaccaaucgccaggugauugucgaccggggaaacagaagcggcuacucuggcaucuucuccguggaggggaaaagcuguauuaaucggugcuuuuaugucgaacugaucagaggacgcaaggaggaaacagaggugcucuggaccuccaacucuauuguuguguucuguggcacaagcgggacguacggaaccggcuccuggcccgauggggccgaccugaaucuuaugccuaucuga

SEQ ID NO: 217641 - RNA, 1410 nt, Artificial Sequence; identical to SEQ ID NO: 211590
  derived and/or modified CDS sequence (opt5) from neuraminidase__InfluenzaA__AIJ10794

SEQ ID NO: 217642 - RNA, 1410 nt, Artificial Sequence; identical to SEQ ID NO: 213215
  derived and/or modified CDS sequence (opt5) from neuraminidase__InfluenzaA__AIJ10795

SEQ ID NO: 217643 - RNA, 1410 nt, Artificial Sequence; identical to SEQ ID NO: 213215
  derived and/or modified CDS sequence (opt5) from neuraminidase__InfluenzaA__AIJ10796

SEQ ID NO: 217644 - RNA, 1410 nt, Artificial Sequence
  derived and/or modified CDS sequence (opt5) from neuraminidase__InfluenzaA__AIJ10797
augaaccccaaucagaagaucauuaccaucggcagcgugucccugacaauuucuacgaucugcuucuuuaugcaaauugccauccucaucaccacagucacccugcacuucaaacaguacgaguuuaacagcccuccgaauaaccagguuaugcuuugugaacccacaauuaucgagagaaauauuaccgaaaucguguaucugacaaacaccacgauugagaaggaaaucugcccuaaacucgcugaguaccggaauugguccaagccccagugugacauuaccggguucgccccuuuuucuaaagauaacagcauccgccuguccgcgggaggcgacaucugggugacaagagagcccuaugucucuugcgauccugacaaguguuaccaauucgcucuugggcagggaaccacacugaauaacgugcauagcaauaacaccguucgggaucgcacgccguauagaacacuccugaugaaugaacugggcgugcccuuucaccucgggaccaagcaggucugcauugccugguccucuagcuccugucaugacggaaaagccuggcugcacgugugcaucacaggcgaugacaagaacgcuaccgccagcuucauuuacaauggcaaacuuguugauucuguggucuccuggagcaaggagauccugcggacccaggaaucugagugugugugcauuaacgggacauguacgguggucaugaccgacggauccgcuagcggcaaagccgauacaaagauccucuuuaucgaggaagggaagauuguucauaccuccacacugucuggaagcgcgcaacacguggaggaaugcuccugcuauccucgcuaccccggcgugagaugugucugccgggacaacuggaaagggagcaaucgcccuaucguggauauuaacaucaaggaccacucuauuguuuccagcuacguguguucuggacuugucggcgacacccccagaaagaaugauagcuccucuagcucccauugccuggacccgaacaaugaggaaggcgggcacggagugaaaggcugggccuucgaugacgggaacgauguuuggaugggacggacgaucaaugagacaagccgccucggcuaugagaccuuuaaagugaucgaaggguggucuaacccuaaguccaaacugcagauuaauagacaggucaucguggaccggggaaaccgcagcggcuacucuggcauuuucuccgucgaggauaagagcuguaucaauagaugcuuuuauguggaacugauucgggggagaaaggaggaaaccgagguucucuggacauccaacucuaucguggucuucuguggaaccagcggcacauacgggacgggauccuggcccgacggcgcugaucugaaucuuaugccuauuuga

SEQ ID NO: 217645 - RNA, 1410 nt, Artificial Sequence
  derived and/or modified CDS sequence (opt5) from neuraminidase__InfluenzaA__AIJ10798
augaaccccaaucagaagaucauuaccaucggcagcgugucccugacaauuucuacgaucugcuucuuuaugcaaauugccauccucaucaccacagucacccugcacuucaaacaguacgaguuuaacagcccuccgaauaaccagguuaugcuuugugaacccacaauuaucgagagaaauauuaccgaaaucguguaucugacaaacaccacgauugagaaggaaaucugcccuacccucgcugaguaccggaauugguccaaaccccagugugacauuacaggguucgccccuuuuucuaaggauaacagcauccgccuguccgcgggaggcgacaucugggugaccagagagcccuaugucucuugcgauccugacaaauguuaccaauucgcucuugggcagggaacaacccugaauaacgugcauagcaauaacacgguucgggaucgcacaccguauagaacccuccugaugaaugaacugggcgugcccuuucaccucgggacaaagcaggucugcauugccugguccagcagcuccugucaugacggaaaggccuggcugcacgugugcaucaccggcgaugacaaaaacgcuaccgccagcuucauuuacaauggccggcuuguugauucuguggucuccuggagcaaggagauccugcgcacacaggaaucugagugugugugcauuaacgggacguguaccguggucaugacagacggauccgcuagcggcaaagccgauaccaagauccucuuuaucgaggaagggaaaauuguucauacauccacccugucuggaagcgcgcaacacguggaggaaugcuccugcuauccuagauaccccggcgugcggugugucugccgcgacaacuggaaggggagcaauagaccuaucguggauauuaacaucaaggaccacucuauuguuuccagcuacguguguucuggacuugucggcgacacgccccggaaaaaugauagcuccucuagcucccauugccuggacccgaacaaugaggaaggcgggcacggagugaagggcugggccuucgaugacgggaacgauguuuggaugggacgcacaaucaaugagaccagcagacucggcuaugagaccuuuaaagugaucgaaggguggucuaacccuaaguccaaacugcagauuaaucggcaggucaucguggaccgcggaaacagaagcggcuacucuggcauuuucuccgucgaggggaagucuuguaucaaucggugcuuuuauguggaacugauuagaggacgcaaagaggaaacagagguucucuggaccuccaacucuaucguggucuucuguggcacaagcgggacguacggaaccggcuccuggcccgauggggcugaccugaaucuuaugccuauuuga

SEQ ID NO: 217646 - RNA, 1410 nt, Artificial Sequence; identical to SEQ ID NO: 213215
  derived and/or modified CDS sequence (opt5) from neuraminidase__InfluenzaA__AIJ10799

SEQ ID NO: 217647 - RNA, 1410 nt, Artificial Sequence
  derived and/or modified CDS sequence (opt5) from neuraminidase__InfluenzaA__AIJ10800
augaaccccaaucagaagaucauuaccaucggcagcgugucccugacaauuucuacgaucugcuucuuuaugcaaauugccauccucaucaccacagucacccugcacuucaaacaguacgaguuuaacagcuccccuaauaaccagguuaugcuuugugaaccgacaauuaucgagagaaauauuaccgaaaucguguaucugacaaacaccacgauugagaaggaaaucugccccaaacucgcugaguaccggaauuggucuaagccucagugugacauuaccggguucgcccccuuuagcaaagauaacuccauccgccugucugcgggaggcgacaucugggugacaagagagccuuaugucagcugcgaucccgacaaguguuaccaauucgcucuugggcagggaaccacacugaauaacgugcauuccaauaacaccguucgggaucgcacgccuuauagaacacuccugaugaaugaacugggcgugccguuucaccucgggaccaagcaggucugcauugccuggucuagcuccagcugucaugacggaaaagccuggcugcacgugugcaucacaggcgaugacaagaacgcuaccgccucuuucauuuacaauggcaaacuuguugauuccguggucagcuggucuaaggagauccugcggacccaggaauccgagugugugugcauuaacgggacauguacgguggucaugaccgacggaagcgcuuccggcaaagccgauacaaagauccucuuuaucgaggaagggaagauuguucauaccucuacacugagcggauccgcgcaacacguggaggaaugcagcugcuauccccgcuacccuggcgugagaugugucugccgggacaacuggaaagggucuaaucgccccaucguggauauuaacaucaaggaccacuccauuguuagcucuuacguguguagcggacuugucggcgacaccccuagaaagaaugauuccucuagcuccagccauugccuggaccccaacaaugaggaaggcgggcacggagugaagggcugggccuucgaugacgggaacgauguuuggaugggacggacgaucaaugagacaucucgccucggcuaugagaccuuuaaagugaucgaagggugguccaacccgaaaagcaaacugcagauuaauagacaggucaucguggaccggggaaaccgcucuggcuacuccggcauuuucagcgucgaggggaaguccuguaucaauagaugcuuuuauguggaacugauucggggaagaaaggaggaaaccgagguucucuggacaucuaacagcaucguggucuucuguggcaccuccgggacauacggaacgggcucuuggccugauggggcugaccugaaucuuaugcccauuuga

SEQ ID NO: 217648 - RNA, 1410 nt, Artificial Sequence; identical to SEQ ID NO: 214218
  derived and/or modified CDS sequence (opt5) from neuraminidase__InfluenzaA__AIJ10801

SEQ ID NO: 217649 - RNA, 1410 nt, Artificial Sequence; identical to SEQ ID NO: 214218
  derived and/or modified CDS sequence (opt5) from neuraminidase__InfluenzaA__AIJ10803

SEQ ID NO: 217650 - RNA, 1410 nt, Artificial Sequence; identical to SEQ ID NO: 214218
  derived and/or modified CDS sequence (opt5) from neuraminidase__InfluenzaA__AIJ10804

SEQ ID NO: 217651 - RNA, 1410 nt, Artificial Sequence; identical to SEQ ID NO: 214218
  derived and/or modified CDS sequence (opt5) from neuraminidase__InfluenzaA__AIJ10805

SEQ ID NO: 217652 - RNA, 1410 nt, Artificial Sequence
  derived and/or modified CDS sequence (opt5) from neuraminidase__InfluenzaA__AIJ10806
augaaccccaaucagaagaucauuaccaucggcagcgugucccugacaauuucuacgaucugcuucuuuaugcaaauugccauccucaucaccacagucacccugcacuucaaacaguacgaguuuaacagcccuccgaauaaccagguuaugcuuugugaacccacaauuaucgagagaaauauuaccgaaaucguguaucugacaaacaccacgauugagaaggaaaucugcccuaaacccgcugaguaccggaauugguccaagccucagugugggauuaccggauucgcccccuuuucuaaagacaacagcauccgccucuccgcgggcggggauaucugggugacaagagagccuuaugucucuugcgacccggauaaguguuaccaauucgcucugggacagggcaccacacuuaauaacgugcauagcaauaacaccguucgggaccgcacgcccuauagaacacugcucaugaaugaacugggggugccuuuucaccugggaaccaagcaggucugcauugccugguccucuagcuccugucaugauggcaaagccuggcuccacgugugcaucacaggcgacgauaagaacgcuaccgccagcuucauuuacaaugggcggcugguugacucuguggucuccuggagcaaagagauccuucgcacccaggaaucugagugugugugcauuaacggaacauguacgguggucaugaccgauggcuccgcuagcgggaaggccgacacaaaaauccuguuuaucgaggaaggaaagauuguucauaccuccacacucucuggcagcgcgcaacacguggaggaaugcuccugcuaucccagauacccuggggugcggugugucugccgcgauaacuggaagggaagcaauagacccaucguggacauuaacaucaaagaucacucuauuguuuccagcuacguguguucuggccuggucggcgacaccccgcggaagaaugacagcuccucuaucagccauugccuugauccuaacaaugaggaagggggacacggcgugaaagggugggccuucgacgauggaaacgacguuuggaugggccgcacgaucaaugagacauccagacugggguaugagaccuuuaaggugauugaaggauggagcaaccccaaaucuaagcuccagaucaaucggcaggucauuguggaucgcggcgacagauccggcuacagcgggaucuucucugucgagggaaaauccuguauuaaccggugcuuuuauguggaacugaucagaggccgcaaggaggaaaccgagguucuguggacaagcaauuccauuguggucuucugugggaccucuggaacauacggcacggggagcuggccugauggcgcugaccucaaccugaugcccaucuga

SEQ ID NO: 217653 - RNA, 1410 nt, Artificial Sequence
  derived and/or modified CDS sequence (opt5) from neuraminidase__InfluenzaA__AIJ10807
augaaccccaaucagaagaucauuaccaucggcagcgugucccugacaauuucuacgaucugcuucuuuaugcaaauugccauccucaucaccacagucacccugcacuucaaacaguacgaguuuaacagcccuccgaauaaccagguuaugcuuugugaacccacaauuaucgagagaaauauuaccgaaaucguguaucugacaaacaccacgauugagaaggaaaucugcccuaaacccgcugaguaccggaauugguccaagccucagugugggauuaccggauucgcccccuuuucuaaagacaacagcauccgccucuccgcgggcggggauaucugggugacaagagaggcuuaugucucuugcgacccugauaaguguuaccaauucgcccugggacagggcaccacacuuaauaacgugcauagcaauaacaccguucgggaccgcacgccguauagaacacugcucaugaaugaacugggggugcccuuucaccugggaaccaagcaggucugcauugccugguccucuagcuccugucaugauggcaaggcuuggcuccacgugugcaucacaggcgacgauaaaaacgccaccgcuagcuucauuuacaaugggcggcugguugacucuguggucuccuggagcaaagagauccuucgcacccaggaaucugagugugugugcauuaacggaacauguacgguggucaugaccgauggcuccgccagcgggaaggcggacacaaaaauccuguuuaucgaggaaggaaagauuguucauaccuccacacucucuggcagcgcccaacacguggaggaaugcuccugcuauccuagauaccccggggugcggugugucugccgcgauaacuggaagggaagcaauagaccuaucguggacauuaacaucaaagaucacucuauuguuuccagcuacguguguucuggccuggucggcgacacgccccggaagaaugacagcuccucuagcucccauugccuugauccgaacaaugaggaagggggacacggcgugaaagggugggcuuucgacgauggaaacgacguuuggaugggccgcaccaucaaugagacaagcagacugggguaugagaccuuuaaggugaucgaaggauggucuaacccuaaauccaagcuccagauuaaucggcaggucaucguggaucgcggcgacagaagcggcuacucugggauuuucuccgucgagggaaaaagcuguaucaaccggugcuuuuauguggaacugauuagaggccgcaaggaggaaaccgagguucuguggacauccaauucuaucguggucuucugugggaccagcggaacauacggcacgggguccuggcccgauggcgccgaccucaaccugaugccuauuuga

SEQ ID NO: 217654 - RNA, 1410 nt, Artificial Sequence
  derived and/or modified CDS sequence (opt5) from neuraminidase__InfluenzaA__AIJ10808
augaaccccaaucagaagaucauuaccaucggcagcgugucccugacaauuucuacgaucugcuucuuuaugcaaauugccauccucaucaccacagucacccugcacuucaaacaguacgaguuuaacagcccuccgaauaaccagguuaugcuuugugaacccacaauuaucgagagaaauauuaccgaaaucguguaucugacaaacaccacgauugagaaggaaaucugcccuaaacccgcugaguaccggaauugguccaagccucagugugggauuaccggauucgcccccuuuucuaaagacaacagcauccgccucuccgcgggcggggauaucugggugacaagagagccuuaugucucuugcgacccggauaaguguuaccaauucgcucugggacagggcaccacacuuaauaacgugcauagcaauaacaccguucgggaccgcacgcccuauagaacacugcucaugaaugaacugggggugccuuuucaccugggaaccaagcaggucugcauugccugguccucuagcuccugucaugauggcaaagccuggcuccacgugugcaucacaggcgacgauaagaacgcuaccgccagcuucauuuacaaugggcggcugguugacucuguggucuccuggagcaaagaggugcuucgcacccaggaaucugagugugugugcaucaacggaacauguacggucguuaugaccgauggcuccgcuagcgggaaggccgacacaaaaauucuguuuaucgaggaaggaaagaucgugcauaccuccacacucucuggcagcgcgcaacacguggaggaaugcuccugcuaucccagauacccugggguccggugugugugccgcgauaacuggaagggaagcaauagacccauuguugacaucaacauuaaagaucacucuaucguguccagcuacgucuguucuggccuggugggcgacaccccgcggaagaaugacagcuccucuagcucccauugccuugauccuaacaaugaggaagggggacacggcguuaaagggugggccuucgacgauggaaacgacguguggaugggccgcacgauuaaugagacaagcagacugggguaugagaccuuuaaggucaucgaaggauggucuaaccccaaauccaagcuccagaucaaucgccaggugauugucgaucggggcgacagaagcggcuacucugggaucuucuccguggagggaaaaagcuguauuaaccggugcuuuuauguugaacugaucagaggccgcaaggaggaaaccgaggugcuguggacauccaauucuauugucguguucugugggaccagcggaacauacggcacgggguccuggccugauggcgcugaccucaaccugaugcccaucuga

SEQ ID NO: 217655 - RNA, 1410 nt, Artificial Sequence; identical to SEQ ID NO: 214218
  derived and/or modified CDS sequence (opt5) from neuraminidase__InfluenzaA__AIJ10809

SEQ ID NO: 217656 - RNA, 1410 nt, Artificial Sequence; identical to SEQ ID NO: 214218
  derived and/or modified CDS sequence (opt5) from neuraminidase__InfluenzaA__AIJ10810

SEQ ID NO: 217657 - RNA, 1410 nt, Artificial Sequence
  derived and/or modified CDS sequence (opt5) from neuraminidase__InfluenzaA__AIJ10812
augaaccccaaucagaagaucauuaccaucggcagcgugucccugacaauuucuacgaucugcuucuuuaugcaaauugccauccucaucaccacagucacccugcacuucaaacaguacgaguuuaacagcccuccgaauaaccagguuaugcuuugugaacccacaauuauggagagaaaugugaccgaaaucguguaucugacaaacaccacgauugagaaggaaaucugcccuaaacccgcugaguaccggaauugguccaagccucagugugggauuaccggauucgcccccuuuucuaaagacaacagcauccgccucuccgcgggcggggauauuugggucacaagagagccuuaugugucuugcgacccggauaaguguuaccaauucgcucugggacagggcaccacacuuaauaacguucauagcaauaacaccgugcgggaccgcacgcccuauagaacacugcucaugaaugaacugggggucccuuuucaccugggaaccaaacaggugugcaucgccugguccucuagcuccugucaugauggcaaggccuggcuccacguuugcaucacaggcgacgauaagaacgcuaccgccagcuucauuuacaaugggcggcugguggacucugucguguccuggagcaaagagauccuucgcacccaggaaucugagugugugugcauuaacggaacauguacggucguuaugaccgauggcuccgcuagcgggaaggccgacacaaaaauccuguuuauugaggaaggaaagaucgugcauaccuccacacucucuggcagcgcgcaacacguggaggaaugcuccugcuaucccagauacccugggguccggugugugugccgcgauaacuggaagggaagcaauagacccaucguugacauuaacaucaaagaucacucuauuguguccagcuacgucuguucuggccuggugggcgacaccccgcggaagaaugacagcuccucuagcucccauugccuugauccuaacaaugaggaagggggacacggcguuaaagggugggccuucgacgauggaaacgacguguggaugggccgcacgaucaaugagacaagcagacugggguaugagaccuuuaaggucauugaaggauggucuaaccccaaauccaagcuccagaucaaucgccaggugaucgucgaucggggcgacagaagcggcuacucugggauuuucuccguggagggaaaaagcuguaucaaccggugcuuuuauguugaacugauuagaggccgcaaggaggaaaccgaggugcuguggacauccaauucuaucgucguguucugugggaccagcggaacauacggcacgggguccuggccugauggcgcugaccucaaccugaugcccauuuga

SEQ ID NO: 217658 - RNA, 1410 nt, Artificial Sequence
  derived and/or modified CDS sequence (opt5) from neuraminidase__InfluenzaA__AIJ10813
augaaccccaaucagaagaucauuaccaucggcagcgugucccugacaauuucuacgaucugcuucuuuaugcaaauugccauccucaucaccacagucacccugcacuucaaacaguacgaguuuaacagcccuccgaauaaccagguuaugcuuugugaacccacaauuauggagagaaaugugaccgaaaucguguaucugacaaacaccacgauugagaaggaaaucugcccuaaacccgcugaguaccggaauugguccaagccucagugugggauuaccggauucgcccccuuuucuaaagacaacagcauccgccucuccgcgggcggggauauuugggucacaagagagccuuaugugucuugcgacccggauaaguguuaccaauucgcucugggacagggcaccacacuuaauaacguucauagcaauaaccccgugcgggaccgcaccccuuauagaacgcugcucaugaaugaacuggggguccccuuucaccugggaacaaaacaggugugcaucgccugguccucuagcuccugucaugauggcaaggccuggcuccacguuugcaucaccggcgacgauaagaacgcuacagccagcuucauuuacaaugggcggcugguggacucugucguguccuggagcaaagagauccuucgcacccaggaaucugagugugugugcauuaacggaaccuguacagucguuaugacggauggcuccgcuagcgggaaggccgacaccaaaauccuguuuauugaggaaggaaagaucgugcauacauccacccucucuggcagcgcgcaacacguggaggaaugcuccugcuauccuagauaccccgggguccggugugugugccgcgauaacuggaagggaagcaauagaccgaucguugacauuaacaucaaagaucacucuauuguguccagcuacgucuguucuggccuggugggcgacacaccucggaagaaugacagcuccucuagcucccauugccuugaucccaacaaugaggaagggggacacggcguuaaagggugggccuucgacgauggaaacgacguguggaugggccgcaccaucaaugagacgagcagacugggguaugagacauuuaaggucauugaaggauggucuaacccuaaauccaagcuccagaucaaucgccaggugaucgucgaucggggcgacagaagcggcuacucugggauuuucuccguggagggaaaaagcuguaucaaccggugcuuuuauguugaacugauuagaggccgcaaggaggaaaccgaggugcuguggaccuccaauucuaucgucguguucugugggacaagcggaaccuacggcacaggguccuggcccgauggcgcugaccucaaccugaugcccauuuga

SEQ ID NO: 217659 - RNA, 1410 nt, Artificial Sequence
  derived and/or modified CDS sequence (opt5) from neuraminidase__InfluenzaA__AIJ10814
augaaccccaaucagaagaucauuaccaucggcagcgugucccugacaauuucuacgaucugcuucuuuaugcaaauugccauccucaucaccacagucacccugcacuucaaacaguacgaguuuaacagcccuccgaauaaccagguuaugcuuugugaacccacaauuguggagagaaauaucaccgaaauuguguaucugacaaacaccacgaucgagaaggaaauuugcccuaaacccgcugaguaccggaauugguccaagccucagugugggaucaccggauucgcccccuuuucuaaagacaacagcauucgccucuccgcgggcggggauaucugggucacaagagagccuuaugugucuugcgacccggauaaguguuaccaauucgcucugggacagggcaccacacuuaauaacguucauagcaauaacaccgugcgggaccgcacgcccuauagaacacugcucaugaaugaacugggggucccuuuucaccugggaaccaaacaggugugcaucgccugguccucuagcuccugucaugauggcaaggccuggcuccacguuugcauuacaggcgacgauaagaacgcuaccgccagcuucaucuacaaugggcggcugguggacucugucguguccuggagcaaagagauucuucgcacccaggaaucugagugugugugcaucaacggaacauguacggucguuaugaccgauggcuccgcuagcgggaaggccgacacaaaaauucuguuuaucgaggaaggaaagaucgugcauaccuccacacucucuggcagcgcgcaacacguggaggaaugcuccugcuaucccagauacccugggguccggugugugugccgcgauaacuggaagggaagcaauagacccauuguugacaucaacauuaaagaucacucuaucguguccagcuacgucuguucuggccuggugggcgacaccccgcggaagaaugacagcuccucuagcucccauugccuugauccuaacaaugaggaagggggacacggcguuaaagggugggccuucgacgauggaaacgacguguggaugggccgcacgauuaaugagacaagcagacugggguaugagaccuuuaaggucaucgaaggauggucuaaccccaaauccaagcuccagaucaaucgccaggugauugucgauaaaggcgaccggagcggcuacucugggaucuucuccguggagggaaagagcuguauuaacagaugcuuuuauguugaacugauccggggcagaaaggaggaaaccgaggugcuguggacauccaauucuauugucguguucugugggaccagcggaacauacggcacgggguccuggccugauggcgcugaccucaaccugaugcccaucuga

SEQ ID NO: 217660 - RNA, 1410 nt, Artificial Sequence
  derived and/or modified CDS sequence (opt5) from neuraminidase__InfluenzaA__AIJ10815
augaaccccaaucagaagaucauuaccaucggcagcgugucccugacaauuucuacgaucugcuucuuuaugcaaauugccauccucaucaccacagucacccugcacuucaaacaguacgaguuuaacagcccuccgaauaaccagguuaugcuuugugaacccacaauuaucgagagaaauauuaccgaaaucguguaucugacaaacaccacgauugagaaggaaaucugcccuaaacccgcugaguaccggaauugguccaagccucagugugggauuaccggauucgcccccuuuucuaaagacaacagcauccgccucuccgcgggcggggauaucugggugacaagagagccuuaugucucuugcgacccggauaaguguuaccaauucgcucugggacagggcaccacacuuaauaacgugcauagcaauaacaccguucgggaccgcacgcccuauagaacacugcucaugaaugaacugggggugccuuuucaccugggaaccaagcaggucugcauugccugguccucuagcuccugucaugauggcaaagccuggcuccacgugugcaucacaggcgacgauaagaacgcuaccgccagcuucauuuacaaugggcggcugguugacucuguggucuccuggagcaaagagauccuucgcacccaggaaucugagugugugugcauuaacggaacauguacgguggucaugaccgauggcuccgcuagcgggaaggccgacacaaaaauccuguuuaucgaggaaggaaagauuguucauaccuccacacucucuggcagcgcgcaacacguggaggaaugcuccugcuaucccagauacccuggggugcggugugucugccgcgauaacuggaagggaagcaauagacccaucguggacauuaacaucaaagaucacucuauuguuuccagcuacguguguucuggccuggucggcgacaccccgcggaagaaugacagcuccucuagcucccauugccuugauccuaacaaugaggaagggggacacggcgugaaagggugggccuucgacgauggaaacgacguuuggaugggccgcacgaucaaugagacaagcagacugggguaugagaccuuuaaggugaucgaaggauggucuaaccccaaauccaagcuccagauuaaucggcaggucaucguggaucgcggcgacagaagcggcuacucugggauuuucuccgucgagggaaaaagcuguaucaaccggugcuuuuauguggaacugauuagaggccgcaaggaggaaaaugagguucuguggaccuccaacucuaucguggucuucugugggacaagcggaaccuacggcacaggguccuggccugauggcgcugaccucaaucugaugcccauuuga

SEQ ID NO: 217661 - RNA, 1410 nt, Artificial Sequence
  derived and/or modified CDS sequence (opt5) from neuraminidase__InfluenzaA__AIJ10816
augaaccccaaucagaagaucauuaccaucggcagcgugucccugacaauuucuacgaucugcuucuuuaugcaaauugccauccucaucaccacagucacccugcacuucaaacaguacgaguuuaacagcccuccgaauaaccagguuaugcuuugugaacccacaauuaucgagagaaauauuaccgaaaucguguaucugacaaacaccacgauugagaaggaaaucugcccuaaacccgcugaguaccggaauugguccaagccucagugugggauuaccggauucgcccccuuuucuaaagacaacagcauccgccucuccgcgggcggggauaucugggugacaagagagccuuaugucucuugcgacccggauaaguguuaccaauucgcucugggacagggcaccacacuuaauaacgugcauagcaauaacaccguucgggaccgcacgcccuauagaacacugcucaugaaugaacugggggugccuuuucaccugggaaccaagcaggucugcauugccugguccucuagcuccugucaugauggcaaagccuggcuccacgugugcaucacaggcgacgauaagaacgcuaccgccagcuucauuuacaaugggcggcugguugacucuguggucuccuggagcaaagagauccuucgcacccaggaaucugagugugugugcauuaacggaacauguacgguggucaugaccgauggcuccgcuagcgggaaggccgacacaaaaauccuguuuaucgaggaaggaaagauuguucauaccuccacacucucuggcagcgcgcaacacguggaggaaugcuccugcuaucccagauacccuggggugcggugugucugccgcgauaacuggaagggaagcaauagacccaucguggacauuaacaucaaagaucacucuauuguuuccagcuacguguguucuggccuggucggcgacaccccgcggaagaaugacagcuccucuagcucccauugccuugauccuaacaaugaggaagggggacacggcgugaaagggugggccuucgacgauggaaacgacguuuggaugggccgcacgaucaaugagacaagcagacugggguaugagaccuuuaaggugaucgaaggauggucuaaccccaaauccaagcuccagauuaaucggcaggucaucguggaucgcggcgacagaagcggcuacucugggauuuucuccgucgagggaaaaggcuguaucaaccggugcuuuuauguggaacugauuagagggcgcaaggaggaaaccgagguucuguggacaagcaauuccaucguggucuucuguggaaccucuggcacauacgggacgggcagcuggccugauggagcugaccucaaccugaugcccauuuga

SEQ ID NO: 217662 - RNA, 1410 nt, Artificial Sequence; identical to SEQ ID NO: 214218
  derived and/or modified CDS sequence (opt5) from neuraminidase__InfluenzaA__AIJ10817

SEQ ID NO: 217663 - RNA, 1410 nt, Artificial Sequence; identical to SEQ ID NO: 214218
  derived and/or modified CDS sequence (opt5) from neuraminidase__InfluenzaA__AIJ10818

SEQ ID NO: 217664 - RNA, 1410 nt, Artificial Sequence
  derived and/or modified CDS sequence (opt5) from neuraminidase__InfluenzaA__AIJ10819
augaaccccaaucagaagaucauuaccaucggcagcgugucccugacaauuucuacgaucugcuucuuuaugcaaauugccauccucaucaccacagucgcucugcacuucaaacaguacgaguuuaacagcccuccgaauaaccagguuaugcuuugugaacccaccauuaucgagagaaauauuacagaaaucguguaucugaccaacacaaccauugagaaggaaaucugcccuaaacccgccgaguaccggaauugguccaagccucagugugggauuacgggauucgcgcccuuuucuaaagacaacagcauccgccucuccgcuggcggggauaucugggugaccagagagccuuaugucucuugcgacccggauaaguguuaccaauucgcccugggacagggcacaacccuuaauaacgugcauagcaauaacacaguucgggaccgcacccccuauagaacgcugcucaugaaugaacugggggugccuuuucaccugggaacaaagcaggucugcauugccugguccucuagcuccugucaugauggcaaggcuuggcuccacgugugcaucaccggcgacgauaaaaacgccacagcuagcuucauuuacaaugggcggcugguugacucuguggucuccuggagcaaagagauccuucgcacccaggaaucugagugugugugcauuaacggaaccuguacaguggucaugacggauggcuccgccagcgggaaggcgaacaccaaaauccuguuuaucgaggaaggaaagauuguucauacauccacccucucuggcagcgcccaacacguggaggaaugcuccugcuaucccagauacccuggggugcggugugucugccgcgacaauuggaagggaagcaacagacccaucguggauauuaauaucaaagaccacucuauuguuuccagcuacguguguucuggccuggucggcgauacaccgcggaagaacgacagcuccucuagcucccauugccuugacccuaauaacgaggaagggggacacggcgugaaagggugggcuuucgaugacggaaaugauguuuggaugggccgcaccaucaacgagacgagcagacugggguaugagacauuuaaggugaucgaaggauggucuaaucccaaauccaagcuccagauuaaccggcaggucaucguggaccgcggcgauagaagcggcuacucugggauuuucuccgucgagggaaaaagcuguaucaaucggugcuuuuauguggaacugauuagaggccgcaaggaggaaaccgagguucuguggaccuccaacucuaucguggucuucugugggacaagcggaaccuacggcacaggguccuggccugacggcgccgaucucaaucugaugcccauuuga

SEQ ID NO: 217665 - RNA, 1410 nt, Artificial Sequence; identical to SEQ ID NO: 214218
  derived and/or modified CDS sequence (opt5) from neuraminidase__InfluenzaA__AIJ10820

SEQ ID NO: 217666 - RNA, 1410 nt, Artificial Sequence; identical to SEQ ID NO: 214218
  derived and/or modified CDS sequence (opt5) from neuraminidase__InfluenzaA__AIJ10821

SEQ ID NO: 217667 - RNA, 1410 nt, Artificial Sequence
  derived and/or modified CDS sequence (opt5) from neuraminidase__InfluenzaA__AIJ10822
augaaccccaaucagaagaucauuaccaucggcagcgugucccugacaauuucuacgaucugcuucuuuaugcaaauugccauccucaucaccacagucacccugcacuucaaacaguacgaguuuaacagcccuccgaauaaccagguuaugcuuugugaacccacaauuaucgagagaaauauuaccgaaaucguguaucugacaaacaccacgauugagaaggaaaucugcccuaaacccgcugaguaccggaauugguccaagccucagugugggauuaccggauucgcccccuuuucuaaagacaacagcauccgccucuccgcgggcggggauaucugggugacaagagagccuuaugucucuugcgacccggauaaguguuaccaauucgcucugggacagggcaccacacuuaauaacgugcauagcaauaacaccguucgggaccgcacgcccuauagaacacugcucaugaaugaacugggggugccuuuucaccugggaaccaagcaggucugcauugccugguccucuagcuccugucaugauggcaaagccuggcuccacgugugcaucacaggcgacgauaagaacgcuaccgccagcuucauuuacaaugggcggcugguugacucuguggucuccuggagcaaagauauccuucgcacccaggagucugaaugugugugcauuaacggaacauguacgguggucaugaccgacggcuccgcuagcgggaaggccgauacaaaaauccuguuuaucgaggagggaaagauuguucauaccuccacacucucuggcagcgcgcaacacguggaagagugcuccugcuaucccagauacccuggggugcggugugucugccgcgacaacuggaagggaagcaauagacccaucguggauauuaacaucaaagaccacucuauuguuuccagcuacguguguucuggccuggucggcgacaccccgcggaagaaugauagcuccucuagcucccauugccuugacccuaacaaugaagaagggggacacggcgugaaagggugggccuucgaugacggaaacgauguuuggaugggccgcacgaucaaugagacaagcagacugggguaugagaccuuuaaggugaucgagggauggucuaaccccaaauccaagcuccagauuaaucggcaggucaucguggaccgcggcgauagaagcggcuacucugggauuuucuccgucgaaggaaaaagcuguaucaaccggugcuuuuauguggagcugauuagaggccgcaaggaagagaaugaaguucuguggaccuccaacucuaucguggucuucugugggacaagcggaaccuacggcacaggguccuggccugacggcgcugaucucaaucugaugcccauuuga

SEQ ID NO: 217668 - RNA, 1410 nt, Artificial Sequence
  derived and/or modified CDS sequence (opt5) from neuraminidase__InfluenzaA__AIJ10823
augaaccccaaucagaagaucauuaccaucggcagcgugucccugacaauuucuacgaucugcuucuuuaugcaaauugccauccucaucaccacagucacccugcacuucaaccaguacgaguuuaauagcccuccgaacaaucagguuaugcuuugugaacccacaauuaucgagagaaacauuaccgaaaucguguaucugacaaccacgaccauugagaaagaaaucugcccuaagcccgcugaguaccggaauugguccaaaccucagugugggauuacaggauucgcccccuuuucuaaggacaacagcauccgccucuccgcgggcggggauaucugggugaccagagagccuuaugucucuugcgacccggauaaauguuaccaauucgcucugggacagggcacaacccuuaauaacgugcauagcaauaacacgguucgggaccgcacacccuuuagaacccugcucaugaaugaacugggggugccuuuccaccugggaacaaagcaggucugcauugccugguccucuucuuccugucaugauggcaaggccuggcuccacgugugcaucaccggcgacgauaaaaacgcuaccgccagcuuuauuuauaaugggcggcugguugacucuguggucuccuggagcaaggagauccuucgcacacaggaaucugagugugugugcauuaacggaacguguaccguggucaugacagauggcuccgcuagcgggaaagccguuaccaagauccuguucaucgaggaaggaaaaauugugcauacauccacccucucuggcagcgcgcaacacguggaggaaugcuccugcuaccccagauauccugggguccggugugugugccgcgacaacuggaagggaagcaauagacccaucguugauauuaacaucaaggaccacucuauuguguccggcuacgucuguagcggccuggugggggauacgccgcggaaaaaugacucuagcuccucuagccauugccuuaacccuaauaacgaggaaggaggccacgggguuaagggaugggccuuugacgauggcaaugacguguggauggggcgcacaaucaacgagaccuccagacugggauacgagaccuucaaagucaucgaaggcuggagcaaucccaagucuaaacuccagauuaaccgccaggugaucgucgaucggggcgacagauccggguauagcggaauuuuuagcguggagggcaaguccuguaucaaucggugcuucuacguugaacugauuagagggcgcaaagaggaaacagaggugcuguggaccagcaacuccaucgucguguucuguggaacaucuggcacguaugggaccggcagcuggccugauggagcugaccucaaucugaugcccauuuga

SEQ ID NO: 217669 - RNA, 1410 nt, Artificial Sequence
  derived and/or modified CDS sequence (opt5) from neuraminidase__InfluenzaA__AIJ10824
augaaccccaaucagaagaucauuaccaucggcagcgugucccugacaauuucuacgaucugcuucuuuaugcaaauugccauccucaucaccacagucacccugcacuucaaacaguacgaguuuaacagcccuccgaauaaccagguugugcuuugugaacccacaauuaucgagagaaauauuaccgaaaucguguaucugacaaacaccacgauugagaaggaaaucugcccuaaacccgcugaguaccggaauugguccaagccucagugugggauuaccggauucgcccccuuuucuaaagacaacagcauccgccucuccgcgggcggggauaucugggucacaagagagccuuaugugucuugcgacccggauaaguguuaccaauucgcucugggacagggcaccacacuuaauaacguucauagcaauaacaccgugcgggaccgcacgcccuauagaacacugcucaugaaugaacugggggucccuuuucaccugggaaccaaacaggugugcauugccugguccucuagcuccugucaugauggcaaggccuggcuccacguuugcaucacaggcgacgauaagaacgcuaccgccagcuucauuuacaaugggcggcugguggacucugucguguccuggagcaaagagauccuucgcacccaggaaucugagugugugugcauuaacggaacauguacggucguuaugaccgauggcuccgcuagcgggaaggccgacacaaaaauccuguuuaucgaggaaggaaagauugugcauaccuccacacucucuggcagcgcgcaacacguggaggaaugcuccugcuaucccagauacccugggguccggugugugugccgcgauaacuggaagggaagcaauagacccaucguugacauuaacaucaaagaucacucuauuguguccagcuacgucuguucuggccuggugggcgacaccccgcggaagaaugacagcuccucuagcucccauugccuugauccuaacaaugaggaagggggacacggcguuaaagggugggccuucgacgauggaaacgacguguggaugggccgcacgaucaaugagacaagcagacugggguaugagaccuuuaaggucaucgaaggauggucuaaccccaaauccaagcuccagauuaaucgccaggugaucgucgaucggggcgacagaagcggcuacucugggauuuucuccguggagggaaaaagcuguaucaaccggugcuuuuauguugaacugauuagaggccgcaaggaggaaaccgaggugcuguggacauccaauucuaucgucguguucugugggaccagcggaacauacggcacgggguccuggccugauggcgcugaccucaaccugaugcccauuuga

SEQ ID NO: 217670 - RNA, 1410 nt, Artificial Sequence
  derived and/or modified CDS sequence (opt5) from neuraminidase__InfluenzaA__AIJ10827
augaaccccaaucagaagaucauuaccaucggcagcgugucccugacaauuucuacgaucugcuucuuuaugcaaauugccauccucaucaccacagucacccugcacuucaaacaguacgaguuuaacagcccuccgaauaaccagguuaugcuuugugaacccacaauuaucgagagaaauauuaccgaaaucguguaucugacaaacaccacgauugagaaggaaaucugcccuaaacccgcugaguaccggaauugguccaagccucagugugggauuaccggauucgcccccuuuucuaaagacaacagcauccgccucuccgcgggcggggauaucugggugacaagagagccuuaugucucuugcgacccggauaaguguuaccaauucgcucugggacagggcaccacacuuaauaacgugcauagcaauaacaccguucgggaccgcacgcccuauagaacacugcucaugaaugaacugggggugccuuuucaccugggaaccaagcaggucugcauugccugguccucuagcuccugucaugauggcaaagccuggcuccacgugugcaucacaggcgacgauaagaacgcuaccgccagcuucauuuacaaugggcggcugguugacucuguggucuccuggagcaaagauauccuucgcacccaggagucugaaugugugugcauuaacggaacauguacgguggucaugaccgacggcuccgcuagcgggaaggccgauacaaaaauccuguuuaucgaggagggaaagauuguucauaccuccacacucucuggcagcgcgcaacacguggaagagugcuccugcuaucccagauacccuggggugcggugugucugccgcgacaacuggaagggaagcaauagacccaucguggauauuaacaucaaagaccacucuauuguuuccagcuacguguguucuggccuggucggcgacaccccgcggaagaaugauagcuccucuagcucccauugccuugacccuaacaaugaagaagggggacacggcgugaaagggugggccuucgaugacggaaacgauguuuggaugggccgcacgaucaaugagacaagcagacugggguaugagaccuuuaaggugaucgagggauggucuaaccccaaauccaagcuccagauuaaucggcaggucaucguggaccgcggcgauagaagcggcuacucugggauuuucuccaucgaaggaaaaagcuguauuaaccggugcuuuuaugucgagcugaucagaggccgcaaggaagagaccgaagugcuguggacauccaauucuauuguuguguucugugggaccagcggaacauacggcacgggguccuggccugacggcgcugaucucaaccugaugcccaucuga

SEQ ID NO: 217671 - RNA, 1410 nt, Artificial Sequence
  derived and/or modified CDS sequence (opt5) from neuraminidase__InfluenzaA__AIJ10828
augaaccccaaucagaagaucauuaccaucggcagcgugucccugacaauuucuacgaucugcuucuuuaugcaaauugccauccucaucaccacagucacccugcacuucaaacaguacgaguuuaacagcccuccgaauaaccagguuaugcuuugugaacccacaauuaucgagagaaauauuaccgaaaucguguaucugacaaacaccacgauugagaaggaaaucugcccuaaacccgcugaguaccggaauugguccaagccucagugugggauuaccggauucgcccccuuuucuaaagacaacagcauccgccucuccgcgggcggggauaucugggugacaagagagccuuaugucucuugcgacccggauaaguguuaccaauucgcucugggacagggcaccacacuuaauaacgugcauagcaauaacaccguucgggaccgcacgcccuauagaacacugcucaugaaugaacugggggugccuuuucaccugggaaccaagcaggucugcauugccugguccucuagcuccugucaugauggcaaagccuggcuccacgugugcaucacaggcgacgauaagaacgcuaccgccagcuucauuuacaaugggcggcugguugacucuguggucuccuggagcaaagauauccuucgcacccaggagucugaaugugugugcauuaacggaacauguacgguggucaugaccgacggcuccgcuagcgggaaggccgauacaaaaauccuguuuaucgaggagggaaagauuguucauaccuccacacucucuggcagcgcgcaacacguggaagagugcuccugcuaucccagauacccuggggugcggugugucugccgcgacaacuggaagggaagcaauagacccaucguggauauuaacaucaaagaccacucuauuguuuccagcuacguguguucuggccuggucggcgacaccccgcggaagaaugauagcuccucuagcucccauugccuugacccuaacaaugaagaagggggacacggcgugaaagggugggccuucgaugacggaaacgauguuuggaugggccgcacgaucaaugagacaagcagacugggguaugagaccuuuaaggugaucgagggauggucuaaccccaaauccaagcuccagauuaaucggcaggucaucguggaccgcggcgauagaagcggcuacucugggauuuucuccaucgaaggaaaaagcuguauuaaccggugcuuuuaugucgagcugaucagaggccgcaaggaagagaccgaagugguuuggacauccaauucuauuguggucuucugugggaccagcggaacauacggcacgggguccuggccugacggcgcugaucugaaccucaugcccaucuga

SEQ ID NO: 217672 - RNA, 1410 nt, Artificial Sequence
  derived and/or modified CDS sequence (opt5) from neuraminidase__InfluenzaA__AIJ10829
augaaccccaaucagaagaucauuaccaucggcagcgugucccugacaauuucuacgaucugcuucuuuaugcaaauugccauccucaucaccacagucacccugcacuucaaacaguacgaguuuaacagcccuccgaauaaccagguuaugcuuugugaacccacaauuaucgagagaaauauuaccgaaaucguguaucugacaaacaccacgauugagaaggaaaucugcccuaaacccgcugaguaccggaauugguccaagccucagugugggauuaccggauucgcccccuuuucuaaagacaacagcauccgccucuccgcgggcggggauaucugggugacaagagagccuuaugucucuugcgacccggauaauuguuaccaauucgcucugggacagggcaccacacuuaacaaugugcauagcaacaauaccguucgggaccgcacgcccuauagaacacugcucaugaacgaacugggggugccuuuucaccugggaaccaagcaggucugcauugccugguccagcagcuccugucaugauggcaaggccuggcuccacgugugcaucacaggcgacgauaaaaaugcuaccgccagcuucauuuacaacgggcggcugguugacucuguggucuccuggagcaaggauauccuucgcacccaggagucugaaugugugugcauuaacggaacauguacgguggucaugaccgacggcuccgcuagcgggaaagccgauacaaagauccuguuuaucgaggagggaaaaauuguucauaccuccacacucucuggcagcgcgcaacacguggaagagugcuccugcuaucccagauacccuggggugcggugugucugccgcgacaauuggaagggaagcaacagacccaucguggauauuaauaucaaggaccacucuauuguuuccagcuacguguguucuggccuggucggcgacaccccgcggaaaaacgauagcuccucuagcucccauugccuugacccuaauaacgaagagggggaucacggagugaagggcugggccuucgacgaugggaaugacguuuggaugggacgcacgaucaacgaaacaagcagacugggcuaugagaccuuuaaagugaucgagggguggucuaaucccaaguccaaacuccagauuaaccggcaggucaucguggaucgcggagacagaagcggcuacucuggcauuuucuccaucgaagggaagucuuguauuaaucggugcuuuuaugucgagcugaucagaggacgcaaagaagagaccgaagugcuguggacauccaacucuauuguuguguucuguggcaccagcgggacauacggaacgggcuccuggccugauggggcugaccucaaucugaugcccaucuga

SEQ ID NO: 217673 - RNA, 1410 nt, Artificial Sequence
  derived and/or modified CDS sequence (opt5) from neuraminidase__InfluenzaA__AIJ10830
augaaccccaaucagaagaucauuaccaucggcagcgugucccugacaauuucuacgaucugcuucuuuaugcaaauugccauccucaucaccacagucacccugcacuucaaacaguacgaguuuaacagcccuccgaauaaccagguuaugcuuugugaacccacaauuaucgagagaaauauuaccgaaaucguguaucugacaaacaccacgauugagaaggaaaucugcccuaaacccgcugaguacaagaauugguccaaaccucagugugggauuaccggauucgcccccuuuucuaaggacaacagcauccggcucuccgcgggcggggauaucugggugacacgcgagccuuaugucucuugcgacccggauaaguguuaccaauucgcucugggacagggcaccacacuuaauaacgugcauagcaauaacaccguuagagaccggacgcccuaucgcacacugcucaugaaugaacugggggugccuuuucaccugggaaccaaacaggucugcauugccugguccucuagcuccugucaugauggcaaggccuggcuccacgugugcaucacaggcgacgauaaaaacgcuaccgccagcuucauuuacaaugggagacugguugacucuguggucuccuggagcaaggauauccuucggacccaggagucugaaugugugugcauuaacggaacauguacgguggucaugaccgacggcuccgcuagcgggaaagccgauacaaagauccuguuuaucgaggagggaaagauuguucauaccuccacacucucuggcagcgcgcaacacguggaagagugcuccugcuauccccgcuacccuggggugagaugugucugccgggacaacuggaaaggaagcaaucgccccaucguggauauuaacaucaaggaccacucuauuguuuccagcuacguguguucuggccuggucggcgacaccccgcggaaaaaugauagcuccucuagcucccauugccuugacccuaacaaugaagaagggggacacggcgugaaggggugggccuucgaugacggaaacgauguuuggaugggcagaacgaucaaugagacaagccgccugggguaugagaccuuuaaagugaucgagggauggucuaaccccaaguccaaacuccagauuaauagacaggucaucguggaccggggcgaucgcagcggcuacucugggauuuucuccaucgaaggaaagagcuguauuaacagaugcuuuuaugucgagcugauccggggcagaaaggaagagaccgaagugcuguggacauccaauucuauuguuguguucugugggaccagcggaacauacggcacgggguccuggccugacggcgcugaucucaaccugaugcccaucuga

SEQ ID NO: 217674 - RNA, 1410 nt, Artificial Sequence; identical to SEQ ID NO: 217670
  derived and/or modified CDS sequence (opt5) from neuraminidase__InfluenzaA__AIJ10831

SEQ ID NO: 217675 - RNA, 1410 nt, Artificial Sequence; identical to SEQ ID NO: 217670
  derived and/or modified CDS sequence (opt5) from neuraminidase__InfluenzaA__AIJ10832

SEQ ID NO: 217676 - RNA, 1410 nt, Artificial Sequence
  derived and/or modified CDS sequence (opt5) from neuraminidase__InfluenzaA__AIJ10834
augaaccccaaucagaagaucauuaccaucggcagcgugucccugacaauuucuacgaucugcuucuuuaugcaaauugccauccucaucaccacagucacccugcacuucaaacaguacgaguuuaacagcccuccgaauaaccagguuaugcuuugugaacccacaauuaucgagagaaauauuaccgaaaucguguaucugacaaacaccacgauugagaaggaaaucugcccuaaacccgcugaguaccggaauugguccaagccucagugugggauuaccggauucgcccccuuuucuaaagacaacagcauccgccucuccgcgggcggggauaucugggugacaagagagccuuaugucucuugcgacccggauaaguguuaccaauucgcucugggacagggcaccacacuuaauaacgugcauagcaauaacaccguucgggaccgcacgcccuauagaacacugcucaugaaugaacugggggugccuuuucaccugggaaccaagcaggucugcauugccugguccucuagcuccugucaugauggcaaagccuggcuccacgugugcaucacaggcgacgauaagaacgcuaccgccagcuucauuuacaaugggcggcugguugacucuguggucuccuggagcaaagauauccuucgcacccaggagucugaaugugugugcauuaacggaacauguacgguggucaugaccgacggcuccgcuagcgggaaggccgauacaaaaauccuguuuaucgaggagggaaagauuguucauaccuccacacucucuggcagcgcgcaacacguggaagagugcuccugcuaucccagauacccuggggugcggugugucugccgcgacaacuggaagggaagcaauagacccaucguggauauuaacaucaaagaccacucuauuguuuccagcuacguguguucuggccuggucggcgacaccccgcggaagaaugauagcuccucuagcucccauugccuugacccuaacaaugaagaagggggacacggcgugaaagggugggccuucgaugacggaaacgauguuuggaugggccgcacgaucaaugagacaagcagacugggguaugagaccuuuaaggugaucgagggauggucuaaccccaaauccaagcuccagauuaaucggcaggucaucguggaccgcggcgauagaagcggcuacucugggauuuucuccaucgaaagcaaauccuguauuaaccggugcuuuuaugucgagcugaucagaggacgcaaggaagagaccgaagugcuguggacaucuaauagcauuguuguguucuguggcaccuccgggacauacggaacgggcucuuggccugacggggcugaucucaaccugaugcccaucuga

SEQ ID NO: 217677 - RNA, 1410 nt, Artificial Sequence
  derived and/or modified CDS sequence (opt5) from neuraminidase__InfluenzaA__AIJ10835
augaaccccaaucagaagaucauuaccaucggcagcgugucccugacaauuucuacgaucugcuucuuuaugcaaauugccauccucaucaccacagucacccugcacuucaaacaguacgaguuuaacagcacaccuaauaaccagguuaugcuuugugaaccgaccauuaucgagagaaauauuacagaaaucguguaucugaccaacacgaccauugagaaggaaaucugccccaaaccugcugaguaccggaauugguccaagccccagugugggauuacaggauucgccccuuuuucuaaagacaacagcauccgccucuccgcgggcggggauaucugggugaccagagagcccuaugucucuugcgacccugauaaguguuaccaauucgcucugggacagggcacaacccuuaauaacgugcauagcaauaacacgguucgggaccgcacaccguauagaacccugcucaugaaugaacugggggugcccuuucaccugggaacaaagcaggucugcauugccugguccucuagcuccugucaugauggcaaagccuggcuccacgugugcaucaccggcgacgauaagaacgcuaccgccagcuucauuuacaaugggcggcugguugacucuguggucuccuggagcaaagauauccuucgcacacaggagucugaaugugugugcauuaacggaacguguaccguggucaugacagacggcuccgcuagcgggaaggccgauaccaaaauccuguuuaucgaggagggaaagauuguucauacauccacccucucuggcagcgcgcaacacguggaagagugcuccugcuauccuagauaccccggggugcggugugucugccgcgacaacuggaagggaagcaauagaccuaucguggauauuaacaucaaagaccacucuauuguuuccagcuacguguguucuggccuggucggcgacacgccccggaagaaugauagcuccucuagcucccauugccuugacccgaacaaugaagaagggggacacggcgugaaagggugggccuucgaugacggaaacgauguuuggaugggccgcacaaucaaugagaccagcagacugggguaugagaccuuuaaggugaucgagggauggucuaacccuaaauccaagcuccagauuaaucggcaggucaucguggaccgcggcgauagaagcggcuacucugggauuuucuccaucgaaggaaaaagcuguauuaaccggugcuuuuaugucgagcugaucagaggccgcaaggaagagacagaagugcuguggaccuccaauucuauuguuguguucugugggacaagcggaacguacggcaccggguccuggcccgacggcgcugaucucaaccugaugccuaucuga

SEQ ID NO: 217678 - RNA, 1410 nt, Artificial Sequence; identical to SEQ ID NO: 217670
  derived and/or modified CDS sequence (opt5) from neuraminidase__InfluenzaA__AIJ10836

SEQ ID NO: 217679 - RNA, 1410 nt, Artificial Sequence
  derived and/or modified CDS sequence (opt5) from neuraminidase__InfluenzaA__AIJ10837
augaaccccaaucagaagaucauuaccaucggcagcgugucccugacaauuucuacgaucugcuucuuuaugcaaauugccauccucaucaccacagucacccugcacuucaaacaguacgaguuuaacagcccuccgaauaaccagguuaugcuuugugaacccacaauuaucgagagaaauauuaccgaaaucguguaucugacaaacaccacgauugagaaggaaaucugcccuaaacccgcugaguaccggaauugguccaagccucagugugggauuaccggauucgcccccuuuucuaaagacaacagcauccgccucuccgcgggcggggauaucugggugacaagagagccuuaugucucuugcgacccggauaaguguuaccaauucgcucugggacagggcaccacacuuaauaacgugcauagcaauaacaccguucgggaccgcacgcccuauagaacacugcucaugaaugaacugggggugccuuuucaccugggaaccaagcaggucugcauugccugguccucuagcuccugucaugauggcaaagccuggcuccacgugugcaucacaggcgacgauaagaacgcuaccgccagcuucauuuacaaugggcggcugguugacucuguggucuccuggagcaaagauauccuucgcacccaggagucugaaugugugugcauuaacggaacauguacgguggucaugaccgacggcuccgcuagcgggaaggccgauacaaaaauccuguuuaucgaggagggaaagauuauccauaccuccacacucucuggcagcgcgcaacacguugaagagugcuccugcuaucccagauacccuggggugcggugugugugccgcgacaacuggaagggaagcaauagacccauugucgauaucaacauuaaagaccacucuaucguguccagcuacguuuguucuggccuggugggcgacaccccgcggaagaaugauagcuccucuagcucccauugccuugacccuaacaaugaagaagggggacacggcgucaaagggugggccuucgaugacggaaacgauguguggaugggccgcacgaucaaugagacaagcagacugggguaugagaccuuuaagguuauugagggauggucuaaccccaaauccaagcuccagaucaaucgccaggugauugucgaccggggcgauagaagcggcuacucugggaucuucuccauugaaggaaaaagcuguaucaaccggugcuuuuauguggagcugauuagaggccgcaaggaagagaccgaaguccuguggacauccaauucuaucgugguuuucugugggaccagcggaacauacggcacgggguccuggccugacggcgcugaucucaaccugaugcccaucuga

SEQ ID NO: 217680 - RNA, 1410 nt, Artificial Sequence; identical to SEQ ID NO: 217670
  derived and/or modified CDS sequence (opt5) from neuraminidase__InfluenzaA__AIJ10838

SEQ ID NO: 217681 - RNA, 1410 nt, Artificial Sequence
  derived and/or modified CDS sequence (opt5) from neuraminidase__InfluenzaA__AIJ10841
augaaccccaaucagaagaucauuaccaucggcagcgugucccugacaauuucuacgaucugcuucuuuaugcaaauugccauccucaucaccacagucacccugcacuucaaacaguacgaguuuaacagcccuccgaauaaccagguuaugcuuugugaacccacaauuaucgagagaaauauuaccgaaaucguguaucugacaaacaccacgauugagaaggaaaucugcccuaaacccgcugaguaccggaauugguccaagccucagugugggauuaccggauucgcccccuuuucuaaagacaacagcauccgccucuccgcgggcggggauaucugggugacaagagagccuuaugucucuugcgacccggauaaguguuaccaauucgcucugggacagggcaccacacuuaauaacgugcauagcaauaacaccguucgggaccgcacgcccuauagaacacugcucaugaaugaacugggggugccuuuucaccugggaaccaagcaggucugcauugccugguccucuagcuccugucaugauggcaaagccuggcuccacgugugcaucacaggcgacgauaagaacgcuaccgccagcuucauuuacaaugggcggcugguugacucuguggucuccuggagcaaagauauccuucgcacccaggagucugaaugugugugcauuaacggaacauguacgguggucaugaccgacggcuccgcuagcggggaggccgauacaaagauccuguuuaucgaggaaggaaaaauuguucauaccuccacacucucuggcagcgcgcaacacguggaggaaugcuccugcuaucccagauacccuggggugcggugugucugccgcgacaacuggaagggaagcaauagacccaucguggauauuaacaucaaggaccacucuauuguuuccagcuacguguguucuggccuggucggcgacaccccgcggaaaaaugauagcuccucuagcucccauugccuugacccuaacaaugaggaagggggacacggcgugaaggggugggccuucgaugacggaaacgauguuuggaugggccgcacgaucaaugagacaagcagacugggguaugagaccuuuaaagugaucgaaggauggucuaaccccaaguccaaacuccagauuaaucggcaggucaucguggaccgcggcgauagaagcggcuacucugggauuuucuccaucgagggaaagagcuguauuaaccggugcuuuuaugucgaacugaucagaggccgcaaagaggaaaccgaggugcuguggacauccaauucuauuguuguguucugugggaccagcggaacauacggcacgggguccuggccugacggcgcugaucucaaccugaugcccaucuga

SEQ ID NO: 217682 - RNA, 1410 nt, Artificial Sequence
  derived and/or modified CDS sequence (opt5) from neuraminidase__InfluenzaA__AIJ10842
augaaccccaaucagaagaucauuaccaucggcagcgugucccugacaauuucuacgaucugcuucuuuaugcaaauugccauccucaucaccacagucacccugcacuucaaacaguacgaguuuaacccuccgcccaauaaccagguuaugcuuugugaaccuacaauuaucgagagaaauauuaccgaaaucguguaucugacaaacaccacgauugagaaggaaaucugccccaaaccugcugaguaccggaauuggagcaagccccagugugggauuaccggauucgccccuuuuuccaaagacaacucuauccgccucagcgcgggcggggauaucugggugacaagagagccguaugucuccugcgaccccgauaaguguuaccaauucgcucugggacagggcaccacacuuaauaacgugcauucuaauaacaccguucgggaccgcacgccuuauagaacacugcucaugaaugaacugggggugcccuuucaccugggaaccaagcaggucugcauugccuggagcuccagcucuugucaugauggcaaagccuggcuccacgugugcaucacaggcgacgauaagaacgcuaccgccuccuucauuuacaaugggcggcugguugacagcguggucucuugguccaaagauauccuucgcacccaggagagcgaaugugugugcauuaacggaacauguacgguggucaugaccgacggcucugcuuccgggaaggccgauacaaaaauccuguuuaucgaggagggaaagauuguucauaccagcacacucuccggcucugcgcaacacguggaagagugcagcugcuauccuagauaccccggggugcggugugucugccgcgacaacuggaagggauccaauagaccgaucguggauauuaacaucaaagaccacagcauuguuucuuccuacguguguagcggccuggucggcgacaccccucggaagaaugauucuagcuccucuagccauugccuugaccccaacaaugaagaagggggacacggcgugaaagggugggccuucgaugacggaaacgauguuuggaugggccgcacgaucaaugagacauccagacugggguaugagaccuuuaaggugaucgagggauggagcaacccuaaaucuaagcuccagauuaaucggcaggucaucguggaccgcggcgauagauccggcuacagcgggauuuucucuaucgaaggaaaauccuguauuaaccggugcuuuuaugucgagcugaucagaggccgcaaggaagagaccgaagugcuguggacaagcaauuccauuguuguguucugugggaccucuggaacauacggcacggggagcuggcccgacggcgcugaucucaaccugaugcccaucuga

SEQ ID NO: 217683 - RNA, 1410 nt, Artificial Sequence; identical to SEQ ID NO: 217670
  derived and/or modified CDS sequence (opt5) from neuraminidase__InfluenzaA__AIJ10843

SEQ ID NO: 217684 - RNA, 1410 nt, Artificial Sequence
  derived and/or modified CDS sequence (opt5) from neuraminidase__InfluenzaA__AIJ10844
augaaccccaaucagaagaucauuaccaucggcagcgugucccugacaauuucuacgaucugcuucuuuaugcagauugccauccucaucaccacagucacccugcacuucaaacaguacgaguuuaacagcccuccgaauaaccagguuaugcuuugugaacccacaauuaucgagagaaauauuaccgaaaucguguaucugacaaacaccacgauugagaaggaaaucugcccuaaacccgcugaguaccggaauugguccaagccucagugugggauuaccggauucgcccccuuuucuaaagacaacagcauccgccucuccgcgggcggggauaucugggugacaagagagccuuaugucucuugcgacccggauaaguguuaccaauucgcucugggacagggcaccacacuuaauaacgugcauagcaauaacaccguucgggaccgcacgcccuuuagaacacugcucaugaaugaacugggggugccuuuccaccugggaaccaagcaggucugcauugccugguccucuagcuccugucaugauggcaaagccuggcuccacgugugcaucacaggcgacgauaagaacgcuaccgccagcuuuauuuauaaugggcggcugguugacucuguggucuccuggagcaaagagauccuucgcacccaggaaucugagugugugugcauuaacggaacauguacgguggucaugaccgauggcuccgcuagcgggaaggccguuacaaaaauccuguucaucgaggaaggaaagauugugcauaccuccacacucucuggcagcgcgcaacacguggaggaaugcuccugcuaccccagauauccugggguccggugugugugccgcgacaacuggaagggaagcaauagacccaucguugauauuaacaucaaagaccacucuauuguguccggcuacgucuguagcggccuggugggggauaccccgcggaagaaugacucuagcuccucuggacauugccuugacccuaacaaugaggaaggcgggcacggaguuaaaggcugggccuuugaugacgggaacgauguguggaugggacgcacgaucaaugagacaagcagacugggcuacgagaccuucaaggucaucaaaggcugguccaaccccaagagcaaacuccagauuaaucggcaagugaucgucgaccgcggggauagaucuggauauuccggcauuuuuagcguggaagggaagucuuguaucaaccggugcuucuacguugagcugauuagaggacgcaaggaagagaccgaagugcuguggacauccaauagcaucgucguguucuguggcaccuccgggacauauggcacgggaucuuggccugacggcgcugaucucaaccugaugcccauuuga

SEQ ID NO: 217685 - RNA, 1410 nt, Artificial Sequence
  derived and/or modified CDS sequence (opt5) from neuraminidase__InfluenzaA__AIJ10845
augaaccccaaucagaagaucauuaccaucggcagcgugucccugacaauuucuacgaucugcuucuuuaugcaaauugccauccucaucaccacagucacccugcacuucaaacaguacgaguuuaacagcccuccgaauaaccagguuaugcuuugugaacccacaauuaucgagagaaauauuaccgaaaucguguaucugacaaacaccauuaucgagaaggaaauuugcccuaaacccgcugaguaccggaauugguccaagccucagugugggaucacgggauucgcccccuuuucuaaagacaacagcauccgccucuccgcgggcggggauauuugggugaccagagagccuuaugucucuugcgacccggauaaguguuaccaauucgcucugggacagggcacaacccuuaauaacgugcauagcaauaacacaguucgggaccgcacccccuuuagaacgcugcucaugaaugaacugggggugccuuuccaccugggaacaaagcaggucugcaucgccugguccucuagcuccugucaugauggcaaagccuggcuccacgugugcauuaccggcgacgauaagaacgcuacagccagcuuuaucuauaaugggcggcugguugacucuguggucuccuggagcaaagagauucuucgcacccaggaaucugagugugugugcaucaacggaaccuguacaguggucaugacggauggcuccgcuagcgggaaggccguuaccaaaauccuguucauugaggaaggaaagaucgugcauacauccacccucucuggcagcgcgcaacacguggaggaaugcuccugcuaccccagauauccugggguccggugugugugccgcgacaacuggaagggaagcaauagacccauuguugauaucaacauuaaagaccacucuaucguguccggcuacgucuguagcggccuggugggggauacaccgcggaagaaugacucuagcuccucuagccauugccuugacccuaacaaugaggaaggaggccacgggguuaaaggaugggccuuugaugacggcaacgauguguggauggggcgcaccaucaaugagacguccagacugggauacgagacauucaaggucauugaaggcuggagcaaccccaaaucuaagcuccagaucaaucgccaggugauugucgaccggggcgauagauccggguauagcggaaucuuuucuguggagggcaaauccuguauuaaccggugcuucuacguugaacugaucagagggcgcaaggaggaaaccgaggugcuguggaccagcaauuccauugucguguucuguggaacaucuggcaccuaugggacaggcagcuggccugacggagcugaucucaaccugaugcccaucuga

SEQ ID NO: 217686 - RNA, 1410 nt, Artificial Sequence
  derived and/or modified CDS sequence (opt5) from neuraminidase__InfluenzaA__AIJ10847
augaaccccaaucagaagaucauuaccaucggcagcgugucccugacaauuucuacgaucugcuucuuuaugcaaauugccauccucaucaccacagucacccugcacuucaaacaguacgaguuuaacagcccuccgaauaaccagguuaugcuuugugaacccacaauuaucgagagaaauauuaccgaaaucguguaucugacaaacaccacgauugagaaggaaaucugcccuaaacccgcugaguaccggaauugguccaagccucagugugggauuaccggauucgcccccuuuucuaaagacaacagcauccgccucuccgcgggcggggauaucugggugacaagagagccuuaugucucuugcgacccggauaaguguuaccaauucgcucugggacagggcaccacacuuaauaacgugcauagcaauaacaccguucgggaccgcacgcccuauagaacacugcucaugaaugaacugggggugccuuuucaccugggaaccaagcaggucugcauugccugguccucuucuuccugucaugauggcaaagccuggcuccacgugugcaucacaggcgacgauaagaacgcuaccgccagcuucauuuacaaugggcggcugguugacucuguggucuccuggagcaaagauauccuucgcacccaggagucugaaugugugugcauuaacggaacauguacgguggucaugaccgacggcuccgcuagcgggaaggccgauacaaaaauccuguuuaucgaggagggaaagauuguucauaccuccacacucucuggcagcgcgcaacacguggaagagugcuccugcuaucccagauacccuggggugcggugugucugccgcgacaacuggaagggaagcaauagacccaucguggauauuaacaucaaagaccacucuauuguuuccagcuacguguguucuggccuggucggcgacaccccgcggaagaaugauagcuucuccucuagccauugccuugacccuaacaaugaagaagggggacacggcgugaaagggugggccuuugaugacggaaacgauguuuggaugggccgcacgaucaaugagacauccagacugggguaugagaccuucaaggugaucgagggauggagcaaccccaaaucuaagcuccagauuaaucggcaggucaucguggaccgcggcgauagauccggcuacagcgggauuuuuagcaucgaaggaaaauccuguauuaaccggugcuucuaugucgagcugaucagaggccgcaaggaagagaccgaagugcuguggacaagcaauuccauuguuguguucugugggaccucuggaacauacggcacggggagcuggccugacggcgcugaucucaaccugaugcccaucuga

SEQ ID NO: 217687 - RNA, 1410 nt, Artificial Sequence; identical to SEQ ID NO: 217670
  derived and/or modified CDS sequence (opt5) from neuraminidase__InfluenzaA__AIJ10848

SEQ ID NO: 217688 - RNA, 1410 nt, Artificial Sequence
  derived and/or modified CDS sequence (opt5) from neuraminidase__InfluenzaA__AIJ10849
augaaccccaaucagaagaucauuaccaucggcagcgugucccugacaauuucuacgaucugcuucuuuaugcaaauugccauccucaucaccacagucacccugcacuucaaacaguacgaguuuaacagcccuccgaauaaccagguuaugcuuugugaacccacaauuaucgagagaaauauuaccgaaaucguguaucugacaaacaccacgauugagaaggaaaucugcccuaaacccgcugaguaccggaauugguccaagccucagugugggauuaccggauucgcccccuuuucuaaagacaacagcauccgccucuccgcgggcggggauaucugggugacaagagagccuuaugucucuugcgacccggauaaguguuaccaauucgcucugggacagggcaccacacuuaauaacgugcauagcaauaacaccguucgggaccgcacgcccuuuagaacacugcucaugaaugaacugggggugccuuuccaccugggaaccaagcaggucugcauugccugguccucuucuuccugucaugauggcaaagccuggcuccacgugugcaucacaggcgacgauaagaacgcuaccgccagcuuuauuuauaaugggcggcugguugacucuguggucuccuggagcaaagagauccuucgcacccaggaaucugagugugugugcauuaacggaacauguacgguggucaugaccgauggcuccgcuagcgggaaggccguuacaaaaauccuguucaucgaggaaggaaagauugugcauaccuccacacucucuggcagcgcgcaacacguggaggaaugcuccugcuaccccagauauccugggguccggugugugugccgcgacaacuggaagggaagcaauagacccaucguugauauuaacaucaaagaccacucuauuguguccggcuacgucuguagcggccuggugggggauaccccgcggaagaaugacucuagcuccucuagccauugccuugacccuaacaaugaggaaggaggccacgggguuaaaggaugggccuuugaugacggcaacgauguguggauggggcgcacgaucaaugagacauccagacugggauacgagaccuucaaggucaucgaaggcuggagcaaccccaaaucuaagcuccagauuaaucgccaggugaucgucgaccggggcgauagauccggguauagcggaauuuuuagcguggagggcaaauccuguaucaaccggugcuucuacguugaacugauuagagggcgcaaggaggaaaccgaggugcuguggacaagcaauuccaucgucguguucuguggaaccucuggcacauaugggacgggcagcuggccugacggagcugaucucaaccugaugcccauuuga

SEQ ID NO: 217689 - RNA, 1410 nt, Artificial Sequence; identical to SEQ ID NO: 217688
  derived and/or modified CDS sequence (opt5) from neuraminidase__InfluenzaA__AIJ10851

SEQ ID NO: 217690 - RNA, 1410 nt, Artificial Sequence; identical to SEQ ID NO: 217688
  derived and/or modified CDS sequence (opt5) from neuraminidase__InfluenzaA__AIJ10852

SEQ ID NO: 217691 - RNA, 1410 nt, Artificial Sequence; identical to SEQ ID NO: 217684
  derived and/or modified CDS sequence (opt5) from neuraminidase__InfluenzaA__AIJ10853

SEQ ID NO: 217692 - RNA, 1410 nt, Artificial Sequence; identical to SEQ ID NO: 217684
  derived and/or modified CDS sequence (opt5) from neuraminidase__InfluenzaA__AIJ10854

SEQ ID NO: 217693 - RNA, 1410 nt, Artificial Sequence
  derived and/or modified CDS sequence (opt5) from neuraminidase__InfluenzaA__AIJ10855
augaaccccaaucagaagaucauuaccaucggcagcgugucccugacaauuucuacgaucugcuucuuuaugcaaauugccauccucaucaccacagucacccugcacuucaaacaguacgaguuuaacagcccuccgaauaaccagguuaugcuuugugaacccacaauuaucgagagaaauauuaccgaaaucguguaucugacaaacaccacgauugagaaggaaaucugcccuaaacccgcugaguaccggaauugguccaagccucagugugggauuaccggauucgcccccuuuucuaaagacaacagcauccgccucuccgcgggcggggauaucugggugacaagagagccuuaugucucuugcgacccggauaaguguuaccaauucgcucugggacagggcaccacacuuaauaacgugcauagcaauaacaccguucgggaccgcacgcccuuuagaacacugcucaugaaugaacugggggugccuuuccaccugggaaccaagcaggucugcauugccugguccucuucuuccugucaugauggcaaagccuggcuccacgugugcaucacaggcgacgauaagaacgcuaccgccagcuuuauuuauaaugggcggcugguugacucuguggucuccuggagcaaagagauccuucgcacccaggaaucugagugugugugcauuaacggaacauguacgguggucaugaccgauggcuccgcuagcgggaaggccguuacaaaaauccuguucaucgaggaaggaaagauugugcauaccuccacacucucuggcagcgcgcaacacguggaggaaugcuccugcuaccccagauauccugggguccggugugugugccgcgacaacuggaagggaagcaauagacccaucguugauauuaacaucaaagaccacucuauuguguccggcuacgucuguagcggccuggugggggauaccccgcggaagaaugacucuagcuccucuagccauugccuugacccuaacaaugaggaaggagaucacggcguuaaagggugggccuuugacgauggaaacgacguguggaugggccgcacgaucaaugagacauccagacugggguacgagaccuucaaggucaucgaaggauggagcaaccccaaaucuaagcuccagauuaaucgccaggugaucgucgaucggggcgacagauccggcuauagcgggauuuuuagcguggagggaaaauccuguaucaaccggugcuucuacguugaacugauuagaggccgcaaggaggaaaccgaggugcuguggacaagcaauuccaucgucguguucugugggaccucuggaacauauggcacggggagcuggccugauggcgcugaccucaaccugaugcccauuuga

SEQ ID NO: 217694 - RNA, 1410 nt, Artificial Sequence
  derived and/or modified CDS sequence (opt5) from neuraminidase__InfluenzaA__AIJ10856
augaaccccaauaagaaaaucauuaccaucggcagcgugucccugacaauuucuacgaucugcuucuuuaugcagauugccauccucaucaccacagucacccugcacuucaagcaauacgaguuuaacagcccuccgaauaaccagguuaugcuuugugaacccacaauuaucgagagaaauauuaccgaaaucguguaucugacaaacaccacgauugagaaagaaaucugcccuaagcccgcugaguaccggaauugguccaaaccucagugugggauuaccggauucgcccccuuuucuaaggacaacagcauccgccucuccgcgggcggggauaucugggugacaagagagccuuaugucucuugcgacccggauaaguguuaccaguucgcucugggacaaggcaccacacuuaaaaaugugcauagcaacaauaccguucgggaccgcacgcccuauagaacacugcucaugaacgaacugggggugccuuuucaccugggaaccaagcaggucugcauugccugguccucuagcuccugucaugauggcaaagccuggcuccacgugugcaucacaggcgacgauaagaaugcuaccgccagcuucauuuacaacgggcggcugguugacucuguggucuccuggagcaaagauauccuucgcacccaggagucugaaugugugugcauuaauggaacauguacgguggucaugaccgacggcuccgcuagcgggaaggccgauacaaagauccuguuuaucgaggagggaaaaauuguucauaccuccacacucucuggcagcgcgcagcacguggaagagugcuccugcuaucccagauacccuggggugcggugugucugccgcgacaacuggaagggaagcaacagacccaucguggauauuaauaucaaagaccacucuauuguuuccagcuacguguguucuggccuggucggcgacaccccgcggaagaacgauagcuucuccucugggcauugccuugacccuaauaacgaagagggaggccacggggugaaaggaugggccuuugaugacggcaaugauguuuggauggggcgcacgaucaacgaaacaagcagacugggauaugagaccuucaaggugaucgagggcugguccaaucccaaaagcaagcuccaaauuaaccggcaggucaucguggaccgcggcgauagaucuggguacuccggaauuuuuagcaucgaaggcaagucuuguauuaaucggugcuucuaugucgagcugaucagagggcgcaaagaagagaccgaagugcuguggacauccaacagcauuguuguguucuguggaaccuccggcacauacgggacgggcucuuggccugacggagcugaucucaaucugaugcccaucuga

SEQ ID NO: 217695 - RNA, 1410 nt, Artificial Sequence; identical to SEQ ID NO: 217670
  derived and/or modified CDS sequence (opt5) from neuraminidase__InfluenzaA__AIJ10857

SEQ ID NO: 217696 - RNA, 1410 nt, Artificial Sequence; identical to SEQ ID NO: 214218
  derived and/or modified CDS sequence (opt5) from neuraminidase__InfluenzaA__AIJ29348

SEQ ID NO: 217697 - RNA, 1410 nt, Artificial Sequence; identical to SEQ ID NO: 214218
  derived and/or modified CDS sequence (opt5) from neuraminidase__InfluenzaA__AIJ29350

SEQ ID NO: 217698 - RNA, 1410 nt, Artificial Sequence
  derived and/or modified CDS sequence (opt5) from neuraminidase__InfluenzaA__AIJ29352
augaaccccaaucagaagaucauuaccaucggcagcgugucccugacaauuucuacgaucugcuucuuuaugcaaauugccauccucaucaccacagucacccugcacuucaaacaguacgaguuuaacagcccuccgaauaaccagguuaugcuuugugaacccacaauuaucgagagaaauauuaccgaaaucguguaucugacaaacaccacgauugagaaggaaaucugcccuaaacccgcuaaguaccggaauugguccaaaccucagugugggauuaccggauucgcccccuuuucuaaggacaacagcauccgccucuccgcgggcggggauaucugggugacaagagagccuuaugucucuugcgacccggauaaguguuaccaauucgcucugggacagggcaccacacuuaauaacgugcauagcaauaacaccguucgggaccgcacgcccuauagaacacugcucaugaaugagcugggggugccuuuucaccugggaaccaaacaggucugcauugccugguccucuagcuccugucaugauggcaaggccuggcuccacgugugcaucacaggcgacgauaaaaacgcuaccgccagcuucauuuacaaugggcggcugguugacucuguggucuccuggagcaaggaaauccuucgcacccaggagucugaaugugugugcauuaacggaacauguacgguggucaugaccgauggcuccgcuagcgggaaagccgacacaaagauccuguuuaucgaggagggaaagauuguucauaccuccacacucucuggcagcgcgcaacacguggaagagugcuccugcuaucccagauacccuggggugcggugugucugccgcgauaacuggaaaggaagcaauagacccaucguggacauuaacaucaaggaucacucuauuguuuccagcuacguguguucuggccuggucggcgacaccccgcggaaaaaugacagcuccucuagcucccauugccuugauccuaacaaugaagaagggggacacggcgugaaggggugggccuucgacgauggaaacgacguuuggaugggccgcacgaucaaugagacaagcagacugggguaugagaccuuuaaagugaucgagggauggucuaaccccaaguccaaacuccagauuaaucggcaggucaucguggaucgcggcgacagaagcggcuacucugggauuuucuccgucgaaggaaagagcuguaucaaccggugcuuuuauguggagcugauuagaggccgcaaggaagagaccgaaguucuguggacauccaauucuaucguggucuucugugggaccagcggaacauacggcacgggguccuggccugauggcgcugaccucaaccugaugcccauuuga

SEQ ID NO: 217699 - RNA, 1410 nt, Artificial Sequence; identical to SEQ ID NO: 213215
  derived and/or modified CDS sequence (opt5) from neuraminidase__InfluenzaA__AIJ29354

SEQ ID NO: 217700 - RNA, 1410 nt, Artificial Sequence; identical to SEQ ID NO: 214994
  derived and/or modified CDS sequence (opt5) from neuraminidase__InfluenzaA__AIJ29356

SEQ ID NO: 217701 - RNA, 1410 nt, Artificial Sequence; identical to SEQ ID NO: 214994
  derived and/or modified CDS sequence (opt5) from neuraminidase__InfluenzaA__AIJ29358

SEQ ID NO: 217702 - RNA, 1410 nt, Artificial Sequence
  derived and/or modified CDS sequence (opt5) from neuraminidase__InfluenzaA__AIJ29360
augaaccccaaucagaagaucauuaccaucggcagcgugucccugacaauuucuacgaucugcuucuuuaugcaaauugccauccucaccacaaccgucacacugcacuucaaacaguacgaguuuaacagcccuccgaauaaccagguuaugcuuugugaacccaccaucauugagagaaauaucacagaaauuguguaucugaccaacacgaccaucgagaaggaaauuugcccuaaacccgcugaguaccggaauugguccaagccucagugugggaucacaggauucgcccccuuuucuaaagacaacagcauucgccucuccgcgggcggggauaucugggugaccagagagccuuaugucucuugcgacccggauaaguguuaccaauucgcucugggacagggcacaacccuuaauaacgugcauagcaauaacacgguucgggaccgcacacccuauagaacccugcucaugaaugaacugggggugccuuuucaccugggaacaaagcaggucugcaucgccugguccucuagcuccugucaugauggcaaagccuggcuccacgugugcauuaccggcgacgauaagaacgcuaccgccagcuucaucuacaaugggcggcugguugacucuguggucuccuggagcaaagagauucuucgcacacaggaaucugagugugugugcaucaacggaacguguaccguggucaugacagauggcuccgcuagcgggaaggccgacaccaaaauucuguuuaucgaggaaggaaagaucguucauacauccacccucucuggcagcgcgcaacacguggaggaaugcuccugcuaucccagauacccuggggugcggugugucugccgcgauaacuggaagggaagcaauagacccauuguggacaucaacauuaaagaucacucuaucguuuccagcuacguguguucuggccuggucggcgacacgccgcggaagaaugacagcuccucuagcucccauugccuugauccuaacaaugaggaagggggacacggcgugaaagggugggccuucgacgauggaaacgacguuuggaugggccgcacaauuaaugagaccagcagacugggguaugagaccuuuaaggugaucgaaggauggucuaaccccaaauccaagcuccagaucaaucggcaggucauuguggaucgcggcgacagaagcggcuacucugggaucuucuccgucgagggaaaaagcuguauuaaccggugcuuuuauguggaacugaucagaggccgcaaggaggaaacagagguucuguggaccuccaauucuauuguggucuucugugggacaagcggaacguacggcaccggguccuggccugauggcgcugaccucaaccugaugcccaucuga

SEQ ID NO: 217703 - RNA, 1410 nt, Artificial Sequence; identical to SEQ ID NO: 214218
  derived and/or modified CDS sequence (opt5) from neuraminidase__InfluenzaA__AIJ29362

SEQ ID NO: 217704 - RNA, 1410 nt, Artificial Sequence
  derived and/or modified CDS sequence (opt5) from neuraminidase__InfluenzaA__AIL93626
augaaccccaaucagaagaucauuaccaucggcagcgugugcaugacaauugggauggccaaccugauccuccaaauuggaaauaucaucuccauuuggaucucucacagcauucagcugggcaaccagucccagaucgaggcuuguaaucaaucugucauuacguacgaaaacaauaccuauguuaaccagacauacgugaauaucagcaacaccaauuucgccgcggggagauccguggucucugugaaacuugcuggaaacagcucccugugcccuguuagcggcugggccauuuauucuaaggacaauuccgugcggaucgggagcaaaggagaugucuuugugauccgcgagccguucauuucuuguagcccccucgaaugcagaacauuuuuccugacccagggcgcccuucugaacgacaagcauuccaauggcacaaucaaagaucggucuccuuaccgcacccucauguccugucccauuggggagguuccuagccccuauaacuccagauuugaaucuguggcuuggagcgccuccgcuugccacgacggaaucaacuggcugacgauuggcaucagcgggccugauucuggagccgucgcggugcugaaguacaauggcaucauuaccgacacaaucaaguccuggaaaaacaauauucuccggacccaggagagcgagugugccugcgugaacgggucuuguuucacaaucaugaccgauggaccgagcgacggccaggcuuccuauaagauuuuucgcaucgaaaaaggcaagaucgucaaaucuguugagaugaaugcccccaacuaccauuacgaagagugcagcuguuauccugauuccagcgagauuacgugcgugugcagagacaauuggcacgggucuaaccggcccuggguguccuucaaucaaaaccuggaauaccagaucggauauauuuguagcggcgucuuuggggauaauccucgccccaacgacaagacaggaucuugcggcccggugcuuuccaauggggcuaacggaguuaagggcuucagcuuuaaauacggcaaugggguguggaucggaagaaccaaguccauuucuagccggaaaggcuucgagaugaucugggauccuaacggguggacaggaaccgacaacaauuuuuccauuaagcaggacaucgucggcaucaacgaauggucuggguauagcggcuccuucgugcaacaucccgagcugaccggacucgauuguauucgcccuugcuucuggguugaacugaucagaggccggcccaaagagaauacaauuuggacgagcgggucuuccaucagcuuuuguggagugaacucugacaccgucggcugguccuggcccgauggggccgagcuuccuuucacaauugacaaguga

SEQ ID NO: 217705 - RNA, 1410 nt, Artificial Sequence
  derived and/or modified CDS sequence (opt5) from neuraminidase__InfluenzaA__AIL93648
augaaccccaaucagaagaucauuaccaucggcagcgugucccugacaauuucuacgaucugcuucuuuaugcaaauugccauccucaucaccacagucacccugcacuucaaacaguacgaguuuaacagcccuccgaauaaccagguuaugcuuugugaacccacaauuaucgagagaaauauuaccgaaaucguguaucugacaaacaccacgauugagaaggaaaucugcccuaaacccgcugaguaccggaauugguccaagccucagugugggauuaccggauucgcccccuuuucuaaagacaacagcauccgccucuccgcgggcggggauaucugggugacaagagagccuuaugucucuugcgacccggauaaguguuaccaauucgcucugggacagggcaccacacuuaauaacgugcauagcaauaacaccguucgggaccgcacgcccuauagaacacugcucaugaaugaacugggggugccuuuucaccugggaaccaagcaggucugcauugccugguccucuagcuccugucaugauggcaaagccuggcuccacgugugcaucacaggcgacgauaagaacgcuaccgccagcuucauuuacaaugggcggcugguugacucuguggucuccuggagcaaagagauccuucgcacccaggaaucugagugugugugcauuaacggaacauguacgguggucaugaccgauggcuccgcuagcgggaaggccgacacaaaaauccuguuuaucgaggaaggaagaauuguucauaccuccacacucucuggcagcgcgcaacacguggaggaaugcuccugcuauccccgguacccuggggugcgcugugucugcagagauaacuggaagggaagcaaucggcccaucguggacauuaacaucaaggaucacucuauuguuuccagcuacguguguucuggccuggucggcgacaccccgcgcaaaaaugacagcuccucuagcucccauugccuugauccuaacaaugaggaagggggacacggcgugaaggggugggccuucgacgauggaaacgacguuuggaugggcagaacgaucaaugagacaagccggcugggguaugagaccuuuaaagugaucgaaggauggucuaaccccaaguccaaacuccagauuaauaagcaggucaucguggaucgcggcgacagaagcggcuacucugggauuuucuccgucgagggaaaaagcuguaucaaccggugcuuuuauguggaacugauuagaggccgcaaggaggaaaccgagguucuguggacauccaauucuaucguggucuucugugggaccagcggaacauacggcacgggguccuggccugauggcgcugaccucaaccugaugcccauuuga

SEQ ID NO: 217706 - RNA, 1410 nt, Artificial Sequence; identical to SEQ ID NO: 214218
  derived and/or modified CDS sequence (opt5) from neuraminidase__InfluenzaA__AIL93660

SEQ ID NO: 217707 - RNA, 1410 nt, Artificial Sequence; identical to SEQ ID NO: 214218
  derived and/or modified CDS sequence (opt5) from neuraminidase__InfluenzaA__AIL93672

SEQ ID NO: 217708 - RNA, 1410 nt, Artificial Sequence
  derived and/or modified CDS sequence (opt5) from neuraminidase__InfluenzaA__AIL93684
augaaccccaaucagaagaucauuaccaucggcagcgugugcaugacaauugggauggccaaccugauccuccaaauuggaaauaucaucuccauuuggaucucucacagcauucagcugggcaaccagucccagaucgaggcuuguaaucaaucugucauuacguacgaaaacaauaccuggguuaaccagacauaugugaauaucagcaacaccaauuccgccacagggcagucuguggucagcgugaaacuugcgggaaacuccagccugugcccuguuucuggcugggcuauuuacuccaaggacaauagcgugagaaucgggucuaaaggagaugucuucgugauccgggagccguuuauuuccuguagcccccucgaaugccgcaccuucuuucugacacagggcgcccuucugaacgacaagcauucuaauggcaccaucaaagauagauccccuuaucggacgcucaugagcugucccauuggggagguuccuucccccuacaacucucgcuucgaaagcguggccugguccgcuagcgccugccacgacggaaucaacuggcugaccauuggcaucucugggccugauuccggagcugucgccgugcugaaguauaauggcaucauuacagacaccaucaagagcuggaaaaacaauauucucagaacacaagagucugagugugcgugcgugaacgggagcuguuuuaccaucaugacggauggaccguccgacggccaggccucuuacaagauuuuccggaucgaaaaaggcaagaucgucaaaagcguugagaugaaugcucccaacuaucauuacgaagagugcuccuguuacccugauagcucugagauuacaugcgugugccgcgacaauuggcacggguccaacagacccugggugagcuuuaaucagaaccuggaauaucagaucggauacauuuguucuggcgucuucggggauaauccucggcccaacgacaagaccggauccugcggcccggugcuuagcaauggggccaacggaguuaagggcuuuuccuucaaauauggcaaugggguguggaucggacgcacaaagucuauuagcuccagaaaaggcuuugagaugaucugggauccuaacggguggaccggaaccgacaacaauuucucuauuaagcaagacaucgucggcaucaacgaauggagcggguacuccggcagcuuugugcagcaucccgagcugacaggacucgauuguauucggccuugcuucuggaucgaacugauucgcggcagacccaaagagaauacgaucuggaccucuggguccagcauuucuuucuguggaguuaacuccgacacagugggcuggagcuggcccgauggggcugagcuuccuuuuaccaucgacaaguga

SEQ ID NO: 217709 - RNA, 1410 nt, Artificial Sequence
  derived and/or modified CDS sequence (opt5) from neuraminidase__InfluenzaA__AIL93719
augaaccccaaucagaagaucauuaccaucggcagcgugucccugacaauuucuacgaucugcuucuuuaugcaaauugccauccucaucaccacagucacccugcacuucaaacaguacgaguuuaacagcccuccgaauaaccagguuaugcuuugugaacccacaauuaucgagagaaauauuaccgaaaucguguaucugacaaacaccacgauugagaaggaaaucugcccuaaacccgcugaguaccggaauugguccaagccucagugugggauuaccggauucgcccccuuuucuaaagacaacagcauccgccucuccgcgggcggggauaucugggugacaagagagccuuaugucucuugcgacccggauaaguguuaccaauucgcucugggacagggcaccacacuuaauaacgugcauagcaauaacaccguucgggaccgcacgcccuauagaacacugcucaugaaugaacugggggugccuuuucaccugggaaccaagcaggucugcauugccugguccucuagcuccugucaugauggcaaagccuggcuccacgugugcaucacaggcgacgauaagaacgcuaccgccagcuucauuuacaaugggcggcugguugacucuguggucuccuggagcaaagagauccuucgcacccaggaaucugagugugugugcauuaacggaacauguacgguggucaugaccgauggcuccgcuagcgggaaggccgacacaaaaauccuguuuaucgaggaaggaaagauuguucauaccuccacacucucuggcagcgcgcaacacguggaggaaugcuccugcuaucccagauacccuggggugcggugugucugccgcgauaacuggaagggaagcaauagacccaucguggacauuaacaucaaagaucacucuauuguuuccagcuacguguguucuggccuggucggcgacaccccgcggaagaaugacagcuccucuagcucccauugccuugauccuaacaaugaggaagggggacacggcgugaaagggugggccuucgacgauggaaacgacguuuggaugggccgcacgaucaaugagacaagcagacugggguaugagaccuuuaaggugaucgaaggauggucuaaccccaaauccaagcuccagauuaauaaacaggucaucguggaucggggcgaccgcagcggcuacucugggauuuucuccgucgagggaaagagcuguaucaacagaugcuuuuauguggaacugauucggggcagaaaggaggaaaccgagguucuguggacauccaauucuaucguggucuucugugggaccagcggaacauacggcacgggguccuggccugauggcgcugaccucaaccugaugcccauuuga

SEQ ID NO: 217710 - RNA, 1410 nt, Artificial Sequence; identical to SEQ ID NO: 217709
  derived and/or modified CDS sequence (opt5) from neuraminidase__InfluenzaA__AIL93743

SEQ ID NO: 217711 - RNA, 1410 nt, Artificial Sequence; identical to SEQ ID NO: 217709
  derived and/or modified CDS sequence (opt5) from neuraminidase__InfluenzaA__AIL93755

SEQ ID NO: 217712 - RNA, 1410 nt, Artificial Sequence; identical to SEQ ID NO: 214218
  derived and/or modified CDS sequence (opt5) from neuraminidase__InfluenzaA__AIL93767

SEQ ID NO: 217713 - RNA, 1410 nt, Artificial Sequence; identical to SEQ ID NO: 214218
  derived and/or modified CDS sequence (opt5) from neuraminidase__InfluenzaA__AIL93779

SEQ ID NO: 217714 - RNA, 1410 nt, Artificial Sequence
  derived and/or modified CDS sequence (opt5) from neuraminidase__InfluenzaA__AIL93791
augaaccccaaucagaagaucauuaccaucggcagcgugucccugacaauuucuacgaucugcuucuuuaugcaaauugccauccucaucaccacagucacccugcacuucaaacaguacaaguuuaacagcccuccgaauaaccagguuaugcuuugugagcccacaauuaucgaaagaaauauuaccgagaucguguaucugacaaacaccacgauugaaaaagagaucugcccuaagcccgcugaauaccggaauugguccaaaccucagugugggauuaccggauucgcccccuuuucuaaggacaacagcauccgccucuccgcgggcggggauaucugggugacaagagagccuuaugucucuugcgacccggauaaguguuaccaauucgcucugggacagggcaccacacuuaauaacgugcauagcaauaacaccguucgggaccgcacgcccuauagaacacugcucaugaaugagcugggggugccuuuucaccugggaaccaaacaggucugcauugccugguccucuagcuccugucaugauggcaaggccuggcuccacgugugcaucacaggcgacgauaaaaacgcuaccgccagcuucauuuacaaugggcggcugguugacucuguggucuccuggagcaaggaaauccuucgcacccaggagucugaaugugugugcauuaacggaacauguacgguggucaugaccgauggcuccgcuagcgggaaagccgacacaaagauccuguuuaucgaggagggaaagauuguucauaccagaacacucuccggcucugcgcaacacguggaagagugcagcugcuauccccgguacccuggggugcgcugugucugcagagauaacuggaaaggauccaaucggcccaucguggacauuaacaucaaggaucacagcauuguuucuuccuacguguguagcggccuggucggcgacaccccgcgcaaaaaugacucuagcuccucuagccauugccuugauccuaacaaugaagaagggggacacggcgugaaggggugggccuucgacgauggaaacgacguuuggaugggcagaacgaucaaugagacaucccggcugggguaugagaccuuuaaagugaucgagggauggagcaaccccaagucuaaacuccagauuaauaagcaggucaucguggaucgcggcgacagauccggcuacagcgggauuuucucugucgaaggaaaguccuguaucaaccggugcuuuuauguggagcugauuagaggccgcaaagaagagaccgaaguucuguggacaagcaauuccaucguggucuucugugggaccucuggaacauacggcacggggagcuggccugauggcgcugaccucaaccugaugcccauuuga

SEQ ID NO: 217715 - RNA, 1410 nt, Artificial Sequence; identical to SEQ ID NO: 217709
  derived and/or modified CDS sequence (opt5) from neuraminidase__InfluenzaA__AIL93803

SEQ ID NO: 217716 - RNA, 1410 nt, Artificial Sequence
  derived and/or modified CDS sequence (opt5) from neuraminidase__InfluenzaA__AIL93815
augaaccccaaucagaagaucauuaccaucggcagcgugucccugacaauuucuacgaucugcuucuuuaugcaaauugccauccucaucaccacagucacccugcacuucaaacaguacgaguuuaacagcccuccgaauaaccagguuaugcuuugugaacccacaauuaucgagagaaauauuaccgaaaucguguaucugacaaacaccacgauugagaaggaaaucugcccuaaacccgcugaguaccggaauugguccaagccucagugugggauuaccggauucgcccccuuuucuaaagacaacagcauccgccucuccgcgggcggggauaucugggugacaagagagccuuaugucucuugcgacccggauaaguguuaccaauucgcucugggacagggcaccacacuuaauaacgugcauagcaauaacaccguucgggaccgcacgcccuauagaacacugcucaugaaugaacugggggugccuuuucaccugggaaccaagcaggucugcauugccugguccucuagcuccugucaugauggcaaagccuggcuccacgugugcaucacaggcgacgauaagaacgcuaccgccagcuucauuuacaaugggcggcugguugacucuguggucuccuggagcaaagagauccuucgcacccaggaaucugagugugugugcauuaacggaacauguacgguggucaugaccgauggcuccgcuagcgggaaggccgacacaaaaauccuguuuaucgaggaaggaaagauuguucauaccuccacacucucuggcagcgcgcaacacguggaggaaugcuccugcuaucccagauacccuggggugcggugugucugccgcgauaacuggaagggaagcaauagacccaucguggacauuaacaucaaagaucacucuauuguuuacuccuauguguguagcggccuggucggcgacaccccgcggaagaaugacucuagcuccucuagccauugccuuaacccuaauaacgaggaagggggacacggcgugaaagggugggccuucgaugacggaaaugauguuuggaugggccgcacgaucaacgagacauccagacugggguacgagaccuuuaaggugaucgaaggauggagcaaucccaaaucuaagcuccagauuaaccggcaggucaucguggaccgcggcgauagauccggcuauagcgggauuuucucugucgagggaaaauccuguaucaaucggugcuuuuacguggaacugauuagaggccgcaaggaggaaaccgagguucuguggacaagcaacuccaucguggucuucugugggaccucuggaacauauggcacggggagcuggccugacggcgcugaucucaaucugaugcccauuuga

SEQ ID NO: 217717 - RNA, 1410 nt, Artificial Sequence; identical to SEQ ID NO: 214218
  derived and/or modified CDS sequence (opt5) from neuraminidase__InfluenzaA__AIL93827

SEQ ID NO: 217718 - RNA, 1410 nt, Artificial Sequence
  derived and/or modified CDS sequence (opt5) from neuraminidase__InfluenzaA__AIL93839
augaaccccaaucagaagaucauuaccaucggcagcgugugcaugacaauugggauggccaaccugauccuccaaauuggaaauaucaucuccauuuggaucucucacagcauucagcugggcaaccagucccagaucgaggcuuguaaucaaucugucauuacguacgaaaacaauaccuggguuaaccagacauaugugaauaucagcaacaccaauuucgccacagggcaguccguggucucugugaaacuugcgggaaacagcucccugugcccuguuagcggcugggcuauuuacucuaaggacaauuccgugagaaucgggagcaaaggagaugucuuugugauccgggagccguucauuucuuguagcccccucgaaugccgcaccuuuuuccugacacagggcgcccuucugaacgacaagcauuccaauggcaccaucaaagauagaucuccuuaucggacgcucauguccugucccauuggggagguuccuagccccuacaacucccgcuuugaaucuguggccuggagcgcuuccgccugccacgacggaaucaacuggcugaccauuggcaucagcgggccugauucuggagcugucgccgugcugaaguauaauggcaucauuacagacaccaucaaguccuggaaaaacaauauucucagaacacaagagagcgagugugcgugcgugaacgggucuuguuucaccaucaugacggauggaccgagcgacggccaggccuccuacaagauuuuucggaucgaaaaaggcaagaucgucaaaucuguugagaugaaugcucccaacuaucauuacgaagagugcagcuguuacccugauuccagcgagauuacaugcgugugccgcgacaauuggcacgggucuaacagacccuggguguccuucaaucagaaccuggaauaucagaucggauacauuuguagcggcgucuuuggggauaauccucggcccaacgacaagaccggaucuugcggcccgguguccagcaauggggccaacggaguuaagggcuucuccuuuaaauauggcaaugggguguggaucggacgcacaaagucuauuagcuccagaaaaggcuucgagaugaucugggauccuaacggguggaccggaaccgacaacaauuuuucuauuaagcaagacaucgucggcaucaacgaauggagcggguacuccggcagcuucgugcagcaucccgagcuuacaggacuggauuguauucggccuugcuucuggguugaacucauccgcggcagacccaaagagaauacgauuuggaccucuggguccagcaucucuuuuuguggagugaacuccgacacagucggcuggagcuggcccgauggggcugagcugccuuucaccauugacaaguga

SEQ ID NO: 217719 - RNA, 1410 nt, Artificial Sequence
  derived and/or modified CDS sequence (opt5) from neuraminidase__InfluenzaA__AIL93850
augaaccccaaucagaagaucauuaccaucggcagcgugugcaugacaauugggauggccaaccugauccuccaaauuggaaauaucaucuccauuuggaucucucacagcauucagcugggcaaccagucccagaucgaggcuuguaaucaaucugucauuacguacgaaaacaauaccuggguuaaccagacauaugugaauaucagcaacaccaauuucgccacagggcaguccguggucucugugaaacuugcgggaaacagcucccugugcccuguuagcggcugggcuauuuacucuaaggacaauuccgugagaaucgggagcaaaggagaugucuuugugauccgggagccguucauuucuuguagcccccucgaaugccgcaccuuuuuccugacacagggcgcccuucugaacgacaagcauuccaauggcaccaucaaagauagaucuccuuaucggacgcucauguccugucccauuggggagguuccuagccccuacaacucccgcuuugaaucuguggccuggagcgcuuccgccugccacgacggaaucaacuggcugaccauuggcaucagcgggccugauucuggagcugucgccgugcugaaguauaauggcaucauuacagacaccaucaaguccuggaaaaacaauauucucagaacacaagagagcgagugugcgugcgugaacgggucuuguuucaccaucaugacggauggaccgagcgacggccaggccuccuacaagauuuuucggaucgaaaaaggcaagaucgucaaaucuguugagaugaaugcucccaacuaucauuacgaagagugcagcuguuacccugauuccagcgagauuacaugcgugugccgcgacaauuggcacgggucuaacagacccuggguguccuucaaucagaaccuggaauaucagaucggauacauuuguagcggcgucuuuggggauaauccucggcccaacgacaagaccggaucuugcggcccgguguccagcaauggggccaagggaguuaaaggcuucuccuuuaaguauggcaacgggguguggaucggacgcacaaaaucuauuagcuccagaaagggcuucgagaugaucugggauccuaauggguggaccggaaccgacaacaacuuuucuauuaaacaagacaucgucggcaucaaugaauggagcggguacuccggcagcuucgugcagcaucccgagcuuacaggacuggauuguauucggccuugcuucuggguugaacucauccgcggcagacccaaggagaacacgauuuggaccucuggguccagcaucucuuuuuguggagucaauuccgacacagugggcuggagcuggcccgauggggcugagcugccuuucaccauugacaaauga

SEQ ID NO: 217720 - RNA, 1410 nt, Artificial Sequence; identical to SEQ ID NO: 217709
  derived and/or modified CDS sequence (opt5) from neuraminidase__InfluenzaA__AIL93861

SEQ ID NO: 217721 - RNA, 1410 nt, Artificial Sequence
  derived and/or modified CDS sequence (opt5) from neuraminidase__InfluenzaA__AIL93885
augaaccccaaucagaagaucauuaccaucggcagcgugucccugacaauuucuacgaucugcuucuuuaugcaaauugccauccucaucaccacagucacccugcacuucaaacaguacgaguuugacagcccuccgaacaaucagguuaugcuuugugaacccacaauuaucgagagaaacauuaccgaaaucguguaucugacaaauaccacgauugagaaggaaaucugcccuaaacccgcugaguaccggaacugguccaagccucagugugggauuaccggauucgcccccuuuucuaaagauaauagcauccgccucuccgcgggcggggacaucugggugacaagagagccuuaugucucuugcgauccggacaaguguuaccaauucgcucugggacagggcaccacacuuaacaaugugcauagcaacaauaccguucgggaucgcacgcccuauagaacacugcucaugaacgaacugggggugccuuuucaccugggaaccaagcaggucugcauugccugguccucuagcuccugucaugacggcaaagccuggcuccacgugugcaucacaggcgaugacaagaaugcuaccgccagcuucauuuacaacgggcggcugguugauucuguggucuccuggagcaaagagauccuucgcacccaggaaucugagugugugugcauuaauggaacauguacgguggucaugaccgacggcuccgcuagcgggaaggccgauacaaaaauccuguuuaucgaggaaggaaagauuguucauaccuccacacucucuggcagcgcgcaacacguggaggaaugcuccugcuaucccagauacccuggggugcggugugucugccgcgacaacuggaagggaagcaacagacccaucguggauauuaauaucaaagaccacucuauuguuuccagcuacguguguucuggccuggucggcgacaccccgcggaagaacgauagcuccucuagcucccauugccuugacccuaauaacgaggaagggggacacggcgugaaagggugggccuucgaugacggaaaugauguuuggaugggccgcacgaucaacgagacaagcagacugggguaugagaccuuuaaggugaucgaaggauggucuaaucccaaauccaagcuccagauuaaccggcaggucaucguggaccgcggcgauagaagcggcuacucuggggucuucuccguggagggaaaaagcuguauuaaucggugcuuuuauguugaacugaucagaggccgcaaggaggaaaccgaggugcuguggacauccaacucuauugucguguucugugggaccagcggaacauacggcacgggguccuggccugacggcgcugaucucaaucugaugcccaucuga

SEQ ID NO: 217722 - RNA, 1410 nt, Artificial Sequence; identical to SEQ ID NO: 217709
  derived and/or modified CDS sequence (opt5) from neuraminidase__InfluenzaA__AIL93897

SEQ ID NO: 217723 - RNA, 1410 nt, Artificial Sequence
  derived and/or modified CDS sequence (opt5) from neuraminidase__InfluenzaA__AIL93909
augaaccccaaucagaagaucauuaccaucggcagcgugugcaugacaauugggauggccaaccugauccuccaaauuggaaauaucaucuccauuuggaucucucacagcauucagcugggcaaccagucccagaucgagacguguaaucaaucugucauuaccuacgaaaacaauacauggguuaaccagaccuaugugaauaucagcaacacaaauuucgcugccgggcaguccguggucucugugaaacuugcgggaaacagcucccugugcccuguuagcggcugggcuauuuacucuaaggacaauuccaucagaaucgggagcaaaggagauguguuugucauucgggagccguucaucucuuguagcccccucgaaugccgcaccuuuuuccugacacagggcgcccuucugaacgacaagcauuccaauggcaccauuaaagauagaucuccuuaucggacgcucauguccugucccaucggggaggugccuagccccuacaacucccgcuuugaaucuguugccuggagcgcuuccgccugccacgacggaauuaacuggcugaccaucggcaucagcgggccugauucuggagcuguggccguccugaaguauaauggcauuaucacagacaccauuaaguccuggagaaacaauauccuccggacacaagagagcgagugugugugcgugaacgggucuuguuucaccauuaugacggauggaccgagcgacggccaggcguccuacaaaaucuuucgcaucgaaaagggcaaaauugucaagucuguugagaugaaugcccccaacuaucauuacgaagagugcagcuguuacccugauuccagcgagaucacaugcgugugcagagacaauuggcacgggucuaaccggcccuggguguccuucaaucagaaccuggaauaucagauuggauacaucuguagcggcauuuuuggggauaauccucgccccaacgacaaaaccggaucuugcggcccggucuccagcaauggggcuaacggagugaagggcuucuccuuuaaguauggcaaugggguuuggaucggaagaacaaaaucuauuagcucccggaagggcuucgagaugaucugggauccuaacggguggaccggaaccgacaacaauuuuucuaucaaacaagacauugugggcaucaacgaauggagcggguacuccggcagcuucguccagcaucccgagcuuacaggacuggauuguauucgcccuugcuucuggguggaacucaucagaggccggcccaaggagaauacgauuuggaccucuggguccagcaucucuuuuuguggaguuaacuccgacacagugggcuggagcuggcccgauggggccgagcugccuuucaccaucgacaaauga

SEQ ID NO: 217724 - RNA, 1410 nt, Artificial Sequence; identical to SEQ ID NO: 217709
  derived and/or modified CDS sequence (opt5) from neuraminidase__InfluenzaA__AIL93920

SEQ ID NO: 217725 - RNA, 1410 nt, Artificial Sequence
  derived and/or modified CDS sequence (opt5) from neuraminidase__InfluenzaA__AIL93943
augaaccccaaucagaagaucauuaccaucggcagcgugugcaugacaauugggauggccaaccugauccuccaaauuggaaauaucaucuccauuugggucucucacagcauccagcugggcaaccagucccagauugagacguguaaucaaucuguuaucaccuacgaaaacaauacaugggugaaccagaccuaugugaauauuagcaacacaaauuucgcugccgggcaguccgucgugucuguuaaacuugcgggaaacagcucccugugcccugugagcggcugggcuaucuacucuaaggacaauuccgucagaauugggagcaaaggagauguguuuguuauccgggagccguucaucucuuguucccccagcgaaugccgcaccuuuuuccucacacagggcgcccugcuuaacgacaagcauucuaauggcaccauuaaagauagauccccuuaucggacgcugaugagcugucccaucggggaggugccuucccccuacaacucucgcuuugaaagcgucgccugguccgcuagcgccugccacgacggaauuaacuggcucaccaucggcauuucugggccugauuccggagcuguggccgugcugaaguauaauggcaucaucacagacaccauuaagagcuggagaaacaauauccugcggacacaagagucugagugugcgugcgucaacgggagcuguuucaccauuaugacggauggaccguccgacggccaggccucuuacaaaaucuuucgcauugaaaagggcaaaaucguuaagagcguggagaugaaugcucccaacuaucauuacgaagagugcuccuguuacccugauagcucugagaucacaugcgugugcagagacaauuggcacggguccaaccggcccugggucagcuucaaucagaaccucgaauaucagauuggauacaucuguucuggcguguuuggggauaauccucgccccaacgacaaaaccggauccugcggcccgguuagcuccaauggggccaacggagugaagggcuucucuuuuaaguauggcaauggggucuggauuggaagaacaaaaagcaucuccucucggaagggcuucgagaugauuugggauccuaacggguggaccggaaccgacaacaauuuuagcaucaaacaagacauugugggcaucaaggaaugguccggguacagcggcucuuucguucagcaucccgagcugacaggacuugauuguauccgcccuugcuucuggguggaacugauuagaggccggcccgaggagaacacgaucuggaccuccgggagcucuauuuccuuuuguggagucaauagcgacacagugggcuggucuuggcccgauggggcugaacucccuuucaccaucgacaaauga

SEQ ID NO: 217726 - RNA, 1410 nt, Artificial Sequence; identical to SEQ ID NO: 217709
  derived and/or modified CDS sequence (opt5) from neuraminidase__InfluenzaA__AIL93954

SEQ ID NO: 217727 - RNA, 1410 nt, Artificial Sequence; identical to SEQ ID NO: 217709
  derived and/or modified CDS sequence (opt5) from neuraminidase__InfluenzaA__AIL93966

SEQ ID NO: 217728 - RNA, 1410 nt, Artificial Sequence
  derived and/or modified CDS sequence (opt5) from neuraminidase__InfluenzaA__AIL93978
augaaccccaaucagaagaucauuaccaucggcagcgugucccugacaauuucuacgaucugccucuucaugcaaauugccauccugaucaccacagucacccuucacuuuaaacaguacgaguucaacagcccuccgaauaaccagguuaugcugugugaacccacaauuaucgagagaaauauuaccgaaaucguguaucucacaaacaccacgauugagaaggaaaucugcccuaaacccgcugaguaccggaauugguccaagccucagugugggauuaccggauuugcccccuucucuaaagacaacagcauccgccuguccgcgggcggggauaucugggugacaagagagccuuaugucucuugcgacccggauaaguguuaccaauuugcucuuggacagggcaccacacugaauaacgugcauagcaauaacaccguucgggaccgcacgcccuauagaacacuccugaugaaugaacugggggugccuuuccaccucggaaccaagcaggucugcauugccugguccuccucuuccugucaugauggcaaagccuggcugcacgugugcaucacaggcgacgauaagaacgcuaccgccagcuuuauuuacaaugggcggcuuguugacucuguggucuccuggagcaaagagauccugcgcacccaggaaucugagugugugugcauuaacggaacauguacgguggucaugaccgauggcuccgcuagcgggaaggccgacacaaaaauccucuucaucgaggaaggaaagauuguucauaccuccacacugucuggcagcgcgcaacacguggaggaaugcuccugcuaucccagauacccuggggugcggugugucugccgcgauaacuggaagggaagcaauagacccaucguggacauuaacaucaaagaucacucuauuguuuccagcuacguguguucuggccuugucggcgacaccccgcggaagaaugacagcuccucuagcucccauugccuggauccuaacaaugaggaagggggacacggcgugaaagggugggccuuugacgauggaaacgacguuuggaugggccgcacgaucaaugagacaagcagacucggguaugagaccuucaaggugaucgaaggauggucuaaccccaaauccaagcugcagauuaaucggcaggucaucguggaucgcggcgacagaagcggcuacucugggauuuuuagcgucgagggaaaaagcuguaucaaccggugcuucuauguggaacugauuagaggccgcaaggaggaaaccgagguucucuggacauccaauucuaucguggucuuuugugggaccagcggaacauacggcacgggguccuggccugauggcgcugaccugaaccuuaugcccauuuga

SEQ ID NO: 217729 - RNA, 1410 nt, Artificial Sequence; identical to SEQ ID NO: 217718
  derived and/or modified CDS sequence (opt5) from neuraminidase__InfluenzaA__AIL93990

SEQ ID NO: 217730 - RNA, 1410 nt, Artificial Sequence; identical to SEQ ID NO: 214218
  derived and/or modified CDS sequence (opt5) from neuraminidase__InfluenzaA__AIL94001

SEQ ID NO: 217731 - RNA, 1410 nt, Artificial Sequence; identical to SEQ ID NO: 217709
  derived and/or modified CDS sequence (opt5) from neuraminidase__InfluenzaA__AIL94013

SEQ ID NO: 217732 - RNA, 1410 nt, Artificial Sequence; identical to SEQ ID NO: 217709
  derived and/or modified CDS sequence (opt5) from neuraminidase__InfluenzaA__AIL94025

SEQ ID NO: 217733 - RNA, 1410 nt, Artificial Sequence; identical to SEQ ID NO: 217709
  derived and/or modified CDS sequence (opt5) from neuraminidase__InfluenzaA__AIL94037

SEQ ID NO: 217734 - RNA, 1410 nt, Artificial Sequence; identical to SEQ ID NO: 217709
  derived and/or modified CDS sequence (opt5) from neuraminidase__InfluenzaA__AIL94049

SEQ ID NO: 217735 - RNA, 1410 nt, Artificial Sequence; identical to SEQ ID NO: 217718
  derived and/or modified CDS sequence (opt5) from neuraminidase__InfluenzaA__AIL94061

SEQ ID NO: 217736 - RNA, 1410 nt, Artificial Sequence
  derived and/or modified CDS sequence (opt5) from neuraminidase__InfluenzaA__AIL94072
augaaccccaaucagaagaucauuaccaucggcagcgugugcaugacaauugggauggccaaccugauccuccaaauuggaaauaucaucuccauuuggaucucucacagcauucagcugggcaaccagucccagaucgaggcuuguaaucaaucugucauuacguacgaaaacaauaccuggguuaaccagacauaugugaauaucagcaacaccaauuucgccacagggcaguccguggucucugugaaacuugcgggaaacagcucccugugcccuguuagcggcugggcuauuuacucuaaggacaauuccgugagaaucgggagcaaaggagaugucuuugugauccgggagccguucauuucuuguagcccccucgaaugccgcaccuuuuuccugacacagggcgcccuucugaacgacaagcauuccaauggcaccaucaaagauagaucuccuuaucggacgcucauguccugucccauuggggagguuccuagccccuacaacucccgcuuugaaucuguggccuggagcgcuuccgccugccacgacggaaucaacuggcugaccauuggcaucagcgggccugauucuggagcugucgccgugcugaaguauaauggcaucauuacagacaccaucaaguccuggaaaaacaauauucucagaacacaagagagcgagugugcgugcgugaacgggucuuguuucaccaucaugacggauggaccgagcgacggccaggccuccuacaagauuuuucggaucgaaaaaggcaagaucgucaaaucuguugagaugaaugcucccaacuaucauuacgaagagugcagcuguuacccugauuccagcgagauuacaugcgugugccgcgacaauuggcacgggucuaacagacccuggguguccuucaaucagaaccuggaauaucagaucggauacauuuguagcggcgucuuuggggauaauccucggcccaacgacaagaccggaucuugcggcccggugcuuuccaauggggccaacggaguuaagggcuucagcuuuaaauauggcaaugggguguggaucggacgcacaaaguccauuucuagcagaaaaggcuucgagaugaucugggauccuaacggguggaccggaaccgacaacaauuuuuccauuaagcaagacaucgucggcaucaacgaauggucuggguacagcggcuccuucgugcagcaucccgagcugacaggacucgauuguauucggccuugcuucuggaucgaacugauucgcggcagacccaaagagaauacgaucuggaccagcgggucuuccauuagcuuuuguggaguuaacucugacacagugggcugguccuggcccgauggggcugagcuuccuuucaccaucgacaaguga

SEQ ID NO: 217737 - RNA, 1410 nt, Artificial Sequence; identical to SEQ ID NO: 217718
  derived and/or modified CDS sequence (opt5) from neuraminidase__InfluenzaA__AIL94083

SEQ ID NO: 217738 - RNA, 1410 nt, Artificial Sequence; identical to SEQ ID NO: 217709
  derived and/or modified CDS sequence (opt5) from neuraminidase__InfluenzaA__AIL94238

SEQ ID NO: 217739 - RNA, 1410 nt, Artificial Sequence
  derived and/or modified CDS sequence (opt5) from neuraminidase__InfluenzaA__AIL94250
augaaccccaaucagaagaucauuaccaucggcagcgugugcaugacaauugggauggccaaccugauccuccaaauuggaaauaucaucuccauuuggaucucucacagcauucagcugggcaaccagucccagaucgaggcuuguaaucaaucugucauuacguacgaaaacaauaccuggguuaaccagacauaugugaauaucagcaacaccaauuucgccgcggggcaguccguggucucugugaaacuugcuggaaacagcucccugugcccuguuagcggcugggccauuuacucuaaggacaauuccgugagaaucgggagcaaaggagaugucuuugugauccgggagccguucauuucuuguagcccccucgaaugccgcacauuuuuccugacccagggcgcccuucugaacgacaagcauuccaauggcacaaucaaagauagaucuccuuaucggacccucauguccugucccauuggggagguuccuagccccuacaacucccgcuuugaaucuguggcuuggagcgccuccgcuugccacgacggaaucaacuggcugacgauuggcaucagcgggccugauucuggagccgucgcggugcugaaguauaauggcaucauuaccgacacaaucaaguccuggaaaaacaauauucucagaacccaagagagcgagugugccugcgugaacgggucuuguuucacaaucaugaccgauggaccgaaugacggccaggcuagcuacaagauuuuucggaucgaaaaaggcaagaucgucaaauccguugagaugaacgcccccaauuaucauuacgaagagugcucuuguuacccugauagcuccgagauuacgugcgugugccgcgacaacuggcacgggagcaauagacccugggugucuuucaaccagaaucuggaauaucagaucggauacauuuguuccggcgucuuuggggauaacccucggcccaaugacaagacaggaagcugcggcccggugucuuccaacggggcuaauggaguuaagggcuucagcuuuaaauauggcaacgggguguggaucggacgcaccaaguccauuucuagcagaaaaggcuucgagaugaucugggauccuaacggguggacaggaaccgacaauaacuuuuccauuaagcaagacaucgucggcaucaaugaauggucuggguacagcggcuccuucgugcagcaucccgagcuuaccggacuggauuguauucggccuugcuucuggguugaacucauccgcggcagacccaaagagaacacaauuuggacgagcgggucuuccaucagcuuuuguggagucaauucugacaccgugggcugguccuggcccgauggggccgagcugccuuucacaauugacaaguga

SEQ ID NO: 217740 - RNA, 1410 nt, Artificial Sequence; identical to SEQ ID NO: 214218
  derived and/or modified CDS sequence (opt5) from neuraminidase__InfluenzaA__AIL94261

SEQ ID NO: 217741 - RNA, 1410 nt, Artificial Sequence; identical to SEQ ID NO: 214218
  derived and/or modified CDS sequence (opt5) from neuraminidase__InfluenzaA__AIL94273

SEQ ID NO: 217742 - RNA, 1410 nt, Artificial Sequence; identical to SEQ ID NO: 214218
  derived and/or modified CDS sequence (opt5) from neuraminidase__InfluenzaA__AIL94285

SEQ ID NO: 217743 - RNA, 1410 nt, Artificial Sequence
  derived and/or modified CDS sequence (opt5) from neuraminidase__InfluenzaA__AIL94297
augaaccccaaucagaagaucauuaccaucggcagcgugucccugacaauuucuacgaucugcuucuuuaugcaaauugccauccucaucaccacagucacccugcacuucaaacaguacgaguuuaacagcccuccgaauaaccagguuaugcuuugugaacccacaauuaucgagagaaauauuaccgaaaucguguaucugacaaacaccacgauugagaaggaaaucugcccuaaacccgcugaguaccggaauugguccaagccucagugugggauuaccggauucgcccccuuuucuaaagacaacagcauccgccucuccgcgggcggggauaucugggugacaagagagccuuaugucucuugcgacccggauaaguguuaccaauucgcucugggacagggcaccacacuuaauaacgugcauagcaauaacaccguucgggaccgcacgcccuauagaacacugcucaugaaugaacugggggugccuuuucaccugggaaccaagcaggucugcauugccugguccucuagcuccugucaugauggcaaagccuggcuccacgugugcaucacaggcgacgauaagaacgcuaccgccagcuucauuuacaaugggcggcugguugacucuguggucuccuggagcaaagagauccuucgcacccaggaaucugagugugugugcauuaacggaacauguacgguggucaugaccgauggcuccgcuagcgggaaggccgacacaaaaauccuguuuaucgaggaaggaaagauuguucauaccagaacacucuccggcucugcgcaacacguggaggaaugcagcugcuauccccgguacccuggggugcgcugugucugcagagauaacuggaagggauccaaucggcccaucguggacauuaacaucaaagaucacagcauuguuucuuccuacguguguagcggccuggucggcgacaccccgcgcaagaaugacucuagcuccucuagccauugccuugauccuaacaaugaggaagggggacacggcgugaaagggugggccuucgacgauggaaacgacguuuggaugggcagaacgaucaaugagacaucccggcugggguaugagaccuuuaaggugaucgaaggauggagcaaccccaaaucuaagcuccagauuaauaaacaggucaucguggaucgcggcgacagauccggcuacagcgggauuuucucugucgagggaaaguccuguaucaaccggugcuuuuauguggaacugauuagaggccgcaaggaggaaaccgagguucuguggacaagcaauuccaucguggucuucugugggaccucuggaacauacggcacggggagcuggccugauggcgcugaccucaaccugaugcccauuuga

SEQ ID NO: 217744 - RNA, 1410 nt, Artificial Sequence; identical to SEQ ID NO: 217709
  derived and/or modified CDS sequence (opt5) from neuraminidase__InfluenzaA__AIL94309

SEQ ID NO: 217745 - RNA, 1410 nt, Artificial Sequence; identical to SEQ ID NO: 217728
  derived and/or modified CDS sequence (opt5) from neuraminidase__InfluenzaA__AIL94321

SEQ ID NO: 217746 - RNA, 1410 nt, Artificial Sequence; identical to SEQ ID NO: 214218
  derived and/or modified CDS sequence (opt5) from neuraminidase__InfluenzaA__AIL94368

SEQ ID NO: 217747 - RNA, 1410 nt, Artificial Sequence
  derived and/or modified CDS sequence (opt5) from neuraminidase__InfluenzaA__AIL94380
augaaccccaaucagaagaucauuaccaucggcagcgugucccugacaauuucuacgaucugcuucuuuaugcaaauugccauccucaucaccacagucacccugcacuucaaacaguacgaguuuaacagcccuccgaauaaccagguuaugcuuugugaacccacaauuaucgagagaaauauuaccgaaaucguguaucugacaaacaccacgauugagaaggaaaucugcccuaaacccgcugaguaccggaauugguccaagccucagugugggauuaccggauucgcccccuuuucuaaagacaacagcauccgccucuccgcgggcggggauaucugggugacaagagagccuuaugucucuugcgacccggauaaguguuaccaauucgcucugggacagggcaccacacuuaauaacgugcauagcaauaacaccguucgggaccgcacgcccuauagaacacugcucaugaaugaacugggggugccuuuucaccugggaaccaagcaggucugcauugccugguccucuagcuccugucaugauggcaaagccuggcuccacgugugcaucacaggcgacgauaagaacgcuaccgccagcuucauuuacaaugggcggcugguugacucuguggucuccuggagcaaagagauccuucgcacccaggaaucugagugugugugcauuaacggaacauguacgguggucaugaccgauggcuccgcuagcgggaaggccgacacaaaaauccuguuuaucgaggaaggaaagauuguucauaccuccacacucucuggcagcgcgcaacacguggaggaaugcuccugcuaucccagauacccuggggugcggugugucugccgcgauaacuggaagggaagcaauagacccgugguugacaucaacauuaaagaucacucuaucguguccagcuacgucuguucuggccuggugggcgacaccccgcggaagaaugacagcuccucuagcucccauugccuugauccuaacaaugaggaagggggacacggcguuaaagggugggccuucgacgauggaaacgacguguggaugggccgcacgauuaaugagacaagcagacugggguaugagaccuuuaaggucaucgaaggauggucuaaccccaaauccaagcuccagaucaauaaacaggugauugucgaucggggcgaccgcagcggcuacucugggaucuucuccguggagggaaagagcuguauuaacagaugcuuuuauguugaacugauccggggcagaaaggaggaaaccgaggugcuguggacauccaauucuauugucguguucugugggaccagcggaacauacggcacgggguccuggccugauggcgcugaccucaaccugaugcccaucuga

SEQ ID NO: 217748 - RNA, 1410 nt, Artificial Sequence
  derived and/or modified CDS sequence (opt5) from neuraminidase__InfluenzaA__AIL94392
augaaccccaaucagaagaucauuaccaucggcagcgugugcaugacaauugggauggccaaccugauccuccaaauuggaaauaucaucuccauuuggaucucucacagcauucagcugggcaaccagucccagaucgaggcuuguaaucaaucugucauuacguacgaaaacaauaccuggguuaaccagacauaugugaauaucagcaacaccaauuucgccgcggggcaguccguggucucugugaaacuugcuggaaacagcucccugugcccuguuagcggcugggccauuuacucuaaggacaauuccgugagaaucgggagcaaaggagaugucuuugugauccgggagccguucauuucuuguagcccccucgaaugccgcacauuuuuccugacccagggcgcccuucugaacgacaagcauuccaauggcacaaucaaagauagaucuccuuaucggacccucauguccugucccauuggggagguuccuagccccuacaacucccgcuuugaaucuguggcuuggagcgccuccgcuugccacgacggaaucaacuggcugacgauuggcaucagcgggccugauucuggagccgucgcggugcugaaguauaauggcaucauuaccgacacaaucaaguccuggaaaaacaauauucucagaacccaagagagcgagugugccugcgugaacgggucuuguuucacaaucaugaccgauggaccgagcgacggccaggcuuccuacaagauuuuucggaucgaaaaaggcaagaucgucaaaucuguugagaugaaugcccccaacuaucauuacgaagagugcagcuguuacccugauuccagcgagauuacgugcgugugccgcgacaauuggcacgggucuaacagacccuggguguccuucaaucagaaccuggaauaucagaucggauacauuuguagcggcgucuuuggggauaauccucggcccaacgacaagacaggaucuugcggcccgguguccagcaauggggcuaacggaguuaagggcuucuccuuuaaauauggcaaugggguguggaucggacgcaccaagucuauuagcuccagaaaaggcuucgagaugaucugggauccuaacggguggacaggaaccgacaacaauuuuucuauuaagcaagacaucgucggcaucaacgaauggagcggguacuccggcagcuucgugcagcaucccgagcuuaccggacuggauuguauucggccuugcuucuggguugaacucauccgcggcagacccaaagagaauacaauuuggacgucuggguccagcaucucuuuuuguggagugaacuccgacaccgucggcuggagcuggcccgauggggccgagcugccuuucacaauugacaaguga

SEQ ID NO: 217749 - RNA, 1410 nt, Artificial Sequence
  derived and/or modified CDS sequence (opt5) from neuraminidase__InfluenzaA__AIL94403
augaaccccaaucagaagaucauuaccaucggcagcgugugcaugacaauugggauggccaaccugauccuccaaauuggaaauaucaucuccauuuggaucucucacagcauucagcugggcaaccagucccagaucgaggcuuguaaucaaucugucauuacguacgaaaacaauaccuggguuaaccagacauaugugaauaucagcaacaccaauuucgccgcggggcaguccguggucucugugaaacuugcuggaaacagcucccugugcccuguuagcggcugggccauuuacucuaaggacaauuccgugagaaucgggagcaaaggagaugucuuugugauccgggagccguucauuucuuguagcccccucgaaugccgcacauuuuuccugacccagggcgcccuucugaacgacaagcauuccaauggcacaaucaaagauagaucuccuuaucggacccucauguccugucccauuggggagguuccuagccccuacaacucccgcuuugaaucuguggcuuggagcgccuccgcuugccacgacggaaucaacuggcugacgauuggcaucagcgggccugauucuggagccgucgcggugcugaaguauaauggcaucauuaccgacacaaucaaguccuggaaaaacaauauucucagaacccaagagagcgagugugccugcgugaacgggucuuguuucacaaucaugaccgauggaccgagcgacggccaggcuuccuacaagauuuuucggaucgaaaaaggcaagaucgucaaaucuguugagaugaaugcccccaacuaucauuacgaagagugcagcuguuacccugauuccagcgagauuacgugcgugugccgcgacaauuggcacgggucuaacagacccuggguguccuucaaucagaaccuggaauaucagaucggauacauuuguagcggcgucuuuggggauaauccucggcccaacgacaagacaggaucuugcgauccgguguccagcaauggcgcuaacgggguuaagggauucuccuuuaaauauggcaauggcguguggaucgggcgcaccaagucuauuagcuccagaaaaggauucgagaugaucugggacccuaacggcuggacagggaccgacaacaauuuuucuauuaagcaagauaucgucggaaucaacgaauggagcggcuacuccgggagcuucgugcagcaucccgagcuuaccggccuggacuguauucggccuugcuucuggguugaacucauccgcggaagacccaaagagaauacaauuuggacgucuggcuccagcaucucuuuuuguggggugaacuccgauaccgucggauggagcuggcccgacggcgccgagcugccuuucacaauugauaaguga

SEQ ID NO: 217750 - RNA, 1410 nt, Artificial Sequence; identical to SEQ ID NO: 214218
  derived and/or modified CDS sequence (opt5) from neuraminidase__InfluenzaA__AIL94426

SEQ ID NO: 217751 - RNA, 1410 nt, Artificial Sequence
  derived and/or modified CDS sequence (opt5) from neuraminidase__InfluenzaA__AIL94438
augaaccccaaucagaagaucauuaccaucggcagcgugugcaugacaauugggauggccaaccugauccuccaaauuggaaauaucaucuccauuuggaucucucacagcauucagcugggcaaccagucccagaucgaggcuuguaaucaaucugucauuacguacgaaaacaauaccuggguuaaccagacauaugugaauaucagcaacaccaauuucgccacagggcaguccguggucucugugaaacuugcgggaaacagcucccugugcccuguuagcggcugggcuauuuacucuaaggacaauuccgugagaaucgggagcaaaggagaugucuuugugauccgggagccguucauuucuuguagcccccucgaaugccgcaccuuuuuccugacacagggcgcccuucugaacgacaagcauuccaauggcaccaucaaagauagaucuccuuaucggacgcucauguccugucccauuggggagguuccuagccccuacaacucccgcuuugaaucuguggccuggagcgcuuccgccugccacgacggaaucaacuggcugaccauuggcaucagcgggccugauucuggagcugucgccgugcugaaguauaauggcaucauuacagacaccaucaaguccuggaaaaacaauauucucagaacacaagagagcgagugugcgugcgugaacgggucuuguuucaccaucaugacggauggaccgagcgacggccaggccuccuacaagauuuuucggaucgaaaaaggcaagaucgucaaaucuguugagaugaaugcucccaacuaucauuacgaagagugcagcuguuacccugauuccagcgagauuacaugcgugugccgcgacaauuggcacgggucuaacagacccuggguguccuucaaucagaaccuggaauaucagaucggauacauuuguagcggcgucuuuggggauaauccucggcccaacgacaagaccggaucuugcggcccgguguccagcaauggggccaacggaguuaagggcuucuccuuuaaauauggcaaugggguguggaucggacgcacaaagucugucagcuccagaaaaggcuucgagaugauuugggauccuaacggguggaccggaaccgacaacaauuuuucuaucaagcaagacauugugggcaucaacgaauggagcggguacuccggcagcuucguucagcaucccgagcuuacaggacuggauuguauccggccuugcuucuggguggaacucauucgcggcagacccaaagagaauacgaucuggaccucuggguccagcauuucuuuuuguggagucaacuccgacacagugggcuggagcuggcccgauggggcugagcugccuuucaccaucgacaaguga

SEQ ID NO: 217752 - RNA, 1410 nt, Artificial Sequence
  derived and/or modified CDS sequence (opt5) from neuraminidase__InfluenzaA__AIL94449
augaaccccaaucagaagaucauuaccaucggcagcgugucccugacaauuucuacgaucugcuucuuuaugcaaauugccauccucaucaccacagucacccugcacuucaaacaguacgaguuuaacagcccuccgaauaaccagguuaugcuuugugaacccacaauuaucgagagaaauauuaccgaaaucguguaucugacaaacaccacgauugagaaggaaaucugcccuaaacccgcuaaguaccggaauugguccaaaccucagugugggauuaccggauucgcccccuuuucuaaggacaacagcauccgccucuccgcgggcggggauaucugggugacaagagagccuuaugucucuugcgacccggauaaguguuaccaauucgcucugggacagggcaccacacuuaauaacgugcauagcaauaacaccguucgggaccgcacgcccuauagaacacugcucaugaaugagcugggggugccuuuucaccugggaaccaaacaggucugcauugccugguccucuagcuccugucaugauggcaaggccuggcuccacgugugcaucacaggcgacgauaaaaacgcuaccgccagcuucauuuacaaugggcggcugguugacucuguggucuccuggagcaaggaaauccuucgcacccaggagucugaaugugugugcauuaacggaacauguacgguggucaugaccgauggcuccgcuagcgggaaagccgacacaaagauccuguuuaucgaggagggaaagauuguucauaccuccacacucucuggcagcgcgcaacacguggaagagugcuccugcuaucccagauacccuggggugcggugugucugccgcgauaacuggaaaggaagcaauagacccaucguggacauuaacaucaaggaucacucuauuguuuacuccuauguguguagcggccuggucggcgacaccccgcggaaaaaugacucuagcuccucuagccauugccuuaacccuaauaacgaagaagggggacacggcgugaaggggugggccuucgaugacggaaaugauguuuggaugggccgcacgaucaacgagacauccagacugggguacgagaccuuuaaagugaucgagggauggagcaaucccaagucuaaacuccagauuaaccggcaggucaucguggaccgcggcgauagauccggcuauagcgggauuuucucugucgaaggaaaguccuguaucaaucggugcuuuuacguggagcugauuagaggccgcaaggaagagaccgaaguucuguggacaagcaacuccaucguggucuucugugggaccucuggaacauauggcacggggagcuggccugacggcgcugaucucaaucugaugcccauuuga

SEQ ID NO: 217753 - RNA, 1410 nt, Artificial Sequence; identical to SEQ ID NO: 217747
  derived and/or modified CDS sequence (opt5) from neuraminidase__InfluenzaA__AIL94461

SEQ ID NO: 217754 - RNA, 1410 nt, Artificial Sequence
  derived and/or modified CDS sequence (opt5) from neuraminidase__InfluenzaA__AIL94473
augaaccccaaucagaagaucauuaccaucggcagcgugugcaugacaauugggauggccaaccugauccuccaaauuggaaauaucaucuccauuugggucggccacucuauccagcuggggaaccagagccagauugagacguguaaucaauccguuaucaccuacgaaaacaauacaugggugaaccagaccuaugugaauauuucuaacacaaauuucgcugccggacagagcgucgugccuguuaaacuugcgggcaacuccucucugugcccggugagcgggugggcuaucuacuccaaggacaauagcgucagaauuggaucuaaaggcgauguguuuguuauccgggagcccuucaucuccuguagcccucucgaaugccgcaccuuuuuccugacacagggcgcccuucugaacgacaagcauucuaaugggaccauuaaagauagaucccccuaucggacgcucaugagcuguccuaucggagaggugcccucuccuuacaacucccgcuuugaaagcgucgccugguccgcuucugccugccacgacggcauuaacuggcugaccaucgggauuagcggaccggauuccggcgcuguggccgugcugaaguauaaugggaucaucacagacaccauuaagagcuggagaaacaauauccuccggacacaagagucugagugugcgugcgucaacggauccuguuucaccauuaugacggauggccccagcgacggccaggccucuuacaaaaucuuucgcauugaaaaggggaaaaucguuaagagcguggagaugaauacaccuaacuaucauuacgaagagugcuccuguuaccccgauucuagcgagauuaccugcgugugcagagacaauuggcacggauccaaccggccuugggucagcuucaaucagaaccuggaauaucagaucggcuacaucuguucugggguguuuggagauaauccccgcccgaacgacaaaacaggcuccugcgggccuguuagcucuaauggagcuaacggcgugaagggcuucuccuuuaaguaugggaauggagucuggauuggcagaaccaaaagcaucuccucucggaagggguucgagaugauuugggaucccaacggauggaccggcacagacaacaauuuuagcaucaaacaagacauuguggggaucaaggaaugguccggcuacucuggcagcuucguucagcauccugagcuuacgggacuggauuguauccgccccugcuucuggguggaacucauuagagggcggcccgaggagaacaccaucuggacauccggaagcucuauuuccuuuuguggcgucaauagcgacaucgugggguggucuuggccugauggagccgaacugccguucaccauugacaaauga

SEQ ID NO: 217755 - RNA, 1410 nt, Artificial Sequence; identical to SEQ ID NO: 216808
  derived and/or modified CDS sequence (opt5) from neuraminidase__InfluenzaA__AIL94484

SEQ ID NO: 217756 - RNA, 1410 nt, Artificial Sequence; identical to SEQ ID NO: 217718
  derived and/or modified CDS sequence (opt5) from neuraminidase__InfluenzaA__AIL94507

SEQ ID NO: 217757 - RNA, 1410 nt, Artificial Sequence
  derived and/or modified CDS sequence (opt5) from neuraminidase__InfluenzaA__AIL94518
augaaccccaaucagaagaucauuaccaucggcagcgugucccugacaauuucuacgaucugcuucuuuaugcaaauugccauccucaucaccacagucacccugcacuucaaacaguacgaguuuaacagcccuccgaauaaccagguuaugcuuugugaacccacaauuaucgagagaaauauuaccgaaaucguguaucugacaaacaccacgauugagaaggaaaucugcccuaaacccgcugaguaccggaauugguccaagccucagugugggauuaccggauucgcccccuuuucuaaagacaacagcauccgccucuccgcgggcggggauaucugggugacaagagagccuuaugucucuugcgacccggauaaguguuaccaauucgcucugggacagggcaccacacuuaauaacgugcauagcaauaacaccguucgggaccgcacgcccuauagaacacugcucaugaaugaacugggggugccuuuucaccugggaaccaagcaggucugcauugccugguccucuagcuccugucaugauggcaaagccuggcuccacgugugcaucacaggcgacgauaagaacgcuaccgccagcuucauuuacaaugggcggcugguugacucuguggucuccuggagcaaagagauccuucgcacccaggaaucugagugugugugcauuaacggaacauguacgguggucaugaccgauggcuccgcuagcgggaaggccgacacaaaaauccuguuuaucgaggaaggaaagauuguucauaccuccacacucucuggcagcgcgcaacacguggaggaaugcuccugcuaucccagauacccuggggugcggugugucugccgcgauaacuggaagggaagcaauagacccaucguggacauuaacaucaaagaucacucuauuguuuccagcuacguguguucuggccuggucggcgacaccccgcggaagaaugacagcuccucuagcucccauugccuugauccuaacaaugaggaagggggacacggcgugaaagggugggccuucgacgauggaaacgacguuuggaugggccgcacgaucaaugagacaagcagacugggguaugagaccuuuaaggugaucgaaggauggucuaaccccaaauccaagcuccagauuaauaaacaggucaucguggaucggggcgaccgcagcggcuacucugggauuuucuccgucgagggaaagagcuguaucaacagaugcuuuuauguggaacugauucggggcagaaaggaggaaaccgagguucuguggacauccaauucuaucguggucuucugugggaccagcggaacauacggcacgggguccuggccugauggcgcugaccucucucugaugcccauuuga

SEQ ID NO: 217758 - RNA, 1410 nt, Artificial Sequence
  derived and/or modified CDS sequence (opt5) from neuraminidase__InfluenzaA__AIL94530
augaaccccaaucagaagaucauuaccaucggcagcgugucccugacaauuucuacgaucugcuucuuuaugcaaauugccauccucaucaccacagucacccugcacuucaaacaguacgaguuuaacagcccuccgaauaaccagguuaugcuuugugaacccacaauuaucgagagaaauauuaccgaaaucguguaucugacaaacaccacgauugagaaggaaaucugcccuaaacccgcugaguaccggaauugguccaagccucagugugggauuaccggauucgcccccuuuucuaaagacaacagcauccgccucuccgcgggcggggauaucugggugacaagagagccuuaugucucuugcgacccggauaaguguuaccaauucgcucugggacagggcaccacacuuaauaacgugcauagcaauaacaccguucgggaccgcacgcccuauagaacacugcucaugaaugaacugggggugccuuuucaccugggaaccaagcaggucugcauugccugguccucuagcuccugucaugauggcaaagccuggcuccacgugugcaucacaggcgacgauaagaacgcuaccgccagcuucauuuacaaugggcggcugguugacucuguggucuccuggagcaaagagauccuucgcacccaggaaucugagugugugugcauuaacggaacauguacgguggucaugaccgauggcuccgcuagcgggaaggccgacacaaaaauccuguuuaucgaggaaggaaagauuguucauaccuccacacucucuggcagcgcgcaacacguggaggaaugcuccugcuaucccagauacccuggggugcggugugucugccgcgauaacuggaagggaagcaauagacccaucguggacauuaacaucaaagaucacucuauuguuuccagcuacguguguucuggccuggucggcgacaccccgcggaagaaugacagcuccucuagcucccauugccuuaacccuaauaacgaggaagggggacacggcgugaaagggugggccuucgaugacggaaaugauguuuggaugggccgcacgaucaacgagacaagcagacugggguaugagaccuuuaaggugaucgaaggauggucuaaucccaaauccaagcuccagauuaaccggcaggucaucguggaccgcggcgauagaagcggcuacucugggauuuucuccgucgagggaaaaagcuguaucaaucggugcuuuuauguggaacugauuagaggccgcaaggaggaaaccgagguucuguggacauccaacucuaucguggucuucugugggaccagcggaacauacggcacgggguccuggccugacggcgcugaucucaaucugaugcccauuuga

SEQ ID NO: 217759 - RNA, 1410 nt, Artificial Sequence; identical to SEQ ID NO: 217748
  derived and/or modified CDS sequence (opt5) from neuraminidase__InfluenzaA__AIL94542

SEQ ID NO: 217760 - RNA, 1410 nt, Artificial Sequence; identical to SEQ ID NO: 217718
  derived and/or modified CDS sequence (opt5) from neuraminidase__InfluenzaA__AIL94553

SEQ ID NO: 217761 - RNA, 1410 nt, Artificial Sequence; identical to SEQ ID NO: 217709
  derived and/or modified CDS sequence (opt5) from neuraminidase__InfluenzaA__AIL94564

SEQ ID NO: 217762 - RNA, 1410 nt, Artificial Sequence; identical to SEQ ID NO: 217718
  derived and/or modified CDS sequence (opt5) from neuraminidase__InfluenzaA__AIL94576

SEQ ID NO: 217763 - RNA, 1410 nt, Artificial Sequence
  derived and/or modified CDS sequence (opt5) from neuraminidase__InfluenzaA__AIL94587
augaaccccaaucagaagaucauuaccaucggcagcgugugcaugacaauugggauggccaaccugauccuccaaauuggaaauaucaucuccauuuggaucucucacagcauucagcugggcaaccagucccagaucgaggcuuguaaucaaucugucauuacguacgaaaacaauaccuggguuaaccagacauaugugaauaucagcaacaccaauuucgccgcggggcaguccguggucucugugaaacuugcuggaaacagcucccugugcccuguuagcggcugggccauuuacucuaaggacaauuccgugagaaucgggagcaaaggagaugucuuugugauccgggagccguucauuucuuguagcccccucgaaugccgcacauuuuuccugacccagggcgcccuucugaacgacaagcauuccaauggcacaaucaaagauagaucuccuuaucggacccucauguccugucccauuggggagguuccuagccccuacaacucccgcuuugaaucuguggcuuggagcgccuccgcuugccacgacggaaucaacuggcugacgauuggcaucagcgggccugauucuggagccgucgcggugcugaaguauaauggcaucauuaccgacacaaucaaguccuggaaaaacaauauucucagaacccaagagagcgagugugccugcgugaacgggucuuguuucacaaucaugaccgauggaccgagcgacggccaggcuuccuacaagauuuuucggaucgaaaaaggcaagaucgucaaaucuguugagauggaugcccccaauuaucauuacgaagagugcagcuguuacccugacuccagcgagauuacgugcgugugccgcgauaacuggcacgggucuaauagacccuggguguccuucaaccagaaucuggaauaucagaucggauacauuuguagcggcgucuuuggggacaacccucggcccaaugauaagacaggaucuugcggcccgguguccagcaacggggcuaauggaguuaagggcuucuccuuuaaauauggcaacgggguguggaucggacgcaccaagucuauuagcuccagaaaaggcuucgagaugaucugggacccuaauggguggaacggaacagacaacaauuuuucuauuaagcaagauaucgucggcaucaacgaauggagcggguacuccggcagcuucgugcagcaucccgagcuuaccggacuggacuguauucggccuugcuucuggguugaacucauccgcggcagacccaaagagaauaccauuuggacagggggaucuuccaucagcuuuuguggcgugaacucugauacggucgggugguccuggcccgacggagccgagcugccuuucaccauugauaaguga

SEQ ID NO: 217764 - RNA, 1410 nt, Artificial Sequence; identical to SEQ ID NO: 217748
  derived and/or modified CDS sequence (opt5) from neuraminidase__InfluenzaA__AIL94598

SEQ ID NO: 217765 - RNA, 1410 nt, Artificial Sequence
  derived and/or modified CDS sequence (opt5) from neuraminidase__InfluenzaA__AIL94609
augaaccccaaucagaagaucauuaccaucggcagcgugucccugacaauuucuacgaucugccucuucaugcaaauugccauccugaucaccacagucacccuucacuuuaaacaguacgaguucaacagcccuccgaauaaccagguuaugcugugugaacccacaauuaucgagagaaauauuaccgaaaucguguaucucacaaacaccacgauugagaaggaaaucugcccuaaacccgcugaguaccggaauugguccaagccucagugugggauuaccggauuugcccccuucucuaaagacaacagcauccgccuguccgcgggcggggauaucugggugacaagagagccuuaugucucuugcgacccggauaaguguuaccaauuugcucuuggacagggcaccacacugaauaacgugcauagcaauaacaccguucgggaccgcacgcccuauagaacacuccugauguccgaacugggggugccuuuccaccucggaaccaagcaggucugcauugccuggucuagcuccagcugucaugauggcaaagccuggcugcacgugugcaucacaggcgacgauaagaaugcuaccgccucuuuuauuuacaacgggcggcuuguugacuccguggucagcuggucuaaagagauccugcgcacccaggaauccgagugugugugcauuaauggaacauguacgguggucaugaccgauggcagcgcuuccgggaaggccgacacaaaaauccucuucaucgaggaaggaaagauuguucauaccucuacacugagcggcuccgcgcaacacguggaggaaugcagcugcuauccccuuuacccuggggugagaugugucugccgggauaacuggaagggaucuaaccgccccaucguggacauuaauaucaaagaucacuccauuguuagcucuuacguguguagcggccuggucggcgacaccccgagaaagaacgacuccucuagcuccagccauugccucgauccuaauaacgaggaagggggacacggcgugaaagggugggccuuugacgauggaaaugacguuuggaugggccggacgaucaacgagacaucucgccugggguaugagaccuucaaggugaucgaaggaugguccaaucccaaaagcaagcugcagauuaacagacaggucaucguggaucggggcgaccgcucuggcuacuccgggauuuuuagcgucgagggaaaauccuguaucaauagaugcuucuauguggaacucauucggggcagaaaggaggaaaccgagguucuguggacaucuaacagcaucguggucuuuugugggaccuccggaacauacggcacggggucuuggccugauggcgcugaccuuaaucugaugcccauuuga

SEQ ID NO: 217766 - RNA, 1410 nt, Artificial Sequence
  derived and/or modified CDS sequence (opt5) from neuraminidase__InfluenzaA__AIL94621
augaaccccaaucagaagaucauuaccaucggcagcgugugcaugacaauugggauggccaaccugauccuccaaauuggaaauaucaucuccauuuggaucucucacagcauucagcugggcaaccagucccagaucgaggcuuguaaucaaucugucauuacguacgaaaacaauaccuggguuaaccagacauaugugaauaucagcaacaccaauuucgccgcggggcaguccguggucccugugaaacuugcuggaaacucuagccugugcccgguuuccggcugggccauuuacagcaaggacaauucugugagaaucggguccaaaggagaugucuuugugauccgggagcccuucauuagcuguucuccucucgaaugccgcacauuuuuccugacccagggcgcccuucugaacgacaagcauuccaauggcacaaucaaagauagaagccccuaucggacccucaugucuuguccuauuggggagguucccuccccuuacaacagccgcuuugaauccguggcuuggucugccagcgcuugccacgacggaaucaacuggcugacgauuggcaucuccgggccggauagcggagccgucgcggugcugaaguauaauggcaucauuaccgacacaaucaagucuuggaaaaacaauauucucagaacccaagaguccgagugugccugcgugaacgggagcuguuucacaaucaugaccgauggacccucugacggccaggcuagcuacaagauuuuucggaucgaaaaaggcaagaucgucaaauccguugagaugaaugccccuaacuaucauuacgaagagugcucuuguuaccccgauagcuccgagauuacgugcgugugccgcgacaauuggcacgggagcaacagaccuugggugucuuucaaucagaaccuggaauaucagaucggauacauuuguuccggcgucuuuggggauaauccccggccgaacgacaagacaggaagcugcggcccugugucuuccaauggggcuaacggaguuaagggcuucagcuuuaaauauggcaaugggguguggaucggacgcaccaaguccauuucuagcagaaaaggcuucgagaugaucugggaucccaacggguggacaggaaccgacaacgacuuuuccauuaagcaagauaucgucggcaucaaugaauggucuggguacagcggcuccuucgugcagcauccugagcuuaccggacuggacuguauucggcccugcuucuggguugaacucauccgcggcagacccaaagagaacacaauuuggacgagcgggucuuccaucagcuuuuguggagucaauucugauaccgugggcugguccuggccugacggggccgagcugccguucacaauugauaaguga

SEQ ID NO: 217767 - RNA, 1410 nt, Artificial Sequence; identical to SEQ ID NO: 217718
  derived and/or modified CDS sequence (opt5) from neuraminidase__InfluenzaA__AIL94632

SEQ ID NO: 217768 - RNA, 1410 nt, Artificial Sequence; identical to SEQ ID NO: 214218
  derived and/or modified CDS sequence (opt5) from neuraminidase__InfluenzaA__AIL94643

SEQ ID NO: 217769 - RNA, 1410 nt, Artificial Sequence
  derived and/or modified CDS sequence (opt5) from neuraminidase__InfluenzaA__AIL94655
augaaccccaaucagaagaucauuaccaucggcagcgugugcaugacaauugggauggccaaccugauccuccaaauuggaaauaucaucuccauuuggaucucucacagcauucagcugggcaaccagucccagaucgagacguguaaucaaucugucauuaccuacgaaaacaauacauggguuaaccagaccuaugugaauaucagcaacacaaauuucgcugccgggcaguccguggucucugugaaacuugcgggaaacagcucccugugcccuguuagcggcugggcuauuuacucuaaggacaauuccaucagaaucgggagcaaaggagauguguuugucauucgggagccguucaucucuuguagcccccucgaaugccgcaccuuuuuccugacacagggcgcccuucugaacgacaagcauuccaauggcaccauuaaagauagaucuccuuaucggacgcucauguccugucccaucggggaggugccuagccccuacaacucccgcuuugaaucuguugccuggagcgcuuccgccugccacgacggaauuaacuggcugaccaucggcaucagcgggccugauucuggagcuguggccguccugaaguauaauggcauuaucacagacaccauuaaguccuggagaaacaauauccuccggacacaagagagcgagugugcgugcgugaacgggucuuguuucaccauuaugacggauggaccgagcgacggccaggccuccuacaaaaucuuucgcaucgaaaagggcaaaauugugaagucugucgagaugaaugcucccaacuaucauuacgaagagugcagcuguuacccugauuccagcgagaucacaugcguuugcagagacaauuggcacgggucuaaccggcccuggguguccuucaaucagaaccuggaauaucagauuggauacaucuguagcggcauuuuuggggauaauccucgccccaacgacaaaaccggaucuugcggcccgguguccagcaauggggccaacggagucaagggcuucuccuuuaaguauggcaaugggguguggaucggaagaacaaaaucuauuagcucccggaagggcuucgagaugaucugggauccuaacggguggaccggaaccgacaacaauuuuucuaucaaacaagacauuguuggcaucaacgaauggagcggguacuccggcagcuucgugcagcaucccgagcuuacaggacuggauuguauucgcccuugcuucugggucgaacucaucagaggccggcccaaggagaauacgauuuggaccucuggguccagcaucucuuuuuguggagugaacuccgacacaguuggcuggagcuggcccgauggggcugagcugccuuucaccaucgacaaauga

SEQ ID NO: 217770 - RNA, 1410 nt, Artificial Sequence
  derived and/or modified CDS sequence (opt5) from neuraminidase__InfluenzaA__AIL94677
augaaccccaaucagaagaucauuaccaucggcagcgugugcaugacaauugggauggccaaccugauccuccaaauuggaaauaucaucuccauuuggaucucucacagcauucagcugggcaaccagucccagaucgaggcuuguaaucaaucugucauuacguacgaaaacaauaccuggguuaaccagacauaugugaauaucagcaacaccaauuucgccgcggggcaguccguggucccugugaaacuugcuggaaacucuagccugugcccgguuuccggcugggccauuuacagcaaggacaauucugugagaaucggguccaaaggagaugucuuugugauccgggagcccuucauuagcuguucuccucucgaaugccgcacauuuuuccugacccagggcgcccuucugaacgacaagcauuccaauggcacaaucaaagauagaagccccuaucggacccucaugucuuguccuauuggggagguucccuccccuuacaacagccgcuuugaauccguggcuuggucugccagcgcuugccacgacggaaucaacuggcugacgauuggcaucuccgggccggauagcggagccgucgcggugcugaaguauaauggcaucauuaccgacacaaucaagucuuggaaaaacaauauucucagaacccaagaguccgagugugccugcgugaacgggagcuguuucacaaucaugaccgauggacccucugacggccaggcuagcuacaagauuuuucggaucgaaaaaggcaagaucgucaaauccguugagaugaaugccccuaacuaucauuacgaagagugcucuuguuaccccgauagcuccgagauuacgugcgugugccgcgacaauuggcacgggagcaacagaccuugggugucuuucaaucagaaccuggaauaucagaucggauacauuuguuccggcgucuuuggggauaauccccggccgaacgacaagacaggaagcugcggcccugugucuuccaauggggcuaacggaguuaagggcuucagcuuuaaauauggcaaugggguguggaucggacgcaccaaguccauuucuagcagaaaaggcuucgagaugaucugggaucccaacggguggacaggaaccgacaacaauuuuuccauuaagcaagacaucgucggcaucaacgaauggucuggguacagcggcuccuucgugcagcauccugagcuuaccggacuggauuguauucggcccugcuucuggguugaacucauccgcggcagacccaaagagaauacaauuuggacgagcgggucuuccaucagcuuuuguggagugaacucugacaccgucggcugguccuggccugauggggccgagcugccguucacaauugacaaguga

SEQ ID NO: 217771 - RNA, 1410 nt, Artificial Sequence; identical to SEQ ID NO: 217709
  derived and/or modified CDS sequence (opt5) from neuraminidase__InfluenzaA__AIL94688

SEQ ID NO: 217772 - RNA, 1410 nt, Artificial Sequence
  derived and/or modified CDS sequence (opt5) from neuraminidase__InfluenzaA__AIL94700
augaaccccaaucagaagaucauuaccaucggcagcgugucccugacaauuucuacgaucugcuucuuuaugcaaauugccauccucaucaccauugucacacugcacuucaaacaguacgaguuuaacagcccuccgaauaaccagguuaugcuuugugaacccaccaucauugagagaaauaucacagaaauuguguaucugaccaacacaaccaucgagaaggaaauuugcccuaaacccgcugaguaccggaauugguccaagccucagugugggaucacgggauucgcccccuuuucuaaagacaacagcauccgccucuccgcgggcggggauauuugggugaccagagagccuuaugucucuugcgacccggauaaguguuaccaauucgcucugggacagggcacaacccuuaauaacgugcauagcaauaacacaguucgggaccgcacccccuauagaacgcugcucaugaaugaacugggggugccuuuucaccugggaacaaagcaggucugcaucgccugguccucuagcuccugucaugauggcaaagccuggcuccacgugugcauuaccggcgacgauaagaacgcuacagccagcuucaucuacaaugggcggcugguugacucuguggucuccuggagcaaagagauucuucgcacccaggaaucugagugugugugcaucaacggaaccuguacaguggucaugacggauggcuccgcuagcgggaaggccgacaccaaaauccuguuuauugaggaaggaaagaucguucauauuuccacacucucuggcagcgcgcaacacguggaggaaugcuccugcuaucccagauacccuggggugcggugugucugccgcgauaacuggaagggaagcaauagacccaucguggacauuaacaucgaggaucacucuaucguuuccagcuacguguguucuggccuggucggcgacaccccgcggaaaaaugacagcuccucuagcucccauugccuugauccuaacaaugaagaagggggacacggcgugaaggggugggccuucgacgauggaaacgacguuuggaugggccgcacaauuaaugagaccagcagacugggguaugagacguuuaaagugaucgagggauggucuaaccccaaguccaaacuccagauuaaucggcaggucaucguggaucgcggcgacagaagcggcuacucugggauuuucuccgucgaaggaaagagcuguaucaaccggugcuuuuauguggagcugauuagaggccgcaaagaagagacagagguucuguggaccuccaauucuaucguggucuucugugggaccagcggaacauacggcaccggguccuggccugauggcgcugaccucaaccugaugcccaucuga

SEQ ID NO: 217773 - RNA, 1410 nt, Artificial Sequence; identical to SEQ ID NO: 217718
  derived and/or modified CDS sequence (opt5) from neuraminidase__InfluenzaA__AIL94712

SEQ ID NO: 217774 - RNA, 1410 nt, Artificial Sequence; identical to SEQ ID NO: 217748
  derived and/or modified CDS sequence (opt5) from neuraminidase__InfluenzaA__AIL94723

SEQ ID NO: 217775 - RNA, 1410 nt, Artificial Sequence
  derived and/or modified CDS sequence (opt5) from neuraminidase__InfluenzaA__AIL94734
augaaccccaaucagaagaucauuaccaucggcagcgugucccugacaauuucuacgaucugcuucuuuaugcaaauugccauccucaucaccacagucacccugcacuucaaacaguacgaguuuaacagcccuccgaauaaccagguuaugcuuugugaacccacaauuaucgagagaaauauuaccgaaaucguguaucugacaaacaccacgauugagaaggaaaucugcccuaaacccgcugaguaccggaauugguccaagccucagugugggauuaccggauucgcccccuuuucuaaagacaacagcauccgccucuccgcgggcggggauaucugggugacaagagagccuuaugucucuugcgacccggauaaguguuaccaauucgcucugggacagggcaccacacuuaauaacgaacauagcaauaacaccgugcgggaccgcacgcccuauagaacacugcucaugaaugagcuggggguuccuuuucaccugggaaccaaacaggugugcauugccugguccucuagcuccugucaugauggcaaggccuggcuccacgucugcaucacaggcgacgauaagaacgcuaccgccagcuucauuuacaaugggcggcugguggacucuguuguguccuggagcaaagaaauccuucgcacccaggagucugagugugucugcauuaacggaacauguacgguggugaugaccgauggcuccgcuagcgggaaggccgacacaaaaauccuguuuaucgaagagggaaagauuguccauaucuccacccucucuggcagcgcgcaacacguugaagagugcuccugcuaucccagauacccuggggugcggugugugugccgcgauaacuggaagggaagcaauagacccauugucgacaucaacauuaaagaucacucuaucguguccagcuacguuuguucuggccuggugggcgacacaccgcggaagaaugacagcuccucuagcucccauugccuugauccuaacaaugaagaagggggacacggcgucaaagggugggccuucgacgauggaaacgacguguggaugggccgcaccaucaaugagacgagcagacugggguaugagacauuuaagguuauugagggauggucuaaccccaaauccaagcuccagaucaaucgccaggugauugucgaucggggcgacagaagcggcuacucugggaucuucuccguggaaggaaaaagcuguauuaaccggugcuuuuaugucgagcugaucagaggccgcaaggaagagaccgaggugcuguggaccuccaauucuauuguuguguucugugggacaagcggaaccuacggcacaggguccuggccugauggcgcugaccucaaccugaugcccaucuga

SEQ ID NO: 217776 - RNA, 1410 nt, Artificial Sequence; identical to SEQ ID NO: 217718
  derived and/or modified CDS sequence (opt5) from neuraminidase__InfluenzaA__AIL94746

SEQ ID NO: 217777 - RNA, 1410 nt, Artificial Sequence; identical to SEQ ID NO: 217748
  derived and/or modified CDS sequence (opt5) from neuraminidase__InfluenzaA__AIL94757

SEQ ID NO: 217778 - RNA, 1410 nt, Artificial Sequence; identical to SEQ ID NO: 217709
  derived and/or modified CDS sequence (opt5) from neuraminidase__InfluenzaA__AIL94768

SEQ ID NO: 217779 - RNA, 1410 nt, Artificial Sequence; identical to SEQ ID NO: 214218
  derived and/or modified CDS sequence (opt5) from neuraminidase__InfluenzaA__AIL94780

SEQ ID NO: 217780 - RNA, 1410 nt, Artificial Sequence; identical to SEQ ID NO: 217748
  derived and/or modified CDS sequence (opt5) from neuraminidase__InfluenzaA__AIL94803

SEQ ID NO: 217781 - RNA, 1410 nt, Artificial Sequence; identical to SEQ ID NO: 217728
  derived and/or modified CDS sequence (opt5) from neuraminidase__InfluenzaA__AIL94814

SEQ ID NO: 217782 - RNA, 1410 nt, Artificial Sequence
  derived and/or modified CDS sequence (opt5) from neuraminidase__InfluenzaA__AIL94826
augaaccccaaucagaagaucauuaccaucggcagcgugucccugacaauuucuacgaucugcuucuuuaugcaaauugccauccucaucaccacagucacccugcacuucaaacaguacgaguuuaacagccuuccuaauaaccagguuaugcugugugaaccgacaauuaucgagagaaauauuaccgaaaucguguaucucacaaacaccacgauugagaaggaaaucugccccaaaccugcugaguaccggaauugguccaagccccagugugggauuaccggauucgccccuuuuucuaaagacaacagcauccgccuguccgcgggcggggauaucugggugacaagagagcccuaugucucuugcgacccugauaaguguuaccaauucgcucuuggacagggcaccacacugaauaacgugcauagcaauaacaccgcccgggaccgcacgccguauagaacacuccugaugaaugaacuggggguucccuuucaccucggaaccaaacaggugugcauugccugguccucuagcuccugucaugauggcaaggcuuggcugcacgucugcaucacaggcgacgauaagaacgccaccgcuagcuucauuuacaaugggcggcuuguggacucuguuguguccuggagcaaagagauccugcgcacccaggaaucugagugugucugcauuaacggaacauguacgguggugaugaccgauggcuccgccagcgggaaggcggacacaaaaauccucuuuaucgaggaaggaaagauuguccauaccuccacacugucuggcagcgcccaacacguugaggaaugcuccugcuauccuagauaccccggggugcggugugugugccgcgauaacuggaagggaagcaauagaccuaucgucgacauuaacaucaaagaucacucuauuguguccagcuacguuuguucuggccuugugggcgacacgccccggaagaaugacagcuccucuagcucccauugccugaacccgaauaacgaggaagggggacacggcgucaaagggugggcuuucgaugacggaaaugauguguggaugggccgcaccaucaacgagacaagcagacucggguaugagaccuuuaagguuaucgaaggauggucuaauccuaaauccaagcugcagauuaaccgccaggugaucgucgaccggggcgauagaagcggcuacucugggauuuucuccguggagggaaaaagcuguaucaaucggugcuuuuaugucgaacugauuagaggccgcaaggaggaaaccgaggugcucuggacauccaacucuaucguuguguucugugggaccagcggaacauacggcacgggguccuggcccgacggcgccgaucugaaucuuaugccuauuuga

SEQ ID NO: 217783 - RNA, 1410 nt, Artificial Sequence
  derived and/or modified CDS sequence (opt5) from neuraminidase__InfluenzaA__AIL94850
augaaccccaaucagaagaucauuaccaucggcagcgugucccugacaauuucuacgaucugcuucuuuaugcaaauugccauccucaucaccacagucacccugcacuucaaacaguacgaguuuaacagcccuccgaauaaccagguuaugcuuuucgaacccacaauuaucgagagaaauauuaccgaaaucguguaucugacaaacaccacgauugagaaggaaaucuguccuaaacucgcugaguaccggaauugguccaagccccagugcgacauuaccggguuugccccuuucucuaaagauaacagcauccgccuguccgcgggaggcgacaucugggugacaagagagcccuaugucucuugugauccugacaagugcuaccaauuugcucuugggcagggaaccacacugaauaacgugcauagcaaugauaccguucgggaccgcacgccguauagaacacuccugaugaacgaacugggcgugcccuuccaccucgggaccaagcaggucuguauugccugguccucuagcuccugccaugauggaaaagccuggcugcacguguguaucacaggcgacgauaagaaugcuaccgccagcuuuauuuacaacggccggcuuguugacucuaucguguccuggagcaaagagauucugcgcacccaggaaucugagugcgucuguaucaaugggacaugcacgguggugaugaccgauggauccgcuagcggcaaggccgacacaaaaauccucuucauuaaggaggggaagaucguccauaccuccacacugucuggaagcgcgcaacacguugaagaguguuccugcuauccuagauaccccggcgugcggugcgugugucgcgauaacuggaaagggagcaacagaccuauugucgacaucaauauuaaggaccacucuaucguguccagcuacguuugcucuggacuugugggcgauacgccccggaaaaacgacagcuccucuagcucccauugucuggauccgaauagcgaagagggcgggcacggagucaagggcugggccuuugacgaugggaacgacguguggaugggacgcaccaucucugaaaaauccagacucggcuaugagacauucaagguuauugagggguggagcaauccuaaaucuaaguuucagaucaaccgccaggugauugucgaucggggaaauagauccggcuacagcggcaucuucuccguggaagggaagucuugcauuaaccgguguuucuaugucgagcugaucagaggacgcaaagaagagaccgaagugcuguggaccagcaauuccauuguuguguuuugcggcacaucugggaccuacggaacaggcagcuggcccgacggggcugaucucaaccugaugccuaucuga

SEQ ID NO: 217784 - RNA, 1410 nt, Artificial Sequence; identical to SEQ ID NO: 211482
  derived and/or modified CDS sequence (opt5) from neuraminidase__InfluenzaA__AIL94862

SEQ ID NO: 217785 - RNA, 1410 nt, Artificial Sequence; identical to SEQ ID NO: 211482
  derived and/or modified CDS sequence (opt5) from neuraminidase__InfluenzaA__AIL94874

SEQ ID NO: 217786 - RNA, 1410 nt, Artificial Sequence
  derived and/or modified CDS sequence (opt5) from neuraminidase__InfluenzaA__AIL94886
augaaccccaaucagaagaucauuaccaucggcagcgugugcaugacaauugggauggccaaccugaugcuccaaaucggaaauauuaucuccaucuggauuucucacagcauccagcugggcaacaaaaaucagauugagacguguaaccaguccgucaucaccuacgaaaauaacacauggguuaaucaaaccuaugugaacauuucuaauacaaacuucgcugccgggcagagcguggucuccgugaagaucgcgggaaauucuagccuuugcccuguuuccggcugggcuauuuacagcaaagacaacucuaucagaaucggguccaagggagauguguuugucauucgggagccguucaucagcuguucuccccuggaaugccgcaccuuuuuccucacacagggcgcccugcuuaaugacaaacauuccaacggcaccauuaaggauagaagcccuuaucggacgcugaugucuugucccaucggggaggugccuucccccuacaacagccgcuuugaauccguugccuggucugcuagcgccugccacgacggaauuaauuggcucaccaucggcaucuccgggccugaugacggagcuguggccguccugaaguauaacggcauuaucacagauaccauuaaaagcuggagaaauaacauccugcggacacaggagucugagugugcgugcgugaauggguccuguuucaccauuaugacggacggaccgagcgauggccaagccucuuacaagaucuuucgcaucgaaaaaggcaagauugugaaaagcgucgagaugaacgcucccaauuaucauuacgaagagugcuccuguuacccugacucuagcgagaucacaugcguuugcagagauaacuggcacggguccaaucggcccugggugagcuucaaccagaaucucgaauaucagauuggauacaucuguucuggcauuuuuggggacaacccucgcccccaugauaagaccggauccugcggcccggugagcucuaauggggccaacggagucaagggcuucuccuuuaaauauggcaaugggguguggaucggaagaacaaagagcauuuccucucggaaaggcuucgagaugaucugggacccuaacggguggaccggaaccgacaacaauuuuagcaucaagcaggauauuguuggcaucaacgaaugguccggguacucuggcagcuucgugcaacaccccgagcugacaggacuugacuguauucgcccuugcuucugggucgaacugaucagaggccggcccaaagagaauacgauuuggaccuccgggagcucuaucuccuuuuguggagugaacagcgauacaguuggcuggucuuggcccgacggggcugagcucccuuucaccaucgauaaguga

SEQ ID NO: 217787 - RNA, 1410 nt, Artificial Sequence; identical to SEQ ID NO: 214994
  derived and/or modified CDS sequence (opt5) from neuraminidase__InfluenzaA__AIL94897

SEQ ID NO: 217788 - RNA, 1410 nt, Artificial Sequence; identical to SEQ ID NO: 217782
  derived and/or modified CDS sequence (opt5) from neuraminidase__InfluenzaA__AIL94909

SEQ ID NO: 217789 - RNA, 1410 nt, Artificial Sequence; identical to SEQ ID NO: 214218
  derived and/or modified CDS sequence (opt5) from neuraminidase__InfluenzaA__AIL94921

SEQ ID NO: 217790 - RNA, 1410 nt, Artificial Sequence; identical to SEQ ID NO: 214218
  derived and/or modified CDS sequence (opt5) from neuraminidase__InfluenzaA__AIL94933

SEQ ID NO: 217791 - RNA, 1410 nt, Artificial Sequence; identical to SEQ ID NO: 217709
  derived and/or modified CDS sequence (opt5) from neuraminidase__InfluenzaA__AIL94945

SEQ ID NO: 217792 - RNA, 1410 nt, Artificial Sequence
  derived and/or modified CDS sequence (opt5) from neuraminidase__InfluenzaA__AIL94957
augaaccccaaucagaagaucauuaccaucggcagcgugugcaugacaauugggauggccaaccugauccuccaaauuggaaauaucaucuccauuuggaucucucacagcauucagcugggcaaccagucccagaucgaggcuuguaaucaaucugucauuacguacgaaaacaauaccuggguuaaccagacauaugugaauaucagcaacaccaauuucgccgcggggcaguccguggucucugugaaacuugcuggaaacagcucccugugcccuguuagcggcugggccauuuacucuaaggacaauuccgugagaaucgggagcaaaggagaugucuuugugauccgggagccguucauuucuuguagcccccucgaaugccgcacauuuuuccugacccagggcgcccuucugaacgacaagcauuccaauggcacaaucaaagauagaucuccuuaucggacccucauguccugucccauuggggagguuccuagccccuacaacucccgcuuugaaucuguggcuuggagcgccuccgcuugccacgacggaaucaacuggcugacgauuggcaucagcgggccugauucuggagccgucgcggugcugaaguauaauggcaucauuaccgacacaaucaaguccuggaaaaacaauauucucagaacccaagagagcgagugugccugcgugaacgggucuuguuucacaaucaugaccgauggaccgagcgacggccaggcuuccuacaagauuuuucggaucgaaaaaggcaagaucgucaaaucuguugagauggaugcccccaauuaucauuacgaagagugcagcuguuacccugacuccagcgagauuacgugcgugugccgcgauaacuggcacgggucuaauagacccuggguguccuucaaccagaaucuggaauaucagaucggauacauuuguagcggcgucuuuggggacaacccucggcccaaugauaagacaggaucuugcggcccgguguccagcaacggggcuaauggaguuaagggcuucuccuuuaaauauggcaacgggguguggaucggacgcaccaagucuauuagcuccagaaaaggcuucgagaugaucugggacccuaauggguggaacggaacagacaacaauuuuucuauuaagcaagauaucgucggcaucaacgaauggagcggguacuccggcagcuucgugcagcaucccgagcuuaccggacuggacuguauucggccuugcuucuggguugaacucauccgcggcagacccaaagagaauaccauuuggacaucuggguccagcaucucuuuuuguggagugaacuccgauacggucggcuggagcuggcccgacggggccgagcugccuuucaccauugauaaguga

SEQ ID NO: 217793 - RNA, 1410 nt, Artificial Sequence; identical to SEQ ID NO: 217782
  derived and/or modified CDS sequence (opt5) from neuraminidase__InfluenzaA__AIL94968

SEQ ID NO: 217794 - RNA, 1410 nt, Artificial Sequence
  derived and/or modified CDS sequence (opt5) from neuraminidase__InfluenzaA__AIM55840
augaaccccaaucagaagaucauuaccaucggcagcgugugcaugacaauugggauggccaaccugauccuccaaauuggaaauaucaucuccauuuggaucucucacagcauucaggucggcaaccagucccagaucgagauuuguaaucaaucuguuaucacguacgaaaacaauaccugggugaaccagacauaugugaauauuagcaacaccaauuucgcugccgggcagccugucguguccguuaaacuggcgggaaacucuagccuuugcccgguguccggcugggcuaucuacagcaaggacaauucugucagaaucggguccaaaggagauguguuuguuauucgggagcccuucaucagcuguucuccucuggaaugccgcacauuuuuccucacccagggcgcccugcuuaacgacaagcauuccaauggcacaauuaaagauagaagccccuaucggacccugaugucuuguccuaucggggaggugcccuccccuuacaacagccgcuuugaauccgucgccuggucugcuagcgccugccacgacggaauuaacuggcucacgaucggcaucuccgggccggauagcggagcuguggccgugcugaaguauaauggcauuaucaccgacacaauuaagucuuggagaaacgauauccugcggacccaagaguccgagugugcgugcgucaaugggagcuguuucacaauuaugaccgacggacccucugauggccaggccagcuacaaaaucuuucgcaucgaaaagggcaaaauuguuaaguccguggagaugaacgcuccuaauuaucauuucgaagagugcucuuguuaccccgacagcuccgagaucacgugcgugugcagagauaacuggcacgggagcaaucggccuugggucucuuuuaaccagaaucucgaauaccagauuggauauaucuguuccggcauuuucggggacaacccccgcccgaaugauaaaacaggaagcugcggcccugugucuuccaacggggccaauggaguuaagggcuuuagcuucaaguacggcaacgggguguggaucggaagaaccaaauccauuucuagccggaagggcuuugagaugaucugggaccccaauggguggacaggaaccgacaacaacuucuccaucaaacaagauauugucggcaucaaugaauggucuggguauagcggcuccuucgugcagcauccugagcugaccggacuugacuguauucgccccugcuuuuggguugaacugaucagaggccggcccaaggagaacacaauuuggacgagcgggucuuccaucagcuucuguggagucaauucugauaccgugggcugguccuggccugacggggcugagcucccguuuacaaucgauaaauga

SEQ ID NO: 217795 - RNA, 1410 nt, Artificial Sequence
  derived and/or modified CDS sequence (opt5) from neuraminidase__InfluenzaA__AIM55851
augaaccccaaucagaagaucauuaccaucggcagcgugugcaugacaauugggauggccaaccugauccuccaaauuggaaauaucaucuccauuugggucucucacagcauccagcugggcaaccagucccagauugagacguguaaucaaucuguuaucaccuacgaaaacaauacaugggugaaccagaccuaugugaauauuagcaacacaaauuucgcugccgggcaguccgucgugccuguuaaacuugcgggaaacucuagccugugcccgguguccggcugggcuaucuacagcaaggacaauucugucagaauuggguccaaaggagauguguuuguuauccgggagcccuucaucagcuguucuccucucgaaugccgcaccuuuuuccugacacagggcgcccuucugaacgacaagcauuccaauggcaccauuaaagauagaagccccuaucggacgcucaugucuuguccuaucggggaggugcccuccccuuacaacagccgcuuugaauccgucgccuggucugcuagcgccugccacgacggaauuaacuggcugaccaucggcauuuccgggccggauagcggagcuguggccgugcugaaguauaauggcaucaucacagacaccauuaagucuuggagaaacaauauccuccggacacaagaguccgagugugcgugcgucaacgggagcuguuucaccauuaugacggauggacccucugacggccaggccagcuacaaaaucuuucgcauugaaaagggcagaaucguuaaauccguggagaugaaugcuccuaacuaucauuacgaagagugcucuuguuaccccgauagcuccgagaucacaugcgugugccgggacaauuggcacgggagcaaccgcccuugggucucuuucaaucagaaccuggaauaucagauuggauacaucuguuccggcguguuuggggauaaucccagaccgaacgacaagaccggaagcugcggcccuguuucuuccaauggggccaacggagugaaaggcuucagcuuuaaguauggcaauggggucuggauuggacggacaaaguccaucucuagccgcaaaggcuucgagaugauuugggaucccaacggguggaccggaaccgacaacaaguuuuccaucaaacaagacauugugggcaucaaugaauggucuggguacagcggcuccuucguucagcauccugagcuuacaggacuggauuguaucagacccugcuucuggguggaacucauucggggccgccccgaggagaacacgaucuggaccagcgggucuuccauuagcuuuuguggagucaagucugacacagugggcugguccuggccugauggggcugaacugccguucaccaucgacaaauga

SEQ ID NO: 217796 - RNA, 1410 nt, Artificial Sequence
  derived and/or modified CDS sequence (opt5) from neuraminidase__InfluenzaA__AIM55862
augaaccccaaucagaagaucauuaccaucggcagcgugugcaugacaauugggauggccaaccugauccuccaaauuggaaauaucaucuccauuugggucucucacagcauccagcugggcaaccagucccagauugagacguguaaucaaucuguuaucaccuacgaaaacaauacaugggugaaccagaccuaugugaauauuagcaacacaaauuucgcugccgggcaguccgucgugccuguuaaacuugcgggaaacucuagccugugcccgguguccggcugggcuaucuacagcaaggacaauucugucagaauuggguccaaaggagauguguuuguuauccgggagcccuucaucagcuguucuccucucgaaugccgcaccuuuuuccugacacagggcgcccuucugaacgacaagcauuccaauggcaccauuaaagauagaagccccuaucggacgcucaugucuuguccuaucggggaggugcccuccccuuacaacagccgcuuugaauccgucgccuggucugcuagcgccugccacgacggaauuaacuggcugaccaucggcauuuccgggccggauagcggagcuguggccgugcugaaguauaauggcaucaucacagacaccauuaagucuuggagaaacaauauccuccggacacaagaguccgagugugcgugcgucaacgggagcuguuucaccauuaugacggauggacccucugacggccaggccagcuacaaaaucuuuaagauugaaaaaggcaagaucguuaaauccguggagaugaaugcuccuaacuaucauuacgaagagugcucuuguuaccccgauagcuccgagaucacaugcgugugccgcgacaauuggcacgggagcaacagaccuugggucucuuucaaucagaaccuggaauaucagauuggauacaucuguuccggcguguuuggggauaauccccggccgaacgacaagaccggaagcugcggcccuguuucuuccaauggggccaacggagugaagggcuucagcuuuaaauauggcaauggggucuggauuggacgcacaaaguccaucucuagcagaaaaggcuucgagaugauuugggaucccaacggguggaacggaaccgacaauaacuuuuccaucaagcaagacauugugggcaucaaagaauggucuggguacagcggcuccuucguucagcauccugagcuuaccggacuggauuguauccggcccugcuucuggguggaacucauucgcggcagacccgaggagaauacaaucuggacgagcgggucuuccauuagcuuuuguggagucaacucugacaccgugggcugguccuggccugauggggcugaacugccguucacaaucgacaaguga

SEQ ID NO: 217797 - RNA, 1410 nt, Artificial Sequence
  derived and/or modified CDS sequence (opt5) from neuraminidase__InfluenzaA__AIM55873
augaaccccaaucagaagaucauuaccaucggcagcgugugcaugacaauugggauggccaaccugauccuccaaauuggaaauaucaucuccauuugggucucucacagcauccagcugggcaaccagucccagauugagacguguaaucaaucuguuaucaccuacgaaaacaauacaugggugaaccagaccuaugugaauauuagcaacacaaauuucgcugccgggcaguccgucgugccuguuaaacuugcgggaaacucuagccugugcccgguguccggcugggcuaucuacagcaaggacaauucugucagaauuggguccaaaggagauguguuuguuauccgggagcccuucaucagcuguucuccucucgaaugccgcaccuuuuuccugacacagggcgcccuucugaacgacaagcauuccaauggcaccauuaaagauagaagccccuaucggacgcucaugucuuguccuaucggggaggugcccuccccuuacaacagccgcuuugaauccgucgccuggucugcuagcgccugccacgacggaauuaacuggcugaccaucggcauuuccgggccggauagcggagcuguggccgugcugaaguauaauggcaucaucacagacaccauuaagucuuggagaaacaauauccuccggacacaagaguccgagugugcgugcgucaacgggagcuguuucaccauuaugacggauggacccucugacggccaggccagcuacaaaaucuuucgcauugaaaagggcaaaaucguuaaguccguggagaugaaugcuccuaacuaucauuacgaagagugcucuuguuaccccgauagcuccgagaucacaugcgugugcagagacaauuggcacgggagcaaccggccuugggucucuuucaaucagaaccuggaauaucagauuggauacaucuguuccggcguguuuggggauaauccccgcccgaacgacaaaaccggaagcugcggcccuguuucuuccaauggggccaacggagugaagggcuucagcuuuaaguauggcaauggggucuggauuggaagaacaaaauccaucucuagccggaagggcuucgagaugauuugggaucccaacggguggaccggaaccgacaacaauuuuuccaucaaacaagacauugugggcaucaaggaauggucuggguacagcggcuccuucguucagcauccugagcuuacaggacuggauuguauccgccccugcuucuggguggaacucauuagaggccggcccgaggagaacacgaucuggaccagcgggucuuccauuagcuuuuguggagucaauucugacacagugggcugguccuggccugauggggcugaacugccguucaccaucgacaaauga

SEQ ID NO: 217798 - RNA, 1410 nt, Artificial Sequence; identical to SEQ ID NO: 217797
  derived and/or modified CDS sequence (opt5) from neuraminidase__InfluenzaA__AIM55884

SEQ ID NO: 217799 - RNA, 1410 nt, Artificial Sequence; identical to SEQ ID NO: 217797
  derived and/or modified CDS sequence (opt5) from neuraminidase__InfluenzaA__AIM55918

SEQ ID NO: 217800 - RNA, 1410 nt, Artificial Sequence
  derived and/or modified CDS sequence (opt5) from neuraminidase__InfluenzaA__AIM55929
augaaccccaaucagaagaucauuaccaucggcagcgugugcaugacaauugggauggccaaccugauccuccaaauuggaaauaucaucuccauuugggucucucacagcauccagcugggcaaccagucccagauugagacguguaaucaaucuguuaucaccuacgaaaacaauacaugggugaaccagaccuaugugaauauuagcaacacaaauuucgcugccgggcaguccgucgugucuguuaaacuugcgggaaacagcucccugugcccugugagcggcugggcuaucuacucuaaggacaauuccgucagaauugggagcaaaggagauguguuuguuauccgggagccguucaucucuuguagcccccucgaaugccgcaccuuuuuccugacacagggcgcccuucugaacgacaagcauuccaauggcaccauuaaagauagaucuccuuaucggacgcucauguccugucccaccggggaggugccuagccccuacaacucccgcuuugaaucugucgccuggagcgcuuccgccugccacgacggaaucaacuggcugacaauuggcaucagcgggccugauucuggagcuguggccgugcugaaguauaauggcauuaucaccgacacaaucaaguccuggagaaacaauauucuccggacccaagagagcgagugugcgugcgucaacgggucuuguuucacgaucaugacagauggaccgagcgacggccaggccuccuacaaaauuuuucgcaucgaaaagggcaaaauuguuaagucuguggagaugaaugcucccaacuaucauuacgaagagugcagcuguuacccugauuccagcgagauuaccugcgugugcagagacaauuggcacgggucuaaccggcccugggucuccuucaaucagaaccuggaauaucagaucggauacaucuguagcggcguguuuggggauaauccucgccccaacgacaaaacaggaucuugcggcccgguuuccagcaauggggccaacggagugaagggcuucuccuuuaaguauggcaauggggucuggaucggaagaaccaaaucuauuagcucccggaagggcuucgagaugaucugggauccuaacggguggaccggaacagacaacaauuuuucuauuaaacaagacaucgugggcauuaaggaauggagcggguacuccggcagcuucguucagcaucccgagcuuacgggacuggauuguauccgcccuugcuucuggguggaacucaucagaggccggcccgaggagaacaccauuuggacaucuggguccagcaucucuuuuuguggagucaauuccgacaccgugggcuggagcuggcccgauggggcugaacugccuuucacaauugacaaauga

SEQ ID NO: 217801 - RNA, 1410 nt, Artificial Sequence
  derived and/or modified CDS sequence (opt5) from neuraminidase__InfluenzaA__AIM55940
augaaccccaaucagaagaucauuaccaucggcagcgugugcaugacaauugggauggccaaccugauccuccaaauuggaaauaucaucuccauuugggucucucacagcauccagcugggcaaccagucccagauugagacguguaaucaaucuguuaucaccuacgaaaacaauacaugggugaaccagaccuaugugaauauuagcuccacaaacuucgcugccgggcagucugucgugccuguuaaacuugcgggaaauagcucccugugcccggugagcggcugggcuaucuacucuaaggacaacuccgucagaauugggagcaaaggagauguguuuguuauccgggagcccuucaucucuuguuccccucucgaaugccgcaccuuuuuccugacacagggcgcccuucugaaugacaagcauagcaacggcaccauuaaagauagaucucccuaucggacgcucauguccuguccuaucggggaggugcccagcccuuacaauucccgcuuugaaucugucgccuggagcgcuuccgccugccacgacggaauuaacuggcugaccaucggcauuagcgggccggauucuggagcuguggccgugcugaaguauaacggcaucaucacagacaccauuaaguccuggagaaauaacauccuccggacacaagagagcgagugugcgugcgucaaugggucuuguuucaccauuaugacggauggacccagcgacggccaggccuccuacaaaaucuuucgcauugaaaagggcaaaaucguuaagucuguggagaugaacgcuccuaauuaucauuacgaagagugcagcuguuaccccgauuccagcgagaucacaugcgugugcagagacaacuggcacgggucuaaucggccuugggucuccuucaaccagaaucuggaauaucagauuggauacaucuguagcggcguguuuggggauaacccccgcccgaaugacaaaaccggaucuugcggcccuguuuccagcaacggggccaauggagugaagggcuucuccuuuaaguauggcaacggggucuggauuggaagaacaaaaucuaucagcucccggaagggcuucgagaugauuugggaucccaauggguggaccggaaccgacaacaacuuuucuaucaaacaagacauugugggcaucaaggaauggagcggguacuccggcagcuucguucagcauccugagcuuacaggacuggauuguauccgccccugcuucuggguggaacucauuagaggccggcccgaggagaauacgaucuggaccucuggguccagcauuucuuuuuguggagucaacuccgacacagugggcuggagcuggccugauggggcugaacugccguucaccaucgacaaauga

SEQ ID NO: 217802 - RNA, 1410 nt, Artificial Sequence
  derived and/or modified CDS sequence (opt5) from neuraminidase__InfluenzaA__AIM55965
augaaccccaaucagaagaucauuaccaucggcagcgugugcaugacaauugggauggccaaccugauccuccaaauuggaaauaucaucuccauuugggucucucacagcauccagcugggcaaccagucccagauugagacguguaaucaaucuguuaucaccuacgaaaacaauacaugggugaaccagaccuaugugaauauuagcaacacaaauuucgcugccgggcaguccgucgugccuguuaaacuugcgggaaacucuagccugugcccgguguccggcugggcuaucuacagcaaggacaauucugucagaauuggguccaaaggagauguguuuguuauccgggagcccuucaucagcuguucuccucucgaaugccgcaccuuuuuccugacacagggcgcccuucugaacgacaagcauuccaauggcaccauuaaagauagaagccccuaucggacgcucaugucuuguccuaucggggaggugcccuccccuuacaacagccgcuuugaauccgucgccuggucugcuagcgccugccacgacggaauuaacuggcugaccaucggcauuuccgggccggauagcggagcuguggccgugcugaaguauaauggcaucaucacagacaccauuaagucuuggagaaacaauauccuccggacacaagaguccgagugugcgugcgucaacgggagcuguuucaccauuaugacggauggacccucugacggccaggccagcuacaaaaucuuucgcauugaaaagggcaaaaucguuaaguccguggagaugaaugcuccuaacuaucauuacgaagagugcucuuguuaccccgauagcuccgagaucacaugcgugugcagagacaauuggcacgggagcaaccggccuugggucucuuucaaucagaaccuggaauaucagauuggauacaucuguuccggcguguuuggggauaauccccgcccgaacgacaaaaccggaagcugcggcccuguuucuuccaauggggccaacggagugaagggcuucagcuuuaaguauggcaauggggucuggauuggaagaacaaaauccaucucuagccggaagggcuucgagaugauuugggaucccaacggguggaccggaaccgacaacaauuuuuccaucaaacaagacauugugggcaucaaggaauggucuggguacagcggcuccuucguucagcauccugagcuuacaggacuggauuguauccgccccugcuucuggguggaacucauuagaggccggcccgaggagaacacgaucuggaccagcgggucuuccauuagcuuuuguggagucaauucugacgcugugggcugguccuggccugauggggccgaacugccguucacaaucgacaaauga

SEQ ID NO: 217803 - RNA, 1410 nt, Artificial Sequence
  derived and/or modified CDS sequence (opt5) from neuraminidase__InfluenzaA__AIM55976
augaaccccaaucagaagaucauuaccaucggcagcgugugcaugacaauugggauggccaaccugauccuccaaauuggaaauaucaucuccauuugggucucucacagcauccagcugggcaaccagucccagauugagacguguaaucaaucuguuaucaccuacgaaaacaauacaugggugaaccagaccuaugugaauauuagcaacacaaauuucgcugccgggcaguccgucgugucuguuaaacuugcgggaaacagcucccugugcccugugagcggcugggcuaucuacucuaaggacaauuccgucagaauugggagcaaaggagauguguuuguuauccgggagccguucaucucuuguagcccccucgaaugccgcaccuuuuuccugacacagggcgcccuucugaacgacaagcauuccaauggcaccauuaaagauagaucuccuuaucggacgcucauguccugucccaucggggaggugccuagccccuacaacucccgcuuugaaucugucgccuggagcgcuuccgccugccacgacggaauuaacuggcugaccaucggcauuagcgggccugauucuggagcuguggccgugcugaaguauaauggcaucaucacagacaccauuaaguccuggagaaacaauauccuccggacacaagagagcgagugugcgugcgucaacgggucuuguuucaccauuaugacggauggaccgagcgacggccaggccuccuacaaaaucuuucgcauugaaaagggcaaaaucguuaagucuguggagaugaaugcucccaacuaucauuacgaagagugcagcuguuacccugauuccagcgagaucacaugcgugugcagagacaauuggcacgggucuaaccggcccugggucuccuucaaucagaaccuggaauaucagauuggauacaucuguagcggcguguuuggggauaauccucgccccaacgacaaaaccggaucuugcggcccgguuuccagcaauggggccaacggagugaagggcuucuccuuuaaguauggcaauggggucuggauuggaagaacaaaaucuaucagcucccggaagggcuucgagaugauuugggauccuaacggguggaccggaaccgacaacaauuuuucuaucaaacaagacauugugggcaucaaggaauggagcggguacuccggcagcuucguucagcaucccgagcuuacaggacuggauuguauccgcccuugcuucuggguggaacucauuagaggccggcccgaggagaacacgaucuggaccucuggguccagcauuucuuuuuguggagucaauuccgacacagugggcuggagcuggcccgauggggcugaacugccuuucaccaucgacaaauga

SEQ ID NO: 217804 - RNA, 1410 nt, Artificial Sequence
  derived and/or modified CDS sequence (opt5) from neuraminidase__InfluenzaA__AIM55987
augaaccccaaucagaagaucauuaccaucggcagcgugugcaugacaauugggauggccaaccugauccuccaaauuggaaauaucaucuccauuugggucucucacagcauccagcugggcaaccagucccagauugagacguguaaucaaucuguuaucaccuacgaaaacaauacaugggugaaccagaccuaugugaauauuagcaacacaaauuucgcugccgggcaguccgucgugucuguuaaacuugcgggaaacagcucccugugcccugugagcggcugggcuaucuacucuaaggacaauuccgucagaauugggagcaaaggagauguguuuguuauccgggagccguucaucucuuguagcccccucgaaugccgcaccuuuuuccugacacagggcgcccuucugaacgacaagcauuccaauggcaccauuaaagauagaucuccuuaucggacgcucauguccugucccaccggggaggugccuagccccuacaacucccgcuuugaaucugucgccuggagcgcuuccgccugccacgacggaaucaacuggcugacaauuggcaucagcgggccugauucuggagcuguggccgugcugaaguauaauggcauuaucaccgacacaaucaaguccuggagaaacaauauucuccggacccaagagagcgagugugcgugcgucaacgggucuuguuucacgaucaugacagauggaccgagcgacggccaggccuccuacaaaauuuuucgcaucgaaaagggcaaaauuguuaagucuguggagaugaaugcucccaacuaucauuacgaagagugcagcuguuacccugauuccagcgagauuaccugcgugugcagagacaauuggcacgggucuaaccggcccugggucuccuucaaucagaaccuggaauaucagaucggauacaucuguagcggcguguuuggggauaauccucgccccaacgacaaaacaggaucuugcggcccgguuuccagcaauggggccaacggagugaagggcuucuccuuuaaguauggcaauggggucuggaucggaagaaccaaaucuauuagcucccggaagggcuucgagaugaucugggauccuaacggguggaccggaacagacaacaauuuuucuauuaaacaagacaucgugggcauuaaggaauggagcggguacuccggcagcuucguucagcaucccgagcuuacgggacuggauuguauccgcccuugcuucuggguggaacucaucagaggccggcccgaggagaacaccauuuggacaucuggguccagcaucucuuuuuguggagucaauuccgacaccguggauuggagcuggcccgacggcgcugaacugccuuucacaauugauaaauga

SEQ ID NO: 217805 - RNA, 1410 nt, Artificial Sequence
  derived and/or modified CDS sequence (opt5) from neuraminidase__InfluenzaA__AIM55998
augaaccccaaucagaagaucauuaccaucggcagcgugugcaugacaauugggauggccaaccugauccuccaaauuggaaauacgaucuccaucugggucucucacagcauucagcugggcaaccagucccagaucgagaccuguaaucaaucuguuauuacauacgaaaacaauaccugggugaaccagacauaugugaauaucagcaacaccaauuucgcugccgggcaguccgucgugccuguuaaacuugcgggaaacucuagccugugcccgguguccggcugggcuauuuacagcaaggacaauucugucagaaucggguccaaaggagauguguuuguuauucgggagcccuucaucagcuguucuccucucgaaugccgcacauuuuuccugacccagggcgcccuucugaacgacaagcauuccaauggcacgaucaaagauagaagccccuaucggacccucaugucuuguccuauuggggaggugcccuccccuuacaacagccgcuuugaauccgucgccuggucugcuagcgccugccacgacggaaucaacuggcugacaauuggcaucuccgggccggauagcggagcuguggccgugcugaaguauaauggcauuaucaccgacacaaucaagucuuggagaaacaauauucuccggacccaagaguccgagugugcgugcgucaacgggagcuguuucacgaucaugacagauggacccucugacggccaggccagcuacaaaauuuuucgcaucgaaaagggcaaaauuguuaaguccguggagaugaaugcuccuaacuaucauuacgaagagugcucuuguuaccccgauagcuccgagauuaccugcgugugcagagacaauuggcacgggagcaaccggccuugggucucuuucaaucagaaccuggaauaucagaucggauacaucuguuccggcguguuuggggauaauccccgcccgaacgacaaaacaggaagcugcggcccuguuucuuccaauggggccaacggagugaagggcuucagcuuuaaguauggcaauggggucuggaucggaagaaccaaauccauuucuagccggaagggcuucgagaugaucugggaucccaacggguggaccggaacagacaacaaauuuuccauuaagcaagacaucgugggcauuaaugaauggucuggguacagcggcuccuucguucagcauccugagcuuacgggacuggauuguauccgccccugcuucuggguggaacucaucagaggccggcccgaggagaacaccauuuggacaagcgggucuuccaucagcuuuuguggagucaaaucugacaccgugggcugguccuggccugauggggcugaacugccguucacaauugacaaguga

SEQ ID NO: 217806 - RNA, 1410 nt, Artificial Sequence; identical to SEQ ID NO: 217803
  derived and/or modified CDS sequence (opt5) from neuraminidase__InfluenzaA__AIM56009

SEQ ID NO: 217807 - RNA, 1410 nt, Artificial Sequence; identical to SEQ ID NO: 217803
  derived and/or modified CDS sequence (opt5) from neuraminidase__InfluenzaA__AIM56020

SEQ ID NO: 217808 - RNA, 1410 nt, Artificial Sequence; identical to SEQ ID NO: 217803
  derived and/or modified CDS sequence (opt5) from neuraminidase__InfluenzaA__AIM56031

SEQ ID NO: 217809 - RNA, 1410 nt, Artificial Sequence
  derived and/or modified CDS sequence (opt5) from neuraminidase__InfluenzaA__AIM56042
augaaccccaaucagaagaucauuaccaucggcagcgugugcaugacaauugggauggccaaccugauccuccaaauuggaaauaucaucuccauuugggucucucacagcauccagcugggcaaccagucccagauugagacguguaaucaaucuguuaucaccuacgaaaacaauacaugggugaaccagaccuaugugaauauuagcaacacaaauuucgcugccgggcaguccgucgugccuguuaaacuugcgggaaacucuagccugugcccgguguccggcugggcuaucuacagcaaggacaauucugucagaauuggguccaaaggagauguguuuguuauccgggagcccuucaucagcuguucuccucucgaaugccgcaccuuuuuccugacacagggcgcccuucugaacgacaagcauuccaauggcaccauuaaagauagaagccccuaucggacgcucaugucuuguccuaucggggaggugcccuccccuuacaacagccgcuuugaauccgucgccuggucugcuagcgccugccacgacggaauuaacuggcugaccaucggcauuuccgggccggauagcggagcuguggccgugcugaaguauaauggcaucaucacagacaccauuaagucuuggagaaacaauauccuccggacacaagaguccgagugugcgugcgucaacgggagcuguuucaccauuaugacggauggacccucuaauggccaggccagcuacaaaaucuuucgcauugaaaagggcaaaaucguuaaguccguggagaugaacgcuccuaauuaucauuacgaagagugcucuuguuaccccgacagcuccgagaucacaugcgugugcagagauaacuggcacgggagcaaucggccuugggucucuuucaaccagaaucuggaauaucagauuggauacaucuguuccggcguguuuggggacaacccccgcccgaaugauaaaaccggaagcugcggcccuguuucuuccaacggggccaauggagugaagggcuucagcuuuaaguauggcaacggggucuggauuggaagaacaaaauccaucucuagccggaagggcuucgagaugauuugggaccccaacggguggaccggaaccgauaauaacuuuuccaucaaacaagacauugugggcaucaaggaauggucuggguacagcggcuccuucguucagcauccugagcuuacaggacuggacuguauccgccccugcuucuggguggaacucauuagaggccggcccgaggagaauacgaucuggaccagcgggucuuccauuagcuuuuguggagucaacucugauacagugggcugguccuggccugacggggcugaacugccguucaccaucgauaaauga

SEQ ID NO: 217810 - RNA, 1410 nt, Artificial Sequence
  derived and/or modified CDS sequence (opt5) from neuraminidase__InfluenzaA__AIM56053
augaaccccaaucagaagaucauuaccaucggcagcgugugcaugacaauugggauggccaaccugauccuccaaauuggaaauaucaucuccauuugggucucucacagcauccagcugggcaaccagucccagauugagacguguaaucaaucuguuaucaccuacgaaaacaauacaugggugaaccagaccuaugugaauauuagcaacacaaauuucgcugccgggcaguccgucgugucuguuaaacuugcgggaaacagcucccugugcccugugagcggcugggcuaucuacucuaaggacaauuccgucagaauugggagcaaaggagauguguuuguuauccgggagccguucaucucuuguagcccccucgaaugccgcaccuuuuuccugacacagggcgcccuucugaacgacaagcauuccaauggcaccauuaaagauagaucuccuuaucggacgcucauguccugucccaucggggaggugccuagccccuacaacucccgcuuugaaucugucgccuggagcgcuuccgccugccacgacggaauuaacuggcugaccaucggcauuagcgggccugauucuggagcuguggccgugcugaaguauaauggcaucaucacagacaccauuaaguccuggagaaacaauauccuccggacacaagagagcgagugugcgugcgucaacgggucuuguuucaccauuaugacggauggaccgagcgacgaacaggccuccuacaaaaucuuucgcauugagaagggcaaaaucguuaagucuguggaaaugaaugcucccaacuaucauuacgaggagugcagcuguuacccugauuccagcgaaaucacaugcgugugcagagacaauuggcacggcucuaaccggcccugggucuccuucaaucagaaccuggaguaucagauuggguacaucuguagcggaguguuuggcgauaauccucgccccaacgacaaaaccgggucuugcggaccgguuuccagcaauggcgccaacggggugaagggauucuccuuuaaguauggcaauggcgucuggauugggagaacaaaaucuaucagcucccggaagggauucgaaaugauuugggauccuaacggcuggaccgggaccgacaacaauuuuucuaucaaacaagacauugugggaaucaaggaguggagcggcuacuccgggagcuucguucagcaucccgaacuuacaggccuggauuguauccgcccuugcuucuggguggagcucauuagaggacggcccgaggaaaacacgaucuggaccucuggcuccagcauuucuuuuuguggggucaauuccgacacagugggauggagcuggcccgauggcgcugagcugccuuucaccaucgacaaauga

SEQ ID NO: 217811 - RNA, 1410 nt, Artificial Sequence
  derived and/or modified CDS sequence (opt5) from neuraminidase__InfluenzaA__AIM56064
augaaccccaaucagaagaucauuaccaucggcagcgugugcaugacaauugggauggccaaccugauccuccaaauuggaaauaucaucuccauuugggucucucacagcauccagcugggcaaccagucccagauugagacguguaaucaaucuguuaucaccuacgaaaacaauacaugggugaaccagaccuaugugaauauuagcaacacaaauuucgcugccgggcaguccgucgugccuguuaaacuugcgggaaacucuagccugugcccgguguccggcugggcuaucuacagcaaggacaauucugucagaauuggguccaaaggagauguguuuguuauccgggagcccuucaucagcuguucuccucucgaaugccgcaccuuuuuccugacacagggcgcccuucugaacgacaagcauuccaauggcaccauuaaagauagaagccccuaucggacgcucaugucuuguccuaucggggaggugcccuccccuuacaacagccgcuuugaauccgucgccuggucugcuagcgccugccacgacggaauuaacuggcugaccaucggcauuuccgggccggauagcggagcuguggccgugcugaaguauaauggcaucaucacagacaccauuaagucuuggagaaacaauauccuccggacacaagaguccgagugugcgugcgucaacgggagcuguuucaccauuaugacggauggacccucugacggccaggccagcuacaaaaucuuucgcauugaaaagggcaaaaucguuaaguccguggagaugaaugcuccuaacuaucauuacgaagagugcucuuguuaccccgauagcuccgagaucacaugcgugugcagagacaauuggcacgggagcaaccggccuugggucucuuucaaucagaaccuggaauaucagauuggauacaucuguuccggcguguuuggggauaauccccgcccgaacgacaaaaccggaagcugcggcccuguuucuuccaauggggccaacggagugaagggcuucagcuuuaaguauggcaauggggucuggauuggaagaacaaaauccaucucuagccggaagggcuucgagaugauuugggaucccaacggguggaccggaaccgacaacaauuuuuccaucaaacaagacauugugggcaucaaggaauggucuggguacagcggcuccuucguucagcauccugagcuuacaggacuggauuguauccgccccugcuucuggguggaacucgucagaggccggcccgaggagaacacgauuuggaccagcgggucuuccaucagcuuuuguggagucaauucugacacagugggcugguccuggccugauggggcugaacugccguucaccauugacaaauga

SEQ ID NO: 217812 - RNA, 1410 nt, Artificial Sequence
  derived and/or modified CDS sequence (opt5) from neuraminidase__InfluenzaA__AIM56086
augaaccccaaucagaagaucauuaccaucggcagcgugugcaugacaauugggauggccaaccugauccuccaaauuggaaauaucaucuccauuugggucucucacagcauccagcugggcaaccagucccauauugagacguguaaucagucuguuaucaccuacgaaaacaauacaugggugaaccaaaccuaugugaauauuagcaacacaaauuucgcugccgggcaguccgucgugccuguuaaacuugcgggaaacucuagccugugcccgguguccggcugggcuaucuacagcaaggacaauucugucagaauuggguccaaaggagauguguuuguuauccgggagcccuucaucagcuguucuccucucgaaugccgcaccuuuuuccugacacagggcgcccuucugaacgacaagcacuccaauggcaccauuaaagauagaagccccuaucggacgcucaugucuuguccuaucggggaggugcccuccccuuacaacagccgcuuugaauccgucgccuggucugcuagcgccugccaugacggaauuaacuggcugaccaucggcauuuccgggccggauaauggagcuguggccgugcugaaguauaacggcaucaucacagacaccauuaagagcuggagaaauaacauccuccggacacaggagucugagugugcgugcgucaauggguccuguuucaccauuaugacggauggacccagcgacggccaagccucuuacaaaaucuuucgcauugaaaagggcaaaaucguuaagagcguggagaugaacgcuccuaauuaucacuacgaagagugcuccuguuaccccgauucuagcgagaucacaugcgugugcagagacaacuggcauggguccaaucggccuugggucagcuucaaccagaaucuggaauaucagauuggauacaucuguucuggcguguuuggggauaacccccgcccgaaugacaaaaccggauccugcggcccuguuacaagcaacggggccaauggagugaagggcuucucuuuuaaguauggcaacggggucuggauuggaagaaccaaauccaucagcucccggaagggcuucgagaugauuugggaucccaacggguggaccggaacagacaauaacuuuucuaucaaacaggacauuaucggcaucaaggaauggagcggguacuccggcucuuucgugcaacacccugagcuuacgggacuggauuguauucgccccugcuucuggguugaacucaucagaggccggcccgaggagaauaccauuuggacaagcggguccagcaucucuuuuuguggagugaacuccgacaccgucggcuggagcuggccugauggggcugaacugccguucacaauugacaaauga

SEQ ID NO: 217813 - RNA, 1410 nt, Artificial Sequence
  derived and/or modified CDS sequence (opt5) from neuraminidase__InfluenzaA__AIM56097
augaaccccaaucagaagaucauuaccaucggcagcgugugcaugacaauugggauggccaaccugauccuccaaauuggaaauaucaucuccauuugggucucucacagcauccagcugggcaaccagucccagauugagacguguaaucaaucuguuaucaccuacgaaaacaauacaugggugaaccagaccuaugugaauauuagcaacacaaauuucgcugccgagcaguccgucgugucuguuaaacuugcggggaacagcucccugugcccugugagcggaugggcuaucuacucuaaggacaauuccgucagaauuggcagcaaaggggauguguuuguuauccgggaaccguucaucucuuguagcccccucgagugccgcaccuuuuuccugacacagggagcccuucugaacgacaagcauuccaauggcaccauuaaagauagaucuccuuaucggacgcucauguccugucccaucggcgaagugccuagccccuacaacucccgcuuugagucugucgccuggagcgcuuccgccugccacgacgggauuaacuggcugaccaucggaauuagcggcccugauucuggggcuguggccgugcugaaguauaauggaaucaucacagacaccauuaaguccuggagaaacaauauccuccggacacaagagagcgaaugugcgugcgucaacggcucuuguuucaccauuaugacggaugggccgagcgacggacaggccuccuacaaaaucuuucgcauugagaagggcaaaaucguuaagucuguggaaaugaaugcucccaacuaucauuacgaggagugcagcuguuacccugauuccagcgaaaucacaugcgugugcagagacaauuggcacggcucuaaccggcccugggucuccuucaaucagaaccuggaguaucagauuggguacaucuguagcggaguguuuggcgauaauccucgccccaacgacaaaaccgggucuugcggaccgguuuccagcaauggcgccaacggggugaagggauucuccuuuaaguauggcaauggcgucuggauugggagaacaaaaucuaucagcucccggaagggauucgaaaugauuugggauccuaacggcuggaccgggaccgacaacaauuuuucuaucaaacaagacauugugggaaucaaggaguggagcggcuacuccgggagcuucguucagcaucccgaacuuacaggccuggauuguauccgcccuugcuucuggguggagcucauuagaggacggcccgaggaaaacacgaucuggaccucuggcuccagcauuucuuuuuguggggucaauuccgacacagugggauggagcuggcccgauggcgcugagcugccuuucaccaucgacaaauga

SEQ ID NO: 217814 - RNA, 1410 nt, Artificial Sequence
  derived and/or modified CDS sequence (opt5) from neuraminidase__InfluenzaA__AIM56108
augaaccccaaucagaagaucauuaccaucggcagcgugugcaugacaauugggauggccaaccugauccuccaaauuggaaauaucaucuccauuugggucucucacagcauccagcugggcaaccagucccagauugagacguguaaucaaucuguuaucaccuacgaaaacaauacauggauuaaccagaccuaugugaauaucagcaacacaaauuucgcugccgggcaguccguggucccugugaaacuugcgggaaacucuagccugugcccgguuuccggcugggcuauuuacagcaaggacaauucugugagaaucggguccaaaggagaugucuuugugauccgggagcccuucauuagcuguucuccucucgaaugccgcaccuuuuuccugacacagggcgcccuucugaacgacaagcauuccaauggcaccaucaaagauagaagccccuaucggacgcucaugucuuguccuauuggggagguucccuccccuuacaacagccgcuuugaauccguggccuggucugcuagcgccugccacgacggaaucaacuggcugaccauuggcaucuccgggccggauagcggagcugucgccgugcugaaguauaauggcaucauuacagacaccaucaagucuuggagaaacaauauucuccggacacaagaguccgagugugcgugcgugaacgggagcuguuucaccaucaugacggauggacccucugacggccaggccagcuacaaaauuuuucgcaucgaaaagggcaaaaucgucaaguccguugagaugaaugcuccuaacuaucauuacgaagagugcucuuguuaccccgauagcuccgagauuacaugcgugugcagagacaauuggcacgggagcaaccggccuugggugucuuucaaucagaaccuggaauaucagaucggauacauuuguuccggcgucuuuggggauaauccccgcccgaacgacaaaaccggaagcugcggcccugugucuuccaauggggccaacggaguuaagggcuucagcuuuaaguauggcaaugggguguggaucggaagaacaaaauccauuucuagccggaagggcuucgagaugaucugggaucccaacggguggaccggaaccgacaacaauuuuuccauuaaacaagacaucgucggcaucaaggaauggucuggguacagcggcuccuucgugcagcauccugagcuuacaggacuggauuguauucgccccugcuucuggguugaacucaucagaggccggcccgaggagaacacgauuuggaccagcgggucuuccaucagcuuuuguggagucaauucugacacagugggcugguccuggccugauggggcugaacugccguucaccauugacaaauga

SEQ ID NO: 217815 - RNA, 1410 nt, Artificial Sequence
  derived and/or modified CDS sequence (opt5) from neuraminidase__InfluenzaA__AIM56119
augaaccccaaucagaagaucauuaccaucggcagcgugugcaugacaauugggauggccaaccugauccuccaaauuggaaauaucaucuccauuugggucucucacagcauccagauuggcaaccagucccagaucgagacguguaaucaaucuguuauuaccuacgaaaacaauacaugggugaaccagaccuaugugaauaucagcaacacaaauuucgcugccgggcaguccgucgugucuguuaaacuggcgggaaacagcucccuuugcccugugagcggcugggcuauuuacucuaaggacaauuccgucagaaucgggagcaaaggagauguguuuguuauccgggagccguucauuucuuguagcccccuggaaugccgcaccuuuuuccucacacagggcgcccugcuuaacgacaagcauuccaauggcaccaucaaagauagaucuccuuaucggacgcugauguccugucccauuggggaggugccuagccccuacaacucccgcuuugaaucugucgccuggagcgcuuccgccugccacgacggaaucaacuggcucaccauuggcaucagcgggccugauucuggagcuguggccgugcugaaguauaauggcaucauuacagacaccaucaaguccuggagaaacaauauucugcggacacaagagagcgagugugcgugcgucaacgggucuuguuucaccaucaugacggauggaccgagcgacggccaggccuccuacaaaauuuuucgcaucgaaaagggcaaaaucguuaagucuguggagaugaaugcucccaacuaucauuacgaagagugcagcuguuacccugauuccagcgagauuacaugcgugugcagagacaauuggcacgggucuaaccggcccugggucuccuucaaucagaaccucgaauaucagaucggauacauuuguagcggcguguuuggggauaauccucgccccaacgacaaaaccggaucuugcggcccgguuuccagcaauggggccaacggagugaagggcuucuccuuuaaguauggcaauggggucuggaucggaagaacaaaaucuauuagcucccggaagggcuucgagaugaucugggauccuaacggguggaccggaaccgacaacaaauuuucuauuaagcaagacaucgugggcaucaaugaauggagcggguacuccggcagcuucguucagcaucccgagcugacaggacuugauuguauucgcccuugcuucuggguggaacugaucagaggccggcccgaggagaacacgauuuggaccucuggguccagcaucucuuuuuguggagucaauuccgacacagugggcuggagcuggcccgauggggcugaacucccuuucaccauugacaaauga

SEQ ID NO: 217816 - RNA, 1410 nt, Artificial Sequence
  derived and/or modified CDS sequence (opt5) from neuraminidase__InfluenzaA__AIM56130
augaaccccaaucagaagaucauuaccaucggcagcgugugcaugacaauugggauggccaaccugauccuccaaauuggaaauaucaucuccauuugggucucucacagcauccagcugggcaaccagucccagauugagacguguaaucaaucuguuaucaccuacgaaaacaauacaugggugaaccagaccuaugugaauauuagcaacacaaauuucgcugccgggcaguccgucgugccuguuaaacuugcgggaaacucuagccugugcccgguguccggcugggcuaucuacagcaaggacaauucugucagaauuggguccaaaggagauguguuuguuauccgggagcccuucaucagcuguucuccucucgaaugccgcaccuuuuuccugacacagggcgcccuucugaacgacaagcauuccaauggcaccauuaaagauagaagccccuaucggacgcucaugucuuguccuaucggggaggugcccuccccuuacaacagccgcuuugaauccgucgccuggucugcuagcgccugccacgacggaauuaacuggcugaccaucggcauuuccgggccggauagcggagcuguggccgugcugaaguauaauggcaucaucacagacaccauuaagucuuggagaaacaauauccuccggacacaagaguccgagugugcgugcgucaacgggagcuguuucaccauuaugacggauggacccucugacggccaggccagcuacaaaaucuuucgcauugaaaagggcaaaaucguuaaguccguggagaugaaugcuccuaacuaucauuacgaagagugcucuuguuaccccgauagcuccgagaucacaugcgugugcagagacaauuggcacgggagcaaccggccuugggucucuuucaaucagaaccuggaauaucagauuggauacaucuguuccggcguguuuggggauaauccccgcccgaacgacaaaaccggaagcugcggcccuguuucuuccaauggggccaacggagugaagggcuucagcuuuaaguauggcaauggggucuggauuggaagaacaaaauccaucucuagccggaagggcuucgagaugauuugggaucccaacggguggaccggaaccgacaacaaauuuuccaucaagcaagacauugugggcaucaaugaauggucuggguacagcggcuccuucguucagcauccugagcuuacaggacuggauuguauccgccccugcuucuggguggaacucauuagaggccggcccgaggagaacacgaucuggaccagcgggucuuccauuagcuuuuguggagucaaaucugacacagugggcugguccuggccugauggggcugaacugccguucaccaucgacaaguga

SEQ ID NO: 217817 - RNA, 1410 nt, Artificial Sequence
  derived and/or modified CDS sequence (opt5) from neuraminidase__InfluenzaA__AIM56141
augaaccccaaucagaagaucauuaccaucggcagcgugugcaugacaauugggauggccaaccugauccuccaaauuggaaauaucaucuccauuugggucucucacagcauccagcugggcaaccagucccagauugagacguguaaucaaucuguuaucauuuacgaaaacaauaccugggugaaccagacauaugugaauaucagcaacaccaauuucgcugccgggcaguccgucgugucuguuaaacuugcgggaaacagcucccugugcccugugagcggcugggcuauuuacucuaaggacaauuccgucagaaucgggagcaaaggagauguguuuguuauccgggagccguucauuucuuguagcccccucgaaugccgcacauuuuuccugacccagggcgcccuucugaacgacaagcauuccaauggcacaaucaaagauagaucuccuuaucggacccucauguccugucccauuggggaggugccuagccccuacaacucccgcuuugaaucugucgccuggagcgcuuccgccugccacgacggaaucaacuggcugacgauuggcaucagcgggccugauucuggagcuguggccgugcugaaguauaauggcaucauuaccgacacaaucaaguccuggagaaacaauauucuccggacccaagagagcgagugugcgugcgucaacgggucuuguuucacaaucaugaccgauggaccgagcgacggccaggccuccuacaaaauuuuucgcaucgaaaagggcaaaaucguuaagucuguggagaugaaugcucccaacuaucauuacgaagagugcagcuguuacccugauuccagcgagauuacgugcgugugcagagacaauuggcacgggucuaaccggcccugggucuccuucaaucagaaccuggaauaucagaucggauacauuuguagcggcguguuuggggauaauccucgccccaacgacaaaacaggaucuugcggcccgguuuccagcaauggggccaacggagugaagggcuucuccuuuaaguauggcaauggggucuggaucggaagaaccaaaucuauuagcucccggaagggcuucgagaugaucugggauccuaacggguggacaggaaccgacaacaauuuuucuauuaaacaagacaucgugggcaucaaggaauggagcggguacuccggcagcuucguucagcaucccgagcuuaccggacuggauuguauucgcccuugcuucuggguggaacucaucagaggccggcccgaggagaacacaauuuggacgucuggguccagcaucucuuuuuguggagucaauuccgacaccgugggcuggagcuggcccgauggggcugaacugccuuucacaauugacaaauga

SEQ ID NO: 217818 - RNA, 1410 nt, Artificial Sequence; identical to SEQ ID NO: 217803
  derived and/or modified CDS sequence (opt5) from neuraminidase__InfluenzaA__AIM56152

SEQ ID NO: 217819 - RNA, 1410 nt, Artificial Sequence
  derived and/or modified CDS sequence (opt5) from neuraminidase__InfluenzaA__AIM56163
augaaccccaaucagaagaucauuaccaucggcagcgugugcaugacaauugggauggccaaccugauccuccaaauuggaaauaucaucuccauuugggucucucacagcauccagcugggcaaccagucccauauugagacguguaaucagucuguuaucaccuacgaaaacaauacaugggugaaccaaaccuaugugaauauuagcaacacaaauuucgcugccgggcaguccgucgugccuguuaaacuugcgggaaacucuagccugugcccgguguccggcugggcuaucuacagcaaggacaauucugucagaauuggguccaaaggagauguguuuguuauccgggagcccuucaucagcuguucuccucucgaaugccgcaccuuuuuccugacacagggcgcccuucugaacgacaagcacuccaauggcaccauuaaagauagaagccccuaucggacgcucaugucuuguccuaucggggaggugcccuccccuuacaacagccgcuuugaauccgucgccuggucugcuagcgccugccaugacggaauuaacuggcugaccaucggcauuuccgggccggauaauggagcuguggccgugcugaaguauaacggcaucaucacagacaccauuaagagcuggagaaauaacauccuccggacacaggagucugagugugcgugcgucaauggguccuguuucaccauuaugacggauggacccagcgacggccaagccucuuacaaaaucuuucgcauugaaaagggcaaaaucguuaagagcguggagaugaacgcuccuaauuaucacuacgaagagugcuccuguuaccccgauucuagcgagaucacaugcgugugcagagacaacuggcauggguccaaucggccuugggucagcuucaaccagaaucuggaauaucagauuggauacaucuguucuggcguguuuggggauaacccccgcccgaaugacaaaaccggauccugcggcccuguuacaagcaacggggccaauggagugaagggcuucucuuuuaaguauggcaacggggucuggauuggaagaaccaaauccaucagcucccggaagggcuucgagaugauuugggaucccaacggguggaccggaacagacaauaacuuuucuaucaaacaggacauugugggcaucaaggaauggagcggguacuccggcucuuucguucaacacccugagcuuacgggacuggauuguauccgccccugcuucuggguggaacucauuagaggccggcccgaggagaauaccaucuggacaagcggguccagcauuucuuuuuguggagucaacuccgacaccgugggcuggagcuggccugauggggcugaacugccguucacaaucgacaaauga

SEQ ID NO: 217820 - RNA, 1410 nt, Artificial Sequence
  derived and/or modified CDS sequence (opt5) from neuraminidase__InfluenzaA__AIM56174
augaaccccaaucagaagaucauuaccaucggcagcgugugcaugacaauugggauggccaaccugauccuccaaauuggaaauaucaucuccauuugggucucucacagcauccagcugggcaaccagucccagauugagacguguaaucaaucuguuaucaccuacgaaaacaauacaugggugaaccagaccuaugugaauauuagcaacacaaauuucgcugccgggcaguccgucgugccuguuaaacuugcgggaaacucuagccugugcccgguguccggcugggcuaucuacagcaaggacaauucugucagaauuggguccaaaggagauguguuuguuauccgggagcccuucaucagcuguucuccucucgaaugccgcaccuuuuuccugacacagggcgcccuucugaacgacaagcauuccaauggcaccauuaaagauagaagccccuaucggacgcucaugucuuguccuaucggggaggugcccuccccuuacaacagccgcuuugaauccgucgccuggucugcuagcgccugccacgacggaauuaacuggcugaccaucggcauuuccgggccggauagcggagcuguggccgugcugaaguauaauggcaucaucacagacaccauuaagucuuggagaaacaauauccuccggacacaagaguccgagugugcgugcgucaacgggagcuguuucaccauuaugacggauggacccucugacggccaggccagcuacaaaaucuuucgcauugaaaagggcaaaaucguuaaguccguggagaugaaugcuccuaacuaucauuacgaagagugcucuuguuaccccgauagcuccgagaucacaugcgugugcagagacaauuggcacgggagcaaccggccuugggucucuuucaaucagaaccuggaauaucagauuggauacaucuguuccggcguguuuggggauaauccccgcccgaacgacaaaaccggaagcugcggcccuguuucuuccaauggggccaacggagugaagggcuucagcuuuaaguauggcaauggggucuggauuggaagaacaaaauccaucucuagccggaagggcuucgagaugauuugggaucccaacggguggaccggaaccgacaacaauuuuuccaucaaacaagacauugugggcaucaaggaauggucuggguacagcggcuccuucguucagcauccugagcuuacaggacuggauuguauccgccccugcuucuggguggaacucauuagaggccggcccgaggagaacacgaucuggaccagcgggucuuccauuagcuuuuguggagucaauucugacacagugggcugguccuggccugauggggcugaacugccguucaccgucgacaaauga

SEQ ID NO: 217821 - RNA, 1410 nt, Artificial Sequence; identical to SEQ ID NO: 217816
  derived and/or modified CDS sequence (opt5) from neuraminidase__InfluenzaA__AIM56185

SEQ ID NO: 217822 - RNA, 1410 nt, Artificial Sequence; identical to SEQ ID NO: 217815
  derived and/or modified CDS sequence (opt5) from neuraminidase__InfluenzaA__AIM56196

SEQ ID NO: 217823 - RNA, 1410 nt, Artificial Sequence; identical to SEQ ID NO: 217797
  derived and/or modified CDS sequence (opt5) from neuraminidase__InfluenzaA__AIM56207

SEQ ID NO: 217824 - RNA, 1410 nt, Artificial Sequence
  derived and/or modified CDS sequence (opt5) from neuraminidase__InfluenzaA__AIM56229
augaaccccaaucagaagaucauuaccaucggcagcgugugcaugacaauugggauggccaaccugauccuccaaauuggaaauacgaucuccaucugggucucucacagcauucagaucggcaaccagucccagauugagaccuguaaucaaucuguuaucacauacgaaaacaauaccugggugaaccagacauaugugaauauuagcaacaccaauuucgcugccgggcaguccgucgugucuguuaaacuggcgggaaacagcucccuuugcccugugagcggcugggcuaucuacucuaaggacaauuccgucagaauugggagcaaaggagauguguuuguuauccgggagccguucaucucuuguagcccccuggaaugccgcacauuuuuccucacccagggcgcccugcuuaacgacaagcauuccaauggcacgauuaaagauagaucuccuuaucggacccugauguccugucccaucggggaggugccuagccccuacaacucccgcuuugaaucugucgccuggagcgcuuccgccugccacgacggaauuaacuggcucacaaucggcauuagcgggccugauucuggagcuguggccgugcugaaguauaauggcaucaucaccgacacaauuaaguccuggagaaacaauauccugcggacccaagagagcgagugugcgugcgucaacgggucuuguuucacgauuaugacagauggaccgagcgacggccaugccuccuacaaaaucuuucgcauugaaaagggcaaaaucguuaagucuguggagaugaaugcucccaacuaucacuacgaagagugcagcuguuacccugauuccagcgagauuaccugcgugugcagagacaauuggcaugggucuaaccggcccugggucuccuucaaucagaaccucgaauaucagaucggauacaucuguagcggcguguuuggggauaauccucgccccaacgacaaaacaggaucuugcggcccgguuuccagcaauggggccaacggagugaagggcuucuccuuuaaguauggcaauggggucuggauuggaagaaccaaaucuaucagcucccggaagggcuucgagaugauuugggauccuaacggguggaccggaacagacaacaaauuuucuaucaagcaggacauugugggcaucaaugaauggagcggguacuccggcagcuucguucaacaccccgagcugacgggacuugauuguauccgcccuugcuucuggguggaacugauuagaggccggcccgaggagaacaccaucuggacaucuggguccagcauuucuuuuuguggagucaauuccgacaccgugggcuggagcuggcccgauggggcugaacucccuuucacaaucgacaaauga

SEQ ID NO: 217825 - RNA, 1410 nt, Artificial Sequence
  derived and/or modified CDS sequence (opt5) from neuraminidase__InfluenzaA__AIM56240
augaaccccaaucagaagaucauuaccaucggcagcgugugcaugacaauugggauggccaaccugauccuccaaauuggaaauaucaucuccauuuggaucucucacagcauucaggucggcaaccagucccagaucgagacguguaaucaaucuguuauuaccuacgaaaacaauacaugggugaaccagaccuaugugaauaucagcaacacaaauuucgcugccgggcagccugucguguccguuaaacuggcgggaaacucuagccuuugcuccgugagcggcugggcuauuuacucuaaggacaauuccgucagaaucgggagcaaaggagauguguuuguuauccgggagccguucauuucuuguagcccccuggaaugccgcaccuuuuuccucacacagggcgcccugcuuaacgacaagcauuccaauggcaccaucaaagauagaucuccuuaucggacgcugauguccugucccauuggggaggugccuagccccuacaacucccgcuuugaaucugucgccuggagcgcuuccgccugccacgacggaaucaacuggcucaccauuggcaucagcgggccugauucuggagcuguggccgugcugaaguauaauggcaucauuacagacaccaucaaguccuggagaaacgauauucugcggacacaagagagcgagugugcgugcgucaaugggucuuguuucaccaucaugacggacggaccgagcgauggccaggccuccuacaaaauuuuucgcaucgaaaagggcaaaaucguuaagucuguggagaugaacgcucccaauuaucauuacgaagagugcagcuguuacccugacuccagcgagauuacaugcgugugcagagauaacuggcacgggucuaaucggcccugggucuccuucaaccagaaucucgaauaucagaucggauacauuuguagcggcaucuuuggggacaacccucgccccaaugauaaaaccggaucuugcggcccgguguccagcaacggggccaauggaguuaagggcuucuccuuuaaguauggcaacgggguguggauuggaagaacaaaaucuaucagcucccggaagggcuucgagaugauuugggacccuaauggguggaccggaaccgacaacaacuuuucuaucaaacaagauaucgucggcauuaaugaauggagcggguacuccggcagcuucgugcagcaucccgagcugacaggacuugacuguauccgcccuugcuucuggguugaacugauuagaggccggcccaaggagaacacgaucuggaccucuggguccagcauuucuuuuuguggagucaauuccgauacagugggcuggagcuggcccgacggggcugagcucccuuucaccaucgauaaauga

SEQ ID NO: 217826 - RNA, 1410 nt, Artificial Sequence
  derived and/or modified CDS sequence (opt5) from neuraminidase__InfluenzaA__AIM56251
augaaccccaaucagaagaucauuaccaucggcagcgugugcaugacaauugggauggccaaccugauccuccaaauuggaaauaucaucuccauuugggucucucacagcauccagcugggcaaccagucccauauugagacguguaaucagucuguuaucaccuacgaaaacaauacaugggugaaccaaaccuaugugaauauuagcaacacaaauuucgcugccgggcaguccgucgugccuguuaaacuugcgggaaacucuagccugugcccgguguccggcugggcuaucuacagcaaggacaauucugucagaauuggguccaaaggagauguguuuguuauccgggagcccuucaucagcuguucuccucucgaaugccgcaccuuuuuccugacacagggcgcccuucugaacgacaagcacuccaauggcaccauuaaagauagaagccccuaucggacgcucaugucuuguccuaucggggaggugcccuccccuuacaacagccgcuuugaauccgucgccuggucugcuagcgccugccaugacggaauuaacuggcugaccaucggcauuuccgggccggauagcggagcuguggccgugcugaaguauaauggcaucaucacagacaccauuaagucuuggagaaacaauauccuccggacacaggaguccgagugugcgugcgucaacgggagcuguuucaccauuaugacggauggacccucugacggccaagccagcuacaaaaucuuucgcauugaaaagggcaaaaucguuaaguccguggagaugaaugcuccuaacuaucacuacgaagagugcucuuguuaccccgauagcuccgagaucacaugcgugugcagagacaauuggcaugggagcaaccggccuugggucucuuucaaucagaaccuggaauaucagauuggauacaucuguuccggcguguuuggggauaauccccgcccgaacgacaaaaccggaagcugcggcccuguuucuuccaauggggccaacggagugaagggcuucagcuuuaaguauggcaauggggucuggauuggaagaacaaaauccaucucuagccggaagggcuucgagaugauuugggaucccaacggguggaccggaaccgacaacaauuuuuccaucaaacaggacauugugggcaucaaggaauggucuggguacagcggcuccuucguucaacacccugagcuuacaggacuggauuguauccgccccugcuucuggguggaacucauuagaggccggcccgaggagaacacgaucuggaccagcgggucuuccauuagcuuuuguggagucaauucugacacagugggcugguccuggccugauggggcugaacugccguucaccaucgacaaauga

SEQ ID NO: 217827 - RNA, 1410 nt, Artificial Sequence; identical to SEQ ID NO: 217826
  derived and/or modified CDS sequence (opt5) from neuraminidase__InfluenzaA__AIM56262

SEQ ID NO: 217828 - RNA, 1410 nt, Artificial Sequence; identical to SEQ ID NO: 217797
  derived and/or modified CDS sequence (opt5) from neuraminidase__InfluenzaA__AIM56273

SEQ ID NO: 217829 - RNA, 1410 nt, Artificial Sequence
  derived and/or modified CDS sequence (opt5) from neuraminidase__InfluenzaA__AIM56284
augaaccccaaucagaagaucauuaccaucggcagcgugugcauuacaaucgggauggccaaccugauucuccaaaucggaaauaucauuuccaucugggucucucacagcauucagaucggcaaccagucccagauugagacguguaaucaaucuguuaucaccuacgaaaacaauacaugggugaaccagaccuaugugaauauuagcaacacaaauuucgcugccgggcaguccgucgugucuguuaaacuggcgggaaacagcucccuuugcccugugagcggcugggcuaucuacucuaaggacaauuccgucagaaucgggagcaaaggagauguguuuguuauucgggagccguucaucucuuguagcccccuggaaugccgcaccuuuuuccucacacagggcgcccugcuuaacgacaagcauuccaauggcaccauuaaagauagaucuccuuaucggacgcugauguccugucccaucggggaggugccuagccccuacaacucccgcuuugaaucugucgccuggagcgcuuccgccugccacgacggaauuaacuggcucaccaucggcaucagcgggccugauucuggagcuguggccgugcugaaguauaauggcauuaucacagacaccauuaaguccuggagaaacaauauccugcggacacaagagagcgagugugcgugcgucaacgggucuuguuucaccauuaugacggauggaccgagcgacggccaggccuccuacaaaaucuuucgcaucgaaaagggcaaaauuguuaagucuguggagaugaaugcucccaacuaucauuacgaagagugcagcuguuacccugauuccagcgagaucacaugcgugugcagagacaauuggcacgggucuaaccggcccugggucuccuucaaucagaaccucgaauaucagauuggauacaucuguagcggcguguuuggggauaauccucgccccaacgacaaaaccggaucuugcggcccgguuuccagcaauggggccaacggagugaagggcuucuccuuuaaguauggcaauggggucuggauuggaagaacaaaaucuaucagcucccggaagggcuucgagaugauuugggauccuaacggguggaccggaaccgacaacaaauuuucuaucaagcaagacgugguuggcaucaaugaauggagcggguacuccggcagcuucgugcagcaucccgagcugacaggacuugauuguauucgcccuugcuucugggucgaacugaucagaggccggcccgaggagaacacgauuuggaccucuggguccagcaucucuuuuuguggagucaauuccgacacagugggcuggagcuggcccgauggggcugaacucccuuucaccauugacaaauga

SEQ ID NO: 217830 - RNA, 1410 nt, Artificial Sequence; identical to SEQ ID NO: 217797
  derived and/or modified CDS sequence (opt5) from neuraminidase__InfluenzaA__AIM56295

SEQ ID NO: 217831 - RNA, 1410 nt, Artificial Sequence; identical to SEQ ID NO: 217797
  derived and/or modified CDS sequence (opt5) from neuraminidase__InfluenzaA__AIM56306

SEQ ID NO: 217832 - RNA, 1410 nt, Artificial Sequence; identical to SEQ ID NO: 217797
  derived and/or modified CDS sequence (opt5) from neuraminidase__InfluenzaA__AIM56317

SEQ ID NO: 217833 - RNA, 1410 nt, Artificial Sequence; identical to SEQ ID NO: 217816
  derived and/or modified CDS sequence (opt5) from neuraminidase__InfluenzaA__AIM56339

SEQ ID NO: 217834 - RNA, 1410 nt, Artificial Sequence
  derived and/or modified CDS sequence (opt5) from neuraminidase__InfluenzaA__AIM56350
augaaccccaaucagaagaucauuaccaucggcagcgugugcaugacaauugggauggccaaccugauccuccaaauuggaaauaucaucuccauuugggucucucacagcauccagcugggcaaccagucccagauugagacguguaaucaaucuguuaucaccuacgaaaacaauacaugggugaaccagaccuaugugaauauuagcaacacaaauuucgcugccgggcaguccgucgugccuguuaaacuugcgggaaacucuagccugugcccgguguccggcugggcuaucuacagcaaggacaauucugucagaauuggguccaaaggagauguguuuguuauccgggagcccuucaucagcuguucuccucucgaaugccgcaccuuuuuccugacacagggcgcccuucugaacgacaagcauuccaauggcaccauuaaagauagaagccccuaucggacgcucaugucuuguccuaucggggaggugcccuccccuuacaacagccgcuuugaauccgucgccuggucugcuagcgccugccacgacggaauuaacuggcugaccaucggcauuuccgggccggauagcggagcuguggccgugcugaaguauaauggcaucaucacagacaccauuaagucuuggagaaacaauauccuccggacacaagaguccgagugugcgugcgucaacgggagcuguuucaccauuaugacggauggacccucugacggccaggccagcuacaaaaucuuucgcauugaaaagggcaaaaucguuaaguccguggagaugaaugcuccuaacuaucauuacgaagagugcucuuguuaccccgauagcuccgagaucacaugcgugugcagagacaauuggcacgggagcaaccggccuugggucucuuucaaucagaaccuggaauaucagauuggauacaucuguuccggcguguuuggggauaauccccgcccgaacgacaaaaccggaagcugcggcccuguuucuuccaauggggccaacggagugaagggcuucagcuuuaaguauggcaauggggucuggauuggaagaacaaaauccaucucuagccggaagggcuucgagaugauuugggaucccaacggguggaccggaaccgacaacaauuuuuccaucaaacaagacauugugggcaucaaggaauggucuggguacagcggcuccuucguucagcauccugagcuuacaggacuggauuguauccgccccugcuucuggguggaacucauuagaggccggcccgaggagaacacgaucuggaccagcgggucuuccauuagcuuuuguggaaucaauucugacacagucggcugguccuggccugauggggcugaacugccguucaccauugacaaauga

SEQ ID NO: 217835 - RNA, 1410 nt, Artificial Sequence; identical to SEQ ID NO: 217826
  derived and/or modified CDS sequence (opt5) from neuraminidase__InfluenzaA__AIM56361

SEQ ID NO: 217836 - RNA, 1410 nt, Artificial Sequence; identical to SEQ ID NO: 217797
  derived and/or modified CDS sequence (opt5) from neuraminidase__InfluenzaA__AIM56372

SEQ ID NO: 217837 - RNA, 1410 nt, Artificial Sequence; identical to SEQ ID NO: 217826
  derived and/or modified CDS sequence (opt5) from neuraminidase__InfluenzaA__AIM56383

SEQ ID NO: 217838 - RNA, 1410 nt, Artificial Sequence
  derived and/or modified CDS sequence (opt5) from neuraminidase__InfluenzaA__AIM56394
augaaccccaaucagaagaucauuaccaucggcagcgugugcaugacaauugggauggccaaccugauccuccaaauuggaaauaucaucuccauuugggucucucacagcauccagauuggcaaccagucccagaucgagacguguaaucaaucuguuauuaccuacgaaaacaauacaugggugaaccagaccuaugugaauaucagcaacacaaauuucgcugccgggcaguccgucgugucuguuaaacuggcgggaaacagcucccuuugcccugugagcggcugggcuauuuacucuaaggacaauuccgucagaaucgggagcaaaggagauguguuuguuauccgggagccguucauuucuuguagcccccuggaaugccgcaccuuuuuccucacacagggcgcccugcuuaacgacaagcauuccaauggcaccaucaaagauagaucuccuuaucggacgcugauguccugucccauuggggaggugccuagccccuacaacucccgcuuugaaucugucgccuggagcgcuuccgccugccacgacggaaucaacuggcucaccauuggcaucagcgggccugauucuggagcuguggccgugcugaaguauaauggcaucauuacagacaccaucaaguccuggagaaacaauauucugcggacacaagagagcgagugugcgugcgucaacgggucuuguuucaccaucaugacggauggaccgagcgacggccaggccuccuacaaaauuuuucgcaucgaaaagggcaaaaucguuaagucuguggagaugaaugcucccaacuaucauuacgaagagugcagcuguuacccugauuccagcgagauuacaugcgugugcagagacaauuggcacgggucuaaccggcccugggucuccuucaaucagaaccucgaauaucagaucggauacauuuguagcggcaucuuuggggauaauccucgccccaacgacaaaaccggaucuugcggcccgguguccagcaauggggccaacggaguuaagggcuucuccuuuaaguauggcaaugggguguggauuggaagaacaaaaucuaucagcucccggaagggcuucgagaugauuugggauccuaacggguggaccggaaccgacaacaaauuuucuaucaagcaagacaucgucggcauuaaugaauggagcggguacuccggcagcuucgugcagcaucccgagcugacaggacuugauuguauccgcccuugcuucuggguugaacugauuagaggccggcccgaggagaacacgaucuggaccucuggguccagcauuucuuuuuguggagucaauuccgacacagugggcuggagcuggcccgauggggcugaacucccuuucaccaucgacaaauga

SEQ ID NO: 217839 - RNA, 1410 nt, Artificial Sequence; identical to SEQ ID NO: 217815
  derived and/or modified CDS sequence (opt5) from neuraminidase__InfluenzaA__AIM56405

SEQ ID NO: 217840 - RNA, 1410 nt, Artificial Sequence
  derived and/or modified CDS sequence (opt5) from neuraminidase__InfluenzaA__AIM56416
augaaccccaaucagaagaucauuaccaucggcagcgugugcaugacaauugggauggccaaccugauccuccaaauuggaaauaucaucuccauuugggucucucacagcauccagcugggcaaccagucccauauugagacguguaaucagucuguuaucaccuacgaaaacaauacaugggugaaccaaaccuaugugaauauuagcaacaucaauuucgcugccgggcaguccgucgugccuguuaaacuugcgggaaacucuagccugugcccgguguccggcugggcuauuuacagcaaggacaauucugucagaaucggguccaaaggagauguguuuguuauccgggagcccuucauuagcuguucuccucucgaaugccgcacauuuuuccugacccagggcgcccuucugaacgacaagcacuccaauggcacaaucaaagauagaagccccuaucggacccucaugucuuguccuauuggggaggugcccuccccuuacaacagccgcuuugaauccgucgccuggucugcuagcgccugccaugacggaaucaacuggcugacgauuggcaucuccgggccggauaauggagcuguggccgugcugaaguauaacggcaucauuaccgacacaaucaagagcuggagaaauaacauucuccggacccaggagucugagugugcgugcgucaauggguccuguuucacaaucaugaccgauggacccagcgacggccaagccucuuacaaaauuuuucgcaucgaaaagggcaaaaucguuaagagcguggagaugaacgcuccuaauuaucacuacgaagagugcuccuguuaccccgauucuagcgagauuacgugcgugugcagagacaacuggcauggguccaaucggccuugggucagcuucaaccagaaucuggaauaucagaucggauacauuuguucuggcguguuuggggauaacccccgcccgaaugacaaaacaggauccugcggcccuguuaccagcaacggggccaauggagugaagggcuucucuuuuaaguauggcaacggggucuggaucggaagaacaaaauccauuagcucccggaagggcuucgagaugaucugggaucccaacggguggaccggaaccgacaauaacuuuucuauuaaacaggacaucgugggcaucaaggaauggagcggguacuccggcucuuucguucaacacccugagcuuacaggacuggauuguauucgccccugcuucuggguggaacucaucagaggccggcccgaggagaauacgauuuggaccagcggguccagcaucucuuuuuguggagucaacuccgacacagugggcuggagcuggccugauggggcugaacugccguucaccauugacaaauga

SEQ ID NO: 217841 - RNA, 1410 nt, Artificial Sequence; identical to SEQ ID NO: 217815
  derived and/or modified CDS sequence (opt5) from neuraminidase__InfluenzaA__AIM56428

SEQ ID NO: 217842 - RNA, 1410 nt, Artificial Sequence; identical to SEQ ID NO: 217797
  derived and/or modified CDS sequence (opt5) from neuraminidase__InfluenzaA__AIM56439

SEQ ID NO: 217843 - RNA, 1410 nt, Artificial Sequence
  derived and/or modified CDS sequence (opt5) from neuraminidase__InfluenzaA__AIM56450
augaaccccaaucagaagaucauuaccaucggcagcgugugcaugacaauugggauggccaaccugauccuccaaauuggaaauaucaucuccauuuggaucucucacagcauucaggucggcaaccagucccagaucgagacguguaaucaaucuguuauuaccuacgaaaacaauacaugggugaaccagaccuaugugaauaucagcaacacaaauuucgcugccgggcagccugucguguccguuaaacuggcgggaaacucuagccuuugcccgguguccggcugggcuauuuacagcaaggacaauucugucagagugggguccaaaggagauguuuuugugauccgggagcccuucaucagcuguucuccucuggaaugccgcaccuuuuuccucacacagggcgcccugcuuaacgacaagcauuccaauggcaccauuaaagauagaagccccuaucggacgcugaugucuuguccuaucggggagguccccuccccuuacaacagccgcuuugaauccguggccuggucugcuagcgccugccacgacggaauuaacuggcucaccaucggcauuuccgggccggauagcggagcuguggccguccugaaguauaauggcaucaucacagacaccauuaagucuuggagaaacgauauccugcggacacaagaguccgagugugcgugcguuaaugggagcuguuucaccauuaugacggacggacccucugauggccaggccagcuacaaaaucuuucgcauugaaaagggcaaaaucgugaaguccguggagaugaacgcuccuaauuaucauuacgaagagugcucuuguuaccccgacagcuccgagaucacaugcgucugcagagauaacuggcacgggagcaaucggccuugggugucuuucaaccagaaucucgaauauaaaauuggauacaucuguuccggcauuuuuggggacaacccccgcccgaaugauaagaccggaagcugcggcccuguuucuuccaacggggccaauggagugaagggcuucagcuuuaaauauggcaacggggucuggaucggaagaacaaaguccauuucuagccggaaaggcuucgagaugaucugggaccccaauggguggaccggaaccgacaacaacuuuuccgugaagcaggauauuguuggcaucaaugaauggucuggguacagcggcuccuucgugcaacauccugagcugacaggacuugacuguauccgccccugcuucugggucgaacugauuagaggccggcccaaagagaacacgaucuggaccagcgggucuuccauuagcuuuuguggagucaauucugauacagugggcugguccuggccugacggggcugagcucccguucaccaucgauaaguga

SEQ ID NO: 217844 - RNA, 1410 nt, Artificial Sequence
  derived and/or modified CDS sequence (opt5) from neuraminidase__InfluenzaA__AIM56461
augaaccccaaucagaagaucauuaccaucggcagcgugugcaugacaauugggauggccaaccugauccuccaaauuggaaauaucaucuccauuugggucucucacagcauccagauuggcaaccagucccagaucgagacguguaaucaaucuguuauuaccuacgaaaacaauacaugggugaaccagaccuaugugaauaucagcaacacaaauuucgcugccgggcaguccgucgugucuguuaaacuggcgggaaacagcucccuuugcccugugagcggcugggcuauuuacucuaaggacaauuccgucagaaucgggagcaaaggagauguguuuguuauccgggagccguucauuucuuguagcccccuggaaugccgcaccuuuuuccucacacagggcgcccugcuuaacgacaagcauuccaauggcaccaucaaagauagaucuccuuaucggacgcugauguccugucccauuggggaggugccuagccccuacaacucccgcuuugaaucugucgccuggagcgcuuccgccugccacgacggaaucaacuggcucaccauuggcaucagcgggccugauucuggagcuguggccgugcugaaguauaauggcaucauuacagacaccaucaaguccuggaaaaacaauauucugagaacacaagagagcgagugugcgugcgucaacgggucuuguuucaccaucaugacggauggaccgagcgacggccaggccuccuacaagauuuuucggaucgaaaaaggcaagaucguuaaaucuguggagaugaaugcucccaacuaucauuacgaagagugcagcuguuacccugauuccagcgagauuacaugcgugugccgcgacaauuggcacgggucuaacagacccugggucuccuucaaucagaaccucgaauaucagaucggauacauuuguagcggcguguuuggggauaauccucggcccaacgacaagaccggaucuugcggcccgguuuccagcaauggggccaacggagugaagggcuucuccuuuaaauauggcaauggggucuggaucggacgcacaaagucuauuagcuccagaaaaggcuucgagaugaucugggauccuaacggguggaccggaaccgacaacaaguuuucuauuaaacaagacaucgugggcguuaaugaauggagcggguacuccggcagcuucgugcagcaucccgagcugacaggacuugauuguauccggccuugcuucugggucgaacugauucgcggcagacccgaggagaacacgaucuggaccucuggguccagcauuucuuuuuguggagucaauuccgacacagugggcuggagcuggcccgauggggcugaacucccuuucaccaucgacaaguga

SEQ ID NO: 217845 - RNA, 1410 nt, Artificial Sequence
  derived and/or modified CDS sequence (opt5) from neuraminidase__InfluenzaA__AIM56472
augaaccccaaucagaagaucauuaccaucggcagcgugugcaugacaauugggauggccaaccugauccuccaaauuggaaauaucaucuccauuugggucucucacagcauccagauuggcaaccagucccagaucgagacguguaaucaaucuguuauuaccuacgaaaacaauacaugggugaaccagaccuaugugaauaucagcaacacaaauuucgcugccgggcaguccgucgugucuguuaaacuggcgggaaacagcucccuuugcccugugagcggcugggcuauuuacucuaaggacaauuccgucagaaucgggagcaaaggagauguguuuguuauccgggagccguucauuucuuguagcccccuggaaugccgcaccuuuuuccucacacagggcgcccugcuuaacgacaagcauuccaauggcaccaucaaagauagaucuccuuaucggacgcugauguccugucccauuggggaggugccuagccccuacaacucccgcuuugaaucugucgccuggagcgcuuccgccugcaacgacggaaucaauuggcucaccauuggcaucagcgggccugauucuggagcuguggccgugcugaaguauaacggcaucauuacagacaccaucaaguccuggagaaauaacauucugcggacacaagagagcgagugugcgugcgucaaugggucuuguuucaccaucaugacggauggaccgagcgacggccaggccuccuacaaaauuuuucgcaucgaaaagggcaaaaucguuaagucuguggagaugaacgcucccaauuaucacuacgaagagugcagcuguuacccugauuccagcgagauuacaugcgugugcagagacaacuggcaugggucuaaucggcccugggucuccuucaaccagaaucucgaauaucagaucggauacauuuguagcggcguguuuggggauaacccucgccccaaugacaaaaccggaucuugcggcccgguuuccagcaacggggccaauggagugaagggcuucuccuuuaaguauggcaacggggucuggaucggaagaacaaaaucuauuagcucccggaagggcuucgagaugaucugggauccuaacggguggaccggaaccgacaauaaauuuucuauuaagcaagacaucgugggcaucaacgaauggagcggguacuccggcagcuucguucagcaccccgagcugacaggacuugauuguauucgcccuugcuucuggguggaacugaucagaggccggcccgaggagaauacgauuuggaccucuggguccagcaucucuuuuuguggagucaacuccgacacagugggcuggagcuggcccgauggggcugaacucccuuucaccauugacaaauga

SEQ ID NO: 217846 - RNA, 1410 nt, Artificial Sequence; identical to SEQ ID NO: 217803
  derived and/or modified CDS sequence (opt5) from neuraminidase__InfluenzaA__AIM56483

SEQ ID NO: 217847 - RNA, 1410 nt, Artificial Sequence; identical to SEQ ID NO: 217826
  derived and/or modified CDS sequence (opt5) from neuraminidase__InfluenzaA__AIM56494

SEQ ID NO: 217848 - RNA, 1410 nt, Artificial Sequence; identical to SEQ ID NO: 217816
  derived and/or modified CDS sequence (opt5) from neuraminidase__InfluenzaA__AIM56505

SEQ ID NO: 217849 - RNA, 1410 nt, Artificial Sequence; identical to SEQ ID NO: 217815
  derived and/or modified CDS sequence (opt5) from neuraminidase__InfluenzaA__AIM56516

SEQ ID NO: 217850 - RNA, 1410 nt, Artificial Sequence
  derived and/or modified CDS sequence (opt5) from neuraminidase__InfluenzaA__AIM56527
augaaccccaaucagaagaucauuaccaucggcagcgugugcaugacaauugggauggccaaccugauccuccaaauuggaaauaucaucuccauuugggucucucacagcauccagcugggcaaccagucccagauugagacguguaaucaaucuguuaucaccuacgaaaacaauacaugggugaaccagaccuaugugaauauuagcaacacaaauuucgcugccgagcaguccgucgugucuguuaaacuugcggggaacagcucccugugcccugugagcggaugggcuaucuacucuaaggacaauuccgucagaauuggcagcaaaggggauguguuuguuauccgggaaccguucaucucuuguagcccccucgagugccgcaccuuuuuccugacacagggagcccuucugaacgacaagcauuccaauggcaccauuaaagauagaucuccuuaucggacgcucauguccugucccaucggcgaagugccuagccccuacaacucccgcuuugagucugucgccuggagcgcuuccgccugccacgacgggauuaacuggcugaccaucggaauuagcggcccugauucuggggcuguggccgugcugaaguauaauggaaucaucacagacaccauuaaguccuggagaaacaauauccuccggacacaagagagcgaaugugcgugcgucaacggcucuuguuucaccauuaugacggaugggccgagcgacggacaggccuccuacaaaaucuuucgcauugagaagggcaaaaucguuaagucuguggaaaugaaugcucccaacuaucauuacgaggagugcagcuguuacccugauuccagcgaaaucacaugcgugugcagagacaauuggcacggcucuaaccggcccugggucuccuucaaucagaaccuggaguaucagauuggguacaucuguagcggagugcuuggcgauaauccucgccccaacgacaaaaccgggucuugcggaccgguuuccagcaauggcgccaacggggugaagggauuuuccuucaaguauggcaauggcgucuggauugggagaacaaaaucuaucagcucccggaagggauuugaaauggugugggauccuaacggcuggaccgggaccgacaacaauuucucuauuaaacaagacaucguuggaauuaaggaguggagcggcuacuccgggagcuuugugcagcaucccgaacugacaggccucgauuguauccgcccuugcuucugggucgagcugaucagaggacggcccgaggaaaacacgauuuggaccucuggcuccagcaucucuuucuguggggucaauuccgacacagugggauggagcuggcccgauggcgcugagcuuccuuuuaccauugacaaauga

SEQ ID NO: 217851 - RNA, 1410 nt, Artificial Sequence; identical to SEQ ID NO: 217797
  derived and/or modified CDS sequence (opt5) from neuraminidase__InfluenzaA__AIM56538

SEQ ID NO: 217852 - RNA, 1410 nt, Artificial Sequence
  derived and/or modified CDS sequence (opt5) from neuraminidase__InfluenzaA__AIM56549
augaaccccaaucagaagaucauuaccaucggcagcgugugcaugacaauugggauggccaaccugauccuccaaauuggaaauaucaucuccauuugggucucucacagcauccagauuggcaaccagucccagaucgagacguguaaucaaucuguuauuaccuacgaaaacaauacaugggugaaccagaccuaugugaauaucagcaacacaaauuucgcugccgggcaguccgucgugucuguuaaacuggcgggaaacagcucccuuugcccugugagcggcugggcuauuuacucuaaggacaauuccgucagaaucgggagcaaaggagauguguuuguuauccgggagccguucauuucuuguagcccccuggaaugccgcaccuuuuuccucacacagggcgcccugcuuaacgacaagcauuccaauggcaccaucaaagauagaucuccuuaucggacgcugauguccugucccauuggggaggugccuagccccuacaacucccgcuuugaaucugucgccuggagcgcuuccgccugccacgacggaaucaacuggcucaccauuggcaucagcgggccugauucuggagcuguggccgugcugaaguauaauggcaucauuacagacaccaucaaguccuggagaaacaauauucugcggacacaagagagcgagugugcgugcgucaacgggucuuguuucaccaucaugacggauggaccgagcgacggccaggccuccuacaaaauuuuucgcaucgaaaagggcaaaaucguuaagucuguggagaugaaugcucccaacuaucauuacgaagagugcagcuguuacccugauuccagcgaggugacaugcgucugcagagacaauuggcacgggucuaaccggcccuggguguccuucaaucagaaccucgaauaucagauuggauacaucuguagcggcguuuuuggggauaauccucgccccaacgacaaaaccggaucuugcggcccgguguccagcaauggggccaacggagucaagggcuucuccuuuaaguauggcaaugggguguggauuggaagaacaaaaucuaucagcucccggaagggcuucgagaugauuugggauccuaacggguggaccggaaccgacaacaaauuuucuaucaagcaagacauuguuggcaucaaugaauggagcggguacuccggcagcuucgugcagcaucccgagcugacaggacuugauuguauccgcccuugcuucugggucgaacugauuagaggccggcccgaggagaacacgaucuggaccucuggguccagcauuucuuuuuguggagucaauuccgacacagugggcuggagcuggcccgauggggcugaacucccuuucaccaucgacaaauga

SEQ ID NO: 217853 - RNA, 1410 nt, Artificial Sequence
  derived and/or modified CDS sequence (opt5) from neuraminidase__InfluenzaA__AIM56560
augaaccccaaucagaagaucauuaccaucggcagcgugugcaugacaauugggauggccaaccugauccuccaaauuggaaauaucaucuccauuugggucucucacagcauccagcugggcaaccagucccauauugagacguguaaucagucuguuaucaccuacgaaaacaauacaugggugaaccaaaccuaugugaauauuagcaacacaaauuucgcugccgggcaguccgucgugccuguuaaacuugcgggaaacucuagccugugcccgguguccggcugggcuauccacagcaaggacaauucugucagaauuggguccaaaggagauguguuuguuauccgggagcccuucaucagcuguucuccucucgaaugccgcaccuuuuuccugacacagggcgcccuucugaacgacaagcauuccaauggcaccauuaaagauagaagccccuaccggacgcucaugucuuguccuaucggggaggugcccuccccuuauaacagccgcuuugaauccgucgccuggucugcuagcgccugccacgacggaauuaacuggcugaccaucggcauuuccgggccggauaauggagcuguggccgugcugaaguacaacggcaucaucacagacaccauuaagagcuggagaaauaacauccuccggacacaggagucugagugugcgugcgucaauggguccuguuucaccauuaugacggauggacccagcgacggccaagccucuuauaaaaucuuucgcauugaaaagggcaaaaucguuaagagcguggagaugaacgcuccuaauuaccauuaugaagagugcuccuguuaccccgauucuagcgagaucacaugcgugugcagagacaacuggcacggguccaaucggccuugggucagcuucaaccagaaucuggaauaccagauuggauauaucuguucuggcguguuuggggauaacccccgcccgaaugacaaaaccggauccugcggcccuguuacaagcaacggggccaauggagugaagggcuucucuuuuaaguacggcaacggggucuggauuggaagaaccaaauccaucagcucccggaagggcuucgagaugauuugggaucccaacggguggaccggaacagacaauaacuuuucuaucaaacaggacauugugggcaucaaggaauggagcggguauuccggcucuuucguucaacacccugagcuuacgggacuggauuguauccgccccugcuucuggguggaacucauuagaggccggcccgaggagaauaccaucuggacaagcggguccagcauuucuuuuuguggagucaacuccgacaccgugggcuggagcuggccugauggggcugaacugccguucacaaucgacaaauga

SEQ ID NO: 217854 - RNA, 1410 nt, Artificial Sequence; identical to SEQ ID NO: 217803
  derived and/or modified CDS sequence (opt5) from neuraminidase__InfluenzaA__AIM56571

SEQ ID NO: 217855 - RNA, 1410 nt, Artificial Sequence
  derived and/or modified CDS sequence (opt5) from neuraminidase__InfluenzaA__AIM56582
augaaccccaaucagaagaucauuaccaucggcagcgugugcauuacaaucgggauggccaaccugauucuccaaaucggaaauaucauuuccaucugggucucucacagcauucagcugggcaaccagucccagaucgagacguguaaucaaucuguuauuaccuacgaaaacaauacaugggugaaccagaccuaugugaauaucagcaacacaaauuucgcugccgggcaguccgucgugucuguuaaacuugcgggaaacagcucccugugcccugugagcggcugggcuauuuacucuaaggacaauuccgucagaaucgggagcaaaggagauguguuuguuauccgggagccguucauuucuuguagcccccucgaaugccgcaccuuuuuccugacacagggcgcccuucugaacgacaagcauuccaauggcaccaucaaagauagaucuccuuaucggacgcucauguccugucccauuggggaggugccuagccccuacaacucccgcuuugaaucugucgccuggagcgcuuccgccugccacgacggaaucaacuggcugaccauuggcaucagcgggccugauucuggagcuguggccgugcugaaguauaauggcaucauuacagacaccaucaaguccuggagaaacaauauucuccggacacaagagagcgagugugcgugcgucaacgggucuuguuucaccaucaugacggauggaccgagcgacggccaggccuccuacaaaauuuuucgcaucgaaaagggcaaaaucguuaagucuguggagaugaaugcucccaacuaucauuacgaagagugcagcuguuacccugauuccagcgagauuacaugcgugugcagagacaauuggcacgggucuaaccggcccugggucuccuucaaucagaaccuggaauaucagaucggauacauuuguagcggcguguuuggggauaauccucgccccaacgacaaaaccggaucuugcggcccgguuuccagcaauggggccaacggagugaagggcuucuccuuuaaguauggcaauggggucuggaucggaagaacaaaaucuauuagcucccggaagggcuucgagaugaucugggauccuaacggguggaccggaaccgacaacaauuuuucuauuaaacaagacaucgugggcaucaaggaauggagcggguacuccggcagcuucguucagcaucccgagcuuacaggacuggauuguauucgcccuugcuucuggguggaacucaucagaggccggcccgaggagaacacgauuuggaccucuggguccagcaucucuuuuuguggagucaauuccgacacagugggcuggagcuggcccgauggggcugaacugccuuucaccauugacaaauga

SEQ ID NO: 217856 - RNA, 1410 nt, Artificial Sequence
  derived and/or modified CDS sequence (opt5) from neuraminidase__InfluenzaA__AIM56593
augaaccccaaucagaagaucauuaccaucggcagcgugugcaugacaauugggauggccaaccugauccuccaaauuggaaauaucaucuccauuugggucucucacagcauccagcugggcaaccagucccagauugagacguguaaucaaucuguuaucaccuacgaaaacaauacaugggugaaccagaccuaugugaauauuagcaacacaaauuucgcugccgagcaguccgucgugucuguuaaacuugcggggaacagcucccugugcccugugagcggaugggcuaucuacucuaaggacaauuccgucagaauuggcagcaaaggggauguguuuguuauccgggaaccguucaucucuuguagcccccucgagugccgcaccuuuuuccugacacagggagcccuucugaacgacaagcauuccaauggcaccauuaaagauagaucuccuuaucggacgcucauguccugucccaucggcgaagugccuagccccuacaacucccgcuuugagucugucgccuggagcgcuuccgccugccacgacgggauuaacuggcugaccaucggaauuagcggcccugauucuggggcuguggccgugcugaaguauaauggaaucaucacagacaccauuaaguccuggagaaacaauauccuccggacacaagagagcgaaugugcgugcgucaacggcucuuguuucaccauuaugacggaugggccgagcgacggacaggccuccuacaaaaucuuucgcauugagaagggcaaaaucguuaagucuguggaaaugaaugcucccaacuaucauuacgaggagugcagcuguuacccugauuccagcgaaaucacaugcgugugcagagacaauuggcacggcucuaaccggcccugggucuccuucaaucagaaccuggaguaucagauuggguacaucuguagcggagugcuuggcgauaauccucgccccaacgacaaaaccgggucuugcggaccgguuuccagcaauggcgccaacggggugaagggauuuuccuucaaguauggcaauggcgucuggauugggagaacaaaaucuaucagcucccggaagggauuugaaaugauuugggauccuaacggcuggaccgagaccgacaacaauuucucuaucaaacaagacauuguggggaucaaggaauggagcggauacuccggcagcuuuguucagcaucccgagcugacagggcucgauuguauccgcccuugcuucuggguggagcugauuagaggccggcccgaagagaacacgaucuggaccucuggauccagcauuucuuucuguggcgucaauuccgacacagugggguggagcuggcccgauggagcugaacuuccuuuuaccaucgacaaauga

SEQ ID NO: 217857 - RNA, 1410 nt, Artificial Sequence
  derived and/or modified CDS sequence (opt5) from neuraminidase__InfluenzaA__AIM56604
augaaccccaaucagaagaucauuaccaucggcagcgugugcaugacaauugggauggccaaccugauccuccaaauuggaaauaucaucuccauuugggucucucacagcauccagauuggcaaccagucccagaucgagacguguaaucaaucuguuauuaccuacgaaaacaauacaugggugaaccagaccuaugugaauaucagcaacauuaauuucgcugccgggcaguccgucgugucuguuaaacuggcgggaaacagcucccuuugcccugugagcggcugggcuaucuacucuaaggacaauuccgucagaaucgggagcaaaggagauguguuuguuauucgggagccguucaucucuuguagcccccuggaaugccgcacauuuuuccucacccagggcgcccugcuuaacgacaagcauuccaauggcacaauuaaagauagaucuccuuaucggacccugauguccugucccaucggggaggugccuagccccuacaacucccgcuuugaaucugucgccuggagcgcuuccgccugccacgacggaauuaacuggcucacgaucggcaucagcgggccugauucuggagcuguggccgugcugaaguauaauggcauuaucaccgacacaauuaaguccuggagaaacaauauccugcggacccaagagagcgagugugcgugcgucaacgggucuuguuucacaauuaugaccgauggaccgagcgacggccaggccuccuacaaaaucuuucgcaucgaaaagggcaaaauuguuaagucuguggagaugaaugcucccaacuaucauuacgaagagugcagcuguuacccugauuccagcgagaucacgugcgugugcagagacaauuggcacgggucuaaccggcccugggucuccuucaaucagaaccucgaauaucagauuggauacaucuguagcggcguguuuggggauaauccucgccccaacgacaaaacaggaucuugcggcccgguuuccagcaauggggccaacggagugaagggcuucuccuuuaaguauggcaauggggucuggauuggaagaaccaaaucuaucagcucccggaagggcuucgagaugauuugggauccuaacggguggacaggaaccgacaacaaauuuucuaucaagcaagacaucgugggcauuaaugaauggagcggguacuccggcagcuucguucagcaucccgagcugaccggacuugauuguauccgcccuugcuucuggguggaacugauuagaggccggcccgaggagaacacaaucuggacgucuggguccagcauuucuuuuuguggagucaauuccgacaccgugggcuggagcuggcccgauggggcugaacucccuuucacaaucgacaaauga

SEQ ID NO: 217858 - RNA, 1410 nt, Artificial Sequence
  derived and/or modified CDS sequence (opt5) from neuraminidase__InfluenzaA__AIM56615
augaaccccaaucagaagaucauuaccaucggcagcgugugcaugacaauugggauggccaaccugauccuccaaauuggaaauaucaucuccauuugggucucucacagcauccagauuggcaaccagucccagaucgagacguguaaucaaucuguuauuaccuacgaaaacaauacaugggugaaccagaccuauguggacaucagcaauacaaacuucgcugccgggcaguccgucgugucuguuaaacuggcgggaaauagcucccuuugcccugugagcggcugggcuauuuacucuaaggauaacuccgucagaaucgggagcaaaggagacguguuuguuauccgggagccguucauuucuuguagcccccuggaaugccgcaccuuuuuccucacacagggcgcccugcuuaaugauaagcauuccaacggcaccaucaaagacagaucuccuuaucggacgcugauguccugucccauuggggaggugccuagccccuacaauucccgcuuugaaucugucgccuggagcgcuuccgccugccacgauggaaucaacuggcucaccauuggcaucagcgggccugacucuggagcuguggccgugcugaaguauaacggcaucauuacagauaccaucaaguccuggagaaauaacauucugcggacacaagagagcgagugugcgugcgucaaugggucuuguuucaccaucaugacggacggaccgagcgauggccaggccuccuacaaaauuuuucgcaucgaaaagggcaaaaucguuaagucuguggagaugaacgcucccaauuaucauuacgaagagugcagcuguuacccugacuccagcgagauuacaugcgugugcagagauaacuggcacgggucuaaucggcccugggucuccuucaaccagaaucucgaauaucagaucggauacauuuguagcggcguguuuggggacaacccucgccccaaugauaaaaccggaucuugcggcccgguuuccagcaacggggccaauggagugaagggcuucuccuuuaaguauucuaacggcgucuggaucgggagaacaaaaagcauuuccucucggaagggauucgagaugaucugggacccuaauggcuggaccgggaccgacaacaaauuuagcauuaagcaagauaucgugggaaucaacgaaugguccggcuacagcgggucuuucguucagcaucccgagcugacaggccuugacuguauucgcccuugcuucuggguggaacugaucagaggacggcccgaggagaauacgauuuggaccuccggcagcucuaucuccuuuuguggggucaacagcgauacagugggauggucuuggcccgacggcgcugaacucccuuucaccauugauaaauga

SEQ ID NO: 217859 - RNA, 1410 nt, Artificial Sequence; identical to SEQ ID NO: 217852
  derived and/or modified CDS sequence (opt5) from neuraminidase__InfluenzaA__AIM56626

SEQ ID NO: 217860 - RNA, 1410 nt, Artificial Sequence; identical to SEQ ID NO: 217797
  derived and/or modified CDS sequence (opt5) from neuraminidase__InfluenzaA__AIM56637

SEQ ID NO: 217861 - RNA, 1410 nt, Artificial Sequence; identical to SEQ ID NO: 217803
  derived and/or modified CDS sequence (opt5) from neuraminidase__InfluenzaA__AIM56648

SEQ ID NO: 217862 - RNA, 1410 nt, Artificial Sequence
  derived and/or modified CDS sequence (opt5) from neuraminidase__InfluenzaA__AIM56659
augaaccccaaucagaagaucauuaccaucggcagcgugugcaugacaauugggauggccaaccugauccuccaaauuggaaauaucaucuccauuugggucucucacagcauccagcugggcaaccagucccauauugagacguguaaucagucuguuaucaccuacgaaaacaauacaugggugaaccaaaccuaugugaauauuagcaacacaaauuucgcugccgggcaguccgucgugccuguuaaacuugcgggaaacucuagccugugcccgguguccggcugggcuaucuacagcaaggacaauucugucagaauuggguccaaaggagauguguuuguuauccgggagcccuucaucagcuguucuccucucgaaugccgcaccuuuuuccugacacagggcgcccuucugaacgacaagcacuccaauggcaccauuaaagauagaagccccuaucggacgcucaugucuuguccuaucggggaggugcccuccccuuacaacagccgcuuugaauccgucgccuggucugcuagcgccugccaugacggaauuaacuggcugaccaucggcauuuccgggccggauagcggagcuguggccgugcugaaguauaauggcaucaucacagacaccauuaagucuuggagaaacaauauccuccggacacaggaguccgagugugcgugcgucaacgggagcuguuucaccauuaugacggauggacccucugacggccaagccagcuacaaaaucuuucgcauugaaaagggcaaaaucguuaaguccguggagaugaaugcuccuaacuaucacuacgaagagugcucuuguuaccccgauagcuccgagaucacaugcgugugcagagacaauuggcaugggagcaaccggccuugggucucuuucaaucagaaccuggaauaucagauuggauacaucuguuccggcguguuuggggauaauccccgcccgaacgacaaaauuggaagcugcggcccuguuucuuccaauggggccaacggagugaagggcuucagcuuuaaguauggcaauggggucuggaucggaagaaccaaauccauuucuagccggaagggcuucgagaugaucugggaucccaacggguggacaggaaccgacaacaauuuuuccauuaaacaggacaucgugggcaucaaggaauggucuggguacagcggcuccuucguucaacacccugagcuuaccggacuggauuguauucgccccugcuucuggguggaacucaucagaggccggcccgaggagaaaacaauuuggacgagcgggucuuccaucagcuuuuguggagucaacucugacaccgugggcugguccuggccugauggggcugaacugccguucacaauugacaaguga

SEQ ID NO: 217863 - RNA, 1410 nt, Artificial Sequence
  derived and/or modified CDS sequence (opt5) from neuraminidase__InfluenzaA__AIM56670
augaaccccaaucagaagaucauuaccaucggcagcgugugcaugacaauugggauggccaaccugauccuccaaauuggaaauacgaucuccaucugggucucucacagcauucagaucggcaaccagucccagauugagaccuguaaucaaucuguuaucacauacgaaaacaauaccugggugaaccagacauaugugaauauuagcaacaccaauuucgcugccgggcaguccgucgugucuguuaaacuggcgggaaacagcucccuuugcccugugagcggcugggcuaucuacucuaaggacaauuccgucagaauugggagcaaaggagauguguuuguuauccgggagccguucaucucuuguagcccccuggaaugccgcacauuuuuccucacccagggcgcccugcuuaacgacaagcauuccaauggcacgauuaaagauagaucuccuuaucggacccugauguccugucccaucggggaggugccuagccccuacaacucccgcuuugaaucugucgccuggagcgcuuccgccugccacgacggaauuaacuggcucacaaucggcauuagcgggccugauucuggagcuguggccgugcugaaguauaauggcaucaucaccgacacaauuaaguccuggagaaacaauauccugcggacccaagagagcgagugugcgugcgucaacgggucuuguuucacgauuaugacagauggaccgagcgacggccaggccuccuacaaaaucuuucgcauugaaaagggcaaaaucguuaagucuguggagaugaaugcucccaacuaucauuacgaagagugcagcuguuacccugauuccagcgagauuaccugcgugugcagagacaauuggcacgggucuaaccggcccugggucuccuucaaucagaaccucgaauaucagaucggauacaucuguagcggcguguuuggggauaauccucgccccaacgacaaaacaggaucuugcggcccgguuuccagcaauggggccaacggagugaagggcuucuccuuuaaguauggcaauggggucuggauuggaagaaccaaaucuaucagcucccggaagggcuucgagaugauuugggauccuaacggguggaccggaacagacaacaaauuuucuaucaagcaagacauugugggcaucaaugaauggagcggguacuccggcagcuucguucagcaucccgagcugacgggacuugauuguauccgcccuugcuucuggguggaacugauuagaggccggcccgaggagaacaccaucuggacaucuggguccagcauuucuuuuuguggagucaauuccgacaccgugggcuggagcuggcccgauggggcugaacucccuuucacaaucgacaaauga

SEQ ID NO: 217864 - RNA, 1410 nt, Artificial Sequence; identical to SEQ ID NO: 217815
  derived and/or modified CDS sequence (opt5) from neuraminidase__InfluenzaA__AIM56703

SEQ ID NO: 217865 - RNA, 1410 nt, Artificial Sequence
  derived and/or modified CDS sequence (opt5) from neuraminidase__InfluenzaA__AIM56714
augaaccccaaucagaagaucauuaccaucggcagcgugugcaugacaauugggauggccaaccugauccuccaaauuggaaauaucaucuccauuugggucucucacagcauccagauuggcaaccagucccagaucgagacguguaaucaaucuguuauuaccuacgaaaacaauacaugggugaaccagaccuaugugaauaucagcaacacaaauuucgcugccgggcaguccgucgugucuguuaaacuggcgggaaacagcucccuuugcccugugagcggcugggcuauuuacucuaaggacaauuccgucagaaucgggagcaaaggagauguguuuguuauccgggagccguucauuucuuguagcccccuggaaugccgcaccuuuuuccucacacagggcgcccugcuuaacgacaagcauuccaauggcaccaucaaagauagaucuccuuaucggacgcugauguccugucccauuggggaggugccuagccccuacaacucccgcuuugaaucugucgccuggagcgcuuccgccugccacgacggaaucaacuggcucaccauuggcaucagcgggccugauucuggagcuguggccgugcugaaguauaauggcaucauuacagacaccaucaaguccuggagaaacaauauucugcggacacaagagagcgagugugcgugcgucaacgggucuuguuucaccaucaugacggauggaccgagcgacggccaggccuccuacaaaauuuuucgcaucgaaaagggcaaaaucguuaagucuguggagaugaaugcucccaacuaucauuacgaagagugcagcuguuacccugauuccagcgagauuacaugcgugugcagagacaauuggcacgggucuaaccggcccugggucuccuucaaucagaaccucgaauaucagaucggauacauuuguagcggcguguuuggggauaauccucgccccaacgacaaaaccggaucuugcggcccgguuccuuccaauggggccaacggagugaagggcuucagcuuuaaguauggcaauggggucuggaucggaagaacaaaauccauuucuagccggaagggcuucgagaugaucugggaucccaacggguggaccggaaccgacaacaaauuuuccauuaagcaagacaucgugggcaucaaugaauggucuggguacagcggcuccuucguucagcauccugagcugacaggacuugauuguauucgccccugcuucuggguggaacugaucagaggccggcccgaggagaacacgauuuggaccagcgggucuuccaucagcuuuuguggagucaauucugacacagugggcugguccuggccugauggggcugaacucccguucaccauugacaaauga

SEQ ID NO: 217866 - RNA, 1410 nt, Artificial Sequence
  derived and/or modified CDS sequence (opt5) from neuraminidase__InfluenzaA__AIM56725
augaaccccaaucagaagaucauuaccaucggcagcgugugcaugacaauugggauggccaaccugauccuccaaauuggaaauaucaucuccauuugggucucucacagcauccagauuggcaaccagucccagaucgagacguguaaucaaucuguuauuaccuacgaaaacaauacaugggugaaccagaccuaugugaauaucagcaacacaaauuucgcugccgggcaguccgucgugucuguuaaacuggcgggaaacagcucccuuugcccugugagcggcugggcuauuuacucuaaggacaauuccgucagaaucgggagcaaaggagauguguuuguuauccgggagccguucauuucuuguagcccccuggaaugccgcaccuuuuuccucacacagggcgcccugcuuaacgacaagcauuccaauggcaccaucaaagauagaucuccuuaucggacgcugauguccugucccauuggggaggugccuagccccuacaacucccgcuuugaaucugucgccuggagcgcuuccgccugccacgacggaaucaacuggcucaccauuggcaucagcgggccugauucuggagcuguggccgugcugaaguauaauggcaucauuacagacaccaucaaguccuggagaaacaauauucugcggacacaagagagcgagugugcgugcgucaacgggucuuguuucaccaucaugacggauggaccgagcgacggccaggccuccuacaaaauuuuucgcaucgaaaagggcaaaaucguuaagucuguggagaugaaugcucccaacuaucauuacgaagagugcagcuguuacccugauuccagcgaggugacaugcgucugcagagacaauuggcacgggucuaaccggcccuggguguccuucaaucagaaccucgaauaucagauuggauacaucuguagcggcauuuuuggggauaauccucgccccaacgacaaaaccggaucuugcggcccgguuuccagcaauggggccaacggagugaagggcuucuccuuuaaguauggcaauggggucuggaucggaagaacaaaaucuauuagcucccggaagggcuucgagaugaucugggauccuaacggguggaccggaaccgacaacaaauuuucuauuaagcaagacaucgugggcaucaaugaauggagcggguacuccggcagcuucguucagcaucccgagcugacaggacuugauuguauucgcccuugcuucuggguggaacugaucagaggccggcccgaggagaacacgauuuggaccucuggguccagcaucucuuuuuguggagucaauuccgacacagugggcuggagcuggcccgauggggcugaacucccuuucaccauugacaaauga

SEQ ID NO: 217867 - RNA, 1410 nt, Artificial Sequence; identical to SEQ ID NO: 217815
  derived and/or modified CDS sequence (opt5) from neuraminidase__InfluenzaA__AIM56736

SEQ ID NO: 217868 - RNA, 1410 nt, Artificial Sequence
  derived and/or modified CDS sequence (opt5) from neuraminidase__InfluenzaA__AIM56747
augaaccccaaucagaagaucauuaccaucggcagcgugugcaugacaauugggauggccaaccugauccuccaaauuggaaauaucaucuccauuugggucucucacagcauccagauuggcaaccagucccagaucgagacguguaaucaaucuguuauuaccuacgaaaacaauacaugggugaaccagaccuaugugaauaucagcaacacaaauuucgcugccgggcaguccgucgugucuguuaaacuggcgggaaacagcucccuuugcccugugagcggcugggcuauuuacucuaaggacaauuccgucagaaucgggagcaaaggagauguguuuguuauccgggagccguucauuucuuguuccagccuggaaugccgcaccuuuuuccucacacagggcgcccugcuuaacgacaagcauucuaauggcaccaucaaagauagaucccccuaucggacgcugaugagcuguccuauuggggaggugcccuccccuuacaacucucgcuuugaaagcgucgccugguccgcuagcgccugccacgacggaaucaacuggcucaccauuggcaucucugggcccgauuccggagcuguggccgugcugaaguauaauggcaucauuacagacaccaucaagagcuggagaaacaauauucugcggacacaagagucugagugugcgugcgucaacgggagcuguuucaccaucaugacggauggaccuuccgacggccaggccucuuacaaaauuuuucgcaucgaaaagggcaaaaucguuaagagcguggagaugaaugcuccgaacuaucauuacgaagagugcuccuguuaccccgauagcucugagauuacaugcgugugcagagacaauuggcacggguccaaccggccuugggucagcuucaaucagaaccucgaauaucagaucggauacauuuguucuggcguguuuggggauaauccccgcccuaacgacaaaaccggauccugcggccccguuagcuccaauggggccaacggagugaagggcuucucuuuuaaguauggcaauggggucuggaucggaagaacaaaaagcauuuccucucggaagggcuucgagaugaucugggauccgaacggguggaccggaaccgacaacaaauuuagcauuaagcaagacaucgugggcaucaaugaaugguccggguacagcggcucuuucguucagcauccugagcugacaggacuugauuguauucgccccugcuucuggguggaacugaucagaggccggccugaggagaacacgauuuggaccuccgggagcucuaucuccuuuuguggagucaauagcgacacagugggcuggucuuggcccgauggggcugaacuccccuucaccauugacaaauga

SEQ ID NO: 217869 - RNA, 1410 nt, Artificial Sequence; identical to SEQ ID NO: 217852
  derived and/or modified CDS sequence (opt5) from neuraminidase__InfluenzaA__AIM56758

SEQ ID NO: 217870 - RNA, 1410 nt, Artificial Sequence; identical to SEQ ID NO: 217815
  derived and/or modified CDS sequence (opt5) from neuraminidase__InfluenzaA__AIM56769

SEQ ID NO: 217871 - RNA, 1410 nt, Artificial Sequence
  derived and/or modified CDS sequence (opt5) from neuraminidase__InfluenzaA__AIM56780
augaaccccaaucagaagaucauuaccaucggcagcgugugcaugacaauugggauggccaaccugauccuccaaauuggaaauaucaucuccauuugggucucucacagcauccagcugggcaaccagucccagauugggacguguaaucaaucuguuaucaccuacgagaacaauacaugggugaaccagaccuaugugaauauuagcaacacaaauuucgcugccggacaguccgucgugucuguuaaacuugcgggcaacagcucccugugcccugugagcgggugggcuaucuacucuaaggacaauuccgucagaauuggaagcaaaggcgauguguuuguuauccgggaaccguucaucucuuguagcccccucgagugccgcaccuuuuuccugacacagggcgcccuucugaacgacaagcauagcaaugggaccauuaaagauagaucuccuuaucggacgcucauguccugucccaucggagaagugccuagccccuacaacucccgcuuugagucugucgccuggagcgcuuccgccugccacgacggcauuaacuggcugaccaucgggauuagcggaccugauucuggcgcuguggccgugcugaaguauaaugggaucaucacagacaccauuaaguccuggagaaacaauauccuccggacacaagaaagcgagugugcgugcgucaacggaucuuguuucaccauuaugacggauggcccgagcgacggccaggccuccuacaaaaucuuucgcauugagaaggggaaaaucaucaagucuguugaaaugaaugcucccaacuaucauuacgaggaaugcagcuguuacccugauuccagcgagauuacaugcgugugcagagacaauuggcacggaucuaaccggcccuggguguccuucaaucagaaccuggaguaucagaucggcuacauuuguagcggggucuuuggagauaauccucgccccaacgacaaaaccggcucuugcgggccgguguccagcaauggagccaacggcguuaagggcuucuccuuuaaguaugggaauggaguguggaucggcagaacaaaaucuauuagcucccggaagggguucgaaaugaucugggauccuaacggauggaccggcaccgacaacaaauuuucuauuaagcaagacaucgucgggauccaugaguggagcggcuacuccggauccuucgugcagcaccccgaacuuacaggccuggauuguauucgcccuugcuucuggguugagcucaucagagggcggcccgaagagaauacgauuuggaccucuggauccagcaucucuuuuuguggcgugaacuccgacacagucggguggagcuggcccgauggagcugagcugccuuucaccauugacaaauga

SEQ ID NO: 217872 - RNA, 1410 nt, Artificial Sequence
  derived and/or modified CDS sequence (opt5) from neuraminidase__InfluenzaA__AIM56791
augaaccccaaucagaagaucauuaccaucggcagcgugugcaugacaauugggauggccaaccugauccuccaaauuggaaauaucaucuccauuugggucucucacagcauccagcugggcaaccagucccagauugagacguguaaucaaucuguuaucaccuacgaaaacaauacaugggugaaccagaccuaugugaauauuagcaacacaaauuucgcugccgggcaguccgucgugucuguuaaacuugcgggaaacagcucccugugcccugugagcggcugggcuaucuacucuaaggacaauuccgucagaauugggagcaaaggagauguguuuguuauccgggagccguucaucucuuguagcccccucgaaugccgcaccuuuuuccugacacagggcgcccuucugaacgacaagcauuccaauggcaccauuaaagauagaucuccuuaucggacgcucauguccugucccaucggggaggugccuagccccuacaacucccgcuuugaaucugucgccuggagcgcuuccgccugccacgacggaauuagcuggcugaccaucggcauuucugggccugauuccggagcuguggccgugcugaaguauaacggcaucaucacagacaccauuaagagcuggagaaauaacauccuccggacacaagagucugagugugcgugcgucaaugggagcuguuucaccauuaugacggauggaccguccgacggccaggccucuuacaaaaucuuucgcauugaaaagggcaaaaucguuaagagcguggagaugaacgcucccaauuaucauuacgaagagugcuccuguuacccugauagcucugagaucacaugcgugugcagagacaacuggcacggguccaaucggcccugggucagcuucaaccagaaucuggaauaucagauuggauacaucuguucuggcguguuuggggauaacccucgccccaaugacaaaaccggauccugcggcccgguuagcuccaacggggccaauggagugaagggcuucucuuuuaaguauggcaacggggucuggauuggaagaacaaaaagcaucuccucucggaagggcuucgagaugauuugggauccuaauggguggaccggaaccgacaacaacuuuagcaucaaacaagacauugugggcaucaaggaaugguccggguacagcggcucuuucguucagcaucccgagcuuacaggacuggauuguauccgcccuugcuucuggguggaacucauuagaggccggcccgaggagaauacgaucuggaccuccgggagcucuauuuccuuuuguggagucaacagcgacacagugggcuggucuuggcccgauggggcugaacugccuuucaccaucgacaaauga

SEQ ID NO: 217873 - RNA, 1410 nt, Artificial Sequence
  derived and/or modified CDS sequence (opt5) from neuraminidase__InfluenzaA__AIM56813
augaaccccaaucagaagaucauuaccaucggcagcgugugcaugacaauugggauggccaaccugauccuccaaauuggaaauaucaucuccauuugggucucucacagcauccagauuggcaaccagucccagaucgagacguguaaucaaucuguuauuaccuacgaaaacaauacaugggugaaccagaccuaugugaauaucagcaacacaaauuucgcugccgggcaguccgucgugucuguuaaacuggcgggaaacagcucccuuugcccugugagcggcugggcuauuuacucuaaggacaauuccgucagaaucgggagcaaaggagauguguuuguuauccgggagccguucauuucuuguagcccccuggaaugccgcaccuuuuuccucacacagggcgcccugcuuaacgacaagcauuccaauggcaccaucaaagauagaucuccuuaucggacgcugauguccugucccauuggggaggugccuagccccuacaacuccaaguuugaaucugucgccuggagcgcuuccgccugccacgacggaaucaacuggcucaccauuggcaucagcgggccugauaauggagcuguggccgugcugaaguauaacggcaucauuacagacaccaucaaaucuuggcgcaauaacauucugagaacacaagaguccgagugugcgugcgucaaugggagcuguuucaccaucaugacggauggaccgucugacggccaggccagcuacaagauuuuucggaucgaaaaaggcaagaucguuaaauccguggagaugaacgcucccaauuaucauuacgaagagugcucuuguuacccugauagcuccgagauuacaugcgugugccgcgacaacuggcacgggagcaauagacccugggucucuuucaaccagaaucucgaauaucagaucggauacauuuguuccggcguguuuggggauaacccucggcccaaugacaagaccggaagcugcggcccgguuucuuccaacggggccaauggagugaagggcuucagcuuuaaauauggcaacggggucuggaucggacgcacaaaguccauuucuagcagaaaaggcuucgagaugaucugggauccuaacggguggaccggaaccgacaauaaguuuuccauuaaacaagacaucgugggcaucaacgaauggucuggguacagcggcuccuucguucagcaucccgagcugacaggacuugauuguauucggccuugcuucuggguggaacugauccgcggcagacccgaggagaauacgauuuggaccagcgggucuuccaucagcuuuuguggagucaacucugacacagugggcugguccuggcccgauggggcugaacucccuuucaccauugacaaguga

SEQ ID NO: 217874 - RNA, 1410 nt, Artificial Sequence
  derived and/or modified CDS sequence (opt5) from neuraminidase__InfluenzaA__AIM56824
augaaccccaaucagaagaucauuaccaucggcagcgugugcaugacaauugggauggccaaccugauccuccaaauuggaaauaucaucuccauuugggucucucacagcauccagauuggcaaccagucccagaucgagacguguaaucaaucuguuauuaccuacgaaaacaauacaugggugaaccagaccuaugugaauaucagcaacacaaauuucgcugccgggcaguccgucgugucuguuaaacuggcgggaaacagcucccuuugcccugugagcggcugggcuauuuacucuaaggacaauuccgucagaaucgggagcaaaggagauguguuuguuauccgggagccguucauuucuuguagcccccuggaaugccgcaccuuuuuccucacacagggcgcccugcuuaacgacaagcauuccaauggcaccaucaaagauagaucuccuuaucggacgcugauguccugucccauuggggaggugccuagccccuacaacucccgcuuugaaucugucgccuggagcgcuuccgccugccacgacggaaucaacuggcucaccauuggcaucagcgggccugauucuggagcuguggccgugcugaaguauaauggcaucauuacagacaccaucaaguccuggagaaacaauauucugcggacacaagagagcgagugugcgugcgucaacgggucuuguuucaccaucaugacggauggaccgagcgacggccaggccuccuacaaaauuuuucgcaucgaaaagggcaaaaucguuaagucuguggagaugaaugcucccaacuaucauuacgaagagugcagcuguuacccugauuccagcgagauuacaugcgugugcagagacaauuggcacgggucuaaccggcccugggucuccuucaaucagaaccucgaauaucagaucggauacauuuguagcggcguguuuggggauaauccucgccccaacgacaaaaccggaucuugcggcccgguuccuuccaauggggccaacggagugaagggcuucagcuuuaaguauuccaauggcgucuggaucgggagaacaaaaucuauuagcucccggaagggauucgagaugaucugggaucccaacggcuggaccgggaccgacaacaaauuuucuauuaagcaagacaucgugggaaucaaugaauggagcggcuacuccgggagcuucguucagcauccugagcugacaggccuugauuguauucgccccugcuucuggguggaacugaucagaggacggcccgaggagaacacgauuuggaccucuggcuccagcaucucuuuuuguggggucaauuccgacacagugggauggagcuggccugauggcgcugaacucccguucaccauugacaaauga

SEQ ID NO: 217875 - RNA, 1398 nt, Artificial Sequence
  derived and/or modified CDS sequence (opt5) from neuraminidase__InfluenzaA__AIN76385
augaaccccaaucagaagauccugugcaccagcgccacagcuauuaucauuggcgccaucgcggugcucauugggaucgcuaaccugggacuuaauaucggccugcaccucaaaccuggguguaacugcucccauucucaaccgggaacgaccaauacaagccagaccauuaucaacaauuacuauaacgagacaaauauuaccaacauccagauggaagagagaacaucccggaauuucaacucucugaccaagggccuuuguacgauuaauagcuggcacaucuacgggaaagacaacgccguccgcauuggagaauccucugauguucuggugaccagagagcccuaugugagcugcgacccugaugaaugucgguuuuacgcccucucccagggcacaaccauccgcggcaagcauagcaaugggacaauccacgacagaucucaauaucgggcucugauuuccuggccccugagcucuccucccaccgucuacaacucccgcguggagugcaucggauggagcucuacguccugucaugauggcaaaagcagaauguccauuugcaucucugggccuaacaauaacgccagcgcuguugugugguauaaucggcgcccggucgccgagauuaacacaugggcgagaaauauccuccggacccaggaauccgagugugugugccacaacggaaucugucccauuguuuucacagacggcagcgccaccgggccugcugauacccgcaucuacuacuuuaaggaaggaaagauucugaaaugggagucucuuacaggcacggccaagcacaucgaggaaugcuccugcuauggcgagagaaccgggauuacauguaccugcaaagacaauuggcagggaagcaaccggcccgugauccagaucgauccugucgcuaugacacauaccucucaauacauuuguagccccgugcugacggacacaccgcgcccuaaugaucccaacaucggcaagugcaaugacccuuaucccgggaacaauaacaauggagugaaaggcuucuccuaccucgauggggccaacaccuggcugggaagaaccauuucuacagcgagccgguccggcuaugaaaugcuuaagguccccaacgcccugaccgacgacagaagcaagccuauccagggccagacaauuguucucaaugcugauuggucuggguacuccggcagcuuuauggacuauugggccgagggagauuguuaccgcgcuugcuucuacguggaacugauccgggggagaccgaaagaggacaaggugugguggacgucuaacuccauugucagcauguguuccucuaccgaguuucugggacaguggaauuggcccgauggcgcccgcaucgaauauuuccucuga

SEQ ID NO: 217876 - RNA, 1410 nt, Artificial Sequence; identical to SEQ ID NO: 206159
  derived and/or modified CDS sequence (opt5) from neuraminidase__InfluenzaA__AIP93105

SEQ ID NO: 217877 - RNA, 1410 nt, Artificial Sequence
  derived and/or modified CDS sequence (opt5) from neuraminidase__InfluenzaA__AIP93117
augaaccccaaucagaagaucauuaccaucggcagcgugucccugacaauugccacggucugcuuccucaugcaaaucgcuauucuggccaccacaguuacccuucacuuuaaacagcaugagugugacucuccugcgagcaaccaggugaugccgugcgaacccaucaucauugagagaaauaucacagaaauuguguaccugaacaauaccacaaucgagaaggaaauuuguccugaggucguggaguaucggaacugguccaaaccccagugccaaaucaccggguucgcuccuuuuucuaaggauaauagcauucgccucuccgccggaggcgacaucuggguuacgagagaacccuacgugucuugugauccugggaaaugcuaucaguucgcccugggacagggcaccacacuugacaacaagcacagcaaugggaccauccaugaucggauuccgcaccgcacacugcucaugaacgagcugggaguccccuuucaucugggcaccaaacagguguguguugcuugguccucuagcuccugccacgacggcaaggccuggcuccacgugugugucacgggggaugacagaaaugcuacagccagcuucaucuacgauggacggcugguggacucuauuggcuccuggagccaaaacauccuucgcacccaggaaucugagugcguguguauuaaugggacaugcaccgucguuaugaccgauggauccgcgagcggcagagccgacacacggauccuguuuaucaaggaggggaaaauugugcauaucuccccucucucuggaagcgcucagcacauugaagagugcuccuguuauccccgcuacccugaugugagaugcaucugucgggacaacuggaagggcagcaaucgccccgucauugacaucaacauggaagauuauucuaucgacuccagcuacgugugcucuggccugguuggggauacgccgagaaacgacgauagcuccucuaauagcaacugucgggacccuaauaacgagcgcggaaaucccggcgugaaagggugggccuucgauaacggagacgaugucuggaugggcagaaccauuuccaaggaccuucggagcggguacgaaacauuuaaggugaucggaggcuggucuaccccuaauuccaaaagccagguuaacagacaagugauugucgauaauaacaauuggucuggcuauuccgggaucuucagcguggagggaaaguccugcauuaaccgcuguuuuuacgucgagcugauccggggcagaccccaggaaacacgcgugugguggaccucuaauagcauuguuguguucugcgggacguccggaacauauggcaccgggucuuggcccgacggcgcuaacaucaauuuuaugccuaucuga

SEQ ID NO: 217878 - RNA, 1410 nt, Artificial Sequence
  derived and/or modified CDS sequence (opt5) from neuraminidase__InfluenzaA__AIR93973
augaaccccaaucagaagaucauuaccaucggcagcgugugcaugacaauugggauggccaaccugauccuccaaauuggaaauaucaucuccauuuggaucucucacagcauucagcugggcuccagaaaccagaucgaggcuuguaaucagucugucauuacguacgaaaacaauaccuggguuaaccaaacauaugugaauaucagcaacaccaauuucgccgcggggcaguccguggucccugugaaacuugcuggaaacucuagccugugcccgguuuccggcugggccauuuacagcaaggacaauucuauccggaucggguccaaaggagauguguuugucauucgcgagcccuucaucagcuguucuccucucgaaugcagaacauuuuuccugacccagggcgcccuucugaacgacaagcauuccaauggcacaauuaaagaucggagccccuaucgcacccucaugucuuguccuaucggggaggugcccuccccuuacaacagcagauuugaauccguugcuuggucugccagcgcuugccacgacggaauuaacuggcugacgaucggcaucuccgggccggauaauggagccguggcgguccugaaguauaacggcauuaucaccgacacaauuaagagcuggcggaauaacauccuccgcacccaggagucugagugugugugcgugaauggguccuguuucacagucaugaccgauggacccagcaacggccaagccucuuacaaaauuuuuagaaucgaaaagggcaaaaucguuaagagcguggagaugaaugcuccuaacuaucauuacgaagagugcuccuguuaccccgacucuagcgagauuacgugcgugugccgggauaauuggcacggguccaaccgcccuugggucagcuucaaucagaaccuggaauaucagaucggauacauuuguucuggcaucuuuggggacaaucccagaccgaacgauaaaacaggauccugcggcccugugagcucuaauggggccaacggaguuaagggcuucuccuuuaaguauggcaacgggguguggauuggacggaccaaaagcaucuccucucgcaauggcuucgagaugauuugggaccccaacggguggacagaaaccgauaauaacuuuagcaucaagcaggacaucgucggaauuaaugagugguccggcuacucugggagcuucgugcaacauccugaacuuaccggccuggacuguaucagacccugcuucuggguugagcucauucggggacgccccaaagagaacacaaucuggacguccggcagcucuauuuccuuuuguggggugaauagcaacaccgucggauggucuuggccugauggcgcugaacugccguucacaaucgacaaguga

SEQ ID NO: 217879 - RNA, 1410 nt, Artificial Sequence
  derived and/or modified CDS sequence (opt5) from neuraminidase__InfluenzaA__AIR93984
augaaccccaaucagaagaucauuaccaucggcagcgugugcaugacaauugggauggccaaccugauccuccaaauuggaaauaucaucuccauuuggaucucucacagcauucagcugggcaaccagaaucagaucgagacguguaaccaauccgucauuaccuacgaaaauaacacauggguuaaucagaccuaugugaacaucucuaauacaaacuucgcugccgggcagagcguggucuccgugaaacuugcgggaaauucuagccugugcccuguuuccggcugggcuauuuacagcaaggacaacucuaucagaaucggguccaaaggagauguguuugucauucgggagccguucaucagcuguucuccccucgaaugccgcaccuuuuuccugacacagggcgcccuucugaaugacaagcauuccaacggcaccauuaaagauagaagcccuuaucggacgcucaugucuugucccaucggggaggugccuucccccuacaacagccgcuuugaauccguugccuggucugcuagcgccugccacgacggaauuaauuggcugaccaucggcaucuccgggccugauaacggagcuguggccguccugaaguauaauggcauuaucacagacaccauuaagagcuggagaaacaauauccuccggacacaagagucugagugugcgugcgugaacggguccuguuucaccgugaugacggauggaccgagcaauggccaggccucuuacaaaauuuuucgcaucgaaaagggcaaaaucgucaagagcguugagauuaacgcucccaauuaucauuacgaagagugcuccuguuacccugacucuagcgagaucacaugcgugugcagagauaacuggcacggguccaaucggcccugggugagcuucaaccagaaucuggaauaucagauuggauacaucuguucuggcauuuuuggggacaacccucgccccaaugauaaaaccggauccugcggcccggucagcucuaacggggccaacggagugaagggcuucuccuuuaaguauggcaaugggguuuggaucggaagaacaaaaagcauuuccucucggaacggcuucgagaugaucugggacccuaauggguggaccggaaccgauaacaauuuuagcaucaagcaagacauugugggcaucaacgaaugguccggguacucuggcagcuucguccagcaucccgagcuuacaggacugggcuguauucgcccuugcuucuggguggaacucaucagagggcggcccaaagagaauacgauuuggaccuccggaagcucuaucuccuuuuguggcguuaacagcgacacagugggguggucuuggcccgauggagcugagcugccuuucaccaucgacaaguga

SEQ ID NO: 217880 - RNA, 1410 nt, Artificial Sequence
  derived and/or modified CDS sequence (opt5) from neuraminidase__InfluenzaA__AIR93995
augaaccccaaucagaagaucauuaucauuggcagcgugugcaugaccaucgggauggccaaccugauucuccaaaucggaaauaucauuuccaucuggauuucucacagcauccagcugggcaaccagaaucagauugagacauguaaccaauccgucaucacguacgaaaauaacaccuggguuaaucagacauaugugaacauuucuaauaccaacuucgcugccgggcagagcguggucccugugaaacuugcgggaaauuccucucugugcccgguuagcggcugggcuaucuacuccaaggacaacagcaucagaauugggucuaaaggagauguguuugucauccgggagcccuucauuuccuguagcccucucgaaugccgcacauuuuuccugacccagggcgcccuucugaaugacaagcauucuaacggcacaaucaaagauagaucccccuaucggacccucaugagcuguccuauuggggaggugcccucuccuuacaacucccgcuuugaaagcguugccugguccgcuucugccugccacgacggaaucaauuggcugacgaucggcauuagcgggccggauaacggagcuguggccguccugaaguauaauggcaucauuaccgacacaaucaaguccuggaaaaacaauauucucagaacccaagagagcgagugugugugcgugaacgggucuuguuucacagucaugaccgauggacccuccaauggccaggcgagcuacaagaucuuucggaucgaaaaaggcaagauuguuaaaucuguggagaugaacgccccuaauuaucauuacgaagagugcagcuguuaccccgacuccucugagaucacgugcgugugccgcgauaacuggcacgggagcaauagaccuugggucuccuucaaccagaaucuggaauaucagauuggauacaucuguagcggcguguuuggggacaacccccggccgaaugauaagacaggaucuugcggcccuguuuccagcaacggggcuaacggagugaagggcuucucuuuuaaauauggcaauggggucuggauuggacgcaccaaguccaucagcuccagaaacggcuucgagaugauuugggaccccaauggguggacaggaaccgauaacaauuuuucuaucaaacaagacaucauuggcaucaacgaauggagcggguacuccggcucuuucgugcagcauccugagcuuaccggaauggacuguauucggcccugcuucuggguugaacugauccgcggcagacccaaggagaauacaauuuggacgagcggguccagcaucucuuuuuguggagugaacuccgauaccgucggcuggagcuggccugacggggccgagcucccguucacaaucgauaaauga

SEQ ID NO: 217881 - RNA, 1401 nt, Artificial Sequence
  derived and/or modified CDS sequence (opt5) from neuraminidase__InfluenzaA__AIR94118
augaaccccaaucagaagaucauugccaucggcagcgugucccugauuaucgcuauuaucugccuccugaugcaaaucgccauucuuaccacaacgaugacccugcacuucagacagaacgaguguaauaacucuagcaauaaccaggucaugccuugcgaaccgaucauuaucgagcggaauacaguucaucucaacuccaccacaauugaacgcgagaucugucccaaaguggcggaauacaagaauuggucuaaaccucagugccaaauuaccggguuugcucccuucagcaaggacaacuccaucagacugucugccggaggcgauaucugggugacacgggagccuuaugucagcuguucccuugacaaaugcuaccaguuugcccuggggcagggaaccacgcucaagaauaagcacagcaacggcaccacacaugaucgcacaccccacagaacccugcugaugaaugagcucggggugccuuuccaucugggaaccaaacagguuuguauugcuuggucuuccagcucuugcuaugacggcaaggccuggcuucacaucugugugacgggcgaugacaaaaacgcuacagccuccauuaucuacaaugggaugcuggucgauagcauuggaucuugguccaagaacauccuccggacccaagaaagcgagugcguguguaucaacggcacaugcgcgguugugaugaccgacggguccgccucuggaaaagcugauacccgcguccuguuuauuaaggaaggcaagaucauuaauaucagcccgcuuuccgggagcgcccagcacguggaggagugcucuuguuaucccagauacccugaagugcggugcgucugucgcgacaacuggaaaggauccaauagacccauucuguauaucaacauggcugauuacagcaucgagucuagcuacguuugcuccggccucgugggcgacacaccucggaaugaugacucuagcuccagcucuaacuguaaggaccccaauuccgaacgcggggccccgggagugaaaggcugggcguucgaugacgggaacgaugucuggaugggaagaacgauuaagaauggcagccggucuggguaugagaccuuucgcgugguuaacggauggacaguggccaauuccaaaagccaggucaacagacaggugaucguugacuccgaugacuggucuggcuacagcggcauuuucuccguggaagggaagaaaugcaucaaucgguguuuuuaugucgagcugauuagaggacgcccucaagagccccgggugugguggaccucuaacagcaucauugucuucugcggcacauccgggaccuacggaacgggcagcuggccugauggggcuaauaucaacuuuaugcccaucuga

SEQ ID NO: 217882 - RNA, 1410 nt, Artificial Sequence
  derived and/or modified CDS sequence (opt5) from neuraminidase__InfluenzaA__AIT38335
augaaccccaaucagaagaucauuaccaucggcagcgugucccugacaauugccacgaucugcuuccucaugcaaauugcuauccuggucaccacaguuacccuucacuuuaaacaguacgaguguaacucuccuccgacaaaucaggugaugcugugcgaacccaccaucauugagagaaacaucacagaaauuguguaucucaccaauacgaccaucgagaaggaaauuuguccuaaacuggucgaguaccggaacuggagcaagccccagugcaaaaucacaggguucgccccuuuuuccaaggacaauucuauucgccuuagcgcgggaggcgauaucugggugaccagagagcccuauguuuccugugacccugauaagugcuaccaauucgcucuggggcagggaacaacccucaacaaucggcauucuaacgacacggugcacgaucgcacaccguauagaacccugcugaugaaugaacucggcauccccuuucaucuggggacaaaacaggucuguauugccuggagcuccagcucuugccacgacggaaaggccuggcuucauguguguguuaccggccacgaugagaacgcuaccgccuccuucaucuacgacggccggcugguggauagcauugucucuugguccaaacgcauccucagaacacaggaaagcgagugcguguguauugacgggacgugcaccguggucaugacagauggaucugcuuccggccgggccgacacccgcauccuguuuaucaaggaggggaaaauuauccacauuagccaacuuuccggaucugcgcagcauguugaagagugcagcuguuauccuagauaccccggcgugcggugcgugugucgcgauaauuggaagggguccaacagaccuaucgucgacauuaaugugaaggacuacagcaucaacucuuccuauguuugcagcggacuggugggcgauacaccccggaaaaacgacucuuucagcuccucuuacugucucaauccgaacaaugaagagggcgggcacggagucaagggcugggccuuugaugacggggaugacguguggaugggacgcaccaucaacgaaaaacugagaagcggcuaugagacguucaagguuauuaaagggugguccaagccuaauagcaaacugcagaucaacagacaggugauugucgaucggggaaaucgcucuggcuacuccggcaucuuuagcguggaggggaagggaugcauuaaccgguguuucuaugucgaacucaucagaggccgcaagcaagagacagaagugugguggaccucuaauuccauuguuguguuuugcgggaccagcggaacauacggcaccggguccuggcccgacggcgcuaacaucaaucugaugccuaucuga

SEQ ID NO: 217883 - RNA, 1410 nt, Artificial Sequence
  derived and/or modified CDS sequence (opt5) from neuraminidase__InfluenzaA__AIT38346
augaaccccaaucagaagaucauuaccaucggcagcauuucccugacaaucgccacgauuugcuuccuccugcaaguggcuauccuugucaccacaguuacccugcacuuuaaacaguucgaguguaacccuacaccgaauaaccaggugaugcucugcgaacccaccgugaucgagagaaauauuacaaagaucgucuaccugaccaacacgaccguggaaaaagagauuuguccuaagcccgccgaauaucggaauuggucuaaaccucagugcaagaucacaggguuugcgcccuucagcaaggacaacuccauucgccuuucugcuggaggcgauaucuggguuaccagagagccuuacgugagcugugccccgaauaaaugcuaucaauuugcccuggggcagggaacaacccucaacaaucggcauuccaacgacacgguccacgaucgcacacccuacagaacccugcugaugaaugagcucggcauuccuuuccaucuggggacaaaacagguguguaucgcuuggucuagcuccagcugccacgacggaaaagccuggcuucauguuugugugaccggccacgauaagaacgcuaccgccucuuuuaucuaugacggccggcuggucgauuccauugggagcuggucuaaaaauauccuccgcacacaggaauccgagugcguguguauuaacggaacgugcaccguggucaugacagacggcagcgcgucugggagagccgauaccaagauccuguucauuaaggaaggaaaaaucauccacauuucccaacuuagcggcuccgcucagcauguugaggagugcucuuguuacccccgguauccuggggugcgcugcguguguagagacaacuggaagggaagcaaucggcccaucgucgauauuaacgugcgcgacuacuccaucguuagcucuuacgugugcuccggccuggucggcgauacaccgagaaagaaugacagcuuuucuagcucccacugucucaacccuaauaacgaagaagggggacauggcgugaaggggugggccuucgacgauggagacgauguuuggaugggccggaccauuucugagaaacugcgcagcggguaugagacguuuaaggugaucaaaggaugguccaagcccaauagcaagcugcagaucaacagacaggucauuguggaccggggcaauagaucuggcuacuccgggaucuucagcgucgaaggaaaaucuugcauuaaccgcuguuuuuauguggagcucauccggggcagaaagcaagagacagaaguuugguggaccuccaauagcauuguggucuucugcgggaccuccggaacauacggcaccgggucuuggccugauggcgcugacaucaaccugaugcccauuuga

SEQ ID NO: 217884 - RNA, 1410 nt, Artificial Sequence
  derived and/or modified CDS sequence (opt5) from neuraminidase__InfluenzaA__AIT38361
augaaccccaaucagaagaucauuaccaucggcagcauuucccugacaaucgccacgauuugcuuccucaugcaaguggcuauccuggucaccacaguuacccuucacuuuaaacaguacgaguguaacucuacaccuaauaaccaggugaugcugugcgaaccgaccgugaucgagagaaauauuacaaagaucgucuaucucaccaacacgaccgugguuaaagaagugugucccaagccugccgaguaccggaauuggagcaaaccccagugcaagauuacaggguucgcgccuuuuuccaaggacaacucuauccgccugagcgcuggaggcgauauuugggucaccagagaacccuauguguccugugccccuaauaaaugcuaccaauucgcccuugggcagggaacaacccugaacaaucggcauucuaacgacacgguucacgaucgcacaccguauagaacccuccugaugaaugagcugggcauccccuuucaucucgggacaaaacagguguguauugcuuggagcuccagcucuugcuacgacggaaaggccuggcugcacgucugugugaccggccaugauaagaacgcuaccgccuccuucaucuaugacggccggcuuguggauagcaucgggucuugguccaaaaauauucugcgcacacaggagagcgaaugcgucuguaucaacggaacgugcaccguugugaugacagacggcucugcguccgggagagccgauaccaagauucucuuuaucaaggagggaaaaauuauccacaucagccaacuguccggcucugcucagcacguggaagagugcagcuguuacccucgguaccccgggguccgcugcguguguagagacaacuggaagggauccaaucggccuauuguugauaucaacaugcgcgacuauagcauugugucuuccuacgucugcagcggccuugugggcgauacacccagagagaaugacucuuucagcuccucucauugucugaacccgaauaacgaagaagggggacacggcguuaaagggugggccuuugacgauggagacgauguguggaugggccggaccaucagcgagaagcuccgcuccggguaugagacguucaaagucauuaagggauggagcaaaccuaauucuaagcugcagaucaacagacaggugaucgucgaccggggcaauagauccggcuacagcgggaucuuuucuguggaaggaaaguccugcauuaaccgcuguuucuauguugagcugauucggggcagaaaacaagagacagaagugugguggaccagcaauuccaucgucguguuuugcgggaccucuggaacauacggcaccgggagcuggcccgauggcgcugacauuaaccucaugccuaucuga

SEQ ID NO: 217885 - RNA, 1410 nt, Artificial Sequence
  derived and/or modified CDS sequence (opt5) from neuraminidase__InfluenzaA__AIT38375
augaaccccaaucagaagaucauuaccaucggcagcgugugcaugacaauugggauggucaaccugauccuccaaauuggaaauaucaucuccauuuggaucucucacagcauucagcugggcaaccagaaucagaucgagauuuguaaccaauccguuaucacguacgaaaauaacaccugggugaaucagacauaugugaacauuucuaauaccaacuucgccgcugggcagagcgucgugccuguuaaacuugccggaaauuccucucugugcagcguguccggcugggcgaucuacagcaaggacaacucuaucagaauuggguccaaaggagaugucuuugugauccgggagccguucauuagcuguucuccccucgaaugccgcacauuuuuccugacccagggcgcccuucugaaugacaagcauuccaacggcacaaucaaagauagaagcccuuaucggacccucaugucuugucccauuggggagguuccuucccccuacaacagccgcuuugaauccguggcuuggucugccagcgcuugccacgacggaaucaauuggcugacgaucggcauuuccgggccugauaacggagccgucgcugugcugaaguauaauggcaucauuaccgacacaaucaagagcuggagaaacaauauucuccggacccaagagucugagugugccugcgugaacggguccuguuucacagucaugaccgauggaccgagcgacggccaggcgucuuacaaaaucuuucgcaucgaaaagggcaaaauuguuaagagcguggagaugaaugcccccaacuaucauuacgaagagugcuccuguuacccugauucuagcgagaucacgugcgugugcagagacaauuggcacggguccaaccggcccugggucagcuucaaucagaaccuggaauaucagauuggauacaucuguucuggcauuuuuggggauaauccucgccccaacgacaaaacaggauccugcggcccggugagcucuaauggggcuaacggaguuaagggcuucuccuuuaaguauggcaacgggguguggaucggaagaaccaaaagcauuuccucucggaauggcuucgagaugaucugggauccuaacggguggacaggaaccgacaauaacuuuagcaucaagcaagacauugucggcaucaaugaaugguccggguacucuggcagcuucgugcagcaucccgagcuuaccggacuggauuguauucgcccuugcuucuggguugaacucaucagaggccggcccaaagagaacacaauuuggacguccgggagcucuaucuccuuuuguggagugaauagcgacaccgucggcuggucuuggcccgauggggccgagcugccuuucacaaucgacaaguga

SEQ ID NO: 217886 - RNA, 1410 nt, Artificial Sequence
  derived and/or modified CDS sequence (opt5) from neuraminidase__InfluenzaA__AIT93148
augaaccccaaucagaagaucauuaccaucggcagcgugugcaugacaauugggauggccaaccugauccuccaaauuggaaauaucaucuccauuugggucucucacagcauccagcugggcaaccagucccagauugagacguguaaucaaucuguuaucaccuacgaaaacaauacaugggugaaccagaccuaugugaauauuagcaacacaaauuucgcugccgggcaguccgucgugucuguuaaacuugcgggaaacagcucccugugcccugugagcggcugggcuaucuacucuaaggacaauuccgucagaauugggagcaaaggagauguguuuguuauccgggagccguucaucucuuguagcccccucgaaugccgcaccuuuuuccugacacagggcgcccuucugaacgacaagcauuccaauggcaccauuaaagauagaucuccuuaucggacgcucauguccugucccaucggggaggugccuagccccuacaacucccgcuuugaaucugucgccuggagcgcuuccgccugccacgacggaauuaacuggcugaccaucggcauuagcgggccugauucuggagcuguggccgugcugaaguauaauggcaucaucacagacaccauuaaguccuggagaaacaauauccuccggacacaagagagcgagugugcgugcgucaacgggucuuguuucaccauuaugacggauggaccgagcgacggccaggccuccuacaaaaucuuucgcauugaaaagggcaaaaucguuaagucuguggagaugaaugcucccaacuaucauuacgaagagugcagcuguuacccugauuccagcgagaucacaugcgugugcagagacaauuggcacgggucuaaccggcccugggucuccuucaaucagaaccuggaauaucagauuggauacaucuguagcggcguguuuggggauaauccucgccccaacgacaaaaccggaucuugcggcccgguuuccagcaauggggccaacggagugaagggcuucuccuuuaaguauggcaauggggucuggauuggaagaacaaaaucuaucagcucccggaagggcuucgagaugauuugggauccuaacggguggaccggaaccgacaacaaauuuucuaucaagcaagacauugugggcaucaaugaauggagcggguacuccggcagcuucguucagcaucccgagcuuacaggacuggauuguauccgcccuugcuucuggguggaacucauuagaggccggcccgaggagaacacgaucuggaccucuggguccagcauuucuuuuuguggagucaauuccgacacagugggcuggagcuggcccgauggggcugaacugccuuucaccaucgacaaauga

SEQ ID NO: 217887 - RNA, 1410 nt, Artificial Sequence; identical to SEQ ID NO: 210712
  derived and/or modified CDS sequence (opt5) from neuraminidase__InfluenzaA__AIU39701

SEQ ID NO: 217888 - RNA, 1410 nt, Artificial Sequence; identical to SEQ ID NO: 208810
  derived and/or modified CDS sequence (opt5) from neuraminidase__InfluenzaA__AIU39703

SEQ ID NO: 217889 - RNA, 1410 nt, Artificial Sequence
  derived and/or modified CDS sequence (opt5) from neuraminidase__InfluenzaA__AIU39705
augaaccccaaucagaagaucauuaccaucggcagcgugugcaugacaauugggauggccaaccugauccuccaaauuggaaauaucaucuccauuuggaucucucacagcauucagcugggcaaccagucccagaucgagacguguaaucaaucugucauuaccuacgaaaacaauacauggguuaaccagaccuaugugaauaucagcaacacaaauuucgcugccgggcaguccguggucucugugaaacuugcgggaaacagcucccugugcccuguuagcggcugggcuauuuacucuaaggacaauuccaucagaaucgggagcaaaggagauguguuugucauucgggagccguucaucucuuguagcccccucgaaugccgcaccuuuuuccugacacagggcgcccuucugaacgacaagcauuccaauggcaccauuaaagauagaucuccuuaucggacgcucauguccugucccaucggggaggugccuagccccuacaacucccgcuuugaaucuguugccuggagcgcuuccgccugccacgacggaauuaacuggcugaccaucggcaucagcgggccugauaauggagcuguggccguccugaaguauaacggcauuaucacagacaccauuaagucuuggagaaauaacauccuccggacacaagaguccgagugugcgugcgugaaugggagcuguuucaccgugaugacggauggaccgucugacggccaggccagcuacaaaauuuuucgcaucgaaaagggcaaaaucgucaaguccguugagaugaacgcucccaauuaucauuacgaagagugcucuuguuacccugauagcuccgagauuacaugcgugugcagagacaacuggcacgggagcaaucggcccugggugucuuucaaccagaaucuggaauaucagaucggauacauuuguuccggcaucuuuggggauaacccucgccccaaugacaacaccggaagcugcggcccggucucuuccaauggggccaacggagugaaaggcuucagcuuuaaguauggcaacgggguuuggauuggaagaacaaaguccaucucuagccggaauggcuucgagaugauuugggauccuaacggguggaccggaaccgacaauaacuuuuccaucaaacaagacaucgugggcauuaaugaauggucuggguacagcggcuccuucguccagcaucccgagcuuacaggacuggauuguauccgcccuugcuucuggguggaacucauuagaggccggcccaaggagaacacgaucuggaccagcgggucuuccauuagcuuuuguggaguuaauucugacacagugggcugguccuggcccgauggggcugagcugccuuucaccaucgacaaauga

SEQ ID NO: 217890 - RNA, 1413 nt, Artificial Sequence
  derived and/or modified CDS sequence (opt5) from neuraminidase__InfluenzaA__AIU46611
augaaccccaaucagaagauuaccugcaucagcgccacaggcaugacgcuguccguggucucuaugcucaucgggauugcuaaccugggacuuaauaucggccugcacuacaaaguuggggacagcaccaacauuaauaucccuaacaugaaugagacauccccgaccacaaccaucauuaacaaucauccccaaaacaauuucacaaacaucaccaauauuaucgugacgagaaacgaagagggacaccuccugaaucuuaccaagccucugugugaagugaacucuuggcauauucucagcaaagauaacgccauccggauuggcgaggacgcgcacaucaucgucacacgcgaacccuaucuguccugcgauccucagggguguagaauguuugcucugucucagggaaccacacuccggggcaagcaugccaauggcaccauucacgaccgcagccccuucagagcccugguguccugggagauggggcaggcuccuagcccguacaacacgcggguugagugcaucggauggucuuccacaagcugucacgauggcauuucucgcauguccaucugcauuagcgggcccaauaacaaugccucugcuguggucugguauggaggcagaccugugaccgaaauccccuccugggccgggaacauccuucggacacaagagagcgaauguguuugccauggaggcauuuguccuguggucaugaccgacggccccgcgaauaaccgcgccgagaccaaaaucauuuacuuuaaggaggggaagaucaaaaagauugaggaacugaaaggagaugcucagcacaucgaagagugcuccuguuauggcgccucugaaaugaucaagugcauuugcagagacaauuggaaaggggcuaaccggccggugaucacaauugauccugagaugaugacgcauaccagcaaguaccucuguuccaagauccugacagacaccagccgccccaaugauccuacaaacggaaauugcgaggcccccauuaccggcgggucucccgacccuggagugaaaggcuucgcguuucuugauggcgaaaacuccuggcuggggagaacgaucagcaaggacucucggagcggauaugagaugcucaaagucccgaaugccgaaacagacacccaguccggcgcuauuucucaccagaucaucguuaacaaccaaaauuggagcggguacuccggagccuucauugauuacugggcuaacaaggaguguuuuaaucccugcuucuauguggaacugauccgcggcagaccuaaagagagcucugugcuguggaccuccaacagcauugucgcccucugugggucuaaggagcggcugggcuccuggagcuggcacgacggagccgaaaucauuuacuuuaaauga

SEQ ID NO: 217891 - RNA, 1410 nt, Artificial Sequence
  derived and/or modified CDS sequence (opt5) from neuraminidase__InfluenzaA__AIV09221
augaaccccaaucagaagaucauuaccaucggcagcgugugcaugacaauugggauggccaaccugauccuccaaauuggaaauaucacguccaucuggauuucucacagcauccagauuggcaacagaaaucagaucgaggcuuguaaccaguccgucauuaccuacgaaaauaacacauggguuaaucaaaccuaugugaacaucucuaauacaaacuucgccguggggcagagcgucgugccuguuaaacuggcgggaaauuccucucuuugcccggugagcggcugggcuauuuacuccaaggacaacagcauccggaucgggucuaaaggagaugucuuugugauucgcgagcccuucaucuccuguagcccucuggaaugcagaaccuuuuuccucacacagggcgcccugcuuaaugacaagcauucuaacggcaccauuaaagaucggucccccuaucgcacgcugaugagcuguccuaucggggagguucccucuccuuacaacuccagauuugaaagcguggccugguccgcuucugccugccacgacggaauuaauuggcucaccaucggcaucagcgggccggauaacggagcugucgccgugcugaaguauaauggcauuaucacagacaccauuaaguccuggcggaacaauauccugcgcacacaggagagcgagugugugugcgucaacgggucuuguuucaccguuaugacggauggacccuccaauggccaagcgagcuacaaaauuuuuagaaucgaaaagggcaaaaucgugaagucuguggagaugaacgccccuaauuaucauuacgaagagugcagcuguuaccccgacuccucugagauuacaugcgucugccgggauaacuggcacgggagcaaucgcccuuggguguccuucaaccagaaucucgaauaucagaucggauacauuuguagcggcaucuuuggggacaaccccagaccgaaugauaaaaccggaucuugcggcccuguucccuccaacggggcuaacggagugaagggcuucagcuuuaaguauggcaauggggucuggauuggacggacaaaaucuaucuccagccgcaacggcuucgagaugauuugggacccuaauggguggaccgaaaccgauaacgacuuuuccaucaagcaggacaucgugggaauuaaugaguggucuggcuacagcggguccuucguucaacaucccgaacugacaggccuugauuguaucagacccugcuucuggguggagcugauucggggacgcccuaaagagaacacgaucuggaccucuggcagcuccauuagcuuuuguggggucaauucuaacacaguggacugguccuggccggauggagccgaacuccccuucaccaucgacaaguga

SEQ ID NO: 217892 - RNA, 1410 nt, Artificial Sequence
  derived and/or modified CDS sequence (opt5) from neuraminidase__InfluenzaA__AIW60703
augaaccccaaucagaagaucauuaccaucggcagcgugucccugacaauugccacgaucugcuuccucaugcaaauugucauccugguuaccacagugacccuucacuuuaaacaguacgaguguaacucuccuccgaauaaccaggugaugcugugcgaacccacaaucauugagagaaauaucaccgaaauugucuaucucacaaacaccacgaucgagaaggaaauuuguccuaaacuggcugaguaccggaauuggagcaagccccagugcaaaaucaccggguucgccccuuuuuccaaggacaacucuauucgccuuagcgcgggaggcgauaucugggugacaagagagcccuauguuuccugugacccugauaagugcuaccaauucgcucuggggcagggaaccacacucaauaaccggcauucuaaugacaccgugcacgaucgcacgccguauagaacacugcugaugaacgaacucggcguccccuuucaucuggggaccaaacagguguguaucgccuggagcuccagcucuugccacgacggaaaggccuggcuucauguuugugugacaggccacgaugagaaugcuaccgccuccuucauuuacgacggccggcuggucgauagcaucgggucuugguccaaaaagauucuccgcacccaggaaagcgagugcguguguaucaacggaacaugcacgguggucaugaccgacggcucugcuuccgggagagccgauacaaaaauucuguuuaucgaggaaggaaagaucguucacauuagcccucuuuccggcucugcgcaacauguggaggaaugcagcuguuauccccaguacuccggggugcggugcgucugucgcgacaauuggaagggaagcaacagaccuaucguggauauuaacguuaaagacuacucuaucguguccagcuaugucugcucuggccuggugggcgacacaccccggaagaaugauagcuccucuagcucccacugucucaacccgaauaacgaggaagggggacauggcguuaaagggugggccuucgacgauggaaaugacguguggaugggccgcaccauuagcgagaagcugagaucuggguacgagaccuuuaaagucaucggaggcugguccaagccuaacagcaaacugcagaucaaucgccaggugauugucgaucggggcaacagaucuggguauuccggaaucuucagcguggaaggcaagaauugcauuaaccgguguuuuuacguugagcucaucagagggcgcaagcaagaaacggaggugugguggacauccaauucuauugucguguucugcggaaccagcggcaccuaugggacaggcuccuggcccgacggagcugauaucaaccugaugccuauuuga

SEQ ID NO: 217893 - RNA, 1410 nt, Artificial Sequence
  derived and/or modified CDS sequence (opt5) from neuraminidase__InfluenzaA__AIW60704
augaaccccaaucagaagaucauuaccaucggcagcgugucccugacaauugccacgaucugcuuccucaugcaaauugucauccugguuaccacagugacccuucacuuuaaacaguacgaguguaacucuccuccgaauaaccaggugaugcugugcgaacccacaaucauugagagaaauaucaccgaaauugucuaucucacaaacaccacgaucgagaaggaaauuuguccuaaacuggcugaguaccggaauuggagcaagccccagugcaaaaucaccggguucgccccuuuuuccaaggacaacucuauucgccuuagcgcgggaggcgauaucugggugacaagagagcccuauguuuccugugacccugauaagugcuaccaauucgcucuggggcagggaaccacacucaauaaccggcauucuaaugacaucgugcacgaucgcaccccguauagaacgcugcugaugaacgaacucggcguccccuuucaucuggggacaaaacagguguguauugccuggagcuccagcucuugccacgacggaaaggccuggcuucauguuugugugaccggccacgaugagaaugcuacagccuccuucaucuacgacggccggcuggucgauagcauugggucuugguccaaaaagauccuccgcacccaggaaagcgagugcguguguauuaacggaaccugcacaguggucaugacggacggcucugcuuccgggagagccgauaccaaaauccuguuuaucgaggaaggaaagauuguucacaucagcccucuuuccggcucugcgcaacauguggaggaaugcagcuguuauccccaguacuccggggugcggugcgucugucgcgacaauuggaagggaagcaacagaccuauuguggauaucaacguuaaagacuacucuauuguguccagcuaugucugcucuggccuggugggcgacacaccccggaagaaugauagcuccucuagcucccacugucucaacccgaauaacgaggaagggggacauggcguuaaagggugggccuucgacgauggaaaugacguguggaugggccgcaccaucagcgagaagcugagaucuggguacgagacauuuaaagucaucggaggcugguccaagccuaacagcaaacugcagauuaaucgccaggugaucgucgaucggggcaacagaucuggguauuccggaauuuucagcguggaaggcaagaauugcaucaaccgguguuuuuacguugagcucauuagagggcgcaagcaagaaaccgaggugugguggacguccaauucuaucgucguguucugcggaacaagcggcaccuaugggaccggcuccuggcccgacggagcugauauuaaccugaugccuaucuga

SEQ ID NO: 217894 - RNA, 1410 nt, Artificial Sequence
  derived and/or modified CDS sequence (opt5) from neuraminidase__InfluenzaA__AIW60705
augaaccccaaucagaagaucauuaccaucggcagcgugucccugacaauugccacgaucugcuuccucaugcaaauugcuauccuggucaccacaguuacccuucacuuuaaacaguacgaguguaacucuccuccgaauaaccaggugaugcugugcgaacccacaaucauugagagaaauaucaccgaaauuguguaucucacaaacaccacgaucgagaaggaaauuuguccuaaacuggccgaguaccggaauuggagcaagccccagugcaaaaucaccggguucgcgccuuuuuccaaggacaacucuauucgccuuagcgcuggaggcgauaucugggucacaagagagcccuauguguccugugacccugauaagugcuaccaauucgcccuggggcagggaaccacacucaauaaccggcauucuaaugacaccguucacgaucgcacgccguauagaacacugcugaugaacgaacucggcgugcccuuucaucuggggaccaaacaggucuguaucgccuggagcuccagcucuugccacgacggaaaggcuuggcuucauguguguguuacaggccacgaugagaaugccaccgcuuccuucauuuacgacggccggcugguggauagcaucgggucuugguccaaaaagauucuccgcacccaggaaagcgagugcgucuguaucaacggaacaugcacgguggugaugaccgacggcucugccuccgggagagcggauacaaaaauucuguuuaucgaggaaggaaagaucguccacauuagcccucuuuccggcucugcccaacauguugaggaaugcagcuguuauccccgguacuccggggugcgcugcguguguagagacaauuggaagggaagcaaccggccuaucgucgauauuaacgugaaagacuacucuaucguuuccagcuaugugugcucuggccuggucggcgacacaccccgcaagaaugauagcuccucuagcucccacugucucaacccgaauaacgaggaagggggacauggcgugaaagggugggcuuucgacgauggaaaugacguuuggaugggcagaaccauuagcgagaaguuucggucuggguacgagaccuucaaagugaucggaggcugguccaagccuaacagcaaacugcagaucaaucgccaggucauuguggauagaggcaaccggucuggguauuccggaaucuuuagcgucgaaggcaaguccugcauuaauagauguuucuacguggagcugauccgcgggcggaagcaggaaacggagguuugguggacaucuaacagcauuguggucuuuugcggaaccuccggcaccuaugggacaggcucuuggcccgacggagccgauaucaaucucaugccuauuuga

SEQ ID NO: 217895 - RNA, 1410 nt, Artificial Sequence; identical to SEQ ID NO: 217894
  derived and/or modified CDS sequence (opt5) from neuraminidase__InfluenzaA__AIW60706

SEQ ID NO: 217896 - RNA, 1410 nt, Artificial Sequence
  derived and/or modified CDS sequence (opt5) from neuraminidase__InfluenzaA__AIW60708
augaaccccaaucagaagaucauuaccaucggcagcgugucccugacaauugccacgaucugcuuccucaugcaaauugcuauccuggucaccacaguuacccuucacuuuaaacaguacgaguguaacucuccuccgaauaaccaggugaugcugugcgaacccacaaucauugagagaaauaucaccgaaauuguguaucucacaaacaccacgaucgagaaggaaauuuguccuaaacuggccgaguaccggaauuggagcaagccccagugcaacaucaccggguucgcgccuuuuuccaaagacaauucuauucgccuuagcgcuggaggcgauaucugggucacaagagagcccuauguguccugugacccugauaagugcuaccaauucgcccuggggcagggaaccacacucaacaaucggcauucuaacgacaccguucacgaucgcacgccguauagaacacugcugaugaaugaacucggcgugcccuuucaucuggggaccaagcaggucuguaucgccuggagcuccagcucuugccacgacggaaaagccuggcuucauguguguguuacaggccacgaugagaacgcuaccgcuuccuucauuuacaauggccggcugguggacagcaucgggucuugguccaagaaaauucuccgcacccaggaaagcgagugcgucuguaucaacggaacaugcacgguggugaugaccgauggcucugccuccgggaaggcggacacaaaaauucuguuuaucgaggaaggaaagaucguccacauuagcccucuuuccggcucugcccaacauguugaggaaugcagcuguuaucccagauacccuggggugcggugcgugugucgcgauaacuggaagggauccaauagacccaucgucgacauuaacgugaaagauuacagcaucguuucuuccuaugugugcagcggccuggucggcgacaccccgcggaagaaugacucuagcuccucuagccacugucucaacccuaauaacgaggaagggggacauggcgugaaagggugggcuuucgaugacggaaaugauguuuggaugggccgcacaauuuccgagaagcugagaagcggguacgagaccuuuaaagugaucgaaggauggucuaaccccaauuccaagcugcagaucaaccggcaggucauuguggaccgcggcaauagcucuggcuauuccgggaucuucagcgucgagggaaaauccugcauuaacagauguuuuuacguggaacucauccggggcagaaagcaggagacggaaguuugguggacaucuaauagcauugugguccugugcgggaccuccggaaccuauggcacagggucuuggccugauggcgccgacaucaaccuuaugcccauuuga

SEQ ID NO: 217897 - RNA, 1410 nt, Artificial Sequence
  derived and/or modified CDS sequence (opt5) from neuraminidase__InfluenzaA__AIW60710
augaaccccaaucagaagaucauuaccaucggcagcgugucccugacaauugccacgaucugcuuccucaugcaaauugcuauccuggucaccacaguuacccuucacuuuaaacaguacgaguguaacucuccuccgaauaaccaggugaugcugugcgaacccacaaucauugagagaaauaucaccgaaauuguguaucucacaaacaccacgaucgagaaggaaauuuguccuaaacuggccgaguaccggaauuggagcaagccccagugcaacaucaccggguucgcgccuuuuuccaaagacaauucuauucgccuuagcgcuggaggcgauaucugggucacaagagagcccuauguguccugugacccugauaagugcuaccaauucgcccuggggcagggaaccacacucaacaauggccauucuaacgacaccguucacgaucggacgccguaucgcacacugcugaugaaugaacucggggugcccuuucaucugggaaccaagcaggucuguaucgccuggagcuccagcucuugccacgacggcaaagccuggcuucauguguguguuacaggcgaugacgagaacgcuaccgcuuccuucauuuacaaugggagacugguggauagcaucggaucuugguccaagaaaauucuccggacccaggaaagcgagugcgucuguaucaacggcacaugcacgguggugaugaccgacgggucugccuccggaaaggcggauacaaaaauucuguuuaucgaggaaggcaagaucguccacaccagcucccuuucugggagcgcccaacacguugaggaaugcuccuguuauccucgcuaccccggagugagaugcgugugucgggacaacuggaagggcagcaaucgcccuacagucgauauuaacgugaaagacuacucuaucguuuccagcuaugugugcucuggccuggucggggacacccccagaaagaaugauagcuccucuagcucccauugucucgacccgaacaaugaggaaggaggccacggggugaaaggaugggcuuucgaugacggcaacgauguuuggauggggcggacgauuagcgagaagcugcgcucuggauacgagacauuuaaagugaucgaaggcugguccaagccuaauagcaaacugcagauuaacagacaggucaucguggaccggggcaaucgcucuggguauuccggaaucuucagcgucgaguccaagucuugcauuaacagauguuuuuacguggaacucauccggggcagaaagcaggagaccgaaguucuguggaccagcaauuccauuguggucuucugcgggacaucuggaaccuauggcacagggagcuggcccgauggcgccgacaucaaccuuaugccuauuuga

SEQ ID NO: 217898 - RNA, 1410 nt, Artificial Sequence; identical to SEQ ID NO: 206663
  derived and/or modified CDS sequence (opt5) from neuraminidase__InfluenzaA__AIW60711

SEQ ID NO: 217899 - RNA, 1410 nt, Artificial Sequence; identical to SEQ ID NO: 206663
  derived and/or modified CDS sequence (opt5) from neuraminidase__InfluenzaA__AIW60712

SEQ ID NO: 217900 - RNA, 1410 nt, Artificial Sequence
  derived and/or modified CDS sequence (opt5) from neuraminidase__InfluenzaA__AIW60713
augaaccccaaucagaagaucauuaccaucggcagcgugucccugacaauuucuacgaucugcuucuuuaugcaaauugccauccucaucaccacagucacccugcacuucaaacaguacgaguuuagcuccccuccgaacaaucagguuaugcuuugugaacccacaauuaucgagagaaacauuaccgaaaucguguaucugacaaauaccacgauugagaaggaaaucugcccuaaacucgcugaguaccggaacuggucuaagccccagugugacauuaccggguucgccccuuuuagcaaagauaauuccauccgccugucugcgggaggcgacaucugggugacaagagagcccuaugucagcugcgauccugacaaguguuaccaauucgcucuugggcagggaaccacacugaacaaugugcauuccaacgauaccguucacgaccggacgccguaucgcacacuccugaugaaugaacugggcgugcccuuucaucucgggaccaagcaggucugcauugccuggucuagcuccagcugucacgauggaaaagccuggcugcaugugugcguuacaggcgacgauaagaacgcuaccgccucuuucaucuacaauggcagacuuguggacuccauugucagcuggucuaaagagauccugcggacccaggaauccgagugugugugcauuaacgggacauguacgguggucaugaccgauggaagcgcuuccggcaaggccgacacaaaaauccucuuuaucgaggaagggaagauuguucacaccucuacacugagcggauccgcgcaacacguggaggaaugcagcugcuauccucgcuaccccggcgugagaugugucugccgggauaauuggaaggggucuaaccgcccuaucguggacauuaacaucaaagacuacuccauugccagcucuuauguuuguagcggacuugugggcgauacccccagaaagaaugacuccucuagcuccagccauugccuggauccgaacaaugaggaaggcgggcacggagucaaaggcugggcuuucgacgaugggaacgacguguggaugggacggacgaucucugagaagcuccgcuccggcuacgagacauuuaaaguuaucgaaggguggagcaauccuaacucuaagcugcagauuaauagacaggugaucgucgaucggggaaaccgcuccggcuauagcggcauuuucuccguggaggggaaaucuuguaucaauagaugcuuuuacgucgaacugauucggggaagaaaggaggaaaccgaggugcucuggaccagcaacuccaucguuguguucuguggcacaucugggaccuauggaacaggcagcuggcccgacggggccgauauuaaucugaugccuaucuga

SEQ ID NO: 217901 - RNA, 1410 nt, Artificial Sequence
  derived and/or modified CDS sequence (opt5) from neuraminidase__InfluenzaA__AIW60714
augaaccccaaucagaagaucauuaccaucggcagcgugucccugacaauuucuacgaucugcuucuuuaugcaaauugccauccucaucaccacagucacccugcacuucaaacaguacgaguuuagcuccccuccgaacaaucagguuaugcuuugugaacccacaauuaucgagagaaacauuaccgaaaucguguaucugacaaauaccacgauugagaaggaaaucugcccuaaacucgcugaguaccggaacuggucuaagccccagugugacauuaccggguucgccccuuuuagcaaagauaauuccauccgccugucugcgggaggcgacaucugggugacaagagagcccuaugucagcugcgauccugacaaguguuaccaauucgcucuugggcagggaaccacacugaacaaugugcauuccaacgauaccguucacgaccggacgccguaucgcacacuccugaugaaugaacugggcgugcccuuucaucucgggaccaagcaggucugcauugccuggucuagcuccagcugucacgauggaaaagccuggcugcaugugugcguuacaggcgacgauaagaacgcuaccgccucuuucaucuacaauggcagacuuguggacuccauugucagcuggucuaaagagauccugcggacccaggaauccgagugugugugcauuaacgggacauguacgguggucaugaccgauggaagcgcuuccggcaaggccgacacaaaaauccucuuuaucgaggaagggaagauuguucacaccucuacacugagcggauccgcgcaacacguggaggaaugcagcugcuauccucgcuaccccggcgugagaugugucugccgggauaauuggaaggggucuaaccgcccuaucguggacauuaacaucaaagacuacuccauugccagcucuuauguuuguagcggacuugugggcgauacccccagaaagaaugacuccucuagcuccagccauugccuggauccgaacaaugaggaaggcgggcacggagucaaaggcugggcuuucgacgaugggaacgacguguggaugggacggacgaucucugagaagcuccgcuccggcuacgagacauuuaaaguuaucgaaggguggagcaauccuaacucuaagcugcagauuaauagacaggugaucgucggacggggcaaccgcuccggcuauagcgggauuuucuccguggagggaaaaucuuguaucaauagaugcuuuuacgucgaacugauucggggcagaaaggaggaaaccgaggugcucuggaccagcaacuccaucguuguguucugugggacaucuggaaccuauggcacagggagcuggcccgauggcgccgacauuaaucugaugccuaucuga

SEQ ID NO: 217902 - RNA, 1410 nt, Artificial Sequence
  derived and/or modified CDS sequence (opt5) from neuraminidase__InfluenzaA__AIW60715
augaaccccaaucagaagaucauuaccaucggcagcgugucccugacaauuucuacgaucugcuucuuuaugcaaauugccauccucaucaccacagucacccugcacuucaaacaguacgaguuuaacagcccuccgaauaaccagguuaugcuuugugaacccacaauuaucgagagaaauauuaccgaaaucguguaucugacaaacaccacgauugagaaggaaaucugcccuaaacucgcugaguaccggaauugguccaagccccagugugacauuaccggguucgccccuuuuucuaaagauaacagcauccgccuguccgcgggaggcgacaucugggugacaagagagcccuaugucucuugcgauccugacaaguguuaccaauucgcucuugggcagggaaccacacugaauaacgugcauagcaaugauaccguucgggaccgcacgccguauagaacacuccugaugaacgaacugggcgugcccuuucaccucgggaccaagcaggucugcauugccugguccucuagcuccugucaugauggaaaagccuggcugcacgugugcaucacaggcgacgauaagaaugcuaccgccagcuucauuuacaacggccggcuuguugacucuaucguguccuggagcaaaaagauucugcgcacccaggagucugaaugugucugcaucaaugggacauguacgguggugaugaccgauggauccgcuagcggcaaagccgacacaaagauccucuuuauugaggaggggaagaucguccauaccuccacacugucuggaagcgcgcaacacguugaagagugcuccugcuauccuagauaccccggcgugcggugugugugccgcgauaacuggaaagggagcaacagaccuauugucgacaucaauauuaaggaccacucuaucguguccagcuacguuuguucuggacuugugggcgauacgccccggaaaaacgacagcuccucuagcucccauugccuggauccgaauaacgaagagggcgggcacggagucaagggcugggccuucgacgaugggaaugacguguggaugggacgcaccaucagcgaaaaaucuagacucggcuaugagacauuuaagguuauugaggggugguccaacccuaaaagcaagcugcagaucaaucgccaggugauugucgaucggggaaacagaucuggcuacuccggcaucuucagcguggaagggaaguccuguauuaaucggugcuuuuaugucgagcugaucagaggacgcaaagaagagaccgaagugcucuggaccucuaacagcauuguuguguucuguggcacauccgggaccuacggaacaggcucuuggcccgacggggcugauaucaaucugaugccuaucuga

SEQ ID NO: 217903 - RNA, 1410 nt, Artificial Sequence; identical to SEQ ID NO: 208583
  derived and/or modified CDS sequence (opt5) from neuraminidase__InfluenzaA__AIW60716

SEQ ID NO: 217904 - RNA, 1410 nt, Artificial Sequence
  derived and/or modified CDS sequence (opt5) from neuraminidase__InfluenzaA__AIY54970
augaaccccaaucagaagaucauuaccaucggcagcgugucccugacaauuucuacgaucugcuucuuuaugcaaauugccauccucaucaccacagucacccugcacuucaaacaguacgaguuuaacagcccuccgaauaaccagguuaugcuuugugaacccacaauuaucgagagaaauauuaccgaaaucguguaucugacaaacaccacgauugagaaggaaaucugcccuaaacucgcugaguaccggaauugguccaagccccaguguaacauuaccggguucgccccuuuuucuaaagacaauagcauccgccuguccgcgggaggcgauaucugggugacaagagagcccuaugucucuugcgacccugauaaguguuaccaauucgcucuugggcagggaaccacacugaacaaugugcauagcaacgacaccguucacgaucggacgccguaucgcacacuccugaugaaugaacugggcgugcccuuucaucucgggaccaagcaggucugcauugccugguccucuagcuccugucacgacggaaaagccuggcugcaugugugcguuacaggcgaugacgagaacgcuaccgccagcuucaucuacaauggcagacuuguggauucuauugucuccuggagcaagaaaauccugcggacccaggaaucugagugugugugcauuaacgggacauguacgguggucaugaccgacggauccgcuagcggcaaggccgauacaaaaauccucuuuaucgaggaagggaagauuguucacaccuccacacugucuggaagcgcgcaacacguggaggaaugcuccugcuauccucgcuaccccggcgugagaugugucugccgggacaacuggaaggggagcaaucgcccuaucguggauauuaacaucaaagacuacucuauuguuuccagcuauguguguucuggacuugucggcgacacccccagaaagacggauagcuccucuagcucccauugccuggacccgaauaacgaggaaggcgggcacggagugaaaggcugggccuucgaugacgggaaugaucucuggaugggacggacaaucagccagaaccugcgcucuggcuacgagaccuuuaagguuaucgaggggugguccaauccuaacagcaaacugcagauuaauagacaggugaucgucgaccggggaaaccgcucuggcuauuccggcauuuucagcguggaagggaaguccuguaucaauagaugcuuuuacgucgagcucauucggggaagaaaacaagaaaccgaggugcuguggacaucuaacagcaucguuguguucuguggcaccuccgggacauauggaacgggcucuuggcccgauggggcugacauuaaucuuaugccuaucuga

SEQ ID NO: 217905 - RNA, 1410 nt, Artificial Sequence
  derived and/or modified CDS sequence (opt5) from neuraminidase__InfluenzaA__AIY54974
augaaccccaaucagaagaucauuaccaucggcagcgugucccugacaauuucuacgaucugcuucuuuaugcaaauugccauccucaucaccacagucacccugcacuucaaacaguacgaguuuaacagcccuccgaauaaccagguuaugcuuugugaacccacaauuaucgagagaaauauuaccgaaaucguguaucugacaaacaccacgauugagaaggaaaucugcccuaaacucgcugaguaccggaauugguccaagccccagugugacauuaccggguucgccccuuuuucuaaagauaacagcauccgccuguccgcgggaggcgacaucugggugacaagagagcccuaugucucuugcgauccugacaaguguuaccaauucgcucuugggcagggaaccacacugaauaacgugcauagcaaugauaccguucacgaccggacgccguaucgcacacuccugauguccgaacugggcgugcccuuucaucucgggaccaagcaggucugcauugccuggucuagcuccagcugucacgauggaaaagccuggcugcaugugugcguuacaggcgacgauaagaacgcuaccgccucuuucaucuacaauggcagacuuguggacuccauugucagcuggucuaaaaagauccugcggacccaggaguccgaaugugugugcauuaacgggacauguacgguggucaugaccgauggaagcgcuuccggcaaagccgacacaaagauccucuuuaucgaggaggggaagauuguucacaccucuacacugagcggauccgcgcaacacguggaagagugcagcugcuauccucgcuaccccggcgugagaugugucugccgggauaauuggaaagggucuaaccgcccuaucguggacauuaacaucaaggacuacuccauuguuagcucuuauguguguagcggacuugucggcgauacccccagaaagaaugacuccucuagcuccagccauugccuggauccgaacaaugaagagggcgggcacggagugaaaggcugggccuucgacgaugggaacgacguuuggaugggacggacgaucucugaaaaacuccgcuccggcuacgagacauuuaaggugaucgagggguggagcaauccuaacucuaaacugcagauuaauagacaggucaagguggaucggggaaaccgcuccggcuauagcggcaucuucuccgucgaagggaagucuuguauuaauagaugcuuuuacguggagcugauccggggaagaaaagaagagaccaagguucucuggaccagcaacuccauuguggucuucuguggcacaucugggaccuauggaacaggcagcuggcccgacggggcugauaucaaucugaugccuauuuga

SEQ ID NO: 217906 - RNA, 1410 nt, Artificial Sequence
  derived and/or modified CDS sequence (opt5) from neuraminidase__InfluenzaA__AIY54982
augaaccccaaucagaagaucauuaccaucggcagcgugucccugacaauuucuacgaucugcuucuuuaugcaaauugccauccucaucaccacagucacccugcacuucaaacaguacgaguuuaacagcccuccgaauaaccagguuaugcuuugugaacccacaauuaucgagagaaauauuaccgaaaucguguaucugacaaacaccacgauugagaaggaaaucugcccuaaacucgcugaguaccggaauugguccaagccccagugugacauuaccggguucgccccuuuuucuaaagauaacagcauccgccuguccgcgggaggcgacaucugggugacaagagagcccuaugucucuugcgauccugacaaguguuaccaauucgcucuugggcagggaaccacacugaauaacgugcauagcaaugauaccguucacgaccggacgccguaucgcacacuccugaugaacgaacugggcgugcccuuucaucucgggaccaagcaggucugcauugccugguccucuagcuccugucacgauggaaaagccuggcugcaugugugcguuacaggcgacgauaagaaugcuaccgccagcuucaucuacaacggcagacuuguggacucuauugucuccuggagcaaagagauccugcggacccaggaaucugagugugugugcauuaaugggacauguacgguggucaugaccgauggauccgcuagcggcaaggccgacacaaaaauccucuuuaucgaggaagggaagauuguucacaccuccacacugucuggaagcgcgcaacacguggaggaaugcuccugcuauccucgcuaccccggcgugagaugugucugccgggauaacuggaaggggagcaaccgcccuaucguggacauuaauaucaaagacuacucuauuguuuccagcuauguguguucuggacuugucggcgauacccccagaaagaacgacagcuccucuagcucccauugccuggauccgaauaacgaggaaggcgggcacggagugaaaggcugggccuucgacgaugggaaugacguuuggaugggacggacgaucagcgagaaguuucgcucuggcuacgagacauucaaagugaucgaagggugguccaacccuaauagcaagcuccagauuaacagacaggucaucguggaucggggaaaucgcucuggcuauuccggcauuuuuagcgucgaggggaaauccuguaucaacagaugcuucuacguggaacugauucggggaagaaaggaggaaaccgagguucuguggaccucuaauagcaucguggucuucuguggcacauccgggaccuauggaacaggcucuuggcccgacggggcugauauuaaccucaugccuaucuga

SEQ ID NO: 217907 - RNA, 1410 nt, Artificial Sequence
  derived and/or modified CDS sequence (opt5) from neuraminidase__InfluenzaA__AIY54990
augaaccccaaucagaagaucauuaccaucggcagcgugucccugacaauuucuacgaucugcuucuuuaugcaaauugccauccucaucaccacagucacccugcacuucaaacaguacgaguuuagcuccccuccgaacaaucagguuaugcuuugugaacccacaauuaucgagagaaacauuaccgaaaucguguaucugacaaauaccacgauugagaaggaaaucugcccuaaacucgcugaguaccggaacuggucuaagccccagugugggauuaccggauucgccccuuuuagcaaagacaauuccauccgccugucugcgggcggggauaucugggugacaagagagcccuaugucagcugcgacccugauaaguguuaccaauucgcucuuggacagggcaccacacugaacaaugugcauuccaacgacaccguucacgaucggacgccguaucgcacacuccugaugaaugaacugggggugcccuuucaucucggaaccaagcaggucugcauugccuggucuagcuccagcugucacgacggcaaagccuggcugcaugugugcguuacaggcgaugacaagaacgcuaccgccucuuucaucuacaaugggagacuuguggauuccauugucagcuggucuaaagagauccugcggacccaggaauccgagugugugugcauuaacggaacauguacgguggucaugaccgacggcagcgcuuccgggaaggccgauacaaaaauccucuuuaucgaggaaggaaagauuguucacaccucuacacugagcggcuccgcgcaacacguggaggaaugcagcugcuauccucgcuaccccggggugagaugugucugccgggacaauuggaagggaucuaaccgcccuaucguggauauuaacaucaaagacuacuccauuguuagcagauauguguguucuggccuugucggcgacacgccccggaagaaugauagcuccucuagcucccauugccuggacccgaacaaugaggaagggggacacggcgugaaagggugggccuucgaugacggaaacgauguuuggaugggccgcaccaucagcgagaagucuagauccggguacgagacauuuaaagugaucgaaggauggagcaauccuaacucuaagcuccagauuaaucggcaggucaucguggaccgcggcaacagauccggcuauagcgggauuuucuccgucgagggaaaaucuuguaucaaucggugcuuuuacguggaacugauuagaggccgcaaggaggaaaccgagguucuguggaccagcaacuccaucguggucuucugugggacaucuggaaccuauggcacagggagcuggcccgauggcgcugacauuaaucucaugccuaucuga

SEQ ID NO: 217908 - RNA, 1401 nt, Artificial Sequence
  derived and/or modified CDS sequence (opt5) from neuraminidase__InfluenzaA__AJD78177
augaaccccaaucagaagaucauugccaucggcagcgugucccugauuaucgcugucauuugccuccugaugcaaaucgccauccuuaccacaacgaugacccugcacuucaugcagaacgaguguucuaauccuagcaacaaucagguuaugccgugcgaacccauuaucauugagagaaacacagugcaucucaauaacaccacaaucgaacgggagauuuguccuaaagcggcugaauacaagaauugguccaaaccccagugccaaaucaccggguuugccccuuucucuaaggacaacagcauucgccuguccgccggaggcgauaucugggugacaagagagcccuaugucucuuguagccuugacaaaugcuaccaguuugcucuggggcagggaaccacgcucaagaauaagcacuccaacggcaccacacaugaucggaccccucaccgcacacugcugaugaaugagcucggggugccguuccaucugggaaccaaacagguuuguaucgccuggucuagcuccagcugcuaugacggcaaggcuuggcuucacauuugugugacgggcgaugacaaaaacgccacagcgucuaucauuuacgaugggaugcuggucgacuccaucggaagcuggucuaagaauauucucagaacccaagaauccgagugcguguguaucaacggcacaugcgccguugugaugaccgaugggagcgcuuccggaaaagccgacacccggguccuguuuauccgcgaaggcaagauuaucaacauuucuccccuuagcggguccgcucagcacguggaggagugcagcuguuauccuagauaccccgaagugcggugcgucugucgcgauaauuggaagggaucuaacagaccuauccuguauauuaauauggccgacuacuccaucgagagcucuuacguuugcagcggccucgugggcgauacaccccggaacgacgacuccucuagcuccagcaauugucgcgauccgaacaaugaaagaggggcgccuggagugaaaggcugggccuucgacgaugggaacgacgucuggaugggacggacgaucaagaauggcucucgcuccggguaugagaccuuuagagugguuaacggauggacaauggcuaauagcaaaucucagauuaacagacaggugaucgucgauuccgacgauuggagcggcuacuccggcauuuucucuguggaagggaagaaaugcaucaaucgguguuuuuauguugagcugauucgcggacggccccaagagccuagagugugguggaccagcaacuccaucauugucuucugcggcacaucugggaccuacggaacgggcagcuggcccgacggggccaauaucaacuuuaugcccaucuga

SEQ ID NO: 217909 - RNA, 1401 nt, Artificial Sequence
  derived and/or modified CDS sequence (opt5) from neuraminidase__InfluenzaA__AJD78189
augaaccccaaucagaagaucauugccaucggcagcgugucccugauuaucgcuauuaucugccuccugaugcaaaucgccauucuuaccacaacgaugacccugcacuucagacagaacgaguguaauaacucuagcaauaaccaggucaugccuugcgaaccgaucauuaucgagcggaauacaguucaucucaacuccaccacaauugaacgcgagaucugucccaaaguggcggaauacaagaauuggucuaaaccucagugccaaauuaccggguuugcucccuucagcaaggacaacuccaucagacugucugccggaggcgauaucugggugacacgggagccuuaugucagcuguucccuugacaaaugcuaccaguuugcccuggggcagggaaccacgcucaagaauaagcacagcaacggcaccacacaugaucgcaccucucacagaacacugcugaugaaugagcucggggugcccuuccaucugggaaccaaacagguuuguauugcuugguccagcagcuccugcuaugacggcaaggccuggcuucacaucugugugacgggcgaugacaaaaacgcuacagccagcauuaucuacaaugggaugcuggucgauucuauuggauccuggagcaagaacauccuccggacccaagaauccgagugcguguguaucaacggcacaugcgcgguugugaugaccgacgggucugccagcggaaaagcugauacccgcguccuguuuauuagagaaggcaagaucauuaauaucuccccucuuagcgggucugcccagcacguggaggagugcuccuguuauccgcgguaccccgaagugcgcugcgucuguagagacaacuggaagggaagcaaucggccuauucuguauaucaacauggcugauuacucuaucgagagcuccuacguuugcucuggccucgugggcgacacaccccgcaaugaugacagcuccucuucuuccaacuguaaagacccuaauagcgaaagaggggcccccggagugaagggcugggcguucgaugacgggaacgaugucuggaugggacggacgauuaaaaauggcucucgcuccggguaugagaccuuuagagugcugaacggauggacaguugccaauagcaagucccagaucaacagacaggugauugucgacucugaugacuggagcggcuacuccggcaucuucucuguggaagggaaaaagugcauuaaucgguguuuuuauguugagcugauccgcggacggccgcaagagccuagagugugguggaccagcaacuccauuaucgucuucugcggcacaagcgggaccuacggaacgggcucuuggcccgauggggcuaauaucaacuuuaugccuauuuga

SEQ ID NO: 217910 - RNA, 1401 nt, Artificial Sequence
  derived and/or modified CDS sequence (opt5) from neuraminidase__InfluenzaA__AJD78201
augaaccccaaucagaagaucaccgccauuggcagcgugucccugaucauugcuaucauuugccuccugaugcaaaucgccauccuuacaacgaccaugacacugcacuucagacagaaagaguguucuaacccuagcaauaaccaggucaugccgugcgaacccauuaucauugagcggaauaccguucaucucaacuccacaaccaucgaacgcgagauuuguccuaagguggcggaauacaaaaauuggucuaagccccagugccugaucacaggguuugcuccuuucagcaaagacaacuccauuagacuuucugccggaggcgauaucugggugacccgggagcccuaugucagcuguuccccugacaagugcuaccaauuugcccuggggcagggaacgacccucaagaauaaacacagcaacggcacaacccaugaucgcacaccgcacagaacccugcugaugaaugagcucggggugcccuuccaucugggaacgaagcagguuuguaucgcuuggucuuccagcucuugcuaugacggcaaagccuggcuucacauuugugugacaggcgaugacaagaacgcuaccgccuccaucauuuacgaugggaugcuggucgacagcaucggaucuugguccaaaaauauucuccggacacaggaaagcgagugcguguguaucaacgggaccugcgcgguugugaugaccgauggcuccgccucuggagucgcugacacacgcgugcuguuuaucagagaaggcaagauuaucaauauucggccucuuagcggguccgcccaacacguggaggagugcagcuguuauccccgcuacccugaagucagaugcguuugucgggauaacuggaagggaucuaaccgccccaucauuuauaucaauauggcugacuacuccaucgagagcucuuacgugugcagcggccuggugggcgauacgccgagaaacgacgacuccucuagcuccagcaauugucgggauccuaacaaugaacgcggggcccccggagucaaaggcugggcguucgacgaugggaacgacguguggaugggaagaaccauuaagaauggcucucgguccggguaugagacauuuagaguuaucaacggauggaccauggccaauagcaaaucucagauuaaccgccaggugaucgucgauuccgacgauuggagcggcuacuccggcauuuucucuguggaagggaagaaaugcaucaaucgguguuuuuauguugagcucauuagaggacgcccucaggagccccgggugugguggacaagcaacuccaucaucgucuucugcggcaccucugggacguacggaacaggcagcuggcccgacggggcuaauauuaacuuuaugccuaucuga

SEQ ID NO: 217911 - RNA, 1401 nt, Artificial Sequence
  derived and/or modified CDS sequence (opt5) from neuraminidase__InfluenzaA__AJD78213
augaaccccaaucagaagaucaccgccauuggcagcgugucccugaucauugcuaucauuugccucuucaugcaaaucgccauccugacaacgaccaugacacuucacuuuagacagaaagaguguucuaacccuagcaauaaccaggucaugccgugcgaacccauuaucauugagcggaauaccguucaucugaacuccacaaccaucgaacgcgagauuuguccuaagguggcggaauacaaaaauuggucuaagccccagugccucaucacaggguucgcuccuuuuagcaaagacaacuccauuagacugucugccggaggcgauaucugggugacccgggagcccuaugucagcuguuccccugacaagugcuaccaauucgcccuugggcagggaacgacccugaagaauaaacacagcaacggcacaacccaugaucgcacaccgcacagaacccuccugaugaaugagcugggggugcccuuucaucucggaacgaagcagguuuguaucgcuuggucuuccagcucuugcuaugacggcaaagccuggcugcacauuugugugacaggcgaugacaagaacgcuaccgccuccaucauuuacgaugggaugcuugucgacagcaucggaucuugguccaaaaauauucugcggacacaggaaagcgagugcguguguaucaacgggaccugcgcgguugugaugaccgauggcuccgccucuggagucgcugacacacgcgugcucuuuaucagagaaggcaagauuaucaauauucggccucugagcggguccgcccaacacguggaggagugcagcuguuauccccgcuacccugaagucagaugcguuugucgggauaacuggaagggaucuaaccgccccaucauuuauaucaauauggcugacuacuccaucgagagcucuuacgugugcagcggccuugugggcgauacgccgagaaacgacgacuccucuagcuccagcaauugucgggauccuaacaaugaacgcggggcccccggagucaaaggcugggcguuugacgaugggaacgacguguggaugggaagaaccauuaagaauggcucucgguccggguaugagacauucagaguuaucaacggauggaccauggccaauagcaaaucucagauuaaccgccaggugaucgucgauuccgacgauuggagcggcuacuccggcauuuucucuguggaagggaagaaaugcaucaaucgguguuucuauguugagcugauuagaggacgcccucaggagccccgggugugguggacaagcaacuccaucaucgucuuuugcggcaccucugggacguacggaacaggcagcuggcccgacggggcuaauauuaacuucaugccuaucuga

SEQ ID NO: 217912 - RNA, 1410 nt, Artificial Sequence; identical to SEQ ID NO: 214994
  derived and/or modified CDS sequence (opt5) from neuraminidase__InfluenzaA__AJI80140

SEQ ID NO: 217913 - RNA, 1410 nt, Artificial Sequence; identical to SEQ ID NO: 214994
  derived and/or modified CDS sequence (opt5) from neuraminidase__InfluenzaA__AJI80152

SEQ ID NO: 217914 - RNA, 1410 nt, Artificial Sequence; identical to SEQ ID NO: 217770
  derived and/or modified CDS sequence (opt5) from neuraminidase__InfluenzaA__AJI80164

SEQ ID NO: 217915 - RNA, 1410 nt, Artificial Sequence; identical to SEQ ID NO: 217709
  derived and/or modified CDS sequence (opt5) from neuraminidase__InfluenzaA__AJI80175

SEQ ID NO: 217916 - RNA, 1410 nt, Artificial Sequence; identical to SEQ ID NO: 217709
  derived and/or modified CDS sequence (opt5) from neuraminidase__InfluenzaA__AJI80187

SEQ ID NO: 217917 - RNA, 1410 nt, Artificial Sequence; identical to SEQ ID NO: 217709
  derived and/or modified CDS sequence (opt5) from neuraminidase__InfluenzaA__AJI80199

SEQ ID NO: 217918 - RNA, 1410 nt, Artificial Sequence; identical to SEQ ID NO: 217709
  derived and/or modified CDS sequence (opt5) from neuraminidase__InfluenzaA__AJI80211

SEQ ID NO: 217919 - RNA, 1410 nt, Artificial Sequence; identical to SEQ ID NO: 215943
  derived and/or modified CDS sequence (opt5) from neuraminidase__InfluenzaA__AJI80223

SEQ ID NO: 217920 - RNA, 1410 nt, Artificial Sequence; identical to SEQ ID NO: 217709
  derived and/or modified CDS sequence (opt5) from neuraminidase__InfluenzaA__AJI80235

SEQ ID NO: 217921 - RNA, 1410 nt, Artificial Sequence; identical to SEQ ID NO: 215943
  derived and/or modified CDS sequence (opt5) from neuraminidase__InfluenzaA__AJI80247

SEQ ID NO: 217922 - RNA, 1410 nt, Artificial Sequence; identical to SEQ ID NO: 217728
  derived and/or modified CDS sequence (opt5) from neuraminidase__InfluenzaA__AJI80259

SEQ ID NO: 217923 - RNA, 1410 nt, Artificial Sequence; identical to SEQ ID NO: 214218
  derived and/or modified CDS sequence (opt5) from neuraminidase__InfluenzaA__AJI80271

SEQ ID NO: 217924 - RNA, 1410 nt, Artificial Sequence; identical to SEQ ID NO: 217709
  derived and/or modified CDS sequence (opt5) from neuraminidase__InfluenzaA__AJI80283

SEQ ID NO: 217925 - RNA, 1410 nt, Artificial Sequence
  derived and/or modified CDS sequence (opt5) from neuraminidase__InfluenzaA__AJI80306
augaaccccaaucagaagaucauuaccaucggcagcgugucccugacaauuucuacgaucugcuucuuuaugcaaauugccauccucaucaccacagucacccugcacuucaaacaguacgaguuuaacagcccuccgaauaaccagguuaugcuuugugaacccacaauuaucgagagaaauauuaccgaaaucguguaucugacaaacaccacgauugagaaggaaaucugcccuaaacccgcugaguaccggaauugguccaagccucagugugggauuaccggauucgcccccuuuucuaaagacaacagcauccgccucuccgcgggcggggauaucugggugacaagagagccuuaugucucuugcgacccggauaaguguuaccaauucgcucugggacagggcaccacacuuaauaacgugcauagcaauaacaccguucuggaccggacgcccuaucgcacacuccugaugaaugaacugggggugccuuuucaccucggaaccaagcaggucugcauugccugguccucuagcuccugucaugauggcaaagccuggcugcacgugugcaucacaggcgacgauaagaacgcuaccgccagcuucauuuacaaugggagacuuguugacucuguggucuccuggagcaaagagauccugcggacccaggaaucugagugugugugcauuaacggaacauguacgguggucaugaccgauggcuccgcuagcgggaaggccgacacaaaaauccucuuuaucgaggaaggaaagauuguucauaccuccacacugucuggcagcgcgcaacacguggaggaaugcuccugcuauccccgcuacccuggggugagaugugucugccgggauaacuggaagggaagcaaucgccccaucguggacauuaacaucaaagaucacucuauuguuuccagcuacguguguucuggccuugucggcgacaccccgagaaagaaugacagcuccucuagcucccauugccuggauccuaacaaugaggaagggggacacggcgugaaagggugggccuucgacgauggaaacgacguuuggaugggccggacgaucaaugagacaagccgccucggguaugagaccuuuaaggugaucgaaggauggucuaaccccaaauccaagcugcagauuaauaaacaggucaucguggauagaggcgaccggagcggcuacucugggauuuucuccgucgagggaaagagcuguaucaaccgcugcuuuuauguggaacugauuagaggccggaaggaggaaaccgagguucucuggacauccaauucuaucguggucuucugugggaccagcggaacauacggcacgggguccuggccugauggcgcugaccugaaccuuaugcccauuuga

SEQ ID NO: 217926 - RNA, 1410 nt, Artificial Sequence
  derived and/or modified CDS sequence (opt5) from neuraminidase__InfluenzaA__AJI80318
augaaccccaaucagaagaucauuaccaucggcagcgugugcaugacaauugggauggccaaccugauccuccaaauuggaaauaucaucuccauuuggaucucucacagcauucagcugggcaaccagucccagaucgaggcuuguaaucaaaacgucauuacguacgaaaauaacaccuggguuaaucagacauaugugaacaucucuaauaccaacuucgccacagggcagagcguggucuccgugaaacuugcgggaaauucuagccugugcccuguuuccggcugggcuauuuacagcaaggacaacucugugagaaucggguccaaaggagaugucuuugugauccgggagccguucauuagcuguucuccccucgaaugccgcaccuuuuuccugacacagggcgcccuucugaaugacaagcauuccaacggcaccaucaaagauagaagcccuuaucggacgcucaugucuugucccauuggggagguuccuucccccuacaacagccgcuuugaauccguggccuggucugcuagcgccugccacgacggaaucaauuggcugaccauuggcaucuccgggccugauagcggagcugucgccgugcugaaguauaacggcaucauuacagacaccaucaagucuuggaaaaauaacauucucagaacacaagaguccgagugugcgugcgugaaugggagcuguuucaccaucaugacggauggaccgucugacggccaggccagcuacaagauuuuucggaucgaaaaaggcaagaucgucaaauccguugagaugaacgcucccaauuaucauuacgaagagugcucuuguuacccugauagcuccgagauuacaugcgugugccgcgacaacuggcacgggagcaauagacccugggugucuuucaaccagaaucuggaauaucagaucggauacauuuguuccggcgucuuuggggauaacccucggcccaaugacaagaccggaagcugcggcccggugucuuccaacggggccaauggaguuaagggcuucagcuuuaaauauggcaacgggguguggaucggacgcacaaaguccauuucuagcagaaaaggcuucgagaugaucugggauccuaacggguggaccggaaccgacaauaacuuuuccauuaagcaagacaucgucggcaucaaugaauggucuggguacagcggcuccuucgugcagcaucccgagcuuacaggacuggauuguauucggccuugcuucuggguugaacucauccgcggcagacccaaagagaacacgauuuggaccagcgggucuuccaucagcuuuuguggagucaauucugacacagugggcugguccuggcccgauggggcugagcugccuuucaccauugacaaguga

SEQ ID NO: 217927 - RNA, 1410 nt, Artificial Sequence
  derived and/or modified CDS sequence (opt5) from neuraminidase__InfluenzaA__AJI80329
augaaccccaaucagaagaucauuaccaucggcagcgugugcaugacaauugggauggccaaccugauccuccaaauuggaaauaucaucuccauuuggaucucucacagcauucagcugggcaaccagucccagaucgagacguguaaucaaucugucauuaccuacgaaaacaauacauggguuaaccagaccuaugugaauaucagcaacacaaauuucgcugccgggcaguccguggucucugugaaacuugcgggaaacagcucccugugcccuguuagcggcugggcuauuuacucuaaggacaauuccgugagaaucgggagcaaaggagaugucuuugugauccgggagccguucauuucuuguagcccccucgaaugccgcaccuuuuuccugacacagggcgcccuucugaacgacaagcauuccaauggcaccaucaaagauagaucuccuuaucggacgcucauguccugucccauuggggagguuccuagccccuacaacucccgcuuugaaucuguggccuggagcgcuuccgccugccacgacggaaucaacuggcugaccauuggcaucagcgggccugauucuggagcugucgccgugcugaaguauaauggcaucauuacagacaccaucaaguccuggaaaaacaauauucucagaacacaagagagcgagugugcgugcgugaacgggucuuguuucaccaucaugacggauggaccgagcgacggccaggccuccuacaagauuuuucggaucgaaaaaggcaagaucgucaaaucuguugagaugaaugcucccaacuaucauuacgaagagugcagcuguuacccugauuccagcgagauuacaugcgugugccgcgacaauuggcacgggucuaacagacccuggguguccuucaaucagaaccuggaauaucagaucggauacauuuguagcggcgucuuuggggauaauccucggcccaacgacaagaccggaucuugcggcccgguguccagcaauggggccaacggaguuaagggcuucuccuuuaaauauggcaaugggguguggaucggacgcacaaagucuauuagcuccagaaaaggcuucgagaugaucugggauccuaacggguggaccggaaccgacaacaauuuuucuauuaagcaagacaucgucggcaucaacgaauggagcggguacuccggcagcuucgugcagcaucccgagcuuacaggacuggauuguauucggccuugcuucuggguugaacucauccgcggcagacccaaagagaauacgauuuggaccucuggguccagcaucucuuuuuguggagugaacuccgacacagucggcuggagcuggcccgauggggcugagcugccuuucaccauugacaaguga

SEQ ID NO: 217928 - RNA, 1410 nt, Artificial Sequence
  derived and/or modified CDS sequence (opt5) from neuraminidase__InfluenzaA__AJI80340
augaaccccaaucagaagaucauuaccaucggcagcgugugcaugacaauugggauggccaaccugauccuccaaauuggaaauaucaucuccauuuggaucucucacagcauucagcugggcaaccagucccagaucgagacguguaaucaaucugucauuaccuacgaaaacaauacauggguuaaccagaccuaugugaauaucagcaacacaaauuucgcugccgggcaguccguggucucugugaaacuugcgggaaacagcucccugugcccuguuagcggcugggcuauuuacucuaaggacaauuccaucagaaucgggagcaaaggagauguguuugucauucgggagccguucaucucuuguagcccccucgaaugccgcaccuuuuuccugacacagggcgcccuucugaacgacaagcauuccaauggcaccauuaaagauagaucuccuuaucggacgcucauguccugucccaucggggaggugccuagccccuacaacucccgcuuugaaucuguugccuggagcgcuuccgccugccacgacggaauuaacuggcugaccaucggcaucagcgggccugauucuggagcuguggccguccugaaguauaauggcauuaucacagacaccauuaaguccuggaaaaacaauauccucagaacacaagagagcgagugugcgugcgugaacgggucuuguuucaccauuaugacggauggaccgagcgacggccaggccuccuacaagaucuuucggaucgaaaaaggcaagauugugaaaucugucgagaugaaugcucccaacuauuacuacgaagagugcagcuguuauccugauuccagcgagaucacaugcguuugccgcgacaauuggcaugggucuaacagacccuggguguccuucaaucagaaccuggaauaccagauuggauauaucuguagcggcauuuuuggggauaauccucggcccaacgacaagaccggaucuugcggcccgguguccagcaauggggccaacggagucaagggcuucuccuuuaaauacggcaaugggguguggaucggacgcacaaagucuauuagcuccagaaaaggcuucgagaugaucugggauccuaacggguggaccggaaccgacaacaauuuuucuaucaagcaagacauuguuggcaucaacgaauggagcggguauuccggcagcuucgugcagcaccccgagcuuacaggacuggauuguauucggccuugcuucugggucgaacucauccgcggcagacccaaagagaauacgauuuggaccucuggguccagcaucucuuuuuguggagugaacuccgacacaguuggcuggagcuggcccgauggggcugagcugccuuucaccaucgacaaguga

SEQ ID NO: 217929 - RNA, 1410 nt, Artificial Sequence; identical to SEQ ID NO: 214218
  derived and/or modified CDS sequence (opt5) from neuraminidase__InfluenzaA__AJI80351

SEQ ID NO: 217930 - RNA, 1410 nt, Artificial Sequence
  derived and/or modified CDS sequence (opt5) from neuraminidase__InfluenzaA__AJI80363
augaaccccaaucagaagaucauuaccaucggcagcgugucccugacaauuucuacgaucugcuucuuuaugcaaauugccauccucaucaccacagucacccugcacuucaaacaguacgaguuuaacagccuuccuaauaaccagguuaugcugugugaaccgacaauuaucgagagaaauauuaccgaaaucguguaucucacaaacaccacgauugagaaggaaaucugccccaaaccugcugaguaccggaauugguccaagccccagugugggauuaccggauucgccccuuuuucuaaagacaacagcauccgccuguccgcgggcggggauaucugggugacaagagagcccuaugucucuugcgacccugauaaguguuaccaauucgcucuuggacagggcaccacacugaauaacgugcauagcaauaacaccgcccgggaccgcacgccguauagaacacuccugaugaaugaacuggggguucccuuucaccucggaaccaaacaggugugcauugccugguccucuagcuccugucaugauggcaaggcuuggcugcacgucugcaucacaggcgacgauaagaacgccaccgcuagcuucauuuacaaugggcggcuuguggacucuguuguguccuggagcaaagagauccugcgcacccaggaaucugagugugucugcauuaacggaacauguacgguggugaugaccgauggcuccgccagcgggaaggcggacacaaaaauccucuuuaucgaggaaggaaagauuguccauaccuccacacugucuggcggggcccaacacguugaggaaugcagcugcuauccuagauaccccggagugcggugugugugccgcgauaacuggaagggcuccaauagaccuaucgucgacauuaacaucaaagaucacagcauugugucuuccuacguuuguagcggccuugugggggacacgccccggaagaaugacucuagcuccucuagccauugccugaacccgaauaacgaggaaggaggccacggggucaaaggaugggcuuucgaugacggcaaugauguguggauggggcgcaccaucaacgagacauccagacucggauaugagaccuuuaagguuaucgaaggcuggagcaauccuaaaucuaagcugcagauuaaccgccaggugaucgucgaccggggcgauagauccggguacagcggaauuuucucuguggagggcaaauccuguaucaaucggugcuuuuaugucgaacugauuagagggcgcaaggaggaaaccgaggugcucuggacaagcaacuccaucguuguguucuguggaaccucuggcacauacgggacgggcagcuggcccgacggagccgaucugaaucuuaugccuauuuga

SEQ ID NO: 217931 - RNA, 1410 nt, Artificial Sequence
  derived and/or modified CDS sequence (opt5) from neuraminidase__InfluenzaA__AJI80375
augaaccccaaucagaagaucauuaccaucggcagcgugucccugacaauuucuacgaucugccucuucaugcaaauugccauccugaucaccacagucacccuucacuuuaaacagcaugaguucaacagcccuccgaauaaccagguuaugcugugugaacccacaauuaucgagagaaauauuaccgaaaucguguaccucacaaacaccacgauugagaaggaaaucugcccuaaacccgcugaguaucggaauugguccaagccucagugugggauuaccggauuugcccccuucucuaaagacaacagcauccgccuguccgcgggcggggauaucugggugacaagagagccuuacgucucuugcgacccggauaaguguuaucaauuugcucuuggacagggcaccacacugaauaacgugcacagcaauaacaccguucgggaccgcacgcccuacagaacacuccugaugaaugaacugggggugccuuuccaucucggaaccaagcaggucugcauugccugguccuccucuuccugucacgauggcaaagccuggcugcaugugugcaucacaggcgacgauaagaacgcuaccgccagcuuuauuuauaaugggcggcuuguugacucuguggucuccuggagcaaagagauccugcgcacccaggaaucugagugugugugcauuaacggaacauguacgguggucaugaccgauggcuccgcuagcgggaaggccgacacaaaaauccucuucaucgaggaaggaaagauuguucacaccuccacacugucuggcagcgcgcaacacguggaggaaugcuccugcuaccccagauauccuggggugcggugugucugccgcgauaacuggaagggaagcaauagacccaucguggacauuaacaucaaagaucauucuauuguuuccagcuacguguguucuggccuugucggcgacaccccgcggaagaaugacagcuccucuagcucccacugccuggauccuaacaaugaggaagggggacauggcgugaaagggugggccuuugacgauggaaacgacguuuggaugggccgcacgaucaaugagacaagcagacucggguacgagaccuucaaggugaucgaaggauggucuaaccccaaauccaagcugcagauuaaucggcaggucaucguggaucgcggcgacagaagcggcuauucugggauuuuuagcgucgagggaaaaagcuguaucaaccggugcuucuacguggaacugauuagaggccgcaaggaggaaaccgagguucucuggacauccaauucuaucguggucuuuugugggaccagcggaacauauggcacgggguccuggccugauggcgcugaccugaaccuuaugcccauuuga

SEQ ID NO: 217932 - RNA, 1410 nt, Artificial Sequence; identical to SEQ ID NO: 217748
  derived and/or modified CDS sequence (opt5) from neuraminidase__InfluenzaA__AJI80387

SEQ ID NO: 217933 - RNA, 1410 nt, Artificial Sequence; identical to SEQ ID NO: 217748
  derived and/or modified CDS sequence (opt5) from neuraminidase__InfluenzaA__AJI80398

SEQ ID NO: 217934 - RNA, 1410 nt, Artificial Sequence; identical to SEQ ID NO: 217748
  derived and/or modified CDS sequence (opt5) from neuraminidase__InfluenzaA__AJI80409

SEQ ID NO: 217935 - RNA, 1410 nt, Artificial Sequence; identical to SEQ ID NO: 217748
  derived and/or modified CDS sequence (opt5) from neuraminidase__InfluenzaA__AJI80420

SEQ ID NO: 217936 - RNA, 1410 nt, Artificial Sequence; identical to SEQ ID NO: 217748
  derived and/or modified CDS sequence (opt5) from neuraminidase__InfluenzaA__AJI80431

SEQ ID NO: 217937 - RNA, 1410 nt, Artificial Sequence; identical to SEQ ID NO: 217743
  derived and/or modified CDS sequence (opt5) from neuraminidase__InfluenzaA__AJI80442

SEQ ID NO: 217938 - RNA, 1410 nt, Artificial Sequence; identical to SEQ ID NO: 217748
  derived and/or modified CDS sequence (opt5) from neuraminidase__InfluenzaA__AJI80454

SEQ ID NO: 217939 - RNA, 1410 nt, Artificial Sequence; identical to SEQ ID NO: 217743
  derived and/or modified CDS sequence (opt5) from neuraminidase__InfluenzaA__AJI80465

SEQ ID NO: 217940 - RNA, 1410 nt, Artificial Sequence; identical to SEQ ID NO: 217748
  derived and/or modified CDS sequence (opt5) from neuraminidase__InfluenzaA__AJI80477

SEQ ID NO: 217941 - RNA, 1410 nt, Artificial Sequence; identical to SEQ ID NO: 217748
  derived and/or modified CDS sequence (opt5) from neuraminidase__InfluenzaA__AJI80488

SEQ ID NO: 217942 - RNA, 1410 nt, Artificial Sequence; identical to SEQ ID NO: 217770
  derived and/or modified CDS sequence (opt5) from neuraminidase__InfluenzaA__AJI80499

SEQ ID NO: 217943 - RNA, 1410 nt, Artificial Sequence; identical to SEQ ID NO: 217748
  derived and/or modified CDS sequence (opt5) from neuraminidase__InfluenzaA__AJI80510

SEQ ID NO: 217944 - RNA, 1410 nt, Artificial Sequence; identical to SEQ ID NO: 217770
  derived and/or modified CDS sequence (opt5) from neuraminidase__InfluenzaA__AJI80521

SEQ ID NO: 217945 - RNA, 1410 nt, Artificial Sequence
  derived and/or modified CDS sequence (opt5) from neuraminidase__InfluenzaA__AJJ98767
augaaccccaaucagaagaucauuaccaucggcagcgugucccugacaauuucuacgaucugcuucuuuaugcaaauugccauccucaucaccacagucacccugcacuucaaacaguacgaguuuaacagcccuuccaauaaccagguuaugcuuugugaaccgacaauuaucgagagaaauauuaccgaaaucguguaucugacaaacaccacgauugagaaggaaaaaugccccaagccugcugaguaccggaauuggucuaaaccccagugugacaucaccggguucgccccuuuuagcaaggauaacuccauucgccucucugcgggaggcgacaucugggugacaagagagcccuaugucagcugcgauccugacaaguguuaccaauucgcucuggggcagggaaccacacuuaauaacgugcauuccaauaacaccguucgggaucgcacgccguauagaacacugcucaugaaugaacugggcgugcccuuucaccuggggaccaaacaggucugcaucgccuggucuagcuccagcugucaugacggaaaggccuggcuccacgugugcauuacaggcgaugacaaaaacgcuaccgccucuuucaucuacaauggccggcugguugauuccguggucagcuggucuaaggagauucuucgcacccaggaauccgagugugugugcaucaacgggacauguacgguggucaugaccgacggaagcgcuuccggcaaagccgauacaaagauucuguuuaucgaggaagggaagaucguucauaccucuacacucagcggauccgcgcaacacguggaggaaugcagcugcuauccuagauaccccggcgugcggugugucugccgcgacaacuggaaagggucuaauagaccuauuguggauaucaacauuaaggaccacuccaucguuagcucuuacguguguagcggacuggucggcgacacgccccggaaaaaugauuccucuagcuccagccauugccuugacccgaacaaugaggaaggcgggcacggagugaagggcugggccuucgaugacggggaugacguuuggaugggacgcaccauuucugagaaauccagacugggcuaugagacauuuaaggugaucgaaggguggagcaacccuaaaucuaagcuccagaucaaucggcaggucauuguggaucgcggaaacagauccggcuacagcggcaucuucuccgucgaggggaagucuuguauuaaucggugcuuuuauguggaacugaucagaggacgcaaagaggaaaccgacguucuguggaccagcaacuccauuguggucuucuguggcacaucugggaccuacggaacaggcagcuggcccgauggggcugacaucaaucucaugccuauuuga

SEQ ID NO: 217946 - RNA, 1410 nt, Artificial Sequence
  derived and/or modified CDS sequence (opt5) from neuraminidase__InfluenzaA__AJJ98779
augaaccccaaucagaagaucauuaccaucggcagcgugucccugacaauuucuacgaucugcuucuuuaugcaaaccgccauucucaucacaaccgucacacugcacuucaaacaguacgaguuuaacagcccuccgaauaaccagguuaugcuuugugaacccaccaucauugagagaaauaucacagaaauuguguaucugaccaacacgaccaucgagaaggaaauuugcccuaaacccgcugaguaccggaauugguccaagccucagugugacaucacaggguucgcccccuuuucuaaagauaacagcauucgccucuccgcgggaggcgacaucugggugaccagagagccuuaugucucuugcgauccggacaaguguuaccaauucgcucuggggcagggaacaacccuuaauaacgugcauagcaaugauacgguucgggaccgcacacccuauagaacccugcucaugaacgaacugggcgugccuuuucaccuggggacaaagcaggucugcaucgccugguccagcagcuccugucaugauggaaaagccuggcuccacgugugcauuaccggcgacgauaagaaugcuaccgccagcuucaucuacaacggccggcugguugacucuauuguguccuggacaaaagagauccuucgcacgcaggaaagcgagugugucugcauuaaugggaccuguacaguggugaugaccgauggaucugcuuccggcaaggccgacacaaaaauccuguuuaucgaggaagggaagauuguccauaccagcacgcucuccggaucugcgcaacacguugaggaaugcagcugcuaucccagauacccuggcgugcggugugugugccgcgauaacuggaagggguccaacagacccaucgucgacauuaauaucaaagaccacagcauugugucuuccuacguuuguagcggacuggugggcgauacaccgcggaagaacgacucuagcuccucuagccauugccuugauccuaauaacgaggaaggcgggcacggagucaaaggcugggccuucgacgaugggaaugacguguggaugggacgcaccaucuccgagaagucuagacugggcuaugagaccuuuaaaguuaucgaaggguggucuaaccccaaguccaaacuccagauuaaucgccaggugaucgucgaucggggaaacagaagcggcuacucuggcauuuucuccguggagggaaagagcuguaucaaucggugcuuuuaugucgaacugauuagagggcgcaaggaggaaacagaggugcuguggaccuccaacucuaucguuguguucuguggcacaagcgggacguacggaaccggcuccuggccugacggggcugauauuaaucucaugcccaucuga

SEQ ID NO: 217947 - RNA, 1410 nt, Artificial Sequence; identical to SEQ ID NO: 214218
  derived and/or modified CDS sequence (opt5) from neuraminidase__InfluenzaA__AJJ98791

SEQ ID NO: 217948 - RNA, 1410 nt, Artificial Sequence
  derived and/or modified CDS sequence (opt5) from neuraminidase__InfluenzaA__AJJ98803
augaaccccaaucagaagaucauuaccaucggcagcgugucccugacaauuucuacgaucugcuucuuuaugcaaauugccauccucaucaccacagucacccugcacuucaaacaguacgaguuuaacagcccuccgaauaaccagguuaugcuuugugaacccacaauuaucgagagaaauauuaccgaaaucguguaucugacaaacaccacgauugagaaggaaaucugcccuaaacccgcugaguaccggaauugguccaagccucagugugggauuaccggauucgcccccuuuucuaaagacaacagcauccgccucuccgcgggcggggauaucugggugacaagagagccuuaugucucuugcgacccggauaaguguuaccaauucgcucugggacagggcaccacacuuaauaacgugcauagcaauaacaagguucgggaccgcacccccuauagaacgcugcucaugaaugaacugggggugccuuuucaccugggaacaaaacaggucugcauugccugguccucuagcuccugucaugauggcaaggccuggcuccacgugugcaucaccggcgacgauaaaaacgcuacagccagcuucauuuacaaugggcggcugguugacucuguggucuccuggagcaaggagauccuucgcacccaggaaucugagugugugugcauuaacggaaccuguacaguggucaugacggauggcuccgcuagcgggaaagccgacaccaagauccuguuuaucgaggaaggaaagauuguucauacauccacccucucuggcagcgcgcaacacguggaggaaugcuccugcuaucccagauacccuggggugcggugugucugccgcgauaacuggaaaggaagcaauagacccaucguggacauuaacaucaaggaucacucuauuguuuccagcuacguguguucuggccuggucggcgacacaccgcggaaaaaugacagcuccucuagcucccauugccuugauccuaacaaugaggaagggggacacggcgugaaggggugggccuucgacgauggaaacgacguuuggaugggccgcaccaucaaugagacgagcagacugggguaugagacauuuaaagugaucgaaggauggucuaaccccaaguccaaacuccagauuaaucggcaggucaucguggaucgcggcgacagaagcggcuacucugggauuuucuccgucgagggaaagagcuguaucaaccggugcuuuuauguggaacugauuagaggccgcaaggaggaaaccgagguucuguggaccuccaauucuaucguggucuucugugggacaagcggaaccuacggcacaggguccuggccugauggcgcugaccucaaccugaugcccauuuga

SEQ ID NO: 217949 - RNA, 1410 nt, Artificial Sequence; identical to SEQ ID NO: 214218
  derived and/or modified CDS sequence (opt5) from neuraminidase__InfluenzaA__AJJ98815

SEQ ID NO: 217950 - RNA, 1410 nt, Artificial Sequence
  derived and/or modified CDS sequence (opt5) from neuraminidase__InfluenzaA__AJJ98827
augaaccccaaucagaagaucauuaccaucggcagcgugucccugacaauuucuacgaucugcuucuuuaugcaaauugccauccucaucaccacagucacccugcacuucaaacaguacgaguuuaacagcccuccgaauaaccagguuaugcuuugugaacccacaauuaucgagagaaauauuaccgaaaucguguaucugacaaacaccacgauugagaaggaaaucugcccuaaacccgcugaguaccggaauugguccaagccucagugugggauuaccggauucgcccccuuuucuaaagacaacagcauccgccucuccgcgggcggggauaucugggugacaagagagccuuaugucucuugcgacccggauaaguguuaccaauucgcucugggacagggcaccacacuuaauaacgugcauagcaauaacaccguucgggaccgcacgcccuauagaacacugcucaugaaugaacugggggugccuuuucaccugggaaccaagcaggucugcauugccugguccucuagcuccugucaugauggcaaagccuggcuccacgugugcaucacaggcgacgauaagaacgcuaccgccagcuucauuuacaaugggcggcugguugacucuguggucuccuggagcaaagagauccuucgcacccaggaaucugagugugugugcauuaacggaacauguacgguggucaugaccgauggcuccgcuagcgggaaggccgacacaaaaauccuguuuaucgaggaaggaaagauuguucauaccuccacacucucuggcagcgcgcaacacguggaggaaugcuccugcuaucccagauacccuggggugcggugugucugccgcgauaacuggaagggaagcaauagacccaucguggacauuaacaucaaagaucacaauauuguuucuuccuacguguguagcggccuggucggcgacaccccgcggaagaacgacucuagcuccucuagccauugccuugauccuaauaacgaggaagggggacacggcgugaaagggugggccuucgacgauggaaaugacguuuggaugggccgcacgaucaacgagacauccagacugggguaugagaccuuuaaggugaucgaaggauggagcaaucccaaaucuaagcuccagauuaaccggcaggucaucguggaucgcggcgacagauccggcuacagcgggauuuucucugucgagggaaaauccuguaucaaucggugcuuuuauguggaacugauuagaggccgcaaggaggaaaccgagguucuguggacaagcaacuccaucguggucuucugugggaccucuggaacauacggcacggggagcuggccugauggcgcugaccucaaucugaugcccauuuga

SEQ ID NO: 217951 - RNA, 1410 nt, Artificial Sequence; identical to SEQ ID NO: 213215
  derived and/or modified CDS sequence (opt5) from neuraminidase__InfluenzaA__AJJ98839

SEQ ID NO: 217952 - RNA, 1410 nt, Artificial Sequence; identical to SEQ ID NO: 211590
  derived and/or modified CDS sequence (opt5) from neuraminidase__InfluenzaA__AJJ98851

SEQ ID NO: 217953 - RNA, 1410 nt, Artificial Sequence
  derived and/or modified CDS sequence (opt5) from neuraminidase__InfluenzaA__AJJ98863
augaaccccaaucagaagaucauuaccaucggcagcgugucccugacaauuucuacgaucugcuucuuuaugcaaauugccauccucaucaccacagucacccugcacuucaaacaguacgaguuuaacagcccuccgaauaaccagguuaugcuuugugaacccacaauuaucgagagaaauauuaccgaaaucguguaucugacaaacaccacgauugagaaggaaaucugcccuaaacccgcugaguaccggaauugguccaagccucagugugacauuaccggguucgcccccuuuucuaaagauaacagcauccgccucuccgcgggaggcgacaucugggugacaagagagccuuaugucucuugcgauccggacaaguguuaccaauucgcucuggggcagggaaccacacuuaauaacgugcauagcaauaacaccguucgggaacgcacgcccuauagaacacugcucaugaaugagcugggcgugccuuuucaccuggggaccaagcaggucugcauugccugguccucuagcuccugucaugauggaaaagccuggcuccacgugugcaucacaggcgacgauaagaacgcuaccgccagcuucauuuacaauggccggcugguugacucuguggucuccuggagcaaagaaauccuucgcacccaggagucugaguguauuugcaucaacgggacauguacgguggugaugaccgauggauccgcuagcggcaaggccgacacaaaaauccuguuuauugaagaggggaagaucguccauaccuccacacucucuggaagcgcgcaacacguugaagagugcuccugcuaucccagauacccuggcgugcggugugugugccgcgauaacuggaaggggagcaauagacccauugucgacaucaacaugaaagaucacucuauuguguccagcuacguuuguucuggacuggugggcgacaccccgcggaagaaugacagcuccucuagcucccauugccuugauccuaacaaugaagagggcgggcacggagucaaaggcugggccuucgacgaugggaacgacguguggaugggacgcacgaucagcgagaagucuagacugggcuaugaaacauuuaaaguuaucgaggggugguccaaucccaagagcaaacuccagauuaaccgccaggugaucgucgaucggggaaauagaucuggcuacuccggcauuuucagcguggaagggaaguccuguaucaaccggugcuuuuaugucgagcugauuagaggacgcaaggaagagaccgaggugcuguggaccucuaauagcaucguuguguucuguggcacauccgggaccuacggaacaggcucuuggccugacggggcugauauuaaccucaugcccaucuga

SEQ ID NO: 217954 - RNA, 1410 nt, Artificial Sequence
  derived and/or modified CDS sequence (opt5) from neuraminidase__InfluenzaA__AJJ98875
augaaccccaaucagaagaucauuaccaucggcagcgugucccugacaauuucuacgaucugcuucuuuaugcaaauugccauccucaucaccacagucacccugcacuucaaacaguacgaguuuaacagcccuccgaauaaccagguuaugcuuugugaacccacaauuaucgagagaaauauuaccgaaaucguguaucugacaaacaccacgauugagaaggaaaucugcccuaaacccgcugaguaccggaauugguccaagccucagugugacauuaccggguucgcccccuuuucuaaagauaacagcauccgccucuccgcgggaggcgacaucugggugacaagagagccuuaugucucuugcgauccggacaaguguuaccaauucgcucuggggcagggaaccacacuuaauaacgugcauagcaaugauaccguucggaaccgcacgcccuauagaacacugcucaugaaugaacugggcgugccuuuucaccuggggaccaagcaggucugcauugccugguccucuagcuccugucaugacggaaaagccuggcuccacgugugcaucacaggcgaugacaagaacgcuaccgccagcuucauuuacaauggccggcugguugauucuguggucuccuggagcaaagagauccuucgcacccaggaaucugagugugugugcauuaacgggacauguacgguggucaugaccgacggauccgcuagcggcaaggccgauacaaaaauccuguuuaucgaggaagggaagauuguucauaccuccacacucucuggaagcgcgcaacacguggaggaaugcuccugcuaucccagauacccuggcgugcggugugucugccgcgacaacuggaaggggagcaauagacccaucguggauauuaacaucaaagaccacucuauuguuuccagcuacguguguucuggacuggucggcgacaccccgcggaagaaugauagcuccucuagcucccauugccuugacccuaacaaugaggaaggcgggcacggagugaaaggcugggccuucgaugacgggaacgauguuuggaugggacgcacgaucagcgagaagucuagacugggcuaugagacauuuaaagugaucgaagggugguccaaucccaagagcaaacuccagauuaaccggcaggucaucguggaccgcggaaauagaucuggcuacuccggcauuuucagcgucgaggggaaguccuguaucaaccggugcuuuuauguggaacugauuagaggacgcaaggaggaaaccgagguucuguggaccucuaauagcaucguggucuucuguggcacauccgggaccuacggaacaggcucuuggccugauggggcugacauuaaccucaugcccaucuga

SEQ ID NO: 217955 - RNA, 1410 nt, Artificial Sequence
  derived and/or modified CDS sequence (opt5) from neuraminidase__InfluenzaA__AJJ98887
augaaccccaaucagaagaucauuaccaucggcagcgugucccugacaauuucuacgaucugcuucuuuaugcaaauugccauccucaucaccacagucacccugcacuucaaacaguacgaguuuaacagcccuccgaauaaccagguuaugcuuugugaacccacaauuaucgagagaaauauuaccgaaaucguguaucugacaaacaccacgauugagaaggaaaucugcccuaaacucgcugaguaccggaauugguccaagccccagugugacauuaccggguucgccccuuuuucuaaagauaacagcauccgccuguccgcgggaggcgacaucugggugacaagagagcccuaugucucuugcgauccugacaaguguuaccaauucgcucuugggcagggaaccacacugaauaacgugcauagcaauaacaccguucggaaucgcacgccguauagaacacuccugaugaacgaacugggcgugcccuuucaccucgggaccaagcaggucugcauugccugguccucuagcuccugucaugauggaaaagccuggcugcacgugugcaucacaggcgacgauaagaaugcuaccgccagcuucauuuacaacggccggcuuguugacucuaucguguccuggagcaaagagauucugcgcacccaggaaucugagugugucugcaucaacgggacauguacgguggugaugaccgauggauccgcuagcggcaaggccgacacaaaaauccucuuuauugaggaagggaagaucguccauaccuccacacugucuggaagcgcgcaacacguugaggaaugcuccugcuauccuagauaccccggcgugcggugugugugccgcgauaauuggaaggggagcaacagaccuauugucgacaucaauauuaaagaucacucuaucguguccagcuacguuuguucuggacuugugggcgacacgccccggaagaacgacagcuccucuagcucccauugccuggauccgaauaacgaggaaggcgggcacggagucaaaggcugggccuucgacgaugggaaugacguguggaugggacgcaccaucagcgagaagucuagacucggcuaugagacauuuaaaguuauugaagggugguccaacccuaagagcaaacugcagaucaaucgccaggugauugucgaucggggaaacagaucuggcuacuccggcaucuucagcguggaggggaaguccuguauuaaucggugcuuuuaugucgaacugaucagaggacgcaaggaggaaaccgacgugcucuggaccucuaacagcauuguuguguucuguggcacauccgggaccuacggaacaggcucuuggcccgauggggcugacaucaaucugaugccuaucuga

SEQ ID NO: 217956 - RNA, 1410 nt, Artificial Sequence
  derived and/or modified CDS sequence (opt5) from neuraminidase__InfluenzaA__AJJ98899
augaaccccaaucagaagaucauuaccaucggcagcgugucccugacaauuucuacgaucugcuucuuuaugcaaaccgccauucucaucacaaccgucacacugcacuucaaacaguacgaguuuaacagcccuccgaauaaccagguuaugcuuugugaacccaccaucauugagagaaauaucacagaaauuguguaucugaccaacacgaccaucgagaaggaaauuugcccuaaacucgcugaguaccggaauugguccaagccccagugugacaucacaggguucgccccuuuuucuaaagauaacagcauucgccuguccgcgggaggcgacaucugggugaccagagagcccuaugucucuugcgauccugacaaguguuaccaauucgcucuugggcagggaacaacccugaauaacgugcauagcaauaacacgguucggaaucgcacaccguauagaacccuccugaugaacgaacugggcgugcccuuucaccucgggacaaagcaggucugcaucgccugguccucuagcuccugucaugauggaaaagccuggcugcacgugugcauuaccggcgacgauaagaaugcuaccgccagcuucaucuacaacggccggcuuguugacucuauuguguccuggagcaaagagauccugcgcacacaggaaucugagugugucugcauuaacgggacguguaccguggugaugacagauggauccgcuagcggcaaggccgacaccaaaauccucuuuaucgaggaagggaagauuguccauacauccacccugucuggaagcgcgcaacacguugaggaaugcuccugcuauccuagauaccccggcgugcggugugugugccgcgauaauuggaaggggagcaacagaccuaucgucgacauuaauaucaaagaucacucuauuguguccagcuacguuuguucuggacuugugggcgacacgccccggaagaacgacagcuccucuagcucccauugccuggauccgaauaacgaggaaggcgggcacggagucaaaggcugggccuucgacgaugggaaugacguguggaugggacgcacaaucagcgagaagucuagacucggcuaugagaccuuuaaaguuaucgaagggugguccaacccuaagagcaaacugcagauuaaucgccaggugaucgucgaucggggaaacagaucuggcuacuccggcauuuucagcguggaggggaaguccuguaucaaucggugcuuuuaugucgaacugauuagaggacgcaaggaggaaaccgaggugcucuggacaucuaacagcaucguuguguucuguggcaccuccgggacauacggaacgggcucuuggcccgacggggcugauauuaaucugaugccuaucuga

SEQ ID NO: 217957 - RNA, 1410 nt, Artificial Sequence; identical to SEQ ID NO: 214218
  derived and/or modified CDS sequence (opt5) from neuraminidase__InfluenzaA__AJJ98911

SEQ ID NO: 217958 - RNA, 1410 nt, Artificial Sequence; identical to SEQ ID NO: 214994
  derived and/or modified CDS sequence (opt5) from neuraminidase__InfluenzaA__AJJ98923

SEQ ID NO: 217959 - RNA, 1410 nt, Artificial Sequence
  derived and/or modified CDS sequence (opt5) from neuraminidase__InfluenzaA__AJJ98935
augaaccccaaucagaagaucauuaccaucggcagcgugucccugacaauuucuacgaucugcuucuuuaugcaaauugccauccucaucaccacagucacccugcacuucaaaagauacgaguuuaacagcccuccgaauaaccagguuaugcuuugugaacccacaauuaucgagcggaauauuaccgaaaucguguaucugacaaacaccacgauugagaaggaaaucugcccuaaacccgcugaguaccgcaauugguccaagccucagugugggauuaccggauucgcccccuuuucuaaagacaacagcaucagacucuccgcgggcggggauaucugggugacacgggagccuuaugucucuugcgacccggauaaguguuaccaguucgcucugggacaaggcaccacacuuaauaacgugcauagcaauaacaccguucgcgacagaacgcccuaucggacacugcucaugaaugaacugggggugccuuuucaccugggaaccaagcaggucugcauugccugguccucuagcuccugucaugauggcaaagccuggcuccacgugugcaucacaggcgacgauaagaacgcuaccgccagcuucauuuacaaugggcgccugguugacucuguggucuccuggagcaaagagauccuuagaacccaggaaucugagugugugugcauuaacggaacauguacgguggucaugaccgauggcuccgcuagcgggaaggccgacacaaaaauccuguuuaucgaggaaggaaagauuguucauaccuccacacucucuggcagcgcgcagcacguggaggaaugcuccugcuauccccgguacccuggggugcgcugugucugcagagauaacuggaagggaagcaaucggcccaucguggacauuaacaucaaagaucacucuauuguuuccagcuacguguguucuggccuggucggcgacaccccgcgcaagaaugacagcuccucuagcucccauugccuugauccuaacaaugaggaagggggacacggcgugaaagggugggccuucgacgauggaaacgacguuuggaugggcagaacgaucaaugagacaagccggcugggguaugagaccuuuaaggugaucgaaggauggucuaaccccaaauccaagcuccaaauuaaucgccaggucaucguggauagaggcgaccggagcggcuacucugggauuuucuccgucgagggaaaaagcuguaucaacagaugcuuuuauguggaacugauucgcggccggaaggaggaaaccgagguucuguggacauccaauucuaucguggucuucugugggaccagcggaacauacggcacgggguccuggccugauggcgcugaccucaaccugaugcccauuuga

SEQ ID NO: 217960 - RNA, 1410 nt, Artificial Sequence
  derived and/or modified CDS sequence (opt5) from neuraminidase__InfluenzaA__AJJ98947
augaaccccaaucagaagaucauuaccaucggcagcgugucccugacaauuucuacgaucugcuucuuuaugcaaauugccauccucaucaccacagucacccugcacuucaaacaguacgaguuuaacagcccuccgaauaaccagguuacacuuugugaacccaccauuaucgagagaaauauuacagaaaucguguaucugaccaacacgaccauugagaaggaaaucugcccuaaacucgcugaguaccggaauugguccaagccccagugugacauuacaggguucgccccuuuuucuaaagauaacagcauccgccuguccgcgggaggcgacaucugggugaccagagagcccuaugucucuugcgauccugacaaguguuaccaauucgcucuugggcagggaacaacccugaauaacgugcauagcaauaacacgguucgggaucgcacaccguauagaacccuccugaugaaugaacugggcgugcccuuucaccucgggacaaagcaggucugcauugccugguccucuagcuccugucaugacggaaaagccuggcugcacgugugcaucaccggcaacgauaagaaugcuaccgccagcuucauuuacaacggccggcuuguugacucuguggucuccuggagcaaagagauccugcgcacacaggaaucugagugugugugcauuaacgggacguguaccguggucaugacagauggauccgcuagcggcaaggccgacaccaaaauccucuuuaucgaggaagggaagauuguucauacauccacccugucuggaagcgcgcaacacguggaggaaugcuccugcuauccuagauaccccggcgugcggugugucugccgcgauaauuggaaggggagcaacagaccuaucguggacauuaauaucaaagaucacucuauuguuuccagcuacguguguucuggacuugucggcgacacgccccggaagaacgacagcuccucuagcucccauugccuggauccgaauaacgaggaaggcgggcacggagugaaaggcugggccuucgacgaugggaaugacguuuggaugggacgcacaaucaacgagaccagcagacucggcuaugagaccuuuaaggugaucgaaggguggucuaauccuaaauccaagcugcagauuaaccggcaggucaucguggaucgcggaaauagaagcggcuacucuggcauuuucuccgucgaggggaaaagcuguaucaaccggugcuuuuauguggaacugauuagaggacgcaaggaggaaacagagguucucuggaccuccaauucuaucguggucuucuguggcacaagcgggacguacggaaccggcuccuggcccgacggggcugaucugaaccuuaugccuauuuga

SEQ ID NO: 217961 - RNA, 1410 nt, Artificial Sequence
  derived and/or modified CDS sequence (opt5) from neuraminidase__InfluenzaA__AJJ98971
augaaccccaaucagaagaucauuaccaucggcagcgugucccugacaauuucuacgaucugcuucuuuaugcaaauugccauccucaucaccacagucacccugcacuucaaacaguacgaguuuaacagcccuccgaauaaccagguuaugcuuugugaacccacaauuaucgagagaaauauuaccgaaaucguguaucugacaaacaccacgauugagaaggaaaucugcccuaaacucgcugaguaccggaauugguccaagccccagugugacauuaccggguucgccccuuuuucuaaagauaacagcauccgccuguccgcgggaggcgacaucugggugacaagagagcccuaugucucuugcgauccugacaaguguuaccaauucgcucuugggcagggaaccacacugaauaacgugcauagcaaugauaccguucggaaccgcacgccguauagaacacuccugaugaaugaacugggcgugcccuuucaccucgggaccaagcaggucugcauugccugguccucuagcuccugucaugacggaaaagccuggcugcacgugugcaucacaggcgaugacaagaacgcuaccgccagcuucauuuacaauggccggcuuguugauucuguggucuccuggagcaaagagauccugcgcacccaggaaucugagugugugugcauuaacgggacauguacgguggucaugaccgacggauccgcuagcggcaaggccgauacaaaaauccucuuuaucgaggaagggaagauuguucauaccuccacacugucuggaagcgcgcaacacguggaggaaugcuccugcuauccuagauaccccggcgugcggugugucugccgcgacaacuggaaggggagcaauagaccuaucguggauauuaacaucaaagaccacucuauuguuuccagcuacguguguucuggacuugucggcgacacgccccggaagaaugauagcuccucuagcucccauugccuggacccgaacaaugaggaaggcgggcacggagugaaaggcugggccuucgaugacgggaacgauguuuggaugggacgcaccaucagcgagaagucuagacucggcuaugagacauuuaaagugaucgaagggugguccaauccuaagagcaaacugcagauuaaccggcaggucaucguggaccgcggaaauagaucuggcuacuccggcauuuucagcgucgaggggaaguccuguaucaaccggugcuuuuauguggaacugauuagaggacgcaaggaggaaaccgagguucucuggaccucuaauagcaucguggucuucuguggcacauccgggaccuacggaacaggcucuuggcccgauggggcugacauuaaccugaugccuaucuga

SEQ ID NO: 217962 - RNA, 1410 nt, Artificial Sequence
  derived and/or modified CDS sequence (opt5) from neuraminidase__InfluenzaA__AJJ98995
augaaccccaaucagaagaucauuaccaucggcagcgugucccugacaauuucuacgaucugcuucuuuaugcaaauugccauccucaucaccacagucacccugcacuucaaacaguacgaguuuaacagcccuccgaauaaccagguuaugcuuugugaacccacaauuaucgagagaaauaugaccgaaauuguguaucugacaaacaccacgaucgagaaggaaauuugcccuaaacccgcugaguaccggaauugguccaagccucagugugacaucaccggguucgcccccuuuucuaaagauaacagcauucgccucuccgcgggaggcgacaucugggugacaagagagccuuaugucucuugcgauccggacaaguguuaccaauucgcucuggggcagggaaccacacuuaauaacgugcauagcaauaacaucguucgggaucgcacccccuauagaacgcugcucaugaaugaacugggcgugccuuuucaccuggggacaaagcaggucugcauugccugguccucuagcuccugucaugacggaaaagccuggcuccacgugugcaucaccggcgaugacaagaacgcuacagccagcuucauuuacaauggccggcugguugauucuguggucuccuggagcaaagagauccuucgcacccaggaaucugagugugugugcauuaacgggaccuguacaguggucaugacggacggauccgcuagcggcaaggccgauaccaaaauccuguuuaucgaggaagggaagauuguucauacauccacccucucuggaagcgcgcaacacguggaggaaugcuccugcuaucccagauacccuggcgugcggugugucugccgcgacaacuggaaggggagcaauagacccaucguggauauuaacaucaaagaccacucuauuguuuccagcuacguguguucuggacuggucggcgacacaccgcggaagaaugauagcuccucuagcucccauugccuugacccuaacaaugaggaaggcgggcacggagugaaaggcugggccuucgaugacgggaacgauguuuggaugggacgcaccaucaaugagacgagcagacugggcuaugagacauuuaaggugaucgaaggguggucuaaccccaaauccaagcuccagauuaaucggcaggucaucguggaccgcagcgauagaucuggauacuccggcauuuucagcgucgagggcaaauccuguaucaaccggugcuuuuauguggaacugauuagagggcgcaaggaggaaaccgagguucuguggaccucuaauagcaucguggucuucuguggaacauccggcaccuacgggacaggaucuuggccugacggcgcugaucucaaccugaugcccauuuga

SEQ ID NO: 217963 - RNA, 1410 nt, Artificial Sequence; identical to SEQ ID NO: 213215
  derived and/or modified CDS sequence (opt5) from neuraminidase__InfluenzaA__AJJ99007

SEQ ID NO: 217964 - RNA, 1410 nt, Artificial Sequence
  derived and/or modified CDS sequence (opt5) from neuraminidase__InfluenzaA__AJJ99019
augaaccccaaucagaagaucauuaccaucggcagcgugucccugacaauuucuacgaucugcuucuuuaugcaaaccgccauucucaucacaaccgucacacugcacuucaaacagugugaguuuaacagcccuccgaauaaccagguuaugcuuugcgaacccaccaucauugagagaaauaucacagaaauuguguaccugaccaacacgaccaucgagaaggaaauuuguccuaaacucgcugaguaucggaauugguccaagccccagugcgacaucacaggguucgccccuuuuucuaaagauaacagcauucgccuguccgcgggaggcgacaucugggugaccagagagcccuacgucucuugugauccugacaagugcuaucaauucgcucuugggcagggaacaacccugaauaacgugcauagcaauaacacgguucgggaucgcacaccguacagaacccuccugaugaaugaacugggcgugcccuuucaccucgggacaaagcaggucuguaucgccugguccagcagcuccugccaugacggaaaagccuggcugcacguguguauuaccggcgaugacaagaacgcuaccgccagcuucaucuauaauggccggcuuguugauucuguggucuccuggagcaaagagauucugcgcacacaggaaucugagugcguguguaucaacgggacgugcaccguggucaugacagacggauccgcuagcggcaaggccgauaccaaaauucucuuuaucgaggaagggaagaucguucauacauccacccugucuggaagcgcgcaacacguggaggaaugcuccuguuacccuagauaucccggcgugcggugcgucugucgcgacaacuggaaggggagcaauagaccuauuguggauaucaacauuaaagaccacucuaucguuuccaauuacgugugcagcggacuugucggcgacacgccccggaagaacgauucuagcuccucuagccauugucuggacccgaauaacgaggaaggcgggcacggagugaaaggcugggccuucgaugacgggaaugauguuuggaugggacgcacaauuuccgagaagucuagauuuggcuacgagaccuucaaagugaucgaaggguggucuaacccuaaguccaaacuccagaucaaucggcaggucauuguggaccgcggaaacagaagcggcuauucuggcaucuuuuccgucgagggaaagagcugcauuaaucgguguuucuacguggaacugaucagagggcgcaaggaggaaaccgagguucuguggacauccaacucuauuguggucuucugcggcaccagcgggacauauggaacgggcuccuggcccgauggggcugacaucaaucucaugccuauuuga

SEQ ID NO: 217965 - RNA, 1410 nt, Artificial Sequence
  derived and/or modified CDS sequence (opt5) from neuraminidase__InfluenzaA__AJJ99031
augaaccccaaucagaagaucauuaccaucggcagcgugucccugacaauuucuacgaucugcuucuuuaugcaaauugccauccucaucaccacagucacccugcacuucaaacaguacgaguuuaacagcccuccgaauaaccagguuaugcuuugugaacccacaauuaucgagagaaauauuaccgaaaucguguaucugacaaacaccacgauugagaaggaaaucugcccuaaacucgcugaguaccggaauugguccaagccccagugugacauuaccggguucgccccuuuuucuaaagauaacagcauccgccuguccgcgggaggcgacaucugggugacaagagagcccuaugucucuugcgauccugacaaguguuaccaauucgcucuugggcagggaaccacaauuaauaacgugcauagcaaugauaccguucgggaccgcacgccguauagaacacugcucaugaacgaacugggcgugcccuuucaccuggggaccaagcaggucugcaucgccugguccucuagcuccugucaugauggaaaagccuggcuccacgugugcauuacaggcgacgauaagaaugcuaccgccagcuucaucuacaacggccggcugguugacucuguggucuccuggagcaaagagauucuucgcacccaggaaucugagugugugugcaucaaugggacauguacgguggucaugaccgauggauccgcuagcggcaaggccgacacaaaaauccuguuuauugaggaagggaagaucguucauaccuccacacucucuggaagcgcgcaacacguggaggaaugcuccugcuauccuagauaccccggcgugcggugugucugccgcgauaacuggaaggggagcaacagaccuauuguggacaucaauauuaaagaccacucuaucguuuccagcuacguguguucuggacuggucggcgauacgccccggaagaacgacagcuccucuagcucccauugccuugauccgaauaacgaggaaggcgggcacggagugaaaggcugggccuucgacgaugggaaugacguuuggaugggacgcaccaucagcgagaagucuagacugggcuaugagacauuuaaagugauugaagggugguccaacccuaagagcaaacuccagaucaaucggcaggucauuguggaucgcggaaacagaucuggcuacuccggcaucuucagcgucgaggggaaguccuguauuaaucggugcuuuuauguggaacugaucagaggacgcaaggaggaaaccgagguucuguggaccucuaacagcauuguggucuucuguggcacauccgggaccuacggaacaggcucuuggcccgacggggcugauaucaaucucaugccuaucuga

SEQ ID NO: 217966 - RNA, 1410 nt, Artificial Sequence
  derived and/or modified CDS sequence (opt5) from neuraminidase__InfluenzaA__AJJ99043
augaaccccaaucagaagaucauuaccaucggcagcgugucccugacaauuucuacgaucugcuucuuuaugcaaauugccauccucaucaccacagucacccugcacuucaaacaguacgaguuuaacagcccuccgaauaaccagguuaugcuuugugaacccacaauuaucgagagaaauauuaccgaaaucguguaucugacaaacaccacgauugagaaggaaaucugcccuaaacucgcugaguaccggaagugguccaaaccccaguguaauauuaccggguucgccccuuuuucuaaggacaacagcauccgccuguccgcgggaggcgauaucugggugacaagagagcccuaugucucuugcgacccugauaaguguuaccaauucgcucuugggcagggaaccacacugaauaacgugcauagcaaugacaccguucgggaucgcacgccguauagaacacuccugaugaacgaacugggcgugcccuuucaccucgggaccaaacaggucugcauugccugguccagcagcuccugucaugacggaaaggccuggcugcacgugugcguuacaggcgaugacaaaaaugcuaccgccagcuucaucuacaacggccggcuuguggauucuauugucuccuggagcaaggagauccugcgcacccaggaaucugagugugugugcauuaaugggacauguacgguggucaugaccgacggauccgcuagcggcaaagccgauacaaagauccucuuuaucgaggaagggaagauuguucauaccuccacacugucuggaagcgcgcaacacguggaggaaugcuccugcuauccuagauaccccggcgugcggugugucugccgcgacaacuggagagggagcaaccggccuaucguggauauuaauaugaaagacuacucuaucguuuccagcuauguguguucuggacuugucggcgacacgccccgcaagaacgauagcuccucuagcggccacugccuggacccgaauaacgaggaagggggacauggcgugaaagggugggccuucgaugacggaaaugauguuuggaugggcagaaccauuuccgagaagucucggucuggguacgagacauuuaaagugaucgaaggaugguccaacccuaauagcaagcuccagaucaaccgccaggucauuguggacagaggcaaucggucuggcuauuccgggaucuucagcgucgagggaaaauccuguauuaacagaugcuuuuacguggaacugauccgcggccggaaggaggaaaccgagguucuguggaccucuaauagcauuguggucuucugugggacauccggaaccuauggcacagggucuuggcccgauggcgcugacaucaaccucaugccuauuuga

SEQ ID NO: 217967 - RNA, 1410 nt, Artificial Sequence
  derived and/or modified CDS sequence (opt5) from neuraminidase__InfluenzaA__AJJ99067
augaaccccaaucagaagaucauuaccaucggcagcgugucccugacaauuucuacgaucugcuucuuuaugcaaauugccauccucaucaccacagucacccugcacuucaaacaguacgaguuuaacagcccuccgaauaaccagguuaugcuuugugaacccacaauuaucgagagaaauauuaccgaaaucguguaucugacaaacaccacgauugagaaggaaaucugcccuaaacccgcugaguaccggaauugguccaagccucagugugggauuaccggauucgcccccuuuucuaaagacaacagcauccgccucuccgcgggcggggauaucugggugacaagagagccuuaugucucuugcgacccggauaaguguuaccaauucgcucugggacagggcaccacacuuaauaacgugcauagcaauaacaccguucgggggcgcacgcccuauagaacacugcucaugaaugaacugggagugccuuuucaccugggcaccaagcaggucugcauugccugguccucuagcuccugucaugacggcaaagccuggcuccacgugugcaucacaggggaugacaagaacgcuaccgccagcuucauuuacaauggacggcugguugauucuguggucuccuggagcaaagacauccuucgcacccaggagucugaaugugugugcauuaacggcacauguacgguggucaugaccgauggguccgcuagcggaaaggccgacacaaaaauccuguuuaucgaggagggcaagauuguucauaccuccacacucucugggagcgcgcaacacguggaagagugcuccugcuaucccagauacccuggagugcggugugucugccgcgauaacuggaagggcagcaauagacccaucguggacauuaacaucaaagaucacucuauuguuuccagcuacguguguucuggccuggucggggacaccccgcggaagaaugacagcuccucuagcucccauugccuugauccuaacaaugaagagggaggccacggggugaaaggaugggccuucgacgauggcaacgacguuuggauggggcgcacgaucaaugaaacaagcagacugggauaugagaccuuuaaggugaucgagggcuggucuaaccccaaauccaagcuccagauuaaucggcaggucaucguggaucgcggcgacagaagcggguacucuggaauuuucuccgucgaaggcaaaagcuguaucaaccggugcuuuuauguggagcugauuagagggcgcaaggaagagaccgaaguucuguggacauccaauucuaucguggucuucuguggaaccagcggcacauacgggacgggcuccuggccugauggagcugaccucaaccugaugcccauuuga

SEQ ID NO: 217968 - RNA, 1410 nt, Artificial Sequence
  derived and/or modified CDS sequence (opt5) from neuraminidase__InfluenzaA__AJJ99079
augaaccccaaucagaagaucauuaccaucggcagcgugucccugacaauuucuacgaucugcuucuuuaugcaaauugccauccucaucaccacagucacccugcacuucaaacaguacgaguuuaacagcccuccgaauaaccagguuaugcuuugugaacccacaauuaucgagagaaauauuaccgaaaucguguaucugacaaacaccacgauugagaaggaaaucugcccuaaacccgcugaguaccggaauugguccaagccucagugugggauuaccggauucgcccccuuuucuaaagacaacagcauccgccucuccgcgggcggggauaucugggugacaagagagccuuaugucucuugcgacccggauaaguguuaccaauucgcucugggacagggcaccacacuuaauaacgugcauagcaauaacaccguucggaaucgcacgcccuauagaacacugcucaugaacgaacugggggugccuuuucaccugggaaccaagcaggucugcauugccugguccucuagcuccugucaugacggcaaagccuggcuccacgugugcaucacaggcgaugacaagaaugcuaccgccagcuucauuuacaacgggcggcugguugauucuguggucuccuggagcaaagagauccuucgcacccaggaaucugagugugugugcauuaacggaacauguacgguggucaugaccgacggcuccgcuagcgggaaggccgauacaaaaauccuguuuaucgaggaaggaaagauuguucauaccuccacacucucuggcagcgcgcaacacguggaggaaugcuccugcuaucccagauacccuggggugcggugugucugccgcgacaauuggaagggaagcaacagacccaucguggauauuaauaucaaagaccacucuauuguuuccagcuacguguguucuggccuggucggcgauaccccgcggaagaacgacagcuccucuagcucccauugccuugacccuaauaacgaggaagggggacacggcgugaaagggugggccuucgaugacggaaaugauguuuggaugggccgcacgaucaacgagacaagcagacugggguaugagaccuuuaaggugaucgaaggauggucuaaucccaaauccaagcuccagauuaaccggcaggucaucguggaccgcggcgauagaagcggcuacucugggauuuucuccgucgagggaaaaagcuguaucaaucggugcuuuuauguggaacugauuagaggccgcaaggaggaaaccgagguucuguggacauccaacucuaucguggucuucugugggaccagcggaacauacggcacgggguccuggccugacggcgcugaucucaaucugaugcccauuuga

SEQ ID NO: 217969 - RNA, 1410 nt, Artificial Sequence
  derived and/or modified CDS sequence (opt5) from neuraminidase__InfluenzaA__AJJ99091
augaaccccaaucagaagaucauuaccaucggcagcgugucccugacaauuucuacgaucugcuucuuuaugcaaauugccauccucaucaccacagucacccugcacuucaaacaguacgaguuuaacagcccuccgaauaaccagguuaugcuuugugaacccacaauuaucgagagaaauauuaccgaaaucguguaucugacaaacaccacgauugagaaggaaaucugcccuaaacccgcugaguaccggaauugguccaagccucagugugggauuaccggauucgcccccuuuucuaaagacaacagcauccgccucuccgcgggcggggauaucugggugacaagagagccuuaugucucuugcgacccggauaaguguuaccaauucgcucugggacagggcaccacacuuaauaacgugcauagcaauaacaccguucgggaccgcacgcccuauagaacacugcucaugaaugaacugggggugccuuuucaccugggaaccaagcaggucugcauugccugguccucuagcuccugucaugauggcaaagccuggcuccacgugugcaucacaggcgacgauaagaacgcuaccgccagcuucauuuacaaugggcggcugguugacucuguggucuccuggagcaaagagauccuucgcacccaggaaucugagugugugugcauuaacggaacauguacgguggucaugaccgauggcuccgcuagcgggaaggccgacacaaaaauccuguuuaucgaggaaggaaagauuguucauaccuccacacucucuggcagcgcgcaacacguggaggaaugcuccugcuaucccagauacccuggggugcggugugucugccgcgauaacuggaagggaagcaauagacccaucguggacauuaacaucaaagaucacucuauuguuuccagcuacguguguucuggccuggucggcgacaccccgcggaagaaugacagcuccucuagcucccauugccuugauccuaacaaugaggaagggggacacggcgugaaagggugggccuucgacgauggaaacgaccuguggaugggccgcacgaucaaugagacaagcagacucggguaugagaccuuuaagguuaucgaaggauggucuaaccccaaauccaagcugcagauuaaucgccaggugaucgucgaucggggcgacagaagcggcuacucugggauuuucuccguggagggaaaaagcuguaucaaccggugcuuuuaugucgaacugauuagaggccgcaaggaggaaaccgaggugcucuggacauccaauucuaucguuguguucugugggaccagcggaacauacggcacgggguccuggccugauggcgcugaccugaaccuuaugcccauuuga

SEQ ID NO: 217970 - RNA, 1410 nt, Artificial Sequence
  derived and/or modified CDS sequence (opt5) from neuraminidase__InfluenzaA__AJJ99103
augaaccccaaucagaagaucauuaccaucggcagcgugucccugacaauuucuacgaucugcuucuuuaugcaaauugccauccucaucaccacagucacccugcacuucaaacaguacgaguuuaacagcccuccgaauaaccagguuaugcuuugugaacccacaauuaucgagagaaauaugaccgaaauuguguaucugacaaacaccacgaucgagaaggaaauuugcccuaaacccgcugaguaccggaauugguccaagccucagugugacaucaccggguucgcccccuuuucuaaagauaacagcauucgccucuccgcgggaggcgacaucugggugacaagagagccuuaugucucuugcgauccggacaaguguuaccaauucgcucuggggcagggaaccacacuuaauaacgugcauagcaauaacaccguucggaaucgcacgcccuauagaacacugcucaugaacgaacugggcgugccuuuucaccuggggaccaagcaggucugcaucgccugguccucuagcuccugucaugauggaaaagccuggcuccacgugugcauuacaggcgacgauaagaaugcuaccgccagcuucaucuacaacggccggcugguugacucuguggucuccuggagcaaagagauucuucgcacccaggaaucugagugugugugcaucaacgggacauguacgguggucaugaccgauggauccgcuagcggcaaggccgacacaaaaauucuguuuaucgaggaagggaagaucguucauaccuccacacucucuggaagcgcgcaacacguggaggaaugcuccugcuaucccagauacccuggcgugcggugugucugccgcgauaauuggaaggggagcaacagacccauuguggacaucaauauuaaagaucacucuaucguuuccagcuacguguguucuggacuggucggcgacaccccgcggaagaacgacagcuccucuagcucccauugccuugauccuaauaacgaggaaggcgggcacggagugaaaggcugggccuucgacgaugggaaugacguuuggaugggacgcacgauuaacgagacaagcagacugggcuaugagaccuuuaaggugaucgaaggguggucuaaucccaaauccaagcuccagaucaaccggcaggucauuguggaucgcagcgacagaucuggauacuccggcaucuucagcgucgagggcaaauccuguauuaaucggugcuuuuauguggaacugaucagagggcgcaaggaggaaaccgagguucuguggacaucuaacagcauuguggucuucuguggaaccuccggcacauacgggacgggaucuuggccugauggcgcugaccucaaucugaugcccaucuga

SEQ ID NO: 217971 - RNA, 1410 nt, Artificial Sequence; identical to SEQ ID NO: 217437
  derived and/or modified CDS sequence (opt5) from neuraminidase__InfluenzaA__AJJ99115

SEQ ID NO: 217972 - RNA, 1410 nt, Artificial Sequence; identical to SEQ ID NO: 216357
  derived and/or modified CDS sequence (opt5) from neuraminidase__InfluenzaA__AJJ99127

SEQ ID NO: 217973 - RNA, 1410 nt, Artificial Sequence; identical to SEQ ID NO: 217645
  derived and/or modified CDS sequence (opt5) from neuraminidase__InfluenzaA__AJJ99139

SEQ ID NO: 217974 - RNA, 1410 nt, Artificial Sequence
  derived and/or modified CDS sequence (opt5) from neuraminidase__InfluenzaA__AJJ99151
augaaccccaaucagaagaucauuaccaucggcagcgugucccugacaauuucuacgaucugcuucuuuaugcaaauugccauccucaucaccacagucacccugcacuucaaacaguacgaguuuaacagcccuccgaauaaccagguuaugcuuugugaacccacaauuaucgagagaaauauuaccgaaaucguguaucugacaaacaccacgauugagaaggaaaucugcccuaaacccgcugaguaccggaauugguccaagccucagugugacauuaccggguucgcccccuuuucuaaagauaacagcauccgccucuccgcgggaggcgacaucugggugacaagagagccuuaugucucuugcgauccggacaaguguuaccaauucgcucuggggcagggaaccacacuuaauaacgugcauagcaauaacaccguucgggaucgcacgcccuauagaacacugcucaugaaugaacugggcgugccuuuucaccuggggaccaagcaggucugcauugccugguccucuagcuccugucaugacggaaaagccuggcuccacgugugcaucacaggcgaugacaagaacgcuaccgccagcuucauuuacaauggccggcugguugauucuguggucuccuggagcaaagagauccuucgcacccaggaaucugagugugugugcauuaacgggacauguacgguggucaugaccgacggauccgcuagcggcaaggccgauacaaaaauccuguuuaucgaggaagggaagauuguucauaccuccacacucucuggaagcgcgcaacacguggaggaaugcuccugcuaucccagauacccuggcgugcggugugucugccgcgacaacuggaaggggagcaauagacccaucguggauauuaacaucaaagaccacucuauuguuuccagcuacguguguucuggacuggucggcgacaccccgcggaagaaugauagcuccucuagcucccauugccuugacccuaacaaugaggaaggcgggcacggagugaaaggcugggccuucgaugacgggaacgauguuuggaugggacgcacgaucagcgagaagucuagacugggcuaugagacauuuaaagugaucgaagggugguccaaucccaagagcaaacuccagauuaaccggcaggucaucguggaccgcggaaauagaucuggcuacuccggcauuuucagcgucgaggggaaguccuguaucaaccggugcuuuuauguggaacugauuagaggacgcaaggaggaaaccgagguucuguggaccucuaauagcaucguggucuucuguggcacauccgggaccuacggaacaggcucuuggccugauggggcugacauuaaccucaugcccaucuga

SEQ ID NO: 217975 - RNA, 1410 nt, Artificial Sequence; identical to SEQ ID NO: 208671
  derived and/or modified CDS sequence (opt5) from neuraminidase__InfluenzaA__AJJ99163

SEQ ID NO: 217976 - RNA, 1410 nt, Artificial Sequence
  derived and/or modified CDS sequence (opt5) from neuraminidase__InfluenzaA__AJJ99175
augaaccccaaucagaagaucauuaccaucggcagcgugucccugacaauuucuacgaucugccucuucaugcaaauugccauccugaucaccacagucacccuucacuuuaaacaguacgaguucaacagcccuccgaauaaccagguuaugcugugugaacccacaauuaucgagagaaauauuaccgaaaucguguaucucacaaacaccacgauugagaaggaaaucugcccuaaacuggcugaguaccggaauugguccaagccccagugugacauuaccggguuugccccuuucucuaaagauaacagcauccgccuuuccgcgggaggcgacaucugggugacaagagagcccuaugucucuugcgauccugacaaguguuaccaauuugcucuggggcagggaaccacacucaauaacgugcauagcaauaacaccguucgggaucgcacgccguauagaacacugcugaugaaugaacucggcgugcccuuccaccuggggaccaagcaggucugcauugccugguccucuagcuccugucaugacggaaaagccuggcuucacgugugcaucacaggcgaugacaagaacgcuaccgccagcuuuauuuacaauggccggcugguugauucuguggucuccuggagcaaagagauccuccgcacccaggaaucugagugugugugcauuaacgggacauguacgguggucaugaccgacggauccgcuagcggcaaggccgauacaaaaauccuguucaucgaggaagggaagauuguucauaccuccacacuuucuggaagcgcgcaacacguggaggaaugcuccugcuauccuagauaccccggcgugcggugugucugccgcgacaacuggaaggggagcaauagaccuaucguggauauuaacaucaaagaccacucuauuguuuccagcuacguguguucuggacuggucggcgacacgccccggaagaaugauagcuccucuagcucccauugccucgacccgaacaaugaggaaggcgggcacggagugaaaggcugggccuuugaugacgggaacgauguuuggaugggacgcaccaucagcgagaagucuagacugggcuaugagacauucaaagugaucgaagggugguccaauccuaagagcaaacugcagauuaaccggcaggucaucguggaccgcggaaauagaucuggcuacuccggcauuuuuagcgucgaggggaaguccuguaucaaccggugcuucuauguggaacucauuagaggacgcaaggaggaaaccgagguucuguggaccucuaauagcaucguggucuuuuguggcacauccgggaccuacggaacaggcucuuggcccgaugggacggacauuaaccuuaugccuaucuga

SEQ ID NO: 217977 - RNA, 1410 nt, Artificial Sequence
  derived and/or modified CDS sequence (opt5) from neuraminidase__InfluenzaA__AJJ99199
augaaccccaaucagaagaucauuaccaucggcagcgugucccugacaauuucuacgaucugcuucuuuaugcaaauugccauccucaucaccacagucacccugcacuucaaacaguacgaguuuaacagcccuccgaauaaccagguuaugcuuugugaacccacaauuaucgagagaaauauuaccgaaaucguguaucugacaaacaccacgauugagaaggaaaucugcccuaaacucgcugaguaccggaauugguccaagccccagugugacauuaccggguucgccccuuuuucuaaagauaacagcauccgccuguccgcgggaggcgacaucugggugacaagagagcccuaugucucuugcgauccugacaaguguuaccaauucgcucuugggcagggaaccacacugaauaacgugcauagcaaugauaccguucggaaccgcacgccguauagaacacuccugaugaaugaacugggcgugcccuuucaccucgggaccaagcaggucugcauugccugguccucuagcuccugucaugacggaaaagccuggcugcacgugugcaucacaggcgaugacaagaacgcuaccgccagcuucauuuacaauggccggcuuguugauucuaucguguccuggagcaaagagauucugcgcacccaggaaucugagugugucugcaucaacgggacauguacgguggugaugaccgacggauccgcuagcggcaaggccgauacaaaaauccucuuuauugaggaagggaagaucguccauaccuccacacugucuggaagcgcgcaacacguugaggaaugcuccugcuauccuagauaccccggcgugcggugugugugccgcgacaacuggaaggggagcaauagaccuauugucgauaucaacauuaaagaccacucuaucguguccagcuacguuuguucuggacuugugggcgacacgccccggaagaaugauagcuccucuagcucccauugccuggacccgaacaaugaggaaggcgggcacggagucaaaggcugggccuucgaugacgggaacgauguguggaugggacgcaccaucagcgagaagucuagacucggcuaugagacauuuaaaguuauugaagggugguccaauccuaagagcaaacugcagaucaaccgccaggugauugucgaccggggaaauagaucuggcuacuccggcaucuucagcguggaggggaaguccuguauuaaccggugcuuuuaugucgaacugaucagaggacgcaaggaggaaaccgaggugcucuggaccucuaauagcauuguuguguucuguggcacauccgggaccuacggaacaggcucuuggcccgauggggcugacaucaaccugaugccuaucuga

SEQ ID NO: 217978 - RNA, 1410 nt, Artificial Sequence; identical to SEQ ID NO: 208815
  derived and/or modified CDS sequence (opt5) from neuraminidase__InfluenzaA__AJJ99211

SEQ ID NO: 217979 - RNA, 1410 nt, Artificial Sequence
  derived and/or modified CDS sequence (opt5) from neuraminidase__InfluenzaA__AJJ99223
augaaccccaaucagaagaucauuaccaucggcagcgugucccugacaauuucuacgaucugcuucuuuaugcaaauugccauccucaucaccacagucacccugcacuucaaacaguacgaguuuaacagcccuccgaauaaccagguuaugcuuugugaacccacaauuaucgagagaaauauuaccgaaaucguguaucugacaaacaccacgauugagaaggaaaucugcccuaaacucgcugaguaccggaauugguccaagccccagugugacauuaccggguucgccccuuuuucuaaagauaacagcauccgccuguccgcgggaggcgacaucugggugacaagagagcccuaugucucuugcgauccugacaaguguuaccaauucgcucuugggcagggaaccacacugaauaacgugcauagcaaugauaccguucggaaccgcacgccguauagaacacuccugaugaaugaacugggcgugcccuuucaccucgggaccaagcaggucugcauugccugguccucuagcuccugucaugacggaaaagccuggcugcacgugugcaucacaggcgaugacaagaacgcuaccgccagcuucauuuacaauggccggcuuguugauucuaucguguccuggagcaaagagauucugcgcacccaggaaucugagugugucugcaucaacgggacauguacgguggugaugaccgacggauccgcuagcggcgaggccgauacaaagauccucuuuauugaagaggggaaaaucguccauaccuccacacugucuggaagcgcgcaacacguugaagagugcuccugcuauccuagauaccccggcgugcggugugugugccgcgacaacuggaaggggagcaauagaccuauugucgauaucaacauuaaggaccacucuaucguguccagcuacguuuguucuggacuugugggcgacacgccccggaaaaaugauagcuccucuagcucccauugccuggacccgaacaaugaagagggcgggcacggagucaagggcugggccuucgaugacgggaacgauguguggguuggacgcaccaucagcgagaaaucuagacucggcuaugaaacauuuaaggugauugaggggugguccaauccuaaaagcaagcugcagaucaaccggcaggucauuguggaccgcggaaauagaucuggcuacuccggcaucuucagcgucgaagggaaauccuguauuaaccggugcuuuuauguggagcugaucagaggacgcaaggaagagaccgagguucucuggaccucuaauagcauuguggucuucuguggcacauccgggaccuacggaacaggcucuuggcccgauggggcugacaucaaccugaugccuaucuga

SEQ ID NO: 217980 - RNA, 1410 nt, Artificial Sequence
  derived and/or modified CDS sequence (opt5) from neuraminidase__InfluenzaA__AJJ99235
augaaccccaaucagaagaucauuaccaucggcagcgugucccugacaauuucuacgaucugcuucuuuaugcaaauugccauccucaucaccacagucacccugcacuucaaacaguacgaguuuaacagcccuccgaauaaccagguuaugcuuugugaacccacaauuaucgagagaaauauuaccgaaaucguguaucugacaaacaccacgauugagaaggaaaucugcccuaaacccgcugaguaccggaauugguccaagccucagugugacauuaccggguucgcccccuuuucuaaagauaacagcauccgccucuccgcgggaggcgacaucugggugacaagagagccuuaugucucuugcgauccggacaaguguuaccaauucgcucuggggcagggaaccacacuuaauaacgugcauagcaaugauaccguucgggaccgcacgcccuauagaacacugcucaugaacgaacugggcgugccuuuucaccuggggaccaagcaggucugcauugccugguccucuagcuccugucaugauggaaaagccuggcuccacgugugcaucacaggcgacgauaagaaugcuaccgccagcuucauuuacaacggccggcugguugacucuaucguguccuggagcaaagagauucuucgcacccaggaaucugagugugucugcaucaaugggacauguacgguggugaugaccgauggauccgcuagcggcgaggccgacacaaagauccuguuuauugaagaggggaaaaucguccauaccuccacacucucuggaagcgcgcaacacguugaagagugcuccugcuaucccagauacccuggcgugcggugugugugccgcgauaacuggaaggggagcaacagacccauugucgacaucaauauuaaggaccacucuaucguguccagcuacguuuguucuggacuggugggcgauaccccgcggaaaaacgacagcuccucuagcucccauugccuugauccuaauaacgaagagggcgggcacggagucaagggcugggccuucgacgaugggaaugacguguggaugggacgcacgaucagcgagaaaucuagacugggcuaugaaacauuuaagguuauugaggggugguccaaccccaaaagcaagcuccagaucaaucgccaggugauugucgaucggggaaacagaucuggcuacuccggcaucuucagcguggaagggaaauccuguauuaaucggugcuuuuaugucgagcugaucagaggacgcaaggaagagaccgaggugcuguggaccucuaacagcauuguuguguucuguggcacauccgggaccuacggaacaggcucuuggccugacggggcugauaucaaucucaugcccaucuga

SEQ ID NO: 217981 - RNA, 1410 nt, Artificial Sequence
  derived and/or modified CDS sequence (opt5) from neuraminidase__InfluenzaA__AJJ99246
augaaccccaaucagaagaucauuaccaucggcagcgugugcaugacaauugggauggccaaccugauccuccaaauuggaaauaucaucuccauuuggaucucucacagcauucagcugggcaaccagucccagaucgagacguguaaucaaaacgucauuaccuacgaaaauaacacauggguuaaucagaccuaugugaacaucucuaauacaaacuucgcugccgggcagagcguggucuccgugaaacuugcgggaaauucuagccugugcccuguuuccggcugggcuauuuacagcaaggacaacucugugagaaucggguccaaaggagaugucuuugugauccgggagccguucauuagcuguucuccccucgaaugccgcaccuuuuuccugacacagggcgcccuucugaaugacaagcauuccaacggcaccaucaaagauagaagcccuuaucggacgcucaugucuugucccauuggggagguuccuucccccuacaacagccgcuuugaauccguggccuggucugcuagcgccugccacgacggaaucaauuggcugaccauuggcaucuccgggccugauagcggagcugucgccgugcugaaguauaacggcaucauuacagacaccaucaagucuuggagaaauaacauucuccggacacaagaguccgagugugcgugccugaaugggagcuguuucaccaucaugacggauggaccgucugacggccaggccagcuacaaaauuuuucgcaucgaaaagggcaaaaucgugaaguccgucgagaugaacgcucccaauuaucauuacgaagagugcucuuguuacccugauagcuccgagauuacaugcguuugcagagacaacuggcacgggagcaaucggcccugggugucuuucaaccagaaucuugaauaucagaucggauacauuuguuccggcaucuuuggggauaacccucgccccaaugacaaaaccggaagcugcggcccggugucuuccagcggggccaacggagucaagggcuucuccuuuaaguauggcaaugggguguggauuggaagaacaaaaucuaucagcucccggaagggcuucgagaugauuugggauccuaacggguggaccggaaccgacaacaauuuuucuaucaaacaagacaucguuggcauuaacgaauggagcggguacuccggcagcuucgugcagcaucccgagcugacaggacucgauuguauccgcccuugcuucugggucgaacugauuagaggccggcccaaggagaauacgaucuggaccucuggguccagcauuucuuuuuguggagugaacuccgacacaguuggcuggagcuggcccgauggggcugagcuuccuuucaccaucgacaaauga

SEQ ID NO: 217982 - RNA, 1410 nt, Artificial Sequence
  derived and/or modified CDS sequence (opt5) from neuraminidase__InfluenzaA__AJJ99257
augaaccccaaucagaagaucauuaccaucggcagcgugugcaugacaauugggauggccaaccugauccuccaaauuggaaauaucaucuccauuuggaucucucacagcauucagcugggcaaccagaaucagaucgagacguguaaccaauccgucauuaccuacgaaaauaacacauggguuaaucagaccuaugugaacaucucuaauacaaacuucgcugccgggcagagcguggucuccgugaaacuugcgggaaauucuagccugugcccuguuuccggcugggcuauuuacagcaaggacaacucuaucagaaucggguccaaaggagauguguuugucauucgggagccguucaucagcuguucuccccucgaaugccgcaccuuuuuccugacacagggcgcccuucugaaugacaagcauuccaacggcaccauuaaagauagaagcccuuaucggacgcucaugucuugucccaucggggaggugccuucccccuacaacagccgcuuugaauccguugccuggucugcuagcgccugccacgacggaauuaauuggcugaccaucggcaucuccgggccugauaacggagcuguggccguccugaaguauaauggcauuaucacagacaccauuaagagcuggagaaacaauauccuccggacacaagagucugagugugcgugcgugaacggguccuguuucaccauuaugacggauggaccgagcgacggccaggccucuuacaaaaucuuucgcaucgaaaagggcaaaauugucaagagcguggagaugaaugcucccaacuaucauuacgaagagugcuccuguuacccugauucuagcgagaucacaugcguuugcagagacaauuggcacggguccaaccggcccugggugagcuucaaucagaaccuggaauaucagauuggauacaucuguucuggcauuuuuggggauaauccucgccccaacgacaaaaccggauccugcggcccggugccuagcaauggggccaacggagucaagggcuucucuuuuaaguauggcaacgggguguggaucggaagaacaaaauccauuagcucccggaagggcuucgagaugaucugggaucccaauggguggaccggaaccgacaacucuuuuagcaucaaacaagacauuguuggcacaaaugaaugguccggguacucuggcagcuucgugcagcauccugagcuuacgggacuggauuguauccgccccugcuucugggucgaacucauuagaggccggcccaaggagaacaccaucuggacauccgggagcucuauuuccuuuuguggagugaauagcggcaccguuggguggucuuggccugacggagcugagcugccguucacaaucgauaaauga

SEQ ID NO: 217983 - RNA, 1413 nt, Artificial Sequence; identical to SEQ ID NO: 208704
  derived and/or modified CDS sequence (opt5) from neuraminidase__InfluenzaA__AJJ99269

SEQ ID NO: 217984 - RNA, 1410 nt, Artificial Sequence; identical to SEQ ID NO: 213030
  derived and/or modified CDS sequence (opt5) from neuraminidase__InfluenzaA__AJJ99280

SEQ ID NO: 217985 - RNA, 1410 nt, Artificial Sequence; identical to SEQ ID NO: 212781
  derived and/or modified CDS sequence (opt5) from neuraminidase__InfluenzaA__AJJ99291

SEQ ID NO: 217986 - RNA, 1413 nt, Artificial Sequence
  derived and/or modified CDS sequence (opt5) from neuraminidase__InfluenzaA__AJJ99303
augaaccccaaucagaagaucauuaccaucggcagcauuuccaucgccauugggaucaucucucugaugcuccaaauuggaaacaucauuagcaucugggcuucccacucuauucagacaggcagccagaauaacacggggaucugcaaucagagaauuaucaccuacgagaacuccacaugggugaaucauaccuaugugaacaucaauaacacaaauguuguggccggagaagacaaaaccucugugacacuggcgggcaacagcucccuuuguagcauuucugggugggcuaucuacaccaaggauaauuccauucggaucggaagcaaaggcgacgucuucgugauucgcgagccuuuuaucucuugcucccaccuggaauguagaacguucuuucucacccaaggcgcccugcuuaacgauaagcauagcaaugggacaguuaaagaccggucuccguaucgcgcccugauguccugcccccucggagaggcuccuagccccuacaacuccaaguucgaaucuguggccuggagcgcuuccgccugucacgauggcaugggguggcugaccaucggaauuagcggcccugacaacggggcggucgccgugcugaaguauaauggaaucauuacaggcaccaucaaaucuuggaagaaacagauucucagaacgcaggaguccgagugcguuuguaugaacggcagcugcuuuacaaucaugaccgaugggcccucuaauaaggcugccagcuacaaaaucuucaagauugaaaagggaaaagugacaaaguccauggagcugaacgcuccuaauuuucauuaugaagaguguucuugcuacccggacaccggcaucgucaugugugugugccgggauaacuggcacgggagcaaucgccccuggguguccuucaaccagaaucuugacuaccaaauuggauauaucugcagcggcgucuuuggggauaacccuagacccgaggacggagaaggcucuuguaauccuguuaccguggauggcgccaacggggugaaaggauucuccuacaaguaugacaauggcgucuggauugggcggacaaaaagcaaccgccugagaaagggauuugagaugaucugggaccccaauggcuggacgaacaccgauucugacuucuccgugaaacaggauguuguggcgauuacagacuggagcggguacuccggcucuuuuguccagcacccggaacucaccggacuggauugcauccggccuuguuucuggguggagcuuguucgcggccugcccagagaaaacacaaccaucuggacgagcggguccucuauuagcuucugcggagucaauuccgacacagccaacuggagcuggccugauggcgcugagcuccccuuuaccaucgacaaguga

SEQ ID NO: 217987 - RNA, 1410 nt, Artificial Sequence
  derived and/or modified CDS sequence (opt5) from neuraminidase__InfluenzaA__AJJ99314
augaaccccaaucagaagaucauuaccaucggcagcgccugcaugacaauugggauggcuaaccugauccuccaaauuggaaauaucaucuccauuuggaucucucacagcauucagcugggcaaccagaaucagaucgagacguguaaccaauccgugauuaccuacgaaaauaacacaugggucaaucagaccuauguuaacaucucuaauacaaacuucgccgcggggcagagcgugguguccgucaaacuugcuggaaauucuagccugugcccuguguccggcugggccauuuacagcaaggacaacucuaucagaaucggguccaaaggagauguuuuugugauucgggagccguucaucagcuguucuccccucgaaugccgcaccuuuuuccugacacagggcgcccuucugaaugacaagcauuccaacggcaccauuaaagauagaagcccuuaucggacgcucaugucuugucccaucggggaggucccuucccccuacaacagccgcuuugaauccguggcuuggucugccagcgcuugccacgacggaauuaauuggcugaccaucggcaucuccgggccugauaacggagccguugcggugcugaaguauaauggcauuaucacagacaccauuaagagcuggagaaacaauauccuccggacacaagagucugagugugccugcgucaacggguccuguuucaccgugaugacggauggaccgagcgacggccaggcuucuuacaaaauuuuucgcaucgaaaagggcaaaaucgucaagagcguggagaugaaugcccccaacuaucauuacgaagagugcuccuguuacccugauucuagcgagauuacaugcguuugcagagacaauuggcacggguccaaccggcccugggugagcuucaaucagaaccuggaauaucagaucggauacauuuguucuggcaucuuuggggauaauccucgccccaacgacaaaaccggauccugcggcccggugagcucuaauggggcuaacggagucaagggcuucuccuuuaaguauggcaacgggguguggauuggaagaacaaaaagcaucuccucucggaauggcuucgagaugauuugggauccuaacggguggaccggaaccgacaauaacuuuagcaucaagcaagacaucguuggcauuaaugaaugguccggguacucuggcagcuucgugcagcaucccgagcuuacaggacuggauuguauccgcccuugcuucugggucgaacucauuagaggccggcccaaagagaacacgaucuggaccuccgggagcucuauuuccuuuuguggagugaauagcgacacaguuggcuggucuuggcccgauggggccgagcugccuuucaccaucgacaaguga

SEQ ID NO: 217988 - RNA, 1413 nt, Artificial Sequence
  derived and/or modified CDS sequence (opt5) from neuraminidase__InfluenzaA__AJJ99326
augaaccccaaucagaagaucauuaccaucggcagcauuuccaucgccauugggaucaucucucugaugcuccaaauuggaaacaucauuagcaucugggcuucccacucuauucagacaggcagccagaauaacacggggaucugcaaucagagaauuaucaccuacgagaacuccacaugggugaaucauaccuaugugaacaucaauaacacaaauguuguggccggagaagacaaaaccucugugacacuggcgggcaacagcucccuuuguagcauuucugggugggcuaucuacaccaaggauaauuccauucggaucggaagcaaaggcgacgucuucgugauucgcgagccuuuuaucucuugcucccaccuggaauguagaacguucuuucucacccaaggcgcccugcuuaacgauaagcauagcaaugggacaguuaaagaccggucuccguaucgcgcccugauguccugcccccucggagaggcuccuagccccuacaacuccaaguucgaaucuguggccuggagcgcuuccgccugucacgauggccugggguggcugaccaucggaauuagcggcccugacaacggggcggucgccgugcucaaguauaauggaaucauuacaggcaccaucaaaucuuggaagaaacagauucugagaacgcaggaguccgagugcguuuguaugaacggcagcugcuuuacaaucaugaccgaugggcccucuaauaaggcugccagcuacaaaaucuucaagauugaaaagggaaaagugacaaaguccaucgagcuuaacgcuccuaauuuuuauuacgaagaguguucuugcuacccggacaccggcauugucaugugugugugccgggauaacuggcaugggagcaaucgccccuggguguccuucaaccagaaucuggacuaucaaaucggauacauuugcagcggcgucuuuggggauaacccuagacccgaggacggagaaggcucuuguaauccuguuaccguggauggcgccaacggggugaaaggauucuccuauaaguacggcaauggggucuggaucggacggacaaaaagcaaccgccucagaaagggcuuugagaugauuugggaccccaauggguggacgaacaccgacucugauuucuccgugaaacaggacguuguggcgaucacagauuggagcggcuauuccggaucuuuuguccagcacccggaacugaccggccuugacugcauccggccuuguuucuggguggagcugguucgcgggcuccccagagaaaacacaaccauuuggacgagcggauccucuaucagcuucugcggcgucaauuccgauacagccaacuggagcuggccugacggggcugagcugcccuuuaccauugauaaguga

SEQ ID NO: 217989 - RNA, 1410 nt, Artificial Sequence; identical to SEQ ID NO: 210454
  derived and/or modified CDS sequence (opt5) from neuraminidase__InfluenzaA__AJJ99337

SEQ ID NO: 217990 - RNA, 1410 nt, Artificial Sequence; identical to SEQ ID NO: 209917
  derived and/or modified CDS sequence (opt5) from neuraminidase__InfluenzaA__AJJ99348

SEQ ID NO: 217991 - RNA, 1410 nt, Artificial Sequence; identical to SEQ ID NO: 208810
  derived and/or modified CDS sequence (opt5) from neuraminidase__InfluenzaA__AJJ99359

SEQ ID NO: 217992 - RNA, 1410 nt, Artificial Sequence
  derived and/or modified CDS sequence (opt5) from neuraminidase__InfluenzaA__AJJ99370
augaaccccaaucagaagaucauuaccaucggcagcgugugcaugauuaucgggauggccaaccugauucuccaaaucggaaauaucauuuccaucuggauuucucacagcauccagcugggcaaccagucccagauugagacauguaaucaaucugucaucacguacgaaaacaauaccuggguuaaccagacauaugugaauauuagcaacaccaauuucgcugccgggcaguccguggucucugugaaacuugcgggaaacagcucccugugcccuguuagcggcugggcuaucuacucuaaggacaauuccaucagaauugggagcaaaggagauguguuugucauccgggagccguucauuucuuguucuccccucgaaugccgcacauuuuuccugacccagggcgcccuucugaacgacaagcauagcaauggcacaaucaaagauagaucuccucaccggacccucauguccugucccauuggggaggugccuagccccuauaacucccgcuuugaaucuguugccuggagcgcuuccgccugccaugacggaaucaacuggcugacgaucggcauuagcgggccugauaauggagcuguggccguccugaaguacaacggcaucauuaccgacacaaucaagucuuggagaaauaacauucuccggacccaagaguccgagugugcgugcgugaaugggagcuguuucacaaucaugaccgauggaccgucugaccgccaggccagcuauaaaaucuuuagaauugaaaagggcaaaaucgugaaguccgucgagaugaacgcucccaauuaccacuaugaagagugcucuuguuacccugauagcuccgagauuacgugcguuugccgggacaacuggcauggcagcaaucgccccugggugucuuucaaccagaaucuggaauaccagaucggguauauuuguuccggaaucuuuggcgauaacccuagacccaaugacaaaacagggagcugcggaccggugucuuccaacggcgccaauggggucaagggauucagcuuuaaguacggcaacggcguguggauugggcggaccaaauccaucucuagccgcaagggauucgagaugaucugggauccuaacggcuggacagggaccgacaauaacuuuuccauuaaacaagacaucguuggaauuaaugaauggucuggcuauagcggguccuucgugcagcaccccgagcuuaccggccuggauuguaucagaccuugcuucugggucgaacucauucggggacgccccaaggagaacacaaucuggacgagcggcuccuccaucagcuuuugugggguuaauucugacaccgugggaugguccuggcccgauggcgcugagcugccuuucacaauugacaaauga

SEQ ID NO: 217993 - RNA, 1410 nt, Artificial Sequence; identical to SEQ ID NO: 212329
  derived and/or modified CDS sequence (opt5) from neuraminidase__InfluenzaA__AJJ99381

SEQ ID NO: 217994 - RNA, 1410 nt, Artificial Sequence
  derived and/or modified CDS sequence (opt5) from neuraminidase__InfluenzaA__AJJ99392
augaaccccaaucagaagaucauuaccaucggcagcgugugcaugacaauugggauggccaaccugauccuccaaauuggaaauaucaucuccauuuggaucucucacagcauucagcugggcaaccagaaucagaucgagacguguaaccaauccgucauuaccuacgaaaauaacacauggguuaaucagaccuaugugaacaucucuaauacaaacuucgcugccgggcagagcguggucuccgugaaacuugcgggaaauucuagccugugcccuguuuccggcugggcuauuuacagcaaggacaacucuaucagaaucggguccaaaggagauguguuugucauucgggagccguucaucagcuguucuccccucgaaugccgcaccuuuuuccugacacagggcgcccuucugaaugacaagcauuccaacggcaccauuaaagauagaagcccuuaucggacgcucaugucuugucccaucggggaggugccuucccccuacaacagccgcuuugaauccguugccuggucugcuagcgccugccacgacggaauuaauuggcugaccaucggcaucuccgggccugauaacggagcuguggccguccugaaguauaauggcauuaucacagacaccauuaagagcuggagaaacaauauccuccggacacaagagucugagugugcgugcgugaacggguccuguuucaccgugaugacggauggaccgagcgacggccaggccucuuacaaaauuuuucgcaucgaaaagggcaaaaucgucaagagcguugagaugaaugcucccaacuaucauuacgaagagugcuccuguuacccugauucuagcgagauuacaugcgugugcagagacaauuggcacggguccaaccggcccugggugagcuucaaucagaaccuggaauaucagaucggauacauuuguucuggcaucuuuggggauaauccucgccccaacgacaaaaccggauccugcggcccggucagcccuaauggggccaacggagugaagggcuucucuuuuaaguauggcaacgggguuuggauuggaagaacaaaauccaucagcucccggaauggcuucgagaugauuugggaucccaacggguggaccggaaccgacaauaacuuuucuaucaagcaagacaucgugggcauuaaugaauggagcggguacuccggcucuuucguccagcauccugagcuuacaggacuggauuguauccgccccugcuucuggguggaacucauuagaggccggcccaaagagaacacgaucuggaccagcggguccagcauuucuuuuuguggaguuaauuccgacacagugggcuggagcuggccugauggggcuaagcugccguucaccaucgacaaauga

SEQ ID NO: 217995 - RNA, 1410 nt, Artificial Sequence; identical to SEQ ID NO: 208810
  derived and/or modified CDS sequence (opt5) from neuraminidase__InfluenzaA__AJJ99403

SEQ ID NO: 217996 - RNA, 1413 nt, Artificial Sequence; identical to SEQ ID NO: 209533
  derived and/or modified CDS sequence (opt5) from neuraminidase__InfluenzaA__AJJ99415

SEQ ID NO: 217997 - RNA, 1413 nt, Artificial Sequence
  derived and/or modified CDS sequence (opt5) from neuraminidase__InfluenzaA__AJJ99427
augaaccccaaucagaagaucauuaccaucggcagcauuuccaucgccauugggaucaucucucugaugcuccaaauuggaaacaucauuagcaucugggcuucccacucuauucagacaggcagccagaauaacacggggaucugcaaucagagaauuaucaccuacgagaacuccacaugggugaaucauaccuaugucaacaucaauaacacaaauguuguggccggagaagacaaaaccucugugacacuggcgggcaacagcucccuuuguagcauuucugggugggcugucuacaccaaggauaauuccauccggauuggaagcaaaggcgacguguucguuauccgcgagccuuuuauuucuugcucccaccuggaauguagaacguucuuucucacccaaggcgcccugcuuaacgauaagcauagcaaugggacagugaaagaccggucuccguaucgcgcccugauguccugcccccucggagaggcuccuagccccuacaacuccaaguucgaaucugucgccuggagcgcuuccgccugucacgauggcaugggguggcugaccaucggaaucagcggcccugacaacggggcgguggccguucugaaguauaauggaauuaucacaggcaccauuaaaucuuggaagaaacagauccucagaacgcaggaguccgagugcguguguaugaacggcagcugcuuuacaauuaugaccgaugggcccucugacaaggcugccagcuacaaaaucuucaagaucgaaaagggaaaagucacaaaguccauugagcugaaugcuccuaacuuuuauuacgaagaguguucuugcuacccggauaccggcaucgugaugugugugugccgggacaauuggcaugggagcaaccgccccugggucuccuucaaucagaaccuugauuaucaaauuggauacaucugcagcggcguuuuuggggacaauccuagacccgaggauggagaaggcucuuguaacccugugaccguggacggcgccaauggggucaaaggauucuccuauaaguacggcaacgggguguggauuggacggacaaaaagcaaucgccugagaaagggcuuugagaugaucugggaccccaacggguggauuaauacggauucugacuucuccguuaaacaggauguggucgcgaucaccgacuggagcggcuauuccggaucuuuugugcagcacccggaacucacaggccuggauugcauccggccuuguuucuggguugagcuugugcgcgggcugcccagagaaaacaccacaauuuggaccagcggauccucuaucagcuucugcggcgucaacuccgacacggccaauuggagcuggccugauggggcugagcuccccuuuacaauugacaaguga

SEQ ID NO: 217998 - RNA, 1413 nt, Artificial Sequence
  derived and/or modified CDS sequence (opt5) from neuraminidase__InfluenzaA__AJJ99439
augaaccccaaucagaagaucauuaccaucggcagcauuuccaucgccauugggaucaucucucugaugcuccaaauuggaaacaucauuagcaucugggcuucccacucuauucagacaggcagccagaauaacacggggaucugcaaucagagaauuaucaccuacgagaacuccacaugggugaaucauaccuaugugaacaucaauaacacaaauguuguggccggagaagacaaaaccucugugacacuggcgggcaacagcucccuuuguagcaccucugggugggcuauuuacacgaaggauaauuccauccggauuggaagcaaaggcgacgucuucgugauccgcgagccuuuuauuucuugcucccaccuggaauguagaaccuucuuucucacacaaggcgcccugcuuaacgauaagcauagcaaugggaccguuaaagaccggucuccguaucgcgcccugauguccugcccccucggagaggcuccuagccccuacaacuccaaguucgaaucuguggccuggagcgcuuccgccugucacgauggcaugggguggcugacaaucggaaucagcggcccugacaacggggcggucgccgugcugaaguauaauggaauuaucaccggcacgauuaaaucuuggaagaaacagauccucagaacacaggaguccgagugcguuuguaugaacggcagcugcuuuaccauuaugacagaugggcccucuaauaaggcugccagcuacaaaaucuucaagaucgaaaagggaaaagugaccaaguccauugagcugaacgcuccuaauuuuuauuacgaagaguguucuugcuacccggacaccggcaucgucaugugugugugccgggauaacuggcaugggagcaaucgccccuggguguccuucaaccagaaucuugacuaucaaauuggauacaucugcagcggcgucuuuggggauaacccuagacccgaggacggagaaggcucuuguaauccuguuacaguggauggcgccaacggggugaaaggauucuccuauaaguacggcaauggggucuggauuggacggacgaaaagcaaccgccugagaaagggcuuugagaugaucugggaccccaauggguggaccaacacagacucugauuucuccgugaaacaggacguuguggcgauuaccgauuggagcggcuauuccggaucuuuuguccagcacccggaacucacaggccuggacugcauccggccuuguuucuggguggagcuuguucgcgggcugcccagagaaaacaccacgaucuggacaagcggauccucuauuagcuucugcggcgucaauuccgauaccgccaacuggagcuggccugacggggcugagcuccccuuuaccaucgauaaguga

SEQ ID NO: 217999 - RNA, 1413 nt, Artificial Sequence
  derived and/or modified CDS sequence (opt5) from neuraminidase__InfluenzaA__AJJ99451
augaaccccaaucagaagaucauuaccaucggcagcauuuccaucgccauugggaucaucucucugaugcuccaaauuggaaacaucauuagcaucugggcuucccacucuauucagacaggcagccagaauaacacggggaucugcaaucagagaauuaucaccuacgagaacuccacaugggugaaucauaccuaugugaacaucaauaacacaaauguuguggccggagaagacaaaaccucugugacacuggcgggcaacagcucccuuuguagcauuucugggugggcuaucuacaccaaggauaauuccauucggaucggaagcaaaggcgacgucuucgugauucgcgagccuuuuaucucuugcucccaccuggaauguagaacguucuuucucacccaaggcgcccugcuuaacgauaagcauagcaaucggacaguuaaagaccgcucuccguauagagcccugauguccugcccccucggggaggcuccuagccccuacaacuccaaguucgaaucuguggccuggagcgcuuccgccugucacgauggaaugggcuggcugaccaucgggauuagcggaccugacaacggcgcggucgccgugcugaaguauaaugggaucauuacaggaaccaucaaaucuuggaagaaacagauucuccggacgcaggaguccgagugcguuuguaugaacggcagcugcuuuacaaucaugaccgauggccccucuaauaaggcugccagcuacaaaaucuucaagauugaaaaggggaaagugacaaaguccaucgagcugaacgcuccuaauuuucauuaugaagaguguucuugcuacccggacaccggaauugucaugugugugugccgcgauaacuggcacggcagcaauagacccuggguguccuucaaccagaaucuugacuaccaaaucggguauauuugcagcggagucuuuggcgauaacccucggcccgaggacggggaaggaucuuguaauccuguuaccguggauggcgccaacggcgugaaaggguucuccuacaaguaugacaauggagucuggaucggccgcacaaaaagcaacagacugcggaagggguuugagaugauuugggaccccaauggauggacgaacaccgauucugacuucuccgugaaacaggauguuguggcgaucacagacuggagcggcuacuccgggucuuuuguccagcacccggaacucaccggccuggauugcauccgcccuuguuucuggguggagcuuguuagaggacugccccgggaaaacacaaccauuuggacgagcggcuccucuaucagcuucugcggggucaauuccgacacagccaacuggagcuggccugauggagcugagcuccccuuuaccauugacaaguga

SEQ ID NO: 218000 - RNA, 1413 nt, Artificial Sequence; identical to SEQ ID NO: 208704
  derived and/or modified CDS sequence (opt5) from neuraminidase__InfluenzaA__AJJ99463

SEQ ID NO: 218001 - RNA, 1410 nt, Artificial Sequence
  derived and/or modified CDS sequence (opt5) from neuraminidase__InfluenzaA__AJJ99474
augaaccccaaucagaagaucauuaccaucggcagcgugugcaugacaauugggaucgccaaccugauucuccaaaucggaaauaucauuuccaucuggauuucucacagcauccagcugggcaaccagaaucagauugagacguguaaccaauccgucaucauuuacgaaaauaacaccuggguuaaucagacauaugugaacaucucuaauaccaacuucgcugccgggcagagcguggucuccgugaaacuugcgggaaauucuagccugugcccuguuuccggcugggcuaucuacagcaaggacaacucuauuagaaucggguccaaaggagauguguuugucauucgggagccguucaucagcuguucuccccucgaaugccgcacauuuuuccugacccagggcgcccuucugaaugacaagcauuccaacggcacaauuaaagauagaagcccuuaucggacccucaugucuugucccaucggggaggugccuucccccuacaacagccgcuuugaauccguugccuggucugcuagcgccugccacgacggaaucaauuggcugacgauuggcaucuccgggccugauaacggagcuguggccguccugaaguauaauggcauuaucaccgacacaauuaagagcuggagaaacaauauccuccggacccaagagucugagugugcgugcgugaacggguccuguuucacaaucaugaccgauggaccgagcgacggccaggccucuuacaaaauuuuucgcaucgaaaagggcaaaauuaucaagagcguggagaugaaugcucccaacuaucauuacgaagagugcuccuguuacccugauucuagcgagauuacgugcgucugcagagacaauuggcacggguccaaccggcccuggguuagcuucaaucagaaccuggaauaucagaucggauacauuuguucuggcaucuuuggggauaauccucgccccaacgacaaaacaggauccugcggcccggugagcucuaauggggccaacggagugaagggcuucuccuuuaaguauggcaacggggucuggaucggaagaaccaaaagcauuuccucucggaagggcuucgagaugaucugggauccuaauggguggacaggaaccgacaacagcuuuuccauuaaacaagacaucgugggcauuaaugaauggucuggguacagcggcuccuucguucagcaucccgagcuuaccggacuggauuguauccgcccuugcuucuggguggaacucaucagaggccggcccaaggagaacacaauuuggacgagcgggucuuccaucagcuuuuguggagucaauucuggcaccguggggugguccuggcccgacggagcugagcugccuuucacaauugauaaauga

SEQ ID NO: 218002 - RNA, 1410 nt, Artificial Sequence; identical to SEQ ID NO: 212781
  derived and/or modified CDS sequence (opt5) from neuraminidase__InfluenzaA__AJJ99496

SEQ ID NO: 218003 - RNA, 1410 nt, Artificial Sequence
  derived and/or modified CDS sequence (opt5) from neuraminidase__InfluenzaA__AJJ99507
augaaccccaaucagaagaucauuaccaucggcagcgugugcaugacaauugggauggccaaccugauccuccaaauuggaaauaucaucuccauuuggaucucucacagcauucagcugggcaaccagaaucagaucgagacguguaaccaauccgucauuaccuacgaaaauaacacauggguuaaucagaccuaugugaacaucucuaauacaaacuucgcugccgggcagagcguggucuccgugaaacuugcgggaaauucuagccugugcccuguuuccggcugggcuauuuacagcaaggacaacucuaucagaaucggguccaaaggagauguguuugucauucgggagccguucaucagcuguucuccccucgaaugccgcaccuuuuuccugacacagggcgcccuucugaaugacaagcauuccaacggcaccauuaaagauagaagcccuuaucggacgcucaugucuugucccaucggggaggugccuucccccuacaacagccgcuuugaauccguugccuggucugcuagcgccugccacgacggaauuaauuggcugaccaucggcaucuccgggccugauaacggagcuguggccguccugaaguauaauggcauuaucacagacaccauuaagagcuggagaaacaauauccuccggacacaagagucugagugugcgugcgugaacggguccuguuucaccgugaugacggauggaccgagcgacggccaggccucuuacaaaauuuuucgcaucgaaaagggcaaaaucgucaagagcguugagaugaaugcucccaacuaucauuacgaagagugcuccuguuacccugauucuagcgagauuacaugcgugugcagagacaauuggcacggggccaaccggcccuggguguccuucaaucagaaccuggaauaucagaucggauacauuuguagcggcaucuuuggggauaauccucgccccaacgacaaaaccggaucuugcggcccggucuccagcaauggggcuaacggagugaagggcuucucuuuuaaguaugauaacggcguuuggauugggagaacaaaauccaucagcucccggaauggauucgagaugauuugggacccuaacggcuggaccgggaccgacaaugauuuuucuaucaagcaagacaucgugggaauuaacgaauggagcggcuacuccgggucuuucguccagcaucccgagcuuacaggccuggauuguauccgcccuugcuucuggguggaacucauuagaggacggcccaaagagaauacgaucuggaccagcggcuccagcauuucuuuuugugggguuaacuccgacacagugggauggagcuggcccgauggcgccgagcugccuuucaccaucgacaaguga

SEQ ID NO: 218004 - RNA, 1410 nt, Artificial Sequence; identical to SEQ ID NO: 208810
  derived and/or modified CDS sequence (opt5) from neuraminidase__InfluenzaA__AJJ99518

SEQ ID NO: 218005 - RNA, 1410 nt, Artificial Sequence
  derived and/or modified CDS sequence (opt5) from neuraminidase__InfluenzaA__AJJ99529
augaaccccaaucagaagaucauuaccaucggcagcgugugcaugacaauugggauggccaaccugauccuccaagucggaaauauuaucuccaucuggauuucucacagcauccagcugggcaaccagaaucagauugagacguguaaccaauccguuaucaccuacgaaaauaacacaugggugaaucagaccuaugugaacauuucuaauacaaacuucgcugccgggcagagcgucguguccguuaaacuugcgggaaauucuagccugugcccuguguccggcugggcuaucuacagcaaggacaacucuauuagaaucggguccaaaggagaugucuuugugauccgggagccguucauuagcuguucuccccucgaaugccgcaccuuuuuccugacacagggcgcccuucugaaugacaagcauuccaacggcaccaucaaagauagaagcccuuaucggacgcucaugucuugucccauuggggagguuccuucccccuacaacagccgcuuugaauccguggccuggucugcuagcgccugccacgacggauucaauuggcugaccaucggcauuuccgggccugauaacggagcugucgccgugcugaaguauaauggcaucaucacagacaccauuaagagcuggagaaacaauauccuccggacacaagagucugagugugcgugcgugaacggguccuguuuuaccauuaugacggauggaccgagcgacggccaggccucuuacaaaaucuuccgcauugaaaagggcaaaaucaucaagagcgucgagaugaaugcucccaacuaucauuacgaagagugcuccuguuacccugauucuagcgagauuacaugcguuugcagagacaauuggcacggguccaaccggcccugggugagcuuuaaucagaaccuggaauaucagaucggauacauuuguucuggcaucuucggggauaauccucgccccaacgacaaaaccggauccugcggcccggugagcucuaauggggccaacggagucaagggcuuuuccuucaaguauggcaacgggguguggauuggaagaacaaaaagcaucuccucucggaagggcuuugagaugauuugggauccuaauggguggaccggaaccgacaacagcuucuccaucaaacaagacaucguuggcauuaaugaauggucuggguacagcggcuccuucgugcagcaucccgagcuuacaggacuggauuguauccgcccuugcuuuugggucgaacucauuagaggccggcccaaggagaacacgaucuggaccagcgggucuuccauuagcuucuguggaguuaauucuggcacaguggggugguccuggcccgacggagcugagcugccuuuuaccaucgauaaauga

SEQ ID NO: 218006 - RNA, 1410 nt, Artificial Sequence
  derived and/or modified CDS sequence (opt5) from neuraminidase__InfluenzaA__AJJ99540
augaaccccaaucagaagaucauuaccaucggcagcgugugcaugacaauugggauggccaaccugauccuccaaauuggaaauaucaucuccauuuggaucucucacagcauucagcugggcaaccagaaucagaucgagacguguaaccaauccgucauuaccuacgaaaauaacacauggguuaaucagaccuaugugaacaucucuaauacaaacuucgcugccgggcagagcguggucuccgugaaacuugcgggaaauucuagccugugcccuguuuccggcugggcuauuuacagcaaggacaacucuaucagaaucggguccaaaggagauguguuugucauucgggagccguucaucagcuguucuccccucgaaugccgcaccuuuuuccugacacagggcgcccuucugaaugacaagcauuccaacggcaccauuaaagauagaagcccuuaucggacgcucaugucuugucccaucggggaggugccuucccccuacaacagccgcuuugaauccguugccuggucugcuagcgccugccacgacggaauuaauuggcugaccaucggcaucuccgggccugauaacggagcuguggccguccugaaguauaauggcauuaucacagacaccauuaagagcuggagaaacaauauccuccggacacaagagucugagugugcgugcgugaacggguccuguuucaccauuaugacggauggaccgagcgacggccaggccucuuacaaaaucuuucgcaucgaaaagggcaaaauugucaagagcguggagaugaaugcucccaacuaucauuacgaagagugcuccuguuacccugauucuagcaaaaucacaugcguuugcagagacaauuggcacggguccaaccggcccugggugagcuucaaucagaaccuggaguaucagauuggauacaucuguucuggcauuuuuggggauaauccucgccccaacgacaagaccggauccugcggcccggugagcucuaauggggccaacggagucaagggcuucuccuuuaaauauggcaacgggaucuggauuggaagaacaaagagcaucuccucucggaaaggcuucgaaaugaucugggauccuaauggguggaccggaaccgacaacaauuuuagcauuaagcaagacaucgugggcauuaacgagugguccggguacucuggcagcuucguucagcaucccgaacuuacaggacuggauuguauccgcccuugcuucuggguggagcucauuagaggccggcccaaagaaaauacgaucuggaccuccgggagcucuaucuccuuuuguggagucaacagcgacacagugggcuggucuuggcccgauggggcugagcugccuuucaccauugacaaguga

SEQ ID NO: 218007 - RNA, 1410 nt, Artificial Sequence
  derived and/or modified CDS sequence (opt5) from neuraminidase__InfluenzaA__AJJ99551
augaaccccaaucagaagaucauuaccaucggcagcgugugcaugacaauugggauggccaaccugauccuccaaauuggaaauaucaucuccauuuggaucucucacagcauucagcugggcaaccagucccagacggagaccuguaaucaaucugucaucacauacgaaaacaauaccuggguuaaccagacauaugugaauauuagcaacaccaauccugcugccgggcaguccguggucucugugaaacuugcgggaaacagcucccugugcccgguuagcggcugggcuaucuacucuaaggacaauuccauuagaaucgggagcaaaggagauguguucgucauccgggagcccuuuauuucuuguuccagccucgaaugccgcacauucuuucugacccagggcgcccuucugaacgacaagcauucuaauggcacgaucaaagauagauccccuuaucggacccucaugagcugucccauuggggaggugccuucccccuacaacucucgcuucgaaagcguugccugguccgcuagcgccugccacgacggaaucaacuggcugacaauuggcaucucugggccugauaauggagcuguggccguccugaaguauaacggcaucauuaccgacacaaucaaguccuggagaaauaacauucuccggacccaagagagcgagugugcgugcgugaaugggucuuguuuuacgaucaugacagauggaccgagcgacggccaggccuccuacaaaauuuuccgcaucgaaaagggcaaaaucgugaagucugucgagaugaacgcucccaauuaucauuacgaagagugcagcuguuacccugauuccagcgagauuaccugcguuugcagagacaacuggcacgggucuaaucggcccuggguguccuuuaaccagaaucuggaauaucagaucggauacauuuguagcggcaucuucggggauaacccucgccccaaugacaaaacaggaucuugcggcccgguguccagcaacggggccaauggagucaagggcuuuuccuucaaguauggcaacgggguguggauuggaagaaccaaaucuaucagcucccggaagggcuuugagaugauuugggauccuaacggguggaccggaacagacaauaacuucucuaucaaacaagacaucguuggcauuaaugaauggagcggguacuccggcagcuuugugcagcaucccgagcuuacgggacuggauuguauccgcccuugcuucugggucgaacucauuagaggccggcccaaggagaacaccaucuggacaucuggguccagcauuucuuucuguggaguuaauuccgacaccgugggcuggagcuggcccgauggggcugagcugccuuuuacaaucgacaaauga

SEQ ID NO: 218008 - RNA, 1410 nt, Artificial Sequence; identical to SEQ ID NO: 212797
  derived and/or modified CDS sequence (opt5) from neuraminidase__InfluenzaA__AJJ99562

SEQ ID NO: 218009 - RNA, 1410 nt, Artificial Sequence
  derived and/or modified CDS sequence (opt5) from neuraminidase__InfluenzaA__AJJ99573
augaaccccaaucagaagaucauuaccaucggcagcgugugcaugacaauugggauggccaaccugauccuccaaauuggaaauaucaucuccauuuggaucucucacagcauucagcugggcaaccagucccagaucgagacguguaaucaaucugucauuaccuacgaaaacaauacauggguuaaccagaccuaugugaauaucagcaacacaaauuucgcugccgggcaguccguggucucugugaaacuugcgggaaacagcucccugugcccuguuagcggcugggcuauuuacucuaaggacaauuccaucagaaucgggagcaaaggagauguguuugucauucgggagccguucaucucuuguagcccccucgaaugccgcaccuuuuuccugacacagggcgcccuucugaacgacaagcauuccaauggcaccauuaaagauagaucuccuuaucggacgcucauguccugucccaucggggaggugccuagccccuacaacucccgcuuugaaucuguugccuggagcgcuuccgccugccacgacggaauuaacuggcugaccaucggcaucagcgggccugauaauggagcuguggccguccugaaguauaacggcauuaucacagacaccauuaagucuuggagaaauaacauccuccggacacaagaguccgagugugcgugcgugaaugggagcuguuucaccauuaugacggauggaccgucugacggccaggccagcuacaaaaucuuucgcaucgaaaagggcaaaauugugaaguccgucgagaugaacgcucccaauuaucauuacgaagagugcucuuguuacccugauagcuccgagaucacaugcguuugcagagacaacuggcacgggagcaaucggcccugggugucuuucaaccagaaucuggaauaucagauuggauacaucuguuccggcauuuuuggggauaacccucgccccaaugacaaaaccggaagcugcggcccggugucuuccaacggggccaauggagucaagggcuucagcuuuaaguauggcaacgggguguggaucggaagaacaaaauccauuucuagccggaagggcuucgagaugaucugggauccuaacggguggaccggaaccgacaauaacuuuuccaucaaacaagacguugugggcauuaaugaauggucuggguacagcggcuccuucguccagcaucccgagcuuacaggacuggauuguauccgcccuugcuucuggguggaacucauuagaggccggcccaaggagaacacgaucuggaccagcgggucuuccauuagcuuuuguggaguuaauucugacacagugggcugguccuggcccgauggggcugagcugccuuucaccaucgacaaauga

SEQ ID NO: 218010 - RNA, 1410 nt, Artificial Sequence; identical to SEQ ID NO: 217987
  derived and/or modified CDS sequence (opt5) from neuraminidase__InfluenzaA__AJJ99584

SEQ ID NO: 218011 - RNA, 1410 nt, Artificial Sequence
  derived and/or modified CDS sequence (opt5) from neuraminidase__InfluenzaA__AJJ99595
augaaccccaaucagaagaucauuaccaucggcagcgugugcaugacaauugggauggccaaccugaucuuccaaauuggaaauaucaucuccauuuggaucucucacagcauucagcucggcaaccagaaucagaucgagacguguaaccaauccgucauuaccuacgaaaauaacacauggguuaaucagaccuaugugaacaucucuaauacaaacuuugcugccgggcagagcguggucuccgugaaacuggcgggaaauucuagccuuugcccuguuuccggcugggcuauuuacagcaaggacaacucuaucagaaucggguccaaaggagauguguucgucauucgggagccguuuaucagcuguucuccccuggaaugccgcaccuucuuucucacacagggcgcccugcuuaaugacaagcauuccaacggcaccauuaaagauagaagcccuuaucggacgcugaugucuugucccaucggggaggugccuucccccuacaacagccgcuucgaauccguugccuggucugcuagcgccugccacgacggaauuaauuggcucaccaucggcaucuccgggccugauaacggagcuguggccguccugaaguauaauggcauuaucacagacaccauuaagagcuggagaaacaauauccugcggacacaagagucugagugugcgugcgugaacggguccuguuuuaccgugaugacggauggaccgagcgacggccaggccucuuacaaaauuuuccgcaucgaaaagggcaaaaucgucaagagcguugagaugaaugcucccaacuaucauuacgaagagugcuccuguuacccugauucuagcgagauuacaugcgugugcagagacaauuggcacggguccaaccggcccugggugagcuuuaaucagaaccucgaauaucagaucggauacauuuguucuggcaucuucggggauaauccucgccccaacgacaaaaccggauccugcggcccggucagcucuaauggggccaacggagugaagggcuuuuccuucaaguauggcaacgggguuuggauuggaagaacaaaaagcaucuccucucggaauggcuuugagaugauuugggauccuaacggguggaccggaaccgacaauaacuucagcaucaagcaagacaucgugggcauuaaugaaugguccggguacucuggcagcuucguccagcaucccgagcugacaggacuugauuguauccgcccuugcuuuuggguggaacugauuagaggccggcccaaagagaacacgaucuggaccuccgggagcucuauuuccuucuguggaguuaauagcgacacagugggcuggucuuggcccgauggggcugagcucccuuuuaccaucgacaaguga

SEQ ID NO: 218012 - RNA, 1410 nt, Artificial Sequence
  derived and/or modified CDS sequence (opt5) from neuraminidase__InfluenzaA__AJJ99606
augaaccccaaucagaagaucauuaccaucggcagcgugugcaugacaauugggauggccaaccugauccuccaaauuggaaauaucaucuccauuuggaucucucacagcauucagcugggcaaccagaaucagaucgagacguguaaccaauccgucauuaccuacgaaaauaacacauggguuaaucagaccuaugugaacaucucuaauacaaacuucgcugccgggcagagcguggucuccgugaaacuugcgggaaauucuagccugugcccuguuuccggcugggcuauuuacagcaaggacaacucuaucagaaucggguccaaaggagauguguuugucauucgggagccguucaucagcuguucuccccucgaaugccgcaccuuuuuccugacacagggcgcccuucugaaugacaagcauuccaacggcaccauuaaagauagaagcccuuaucggacgcucaugucuugucccaucggggaggugccuucccccuacaacagccgcuuugaauccguugccuggucugcuagcgccugccacgacggaauuaauuggcugaccaucggcaucuccgggccugauaacggagcuguggccguccugaaguauaauggcgugauuacagacaccaucaagagcuggagaaacaauauucuccggacacaagagucugagugugcgugcgugaacggguccuguuucaccgucaugacggauggaccgagcgacggccaggccucuuacaaaaucuuucgcauugaaaagggcaaaaucguuaagagcguggagaugaaugcucccaacuaucauuacgaagagugcuccuguuacccugauucuagcgagaucacaugcgugugcagagacaauuggcacggguccaaccggcccugggucagcuucaaucagaaccuggaauaucagauuggauacaucuguucuggcauuuuuggggauaauccucgccccaacgacaaaaccggauccugcggcccggugagcucuaauggggccaacggaguuaagggcuucuccuuuaaguauggcaacgggguguggaucggaagaacaaaaagcauuuccucucggaauggcuucgagaugaucugggauccuaacggguggaccggaaccgacaauaacuuuagcauuaagcaagacaucgucggcaucaaugaaugguccggguacucuggcagcuucgugcagcaucccgagcuuacaggacuggauuguauucgcccuugcuucuggguugaacucaucagaggccggcccaaagagaacacgauuuggaccuccgggagcucuaucuccuuuuguggagugaauagcgacacagucggcuggucuuggcccgauggggcugagcugccuuucaccauugacaaguga

SEQ ID NO: 218013 - RNA, 1413 nt, Artificial Sequence; identical to SEQ ID NO: 209533
  derived and/or modified CDS sequence (opt5) from neuraminidase__InfluenzaA__AJJ99618

SEQ ID NO: 218014 - RNA, 1413 nt, Artificial Sequence
  derived and/or modified CDS sequence (opt5) from neuraminidase__InfluenzaA__AJJ99630
augaaccccaaucagaagaucauuaccaucggcagcauuuccaucgccauugggaucaucucucugaugcuccaaauuggaaacaucauuagcaucugggcuucccacucuauucagacaggcagccagaauaacacggggaucugcaaucagagaauuaucaccuacgagaacuccacaugggugaaucauaccuaugucaacaucaauaacacaaauguuguggccggagaagacaaaaccucugugacacuggcgggcaacagcucccuuuguagcauuucugggugggcuaucuacaccaaggauaauuccauucggaucggaagcaaaggcgacgucuucgugauucgcgagccuuuuaucucuugcucccaccuggaauguagaacguucuuucucacccaaggcgcccugcuuaacgauaagcauagcaaugggacaguuaaagaccggucuccguaucgcgcccugauguccugcccccucggagaggcuccuagccccuacaacuccaaguucgaaucuguggccuggagcgcuuccgccugucacgauggcaugggguggcugaccaucggaauuagcggcccugacaacggggcggucgccgugcugaaguauaauggaaucauuacaggcaccaucaaaucuuggaagaaacagauucucagaacgcaggaguccgagugcguuuguaugaacggcagcugcuuuacaaucaugaccgaugggcccucuaauaaggcugccagcuacaaaaucuucaagauugaaaagggaaaagugacaaaguccaucgagcugaacgcuccuaauuuuuauuacgaagaguguucuugcuacccggacaccggcauugucaugugugugugccgggauaacuggcaugggagcaaucgccccuggguguccuucaaccagaaucuugacuaucaaaucggauacauuugcagcggcgucuuuggggauaacccuagacccgaggacggagaaggcucuuguaauccuguuaccguggauggcgccaacggggugaaaggauucuccuauaaguacggcaauggggucuggaucggacggacaaaaagcaaccgccugagaaagggcuuugagaugauuugggaccccaauggguggacgaacaccgacucugauuucuccaugaaacagaacgugguugcgaucacagacuggagcggcuauuccggaucuuuugugcagcacccggaacucaccggccuggauugcauccggccuuguuucugggucgagcuugugcgcgggcugcccagagaaaauacaaccauuuggacgagcggauccucuaucagcuucugcggcguuaacuccgacacagccaauuggagcuggccugauggggcugagcuccccuuuaccauugacaaguga

SEQ ID NO: 218015 - RNA, 1413 nt, Artificial Sequence; identical to SEQ ID NO: 209533
  derived and/or modified CDS sequence (opt5) from neuraminidase__InfluenzaA__AJJ99642

SEQ ID NO: 218016 - RNA, 1413 nt, Artificial Sequence; identical to SEQ ID NO: 209533
  derived and/or modified CDS sequence (opt5) from neuraminidase__InfluenzaA__AJJ99654

SEQ ID NO: 218017 - RNA, 1413 nt, Artificial Sequence
  derived and/or modified CDS sequence (opt5) from neuraminidase__InfluenzaA__AJJ99666
augaaccccaaucagaagaucauuaccaucggcagcauuuccaucgccauugggaucaucucucugaugcuccaaauuggaaacaucauuagcaucugggcuucccacucuauucagacaggcagccagaauaacacggggaucugcaaucagagaauuaucaccuacgagaacuccacaugggugaaucauaccuaugucaacaucaauaacaauaacguuguggccggagaagacaaaacaucugugacccuggcgggcaauagcucccuuuguagcauuucugggugggcuaucuacacaaaggauaacuccauucggaucggaagcaaaggcgacgucuucgugauucgcgagccuuuuaucucuugcucccaccuggaauguagaaccuucuuucucacgcaaggcgcccugcuuaaugauaagcauagcaacgggaccguuaaagaccggucuccguaucgcgcccugauguccugcccccucggagaggcuccuagccccuacaacuccaaguucgaaucuguggccuggagcgcuuccgccugucacgauggcaugggguggcugacaaucggaauuagcggcccugacaauggggcggucgccgugcugaaguauaacggaaucauuaccggcacaaucaaaucuuggaagaaacagauucucagaacccaggaguccgagugcguuuguaugaauggcagcugcuuuacgaucaugacagaugggcccucuaacaaggcugccagcuacaaaaucuucaagauugaaaagggaaaagugaccaaguccaucgagcugaaugcuccuaacuuucauuaugaagaguguucuugcuacccggacacaggcauugucaugugugugugccgggauaauuggcacgggagcaaccgccccuggguguccuucaaucagaaccuugacuaccaaaucggauauauuugcagcggcgucuuuggggauaauccuagacccgaggacggagaaggcucuuguaacccuguuaccguggauggcgccaauggggugaaaggauucuccuacaaguaugacaacggcgucuggaucgggcggaccaaaagcaaucgccugagaaagggauuugagaugauuugggaccccaacggcuggacaaacacggauucugacuucuccgugaaacaggauguuguggcgaucaccgacuggagcggguacuccggcucuuuuguccagcacccggaacucacaggacuggauugcauccggccuuguuucuggguggagcuuguucgcggccugcccagagaaaauaccacaauuuggaccagcggguccucuaucagcuucugcggagugaacuccgacacggccaauuggagcuggccugauggcgcugagcuccccuuuacaauugacaaguga

SEQ ID NO: 218018 - RNA, 1410 nt, Artificial Sequence
  derived and/or modified CDS sequence (opt5) from neuraminidase__InfluenzaA__AJJ99677
augaaccccaaucagaagaucauuaccaucggcagcgugugcaugacaauugggauggccaaccugauccuccaaauuggaaauaucaucuccauuuggaucucucacagcauucagcugggcaaccagaaucagaucgagacguguaaccaauccgucauuaccuacgaaaauaacacauggguuaaucagaccuaugugaacaucucuaauacaaacuucgcugccgggcagagcguggucuccgugaaacuugcgggaaauucuagccugugcccuguuuccggcugggcuauuuacagcaaggacaacucuaucagaaucggguccaaaggagauguguuugucauucgggagccguucaucagcuguucuccccucgaaugccgcaccuuuuuccugacacagggcgcccuucugaaugacaagcauuccaacggcaccauuaaagauagaagcccuuaucggacgcucaugucuugucccaucggggaggugccuucccccuacaacagccgcuuugaauccguugccuggucugcuagcgccugccacgacggaauuaauuggcugaccaucggcaucuccgggccugauaacggagcuguggccguccugaaguauaauggcauuaucacagacaccauuaagagcuggagaaacaauauccuccggacacaagagucugagugugcgugcgugaacggguccuguuucaccauuaugacggauggaccgagcgacggccaggccucuuacaaaaucuuucgcaucgaaaagggcaaaauuaucaagagcguggagaugaaugcucccaacuaucauuacgaagagugcuccuguuacccugauucuagcgagauuacaugcgucugcagagacaauuggcacggguccaaccggcccuggguuagcuucaaucagaaccuggaauaucagaucggauacauuuguucuggcaucuuuggggauaauccucgccccaacgacaaaaccggauccugcggcccggugagcucuaauggggccaacggagugaagggcuucuccuuuaaguauggcaacggggucuggauuggaagaacaaaaagcaucuccucucggaagggcuucgagaugaucugggauccuaauggguggaccggaaccgacaacagcuuuuccauuaaacaagacaucgugggcaugaaugaauggucuggguacagcggcuccuucguucagcaucccgagcuuacaggacuggauuguauucgcccuugcuucuggguggaacucaucagaggccggcccaaggagaacacgauuuggaccagcgggucuuccaucagcuuuuguggagucaauucuggcacaguggggugguccuggcccgacggagcugagcugccuuucaccaucgauaaauga

SEQ ID NO: 218019 - RNA, 1410 nt, Artificial Sequence
  derived and/or modified CDS sequence (opt5) from neuraminidase__InfluenzaA__AJJ99688
augaaccccaaucagaagaucauuaccaucggcagcgugugcaugacaauugggauggccaaccugauccuccaaauuggaaauaucaucuccauuuggaucucucacagcauucagcugggcaaccagaaucagaucgagacguguaaccaauccgucauuaccuacgaaaauaacacauggguuaaucagaccuaugugaacaucucuaauacaaacuucgcugccgggcagagcguggucuccgugaaacuugcgggaaauucuagccugugcccuguuuccggcugggcuauuuacagcaaggacaacucuaucagaaucggguccaaaggagauguguuugucauucgggagccguucaucagcuguucuccccucgaaugccgcaccuuuuuccugacacagggcgcccuucugaaugacaagcauuccaacggcaccauuaaagauagaagcccuuaucggacgcucaugucuugucccaucggggaggugccuucccccuacaacagccgcuuugaauccguugccuggucugcuagcgccugccacgacggaauuaauuggcugaccaucggcaucuccgggccugauaacggagcuguggccguccugaaguauaauggcauuaucacagacaccauuaagagcuggagaaacaauauccuccggacacaagagucugagugugcgugcgugaacggguccuguuucaccauuaugacggauggaccgagcgacggccaggccucuuacaaaaucuuucgcaucgaaaagggcaaaauuaucaagagcguggagaugaaugcucccaacuaucauuacgaagagugcuccuguuacccugauucuagcgagauuacaugcgucugcagagacaauuggcacggguccaaccggcccuggguuagcuucaaucagaaccuggaauaucagaucggauacauuuguucuggcaucuuuggggauaauccucgccccaacgacaaaaccggauccugcggcccggugagcucuaauggggccaacggagugaagggcuucuccuuuaaguauggcaacggggucuggauuggaagaacaaaaagcaucuccucucggaagggcuucgagaugaucugggauccuaauggguggaccggaaccgacaacagcuuuuccauuaaacaagacaucgugggcauuaaugaauggucuggguacagcggcuccuucguucagcaucccgagcuuacaggacuggauuguauccgcccuugcuucuggguggaacucauuagaggccggcccaaggagaacacgaucuggaccagcgggucuuccaucagcuuuuguggagucaauucuggcacaguggggugguccuggcccgacggagcugagcugccuuucaccauugauaaauga

SEQ ID NO: 218020 - RNA, 1410 nt, Artificial Sequence
  derived and/or modified CDS sequence (opt5) from neuraminidase__InfluenzaA__AJJ99710
augaaccccaaucagaagaucauuaccaucggcagcgugugcaugacaauugggauggccaaccugauccuccaaauuggaaauaucaucuccauuuggaucucucacagcauucagcugggcaaccagucccagaucgagacguguaaucaaucugucauuaccuacgaaaacaauacauggguuaaccagaccuaugugaauaucagcaacacaaauuucgcugccgggcaguccguggucucugugaaacuugcgggaaacagcucccugugcccuguuagcggcugggcuauuuacucuaaggacaauuccaucagaaucgggagcaaaggagauguguuugucauucgggagccguucaucucuuguagcccccucgaaugccgcaccuuuuuccugacacagggcgcccuucugaacgacaagcauuccaauggcaccauuaaagauagaucuccuuaucggacgcucauguccugucccaucggggaggugccuagccccuacaacucccgcuuugaaucuguugccuggagcgcuuccgccugccacgacggaauuaacuggcugaccaucggcaucagcgggccugauaauggagcuguggccguccugaaguauaacggcauuaucacagacaccauuaagucuuggagaaauaacauccuccggacacaagaguccgagugugcgugcgugaaugggagcuguuucaccauuaugacggauggaccgucugacggccaggccagcuacaaaaucuuucgcaucgaaaagggcaaaauugugaaguccgucgagaugaacgcucccaauuaucauuacgaagagugcucuuguuacccugauagcuccaaaaucacaugcguuugcagagacaacuggcacgggagcaaucggcccugggugucuuucaaccagaaucuggaguaucagauuggauacaucuguuccggcauuuuuggggauaacccucgccccaaugacaagaccggaagcugcggcccggugucuuccaacggggccaauggagucaagggcuucagcuuuaaauauggcaacgggguguggaucggaagaacaaaguccauuucuagccggaaaggcuucgaaaugaucugggauccuaacggguggaccggaaccgacaauaacuuuuccaucaagcaagacauuguuggcaucaaugaguggucuggguacagcggcuccuucgugcagcaucccgaacuuacaggacuggauuguauucgcccuugcuucugggucgagcucaucagaggccggcccaaagaaaacacgauuuggaccagcgggucuuccaucagcuuuuguggaguuaauucugacacagugggcugguccuggcccgauggggcugagcugccuuucaccaucgacaaguga

SEQ ID NO: 218021 - RNA, 1410 nt, Artificial Sequence; identical to SEQ ID NO: 212329
  derived and/or modified CDS sequence (opt5) from neuraminidase__InfluenzaA__AJJ99721

SEQ ID NO: 218022 - RNA, 1410 nt, Artificial Sequence; identical to SEQ ID NO: 212329
  derived and/or modified CDS sequence (opt5) from neuraminidase__InfluenzaA__AJJ99732

SEQ ID NO: 218023 - RNA, 1410 nt, Artificial Sequence; identical to SEQ ID NO: 213029
  derived and/or modified CDS sequence (opt5) from neuraminidase__InfluenzaA__AJJ99743

SEQ ID NO: 218024 - RNA, 1410 nt, Artificial Sequence; identical to SEQ ID NO: 210363
  derived and/or modified CDS sequence (opt5) from neuraminidase__InfluenzaA__AJJ99754

SEQ ID NO: 218025 - RNA, 1410 nt, Artificial Sequence
  derived and/or modified CDS sequence (opt5) from neuraminidase__InfluenzaA__AJJ99765
augaaccccaaucagaagaucauuaccaucggcagcgugugcaugacaauugggauggccaaccugauccuccaaauuggaaauaucaucuccauuuggaucucucacagcauucagcugggcaaccagaaucagaucgagacguguaaccaauccgucauuaccuacgaaaauaacacauggguuaaucagaccuaugugaacaucucuaauacaaacuucgcuaccgggcagagcguggucuccgugaaacuugccggaaauucuagccugugcccuguuuccggcugggcgauuuacagcaaggacaacucuaucagaaucggguccaaaggagauguguuugucauucgggagccguucaucagcuguucuccccucgaaugccgcacauuuuuccugacccagggcgcccuucugaaugacaagcauuccaacggcacgauuaaagauagaagcccuuaucggacccucaugucuugucccaucggggaggugccuucccccuacaacagccgcuuugaauccguugcuuggucugccagcgcuugccacgacggaauuaauuggcugacaaucggcaucuccgggccugauaacggagccguggcuguccugaaguauaauggcauuaucaccgacacaauuaagagcuggagaaacaauauccuccggacccaagagucugagugugccugcgugaacggguccuguuucacggugaugacagauggaccgagcgacggccaggcgucuuacaaaauuuuucgcaucgaaaagggcaaaaucgucaagagcguugagaugaaugcccccaacuaucauuacgaagagugcuccuguuacccugauucuagcgagauuaccugcgugugcagagacaauuggcacggguccaaccggcccugggugagcuucaaucagaaccuggaauaucagaucggauacauuuguucuggcaucuuuggggauaauccucgccccaacgacaaaacaggauccugcggcccggucagcucuaauggggcuaacggagugaagggcuucuccuuuaaguauggcaacgggguuuggauuggaagaaccaaaagcaucuccucucggaauggcuucgagaugauuugggauccuaacggguggaccggaacagacaauaacuuuagcaucaagcaagacaucgugggcauuaaugaaugguccggguacucuggcagcuucguccagcaucccgagcuuacgggacuggauuguauccgcccuugcuucuggguggaacucauuagaggccggcccaaagagaacaccaucuggacauccgggagcucuauuuccuuuuguggaguuaauagcgacaccgugggcuggucuuggcccgauggggccgagcugccuuucacaaucgacaaguga

SEQ ID NO: 218026 - RNA, 1413 nt, Artificial Sequence
  derived and/or modified CDS sequence (opt5) from neuraminidase__InfluenzaA__AJJ99777
augaaccccaaucagaagaucauuaccaucggcagcauuuccaucgccauugggaucaucucucugauucuccaaaucggaaacauuaucagcauuugggcuucccacucuauccagacaggcagccagaauaacacggggauuugcaaucagagaaucaucaccuacgagaacuccacaugggugaaucauaccuaugucaacauuaauaacacaaauguuguggccggagaagacaaaaccucugugacacuggcgggcaacagcucccuuuguagcaucucugggugggcuauuuacaccaaggauaauuccauccggauuggaagcaaaggcgacgucuucgugauccgcgagccuuuuaucucuugcucccaccuggaauguagaacguucuuucucacccaaggcgcccugcuuaacgauaagcauagcaaugggacaguuaaagaccggucuccguaucgcgcccugauguccugcccccucggagaggcuccuagccccuacaacuccaaguucgaaucuguggccuggagcgcuuccgccugucacgauggcaugggguggcugaccauuggaaucagcggcccugacaacggggcggucgccgugcugaaguauaauggaauuaucacaggcaccauuaaaucuuggaagaaacagauccucagaacgcaggaguccgagugcguuuguaugaacggcagcugcuuuacaaucaugaccgaugggcccucuaauaaggcugccagcuacaaaauuuucaagaucgaaaagggaaaagugacaaaguccauugagcugaacgcuccuaauuuuuauuacgaagaguguucuugcuacccggacaccggcaucgucaugugugugugccgggauaacuggcaugggagcaaucgccccuggguguccuucaaccagaaucuugacuaucaaauuggauacaucugcagcggcgucuuuggggauaacccuagacccgaggacggagaaggcucuuguaauccuguuaccguggauggcgccaacggggugaaaggauucuccuauaaguacggcaauggggucuggauuggacggacaaaaagcaaccgccugagaaagggcuuugagaugaucugggaccccaauggguggacgaacaccgacucugauuucuccgugaaacaggacguuguggcgaucacagauuggagcggcuauuccggaucuuuuguccagcacccggaacucaccggccuggacugcauucggccuuguuucuggguggagcuuguucgcgggcugcccagagaaaacacagccguguggaccagcggauccucuaucagcuucugcggcgucaauuccgauacggcuaacuggagcuggccugacggggccgagcuccccuuuacaauugauaaguga

SEQ ID NO: 218027 - RNA, 1410 nt, Artificial Sequence; identical to SEQ ID NO: 208810
  derived and/or modified CDS sequence (opt5) from neuraminidase__InfluenzaA__AJJ99788

SEQ ID NO: 218028 - RNA, 1413 nt, Artificial Sequence
  derived and/or modified CDS sequence (opt5) from neuraminidase__InfluenzaA__AJJ99800
augaaccccaaucagaagaucauuaccaucggcagcauuuccaucgccauugggaucaucucucugaugcuccaaauuggaaacaucauuagcaucugggcuucccacucuauucagacaggcagccagaauaacacggggaucugcaaucagagaauuaucaccuacgagaacuccacaugggugaaucauaccuaugugaacaucaauaacacaaauguuguggccggagaagacaaaaccucugugacacuggcgggcaacagcucccuuuguagcauuucugggugggcuaucuacaccaaggauaauuccauucggaucggaagcaaaggcgacgucuucgugauucgcgagccuuuuaucucuugcucccaccuggaauguagaacguucuuucucacccaaggcgcccugcuuaacgauaagcauagcaaugggacaguuaaagaccggucuccguaucgcgcccugauguccugcccccucggagaggcuccuagccccuacaacuccaaguucgaaucuguggccuggagcgcuuccgccugucacgauggcaugggguggcugaccaucggaauuagcggcccugacaacggggcggucgccgugcugaaguauaauggaaucauuacaggcaccaucaaaucuuggaagaaacagauucucagaacgcaggaguccgagugcguuuguaugaacggcagcugcuuuacaaucaugaccgaugggcccucuaauaaggcugccagcuacaaaaucuucaagauugaaaagggaaaagugacaaaguccaucgagcugaacgcuccuaauuuuuauuacgaagaguguucuugcuacccggacaccggcauugucaugugugugugccgggauaacuggcaugggagcaaucgccccuggguguccuucaaccagaaucuugacuaucaaaucggauacauuugcagcggcgucuuuggggauaacccuagacccgaggacggagaaggcucuuguaauccuguuaccguggauggcgccaacggggugaaaggauucuccuauaaguacggcaauggggucuggaucggacggacaaaaagcaaccgccugagaaagggcuuugagaugauuugggaccccaauggguggacgaacaccgacucugauuucuccgugaaacaggacguuguggcgaucacagauuggagcggcuauuccggaucuuuuguccagcacccggaacucaccggccuggacugcauccggccuuguuucuggguggagcuuguucgcgggcugcccagagaaaacacaaccauuuggacgagcggauccucuaucagcuucugcggcgucaauuccgauacagccaacuggagcuggccugacggggcugagcuccccuuuauuaucgauaaguga

SEQ ID NO: 218029 - RNA, 1413 nt, Artificial Sequence; identical to SEQ ID NO: 209533
  derived and/or modified CDS sequence (opt5) from neuraminidase__InfluenzaA__AJJ99812

SEQ ID NO: 218030 - RNA, 1413 nt, Artificial Sequence
  derived and/or modified CDS sequence (opt5) from neuraminidase__InfluenzaA__AJJ99824
augaaccccaaucagaagaucauuaccaucggcagcauuuccaucgccauugggacaaucucucugaugcuccaaaucggaaacauuaucagcauuugggcuucccacucuauccagacgggcagccagaauaacaccgggauuugcaaucagagaaucauuacauacgagaacuccaccugggugaaucauacauaugugaacaucaauaacaccaauguuguggccggagaagacaaaacaucugugacccuggcgggcaacagcucccuuuguagcaucucugggugggcuauuuacacgaaggauaauuccauccggauuggaagcaaaggcgacgucuucgugauccgcgagccuuuuauuucuugcucccaccuggaauguagaaccuucuuucucacacaaggcgcccugcuuaacgauaagcauagcaaugggaccguuaaagaccggucuccguaucgcgcccugauguccugcccccucggagaggcuccuagccccuacaacuccaaguucgaaucuguggccuggagcgcuuccgccugucacgauggcaugggguggcugacaaucggaaucagcggcccugacaacggggcggucgccgugcugaaguauaauggaauuaucaccggcacgauuaaaucuuggaagaaacagauccucagaacacaggaguccgagugcguuuguaugaacggcagcugcuuuaccauuaugacagaugggcccucuaauaaggcugccagcuacaaaaucuucaagaucgaaaagggaaaagugaccaaguccauugagcugaacgcuccuaauuuucauuaugaagaguguucuugcuacccggacaccggcaucgucaugugugugugccgggauaacuggcacgggagcaaucgccccuggguguccuucaaccagaaucuugacuaccaaauuggauauaucugcagcggcgucuuuggggauaacccuagacccgaggacggagaaggcucuuguaauccuguuacaguggauggcgccaacggggugaaaggauucuccuacaaguaugacaauggcgucuggauugggcggacgaaaagcaaccgccugagaaagggauuugagaugaucugggaccccaauggcuggaccaacacagauucugacuucuccgugaaacaggauguuguggcgauuaccgacuggagcggguacuccggcucuuuuguccagcacccggaacucacaggacuggauugcauccggccuuguuucuggguggagcuuguucgcggccugcccagagaaaacaccacgaucuggacaagcggguccucuauuagcuucugcggagucaauuccgacaccgccaacuggagcuggccugauggcgcugagcuccccuuuaccaucgacaaguga

SEQ ID NO: 218031 - RNA, 1410 nt, Artificial Sequence; identical to SEQ ID NO: 218019
  derived and/or modified CDS sequence (opt5) from neuraminidase__InfluenzaA__AJJ99835

SEQ ID NO: 218032 - RNA, 1410 nt, Artificial Sequence; identical to SEQ ID NO: 212329
  derived and/or modified CDS sequence (opt5) from neuraminidase__InfluenzaA__AJJ99846

SEQ ID NO: 218033 - RNA, 1410 nt, Artificial Sequence; identical to SEQ ID NO: 212329
  derived and/or modified CDS sequence (opt5) from neuraminidase__InfluenzaA__AJJ99857

SEQ ID NO: 218034 - RNA, 1410 nt, Artificial Sequence
  derived and/or modified CDS sequence (opt5) from neuraminidase__InfluenzaA__AJJ99868
augaaccccaaucagaagaucauuaccaucggcagcgugugcaugacaauugggauggccaaccugauccuccaaauuggaaauaucaucuccauuuggaucucucacagcauucagcugggcaaccagaaucagaucgagacguguaaccaauccgucauuaccuacgaaaauaacacauggguuaaucagaccuaugugaacaucucuaauacaaacuucgcugccgggcagagcguggucuccgugaaacuugcgggaaauucuagccugugcccuguuuccggcugggcuauuuacagcaaggacaacucuaucagaaucggguccaaaggagauguguuugucauucgggagccguucaucagcuguucuccccucgaaugccgcaccuuuuuccugacacagggcgcccuucugaaugacaagcauuccaacggcaccauuaaagauagaagcccuuaucggacgcucaugucuugucccaucggggaggugccuucccccuacaacagccgcuuugaauccguugccuggucugcuagcgccugccacgacggaauuaauuggcugaccaucggcaucuccgggccugauaacggagcuguggccguccugaaguauaauggcauuaucacagacaccauuaagagcuggagaaacaauauccuccggacacaagagucugagugugcgugcgugaacggguccuguuucaccgugaugacggauggaccgagcgacggccaggccucuuacaaaauuuuucgcaucgaaaagggcaaaaucgucaagagcguugagaugaaugcucccaacuaucauuacgaagagugcuccuguuacccugauucuagcgugauuacaugcgugugcagagacaauuggcacggguccaaccggcccugggucagcuucaaucagaaccuggaguaucagaucggauacauuuguucuggcaucuuuggggauaauccucgccccaacgacaaaaccggauccugcggcccggugagcucuaauggggccaacggaguuaagggcuucuccuuuaaguauggcaacgggguguggauuggaagaacaaaaagcaucuccucucggaauggcuucgaaaugauuugggauccuaacggguggaccggaaccgacaauaacuuuagcaucaagcaaaauaucgucggcauuaacgagugguccggguacucuggcagcuucgugcagcaucccgaacuuacaggacuggacuguauccgcccuugcuucuggguugagcucauuagaggccggcccaaagaaaauacgaucuggaccuccgggagcucuauuuccuuuuguggagugaacagcgauacagucggcuggucuuggcccgacggggcugagcugccuuucaccaucgauaaguga

SEQ ID NO: 218035 - RNA, 1410 nt, Artificial Sequence; identical to SEQ ID NO: 211229
  derived and/or modified CDS sequence (opt5) from neuraminidase__InfluenzaA__AJJ99879

SEQ ID NO: 218036 - RNA, 1410 nt, Artificial Sequence; identical to SEQ ID NO: 208810
  derived and/or modified CDS sequence (opt5) from neuraminidase__InfluenzaA__AJJ99890

SEQ ID NO: 218037 - RNA, 1410 nt, Artificial Sequence
  derived and/or modified CDS sequence (opt5) from neuraminidase__InfluenzaA__AJJ99901
augaaccccaaucagaagaucauuaccaucggcagcgugugcaugacaauugggauggccaaccugauccuccaaauuggaaauaucaucuccauuuggaucucucacagcauucagcugggcaaccagaaucagaucgagacguguaaccaauccgucauuaccuacgaaaauaacacauggguuaaucagaccuaugugaacaucucuaauacaaacuucgcugccgggcagagcguggucuccgugaaacuugcgggaaauucuagccugugcccuguuuccggcugggcuauuuacagcaaggacaacucuaucagaaucggguccaaaggagauguguuugucauucgggagccguucaucagcuguucuccccucgaaugccgcaccuuuuuccugacacagggcgcccuucugaaugacaagcauuccaacggcaccauuaaagauagaagcccuuaucggacgcucaugucuugucccaucggggaggugccuucccccuacaacagccgcuuugaauccguugccuggucugcuagcgccugccacgacggaauuaauuggcugaccaucggcaucuccgggccugauaacggagcuguggccguccugaaguauaauggcauuaucacagacaccauuaagagcuggagaaacaauauccuccggacacaagagucugagugugcgugcgugaacggguccuguuucaccauuaugacggauggaccgagcgacggccaggccucuuacaaaaucuuucgcaucgaaaagggcaaaauugucaagagcguggagaugaaugcucccaacuaucauuacgaagagugcuccuguuacccugauucuagcgagaucacaugcguuugcagagacaauuggcacggguccaaccggcccugggugagcuucaaucagaaccuggaauaucagauuggauacaucuguucuggcauuuuuggggauaauccucgccccaacgacaaaaccggauccugcggcccggugagcucuaauggggccaacggagucaagggcuucuccuuuaaguauggcaacgggguguggaucggaagaacaaaaagcauuuccucucggaagggcuucgagaugaucugggauccuaauggguggaccggaaccgacaacagcuuuuccaucaaacaagacauuguuggcaucaaugaauggucuggguacagcggcuccuucgugcagcaucccgagcuuacaggacuggauuguauucgcccuugcuucugggucgaacucaucagaggccggcccaaggagaacacgauuuggaccagcgggucuuccaucagcuuuuguggaguggacucuggcacaguugggugguccuggcccgauggagcugagcugccuuucaccaucgacaaauga

SEQ ID NO: 218038 - RNA, 1410 nt, Artificial Sequence
  derived and/or modified CDS sequence (opt5) from neuraminidase__InfluenzaA__AJJ99912
augaaccccaaucagaagaucauuaccaucggcagcgugugcaugacaauugggauggccaaccugauccuccaaauuggaaauaucaucuccauuuggaucucucacagcauucagcugggcaaccagucccagaucgagacguguaaucaaucugucauuaccuacgaaaacaauacauggguuaaccagaccuaugugaauaucagcaacacaaauuucgcugccgggcaguccguggucucugugaaacuugcgggaaacagcucccugugcccuguuagcggcugggcuauuuacucuaaggacaauuccaucagaaucgggagcaaaggagauguguuugucauucgggagccguucaucucuuguagcccccucgaaugccgcaccuuuuuccugacacagggcgcccuucugaacgacaagcauuccaauggcaccauuaaagauagaucuccuuaucggacgcucauguccugucccaucggggaggugccuagccccuacaacucccgcuuugaaucuguugccuggagcgcuuccgccugccacgacggaauuaacuggcugaccaucggcaucagcgggccugauaauggagcuguggccguccugaaguauaacggcauuaucacagacaccauuaagucuuggagaaauaacauccuccggacacaagaguccgagugugcgugcgugaaugggagcuguuucaccauuaugacggauggaccgucugacggccaggccagcuacaaaaucuuucgcaucgaaaagggcaaaauugugaaguccgucgagaugaacgcucccaauuaucauuacgaagagugcucuuguuacccugauagcuccaaaaucacaugcguuugcagagacaacuggcacgggagcaaucggcccugggugucuuucaaccagaaucuggaguaucagauuggauacaucuguuccggcauuuuuggggauaacccucgccccaaggacaagaccggaagcugcggcccggugucuuccaauggggccaacggagucaaaggcuucagcuuuaaguauggcaaugggguguggaucggaagaacaaaauccauuucuagccggaagggcuucgaaaugaucugggauccuaacggguggaccggaaccgacaacaauuuuuccaucaaacaagacauuguuggcaucaacgaguggucuggguacagcggcuccuucgugcagcaucccgaacuuacaggacuggauuguauucgcccuugcuucugggucgagcucaucagaggccggcccaaggaaaauacgauuuggaccagcgggucuuccaucagcuuuuguggagugaacucugacacaguuggcugguccuggcccgauggggcugagcugccuuucaccaucgacaaauga

SEQ ID NO: 218039 - RNA, 1410 nt, Artificial Sequence; identical to SEQ ID NO: 212329
  derived and/or modified CDS sequence (opt5) from neuraminidase__InfluenzaA__AJJ99923

SEQ ID NO: 218040 - RNA, 1410 nt, Artificial Sequence; identical to SEQ ID NO: 212781
  derived and/or modified CDS sequence (opt5) from neuraminidase__InfluenzaA__AJJ99934

SEQ ID NO: 218041 - RNA, 1410 nt, Artificial Sequence; identical to SEQ ID NO: 212329
  derived and/or modified CDS sequence (opt5) from neuraminidase__InfluenzaA__AJJ99945

SEQ ID NO: 218042 - RNA, 1410 nt, Artificial Sequence
  derived and/or modified CDS sequence (opt5) from neuraminidase__InfluenzaA__AJJ99956
augaaccccaaucagaagaucauuaccaucggcagcgugugcaugacaauugggauggccaaccugauccuccaaauuggaaauaucaucuccauuuggaucucucacagcauucagcugggcaaccagaaucagaucgagacguguaaccaauccgucauuaccuacgaaaauaacacauggguuaaucagaccuaugugaacaucucuaauacaaacuucgcugccgggcagagcguggucuccgugaaacuugcgggaaauucuagccugugcccuguuuccggcugggcuauuuacagcaaggacaacucuaucagaaucggguccaaaggagauguguuugucauucgggagccguucaucagcuguucuccccucgaaugccgcaccuuuuuccugacacagggcgcccuucugaaugacaagcauuccaacggcaccauuaaagauagaagcccuuaucggacgcucaugucuugucccaucggggaggugccuucccccuacaacagccgcuuugaauccguugccuggucugcuagcgccugccacgacggaauuaauuggcugaccaucggcaucuccgggccugauaacggagcuguggccguccugaaguauaauggcauuaucacagacaccauuaagagcuggagaaacaauauccuccggacacaagagucugagugugcgugcgugaacggguccuguuucaccgugaugacggauggaccgagcgacggccaggccucuuacaaaauuuuucgcaucgaaaagggcaaaaucgucaagagcguugagaugaaugcucccaacuaucauuacgaagagugcuccuguuacccugauucuagcgagauuacaugcgugugcagagacaauuggcacggguccaaccggcccugggugagcuucaaucagaaccuggaauaucagaucggauacauuuguucuggcaucuuuggggauaauccucgccccaacgacaaaaccggauccugcggcccgguccuuagcaauggggccaacggagugaagggcuucucuuuuaaguauggcaacgggguuuggauuggaagaacaaaauccaucagcucccggaauggcuucgagaugauuugggauccuaacggguggaccggaaccgacaauaacuuuucuaucaagcaagacaucgugggcauuaaugaauggagcggguacuccggcucuuucguccagcaucccgagcugacaggacucgauuguauccgcccuugcuucuggguggaacugauuagaggccggcccaaagagaacacgaucuggaccagcggguccagcauuucuuuuuguggaguuaauuccgacacagugggcuggagcuggcccgauggggcugagcuuccuuucaccaucgacaaguga

SEQ ID NO: 218043 - RNA, 1410 nt, Artificial Sequence; identical to SEQ ID NO: 208810
  derived and/or modified CDS sequence (opt5) from neuraminidase__InfluenzaA__AJJ99967

SEQ ID NO: 218044 - RNA, 1413 nt, Artificial Sequence
  derived and/or modified CDS sequence (opt5) from neuraminidase__InfluenzaA__AJJ99991
augaaccccaaucagaagaucauuaccaucggcagcauuuccaucgccauugggaucaucucucugaugcuccaaauuggaaacaucauuagcaucugggcuucccacucuauucagacaggcagccagaauaacacggggaucugcaaucagagaauuaucaccuacgagaacuguacaugggugaaucauaccuaugucaacaucaauaacacaaauguuguggccggagaagacaaaaccuccgugacacuggcgggcaacucuagccuuugcuccauuagcgggugggcuaucuacaccaaggauaauucuauucggaucggauccaaaggcgacgucuucgugauucgcgagccuuuuaucagcuguucucaccuggaaugcagaacguucuuucucacccaaggcgcccugcuuaacgauaagcauuccaaugggacaguuaaagaccggagcccguaucgcgcccugaugucuuguccccucggagaggcuccuucccccuacaacagcaaguucgaauccguggccuggucugcuagcgccugccacgauggcaugggguggcugaccaucggaauuuccggcccugacaacggggcggucgccgugcugaaguauaauggaaucauuacaggcaccaucaaaagcuggaagaaacagauucucagaacgcaggagucugaguguguuugcaugaacggcuccuguuuuacaaucaugaccgaugggcccagcaauaaggcugccucuuacaaaaucuucaagauugaaaagggaaaagugacaaagagcaucgagcugaacgcuccuaauuuucauuaugaagagugcuccuguuacccggacaccggcauugucaugugcgugugccgggauaacuggcacgggucuaaucgccccugggugagcuucaaccagaaucuugacuaccaaaucggauauauuuguuccggcgucuuuggggauaacccuagacccgaggacggagaaggcagcugcaauccuguuaccguggauggcgccaacggggugaaaggauucucuuacaaguaugacaauggcgucuggaucgggcggacaaaauccaaccgccugagaaagggauuugagaugauuugggaccccaauggcuggacgaacaccgauagcgacuucucugugaaacaggauguuguggcgaucacagacugguccggguacagcggcuccuuuguccagcacccggaacucaccggacuggauuguauccggccuugcuucuggguggagcuuguucgcggccugcccagagaaaacacaaccauuuggacgucugggagcuccaucucuuucuguggagugaauagcgacacagccaacugguccuggccugauggcgcugagcuccccuuuaccauugacaaguga

SEQ ID NO: 218045 - RNA, 1410 nt, Artificial Sequence; identical to SEQ ID NO: 218019
  derived and/or modified CDS sequence (opt5) from neuraminidase__InfluenzaA__AJK00003

SEQ ID NO: 218046 - RNA, 1410 nt, Artificial Sequence
  derived and/or modified CDS sequence (opt5) from neuraminidase__InfluenzaA__AJK00014
augaaccccaaucagaagaucauuaccaucggcagcgugugcaugacaauugggauggccaaccugauccuccaaauuggaaauaucaucuccauuuggaucucucacagcauucagcugggcaaccagucccagaucgagacguguaaucaaucugucauuaccuacgaaaacaauacauggguuaaccagaccuaugugaauaucagcaacacaaauuucgcugccgggcaguccguggucucugugaaacuugcgggaaacagcucccugugcccuguuagcggcugggcuauuuacucuaaggacaauuccaucagaaucgggagcaaaggagauguguuugucauucgggagccguucaucucuuguagcccccucgaaugccgcaccuuuuuccugacacagggcgcccuucugaacgacaagcauuccaauggcaccauuaaagauagaucuccuuaucggacgcucauguccugucccaucggggaggugccuagccccuacaacucccgcuuugaaucuguugccuggagcgcuuccgccugccacgacggaauuaacuggcugaccaucggcaucagcgggccugauaauggagcuguggccguccugaaguauaacggcgugauuacagacaccaucaagucuuggagaaauaacauucuccggacacaagaguccgagugugcgugcgugaaugggagcuguuucaccaucaugacggauggaccgucugacggccaggccagcuacaaaauuuuucgcaucgaaaagggcaaaaucgucaaguccguugagaugaacgcucccaauuaucauuacgaagagugcucuuguuacccugauagcuccgagauuacaugcgugugcagagacaacuggcacgggagcaaucggcccugggugucuuucaaccagaaucuggaauaucagaucggauacauuuguuccggcaucuuuggggauaacccucgccccaaugacaaaaccggaagcugcggcccggucucuuccaacggggccaauggagugaagggcuucagcuuuaaguauggcaacgggguuuggauuggaagaacaaaauccaucucuagccggaagggcuucgagaugauuugggauccuaacggguggaccggaaccgacaauaacuuuuccacaaaacaagacaucgugggcaucaaugaauggucuggguacagcggcuccuucguccagcaucccgagcuuacgggacuggauuguauucgcccuugcuucuggguggaacucaucagaggccggcccaaggagaacaccauuuggacaagcgggucuaucauuuccuuuuguggaguuaauagcgacaccgugggcuggucuuggcccgauggggcugagcugccuuucacaaucgacaacuga

SEQ ID NO: 218047 - RNA, 1410 nt, Artificial Sequence
  derived and/or modified CDS sequence (opt5) from neuraminidase__InfluenzaA__AJK00025
augaaccccaaucagaagaucauuaccaucggcagcgugugcaugacaauugggauggccaaccugauccuccaaauuggaaauaucaucuccauuuggaucucucacagcauucagcugggcaaccagaaucagaucgagacguguaaccaauccgucauuaccuacgaaaauaacacauggguuaaucagaccuaugugaacaucucuaauacaaacuucgcugccgggcagagcguggucuccgugaaacuugcgggaaauucuagccugugcccuguuuccggcugggcuauuuacagcaaggacaacucuaucagaaucggguccaaaggagauguguuugucauucgggagccguucaucagcuguucuccccucgaaugccgcaccuuuuuccugacacagggcgcccuucugaaugacaagcauuccaacggcaccauuaaagauagaagcccuuaucggacgcucaugucuugucccaucggggaggugccuucccccuacaacagccgcuuugaauccguugccuggucugcuagcgccugccacgacggaauuaauuggcugaccaucggcaucuccgggccugauaacggagcuguggccguccugaaguauaauggcauuaucacagacaccauuaagagcuggagaaacaauauccuccggacacaagagucugagugugcgugcgugaacggguccuguuucaccauuaugacggauggaccgagcgacggccaggccucuuacaaaaucuuucgcaucgaaaagggcaaaauugugaagucugucgagaugaaugcucccaacuaucauuacgaagagugcuccuguuacccugauucuagcgagaucacaugcguuugcagagacaauuggcacggguccaaccggcccugggugagcuucaaucagaaccuggaauaucagauuggauacaucuguucuggcauuuuuggggauaauccucgccccaacgacaaaaccggauccugcggcccggugagcucuaauggggccaacggagucaagggcuucuccuuuaaguauggcaacgggguguggaucggaagaacaaaaagcauuuccucucggaagggcuucgagaugaucugggauccuaauggguggaccggaaccgacaacagcuuuuccaucaaacaagacauuguuggcaucaaugaauggucuggguacagcggcuccuucgugcagcaucccgagcuuacaggacuggauuguauucgcccuugcuucugggucgaacucaucagaggccggcccaaggagaacacgauuuggaccagcgggucuuccaucagcuuuuguggagugaauagcggcacaguugggugguccuggcccgacggagcugagcugccuuucaccaucgauaaauga

SEQ ID NO: 218048 - RNA, 1410 nt, Artificial Sequence
  derived and/or modified CDS sequence (opt5) from neuraminidase__InfluenzaA__AJK00036
augaaccccaaucagaagaucauuaccaucggcagcgugugcaugacaauugggauggccaaccugauccuccaaauuggaaauaucaucuccauuuggaucucucacagcauucagcugggcaaccagucccagaucgagacguguaaucaaucugucauuaccuacgaaaacaauacauggguuaaccagaccuaugugaauaucagcaacauuaauuucgcugccgggcaguccguggucucugugaaacuugcgggaaacagcucccugugcccuguuagcggcugggcuaucuacucuaaggacaauuccaucagaauugggagcaaaggagauguguuugucauccgggagccguucauuucuuguagcccccucgaaugccgcacauuuuuccugacccagggcgcccuucugaacgacaagcauuccaauggcacaaucaaagauagaucuccuuaucggacccucauguccugucccauuggggaggugccuagccccuacaacucccgcuuugaaucuguugccuggagcgcuuccgccugccacgacggaaucaacuggcugacgaucggcauuagcgggccugauaauggagcuguggccguccugaaguauaacggcaucauuaccgacacaaucaagucuuggagaaauaacauucuccggacccaagaguccgagugugcgugcgugaaugggagcuguuucacaaucaugaccgauggaccgucugacggccaggccagcuacaaaaucuuucgcauugaaaagggcaaaaucgugaaguccgucgagaugaacgcucccaauuaucauuacgaagagugcucuuguuacccugauagcuccgagauuacgugcguuugcagagacaacuggcacgggagcaaucggcccugggugucuuucaaccagaaucuggaauaucagaucggauacauuuguuccggcaucuuuggggauaacccucgccccaaugacaaaacaggaagcugcggcccggugucuuccaacggggccaauggagucaagggcuucagcuuuaaguauggcaacgggguguggauuggaagaaccaaauccaucucuagccggaagggcuucgagaugaucugggauccuaacggguggacaggaaccgacaauaacuuuuccauuaaacaagacaucguuggcauuaaugaauggucuggguacagcggcuccuucgugcagcaucccgagcuuaccggacuggauuguauccgcccuugcuucugggucgaacucauuagaggccggcccaaggagaacacaaucuggacgagcgggucuuccaucagcuuuuguggaguuaauucugacaccgugggcugguccuggcccgauggggcugagcugccuuucacaauugacaaauga

SEQ ID NO: 218049 - RNA, 1410 nt, Artificial Sequence; identical to SEQ ID NO: 213029
  derived and/or modified CDS sequence (opt5) from neuraminidase__InfluenzaA__AJK00047

SEQ ID NO: 218050 - RNA, 1410 nt, Artificial Sequence; identical to SEQ ID NO: 213029
  derived and/or modified CDS sequence (opt5) from neuraminidase__InfluenzaA__AJK00058

SEQ ID NO: 218051 - RNA, 1410 nt, Artificial Sequence
  derived and/or modified CDS sequence (opt5) from neuraminidase__InfluenzaA__AJK00069
augaaccccaaucagaagaucauuaccaucggcagcgugugcaugacaauugggauggccaaccugauccuccaaauuggaaauaucaucuccauuuggaucucucacagcauucagcugggcaaccagaaucagaucgagacguguaaccaauccgucauuaccuacgaaaauaacacauggguuaaucagaccuauuucaacaucucuaauacaaacuuugcugccgggcagagcgugguguccgucaaacuugcgggaaauucuagccugugcccuguguccggcugggcuauuuacagcaaggacaacucuaucagaaucggguccaaaggagauguuuucgugauucgggagccguuuaucagcuguucuccccucgaaugccgcaccuucuuucugacacagggcgcccuucugaaugacaagcauuccaacggcaccauuaaagauagaagcccuuaucggacgcucaugucuugucccaucggggaggucccuucccccuacaacagccgcuucgaauccguggccuggucugcuagcgccugccacgacggaauuaauuggcugaccaucggcaucuccgggccugauaacggagcuguugccgugcugaaguauaauggcauuaucacagacaccauuaagagcuggagaaacaauauccuccggacacaagagucugagugugcgugcgucaacggguccuguuuuaccgugaugacggauggaccgagcgacggccaggccucuuacaaaauuuuccgcaucgaaaagggcaaaaucgucaagagcguggagaugaaugcucccaacuaucauuacgaagagugcuccuguuacccugauucuagcgagauuacaugcguuugcagagacaauuggcacggguccaaccggcccugggugagcuuuaaucagaaccuggaauaucagaucggauacauuuguucuggcaucuucggggauaauccucgccccaacgacaaaaccggauccugcggcccggugagcucuaauggggccaacggagucaagggcuuuuccuucaaguauggcaacgggguguggauuggaagaacaaaaagcaucuccucucggaauggcuuugagaugauuugggauccuaacggguggaccggaaccgacaauaacuucagcaucaagcaagacaucguuggcauuaaugaaugguccggguacucuggcagcuucgugcagcaucccgagcuuacaggacuggauuguauccgcccuugcuuuugggucgaacucauuagaggccggcccaaagagaacacgaucuggaccuccgggagcucuauuuccuucuguggagugaauagcgacacaguuggcuggucuuggcccgauggggcugagcugccuuuuaccaucgacaaguga

SEQ ID NO: 218052 - RNA, 1413 nt, Artificial Sequence; identical to SEQ ID NO: 209533
  derived and/or modified CDS sequence (opt5) from neuraminidase__InfluenzaA__AJK00081

SEQ ID NO: 218053 - RNA, 1413 nt, Artificial Sequence; identical to SEQ ID NO: 208704
  derived and/or modified CDS sequence (opt5) from neuraminidase__InfluenzaA__AJK00093

SEQ ID NO: 218054 - RNA, 1413 nt, Artificial Sequence
  derived and/or modified CDS sequence (opt5) from neuraminidase__InfluenzaA__AJK00105
augagccccaaccagaagaucauuaccaucggcuccauuucuaucgccauugggaucaucagccugaugcuccaaauuggaaauacaaucuccauuugggcuucucacagcauccagacgggcucccagaacaauaccgggauuugcaaccagagaaucauuacauacgaaaauucuaccugggugaaccauacauaugucaauaucaacaauaccaacguuguggccggagaggacaaaacaagcgugacccuggcgggcaauuccagccuuuguucuaucuccgggugggcuauuuacacgaaggauaacagcauccggauuggaucuaaaggcgacgucuucgugauccgcgagccuuuuauuuccugcagccaccuggaauguagaaccuucuuucucacacaaggcgcccugcuuaaugauaagcauucuaacgggaccguuaaagaccgguccccguaucgcgcccugaugagcugcccccucggagaggcuccuucccccuacaauucuaaguucgaaagcguggccugguccgcuagcgccugucacgauggcaugggguggcugacaaucggaaucucuggcccugacaacggggcggucgccgugcugaaguauaacggaauuaucaccggcacgauuaaauccuggaagaaacagauccucagaacacaggagagcgagugcguuuguaugaauggcucuugcuuuaccauuaugacagaugggcccagcaacaaggcugccuccuacaaaaucuucaagaucgaaaagggaaaagugaccaagucuauugagcugaaugcuccuaacuuucauuaugaagaguguagcugcuacccggacaccggcaucgucaugugugugugccgggauaauuggcacggguccaaccgccccugggugagcuucaaucagaaccuugacuaccaaauuggauauaucugcucuggcgucuuuggggauaauccuagacccgaggacggagaaggcuccuguaacccuguuacaguggauggcgccaauggggugaaaggauucagcuacaaguaugacaacggcgucuggauugggcggacgaaaucuaaucgccugagaaagggauuugagaugaucugggaccccaacggcuggaccaauacagauuccgacuucagcgugaaacaggauguuguggcgauuaccgacugguccggguacucuggcagcuuuguccagcacccggaacucacaggacuggauugcauccggccuuguuucuggguggagcuuguucgcggccugcccagagaaaacaccacgaucuggacauccgggucuagcauuuccuucugcggagugaacagcgacaccgccaauuggucuuggccugauggcgcugagcuccccuuuaccaucgacaaguga

SEQ ID NO: 218055 - RNA, 1410 nt, Artificial Sequence; identical to SEQ ID NO: 211085
  derived and/or modified CDS sequence (opt5) from neuraminidase__InfluenzaA__AJK00116

SEQ ID NO: 218056 - RNA, 1410 nt, Artificial Sequence; identical to SEQ ID NO: 209917
  derived and/or modified CDS sequence (opt5) from neuraminidase__InfluenzaA__AJK00127

SEQ ID NO: 218057 - RNA, 1410 nt, Artificial Sequence; identical to SEQ ID NO: 208810
  derived and/or modified CDS sequence (opt5) from neuraminidase__InfluenzaA__AJK00138

SEQ ID NO: 218058 - RNA, 1350 nt, Artificial Sequence
  derived and/or modified CDS sequence (opt5) from neuraminidase__InfluenzaA__AJK00152
augaaccccaaucagaagaucauuaccaucggcagcauuugcauggugacagggaucgucucccugaugcuccaaauuggaaacaucaucucuauguggguuagccacuccauucagacgagaaaucagcaucagaccgagccuauccggaacacaaauuuccugaccgaaaacgccguggcuucugugacacuugccggcaauagcucccuguguccgauucgcgggugggcgguccacucuaaagacaacagcaucagaauuggauccaagggcgauguguuuguuauccgggagcccuucauuagcugcucucaucucgaaugucgcaccuuuuuccugacacaaggggcucuuaucaaugacaaacacuccaacggaaccgugaaggauagaagcccucaucggacgcugaugucuugccccgucggcgaggccccuucccccuacaauagccgcuuugaaucuguggccugguccgcuagcgccugucacgacggcaccuccuggcucacaaucgggauuucuggaccugauaacggcgcuguugccgugcugaaauauaaugggaucauuaccgacacaaucaagagcuggagaaacaauauucugcggacccaggaguccgagugcgcgugugucaacggaagcugcuucacggugaugacagauggcccgucuaacgggcaggccuccuacaagaucuuuaaaauggaaaagggaaaaguggucaagagcguugagcucaaugcucccaacuaucacuacgaagaguguucuugcuauccugacgccggcgagaucaccugugugugccgcgauaauuggcauggcagcaacagacccuggguguccuucaaucagaaccuggaauaccaaauuggguauaucugcucuggagucuuuggcgacaauccucggcccaacgaugggacaggaagcuguggcccgguguccccuaauggggcuuacggaauuaaaggcuucagcuuuaaguacggcaacgggguuuggaucggacgcaccaagucuaccaauuccagaagcggcuucgagaugauuugggaccccaacggguggacaggaacggauucugacuuuuccgugaaacaggacaucgucgaaaucaccgauuggagcggcuauuccgggucuuucgugcagcacccugagcuuacaggccuggacugcauucggcccuguuucuggguugaacucauccgcggaagacccaaggagagcaccauuuggacauccggcucuagcaucuccuuuugcggggugaauagcgauaccgucucuugguccuggccugacggagccgagcugccguucacgauugauaaauga

SEQ ID NO: 218059 - RNA, 1350 nt, Artificial Sequence
  derived and/or modified CDS sequence (opt5) from neuraminidase__InfluenzaA__AJK00167
augaaccccaaucagaagaucauuaccaucggcagcauuugcauggugaucgggauugucucccugaugcuccaaaucggaaacaugaucucuauuuggguuagccacuccauccagacaggcaaucagcaucaggccgagccuauuagaaacgcuaauuuccugacggaaaacgccguggcgucugugacccuugcugggaauagcucccuguguccgguccggggaugggccgugcacucuaaagacaacagcauccgcauuggcuccaagggggauguuuuugugaucagagagcccuucauuagcugcucucaucucgaaugucggacauuuuuccugacccaaggagcccuucugaaugacaaacacuccaacggcacagucaaggaucgcagcccucauagaacccucaugucuugccccgugggcgaggcuccuucccccuacaauagccgguuugaaucuguugccugguccgcuagcgccugucacgacgggacauccuggcugaccaucggaaucucuggcccugauaacggggcgguggccguccugaaauauaauggaauuaucacggacaccauuaagagcuggcgcaacaauauccucagaacacaggaguccgagugcgcuugugugaacggcagcugcuucaccgugaugacagaugggccgucuaacggacaggccuccuacaagauuuuuaaaauggaaaagggcaaagucguuaagagcguggagcugaaugcucccaacuaucacuacgaagaguguucuugcuauccugacgccggcgagaucaccugugugugccgggauaauuggcaugggagcaaccgccccugggucuccuucaaucagaaccuugaauaccaaaucggauauauuugcucuggcguguuuggggacaauccuagacccaacgauggaacgggcagcugugggccgguuuccccuaauggagcguacggcaucaaaggcuucagcuuuaaguacgggaacggaguguggauuggccggacaaagucuaccaauucccgcagcggguucgagaugaucugggaccccaacggauggacagaaaccgauucuaauuuuuccgucaaacaggacauuguggccaucaccgacuggagcggcuauuccgggucuuucguucagcacccugagcugacaggccucgauugcaucagacccuguuucuggguggaacugauucggggacgccccaaggagagcacgaucuggaccuccggcucuagcauuuccuuuugcggggucaacagcgacacagugucuugguccuggccugauggagcugagcuuccguucaccaucgacaaauga

SEQ ID NO: 218060 - RNA, 1350 nt, Artificial Sequence
  derived and/or modified CDS sequence (opt5) from neuraminidase__InfluenzaA__AJK00178
augaaccccaaucagaagaucauuaccaucggcagcauuugcauggugaucgggauugucucccugaugcuccaaaucggaaacaugaucucuauuugggccagccacuccaucagaacaggcaaucagaaccagguugagccuauuaucaauacgaacuucccgaccgaaaaagcugccgcgucuauuacacuggcugggaauagcucccuuugucccauccggggaugggccauucauucuaaggacaacagcauccgcaucggcuccaaaggggauguguuugugauuagagagccuuucaucagcugcucucaccuggaaugucggaccuuuuuccucacacagggagcccugcuuaaugacaagcauuccaacggcaccgucaaagaucgcagcccccacagaacacugaugucuugcccugugggcgaggcucccuccccuuacaauagccgguuugaaucuguugccugguccgcuagcgccugucaugacgggaccuccuggcucacgauuggaaucucuggcccggauaacggggcgguggccguccugaaguauaauggaauuaucaccgacacaaucaagaccuggcgcaacaauauucugagaacacaagagagcgagugcgcuugugugaacggcuccugcuucaccguuaugacggaugggcccagcgacggacaggccucuuacaaaaucuuuaagauggaaaaaggcaaggugauuaaauccgucgagcucgaugcuccuaacuaucacuacgaagaguguagcugcuaucccgacgccggcgagaucacaugugugugccgggauaauuggcacgggucuaaccgcccuugggugagcuucaaucagaaccuggaauaccagauuggauauaucugcuccggcgucuuuggggacaaucccagaccgaccgauggaacaggcucuugugggccuguuagccauaacggagcguacggcgugaagggcuucuccuuuaaguacgggaauggaguguggaucggccggaccaaaagccccaacucucgcuccggguucgagaugauuugggacccuaauggauggagcgaaaccgacucuuccuuuagcgucaagcaagauaucguggccauuacagacugguccggcuauucugggagcuucguucagcaccccgagcuuacgggccuggauugcaucagacccuguuucuggguggaacucauucggggacgcccuaaagaguccaccgucuggacaucuggcagcuccaucagcuuuugcggggugaacucugacaccguuuccuggagcuggccggauggagcugagcugcccuucacaauugacaaguga

SEQ ID NO: 218061 - RNA, 1350 nt, Artificial Sequence
  derived and/or modified CDS sequence (opt5) from neuraminidase__InfluenzaA__AJK00199
augaaccccaaucagaagaucauuaccaucggcagcauuugcauggugaucgggauugucucccugaugcuccaaaucggaaacaugaucucuauuuggguuagccacuccauccagacaggcaaucagaaccagguggagccuauuaucaauacgaacuuccugaccgaaaaagccguggucucuauuacacuugcugggaauagcucccuguguccgaucagaggaugggccauucauucuaaggacaacagcauccggaucggcuccaaaggggauguguuuguuauucgcgagcccuucaucagcugcucucaccucgaauguagaaccuuuuuccugacacaaggagcgcuucugaaugacaagcauuccaacggcaccgugaaagaucggagcccucaccgcacacucaugucuugccccgucggcgaggcuccuucccccuacaauagcagauuugaaucuguggccugguccgccagcgcuugucaugacgggaccuccuggcugacgauuggaaucucuggcccugauaacggggccgcugccguucugaaguauaauggaauuaucaccgacacaaucaagagcuggcggaacaauauucuccgcacccaggaguccgagugcgcgugugugaacggcagcugcuucacagucaugaccgaugggccgucugacggacaggccuccuacaaaaucuuuaagauggaaaaaggcaaggugauuaaaagcguggagcuggaugcucccaacuaucacuacgaagaguguucuugcuauccugacgccggcgagaucacgugugucugcagagauaauuggcacgggagcaaccggcccuggguuuccuucaaucagaaccuugaauaccaaauuggauauaucugcucuggcguguuuggggacaauccucgccccaacgauggaacaggcagcuguuccccggugagccauaauggggcuuacggagucaagggcuucucuuuuaaguacggcaacgggguguggaucggaagaaccaaauccccuaauagccggucuggcuucgagaugauuugggaccccaacgggugguccgaaacagacagcuccuuuucuguuaagcaggauaucguggccauuaccgacuggagcggauauuccggcucuuucguccagcacccugagcugaccgggcucgauugcauccgccccuguuucuggguggaacugauuagaggccggcccaaagagagcacaguuuggacguccggaagcucuaucuccuuuugcggcgugaauagcgacaccgucucuugguccuggccugauggggcggagcuuccguucacaauugacaaguga

SEQ ID NO: 218062 - RNA, 1350 nt, Artificial Sequence
  derived and/or modified CDS sequence (opt5) from neuraminidase__InfluenzaA__AJK00208
augaaccccaaucagaagaucauuaccaucggcagcauuugcauggugacagggaucgucucccugaugcuccaaauuggaaacaucaucucuauguggguuagccacuccauucagacgagaaaucagcaucagaccgagccuauccggaacacaaauuuccugaccgaaaacgccguggcuucugugacacuugccggcaauagcucccuguguccgauucgcgggugggcgguccacucuaaagacaacagcaucagaauuggauccaagggcgauguguuuguuauccgggagcccuucauuagcugcucucaucucgaaugucgcaccuuuuuccugacacaaggggcccuucugaaugacaaacacuccaacggaaccgugaaggauagaagcccucaucggacgcucaugucuugccccgucggcgaggcuccuucccccuacaauagccgcuuugaaucuguggccugguccgcuagcgccugucacgacggcaccuccuggcugacaaucgggaucucuggaccugauaacggcgcuguugccgugcugaaauauaaugggauuaucaccgacacaauuaagagcuggagaaacaauauccuccggacccaggaguccgagugcgcgugugucaacggaagcugcuucacggugaugacagauggcccgucuaacgggcaggccuccuacaagauuuuuaaaauggaaaagggaaaaguggucaagagcguugagcugaaugcucccaacuaucacuacgaagaguguucuugcuauccugacgccggcgagaucaucugugugugccgcgauaauuggcauggcagcaacagacccuggguguccuucaaucagaaccuugaauaccaaauuggguauaucugcucuggagucuuuggcgacaauccucggcccaacgaugggaccggaagcuguggcccgguguccccuaauggggcuuacggaauuaaaggcuucagcuuuaaguacggcaacgggguuuggaucggacgcacaaagucuaccaauuccagaagcggcuucgagaugauuugggaccccaacggguggaccggaacagauucugacuuuuccgugaaacaggacaucgucgaaaucacggauuggagcggcuauuccgggucuuucgugcagcacccugagcugaccggccucgacugcauucggcccuguuucuggguugaacugauccgcggaagacccaaggagagcacaauuuggaccuccggcucuagcaucuccuuuugcggggugaauagcgauacagucucuugguccuggccugacggagccgagcuuccguucaccauugauaaauga

SEQ ID NO: 218063 - RNA, 1350 nt, Artificial Sequence
  derived and/or modified CDS sequence (opt5) from neuraminidase__InfluenzaA__AJK00219
augaaccccaaucagaagaucauuaccaucggcagcauuugcauggugacagggaucgucucccugaugcuccaaauuggaaacaucaucucuauguggguuagccacuccauucagacgagaaaucagcaucaggccgagccuauccggaacaccaauuuccugacagaaaacgcuguggccucugugacccuugcgggcaaucugagccucuguccgauucgcgggugggcuguccacuccaaagacaacaauaucagaauuggaucuaagggcgauguguuuguuauccgggagcccuucauuagcugcucccaucuggaaugucgcacauuuuuccuuacccaaggggcccugcucaacgacaaacacagcaauggaacagugaaggauagaucuccucaucggacccugauguccugccccgucggcgaggccccuagccccuacaacucucgcuuugaauccguggcuuggagcgccucugcuugucacgacggcacguccuggcugaccaucgggaucagcggaccugauaauggcgccguugcggugcucaaauauaacgggauuaucacagacaccauuaaguccuggagaaauaacauccugcggacacaggagucugagugcgccugugucaacggaagcugcuucaccgugaugacggauggcccguccaaugggcaggcuagcuacaagauuuuuaaaauggaaaagggaaaaguggucaagucuguugagcuuaacgcccccaauuaucacuacgaagaguguuccugcuauccugacgcuggcgagaucaucugugugugccgcgauaacuggcauggcagcaauagacccugggugucuuucaaccagaaucuggaauaccaaauuggguauaucugcagcggagucuuuggcgacaacccucggcccaaugaugggacaggauccuguggcccggugucuccuaacggggccuacggaauuaaaggcuucagcuuuaaguacggcaaugggguuuggaucggacgcaccaaguccacaaacagcagaucuggcuucgagaugauuugggaccccaauggguggaccggaaccgauuccgacuuuagcgugaaacaggacaucgucgaaaucacagauuggucuggcuauuccgggagcuucgugcagcacccugagcucacgggccuggacugcauucggcccuguuucuggguugaacuuauccgcggaagacccaaggaguccaccauuuggacaucuggcagcuccaucucuuuuugcggggugaacagcgauaccgucuccuggagcuggccugacggagcggagcugccguucacaauugauaaauga

SEQ ID NO: 218064 - RNA, 1350 nt, Artificial Sequence
  derived and/or modified CDS sequence (opt5) from neuraminidase__InfluenzaA__AJK00230
augaaccccaaucagaagaucauuaccaucggcagcauuugcauggugacagggaucgucucccugaugcuccaaauuggaaacaucaucucuauguggguuagccacuccauucagacgagaaaucagcaucagaccgagccuauccggaacacaaauuuccugaccgaaaacgccguggcuucugugacacuugccggcaauagcucccuguguccgauucgcgggugggcgguccacucuaaagacaacagcaucagaauuggauccaagggcgauguguuuguuauccgggagcccuucauuagcugcucucaucucgaaugucgcaccuuuuuccugacacaaggggcucuuaucaaugacaaacacuccaacggaaccgugaaggauagaagcccucaucggacgcugaugucuugccccgucggcgaggccccuucccccuacaauagccgcuuugaaucuguggccugguccgcuagcgccugucacgacggcaccuccuggcucacaaucgggauuucuggaccugauaacggcgcuguugccgugcugaaauauaaugggaucauuaccgacacaaucaagagcuggagaaacaauauucugcggacccaggaguccgagugcgcgugugucaacggaagcugcuucacggugaugacagauggcccgucuaacgggcaggccuccuacaagaucuuuaaaauggaaaagggaaaaguggucaagagcguugagcucaaugcucccaacuaucacuacgaagaguguucuugcuauccugacgccggcgagaucauuugugugugccgcgauaauuggcauggcagcaacagacccuggguguccuucaaucagaaccuggaauaccaaaucggguauauuugcucuggagucuuuggcgacaauccucggcccaacgaugggaccggaagcuguggcccgguguccccuaauggggcuuacggaaucaaaggcuucagcuuuaaguacggcaacgggguuuggauuggacgcacaaagucuaccaauuccagaagcggcuucgagaugaucugggaccccaacggguggaccggaacagauucugacuuuuccgugaaacaggacaucgucgaaauuacggauuggagcggcuauuccgggucuuucgugcagcacccugagcuuaccggccuggacugcauccggcccuguuucuggguugaacucauucgcggaagacccaaggagagcacaaucuggaccuccggcucuagcauuuccuuuugcggggugaauagcgauacagucucuugguccuggccugacggagccgagcugccguucaccaucgauaaauga

SEQ ID NO: 218065 - RNA, 1380 nt, Artificial Sequence
  derived and/or modified CDS sequence (opt5) from neuraminidase__InfluenzaA__AJS18470
augaaccccaaucagaagauuaccugcaucagcgccacaggcgugacgcuguccgucguuucucuccugaucgggauugcuaaccuuggacugaauaucggccuccacuacaaaguggacgauagcaccacaauuaacaucccuaauaugaacgagaccaauccgacaaucaccaacauuacaaauaucauugugaacaagaaugaagagagaaccuuccugaaccuuacgaaaccccugugugaagucaauuccuggcauauccucucuaaggacaacgccauucggaucggggaggaugcgcacauucuggugacccgcgaaccuuaucugagcugcgacccccaaggauguagaauguuugcucucucccagggcacaacccugcgggggcgccaugccaauggaacaauccacgauagaucuccuuuccgggcccuuaucagcugggagaugggccaggcucccuccccuuacaacacccgcguugagugcauuggcuggagcucuacguccugucaugacgggaucagcagaaugucuauuugcaucuccggaccgaacaauaacgccagcgcuguggucugguaucggggccgccccgugacagaaauuccuucuuggguugggaauauccugagaacccaggaguccgaaugugugugccacaaaggaaucugucccgucgugaugacagauggcccugccaacaauaaggcggccaccaagauuaucuacuuuaaagaggggaagauucagaaaaucgaggaacuccaaggaaacgcucagcacguggaggaaugcagcuguuauggcgccgcuggcaugauuaagugcgucugccgggacaauuggaaaggggccaaccgccccaucaucaccauugauccggagaugaugacacauacguccaaguaccuguguucuaagauccuuaccgacacaagcagaccuaaugaucccaccaacggaaauugcgacgcgccuauuaucggcgggucccccgaucccggaguuaaaggcuucgccuaucuggacggggaaaacagcuggcucggacggacaauuucuaaggacucccgcagcggcuacgagaugcugaaagugccuaaugcugagaccgauacgcagucuggcccgacaagcuaccaacugaucgugaacaaucagaacugguccggguauucuggagccuuuauugacuacugggcuaacaagggcuguuucaaucccugcuuuuaugucgaacucaucagagggcggccuaaagagaucgaugugcuguggaccagcaacuccaugguugcccuuuguggaagcagagaacgccugggcucuugguccuggcacgacggggccgagauuaucuacuucaaguga

SEQ ID NO: 218066 - RNA, 1380 nt, Artificial Sequence
  derived and/or modified CDS sequence (opt5) from neuraminidase__InfluenzaA__AJS18481
augaaccccaaucagaagauuaccugcaucagcgccacaggcgugacgcuguccgucguuucucuccugaucgggauugcuaaccuuggacugaauaucggccuccacuacaaagugagcgacuccaccacaauuaacucuccuaauaugaacgagaccaauccgacaaccacaaacaucaccaauaucauugugaacaagaaugaagagagaacguuccugaaccuuaccaaaccccugugugaagucaauagcuggcauauccucuccaaggauaacgccauucggaucggggaggaagcgcacauucuggugacacgcgagccuuaucugucuugcgacccccaaggauguagaauguuugcucucagccagggcaccacacugcgggggcgccaugccaauggaaccauccacgauagauccccuuuccgggcccuuauuagcugggagaugggccaggcucccucuccuuacaacacgcgcguugaaugcaucggcugguccagcacaucuugucaugacgggaucuccagaaugagcauuugcaucucuggaccgaacaauaacgccuccgcuguggucugguaucggggccgccccgugaccgagauuccuagcugggccgggaauauccugagaacacaggaauccgaguguguuugccacaaaggaauuugucccguggucaugaccgauggcccugcgaacaauaaggccgcuaccaagaucaucuacuuucgggaggggaaaauucaaaagaucgaggaacuccagggaaacgcccagcacauugaagagugcucuuguuauggcgcugccggcaugaucaaaugcgcgugccgcgacaauuggaagggggccaacagacccauuaucacaaucgauccggaaaugaugacgcauaccagcaaauaccuguguuccaagauucuuacagacaccagccggccuaaugaucccacaaacggaaauugcgacgcuccugugaccggcgggucucccgaucccggaaucaagggcuucgccuuucuggacggggagaacuccuggcucggacgcacgauuagcaaaaauucuagaagcggcuaugagaugcugaaggugccuaacgcugaaacagauacccaguccggcccgaccucuuaccaacugaucgucaauaaccagaacuggagcggguacuccggagccuucauugacuauugggccaauaaagaguguuuuaaccccugcuucuacguugaacucauccggggcagaccuaaggagagcgacgugcuguggacaucuaauuccaugguggcucuuugugggagccgcgaacggcugggaucuugguccuggcacgauggcgcggagauuaucuauuuuaaauga

SEQ ID NO: 218067 - RNA, 1410 nt, Artificial Sequence
  derived and/or modified CDS sequence (opt5) from neuraminidase__InfluenzaA__AKA59350
augaaccccaaucagaagaucauuaccaucggcagcgugugcaugacaauuggggucgccaaccugauccuccaaauuggaaauaucaucuccauuuggaucucucacagcauucagcugggcaaccagaaucagaucgagacguguaaccaauccguuauuaccuacgaaaauaacacaugggugaaucagaccgacgugaacaucucuaauacaaacuucgcugccgggcagagcgucguguccguuaaacuugcgggaaauucuagccugugcccuguguccggcugggcuauuuauagcaaggauaacucuaucagaaucggguccaaaggagacgucuuugugauucgggagccguucaucagcuguucuccccucgaaugccgcaccuuuuuccugacacagggcgcccuucugaaugauaagcauuccaacggcaccauuaaagacagaagcccuuaccggacgcucaugucuugucccaucggggagguuccuucccccuauaacagccgcuuugaauccguggccuggucugcuagcgccugccacgauggaauuaauuggcugaccaucggcaucuccgggccugacaacggagcugucgccgugcugaaguacaauggcauuaucacagauaccauuaagagcuggagaaacaauauccuccggacacaagagucugagugugugugcgucaacggguccuguuucaccguuaugacggacggaccgagcaauggccaggcgucuuauaaaauuuuucgcaucgaaaagggcaaaaucgucaagagcguggagaugaacgcccccaauuaccauuaugaagagugcuccuguuacccugauucuagcgagauuacaugcgugugcagagacaacuggcacggguccaaucggcccugggugagcuucaaccagaaucuggaauaccagaucggauauauuuguucuggcaucuuuggggauaacccucgccccaaugacaaaaccggauccugcggcccgguuagcucuaacggggcuaacggagugaagggcuucuccuuuaaguacggcaauggggucuggauuggaagaacaaaaagcaucuccucucggaacggcuucgagaugauuugggauccuaauggguggaccggaaccgacaacaauuuuagcaucaagcaagacaucgugggcauuaacgaaugguccggguauucuggcagcuucguucagcaucccgagcuuacaggacuggauuguauccgcccuugcuucuggguggaacucauuagaggccggcccaaagagaauacggucuggaccuccgggagcucuaucuccuuuuguggagugaacagcgacacagucggcuggucuuggcccgauggggccgagcugccuuucaccauugacaaguga

SEQ ID NO: 218068 - RNA, 1410 nt, Artificial Sequence
  derived and/or modified CDS sequence (opt5) from neuraminidase__InfluenzaA__AKA59352
augaaccccaaucagaagaucauuaccaucggcagcgugugcaugacaauugggauggccaaccugaugcuccaaaucggaaauauuaucuccaucuggauuucucacagcauccagcugggcaaccagaaucagauugagacguguaaccaauccgucaucaccuacgaaaauaacacauggguuaaucagaccuaugugaacauuucuaauacaaaccuugcuguggggcagagcgucguguccaccaaacuggccggaaauucuagccucugcccuguuuccggcugggcgaucuacagcaaggacaacucuauuagaaucggguccaaaggagauguguucgucauccgggagccguuuauuagcuguucuccccuggaaugccgcacauucuuucuuacccagggcgcucugcucaaugacaagcauuccaacggcacgaucaaagauagaagcccuuaucggacccugaugucuugucccauuggggaggugccuucccccuacaacagccgcuucgaauccguugccuggucugccagcgcuugccacgacggaaucaauuggcugacaauuggcaucuccgggccugauaacggagccguggcuguccucaaguauaauggcaucauuaccgacacaaucaagagcuggagaaacaauauucugcggacccaagagucugagugugccugcgugaacggguccuguuuuacggugaugacagauggaccgagcgacggccaggcgucuuacaaaaucuuccgcauugaaaagggcaaaaucgucaagagcguugagaugaaugcccccaacuaucauuacgaagagugcuccuguuacccugauucuagcgagauuaccugcgugugcagagacaauuggcacggguccaaccggcccugggugagcuuuaaucagaaccuugaauaucagaucggauacaucuguucuggcauuuucggggauaauccucgccccaacgacaaaacaggauccugcggcccggucagcucuaauggggcuaacggagugaagggcuuuuccuucaaguauggcaacgggguuuggaucggaagaaccaaaagcauuuccucucggaauggcuuugagaugaucugggauccuaacggguggaccggaacagacaauaacuucagcauuaagcaagacaucgugggcaucaaugaaugguccggguacucuggcagcuuuguccagcaucccgagcugacgggacucgauuguauucgcccuugcuucuggguggaacugaucagaggccggcccaaagagaacaccauuuggacauccgggagcucuaucuccuucuguggaguuaauagcgacaccgugggcuggucuuggcccgauggggccgagcuuccuuuuacaauugacaaguga

SEQ ID NO: 218069 - RNA, 1410 nt, Artificial Sequence
  derived and/or modified CDS sequence (opt5) from neuraminidase__InfluenzaA__AKA59354
augaaccccaaucagaagaucauuaccaucggcagcgugugcaugacaauuggggucgccaaccugauccuccaaauuggaaauaucaucuccauuuggaucucucacagcauucagcugggcaaccagaaucagaucgagacguguaaccaauccguuauuaccuacgaaaauaacacaugggcuaaucagaccuaugugaacaucucuaauacaaacuucgccgcggggcagagcguggucuccgugaaacuugcuggaaauucuagccugugcccuguuuccggcugggccauuuacagcaaggacaacucuaucagaaucggguccaaaggagauguguuugucauucgggagccguucaucagcuguucuccccucgaaugccgcaccuuuuuccugacacagggcgcccuucugaaugacaagcauuccaacggcaccauuaaagauagaagcccuuaucggacgcucaugucuugucccaucggggaggugccuucccccuacaacagccgcuuugaauccguugcuuggucugccagcgcuugccacgacggaauuaauuggcugaccaucggcaucuccgggccugauaacggagccguggcgguccugaaguauaauggcauuaucacagacaccauuaagagcuggagaaacaauauccuccggacacaagagucugagugugugugcgugaacggguccuguuucaccgucaugacggauggaccgagcaauggccaggccucuuacaaaauuuuucgcaucgaaaagggcaaaaucguuaagagcguggagaugaacgcucccaauuaucauuacgaagagugcuccuguuacccugacucuagcgagauuacaugcgugugcagagauaacuggcacggguccaaucggcccugggucagcuucaaccagaaucuggaauaucagaucggauacauuuguucuggcaucuuuggggacaacccucgccccaaugauaaaaccggauccugcggcccggugagcucuaacggggccaacggaguuaagggcuucuccuuuaaguauggcaaugggguguggauuggaagaacaaaaagcaucuccucucggaacggcuucgagaugauuugggacccuaauggguggaccgaaaccgauaacaauuuuagcaucaagcaagacaucgucggaauuaacgagugguccggcuacucugggagcuucgugcagcaucccgaacuuacaggccuggacuguauccgcccuugcuucuggguugagcucauuagaggacggcccaaagagaauacgguguggaccuccggcagcucuaucuccuuuuguggggucaacagcgauacagugggauggucuuggcccgacggcgcugaacugccuuucaccauugauaaguga

SEQ ID NO: 218070 - RNA, 1380 nt, Artificial Sequence
  derived and/or modified CDS sequence (opt5) from neuraminidase__InfluenzaA__AKS48026
augaaccccaaucagaagauuaccugcaucagcgccacaggcgugacgcuguccgucguuucucuccugaucgggauugcuaaccuuggacugaauaucggccuccacuacaaagugagcgacuccaccacaauuaacaucccuaauaugaacgagaccaauccgacaaccacaaacaucaccaauauuaucgugaacaagaaugaagagagaacguuccugaaccuuaccaaaccccugugugaagucaauucuuggcauauucucagcaaggauaacgccauccggauuggggaggacgcgcacauccuggugacacgcgaaccuuaucuguccugcgauccccaaggauguagaauguuugcucucucucagggcaccacacugcgggggcgccaugccaauggaaccauucacgacaaaagcccuuucagagcccuuaucuccugggagaugggccaggcucccagcccuuacaacacgcggguugagugcaucggcuggucuuccacaagcugucaugaugggauuucucgcauguccaucugcauuagcggaccgaacaauaacgccucugcuguggucugguauagaggccggcccgugaccgaaaucccuuccuggguugggaauauucugcgcacacaggagagcgaaugugugugccacaagggaaucugucccgucgugaugaccgacggcccugccaacaauaaggcggccaccaaaaucauuuacuuuaaggaggggaaaauccaaaagauugaggaacuccagggaaacgcucagcacaucgaggaaugcuccuguuauggcgccgcuggcaugauuaaaugcgugugcagagauaauuggaagggggccaaccggcccaucaucacaauugacccggagaugaugacgcauaccucuaaguaccuguguagcaaaauccuuacagauaccucccgcccuaaugaccccacaaacggaaauugcgaugaaccuauuaccggcgggagccccgaccccggagucaagggcuucgcguuucuggauggggagaacucuuggcucggaagaacgaucuccaaagacagccggucuggcuaugagaugcugaagguuccuaaugccgaaacagacacccagagcggcccgaccuccuaccaacugauugugaacaaucagaacuggucuggguacagcggagcuuucaucgauuauugggccaacaaagaguguuuuaaucccugcuucuacguggaacucauucgcggcagaccuaaggagaucgacguccugugggcuuccaacagcaugguggcccuuugugggucucgggaaagacugggauccuggagcuggcacgauggcgccgagaucauuuauuuuaaauga

SEQ ID NO: 218071 - RNA, 1380 nt, Artificial Sequence
  derived and/or modified CDS sequence (opt5) from neuraminidase__InfluenzaA__AKS48040
augaaccccaaucagaagauuaccugcaucagcgccacaggcaugacgcuguccguggucucucuccugaucgggauugcuaaccuuggacugaauaucggccuccacuacaaaguuagcgacuccaccacaauuaacaucccuaauaugaacgagaccaauccgacaaccacaaacaucaccaauauuaucgugaacaagaaugaagagagaacguuccugaaccuuaccaaaccccugugugaagucaauucuuggcauauucucagcaaggauaacgccauccggauuggggaggacgcgcacauccuggugacacgcgaaccuuaucuguccugcgauccccaaggauguagaauguuugcucucucucagggcaccacacugcgggggcgccaugccaauggaaccauucacgacagaagcccuuuccgggcccuuaucuccugggagaugggccaggcucccagcccuuacaacacgcgcguggagugcaucggcuggucuuccacaagcugucaugaugggauuucuagaauguccaucugcauuagcggaccgaacaauaacgccucugcuguugugugguaucggggccgccccgucaccgaaaucccuuccuggguggggaauauucugagaacacaggagagcgaauguguuugccacaaaggaaucugucccguggucaugaccgacggcccugccaacaauaaggcggccaccaagaucauuuacuuuaaagaggggaagauccagaaaauugaggaacuccaaggaaacgcucagcacaucgaggaaugcuccuguuauggcgccgcuggcaugauuaagugcgugugccgggauaauuggaaaggggccaaccgccccaucaucacaauugacccggagaugaugacgcauaccucuaaguaccuguguagcaagauccuuacagauaccuccagaccuaaugaccccacaaacggaaauugcgaugcgccuauuaccggcgggagccccgaccccggagugaaaggcuucgccuuucuggauggggaaaacucuuggcucggacggacgaucuccaaggacagccgcucuggcuaugagaugcugaaagucccuaaugcugagacagacacccagagcggcccgaccuccuaccaacugauuguuaacaaucagaacuggucuggguacagcggagccuucaucgauuauugggcuaacaaggaauguuuuaaucccugcuucuacguggagcucauuagaggccggccuaaagaaaucgacgugcugugggccuccaacagcauggucgcccuuugugggucuagagagcgccugggauccuggagcuggcacgauggcgcugaaaucauuuauuuuaaguga

SEQ ID NO: 218072 - RNA, 1380 nt, Artificial Sequence
  derived and/or modified CDS sequence (opt5) from neuraminidase__InfluenzaA__ALO75898
augaaccccaaucagaagauuaccugcaucagcgccacaggcgugacgcuguccgucguuucucuccugaucgggauugcuaaccuuggacugaauaucggccuccacuacaaagugagcgacuccaccacaauuaacaucccuaauaugaacgagaccaauccgacaaccacaaacaucaccaauauuaucgugaacaagaaugaagagagaacguuccugaaccuuaccaaaccccugugugaagucaauucuuggcauauucucagcaaggauaacgccauccggauuggggaggacgcgcacauccuggugacacgcgaaccuuaucuguccugcgauccccaaggauguagaauguuugcucucucucagggcaccacacugcgggggcgccaugccaauggaaccauucacgacagaagcccuuuccgggcccuuaucuccugggagaugggccaggcucccagcccuuacaacacgcgcguugagugcaucggcuggucuuccacaagcugucaugaugggauuucuagaauguccaucugcauuagcggaccgaacaauaacgccucugcuguggucugguaucggggccgccccgugaccgaaaucccuuccuggguugggaauauucugagaacacaggagagcgaaugugugugccacaaaggaaucugucccgucgugaugaccgacggcccugccaacaauaaggcggccaccaagaucauuuacuuuaaagaggggaagauccagaaaauugaggaacuccaaggaaacgcucagcacaucgaggaaugcuccuguuauggcgccgcuggcaugauuaagugcgugugccgggauaauuggaaaggggccaaccgccccaucaucacaauugacccggagaugaugacgcauaccucuaaguaccuguguagcaagauccuuacagauaccuccagaccuaaugaccccacaaacggaaauugcgaugcgccuauuaccggcgggagccccgaccccggagucaaaggcuucgccuuucuggauggggaaaacucuuggcucggacggacgaucuccaaggacagccgcucuggcuaugagaugcugaaaguuccuaaugcugagacagacacccagagcggcccgaccuccuaccaacugauugugaacaaucagaacuggucuggguacagcggagccuucaucgauuauugggcuaacaaggaauguuuuaaucccugcuucuacguggagcucauuagaggccggccuaaagaaaucgacguccugugggccuccaacagcaugguggcccuuugugggucuagagagcgccugggauccuggagcuggcacgauggcgcugaaaucauuuauuuuaaguga

SEQ ID NO: 218073 - RNA, 1380 nt, Artificial Sequence; identical to SEQ ID NO: 218072
  derived and/or modified CDS sequence (opt5) from neuraminidase__InfluenzaA__ALO75910

SEQ ID NO: 218074 - RNA, 1380 nt, Artificial Sequence
  derived and/or modified CDS sequence (opt5) from neuraminidase__InfluenzaA__ALO75922
augaaccccaaucagaagauuaccugcaucagcgccacaggcgugacgcuguccgucguuucucuccugaucgggauugcuaaccuuggacugaauaucggccuccacuacaaagugagcgacuccaccacaauuaacaucccuaauaugaacgagaccaauccgacaaccacaaacaucaccaauauuaucgugaacaagaaugaagagagaacguuccugaaccuuaccaaaccccugugugaagucaauucuuggcauauucucagcaaggauaacgccauccggauuggggaggacgcgcacauccuggugacacgcgaaccuuaucuguccugcgauccccaaggauguagaauguuugcucucucucagggcaccacacugcgggggcgccaugccaauggaaccauucacgacagaagcccuuuccgggcccuuaucuccugggagaugggccaggcucccagcccuuacaacacgcgcguugagugcaucggcuggucuuccacaagcugucaugaugggauuucuagaauguccaucugcauuagcggaccgaacaauaacgccucugcuguggucugguaucggggccgccccgugaccgaaaucccuuccuggguugggaauauucugagaacacaggagagcgaaugugugugccacaaaggaaucugucccgucgugaugaccgacggcccugccaacaauaaggcggccaccaagaucauuuacuuuaaagaggggaagauccagaaaauugaggaacuccaaggaaacgcucagcacaucgaggaaugcuccuguuauggcgccgcuggcaugauuaagugcgugugccgggauaauuggaaaggggccaaccgccccaucaucacaauugacccggagaugaugacgcauaccucuaaguaccuguguagcaagauccuuacagauaccuccagaccuaaugaccccacaaacggaaauugcgaugaaccuauuaccggcgggagccccgaccccggagucaaaggcuucgcguuucuggauggggagaacucuuggcucggacggacgaucuccaaggacagccgcucuggcuaugagaugcugaaaguuccuaaugccgaaacagacacccagagcggcccgaccuccuaccaacugauugugaacaaucagaacuggucuggguacagcggagcuuucaucgauuauugggccaacaaggaguguuuuaaucccugcuucuacguggaacucauuagaggccggccuaaagagaucgacguccugugggcuuccaacagcaugguggcccuuugugggucuagagaacgccugggauccuggagcuggcacgauggcgccgagaucauuuauuuuaaguga

SEQ ID NO: 218075 - RNA, 1401 nt, Artificial Sequence
  derived and/or modified CDS sequence (opt5) from neuraminidase__InfluenzaA__ALT20083
augaaccccaaucagagaaucaccgccauuggcagcgugucccugaucauugcuaucauuugccuccugaugcaaaucgccauccuuacaacgaccaugacacugcacuuccggcagaacgaguguucuaauccuagcaacaaucaggucaugccgugcgaacccauuaucauugagcgcaacaccguucaucucaauuccacaaccaucgaaagagagauuuguccuaagguggcggaauacaaaaacuggucuaagccccagugccaaaucacaggguuugcuccuuucagcaaagacaauuccauucggcugucugccagcggagauaucugggugacccgcgagcccuaugucuccuguagccuuaacaagugcuaccaguuugcccugggccaggggacgacccucaaaaauaagcacucuaacggaacaacccaugacagaacaccucaccggacccugcugaugaaugagcucggcgugccguuccaucuggggacgaagcagguuuguaucgcuugguccuccucuuccugcuaugauggaaaagccuggcuucacgugugugucacaggcgacgauaagaacgcuaccgccagcauuaucuacgacggcaugcugguggauucuauuggguccuggagcaaaaauauccuccgcacacaagaauccgagugcguuuguauuaacggaaccugcgcgguggucaugaccgacggcucugccagcgggaaggcugauacaagagugcuguuuauccgggaaggaaaaaucauuaacaucagcccccuuagcggcucugcccagcacguggaggagugcuccuguuauccucgcuaccccgaagucagaugcguuugucgggacaauuggaaggggagcaaccgcccuauucuguauaucaauauggcugauuacucuauugagagcuccuacgugugcucuggacucgugggcgacacgcccagaaacgaugacagcuccucuagcuccaauugucgggacccgaacaaugaacgcggcgccccuggggucaagggaugggcguucgaugacggcaacgauguguggauggggagaaccaucaaaaauggaagccggucuggcuaugagacauuuagaguugugaacggguggaccauggccaauuccaagagccagaucaaccgccaggucauuguggacuccaaugauuggucuggauacagcggcaucuucuccguugaaggcaaaaagugcauuaaccgguguuuuuauguggagcugaucagagggcgcccccaagagccucgggucugguggacaucuaauagcauuaucguguucugcggaaccuccggcacguacgggacaggaagcuggcccgacggcgcuaacauuaacuuuaugcccaucuga

SEQ ID NO: 218076 - RNA, 1410 nt, Artificial Sequence
  derived and/or modified CDS sequence (opt5) from neuraminidase__InfluenzaA__AMA65392
augaaccccaaucagaagaucauuaccaucggcagcgugugcaugacaauugggauggccaaccugauccuccaaauuggaaauaucaucuccauuugggucucucacagcauccagauuggcaaccagucccagaucgagacguguaaucaaucuguuauuaccuacgaaaacaauacaugggugaaccagaccuaugugaauaucagcaacacaaauuucgcugccgggcaguccgucgugucuguuaaacuggcgggaaacagcucccuuugcccugugagcggcugggcuauuuacucuaaggacaauuccgucagaaucgggagccggggagauguguuuguuauccgcgagccguucauuucuuguagcccccuggaaugcagaaccuuuuuccucacacagggcgcccugcuuaacgacaaacauuccaauggcaccaucaaggaucggucuccuuaucgcacgcugauguccugucccauuggggaggugccuagccccuacaacuccagauuugaaucugucgccuggagcgcuuccgccugccacgacggaaucaacuggcucaccauuggcaucagcgggccugauucuggagcuguggccgugcugaaauauaauggcaucauuacagacaccaucaaguccuggcggaacaauauucugcgcacacaagagagcgagugugcgugcgucaacgggucuuguuucaccaucaugacggauggaccgagcgacggccaggccuccuacaagauuuuuagaaucgaaaaaggcaagaucauuaaaucuguugagaugaaggcucccaauuaucauuacgaagagugcagcuguuacccugauuccagcgagaucacaugcgugugccgggacaacuggcacgggucuaaucgccccuggguguccuucaaccagaaucucgaauaucagaugggauacauuuguagcggcgucuuuggggauaacccuagacccaaugacaaaaccggaucuugcggcccgguguccagcaacggggccaauggaguuaagggcuucuccuuuaaguauggcaacgggguguggaucggacggacaaaaucuauuagcucccgcaagggcuucgagaugaucugggauccuaauggguggaccggaaccgacaacaaauuuucuauuaagcaagacaucgucggcaucaacgaauggagcggguacuccggcagcuucgugcagcaucccgagcugacaggacuugauuguauuagaccuugcuucuggguugaacugauccggggccgccccgaggagaauacgauuuggaccucuggguccagcaucucuuuuuguggagugaacuccgacacagucggcuggagcuggcccgauggggcugaacucccuuucaccauugacaaauga

SEQ ID NO: 218077 - RNA, 1410 nt, Artificial Sequence
  derived and/or modified CDS sequence (opt5) from neuraminidase__InfluenzaA__AMA65394
augaaccccaaucagaagaucauuaccaucggcagcgugugcaugacaauugggauggccaaccugauccuccaaauuggaaauaucaucuccauuugggucucucacagcauccagauuggcaaccagucccagaucgagacguguaaucaaucuguuauuaccuacgaaaacaauacaugggugaaccagaccuaugugaauaucagcaacacaaauuucgcugccgggcaguccgucgugucuguuaaacuggcgggaaacagcucccuuugcccugugagcggcugggcuauuuacucuaaggacaauuccgucagaaucgggagcaaaggagauguguuuguuauccgggagccguucauuucuuguagcccccuggaaugccgcaccuuuuuccucacacagggcgcccugcuuaacgacaagcauuccaauggcaccaucaaagauagaucuccuuaucggacgcugauguccugucccauuggggaggugccuagccccuacaacucccgcuuugaaucugucgccuggagcgcuuccgccugccacgacggaaucaacuggcucaccauuggcaucagcgggccugauucuggagcuguggccgugcugaaguauaauggcaucauuacagacaccaucaaguccuggagaaacaauauucugcggacacaagagagcgagugugcgugcgucaacgggucuuguuucaccaucaugacggauggaccgagcgacggccaggccuccuacaaaauuuuucgcaucgaaaagggcaaaaucauuaagucuguugagaugaaagcucccaauuaucauuacgaagagugcagcuguuacccugauuccagcgagaucacaugcgugugcagagacaacuggcacgggucuaaucggcccuggguguccuucaaccagaaucucgaauaucagaugggauacauuuguagcggcgucuuuggggauaacccucgccccaaugacaagaccggaucuugcggcccgguguccagcaacggggccaauggaguuaagggcuucuccuuuaaauauggcaacgggguguggaucggaagaacaaagucuauuagcucccggaaaggcuucgagaugaucugggauccuaauggguggaccggaaccgacaacaaguuuucuauuaaacaagacaucgucggcaucaacgaauggagcggguacuccggcagcuucgugcagcaucccgagcugacaggacuugauuguauucgcccuugcuucuggguugaacugaucagaggccggcccgaggagaauacgauuuggaccucuggguccagcaucucuuuuuguggagugaacuccgacacagucggcuggagcuggcccgauggggcugaacucccuuucaccauugacaaguga

SEQ ID NO: 218078 - RNA, 1410 nt, Artificial Sequence
  derived and/or modified CDS sequence (opt5) from neuraminidase__InfluenzaA__BAA00618
augaaccccaaucagaagaucauuaccaugggcagcguguccaucauuaucgccauugucugccugcucaugcaaaucgcuauccugguuacaacggugacccuucacuucagacagcaugagucugacagcccuccguccaaccaggugauucccugugaaccuaucauuaucgagcggaauauuacagaaaucgucuaccugaacaauaccacaauugagaaagaaaccugccccaagucuguggaguaucgcaacuggagcaaaccucaguguaagaucacaggguuugcccccuucuccaaagauaauucuaucagacucagcgcgggaggcgacauuuggguuacccgggagccuuacguguccugcgauccggggaaguguuaucaauuugcucugggacagggcacgacccuugacaacaagcacagcaaugauacaauccaugaccgcauuccccacagaacccugcucaugaacgaacugggggucccuuuccaucugggaacacgccaggugugcaucgccuggucuuccagcucuugucacgauggcaaagccuggcuccacguuugcgugaccggcgacgauaagaaugcuacggccuccuuuauuuacaacgggcggcuggucgacagcaucggaucuuggucccagaauauccuuagaacacaagagagcgaaugugugugcauuaacggcaccuguacaguggucaugaccgauggguccgcuucuggacgggccgacacccgcauccuguucauugaggagggcaaaaucguucauauuagcccccucuccgggagcgcgcagcacguggaagagugcucuugcuauccuagauaccccgaugugcgguguaucugccgcgacaauuggaagggauccaacagcccggucguggacaucaacaugaaagauuauucuauugacagcuccuacguuuguucuggccuggugggcgauacaccuagaaaugacgaucggagcuccaagagcaacugccgcaaucccaacaaugaaagagggaaccauggagucaagggcugggccuuugacaauggggaugacguguggaugggacggacgaucucuaaagaucuuagauccggcuacgagaccuucaagguuauugggggauggagcacaccuaacucuaaaucccagaccaaucgccaggugaucgucgacagcaacaauugguccggcuauucuggcauuuuuagcguggaagggaaguccuguaucaaccggugcuucuacgucgagcugauuagaggacgcaaacaagagacacgggugugguggaccucuaauagcaucguuguguuuuguggcacguccgggacauauggaaccggcagcuggcccgauggggcuaacaucgacuucaugcccauuuga

SEQ ID NO: 218079 - RNA, 1410 nt, Artificial Sequence
  derived and/or modified CDS sequence (opt5) from neuraminidase__InfluenzaA__BAA00619
augaaccccaaucagaagaucauuaccaucggcagcguuucccugacauucgccgcuauuugcuuucucaugcaaaucgccauucuggucacgaccguuacacuuaacuucaaacaguacgagugugacccuccggcgaccaaucaggugaugcccugcgaaccuaucaucauugagagaaacaucacagaaauuguguaucugaccaauacaaccaucgagcgggaaauuugucccaagcucgucgaguaccgcaacuggucuaaaccucagugcaagaucacgggguuugcucccuucagcaaagauaauuccauuagacugucugccggaggcgacaucugggugacccgggagccuuauguuagcugugauccggggcgcugcuaccaauuugcccuuggacagggcacaacccuggacaacaagcacuccaaugauacaauccaugacagaacgccccaccggacccuccugaugaacgaacugggggugccuuuccaucucggaacacgccaggucuguauugcuuggucuagcuccagcugccacgauggcaaggccuggcugcauguguguaucaccggcuaugacaaaaaugcuacagccucuuuuauuuacgaugggagacuuguugacuccaucggaagcuggucuaagaacauucugcggacccaggaguccgaaugcguguguaucaaugggaccugcacagucgugaugacggauggcagcgcgucuggacgcgccgacaccagaauccucuucauugaggagggccggaucgugcacauuagcccccuguccggguccgcucaacacgucgaagagugcucuuguuauccucgcuaccccggaguuagaugcaucugucgggauaacuggaaaggcagcaaucgcccggugguggacauuaacgucaaggacuacuccaucaacagcucuuaugugugcuccggccuuguuggggauacaccuagaaauaacgaccggagcucuaauagcuacugucagaaccccaauaacgaaaaaggaaaucauggcgugaaggggugggccuuugaugacggaaacgaugucuggaugggcagaaccaucuccgaggacucucgcagcggguaucagacauucaaggugauuggaggcugguccaccccuaauagcaaacugcagaucaaccggcaaguuauuguggauucugacaauagauccggcuacagcgggaucuuuucugucgaaggaaaguccugcauuaaccgcuguuucuauguggagcucauccggggcagacgccaggagacgcgggucugguggacaagcaauuccauugugguguuuugcgggaccucuggaaccuacggcacagggagcuggcccgauggcgcugacaucaaccugaugcccaucuga

SEQ ID NO: 218080 - RNA, 1410 nt, Artificial Sequence
  derived and/or modified CDS sequence (opt5) from neuraminidase__InfluenzaA__BAA00620
augaaccccaaucagaagaucaugaccauuggcagcgugucccugaucauugccgcugucugcuuccucaugcaaaucgccauucugguuacaacggugacccuucacuuuaaacagugugagugcgacucuccuagcaacaaucaggugaagccgugugaacccaucaucauugagagaaacaucacagaaauugucuaccugaauaacaccacaaucgagaaagaaaccugcccuaagcucguggaguaucggaauugguccaaaccccaguguaagauuacaggguucgcgccuuuuucuaaggauaacagcauccgccuguccgcuggaggcgacauuuggguuaccagagagcccuacgugucuugcgauccugggaaauguuaucaauucgcccuuggacagggcacgacccuggacaauaagcauagcaacgauacaauccacgaccggaucccgcaucgcacccuccugaugaaugaacuggggguccccuuucaccucggaacaagacaggugugcauugccugguccuccucuuccugucaugauggcaaggcuuggcugcacguuugcgugaccggcgacgauaaaaacgccacggcuagcuucaucuacgacgggcggcuugucgauucuauuggauccuggagccagaauauccugcgcacacaagagucugaaugugugugcauuaacggaaccugcacaguggucaugaccgacggguccgccagcggcagagcggauacccggauccucuuuaucgaggagggcaaaauuguucacaucuccccucugucugggagcgcccagcauguggaagaguguuccugcuauccccgcuacccuaaugugagauguauuugccgggacaacuggaagggaagcaaccgccccaucgucgacauuaauaugaaggauuauucuaucgacuccagcuacguguguucuggccuuguuggcgauacaccgagaaacgacgaucggagcuccaaaucuaauugccgcaacccuaauaacgaaaaggggaaucacggagugaaaggcugggcuuucgacaacggggaugacgucuggaugggaagaacgaucagcaaggaucugcgguccggcuacgagaccuuuaaagugauugggggaugguucacacccaauagcaagucucagguuaacagacaggugaucgucgacuccgauaaucgcagcggcuauucuggcauuuuuagcguggaagggaaaagcuguaucaaccggugcuucuacgucgagcucauuagaggacgcggccaagagacccgggugugguggacauccaauucuaucguuguguuuugugggaccagcggaacguauggcaagggguccuggccugacggcgccaacauuaauuucaugcccaucuga

SEQ ID NO: 218081 - RNA, 1410 nt, Artificial Sequence
  derived and/or modified CDS sequence (opt5) from neuraminidase__InfluenzaA__BAA00621
augaaccccaaucagaagaucauuaccaucggcagcgugucccugacaauugccacgaucugcuuccucaugcaaauugcuauccuggucaccacaguuacccuucacuuuaaacaguacgagugugacucuccugccaacaaucaggugaugccgugcgaacccaucauuaucgagagaaacauuacagaaaucguguaucugaccaauacaaccauugagaaggaaaucuguccuaaacucgucgaguaccggaacuggagcaagccccagugcaaaauuacgggguucgcgccuuuuuccaaggauaauucuauccgccugagcgcuggaggcgacaucugggugaccagagagcccuauguuuccugugauccugggaagugcuaccaauucgcccuuggacagggcacaacccuggacaacaaacauucuaaugauacaauucacgaccggaccccgcaucgcacgcuccugaugaacgaacugggggugcccuuucaccucggaacaagacaggucuguaucgccuggagcuccagcucuugccaugauggcaaggcuuggcugcacguguguguuaccggcuaugacaaaaaugccacagcuuccuucauuuacgaugggcggcuuguggacagcaucggaucuuggucccagaacauucugcgcacccaagagagcgaaugcgucuguaucaauggaaccugcacaguggugaugacggaugggucugccuccggcagagcggacaccaagauccucuuuauugaggagggcaaaaucguccacacaagcccucuguccgggucugcccagcauguugaagagugcagcuguuauccccgguacccuggagugcgcugcauuuguagagauaacuggaagggcuccaaucggcccguggucgacaucaacgugaaggacuacagcauugauucuuccuauguuugcagcggccuugugggggacaccccgcgcaaaaacgauagaucuagcuccucuuacugucggaauccuaacaaugaaaagggaacacacggcgucaaagggugggcuuucgacgauggaaacgacguguggaugggccgcaccaucagcgaggauuccagaagcggguaugaaacguuuaagguuaucggaggcuggucuacacccaauuccaaacugcagauuaacagacaggugaucgucgacagcaaugaucggucuggcuacuccgggauuuucagcguggagggaaaguccugcaucaaccgcuguuuuuaugucgagcucauucggggcagagaacaagagacccgcgugugguggaccucuaauagcaucguuguguucugcgggacauccggaaccuacggcacagggucuuggccugacggcgccgauauuaaccugaugcccaucuga

SEQ ID NO: 218082 - RNA, 1413 nt, Artificial Sequence
  derived and/or modified CDS sequence (opt5) from neuraminidase__InfluenzaA__BAA06714
augaaccccaaucagaagaucauuaccaucggcagcauuuccauggccaucgggauuaucucucugauccuccaaauuggaaacaucauuagcaucugggugucccacucuauucagacaggcagccagaaucauacggggaucugcaaccagagaauuaucaccuacgagaauagcacaugggucaaccaaaccuauguuaauaucaacaauacaaacgugguggcuggaaaagacaagaccucugucacacuggccggcaauagcucccuuuguccuauucgggggugggcgaucuacaccaaagauaacagcauucgcaucggaucuaagggcgacguguucguuauuagagaaccguuuaucuccugcagccaccuggagugucggacguucuuucucacccagggcgcucugcuuaaugauaaacauucuaacgggacagugaaggaccgcucccccuauagacggcugaugagcugcccucucggagaagcccccucuccuuacaauucccgcuucgagagcaucgccugguccgcuucugccugucacgauggcaugggguggcugaccauuggaaucagcggccccgacgauggggcugucgccgugcugaaguauaacggaauuaucacagaaaccauuaaauccuggaagaaaagaauccuccggacgcaggagagcgagugcguuugugugaacggcucuugcuuuacaaucaugaccgacggcccuuccaaugggcaggcgagcuaccgcauuuucaagaucgaaaaaggaaaggucacaaagucuauugagcuggaugccccgaacagccauuaugaagaguguuccugcuaccccgacaccggcaccgugaugugugugugcagagauaauuggcacgggucuaaccggccuugggucagcuuuaaucaaaaccuugacuaccagaucggauauauuugcuccggcguuuucggggauaaucccccucccaaagacggaaagggcagcugugacccggugacaguggauggcgcugacggggucaaaggauuuucuuaccgcuauggcaacgggguguggaucggaagaacgaaguccaaucgguuccgcaaaggcuuugagaugauuugggauccuaacggguggaccgacacagauagcgacuuccugguuaagcaggauguggucgccaugaccgacuggucuggcuacuccggauccuuugugcagcaccccgaacucacaggccuggauugcaugagaccuuguuucuggguugagcuugugcgggggagaccccgcgaaaauaccacgaucuggacauccggaucuagcaucuccuucugcggcgucaacucugacaccgcuaauuggagcuggcccgauggggccgagcugccuuuuaccauugacaaauga

SEQ ID NO: 218083 - RNA, 1413 nt, Artificial Sequence
  derived and/or modified CDS sequence (opt5) from neuraminidase__InfluenzaA__BAA06715
augaaccccaaucagaagaucauuaccaucggcagcauuuccauggccaucgggauuaucucucugauccuccaaauuggaaacaucauuagcaucugggcuucccacucuauucagacaggcagccagaaucauacggggaucugcaaccagagaauuaucaccuacgaaaauuccacaugggugaaccaaaccuaugucaauaucaacaauacaaacguuguggccggaaaagacaagaccucugugacacuggcgggcaauagcucccuuuguccuauucgggggugggcuaucuacaccaaagauaacagcauucgcaucggaucuaagggcgacgucuucgugauuagagagccguuuaucuccugcagccaccuggagugucggacguucuuucucacccagggcgcccugcuuaaugauaaacauucuaacgggacaguuaaggaccgcucccccuauagagcccugaugagcugcccucucggagaagcucccucuccuuacaauucccgguucgagagcguggccugguccgcuucugccugucacgauggcaugggguggcugaccaucggaauuagcggccccgacaacggggcggucgccgugcugaaguauaacggaaucauuacagaaaccaucaaauccuggaagaaacgcauucucagaacgcaggagagcgagugcguuugugugaauggcucuugcuuuacaaucaugaccgauggcccuuccaacggggcugccagcuaccggaucuucaagauugaaaaaggaaaggucacaaagucuaucgagcuggacgcuccgaauuaucauuacgaagaguguagcugcuaccccgauaccggcaccgugaugugugugugccgcgacaacuggcacggguccaauagaccuucugucagcuuuaaccagaaucuugauuaucaaauuggauacaucugcuccggcguuuucggggacaacccccggccuaaagauggagagggcagcuguaaucccgugacaguggacggcgccgacggggucaagggauuuucuuaucgcuacggcaacgggguguggauuggaagaacgaaauccaaucggcugcgcaagggcuucgaaaugaucugggauccgaacggguggaccgacacagauagcgacuuuucuguuaaacaggauguggucgcgaugaccgacugguccggcuauagcggauccuucgugcagcacccugagcucacaggccuggauugcaugagacccuguuuuuggguugaacuuauucgggggagaccucgcgagaagaccacgaucuggacaucuggaagcuccaucucuuucugcggcgugaauagcgacaccgccaacugguccuggcccgauggggcugaacugcccuucaccauugacaaauga

SEQ ID NO: 218084 - RNA, 1410 nt, Artificial Sequence
  derived and/or modified CDS sequence (opt5) from neuraminidase__InfluenzaA__BAA06716
augaacaccaaucagagaaucauuacaaucggcacgauuugccugaucguggggauuaucagccuccugcuucaaaucggaaacauuauccugcucuggaugucccacucuauucagaccggcgaaaagagccaucccaaagucuguaaucaguccguuaucacauacgagaacaauaccugggugaaccagacauaugugaauauuucuaacaccaauaucgccgcugggcaaggagucacaccuauuauccuggccggcaacagcucccuuugcccgaucucugggugggcgauuuacagcaaggacaauuccauccggauuggaagcaaaggcgauaucuucgugaugcgcgagcccuuuauuucuuguucccaccuggaaugcagaaccuucuuucucacgcagggcgcucugcugaacgaccggcauagcaaugggaccguuaaggaucgcucuccuuauagaacacucauguccugucccaucggagaggccccuagccccuacaacucucgguucgaauccguggccuggagcgcuuccgccugccacgacggcaugggguggcugaccaucggaauuucuggcccugauaauggggcugucgccgugcuuaaauauaacggaaucauuacagacaccaucaagagcuggcgcaacaagauucugagaacgcaggaguccgaguguguuugcaucaauggcagcuguuuuacaaucaugaccgauggcccgucuaacgggcaggcguccuacaaacucuucaagauggaaaaaggaaagauuaucaaaagcauugagcuggacgcccccaauuaucauuacgaagagugcucuuguuacccugauacaggcaagguggucugcgugugccgggacaacuggcacgcuagcaaucgccccuggguguccuuugaucaaaaccuugacuaucagaucggguacauuuguucuggagucuucggcgauaauccuagaagcaacgacgggaagggaaauugcggccccguucuguccaacggcgccaauggggugaaaggauuuagcuuccgguauggcaacgggguguggaucggacgcaccaagucuauuuccagcagacggggcuuugagaugaucugggacccgaauggguggaccgaaacagauucuuccuucagcaugaaacaggacaucauugcucucacggauugguccggcuacucuggcagcuuuguccagcacccugagcugaccggaaugaacuguauccgccccugcuucuggguggaacugauuagagggcaaccuaaggaguccacaaucuggaccucuggaagcuccauuagcuucuguggcguuaauucugggacagccuccuggagcuggcccgacggagcggaucuccccuuuaccaucgacaaauga

SEQ ID NO: 218085 - RNA, 1413 nt, Artificial Sequence
  derived and/or modified CDS sequence (opt5) from neuraminidase__InfluenzaA__BAA06717
augaaccccaaucagaagaucauuaccaucggcagcauuuccauggccaucgggauuaucucucugauccuccaaauuggaaacaucauuagcaucugggcuucccacucuauucagacaggcagccagaaucauacggggaucugcaaccagagaaugauuaccuacgaaaauuccacaugggugaaccaaaccuaugucaauaucucuaacacaaauguuguggccggaaaagacaagaccagcgugacacuggcgggcaacuccagccuuuguccuauccgggggugggcuauuuacaccaaagauaauucuauccgcauuggauccaagggcgacgucuucgugaucagagagccguuuauuagcugcucucaccuggagugucggacguucuuucucacccagggcgcccugcuuaacgauaaacauuccaaugggacaguuaaggaccgcagccccuauagagcccugaugucuugcccucucggagaagcucccuccccuuacaacagccgguucgaguccguggccuggucugcuagcgccugucacgauggcaugggguggcugaccaucggaaucuccggccccgacgauggggcggucgccgugcugaaguauaauggaauuaucacagaaaccauuaaaagcuggcgcaagcagauccucagaacgcaggagucugagugcguuugugugaacggcuccugcuuuacaauuaugaccgacggcccuagcgaugggccggcuucuuaccggaucuucaaaaucgaaaagggaaaagucacaaagagcauugagcuggacgcccccaacuaucauuacgaagaguguuccugcuacccugauaccggcaccgugaugugugugugccgcgacaauuggcacgggucuaacagacccugggucagcuuuaaucaaaaccuugauuaucagaucggauacauuugcuccggcguuuucggggacaauccucggcccaaggacggagagggcagcuguaacccggugacaguggauggcgcugacggggucaaaggauuuucuuaucgcuacggcaaugggguguggaucggaagaacgaaguccaaccggcugcgcaaaggcuucgaaaugauuugggauccuaauggguggaccgacacagauagcgacuuuucuguuaagcaggauguggucgccaugaccgacugguccggcuauagcggauccuucgugcagcaccccgagcucacaggccuggauugcaugagaccuuguuuuuggguugaacuuauccgggggagaccccgcgagaaaaccacgauuuggacaucuggaagcuccaucucuuucugcggcgugaacagcgacaccgcgaauugguccuggcccgauggggccgaacugccuuucaccaucgacaaguga

SEQ ID NO: 218086 - RNA, 1413 nt, Artificial Sequence
  derived and/or modified CDS sequence (opt5) from neuraminidase__InfluenzaA__BAA06718
augaaccccaaucagaagaucauuaccaucggcagcauuugcauggccaucgggauuaucucccugauccuccaaauuggaaacaucgugucuauuuggaucagccacuccauucagacaggcucucagaauuacacggggaucuguaaccagagaauuaucaccuaugagaauagcacaugggucaaccaaaccuacguuaauaucaacaauacaaacgugguggcuggacaggacaccacauccgucgcccuggcgggcaauucuagccuuugcccuauuuccgggugggcuaucuauagcaaagauaacucuauucggaucggauccaagggcgacguguucguuauucgcgaaccguuuaucagcuguucucaucuggagugcagaaccuucuuucucacgcagggcgcccugcuuaaugauaaacacuccaacgggaccgugaaggaccggagccccuaccgcagacugaugucuuguccuaucggagaagcccccuccccuuauaauagccgguucgaguccgucgcuuggucugccagcgcuugccaugauggcaugggguggcucacaauuggaaucuccggccccgacgauggggccguggcgguucugaaauacaacggaauuaucaccgaaacaauuaagagcuggcgcaagagaauccugcggacccaggagucugagugugugugcgucaacggcuccuguuuuacgaucaugacagacggcccuaauaacgggccggccagcuaucgcauuuucaaaaucgaaaagggaaaaauuaccaagucuaucgagcucgaugcucccaauagccacuacgaagagugcuccuguuacccugacgccggcacagugaugugcgugugcagagauaacuggcaugggucuaaucggcccugggucagcuuuaaccaaaaucuggacuaucagauuggauacaucuguuccggcguuuucggggauaacccucgccccaaagacggaaagggcagcugcgacccggugaccguggauggcgcugacggggucaagggauuuucuuauagauacggcaaugggguguggauuggacggaccaaauccaacagcucucgcagaggcuucgagaugaucugggauccuaauggguggacagacacggauuccaaguuucuuguuaaacaggacguggucgccaugaccgauuggagcggcuauuccggaucuuucgugcagcaccccgaacugacaggccucgacuguaugcggccuugcuuuuggguugagcuggugagagggcgcccccgggaaaacaccacaaucuggaccagcggauccucuauuagcuucuguggcgucaauggggauacggcgaacugguccuggcccgacggagccgagcuuccuuucacaaucgauaaguga

SEQ ID NO: 218087 - RNA, 1413 nt, Artificial Sequence
  derived and/or modified CDS sequence (opt5) from neuraminidase__InfluenzaA__BAA06720
augaaccccaaucagaagaucauuaccaucggcagcauuuccauggccaucgggauuaucucucugauccuccaaauuggaaacaucauuagcaucugggugucccacucuauucagacaggcagccagaaucauacggggaucugcaaccagagaauuaucaccuacgaaaauuccacaugggucaaccaaaccuauguuaauaucaacaauacaaacgugguggcuggaaaagacaagaccucugucacacuggccggcaauagcucccuuuguccuauucuggggugggcgaucuacaccaaagauaacagcauucggaucggaucuaagggcgacguguucguuauucgcgagccguuuaucuccugcagccaccucgaguguagaacguucuuucugacccagggcgcccuucugaaugauaaacauucuaacgggacagugaaggaccggucccccuaucgcagacucaugagcugcccucugggagaagcucccucuccuuacaauucccgguucgagagcgucgccugguccgcuucugccugucacgauggcaugggguggcugaccaucggaauuagcggccccgacgauggggcuguggccguucucaaguauaacggaaucauuacagaaaccaucaaauccuggaagaaacgcauucugagaacgcaggagagcgagugcgugugugucaacggcucuugcuuuacaaucaugaccgacggcccuuccaauggggcggccagcuaccggaucuucaagauugaaaaaggaaaggugacaaagucuaucgagcuugaugcuccgaacagccauuaugaagaguguuccugcuaccccgacaccggcaccgugaugugugucugccgcgauaauuggcacgggucuaacagaccuuggguuagcuuuaaucagaaccuggacuaccaaauuggauauaucugcuccggcguguucggggauaaucccccucccaaagacggaaagggcagcuguaacccggugacagucgacggcgccgauggggugaaaggauuuucuuaccgguauggcaaugggguuuggauuggacgcacgaaguccaacagauuccggaaaggcuuugagaugaucugggacccuaauggguggaccgauacagacagcgauuucucugugaagcaggacgucguggcuaugaccgauugguccggcuacagcggauccuuuguucagcaccccgaacucacaggccuggacugcaugcgcccuuguuucuggguggagcuugucagagggcggcccagagaaaacaccacgauuuggacaucuggaagcuccaucucuuucugcggcgugaauagcgauaccgccaacugguccuggcccgacggggcggagcugccuuuuaccaucgauaaauga

SEQ ID NO: 218088 - RNA, 1410 nt, Artificial Sequence
  derived and/or modified CDS sequence (opt5) from neuraminidase__InfluenzaA__BAD16637
augaaccccaaucagaagaucauuaccaucggcagcgugucccugacaauugccacggucugcuuccucaugcaaaucgcuauucuggccaccacaguuacccuucacuuuaaacagcaugagugugacucuccugcgagcaaccaggugaugccgugcgaacccaucaucauugagagaaauaucacagaaauuguguaccugaacaauaccacaaucgagaaggaaauuuguccugaggucguggaguaucggaacugguccaaaccccagugccaaaucaccggguucgcuccuuuuucuaaggauaauagcauucgccucuccgccggaggcgacaucuggguuacgagagaacccuacgugucuugugauccugggaaaugcuaucaguucgcccugggacagggcaccacacuugacaacaagcacagcaaugggaccauccaugaucggauuccgcaccgcacacugcucaugaacgagcugggaguccccuuucaucugggcaccaaacagguguguguugcuugguccucuagcuccugccacgacggcaaggccuggcuccacgugugugucacgggggaugacagaaaugcuacagccagcuucaucuacgauggacggcugguggacucuauuggcuccuggagccaaaacauccuucgcacccaggaaucugagugcguguguauuaaugggacaugcaccgucguuaugaccgauggauccgcgagcggcagagccgacacacggauccuguuuaucaaggaggggaaaauugugcauaucuccccucucucuggaagcgcucagcacauugaagagugcuccuguuauccccgcuacccugaugugagaugcaucugucgggacaacuggaagggcagcaaucgccccgucauugacaucaacauggaagauuauucuaucgacuccagcuacgugugcucuggccugguuggggauacgccgagaaacgacgauagcuccucuaauagcaacugucgggacccuaauaacgagcgcggaaaucccggcgugaaagggugggccuucgauaacggagacgaugucuggaugggcagaaccauuuccaaggacagccggucuggguacgaaacauuuaaggugaucggaggcugguccaccccuaauagcaaaucucagguuaacagacaagugauugucggcaauaacaauugguccggguauagcggaaucuucuccguggagggcaagucuugcauuaaccgcuguuuuuacgucgagcuuauccgggggaugccccaggaaacaagagugugguggaccagcaauuccauuguuguguucugcggaacgucuggcacauaugggaccggcagcuggcccgauggagcuaacaucaauuuuaugccuaucuga

SEQ ID NO: 218089 - RNA, 1410 nt, Artificial Sequence
  derived and/or modified CDS sequence (opt5) from neuraminidase__InfluenzaA__BAD16638
augaaccccaaucagaagaucauuaccaucggcagcgugucccugacaauugccacggucugcuuccucaugcaaaucgcuauucuggccaccacaguuacccuucacuuuaaacagcaugagugugacucuccugcgagcaaccaggugaugccgugcgaacccaucaucauugagagaaauaucacagaaauuguguaccugaacaauaccacaaucgagaaggaaauuuguccugaggucguggaguaucggaacugguccaaaccccagugccaaaucaccggguucgcuccuuuuucuaaggauaauagcauucgccucuccgccggaggcgacaucuggguuacgagagaacccuacgugucuugugauccugggaaaugcuaucaguucgcccugggacagggcaccacacuugacaacaagcacagcaaugggaccauccaugaucggauuccgcaccgcacacugcucaugaacgagcugggaguccccuuucaucugggcaccaaacagguguguguugcuugguccucuagcuccugccacgacggcaaggccuggcuccacgugugugucacgggggaugacagaaaugcuacagccagcuucaucuacgauggacggcugguggacucuauuggcuccuggagccaaaacauccuucgcacccaugaaucugagugcguguguauuaaugggacaugcaccgucguuaugaccgauggauccgcgagcggcagagccgacacacggauccuguuuaucaaggaggggaaaauugugcacaucuccccucucucuggaagcgcucagcauauugaagagugcuccuguuauccccgcuacccugaugugagaugcaucugucgggacaacuggaagggcagcaaucgccccgucauugacaucaacauggaagauuauucuaucgacuccagcuacgugugcucuggccugguuggggauacgccgagaaacgacgauagcuccucuaauagcaacugucgggacccuaauaacgagcgcggaaaucccggcgugaaagggugggccuucgauaacggagacgaugucuggaugggcagaaccauuaauaaggacucccggagcggguacgaaacauuuaaggugaucggaggcuggucuaccccuaacuccaaaagccagguuaauagacaggugauugucgauaacaauaacuggucuggcuauuccgggaucuucagcguggagggaaaguccugcauuaaucgcuguuuuuacgucgagcuuauccggggcagaccccaagaaacacgcgugugguggaccucuaacagcauuguuguguucugcgggacguccggaacauauggcaccgggucuuggcccgacggcgcuaauaucaacuuuaugccuaucuga

SEQ ID NO: 218090 - RNA, 1410 nt, Artificial Sequence; identical to SEQ ID NO: 215269
  derived and/or modified CDS sequence (opt5) from neuraminidase__InfluenzaA__BAD16639

SEQ ID NO: 218091 - RNA, 1410 nt, Artificial Sequence
  derived and/or modified CDS sequence (opt5) from neuraminidase__InfluenzaA__BAD16640
augaaccccaaucagaagaucauuaccaucggcagcgugucccugacaauugccacggucugcuuccucaugcaaaucgcuauucugguuaccacagugacccuucacuuuaaacagcaugagugugacucuccugccagcaaccaggugaugccgugcgaacccaucaucauugagagaaauaucacagaaauugucuaccugaacaauaccacaaucgagaaggaaauuuguccugaggugguugaguaucggaacugguccaaaccccagugccaaaucaccggguucgcgccuuuuucuaaggauaauagcauucgccucuccgcuggaggcgacaucugggugacgagagaacccuacgucucuugugauccugggaaaugcuaucaguucgcccugggacagggcaccacacuugacaacaagcacagcaaugauaccauccaugaccggauuccgcaccgcacacugcucaugaacgagcugggggugcccuuucaucugggaaccagacagguuuguguggccugguccucuagcuccugccacgauggcaaggcuuggcuccacgucugugugacgggcgacgauaaaaaugccacagcuagcuucaucuacgacgggcggcugauggauucuauuggauccuggagccaaaacauccuucgcacccaggaaucugagugcguguguauuaauggcacaugcaccgucguuaugaccgacggguccgccagcggcagagcggauacacggauccuguuuaucgaggaaggaaagauugugcauaucuccccucucucugggagcgcccagcacguggaggaaugcuccuguuauccccgcuacccugacgucagaugcauuugucgggacaacuggaaaggaagcaaucgccccgugaucgauauuaacauggaggacuauucuaucgauuccagcuacguuugcucuggccuggugggcgacacgccgagaaacgaugaccggagcuccaauucuaacugucgcaauccuaacaaugaaagagggaaccccggagucaagggcugggcuuucgauaauggggacgauguguggaugggacggaccaucagcaaagaccuuagauccggcuacgagacauuuaagguuauugggggauggagcaccccuaacucuaagucccagaucaaucgccaagugauugucgauagcaacaauuggucuggcuauuccggcaucuucagcguggaggggaaauccugcauuaaccgguguuuuuacgucgaacugaucagaggacgccagcaggagacacgggugugguggaccucuaauagcauuguuguguucugcggcacguccgggacauauggaaccggcucuuggcccgacggggccaacaucaauuuuaugcccaucuga

SEQ ID NO: 218092 - RNA, 1410 nt, Artificial Sequence
  derived and/or modified CDS sequence (opt5) from neuraminidase__InfluenzaA__BAD16641
augaaccccaaucagaagaucauuaccaucggcagcgccucccugacaauugcuacggugugcuuccucaugcaaaucgccauucuggucaccacaguuacccuucacuuuaaacagcaugagugugacucuccugcgagcaaccaggugaugccgugcgaacccaucaucauugagagaaauacaaccgaaaucguguaccugaacaauacaaccauugagaaggaaaucuguccuaaagucguggaguaucggaacugguccaagccccagugcaaaauuacgggguucgcuccuuuuucuaaggauaauagcauccgccucuccgccggaggcgacauuuggguuaccagagagcccuacgugucuugugauccugggaagugcuaucaauucgcccugggacagggcacaacccuugacaacaaacacagcaaugauacaauccaugaccggaucccgcaccgcacccugcucaugaacgaacuggggguccccuuucaucugggaacgagacagguguguauugcuugguccucuagcuccugccacgauggcaaggccuggcuccacguuugugugacaggcgacgauaaaaaugcuaccgccagcuucaucuacgacgggcggcuggucgauucuauuggauccuggagccagaacauccuucgcacacaagagucugaaugcguguguauuaauggaaccugcaccguggucaugacagacggguccgcgagcggcagagccgauacgcggauccuguuuaucgaggagggcaagauuguucauaucuccccucucucugggagcgcucagcacguggaagagugcuccuguuauccccgcuacccugacgugagaugcauuugucgggacaacuggaaaggaagcaaucgccccgucguggauaucaacauggaagacuauucuauugauuccagcuacguuugcucuggccuggugggcgacaccccgagaaacgaugaccggagcuccaauucuaacugucgcaauccuaacaaugagaaggggaaccagggagucaagggcugggccuucgauaauggggacgauguguggaugggaagaacaaucagcaaagaccuucgguccggcuacgaaaccuuuaagguuaucgggggauggagcacacccaacucuaaaucccagauuaauagacaagugaucgucgauagcgacaaccgcucuggcuauuccggcauuuucagcguggaggggaaguccugcaucaaucgguguuuuuacgucgagcugauuagaggacgcaaacaggaaacccgggugugguggacgucuaacagcaucguuguguucugcggcacauccgggaccuauggaaccggcucuuggccugacggggcuaauauuaaccucaugcccaucuga

SEQ ID NO: 218093 - RNA, 1410 nt, Artificial Sequence
  derived and/or modified CDS sequence (opt5) from neuraminidase__InfluenzaA__BAD16642
augaaccccaaucagaagaucauuaccaucggcagcgugucccugacaauugccacggucugcuuccucaugcaaaucgcuauucugguuaccacagugacccuucacuuuaaacaguacgagugugacucuccugccagcaaccaggugaugccgugcgaacccaucaucauugagagaaauaucacagaaauugucuaucugaacaauaccacaaucgauaaggagaaauguccuaaggugguugaauaccggaacugguccaaaccccagugccaaauuaccggguucgcgccuuuuucuaaggacaauagcauccgccucuccgcuggaggcgauauuugggugacgagagagcccuaugucucuugugaccaugggaagugcuaccaguucgcccugggacagggcaccacacuugauaacaaacacagcaaugacaccauccaugaucggaucccucaccgcacacugcucaugaacgagcugggggugccguuucaucugggaaccagacagguuuguauugccugguccuccucuuccugccacgacggcaaggcuuggcuccacguguguaucacgggcgaugacaaaaaugccacagcuagcuucauuuaugaugggcggcuggucgacucuaucggauccuggagccaaaacauucuucgcacccaggaaucugagugcguguguaucaauggcacaugcaccguggucaugaccgauggguccgccagcggcagagcggacacacggauccuguuuauugaagagggaaagaucguucauauuagcccccucucugggagcgcccagcacguggaggaaugcuccuguuacccucgcuaucccggagugagaugcaucugucgggacaacuggaaaggcagcaaucgcccugucguggauauuaacauggaggacuacucuaucgauuccagcuacguuugcucuggccuggugggggacacgcccagaaacgaugaccggagcuccaauucuaacugucgcaauccgaacaaugaaagaggaaaccagggcgucaaggggugggcuuucgauaauggagacgauguguggaugggccggaccaucagcaaggaccuuagauccggguaugagacauuuaaaguuauuggaggcuggagcaccccuaacucuaagucccaaaucaaucgccaggugauugucgauagcgacaaccggucuggcuacuccgggaucuucagcguggaaggaaaauccugcauuaauagauguuuuuaugucgagcugauccgcggccggaagcaggagacaagagugugguggaccucuaacagcauuguuguguucugcgggacguccggaacauacggcaccgggucuuggcccgacggcgccaauaucaacuuuaugccuaucuga

SEQ ID NO: 218094 - RNA, 1410 nt, Artificial Sequence
  derived and/or modified CDS sequence (opt5) from neuraminidase__InfluenzaA__BAD16643
augaaccccaaucagaagaucauuaccaucggcagcgugucccugacaauugccacgaucugcuuccucaugcaaauugcuauccuggucaccacaguuacccuucacuuuaaacaguacgagugugacucuccugccaacaaucaggugaugccgugcgaacccaucauuaucgagagaaacauuacagaaaucguguaucugaccaauacaaccauugagaaggaaaucuguccuaaacucgucgaguaccggaacuggagcaagccccagugcaaaauuacgggguucgcgccuuuuuccaaggauaauucuauccgccugagcgcuggaggcgacaucugggugaccagagagcccuauguuuccugugauccugggaagugcuaccaauucgcccuuggacagggcacaacccuggacaacaaacauucuaaugauacaauucacgaccggaccccgcaucgcacgcuccugaugaacgaacugggggugcccuuucaccucggaacaagacaggucuguaucgccuggagcuccagcucuugccaugauggcaaggcuuggcugcacguguguguuaccggcuaugacaaaaaugccacagcuuccuucauuuacgaugggcggcuuguggacagcaucggaucuuggucccagaacauucugcgcacccaagagagcgaaugcgucuguaucaauggaaccugcacaguggugaugacggaugggucugccuccggcagagcggacaccaagauccucuuuauugaggagggcaaaaucguccacauuagcccucuguccgggucugcccagcauguugaagagugcagcuguuauccccgguacccuggagugcgcugcaucuguagagauaacuggaagggcuccaaucggcccguggucgacauuaacgugaaggacuacagcaucgauucuuccuauguuugcagcggccuugugggggacacaccgcgcaacaaugauagaucuagcaacuccuacugucggaauccuaacaaugaaaaaggaaaccacggcgucaaggggugggcuuucgacgauggaaaugacguguggaugggccgcaccaucucugaggauagcagauccggguaugaaacauuuaaaguuauuggaggccuguucacccccaacagcaagcuccagaucaauagacaggugauugucgacucugauaaccgguccggcuacagcgggaucuuuucuguggagggaaaauccugcauuaaucgcuguuucuaugucgagcugauccggggcagagaacaagagacgcgcgugugguggacaagcaacuccauuguuguguuuugcgggaccucuggaaccuacggcacagggagcuggccugacggcgccgauaucaaucugaugcccaucuga

SEQ ID NO: 218095 - RNA, 1410 nt, Artificial Sequence
  derived and/or modified CDS sequence (opt5) from neuraminidase__InfluenzaA__BAD16644
augaaccccaaucagaagaucauuaccaucggcagcgugucccugacaauugccacgaucugcuuccucaugcaaauugcuauccuggucaccacaguuacccuucacuuuaaacaguacgagugugacucuccuccgaacaaucaggugaugcccugcgaaccuaucauuaucgagagaaacauuacagaaaucguguaucugaccaauacaaccauugagaaggaaaucugucccaaacucgucgaguaccggaacuggagcaagccucagugcaaaauuacgggguucgcccccuuuuccaaggauaauucuauccgccugagcgcgggaggcgacaucugggugaccagagagccuuauguuuccugugauccggggaagugcuaccaauucgcucuuggacagggcacaacccuggacaacaaacauucuaaugauacaauucacgaccggacgccccaucgcacccuccugaugaacgaacugggggugccuuuucaccucggaacaagacaggucuguaucgccuggagccgguccagcugccaugauggcaaggccuggcugcacguguguguuaccggcuaugacaaaaaugcuacagccucuuucauuuacgaugggcgccuuguggacuccaucggaagcuggucuaagaacauucugagaacccaggaguccgaaugcgucuguaucaaugggaccugcacaguggugaugacggauggcagcgcuucuggacgggccgacaccaaaauccucuuuauugaggagggcaagaucguccacauuagcccccuguccggguccgcgcaacauguugaagagugcucuuguuauccucgcuaccccggagugagaugcaucugucgggauaacuggaagggcagcaaucgcccgguggucgacauuaacgugaaagacuacuccaucgauagcucuuauguuugcuccggccuugugggggacacaccuagaaacaaugaucggagcucuaacagcuacugucgcaaucccaacaaugaaaagggaaaccacggcgucaaagggugggccuucgacgauggaaaugacguguggaugggcagaaccaucuccgaggauucucggagcgggugcgaaacauuuaagguuauuggaggcugguccaccccuaacagcaaacugcagaucaauagacaggugauugucgacucugauaaccgcuccggcuauagcgggaucuucucuguggagggaaaguccuguauuaaucggugcuuuuacgucgagcucaucagaggccgcgaacaggagacgcgggugugguggacaagcaacuccauuguuguguucugugggaccucuggaaccuauggcacagggagcuggcccgacggcgcugauaucaaucugaugcccaucuga

SEQ ID NO: 218096 - RNA, 1410 nt, Artificial Sequence; identical to SEQ ID NO: 206648
  derived and/or modified CDS sequence (opt5) from neuraminidase__InfluenzaA__BAD16645

SEQ ID NO: 218097 - RNA, 1410 nt, Artificial Sequence; identical to SEQ ID NO: 214616
  derived and/or modified CDS sequence (opt5) from neuraminidase__InfluenzaA__BAD16646

SEQ ID NO: 218098 - RNA, 1410 nt, Artificial Sequence; identical to SEQ ID NO: 206648
  derived and/or modified CDS sequence (opt5) from neuraminidase__InfluenzaA__BAD16647

SEQ ID NO: 218099 - RNA, 1410 nt, Artificial Sequence
  derived and/or modified CDS sequence (opt5) from neuraminidase__InfluenzaA__BAD16648
augaaccccaaucagaagaucauuaccaucggcagcgugucccugacaauugccacgaucugcuuccucaugcaaauugcuauccuggucaccacaguuacccuucacuuuaaacaguacgaguguucuagcccuccgaacaaucaggugaugcccugcgaaccuaucauuaucgagagaaacauuacagaaaucguguaucugaccaauacaaccauugagaaggaaaucugucccaaacucgucgaguaccggaacugguccaagccucagugcaaaauuacgggguucgcccccuuuucuaaggacaauagcauccgccuguccgcgggaggcgauaucugggugaccagagagccuuauguuucuugugacccggggaagugcuaccaauucgcucuuggacagggcacaacccuggauaacaaacauagcaaugacacaauucacgaucggacccccuaucgcacgcuccugaugaacgaacugggggugccuuuucaucucggaacaagacaggucuguaucgccugguccuccucuuccugccacgacggcaaggccuggcugcauguguguguuaccggcuacgauaaaaaugcuacagccagcuucauuuaugacgggcggcuuguggauucuaucggauccuggagcaagaacauucugcgcacccaggagucugaaugcgucuguaucuacgggaccugcacaguggugaugacggacggcuccgcuagcgagagagccgagaccaaaauccucuuuauugaagagggaaagaucguccacauuagcccccugucuggcagcgcgcaacacguugaagagugcuccuguuacccucgguaucccggggugcgcugcguguguagagauaauuggaagggaagcaaccggccggucguggacaucaauguuaaagauuacucuauuguguccagcuaugucugcucuggccuugugggcgacacaccucgcaagaacgacagaagcuccucuagcuacugucggaaccccaauaacgaaaaagggaaucauggaguuaagggcugggccuucgaugacgggaacgauguguggaugggacgcaccaucuccgaggagagcagaucuggcuaugaaacauuuaaagucaucgggggaugguccaccccuaauagcaagcugcagauuaacagacaggugaucgucgacucugauaaucgguccggcuacagcggcauuuucuccguggaggggaaaucuugcaucaaccgcuguuuuuauguugaacucauucggggaagagagcaggaaacgcgcgugugguggacaagcaauuccaucgucguguucugcggcaccucugggaccuacggaacaggcagcuggcccgacggggcugauauuaaccugaugcccaucuga

SEQ ID NO: 218100 - RNA, 1410 nt, Artificial Sequence
  derived and/or modified CDS sequence (opt5) from neuraminidase__InfluenzaA__BAE07203
augaaccccaaucagaagaucaccacaauuggcagcaucugcauggugauugggaucgucucccugaugcuccaaauuggaaacaucaucucuauuuggguuagccacuccauccagacgggcaaucagcaucaggccgagccuuguaaccaaucuauuaucaccuacgaaaauaacacaugggugaaucagaccuaugugaacauuagcaauacaaacuuccugaccgagaaagcugucgccuccgugacacuugcgggaaauucuagccugugcccgaucuccgggugggcuguuuacagcaaggacaacggcauuagaaucgggucuaaaggagauguguuugucauccgggaacccuucauuuccuguagccaccucgagugccgcaccuuuuuccugacgcagggcgcccuucugaaugacaagcauucuaacggcaccgugaaagauagauccccucaccggacacucaugagcugucccguuggggaagccccuucucccuauaauucccgcuuugagagcguggcuugguccgccucugcuugccaugacggaaccagcuggcugacaaucggcauuuccgggccugauaacggagccgucgcggugcugaaguacaacggcaucauuaccgacacgaucaagagcuggagaaauaacaucaugcggacacaggagucugaaugugccugcgugaauggguccuguuucaccgucaugacagauggaccgagcaacggccaagcuagcuauaaaauuuuucgcaucgagaagggcaaaguugugaagucugccgaacucaaugcucccaacuaccacuaugaggagugcuccuguuacccugacgccggggaaauuaccugcgugugcagagauaauuggcacggaucuaaccggcccugggucagcuucaaucagaaccuggaguaccgcaucggcuauauuuguuccgggguguuuggagacaauccuagacccaacgauggcaccgggagcugcggaccgguuucuccuaaaggcgcguacggcaucaagggguucuccuuuaaguauggaaauggcguguggaucgggcggacaaaaagcacgaacucucgcuccggauucgaaaugauuugggaccccaauggcuggaccgggacagauagcaacuuuuccgucaagcaggacaucguggccauuaccgacuggucuggcuacagcggauccuucguucagcauccugagcuuacaggccuggauuguaucagacccugcuucuggguggaacucauucgggggcgccccaaagagucuaccaucuggacgagcggauccagcauuucuuuuuguggcgucaacuccgacacagugggguggagcuggccugauggagcugagcugccguucaccaucgacaaguga

SEQ ID NO: 218101 - RNA, 1410 nt, Artificial Sequence
  derived and/or modified CDS sequence (opt5) from neuraminidase__InfluenzaA__BAF46322
augaaccccaauccuaagaucauuaccaucggcagcgugucccugacaauuucuacgaucugcuucuuuaugcagauugccauccucaucaccacagucacccugcacuucaaacaauacgaguuuaacagcccgcccaauaaccagguuaugcuuugugaaccuacaauuaucgagagaaauauuaccgaaaucguguaucugacaaacaccacgauugagaaggaaaucugccccaaacucgcugaguaccggaauugguccaagccucagugugacauuaccggguucgcccccuuuucuaaagauaacagcauccgccuguccgcgggaggcgacaucugggugacaagagagccuuaugucucuugcgauccggacaaguguuaccaguucgcucuugggcaaggaaccacacugaauaacgugcauagcaaugauaccguucacgaccggacgcccuaucgcacacuccugaugaacgaacugggcgugccuuuucaucucgggaccaagcaggucugcauugccugguccucuagcuccugucacgauggaaaagccuggcugcaugugugcguuacaggcgacgauaagaaugcuaccgccagcuucaucuacaacggcagacuuguggacucuauugucuccuggagcaaaaagauccugcggacccaggagucugaaugugugugcauuaaugggacauguacgguggucaugaccgauggauccgcuagcggcaaagccgacacaaagauccucuuuaucgaggaggggaagauuguucacaccuccacacugucuggaagcgcgcagcacguggaagagugcuccugcuauccccgcuacccuggcgugagaugugucugccgggauaacuggaaagggagcaaccgccccaucguggacauuaauaucaaggacuacucuauuguuuccagcuauguguguucuggacuugucggcgauaccccgcggaaaaacgacagcuccucuagcucccauugccuggauccuaauaacgaagagggcgggcacggagugaagggcugggccuucgacgaugggaaugacguuuggaugggaagaacgaucagcgaaaaacuccgcucuggcuacgagacauuuaaggugaucgaggggugguccaaccccaauagcaaacugcaaauuaacagacaggucaucguggaucggggaaaucgcucuggcuauuccggcauuuucagcgucgaagggaaguccuguaucaacagaugcuuuuacguggagcugauucggggaagaaaggaagagaccgaaguucucuggaccucuaauagcaucguggucuucuguggcacauccgggaccuauggaacaggcucuuggccugacggggcugauauuaaccugaugcccaucuga

SEQ ID NO: 218102 - RNA, 1410 nt, Artificial Sequence; identical to SEQ ID NO: 206786
  derived and/or modified CDS sequence (opt5) from neuraminidase__InfluenzaA__BAF46323

SEQ ID NO: 218103 - RNA, 1410 nt, Artificial Sequence
  derived and/or modified CDS sequence (opt5) from neuraminidase__InfluenzaA__BAF46324
augaaccccaaucagaagaucauuaccaucggcagcgugucccugacaauuucuacgaucugcuucuuuaugcaaauugccauccucaucaccacagucacccugcacuucaaacaguacgaguuuaacagcccuccgaauaaccagguuaugcuuugugaacccacaauuaucgagagaaauauuaccgaaaucguguaucugacaaacaccacgauugagaaggaaaucugcccuaaacucgcugaguaccggaauugguccaagccccagugugacauuaccggguucgccccuuuuucuaaagauaacagcauccgccuguccgcgggaggcgacaucugggugacaagagagcccuaugucucuugcgauccugacaaguguuaccaauucgcucuugggcagggaaccacacugaauaacgugcauagcaaugauauuguucacgaccggaccccguaucgcacgcuccugaugaacgaacugggcgugcccuuucaucucgggacaaagcaggucugcaucgccugguccucuagcuccugucacgauggaaaagccuggcugcauguguggguuaccggcgacgauaagaaugcuacagccagcuucauuuacaacggcagacuuguggacucuaucgucuccuggagcaaaaagauucugcggacccaggagucugaaugcguguguaucaaugggaccugcacaguggucaugacggauggauccgcuagcggcaaagccgacaccaagauccucuuuauugaggaggggaagaucguucacacauccacccugucuggaagcgcgcaacacguggaagaguguuccugcuauccucgcuaccccggcgugagaugcgucugucgggauaacuggaaagggagcaaccgcccuauuguggacaucaauauuaaggacuacucuaucguuuccagcuaugugugcucuggacuugucggcgauacaccccggaaaaacgacagcuccucuagcucccauugucuggauccgaauaacgaagagggcgggcacggagugaagggcugggccuucgacgaugggaaugacguuuggaugggaagaaccaucagcgaaaaacuccgcucuggcuacgagacguuuaaggugauugaggggugguccaacccuaauagcaaacugcagaucaacagacaggucauuguggaucggggaaaucgcucuggcuauuccggcaucuucagcgucgaagggaaguccugcauuaacagauguuuuuacguggagcugauccggggaagaaaggaagagacagaaguucucuggaccucuaauagcauuguggucuucugcggcaccuccgggacauauggaaccggcucuuggcccgacggggcugauaucaaccugaugccuaucuga

SEQ ID NO: 218104 - RNA, 1410 nt, Artificial Sequence
  derived and/or modified CDS sequence (opt5) from neuraminidase__InfluenzaA__BAF46332
augaaccccaaucagaagaucauuaccaucggcagcgugucccugacaauuucuacgaucugcuucuuuaugcaaauugccauccucaucaccacagucacccugcacuucaaacaguacgaguuuaacagcccuccgaauaaccagguuaugcuuugugaacccacaauuaucgagagaaauauuaccgaaaucguguaucugacaaacaccacgauugagaaggaaaucugcccuaaacucgcugaguaccggaagugguccaaaccccaguguaauauuaccggguucgccccuuuuucuaaggacaacagcauccgccuguccgcgggaggcgauaucugggugacaagagagcccuaugucucuugcgacccugauaaguguuaccaauucgcucuugggcagggaaccacacugaauaacgugcauagcaaugacaccguucgggaucgcacgccguauagaacacuccugaugaacgaacugggcgugcccuuucaccucgggaccaaacaggucugcauugccugguccucuagcuccugucaugacggaaaggccuggcugcacgugugcguuacaggcgaugacaaaaaugcuaccgccagcuucaucuacaacggccggcuuguggauucuauugucuccuggagcaaggagauccugcgcacccaggaaucugagugugugugcauuaaugggacauguacgguggucaugaccgacggauccgcuagcggcaaagccgauacaaagauccucuuuaucgaggaagggaagauuguucauaccuccacacugucuggaagcgcgcaccacguggaggaaugcuccugcuauccuagauaccccggcgugcggugugucugccgcgacaacuggaaagggagcaacagaccuaucguggauauuaauaucaaggacuacucuauuguuuccagcuauguguguucuggacuugucggcgacacgccccggaaaaacgauagcuccucuagcucccauugccuggacccgaauaacgaggaaggcgggcacggagugaagggcugggccuucgaugacgggaaugauguuuggaugggacgcaccaucagcgagaaacucagaucuggcuacgagacauuuaaggugaucgaagggugguccaacccuaauagcaaacugcaaauuaaccggcaggucaucguggaccgcggaaauagaucuggcuauuccggcauuuucagcgucgaggggaaguccuguaucaaccggugcuuuuacguggaacugauuagaggacgcaaggaggaaaccgagguucucuggaccucuaauagcaucguggucuucuguggcacauccgggaccuauggaacaggcucuuggcccgauggggcugacauuaaccugaugccuaucuga

SEQ ID NO: 218105 - RNA, 1410 nt, Artificial Sequence
  derived and/or modified CDS sequence (opt5) from neuraminidase__InfluenzaA__BAF46334
augaaccccaaucagaagaucauuaccaucggcagcgugucccugacaauuucuacgaucugcuucuuuaugcaaauugccauccucaucaccacagucacccugcacuucaaacaguacgaguuuaacagcccuccgaauaaccagguuaugcuuugugaacccacaauuaucgagagaaauauuaccgaaaucguguaucugacaaacaccacgauugagaaggaaaucugcccuaaacucgcugaguaccggaagugguccaaaccccaguguaauauuaccggguucgccccuuuuucuaaggacaacagcauccgccuguccgcgggaggcgauaucugggugacaagagagcccuaugucucuugcgacccugauaaguguuaccaauucgcucuugggcagggaaccacacugaauaacgugcauagcaaugacaccguucgggaucgcacgccguauagaacacuccugaugaacgaacugggcgugcccuuucaccucgggaccaaacaggucugcauugccugguccucuagcuccugucaugacggaaaggccuggcugcacgugugcguuacaggcgaugacaaaaaugcuaccgccagcuucaucuacaacggccggcuuguggauucuauugucuccuggagcaaggagauccugcgcacccaggaaucugagugugugugcauuaaugggacauguacgguggucaugaccgacggauccgcuagcggcaaagccgauacaaagauccucuuuaucgaggaagggaagauuguucauaccuccacacugucuggaagcgcgcaacacguggaggaaugcuccugcuauccuagauaccccggcgugcggugugucugccgcgacaacuggaaagggagcaacagaccuaucguggauauuaauaucaaggacuacucuauuguuuccagcuauguguguucuggacuugucggcgacacgccccggaaaaacgauagcuccucuagcucccacugccuggacccgaauaacgaggaaggcgggcauggagugaagggcugggccuucgaugacgggaaugauguuuggaugggacgcaccaucagcgagaaacucagaucuggcuacgagacauuuaaggugaucgaagggugguccaacccuaauagcaaacugcagauuaaccggcaggucaucguggaccgcggaaauagaucuggcuauuccggcauuuucagcgucgaggggaaguccuguaucaaccggugcuuuuacguggaacugauuagaggacgcaaggaggaaaccgagguucucuggaccucuaauagcaucguggucuucuguggcacauccgggaccuauggaacaggcucuuggcccgauggggcugacauuaaccugaugccuaucuga

SEQ ID NO: 218106 - RNA, 1410 nt, Artificial Sequence; identical to SEQ ID NO: 218105
  derived and/or modified CDS sequence (opt5) from neuraminidase__InfluenzaA__BAF46335

SEQ ID NO: 218107 - RNA, 1410 nt, Artificial Sequence
  derived and/or modified CDS sequence (opt5) from neuraminidase__InfluenzaA__BAF46337
augaaccccaaucagaagaucauuaccaucggcagcgugucccugacaauuucuacgaucugcuucuuuaugcaaauugccauccucaucaccacagucacccugcacuucaaacaguacgaguuuaacagcccuccgaauaaccagguuaugcuuugugaacccacaauuaucgagagaaauauuaccgaaaucguguaucugacaaacaccacgauugagaaggaaaucugcccuaaacucgcugaguaccggaagugguccaaaccccaguguaauauuaccggguucgccccuuuuucuaaggacaacagcauccgccuguccgcgggaggcgauaucugggugacaagagagcccuaugucucuugcgacccugauaaguguuaccaauucgcucuugggcagggaaccacacugaauaacgugcauagcaaugacaccguucgggugcgcacgccguauagaacacuccugaugaacgaacugggcguccccuuucaccucgggaccaaacaggugugcauugccugguccucuagcuccugucaugauggaaaggccuggcugcacguuugcgugacaggcgacgauaaaaaugcuaccgccagcuucaucuacaacggccggcuugucgacucuauuguguccuggagcaaggagauccugcgcacccaggaaucugagugugugugcauuaaugggacauguacggucguuaugaccgauggauccgcuagcggcaaagccgacacaaagauccucuuuaucgaggaagggaagauugugcauaccuccacacugucuggaagcgcgcaacacguggaggaaugcuccugcuauccuagauaccccggcguccggugugugugccgcgauaacuggaaagggagcaacagaccuaucguugacauuaauaucaaggauuacucuauuguguccagcuaugucuguucuggacuugugggcgacacgccccggaaaaacgacagcuccucuagcucccacugccuggauccgaauaacgaggaaggcgggcauggaguuaagggcugggccuucgacgaugggaaugacguguggauggcucgcaccaucagcgagaaacucagaucuggauacgagacauuuaaggucaucgaaggcugguccaacccuaauagcaaacugcagauuaaccgccaggugaucgucgaucgggggaauagaucuggauauuccggcauuuucagcguggagggcaaguccuguaucaaccggugcuuuuacguugaacugauuagagggcgcaaggaggaaaccgaggugcucuggaccucuaauagcaucgucguguucuguggaacauccggcaccuaugggacaggaucuuggcccgacggcgccgauauuaaccugaugccuaucuga

SEQ ID NO: 218108 - RNA, 1410 nt, Artificial Sequence; identical to SEQ ID NO: 218105
  derived and/or modified CDS sequence (opt5) from neuraminidase__InfluenzaA__BAF46345

SEQ ID NO: 218109 - RNA, 1410 nt, Artificial Sequence
  derived and/or modified CDS sequence (opt5) from neuraminidase__InfluenzaA__BAF46346
augaaccccaaucagaagaucauuaccaucggcagcgugucccugacaauuucuacgaucugcuucuuuaugcaaauugccauccucaucaccacagucacccugcacuucaaacaguacgaguuuaacagcccuccgaauaaccagguuaugcuuugugaacccacaauuaucgagagaaauauuaccgaaaucguguaucugacaaacaccacgauugagaaggaaaucugcccuaaacucgcugaguaccggaagugguccaaaccccaguguaauauugccggguucgcgccuuuuucuaaggacaacagcauccgccuguccgcuggaggcgauaucugggugaccagagagcccuaugucucuugcgacccugauaaguguuaccaauucgcccuugggcagggaacaacccugaauaacgugcauagcaaugacacaguucgggaucgcaccccguauagaacgcuccugaugaacgaacugggcgugcccuuucaccucgggacaaaacaggucugcauugccugguccucuagcuccugucaugacggaaaggcuuggcugcacgugugcguuaccggcgaugacaaaaaugccacagcuagcuucaucuacaacggccggcuuguggauucuauugucuccuggagcaaggagauccugcgcacccaggaaucugagugugugugcauuaaugggaccuguacaguggucaugacggacggauccgccagcggcaaagcggauaccaagauccucuuuaucgaggaagggaagauuguucauacauccacccugucuggaagcgcccaacacguggaggaaugcuccugcuauccuagauaccccggcgugaucugugucugccgggacaacuggaaagggagcaaccgcccuauuguggauaucaauauuaaggacuacucuaucguuuccagcuauguguguucuggacuugucggcgacacaccccggaaaaacgauagcuccucuagcucccacugccuggacccgaauaacgaggaaggcgggcauggagugaagggcugggcuuucgaugacgggaaugauguuuggaugggaagaaccaucagcgagaaacuccgcucuggcuacgagacguuuaaggugauugaagggugguccaacccuaauagcaaacugcagaucaacagacaggucauuguggaccggggaaaucgcucuggcuauuccggcaucuucagcgucgaggggaaguccuguauuaacagaugcuuuuacguggaacugauccggggaagaaaggaggaaacagagguucucuggaccucuaauagcauuguggucuucuguggcaccuccgggacauauggaaccggcucuuggcccgauggggccgacaucaaccugaugccuaucuga

SEQ ID NO: 218110 - RNA, 1410 nt, Artificial Sequence
  derived and/or modified CDS sequence (opt5) from neuraminidase__InfluenzaA__BAF46347
augaaccccaaucagaagaucauuaccaucggcagcgugucccugacaauuucuacgaucugcuucuuuaugcaaauugccauccucaucaccacagucacccugcacuucaaacaguacgaguuuaacagcccuccgaauaaccagguuaugcuuugugaacccacaauuaucgagagaaauauuaccgaaaucguguaucugacaaacaccacgauugagaaggaaaucugcccuaaacucgcugaguaccggaagugguccaaaccccaguguaauauuaccggguucgccccuuuuucuaaggacaacagcauccgccuguccgcgggaggcgauaucugggugacaagagagcccuaugucucuugcgacccugauaaguguuaccaauucgcucuugggcagggaaccacacugaauaacgugcauagcaaugacaccguucgggaucgcacgccguauagaacacuccugaugaacgaacugggcgugcccuuucaccucgggaccaaacaggucugcauugccugguccagcagcuccugucaugacggaaaggccuggcugcacgugugcguuacaggcgaugacaaaaaugcuaccgccaccuucaucuacaacggccggcuuguggauagcauugucucuugguccaaggagauccugcgcacacaggaaagcgagugugugugcauuaaugggacguguaccguggucaugacagacggaucugcuuccggcaaagccgauaccaagauccucuuuaucgaggaagggaagauuguucauacaagcacccuguccggaucugcgcaacacguggaggaaugcagcugcuauccuagauaccccggcgugcggugugucugccgcgacaacuggaaaggguccaacagaccuaucguggauauuaauaucaaggacuacagcauuguuucuuccuauguguguagcggacuugucggcgacacgccccggaaaaacgauucuagcuccucuagccacugccuggacccgaauaacgaggaaggcgggcauggagugaagggcugggccuucgaugacgggaaugauguuuggaugggacgcacaaucuccgagaaacucagaagcggcuacgagaccuuuaaggugaucgaaggguggucuaacccuaauuccaaacugcagauuaaccggcaggucaucguggaccgcggaaauagaagcggcuauucuggcauuuucuccgucgaggggaagucuuguaucaaccggugcuuuuacguggaacugauuagaggacgcaaggaggaaaccgagguucucuggacauccaauucuaucguggucuucuguggcaccagcgggacauauggaacgggcuccuggcccgauggggcugacauuaaccugaugccuaucuga

SEQ ID NO: 218111 - RNA, 1410 nt, Artificial Sequence
  derived and/or modified CDS sequence (opt5) from neuraminidase__InfluenzaA__BAF46349
augaaccccaaucagaagaucauuaccaucggcagcgugucccugacaauuucuacgaucugcuucuuuaugcaaauugccauccucaucaccacagucacccugcacuucaaacaguacgaguuuaacagcccuccgaauaaccagguuaugcuuugugaacccacaauuaucgagagaaauauuaccgaaaucguguaucugacaaacaccacgauugagaaggaaaucugcccuaaacucgcugaguaccggaagugguccaaaccccaguguaauauuaccggguucgccccuuuuucuaaggacaacagcauccgccuguccgcgggaggcgauaucugggugacaagagagcccuaugucucuugcgacccugauaaguguuaccaauucgcucuugggcagggaaccacacugaauaacgugcauagcaaugacaccguucgggcccgcacgccguauagaacacuccugaugaacgaacugggcgugcccuuucaccucgggaccaaacaggucugcauugccugguccucuagcuccugucaugauggaaaggcuuggcugcacgugugcguuacaggcgacgauaaaaaugccaccgcuagcuucaucuacaacggccggcuuguggacucuauugucuccuggagcaaggagauccugcgcacccaggaaucugagugugugugcauuaaugggacauguacgguggucaugaccgauggauccgccagcggcaaagcggacacaaagauccucuuuaucgaggaagggaagauuguucauaccuccacacugucuggaagcgcccaacacguggaggaaugcuccugcuauccuagauaccccggcgugcggugugucugccgcgauaacuggaaagggagcaacagaccuaucguggacauuaauaucaaggauuacucuauuguuuccagcuauguguguucuggacuugucggcgacacgccccggaaaaacgacagcuccucuagcucccacugccuggauccgaauaacgaggaaggcgggcauggagugaagggcugggcuuucgacgaugggaaugacguuuggaugggacgcaccaucagcgagaaacucagaucuggcuacgagacauuuaagguguucgaagggugguccaacccuaauagcaaacugcagaucaaccggcaggucauuguggaucgcggaaauagaucuggcuauuccggcaucuuuagcgucgaggggaaguccuguauuaaccggugcuucuacguggaacugaucagaggacgcaaggaggaaaccgagguucucuggaccucuaauagcauuguggucuucuguggcacauccgggaccuauggaacaggcucuuggcccgacggggccgauaucaaccugaugccuauuuga

SEQ ID NO: 218112 - RNA, 1410 nt, Artificial Sequence; identical to SEQ ID NO: 218105
  derived and/or modified CDS sequence (opt5) from neuraminidase__InfluenzaA__BAF46350

SEQ ID NO: 218113 - RNA, 1410 nt, Artificial Sequence
  derived and/or modified CDS sequence (opt5) from neuraminidase__InfluenzaA__BAF46351
augaaccccauccagaagauuaucaccauuggcagcgugucccugacaaucucuacgauuugcuucuuuaugcaaaucgccauccucauuaccacagucacccugcacuucaaacaguacgaguuuaauagcccuccgaacaaucagguuaugcuuugugaacccacaaucauugagagaaacaucaccgaaauuguguaucugacaaauaccacgaucgagaaggaaauuugcccuaaacucgcugaguaccggaagugguccaaaccccaguguaacaucaccggguucgccccuuuuucuaaggacaauagcauccgccuguccgcgggaggcgauauuugggugacaagagagcccuaugucucuugcgacccugauaaguguuaccaauucgcucuugggcagggaaccacacugaacaaugugcauagcaacgacaccguucgggaucgcacgccguauagaacacuccugaugaaugaacugggcgugcccuuucaccucgggaccaaacaggucugcaucgccugguccucuagcuccugucaugacggaaaggccuggcugcacgugugcguuacaggcgaugacaaaaacgcuaccgccagcuucauuuacaauggccggcuuguggauucuaucgucuccuggagcaaggagauucugcgcacccaggaaucugagugugugugcaucaacgggacauguacgguggucaugaccgacggauccgcuagcggcaaagccgauacaaagauccucuuuauugaggaagggaagaucguucauaccuccacacugucuggaagcgcgcaacacguggaggaaugcuccugcuauccuagauaccccggcgugcggugugucugccgcgacaauuggaaagggagcaacagaccuaugguggauauuaacaucaaggacuacucuauuguuuccagcuauguguguucuggacuugucggcgacacgccccggaaaaaugauagcuccucuagcucccacugccuggacccgaacaaugaggaaggcgggcauggagugaagggcugggccuucgaugacgggaacgauguuuggaugggacgcaccaucagcgagaaacucagaucuggcuacgagacauuuaaggugaucgaagggugguccaauccuaacagcaaacugcagauuaaucggcaggucaucguggaccgcggaaacagaucuggcuauuccggcauuuucagcgucgaggggaaguccuguaucaaucggugcuuuuacguggaacugauuagaggacgcaaggaggaaaccgagguucucuggaccucuaacagcaucguggucuucuguggcacauccgggaccuauggaacaggcucuuggcccgauggggcugacauuaaucugaugccuaucuga

SEQ ID NO: 218114 - RNA, 1410 nt, Artificial Sequence
  derived and/or modified CDS sequence (opt5) from neuraminidase__InfluenzaA__BAF46368
augaaccccaaucagaagaucauuaccaucggcagcgugucccugacaauuucuacgaucugcuucuuuaugcaaauugccauccucaucaccacagucacccugcacuucaaacaguacgaguuuaacagcccuccgaauaaccagguuaugcuuugugaacccacaauuaucgagagaaauauuaccgaaaucguguaucugacaaacaccacgauugagaaggaaaucugcccuaaacucgcugaguaccggaauugguccaagccccaguguaacauuaccggguucgccccuuuuucuaaagacaauagcauccgccuguccgcgggaggcgauaucugggugacaagagagcccuaugucucuugcgacccugauaaguguuaccaauucgcucuugggcagggaaccacacugaacaaugugcauagcaacgacaccguucgggaacgcacgccguauagaacacuccugaugaaugagcugggcgugcccuuucaccucgggaccaagcaggucugcauugccugguccucuagcuccugucaugauggaaaagccuggcugcacgugugcguuacaggcgacgauaagaacgcuaccgccagcuucaucuacaauggccggcuuguggacucuauugucuccuggagcaaagaaauccugcgcacccaggagucugagugugugugcauuaacgggacauguacgguggucaugaccgauggauccgcuagcggcaaggccgacacaaaaauccucuuuaucgaagaggggaagauuguucauaccuccacacugucuggaagcgcgcaacacguggaagagugcuccugcuauccuagauaccccggcgugcggugugucugccgcgauaacuggaaggggagcaauagaccuaucguggacauuaacaucaaagauuacucuauuguuuccagcuauguguguucuggacuugucggcgacacgccccggaagaaugacagcuccucuagcucccacugccuggauccgaacaaugaagagggcgggcauggagugaaaggcugggccuucgacgaugggaacgacguuuggaugggacgcaccaucagcgagaagcucagaucuggcuacgaaacauuuaaagugaucgaggggugguccaauccuaacagcaagcugcagauuaaucggcaggucaucguggaucgcggaaacagaucuggcuauuccggcauuuucagcgucgaagggaaauccuguaucaaucggugcuuuuacguggagcugauuagaggacgcaaggaagagaccgagguucucuggaccucuaacagcaucguggucuucuguggcacauccgggaccuauggaacaggcucuuggcccgacggggcugauauuaaucugaugccuaucuga

SEQ ID NO: 218115 - RNA, 1410 nt, Artificial Sequence
  derived and/or modified CDS sequence (opt5) from neuraminidase__InfluenzaA__BAF46369
augaaccccaaucagaagaucauuaccaucggcagcgugucccugacaauuucuacgaucugcuucuuuaugcaaauugccauccucaucaccacagucacccugcacuucaaacaguacgaguuuaacagcccuccgaauaaccagguuaugcuuugugaacccacaauuaucgagagaaauauuaccgaaaucguguaucugacaaacaccacgauugagaaggaaaucugcccuaaacucgcugaguaccggaauugguccaagccccaguguaacauuaccggguucgccccuuuuucuaaagacaauagcauccgccuguccgcgggaggcgauaucugggugacaagagagcccuaugucucuugcgacccugauaaguguuaccaauucgcucuugggcagggaaccacacugaacaaugugcauagcaacgacaccguucacgaucggacgccguaucgcacacuccugaugaaugaacugggcgugcccuuucaucucgggaccaagcaggucugcauugccugguccucuagcuccugucacgacggaaaagccuggcugcaugugugcguuacaggcgaugacaagaacgcuaccgccagcuucaucuacaauggcaaacuuguggauucuauugucuccuggagcaaggagauccugagaacccaggaaucugagugugugugcauuaacgggacauguacgguggucaugaccgacggauccgcuagcggcaaagccgauacaaagauccucuuuaucgaggaagggaagauuguucacaccuccacacugucuggaagcgcgcaacacguggaggaaugcuccugcuauccucgguaccccggcgugcgcugugucugcagagacaacuggaaagggagcaaucggccuaucguggauauuaacaucaaggacuacucuauuguuuccagcuauguguguucuggacuugucggcgacacgccccgcaaaaaugauagcuccucuagcucccauugccuggacccgaacaaugaggaaggcgggcacggagugaagggcugggccuucgaugacgggaacgauguuuggaugggaagaaccaucagcgagaaaucucgguccggcuacgagacauuucaggugaucgaaggguggagcaauucuaacuccaagcuccagauuaaucgccaggucaucguggacagaggaaaccggagcggcuauuccggcauuuucucugucgaggggaaaagcuguaucaaucgcugcuuuuacguggaacugauuagaggacggaaggaggaaaccgagguucuguggaccuccaacucuaucguggucuucuguggcacaagcgggaccuauggaacaggcuccuggccugauggggcugacauuaaucucaugcccaucuga

SEQ ID NO: 218116 - RNA, 1410 nt, Artificial Sequence
  derived and/or modified CDS sequence (opt5) from neuraminidase__InfluenzaA__BAF46370
augaaccccaaucagaagaucauuaccaucggcagcgugucccugacaauuucuacgaucugcuucuuuaugcaaauugccauccucaucaccacagucacccugcacuucaaacaguacgaguuuaacagccuuccuaauaaccagguuaugcugugugaaccgacaauuaucgagagaaauauuaccgaaaucguguaucucacaaacaccacgauugagaaggaaaucugccccaaacuggcugaguaccggaauugguccaagccucaguguaacauuaccggguucgcccccuuuucuaaagacaauagcauccgccuuuccgcgggaggcgauaucugggugacaagagagccuuaugucucuugcgaccccgauaaguguuaccaauucgcucuggggcagggaaccacacucaacaaugugcauagcaacgacaccguucacgaucggacgccuuaucgcacacugcugaugaaugaacucggcgugccguuucaucuggggaccaagcaggucugcauugccugguccucuagcuccugucacgacggaaaagccuggcuucaugugugcguuacaggcgaugacaagaacgcuaccgccagcuucaucuacaauggcagacugguggauucuauugucuccuggagcaaagagauccuccggacccaggaaucugagugugugugcauuaacgggacauguacgguggucaugaccgacggauccgcuagcggcaaggccgauacaaaaauccuguuuaucgaggaagggaagauuguucacaccuccacacuuucuggaagcgcgcaacacguggaggaaugcuccugcuauccccgcuacccuggcgugagaugugucugccgggacaacuggaaggggagcaaucgccccaucguggauauuaacaucaaagacuacucuauuguuuccagcuauguguguucuggacuggucggcgacaccccuagaaagaaugauagcuccucuagcucccauugccucgaccccaacaaugaggaaggcgggcacggagugaaaggcugggccuucgaugacgggaacgauguuuggaugggacggacgaucagcgagaagcugcgcucuggcuacgagacauuuaaagugaucgaagggugguccaauccgaacagcaagcugcagauuaauagacaggucaucguggaccggggaaaccgcucuggcuauuccggcauuuucagcgucgaggggaaauccuguaucaauagaugcuuuuacguggaacucauucggggaagaaaggaggaaaccgagguucuguggaccucuacaagcaucguggucuucuguggcuccucugggaccuauggaacaggcagcuggccugauggggcugacauuaaccuuaugcccaucuga

SEQ ID NO: 218117 - RNA, 1410 nt, Artificial Sequence
  derived and/or modified CDS sequence (opt5) from neuraminidase__InfluenzaA__BAF46371
augaaccccaaucagaagaucauuaccaucggcagcgugucccugacaauuucuacgaucugcuucuuuaugcaaauugccauccucaucaccacagucacccugcacuucaaacaguacgaguuuaacagcccuccgaauaaccagguuaugcuuugugaacccacaauuaucgagagaaauauuaccgaaaucgugcaucugacaaacaccacgauugagaaggaaaucugcccuaaacucgcugaguaucggaauugguccaagccccaguguaacauuaccggguucgccccuuuuucuaaagacaauagcauccgccuguccgcgggaggcgauaucugggugacaagagagcccuacgucucuugcgacccugauaaguguuaucaauucgcucuugggcagggaaccacacugaacaaugugcacagcaacgacaccguucaugaucggacgccguaccgcacacuccugaugaaugaacugggcgugcccuuucaccucgggaccaagcaggucugcauugccugguccucuagcuccugucaugacggaaaagccuggcugcacgugugcguuacaggcgaugacaagaacgcuaccgccagcuucaucuauaauggcagacuuguggauucuauugucuccuggagcaaagagauccugcggacccaggaaucugagugugugugcauuaacgggacauguacgguggucaugaccgacggauccgcuagcggcaaggccgauacaaaaauccucuuuaucgaggaagggaagauuguucacaccuccacacugucuggaagcgcgcaacauguggaggaaugcuccugcuacccucgcuaucccggcgugagaugugucugccgggacaacuggaaggggagcaaucgcccuaucguggauauuaacaucaaagacuacucuauuguuuccagcuacguguguucuggacuugucggcgacacccccagaaagaaugauagcuccucuagcucccacugccuggacccgaacaaugaggaaggcgggcauggagugaaaggcugggccuucgaugacgggaacgauguuuggaugggacggacgaucagcgagaagcuccgcucuggcuaugagacauuuaaagugaucgaagggugguccaauccuaacagcaagcugcagaccaauagacaggucauuguggaccggucuaaccgcuccggauacagcggcaucuucuccgucgagggcaaaucuuguauuaauagaugcuuuuauguggaacugauccgggggagaaaggaggaaaccgagguucucuggacaagcaacuccauuguggucuucuguggaaccucuggcacauacgggacgggaagcuggcccgauggcgcugacaucaaucugaugccuauuuga

SEQ ID NO: 218118 - RNA, 1410 nt, Artificial Sequence
  derived and/or modified CDS sequence (opt5) from neuraminidase__InfluenzaA__BAF46372
augaaccccaaucagaagaucauuaccaucggcagcgugucccugacaauuucuacgaucugcuucuuuaugcaaauugccauccucaucaccacagucacccugcacuucaaacaguacgaguuuaacagcccuccgaauaaccagguuaugcuuugugaacccacaauuaucgagagaaauauuaccgaaaucguguaucugacaaacaccacgauugagaaggaaaucugcccuaaacucgcugaguaccggaauugguccaagccccagugugacauugccggguucgcgccuuuuucuaaagauaacagcauccgccuguccgcuggaggcgacaucugggugaccagagagcccuaugucucuugcgauccugacaaguguuaccaauucgcccuugggcagggaacaacccugaauaacgugcauagcaaugauacaguucacgaccggaccccguaucgcacgcuccugaugaacgaacugggcgugcccuuucaucucgggacaaagcaggucugcauugccugguccucuagcuccugucacgauggaaaggcuuggcugcaugugugcguuaccggcgacgauaaaaaugccacagcuagcuucaucuacaacggcagacuuguggacucuauugucuccuggagcaaaaagauccugcggacccaggagucugaaugugugugcauuaaugggaccuguacaguggucaugacggauggauccgccagcggcaaagcggacaccaagauccucuuuaucgaggaggggaagauuguucacacauccacccugucuggaagcgcccaacacguggaagagugcuccugcuauccucgcuaccccggcgugagaugugucugccgggauaacuggaaagggagcaaccgcccuaucguggacauuaauaucaaggacuacucuauuguuuccagcuauguguguucuggacuugucggcgauacaccccggaaaaacgacagcuccucuagcucccauugccuggauccgaauaacgaagagggcgggcacggagugaagggcugggcuuucgacgaugggaaugacguuuggaugggaagaaccaucagcgaaaaacuccgcucuggcuacgagacguuuaaggugaucgaggggugguccaacccuaauagcaaacugcagauuaacagacaggucaucguggaucggggaaaucgcucuggcuauuccggcauuuucagcgucgaagggaaguccuguaucaacagaugcuuuuacguggagcugauucggggaagaaaggaagagacagaaguucucuggaccucuaauagcaucguggucuucuguggcaccuccgggacauauggaaccggcucuuggcccgacggggccgauauuaaccugaugccuaucuga

SEQ ID NO: 218119 - RNA, 1410 nt, Artificial Sequence
  derived and/or modified CDS sequence (opt5) from neuraminidase__InfluenzaA__BAF46385
augaaccccaaucagaagaucauuaccaucggcagcgugucccugacaauuucuacgaucugcuucuuuaugcaaauugccauccucaucaccacagucacccugcacuucaaacaguacgaguuuaacagcccuccgaauaaccagguuaugcuuugugaacccacaauuaucgagagaaauauuaccgaaaucguguaucugacaaacaccacgauugagaaggaaaucugcccuaaacucgcugaguaccggaauugguccaagccccaguguaacauuaccggguucgccccuuuuucuaaagacaauagcauccgccuguccgcgggaggcgauaucugggugacaagagagcccuaugucucuugcgacccugauaaguguuaccaauucgcucuugggcagggaaccacacugaacaaugugcauagcaacgacaccguucacgaucggacgccguaucgcacacuccugaugaaugaacugggcgugcccuuucaucucgggaccaagcaggucugcauugccugguccucuagcuccuguccugacggaaaagccuggcugcacgugugcguuacaggcgaugacaagaacgcuaccgccagcuucaucuacaauggcagacuuguggauucuauugucuccuggagcaaagagauccugcggacccaggaaucugagugugugugcauuaacgggacauguacgguggucaugaccgacggauccgcuagcggcaaggccgauacaaaaauccucuuuaucgaggaagggaagauuguucauaccuccacacugucuggaagcgcgcaacacguggaggaaugcuccugcuauccccgcuacccuggcgccagaugugugugccgggacaacuggaaggggagcaaucgccccaucgucgauauuaacaucaaagacuacucuauuguguccagcuauguuuguucuggacuugugggcgacaccccgagaaagaaugauagcuccucuagcucccacugccuggacccuaacaaugaggaaggcgggcauggagucaaaggcugggcuuucgaugacgggaacgauguguggaugggacggacgaucagcgagaagcuccgcucuggcuacgagacauuuaaaguuaucgaagggugguccaaucccaacagcaagcugcagaccaauagacaggugauugucgaccggggaaaccgcucuggcuauuccggcaucuucagcguggaggggaaauccuguauuaauagaugcuuuuacgucgaacugauccggggaagaaaggaggaaaccgaggugcucuggacaucuaacagcauuguuguguucuguggcaccuccucuacauaugggacgggaagcuggccugauggcgccgacaucaaucugaugcccauuuga

SEQ ID NO: 218120 - RNA, 1410 nt, Artificial Sequence
  derived and/or modified CDS sequence (opt5) from neuraminidase__InfluenzaA__BAF46386
augaaccccaaucagaagaucauuaccaucggcagcgugucccugacaauuucuacgaucugcuucuuuaugcaaauugccauccucaucaccacagucacccugcacuucaaacaguacgaguuuaacagcccuccgaauaaccagguuaugcuuugugaacccacaauuaucgagagaaauauuaccgaaaucguguaucugacaaacaccacgauugagaaggaaaucugcccuaaacucgcugaguaccggaauugguccaagccccaguguaacauuaccggguucgccccuuuuucuaaagacaauagcauccgccuguccgcgggaggcgauaucugggugacaagagagcccuaugucucuugcgacccugauaaguguuaccaauucgcucuugggcagggaaccacacugaacaaugugcauagcaacgacaccguucacgaucggacgccguaucgcacacuccugaugaaugaacugggcgugcccuuucaucucgggaccaagcaggucugcauugccugguccucuagcuccugucacgacggaaaagccuggcugcaugugugcguuacaggcgaugacaagaacgcuaccgccagcuucaucuacaauggcagacuuguggauucuauugucuccuggagcaaagagauccugcggacccaggaaucugagugugugugcauuaacgggacauguacgguggucaugaccgacggauccgcuagcggcaaggccgauacaaaaauccucuuuaucgaggaagggaagauuguucacaccuccacacugucuggaagcgcgcaacacguggaggaaugcuccugcuauccucgcuaccccggcgugagaugugucugccgggacaacuggaaggggagcaaucgcccuaucguggauauuaacaucaaagacuacucuauuguuuccagcuauguguguucuggacuugucggcgacacccccagaaagaaugauagcuccucuagcucccauugccuggacccgaacaaugaggaaggcgggcacggagugaaaggcugggccuucgaugacgggaacgauguuuggaugggacggacgaucagcgagaagcuccgcucuggcuacgagacauuuaaagugaucgaagggugguccaauccuaacagcaagcugcagaccaauagacaggucauuguggaccggggaaaccgcucuggcuauuccggcaucuucagcgucgaggggaaauccuguauuaauagaugcuuuuacguggaacugauccggggaagaaaggaggaaaccgagguucucuggacaucuaacagcauuguggucuucuguggcaccuccucuacauaugggacgggaagcuggcccgauggcgcugacaucaaucugaugccuauuuga

SEQ ID NO: 218121 - RNA, 1410 nt, Artificial Sequence; identical to SEQ ID NO: 208636
  derived and/or modified CDS sequence (opt5) from neuraminidase__InfluenzaA__BAF46387

SEQ ID NO: 218122 - RNA, 1410 nt, Artificial Sequence
  derived and/or modified CDS sequence (opt5) from neuraminidase__InfluenzaA__BAF46388
augaaccccaaucagaagaucauuaccaucggcagcgugucccugacaauuucuacgaucugcuucuuuaugcaaauugccauccucaucaccacagucacccugcacuucaaacaguacgaguuuaacagcccuccgaauaaccagguuaugcuuugugaacccacaauuaucgagagaaauauuaccgaaaucguguaucugacaaacaccacgauugagaaggaaaucugcccuaaacucgcugaguaccggaauugguccaagccccaguguaacauuaccggguucgccccuuuuucuaaagacaauagcauccgccuguccgcgggaggcgauaucugggugacaagagagcccuaugucucuugcgacccugauaaguguuaccaauucgcucuugggcagggaaccacacugaacaaugugcauagcaacgacaccguucacgaucggacgccguaucgcacacuccugaugaaugaacugggcgugcccuuucaucucgggaccaagcaggucugcauugccugguccucuagcuccugucacgacggaaaagccuggcugcaugugugcguuacaggcgaugacaagaacgcuaccgccagcuucaucuacaauggcagacuuguggauucuauugucuccuggagcaaagagauccugcggacccaggaaucugagugugugugcauuaacgggacauguacgguggucaugaccgacggauccgcuagcggcaaggccgauacaaaaauccucuuuaucgaggaagggaagauuguucacaccuccacacugucuggaagcgcgcaacacguggaggaaugcuccugcuauccucgcuaccccggcgugagaugugucugccgggacaacuggaaggggagcaaucgcccuaucguggauauuaacaucaaagacuacucuauuguuuccagcuauguguguucuggacuugucggcgacacccccagaaagaaugauagcuccucuagcucccauugccuggacccgaacaaugaggaaggcgggcacggagugaaaggcugggccuucgaugacgggaacgauguuuggaugggacggacgaucagcgagaagcuccgcucuggcuacgagacauuuaaagugaucgaagggugguccaauccuaacagcaagcugcagauuaauagacaggacaucgucgaucggggaaaccgcucuggcuauuccggcauuuucagcguggaggggaaauccuguaucaauagaugcuuuuacgucgaacugauucggggaagaaaggaggaaaacgaggugcucuggaccucuaauagcaucguuguguucuguggcaccuccgggacauauggaaccggcucuuggcccgacggggcugauauuaaccugaugccuaucuga

SEQ ID NO: 218123 - RNA, 1410 nt, Artificial Sequence
  derived and/or modified CDS sequence (opt5) from neuraminidase__InfluenzaA__BAF47922
augaaccccaaucagaagaucauuaccaucggcagcgugucccugacaauuucuacgaucugcuucuuuaugcaaauugccauccucaucaccacagucacccugcacuucaaacaguacgaguuuaacagcccuccgaauauucagguuaugcuuugugaacccacaaucauugagagaaacaucaccgaaauuguguaucugacaaauaccacgaucgagaaggaaauuugcccuaaacucgcugaguaccggaacugguccaagccccagugugacaucaccggguucgccccuuuuucuaaagauaauagcauccgccuguccgcgggaggcgacauuugggugacaagagagcccuaugucucuugcgauccugacaaguguuaccaauucgcucuugggcagggaaccacacugaacaaugugcauagcaacgauaccguucacgaccggacgccguaucgcacacuccugaugaaugaacugggcgugcccuuucaucucgggaccaagcaggucugcaucgccugguccucuagcuccugucacgauggaaaagccuggcugcaugugugcguuacaggcgacgauaagaacgcuaccgccagcuucauuuacaauggcagacuuguggacucuaucgucuccuggagcaaagagauucugcggacccaggaaucugagugugugugcaucaacgggacauguacgguggucaugaccgauggauccgcuagcggcaaggccgacacaaaaauccucuuuauugaggaagggaagaucguucacaccuccacacugucuggaagcgcgcaacacguggaggaaugcuccugcuauccucgcuaccccggcgugagaugugucugccgggauaauuggaaggggagcaaccgcccuauuguggacaucaacauuaaagacuacucuaucgccuccagcuauguuuguucuggacuugugggcgauacccccagaaagaaugacagcuccucuagcucccauugccuggauccgaacaaugaggaaggcgggcacggagucaaaggcugggcuuucgacgaugggaacgacguguggaugggacggacgaucagcgagaagcuccgcucuggcuacgagacauuuaaaguuauugaagggugguccaauccuaacagcaagcugcagaucaauagacaggugauugucgaucggggaaaccgcucuggcuauuccggcaucuucagcguggaggggaaauccuguauuaauagaugcuuuuacgucgaacugauccggggaagaaaggaggaaaccgaggugcucuggaccucuaacagcauuguuguguucuguggcacauccgggaccuauggaacaggcucuuggcccgacggggccgauaucaaucugaugccuaucuga

SEQ ID NO: 218124 - RNA, 1410 nt, Artificial Sequence; identical to SEQ ID NO: 206766
  derived and/or modified CDS sequence (opt5) from neuraminidase__InfluenzaA__BAF47923

SEQ ID NO: 218125 - RNA, 1410 nt, Artificial Sequence
  derived and/or modified CDS sequence (opt5) from neuraminidase__InfluenzaA__BAF47924
augaaccccaaucagaagaucauuaccaucggcagcgugucccugacaauuucuacgaucugcuucuuuaugcaaauugccauccucaucaccacagucacccugcacuucaaacaguacgaguuuaacagcccuccgaauaaccagguuaugcuuugugaacccacaauuaucgagagaaauauuaccgaaaucguguaucugacaaacaccacgauugagaaggaaaucugcccuaaacucgcugaguaccggaauugguccaagccccaguguaacauuaccggguucgccccuuuuucuaaagacaauagcauccgccuguccgcgggaggcgauaucugggugacaagagagcccuaugucucuugcgacccugauaaguguuaccaauucgcucuugggcagggaaccacacugaacaaugugcauagcaacgacaccguucacgaucggacgccguaucgcacacuccugaugaaugaacugggcgugcccuuucaucucgggaccaagcaggucugcauugccugguccucuagcuccugucacgacggaaaagccuggcugcaugugugcguuacaggcgaugacaagaacgcuaccgccagcuucaucuacaauggcagacuuguggauucuauugucuccuggagcaaagagauccugcggacccaggaaucugagugugugugcauuaacgggacauguacgguggucaugaccgacggauccgcuagcggcaaggccgauacaaaaauccucuuuaucgaggaagggaagauuguucacaccuccacacugucuggaagcgcgcaacacguggaggaaugcuccugcuauccucgcuaccccggcgugagaugugucugccgggacaacuggaaggggagcaaucgcccuaucguggauauuaacaucaaagacuacucuauuguuuccagcuauguguguucuggacuugucggcgacacccccagaaagaaugauagcuccucuagcucccauugccuggacccgaacagcgaggaaggcgggcacggagugaaaggcugggccuucgaugacgggaaugauguuuggaugggacggacgaucucugagaagcuccgcuccggcuacgagacauuuaaagugaucgaaggguggagcaacccuaauucuaagcugcagaccaacagacaggucauuguggaccggggaaaucgcuccggcuauagcggcaucuucuccgucgaggggaaaucuuguauuaacagaugcuuuuacguggaacugauccggggaagaaaggaggaaaccgagguucucuggacaagcaauuccauuguggucuucuguggcaccucugggacauauggaacgggcagcuggcccgauggggcugacaucaaccugaugccuauuuga

SEQ ID NO: 218126 - RNA, 1410 nt, Artificial Sequence; identical to SEQ ID NO: 206784
  derived and/or modified CDS sequence (opt5) from neuraminidase__InfluenzaA__BAF47925

SEQ ID NO: 218127 - RNA, 1410 nt, Artificial Sequence; identical to SEQ ID NO: 206784
  derived and/or modified CDS sequence (opt5) from neuraminidase__InfluenzaA__BAF47926

SEQ ID NO: 218128 - RNA, 1410 nt, Artificial Sequence; identical to SEQ ID NO: 212771
  derived and/or modified CDS sequence (opt5) from neuraminidase__InfluenzaA__BAF47927

SEQ ID NO: 218129 - RNA, 1410 nt, Artificial Sequence; identical to SEQ ID NO: 208636
  derived and/or modified CDS sequence (opt5) from neuraminidase__InfluenzaA__BAF47928

SEQ ID NO: 218130 - RNA, 1410 nt, Artificial Sequence
  derived and/or modified CDS sequence (opt5) from neuraminidase__InfluenzaA__BAF47929
augaaccccaaucagaagaucauuaccaucggcagcgugucccugacaauuucuacgaucugcuucuuuaugcaaauugccauccucaucaccacagucacccugcacuucaaacaguacgaguuuaacagcccuccgaauaaccagguuaugcuuugugaacccacaauuaucgagagaaauauuaccgaaaucguguaucugacaaacaccacgaccgagaaggaaauuugcccuaaacucgcugaguaccggaauugguccaagccccaguguaacaucacaggguucgccccuuuuucuaaagacaauagcauucgccuguccgcgggaggcgauaucugggugaccagagagcccuaugucucuugcgacccugauaaguguuaccaauucgcucuugggcagggaacaacccugaacaaugugcauagcgacgauacgguucacgaccggacaccguaucgcacccuccugaugaacgaacugggcgugcccuuucaucucgggacaaagcaggucugcaucgccugguccucuagcuccugucacgauggaaaagccuggcugcaugugugcguuaccggcgacgauaagaaugcuaccgccagcuucauuuacaacggcagacuuguggacucuaucgucuccuggagcaaagagauucugcggacacaggaaucugagugugugugcaucaaugggacguguaccguggucaugacagauggauccgcuagcggcaaggccgacaccaaaauucucuuuaucgaggaagggaagaucguucacacauccacccugucuggaagcgcgcaacacguggaggaaugcuccugcuauccucgcuaccccggcgugagaugugucugccgggauaacuggaaggggagcaaccgcccuauuguggacaucaauauuaaagacuacucuaucguuuccagcuauguguguucuggacuugucggcgauacgcccagaaagaacgacagcuccucuagcucccauugccuggauccgaauaacgaggaaggcgggcacggagugaaaggcugggccuucgacgaugggaaugacguuuggaugggacggacaauuagcgagaagcuccgcucuggcuacgagaccuuuaaagugaucgaagggugguccaacccuaauagcaagcugcagaucaacagacaggucauuguggaucggggaaaucgcucuggcuauuccggcaucuucagcgucgaggggaaauccuguauuaacagaugcuuuuacguggaacugauccggggaagaaaggaggaaaaugagguucucuggaccucuaacagcauuguggucuucuguggcacauccgggaccuauggaacaggcucuuggcccgacggggcugauaucaaucugaugccuauuuga

SEQ ID NO: 218131 - RNA, 1410 nt, Artificial Sequence
  derived and/or modified CDS sequence (opt5) from neuraminidase__InfluenzaA__BAF47930
augaaccccaaucagaagaucauuaccaucggcagcgugucccugacaauuucuacgaucugcuucuuuaugcaaauugccauccucaucaccacagucacccugcacuucaaacaguacgaguuuaacagcccuccgaauaaccagguuaugcuuugugaacccacaauuaucgagagaaauauuaccgaaaucguguaucugacaaacaccacgauugagaaggaaaucugcccuaaacucgcugaguaccggaauugguccaagccccaguguaacauuaccggguucgccccuuuuucuaaagacaauagcauccgccuguccgcgggaggcgauaucugggugacaagagagcccuaugucucuugcgacccugauaaguguuaccaauucgcucuugggcagggaaccacacugaacaaugugcauagcaacgacaccguucacggccggacgccguaucgcacacuccugaugaaugaacugggggugcccuuucaucucggaaccaagcaggucugcauugccugguccucuagcuccugucacgauggcaaagccuggcugcaugugugcguuacaggcgacgauaagaacgcuaccgccagcuucaucuacaaugggagacuuguggacucuauugucuccuggagcaaagagauccugcggacccaggaaucugagugugugugcauuaacggaacauguacgguggucaugaccgauggcuccgcuagcgggaaggccgacacaaaaauccucuuuaucgaggaaggaaagauuguucacaccuccacacugucuggcagcgcgcaacacguggaggaaugcuccugcuauccucgcuaccccggggugagaugugucugccgggauaacuggaagggaagcaaucgcccuaucguggacauuaacaucaaagauuacucuaccguuuccagcuauguguguucuggccuugucggcgacacgcccagaaagaaugacagcuccucuagcgggcauugccuggauccgaacaaugaggaaggaggccacggggugaaaggaugggccuucgacgauggcaacgacguuuggauggggcggacaauuuccgagaagcuccgcagcggauacgagaccuuuaaagugaucgaaggcuggucuaauccuaacuccaagcugcagaucaauagacaggucauuguggaucggggcaaccgcagcggguauucuggaaucuucuccgucgagggcaaaagcuguauuaauagaugcuuuuacguggaacugauccgggggagaaaggaggaaaccgagguucucuggacauccaacucuauuguggucuucuguggaaccagcggcacauaugggacgggcuccuggcccgacggagcugauaucaaucugaugccuauuuga

SEQ ID NO: 218132 - RNA, 1410 nt, Artificial Sequence; identical to SEQ ID NO: 212771
  derived and/or modified CDS sequence (opt5) from neuraminidase__InfluenzaA__BAF47931

SEQ ID NO: 218133 - RNA, 1410 nt, Artificial Sequence
  derived and/or modified CDS sequence (opt5) from neuraminidase__InfluenzaA__BAF47932
augaaccccaaucagaagaucauuaccaucggcagcgugucccugacaauuucuacgaucugcuucuuuaugcaaauugccauccucaucaccacagucacccugcacuucaaacaguacgaguuuaacagcccuccgaauaaccagguuaugcuuugugaacccacaauuaucgagagaaauauuaccgaaaucguguaucugacaaacaccacgauugagaaggaaaucugcccuaaacucgcugaguaccggaauugguccaagccccaguguaacauuaccggguucgccccuuuuucuaaagacaauagcauccgccuguccgcgggaggcgauaucugggugacaagagagcccuaugucucuugcgacccugauaaguguuaccaauucgcucuugggcagggaaccacacugaacaaugugcauagcaacgacaccguucacgaucggacgccguaucgcacacuccugaugaaugaacugggcgugcccuuucaucucgggaccaagcaggucugcauugccugguccucuagcuccugucacgacggaaaagccuggcugcaugugugcguuacaggcgaugacaagaacgcuaccgccagcuucaucuacaauggcagacuuguggauucuauugucuccuggagcaaagagauccugcggacccaggaaucugagugugugugcauuaacgggacauguacgguggucaugaccgacggauccgcuagcggcaaggccgauacaaaaauccucuuuaucgaggaagggaagauuguucacaccuccacacugucuggaagcgcgcaacacguggaggaaugcuccugcuauccucgcuaccccggcgugagaugugucugccgggacaacuggaaggggagcaaucgcccuaucguggauauuaacaucaaagacuacucuauuguuuccagcuauguguguucuggacuugucggcgacacccccagaaagaaugauagcuccucuagcggccauugccuggacccgaacaaugaggaagggggacacggcgugaaagggugggccuucgaugacggaaacgauguuuggaugggccggacgaucuccgagaagcuccgcagcggguacgagacauuuaaagugaucgaaggauggucuaauccuaacuccaagcugcagauuaauagacaggucaucguggaccggggcaaccgcagcggcuauucugggauuuucuccgucgagggaaaaagcuguaucaauagaugcuuuuacguggaacugauucggggcagaaaggaggaaaccgagguucucuggaccuccaacucuaucguggucuucugugggacaagcggaaccuauggcacaggguccuggcccgauggcgcugacauuaaucugaugccuaucuga

SEQ ID NO: 218134 - RNA, 1410 nt, Artificial Sequence; identical to SEQ ID NO: 206784
  derived and/or modified CDS sequence (opt5) from neuraminidase__InfluenzaA__BAF47933

SEQ ID NO: 218135 - RNA, 1410 nt, Artificial Sequence; identical to SEQ ID NO: 206786
  derived and/or modified CDS sequence (opt5) from neuraminidase__InfluenzaA__BAF47934

SEQ ID NO: 218136 - RNA, 1410 nt, Artificial Sequence; identical to SEQ ID NO: 206786
  derived and/or modified CDS sequence (opt5) from neuraminidase__InfluenzaA__BAF47935

SEQ ID NO: 218137 - RNA, 1410 nt, Artificial Sequence
  derived and/or modified CDS sequence (opt5) from neuraminidase__InfluenzaA__BAF47936
augaaccccaaucagaagaucauuaccaucggcagcgugucccugacaauuucuacgaucugcuucuuuaugcaaauugccauccucaucaccacagucacccugcacuucaaacaguacgaguuuaacagcccuccgaauaaccagguuaugcuuugugaacccacaauuaucgagagaaauauuaccgaaaucguguaucugacaaacaccacgauugagaaggaaaucugcccuaaacucgcugaguaccggaauugguccaagccccaguguaacauuaccggguucgccccuuuuucuaaagacaauagcauccgccuguccgcgggaggcgauaucugggugacaagagagcccuaugucucuugcgacccugauaaguguuaccaauucgcucuugggcagggaaccacacugaacaaugugcauagcaacgacaccguucacgaucggacgccguaucgcacacuccugaugaaugaacugggcgugcccuuucaucucgggaccaagcaggucugcauugccugguccucuagcuccugucacgacggaaaagccuggcugcaugugugcaucacaggcgaugacaagaacgcuaccgccagcuucauuuacaauggcagacuuguugauucuaucguguccuggagcaaagagauucugcggacccaggaaucugagugugucugcaucaacgggacauguacgguggugaugaccgacggauccgcuagcggcaaggccgauacaaaaauccucuuuauugaggaagggaagaucguccacaccuccacacugucuggaagcgcgcaacacguugaggaaugcuccugcuauccucgcuaccccggcgugagaugugugugccgggacaacuggaaggggagcaaucgcccuauugucgauaucaacauuaaagacuacucuaucguguccagcuauguuuguucuggacuugugggcgacacccccagaaagaaugauagcuccucuagcggccauugccuggacccgaacaaugaggaagggggacacggcgucaaagggugggccuucgaugacggaaacgauguguggaugggccggacgaucuccgagaagcuccgcagcggguacgagacauuuaaaguuauugaaggauggucuaauccuaacuccaagcugcagaucaauagacaggugauugucgaccggggcaaccgcagcggcuauucugggaucuucuccguggagggaaaaagcuguauuaauagaugcuuuuacgucgaacugauccggggcagaaaggaggaaaccgaggugcucuggaccuccaacucuauuguuguguucugugggacaagcggaaccuauggcacaggguccuggcccgauggcgcugacaucaaucugaugccuaucuga

SEQ ID NO: 218138 - RNA, 1410 nt, Artificial Sequence
  derived and/or modified CDS sequence (opt5) from neuraminidase__InfluenzaA__BAF47937
augaaccccaaucagaagaucauuaccaucggcagcgugucccugacaauuucuacgaucugcuucuuuaugcaaauugccauccucaucaccacagucacccugcacuucaaacaguacgaguuuaacagcccuccgaauaaccagguuaugcuuugugaacccacaauuaucgagagaaauauuaccgaaaucguguaucugacaaacaccacgauugagaaggaaaucugcccuaaacucgcugaguaccggaauugguccaagccccaguguaacauuaccggguucgccccuuuuucuaaagacaauagcauccgccuguccgcgggaggcgauaucugggugacaagagagcccuaugucucuugcgggccugacaaguguuaccaauucgcucuuggacagggcaccacacugaacaaugugcauagcaacgauaccguucacgaccggacgccguaucgcacacuccugaugaaugaacugggggugcccuuucaucucggaaccaagcaggucugcauugccugguccucuagcuccugucacgauggcaaagccuggcugcaugugugcguuacaggcgacgauaagaacgcuaccgccagcuucaucuacaaugggagacuuguggacucuauugucuccuggagcaaagagauccugcggacccaggaaucugagugugugugcauuaacggaacauguacgguggucaugaccgauggcuccgcuagcgggaaggccgacacaaaaauccucuuuaucgaggaaggaaagauuguucacaccuccacacugucuggcagcgcgcaacacguggaggaaugcuccugcuauccucgcuaccccggggugagaugugucugccgggauaacuggaagggaagcaaucgcccuaucguggacauuaacaucaaagauuacucuauuguuuccagcuauguguguucuggccuugucggcgacacccccagaaagaaugacagcuccucuagcucccauugccuggauccgaacaaugaggaagggggacacggcgugaaagggugggccuucgacgauggaaacgacguuuggaugggccggacgaucagcgagaagcuccgcucuggguacgagacauuuaaagugaucgaaggaugguccaauccuaacagcaagcugcagauuaauagacaggucaucguggaucggggcaaccgcucuggcuauuccgggauuuucagcgucgagggaaaauccuguaucaauagaugcuuuuacguggaacugauucggggcagaaaggaggaaaccgagguucucuggaccucuaacagcaucguggucuucugugggacauccggaaccuauggcacagggucuuggcccgacggcgcugauauuaaucugaugccuaucuga

SEQ ID NO: 218139 - RNA, 1410 nt, Artificial Sequence
  derived and/or modified CDS sequence (opt5) from neuraminidase__InfluenzaA__BAF47938
augaaccccaaucagaagaucauuaccaucggcagcgugucccugacaauuucuacgaucugcuucuuuaugcaaauugccauccucaucaccacagucacccugcacuucaaacaguacgaguuuaacagccuuccuaauaaccagguuaugcugugugaaccgacaauuaucgagagaaauauuaccgaaaucguguaucucacaaacaccacgauugagaaggaaaucugccccaaacuggcugaguaccggaauugguccaagccucaguguaacauuaccggguucgcccccuuuucuaaagacaauagcauccgccuuuccgcgggaggcgauaucugggugacaagagagccuuaugucucuugcgaccccgauaaguguuaccaauucgcucuggggcagggaaccacacucaacaaugugcauagcaacgacaccguucacggccggacgccuuaucgcacacugcugaugaaugaacucggggugccguuucaucugggaaccaagcaggucugcauugccugguccucuagcuccugucacgauggcaaagccuggcuucaugugugcguuacaggcgacgauaagaacgcuaccgccagcuucaucuacaaugggagacugguggacucuauugucuccuggagcaaagagauccuccggacccaggaaucugagugugugugcauuaacggaacauguacgguggucaugaccgauggcuccgcuagcgggaaggccgacacaaaaauccuguuuaucgaggaaggaaagauuguucacaccuccacacuuucuggcagcgcgcaacacguggaggaaugcuccugcuauccccgcuacccuggggugagaugugucugccgggauaacuggaagggaagcaaucgccccaucguggacauuaacaucaaagauuacucuauuguuuccagcuauguguguucuggccuggucggcgacaccccuagaaagacggacagcuccucuagcucccauugccucgaucccaauaacgaggaagggggacacggcgugaaagggugggccuucgacgauggaaaugacguuuggaugggccggacaaucagcgagaagcugcgcucuggguacgagaccuuuaaagugaucgaaggaugguccaacccgaauagcaagcugcagauuaacagacaggucaucguggaucggggcaaucgcucuggcuauuccgggauuuucagcgucgagggaaaauccuguaucaacagaugcuuuuacguggaacucauucggggcagaaaggaggaaaccgagguucuguggacaucuaauagcaucguggucuucugugggaccuccggaacauauggcacggggucuuggccugacggcgcugauauuaaccuuaugcccaucuga

SEQ ID NO: 218140 - RNA, 1410 nt, Artificial Sequence; identical to SEQ ID NO: 206786
  derived and/or modified CDS sequence (opt5) from neuraminidase__InfluenzaA__BAF47939

SEQ ID NO: 218141 - RNA, 1410 nt, Artificial Sequence
  derived and/or modified CDS sequence (opt5) from neuraminidase__InfluenzaA__BAF47940
augaaccccaaucagaagaucauuaccaucggcagcgugucccugacaauuucuacgaucugcuucuuuaugcaaauugccauccucaucaccacagucacccugcacuucaaacaguacgaguuuaacagcccuccgaauaaccagguuaugcuuugugaacccacaauuaucgagagaaauauuaccgaaaucguguaucugacaaacaccacgauugagaaggaaaucugcccuaaacucgcugaguaccggaauugguccaagccccagugugacauuaccggguucgccccuuuuucuaaagauaacagcauccgccuguccgcgggaggcgacaucugggugacaagagagcccuaugucucuugcgauccugacaaguguuaccaauucgcucuugggcagggaaccacacugaauaacgugcauagcaaugauaccguucacgaccggacgccguaucgcacacuccugaugaacgaacugggcgugcccuuucaucucgggaccaagcaggucugcauugccugguccucuagcuccugucacgauggaaaagccuggcugcaugugugcguuacaggcgacgauaagaaugcuaccgccagcuucaucuacaacggcagacuuguggacucuauugucuccuggagcaaaaagauccugcggacccaggagucugaaugugugugcauuaaugggacauguacgguggucaugaccgauggauccgcuagcggcaaagccgacacaaagauccucuuuaucgaggaggggaagauuguucacaccuccacacugucuggaagcgcgcaacacguggaagagugcuccugcuauccucgcuaccccggcgugagaugugucugccgggauaacuggaaagggagcaaccgcccuaucguggacauuaauaucaaggacuacucuauuguuuccagcuauguguguucuggacuugucggcgauacccccagaaagaacgacagcuccucuagcucccauugccuggauccgaauaacgaagagggcgggcacggagugaaaggcugggccuucgacgaugggaaugacguuuggaugggacggacgaucagcgaaaaacuccgcucuggcuacgagacauuuaaggugaucgaggggugguccaacccuaauagcaaacugcagauuaacagacaggucaucguggaucggggaaaucgcucuggcuauuccggcauuuucagcgucgaagggaaguccuguaucaacagaugcuuuuacguggagcugauucggggaagaaaggagaaaaccgaaguucucuggaccucuaauagcaucguggucuucuguggcacauccgggaccuauggaacaggcucuuggcccgacggggcugauauuaaccugaugccuaucuga

SEQ ID NO: 218142 - RNA, 1410 nt, Artificial Sequence; identical to SEQ ID NO: 206784
  derived and/or modified CDS sequence (opt5) from neuraminidase__InfluenzaA__BAF47941

SEQ ID NO: 218143 - RNA, 1410 nt, Artificial Sequence
  derived and/or modified CDS sequence (opt5) from neuraminidase__InfluenzaA__BAF47943
augaaccccaaucagaagaucauuaccaucggcagcgugucccugacaauuucuacgaucugcuucuuuaugcaaauugccauccucaucaccacagucacccugcacuucaaacaguacgaguuuaacagcccuccgaauaaccagguuaugcuuugugaacccacaauuaucgagagaaauauuaccgaaaucguguaucugacaaacaccacgauugagaaggaaaucugcccuaaacucgcugaguaccggaauugguccaagccccaguguaacauuaccggguucgccccuuuuucuaaagacaauagcauccgccuguccgcgggaggcgauaucugggugacaagagagcccuaugucucuugcgacccugauaaguguuaccaauucgcucuugggcagggaaccacacugaacaaugugcauagcaacgacaccguucacgaucggacgccguaucgcacacuccugaugauugaacugggcgugcccuuucaucucgggaccaagcaggucugcaucgccugguccucuagcuccugucacgacggaaaagccuggcugcaugugugcguuacaggcgaugacaagaaugcuaccgccagcuucauuuacaacggcagacuuguggauucuaucgucuccuggagcaaagagauucugcggacccaggaaucugagugugugugcaucaaugggacauguacgguggucaugaccgacggauccgcuagcggcaaggccgauacaaaaauccucuuuauugaggaagggaagaucguucacaccuccacacugucuggaagcgcgcaacacguggaggaaugcuccugcuauccucgcuaccccggcgugagaugugucugccgggacaacuggaaggggagcaaccgcccuauuguggauaucaauauuaaagacuacucuaucguuuccagcuauguguguucuggacuugucggcgacacccccagaaagaacgauagcuccucuagcucccauugccuggacccgaauaacgaggaaggcgggcacggagugaaaggcugggccuucgaugacgggaaugauguuuggaugggacggacgaucagcgagaagcuccgcucuggcuacgagacauuuaaagugauugaagggugguccaacccuaauagcaagcugcagaccaacagacaggucaucguggaccggggaaaucgcucuggcuauuccggcauuuucagcgucgaggggaaauccuguaucaacagaugcuuuuacguggaacugauucggggaagaaaggaggaaaccgagguucucuggacaucuaauagcaucguggucuucuguggcaccuccgggacauauggaacgggcucuuggcccgauggggcugacauuaaccugaugccuaucuga

SEQ ID NO: 218144 - RNA, 1410 nt, Artificial Sequence
  derived and/or modified CDS sequence (opt5) from neuraminidase__InfluenzaA__BAF47944
augaaccccaaucagaagaucauuaccaucggcagcgugucccugacaauuucuacgaucugcuucuuuaugcaaauugccauccucaucaccacagucacccugcacuucaaacaguacgaguuuaacagcccuccgaauaaccagguuaugcuuugugaacccacaauuaucgagagaaauauuaccgaaaucguguaucugacaaacaccacgauugagaaggaaaucugcccuaaacucaccgaguaccggaauugguccaagccccaguguaacauuacaggguucgcuccuuuuucuaaagacaauagcauccgccuguccgccggaggcgauaucugggugaccagagagcccuaugucucuugcgacccugauaaguguuaccaauucgcgcuugggcagggaacaacccugaacaaugugcauagcaacgacccgguucacgaucggacgcccuaucgcacacuccugaugaaugaacugggcgugccuuuucaucucgggaccaagcaggucugcauugcuugguccucuagcuccugucacgacggaaaagccuggcugcaugugugcguuacaggcgaugacaagaacgccaccgcuagcuucaucuacaauggcagacuuguggauucuauugucuccuggagcaaagagauccugcggacccaggaaucugagugugugugcauuaacgggacauguacgguggucaugaccgacggauccgccagcggcaaggcugauacaaaaauccucuuuaucgaggaagggaagauuguucacaccuccacacugucuggaagcgcccaacacguggaggaaugcuccugcuauccccgcuacccuggcgugagaugugucugccgggacaacuggaaggggagcaaucgccccaucguggauauuaacaucaaagacuacucuauuguuuccagcuauguguguucuggacuugucggcgacaccccgagaaagaaugauagcuccucuagcucccauugccuggacccuaacaaugaggaaggcgggcacggagugaaaggcugggcguucgaugacgggaacgauguuuggaugggacggacgaucagcgagaagcuccgcucuggcuacgagacauuuaaagugaucgaagggugguccaaucccaacagcaagcugcagaccaauagacaggucauuguggaccggggaaaccgcucuggcuauuccggcaucuucagcgucgaggggaaauccuguauuaauagaugcuuuuacguggaacugauccggggaagaaaggaggaaaccgagguucucuggacaucuaacagcauuguggucuucuguggcaccuccgggacauauggaacgggcucuuggccugauggggccgacaucaaucugaugcccauuuga

SEQ ID NO: 218145 - RNA, 1410 nt, Artificial Sequence
  derived and/or modified CDS sequence (opt5) from neuraminidase__InfluenzaA__BAF47945
augaaccccaaucagaagaucauuaccaucggcagcgugucccugacaauuucuacgaucugcuucuuuaugcaaauugccauccucaucaccacagucacccugcacuucaaacaguacgaguuuaacagcccuccgaauaaccagguuaaacuuugugaacccacaauuaucgagagaaauauuaccgaaaucguguaucugacaaacaccacgauugagaaagaaaucugcccuaagcucgcugaguaccggaauugguccaaaccccaguguaacauuaccggguucgccccuuuuucuaaggacaauagcauccgccuguccgcgggaggcgauaucugggugacaagagagcccuaugucucuugcgacccugauaaguguuaccaauucgcucuugggcagggaaccacacugaacaaugugcauagcaacgacaccguucacgaucggacgccguaucgcacacuccugaugaaugaacugggcgugcccuuucaucucgggaccaaacaggucugcauugccugguccucuagcuccugucacgacggaaaggccuggcugcaugugugcguuacaggcgaugacaaaaacgcuaccgccagcuucaucuacaauggcagacuuguggauucuauugucuccuggagcaaggagauccugcggacccaggaaucugagugugugugcauuaacgggacauguacgguggucaugaccgacggauccgcuagcggcaaagccgauacaaagauccucuuuaucgaggaagggaagauuguucacaccuccacacugucuggaagcgcgcaacacguggaggaaugcuccugcuauccucgcuaccccggcgugagaugugucugccgggacaacuggaaagggagcaaucgcccuaucguggauauuaacaucaaggacuacucuauuguuuccagcuauguguguucuggacuugucggcgacacccccagaaagaaugauagcuccucuagcucccauugccuggacccgaacaaugaggaaggcgggcacggagugaagggcugggccuucgaugacgggaacgauguuuggaugggacggacgaucagcgagaaacuccgcucuggcuacgagacauuuaaggugaucgaagggugguccaauccuaacagcaaacugcagaccaauagacaggucauuguggaccggggaaaccgcucuggcuauuccggcaucuucagcgucgaggggaaguccuguauuaauagaugcuuuuacguggaacugauccggggaagaaaggaggaaaccgagguucucuggacaucuaacagcauuguggucuucuguggcaccuccgggacauauggaacgggcucuuggcccgauggggcugacaucaaucugaugccuauuuga

SEQ ID NO: 218146 - RNA, 1410 nt, Artificial Sequence
  derived and/or modified CDS sequence (opt5) from neuraminidase__InfluenzaA__BAF47946
augaaccccaaucagaagaucauuaccaucggcagcgugucccugacaauuucuacgaucugcuucuuuaugcaaauugccauccucaucaccacagucacccugcacuucaaacaguacgaguuuaacagcccuccgaauaaccagguuaugcuuugugaacccacaauuaucgagagaaauauuaccgaaaucguguaucugacaaacaccacgauugagaaggaaaucugcccuaaacucgcugaguaccggaauugguccaagccccaguguaacauuaccggguucgccccuuuuucuaaagacaauagcauccgccuguccgcgggaggcgauaucugggugacaagagagcccuaugucucuugcgacccugauaaguguuaccaauucgcucuugggcagggaaccacacugaacaaugugcauagcaacgacaccguucacgaucggacgccguaucgcacacuccugaugaaugaacugggcgugcccuuucaucucgggaccaagcaggucugcauugccugguccucuagcuccugucacgacggaaaagccuggcugcaugugugcguuacaggcgaugacaagaacgcuaccgccagcuucaucuacaauggcagacuuguggauucuauugucuccuggagcaaagagauccugcggacccaggaaucugagugugugugcauuaacgggacauguacgguggucaugaccgacggauccgcuagcggcaaggccgauacaaaaauccucuuuaucgaggaagggaagauuguucacaccuccacacugucuggaagcgcgcaacacguggaggaaugcuccugcuauccucgcuaccccggcgugagaugugucugccgggacaacuggaaggggagcaaucgcccuaucguggauauuaacaucaaagacuacucuauuguuuccagcuauguguguucuggacuugucggcgacacccccagaaagaaugauagcuccucuagcucccauugccuggacccgaacaaugaggaaggcgggcacggagugaaaggcugggccuucgaugacgggaacgauguuuggaugggacggacgaucagcgagaagcuccgcucuggcuacgagacauuuaaagugcuggaagggugguccaauccuaacagcaagcugcagaccaauagacaggucaucguggaccggggaaaccgcucuggcuauuccggcauuuucagcgucgaggggaaauccuguaucaauagaugcuuuuacguggaacucauucggggaagaaaggaggaaaccgagguucuguggacaucuaacagcaucguggucuucuguggcaccuccgggacauauggaacgggcucuuggcccgauggggcugacauuaaucuuaugccuaucuga

SEQ ID NO: 218147 - RNA, 1410 nt, Artificial Sequence
  derived and/or modified CDS sequence (opt5) from neuraminidase__InfluenzaA__BAF47948
augaaccccaaucagaagaucauuaccaucggcagcgugucccugacaauuucuacgaucugcuucuuuaugcaaauugccauccucaucaccacagucacccugcacuucaaacaguacgaguuuaacagcccuccgaauaaccagguuaugcuuugugaacccacaauuaucgagagaaauauuaccgaaaucguguaucugacaaacaccacgauugagaaggaaaucugcccuaaacucgcugaguaccggaauugguccaagccccagugugacauuaccggguucgccccuuuuucuaaagauaacagcauccgccuguccgcgggaggcgacaucugggugacaagagagcccuaugucucuugcgauccugacaaguguuaccaauucgcucuugggcagggaaccacacugaauaacgugcauagcaaugauaagguucacgaccggaccccguaucgcacgcuccugaugaacgaacugggcgugcccuuucaucucgggacaaaacaggucugcauugccugguccucuagcuccugucacgauggaaaggccuggcugcaugugugcguuaccggcgacgauaaaaaugcuacagccagcuucaucuacaacggcagacuuguggacucuauugucuccuggagcaagaaaauccugcggacccaggagucugaaugugugugcauuaaugggaccuguacaguggucaugacggauggauccgcuagcggcaaggccgacaccaagauccucuuuaucgaggaggggaaaauuguucacacauccacccugucuggaagcgcgcaacacguggaagagugcuccugcuauccucgcuaccccggcgugagaugugucugccgggauaacuggaaggggagcaaccgcccuaucguggacauuaauaucaaagacuacucuauuguuuccagcuauguguguucuggacuugucggcgauacacccagaaagaacgacagcuccucuagcucccauugccuggauccgaauaacgaagagggcgggcacggagugaaaggcugggccuucgacgaugggaaugacguuuggaugggacggaccaucagcgaaaagcuccgcucuggcuacgagacguuuaaagugaucgaggggugguccaacagcaauucuaagcugcagauuaacagacaggucaucguggaucggggaaaucgcuccggcuauagcggcauuuucuccgucgaagggaagucuuguaucaacagaugcuuuuacguggagcugauucggggaagaaaagaagagacagaaguucucuggaccagcaauuccaucguggucuucuguggcaccucugggacauauggaaccggcagcuggccugacggggcugauauuaaccugaugcccaucuga

SEQ ID NO: 218148 - RNA, 1410 nt, Artificial Sequence
  derived and/or modified CDS sequence (opt5) from neuraminidase__InfluenzaA__BAF47949
augaaccccaaucagaagaucauuaccaucggcagcgugucccugacaauuucuacgaucugcuucuuuaugcaaauugccauccucaucaccacagucacccugcacuucaaacaguacgaguuuaacagcccuccgaauaaccagguuaugcuuugugaacccacaauuaucgagagaaauauuaccgaaaucguguaucugacaaacaccacgauugagaaggaaaucugcccuaaacucgcugaguaccggaauugguccaagccccagugugacauuaccggguucgccccuuuuucuaaagauaacagcauccgccuguccgcgggaggcgacaucugggugacaagagagcccuaugucucuugcgauccugacaaguguuaccaauucgcucuugggcagggaaccacacugaauaacgugcauagcaaugauaagguucacgaccggaccccguaucgcacgcuccugaugaacgaacugggcgugcccuuucaucucgggacaaaacaggucugcauugccugguccucuagcuccugucacgauggaaaggccuggcugcaugugugcguuaccggcgacgauaaaaaugcuacagccagcuucaucuacaacggcagacuuguggacucuauugucuccuggagcaagaaaauccugcggacccaggagucugaaugugugugcauuaaugggaccuguacaguggucaugacggauggauccgcuagcggcaaggccgacaccaagauccucuuuaucgaggaggggaaaauuguucacacauccacccugucuggaagcgcgcaacacguggaagagugcuccugcuauccucgcuaccccggcgugagaugugucugccgggauaacuggaaggggagcaaccgcccuaucguggacauuaauaucaaagacuacucuauuguuuccagcuauguguguucuggacuugucggcgauacacccagaaagaacgacagcuccucuagcucccauugccuggauccgaauaacgaagagggcgggcacggagugaaaggcugggccuucgacgaugggaaugacguuuggaugggacggaccaucagcgaaaagcuccgcucuggcuacgagacguuuaaagugaucgaggggugguccaacccuaauagcaagcugcagauuaacagacaggucaucguggaucggggaaaucgcucuggcuauuccggcauuuucagcgucgaagggaaguccuguaucaacagaugcuuuuacguggagcugauucggggaagaaaagaagagacagaaguucucuggaccucuaauagcaucguggucuucuguggcaccuccgggacauauggaaccggcucuuggcccgacggggcugauauuaaccugaugccuaucuga

SEQ ID NO: 218149 - RNA, 1410 nt, Artificial Sequence; identical to SEQ ID NO: 206786
  derived and/or modified CDS sequence (opt5) from neuraminidase__InfluenzaA__BAF47950

SEQ ID NO: 218150 - RNA, 1410 nt, Artificial Sequence
  derived and/or modified CDS sequence (opt5) from neuraminidase__InfluenzaA__BAF47951
augaaccccaaucagaagaucauuaccaucggcagcgugucccugacaauuucuacgaucugcuucuuuaugcaaauugccauccucaucaccacagucacccugcacuucaaacaguacgaguuuaacagcccuccgaauaaccagguuaugcuuugugaacccacaauuaucgagagaaauauuaccgaaaucguguaucugacaaacaccacgauugagaaggaaaucugcccuaaacucgcugaguaccggaauugguccaagccccagugugacauuaccggguucgccccuuuuucuaaagauaacagcauccgccuguccgcgggaggcgacaucugggugacaagagagcccuaugucucuugcgauccugacaaguguuaccaauucgcucuugggcagggaaccacacugaauaacgugcauagcaaugauaccguucacgaccggacgccguaucgcacacuccugaugaacgaacugggcgugcccuuucaucucgggaccaagcaggucugcauugccugguccucuagcuccugucacgauggaaaagccuggcugcaugugugcguuacaggcgacgauaagaaugcuaccgccagcuucaucuacaacggcagacuuguggacucuauugucuccuggagcaaaaagauccugcggacccaggagucugaaugugugugcauuaaugggacauguacgguggucaugaccgauggauccgcuagcggcaaagccgacacaaagauccucuuuaucgaggaggggaagauuguucacaccuccacacugucuggaagcgcgcaacacguggaagagugcuccugcuauccucgcuaccccggcgugagaugugucugccgggauaacuggaaagggagcaaccgcccuaucguggacauuaauaucaaggacuacucuauuguuuccagcuauguguguucuggacuugucggcgauacccccagaaagaacgacagcuccucuagcucccauugccuggauccgaauaacgaagagggcgggcacggagugaaaggcugggccuucgacgaugggaaugacguuuggaugggacggacgaucagcgaaaaacuccgcucuggcuacgagacauuuaaggugaucgaggggugguccaacagcaauucuaaacugcagauuaacagacaggucaucguggaucggggaaaucgcuccggcuauagcggcauuuucuccgucgaagggaagucuuguaucaacagaugcuuuuacguggagcugauucggggaagaaaggaagagaccgaaguucucuggaccagcaauuccaucguggucuucuguggcacaucugggaccuauggaacaggcagcuggccugacggggcugauauuaaccugaugcccaucuga

SEQ ID NO: 218151 - RNA, 1410 nt, Artificial Sequence
  derived and/or modified CDS sequence (opt5) from neuraminidase__InfluenzaA__BAF47952
augaaccccaaucagaagaucauuaccaucggcagcgugucccugacaauuucuacgaucugcuucuuuaugcaaauugccauccucaucaccacagucacccugcacuucaaacaguacgaguuuaacagcccuccgaauaaccagguuaugcuuugugaacccacaauuaucgagagaaauauuaccgaaaucguguaucugacaaacaccacgauugagaaggaaaucugcccuaaacucgcugaguaccggaauugguccaagccccaguguaacauuaccggguucgccccuuuuucuaaagacaauagcauccgccuguccgcgggaggcgauaucugggugacaagagagcccuaugucucuugcgacccugauaaguguuaccaauucgcucuugggcagggaaccacacugaacaaugugcauagcaacgacaccguucacgaucggacgccguaucgcacacuccugaugaaugaacugggcgugcccuuucaucucgggaccaagcaggucugcauugccugguccucuagcuccugucacgacggaaaagccuggcugcaugugugcguuacaggcgaugacaagaacgcuaccgccagcuucaucuacaauggcagacuuguggauucuauugucuccuggagcaaagagauccugcggacccaggaaucugagugugugugcauuaacgggacauguacgguggucaugaccgacggauccgcuagcggcaaggccgauacaaaaauccucuuuaucgaggaagggaagauuguucacaccuccacacugucuggaagcgcgcaacacguggaggaaugcuccugcuauccucgcuaccccggcgugagaugugucugccgggacaacuggaaggggagcaaucgcccuaucguggauauuaacaucaaagacuacucuauuguuuccagcuauguguguucuggacuugucggcgacacccccagaaagaaugauagcuccucuagcucccauugccuggacccgaacaaugaggaaggcgggcacggagugaaaggcugggccuucgaugacgggaacgauguuuggaugggacggacgaucagcgagaagcuccgcucuggcuacgagacauuuaaagugaucgaagggugguccaauccuaacagcaagcugcagaccaauagacaggucauuguggaccggggaaaccgcucuggcuauuccggcaucuucagcgucgaggggaaauccuguauuaauagaugcuuuuacguggaacugauccggggaagaaaggaggaaaccgagguucucuggacaucuaacagcauuguggucuucuguggcaccuccgggacauauggaacgggcucuuggcccgauggggcuaauaucaaccugaugccuauuuga

SEQ ID NO: 218152 - RNA, 1410 nt, Artificial Sequence
  derived and/or modified CDS sequence (opt5) from neuraminidase__InfluenzaA__BAF47953
augaaccccaaucagaagaucauuaccaucggcagcgugucccugacaauuucuacgaucugcuucuuuaugcaaauugccauccucaucaccacagucacccugcacuucaaacaguacgaguuuaacagcccuccgaauaaccagguuaugcuuugugaacccacaauuaucgagagaaauauuaccgaaaucguguaucugacaaacaccacgauugagaaggaaaucugcccuaaacucgcugaguaccggaauugguccaagccccagugugacauuaccggguucgccccuuuuucuaaagauaacagcauccgccuguccgcgggaggcgacaucugggugacaagagagcccuaugucucuugcgauccugacaaguguuaccaauucgcucuugggcagggaaccacacugaauaacgugcauagcaaugauaccguucacgaccggacgccguaucgcacacuccugaugaacgaacugggcgugcccuuucaucucgggaccaagcaggucugcauugccugguccucuagcuccugucacgauggaaaagccuggcugcaugugugcguuacaggcgacgaugagaaugcuaccgccagcuucaucuacaacggcagacuuguggacucuauugucuccuggagcaagaaaauccugcggacccaggaaucugagugugugugcauuaaugggacauguacgguggucaugaccgauggauccgcuagcggcaaggccgacacaaaaauccucuuuaucgaggaagggaagauuguucacaccuccacacugucuggaagcgcgcaacacguggaggaaugcuccugcuauccucgcuaccccggcgugagaugugucugccgggauaacuggaaggggagcaaccgcccuaucguggacauuaauaucaaagacuacucuauuguuuccagcuauguguguucuggacuugucggcgauacccccagaaagaacgacagcuccucuagcucccauugccuggauccgaauaacgaggaaggcgggcacggagugaaaggcugggccuucgacgaugggaaugacguuuggaugggacggacgaucagcgagaagcuccgcucuggcuacgagacauuuaaagugaucgaagggugguccaacccuaauagcaagcugcagauuaacagacaggucaucguggaucggggaaaucgcucuggcuauuccggcauuuucagcgucgaggggaaauccuguaucaacagaugcuuuuacguggaacugauucggggaagaaaggaggaaaccgagguucucuggaccucuaauagcaucguggucuucuguggcacauccgggaccuauggaacaggcucuuggcccgacggggcugauauuaaccugaugccuaucuga

SEQ ID NO: 218153 - RNA, 1410 nt, Artificial Sequence; identical to SEQ ID NO: 218105
  derived and/or modified CDS sequence (opt5) from neuraminidase__InfluenzaA__BAF47954

SEQ ID NO: 218154 - RNA, 1410 nt, Artificial Sequence; identical to SEQ ID NO: 218105
  derived and/or modified CDS sequence (opt5) from neuraminidase__InfluenzaA__BAF47955

SEQ ID NO: 218155 - RNA, 1410 nt, Artificial Sequence
  derived and/or modified CDS sequence (opt5) from neuraminidase__InfluenzaA__BAF47956
augaaccccaaucagaagaucauuaccaucggcagcgugucccugacaauuucuacgaucugcuucuuuaugcaaauugccauccucaucaccacagucacccugcacuucaaacaguacgaguuuaacagcccuccgaauaaccagguuaugcuuugugaacccacaauuaucgagagaaauauuaccgaaaucguguaucugacaaacaccacgauugagaaggaaaucugcccuaaacucgcugaguaccggaagugguccaaaccccaguguaauauuaccggguucgccccuuuuucuaaggacaacagcauccgccuguccgcgggaggcgauaucugggugacaagagagcccuaugucucuugcgacccugauaaguguuaccaauucgcucuugggcagggaaccacacugaauaacgugcauagcaaugacaccguucgggaucgcacgccguauagaacacuccugaugaacgaacugggcgugcccuuucaccucgggaccaaacaggucugcauugccugguccucuagcuccugucaugacggaaaggccuggcugcacgugugcguuacaggcgaugacaaaaaugcuaccgccagcuucaucuacaacggccggcuuguggauucuauugucuccuggagcaaggagauccugcgcacccaggaaucugagugugugugcauuaaugggacauguacgguggucaugaccgacggauccgcuagcggcaaagccgauacaaagauccucuuuaucgaggaagggaagauuguucauaccuccacacugucuggaagcgcgcaacacguggaggaaugcuccugcuauccuagauaccccggcgugcggugugucugccgcgacaacuggaaagggagcaacagaccuaucguggauauuaauaucaaggacuacucuauuguuuccagcuauguguguucuggacuugucggcgacacgccccggaaaaacgauagcuccucuagcucccacugccuggacccgaauaacgaggaaggcgggcauggagugaagggcugggccuucgaugacgggaaugauguuuggaugggacgcaccaucagcgagaaacucagaucuggcuacgagacauuuaaggugaucgaagggugguccaacccuaauagcaaacugcagauuaaccggcaggucaucguggaccgcggaaauagaucuggcuauuccggcauuuucagcgucgaggggaaguccuguaucaaccggugcuuuuacguggaacugauuagaggacgcaaggaggaaaccgagguucucuggaccucuaauagcaucguggucuucuguggcacauccgggaccuauggaacaggcucuuggcccgauggggcugacauuaacuucaugccuaucuga

SEQ ID NO: 218156 - RNA, 1410 nt, Artificial Sequence
  derived and/or modified CDS sequence (opt5) from neuraminidase__InfluenzaA__BAF47958
augaaccccaaucagaagaucauuaccaucggcagcgugucccugacaauuucuacgaucugcuucuuuaugcaaauugccauccucaucaccacagucacccugcacuucaaacaguacgaguuuaacagcccuccgaauaaccagguuaugcuuugugaacccacaauuaucgagagaaauauuaccgaaaucguguaucugacaaacaccacgauugagaaggaaaucugcccuaaacucgcugaguaccggaagugguccaaaccccaguguaauauuaccggguucgccccuuuuucuaaggacaacagcauccgccuguccgcgggaggcgauaucugggugacaagagagcccuaugucucuugcgacccugauaaguguuaccaauucgcucuugggcagggaaccacacugaauaacgugcauagcaaugacaccguucgggaucgcacgccguauagaacacucaugaugaacgaacugggcgugcccuuucaccuggggaccaaacaggucugcauugccugguccucuagcuccugucaugacggaaaggccuggcuccacgugugcguuacaggcgaugacaaaaaugcuaccgccagcuucaucuacaacggccggcugguggauucuauugucuccuggagcaaggagauccuucgcacccaggaaucugagugugugugcauuaaugggacauguacgguggucaugaccgacggauccgcuagcggcaaagccgauacaaagauccuguuuaucgaggaagggaagauuguucauaccuccacacucucuggaagcgcgcaacacguggaggaaugcuccugcuauccuagauaccccggcgugcggugugucugccgcgacaacuggaaagggagcaacagaccuaucguggauauuaauaucaaggacuacucuauuguuuccagcuauguguguucuggacuggucggcgacacgccccggaaaaacgauagcuccucuagcucccacugccuugacccgaauaacgaggaaggcgggcauggagugaagggcugggccuucgaugacgggaaugauguuuggaugggacgcaccaucagcgagaaacugagaucuggcuacgagacauuuaaggugaucgaagggugguccaacccuaauagcaaacuccagauuaaccggcaggucaucguggaccgcggaaauagaucuggcuauuccggcauuuucagcgucgaggggaaguccuguaucaaccggugcuuuuacguggaacugauuagaggacgcaaggaggaaaccgagguucuguggaccucuaauagcaucguggucuucuguggcacauccgggaccuauggaacaggcucuuggacggauggggcugacauuaacuucaugcccaucuga

SEQ ID NO: 218157 - RNA, 1410 nt, Artificial Sequence
  derived and/or modified CDS sequence (opt5) from neuraminidase__InfluenzaA__BAF47959
augaaccccaaucagaagaucauuaccaucggcagcgugucccugacaauuucuacgaucugcuucuuuaugcaaauugccauccucaucaccacagucacccugcacuucaaacaguacgaguuuaacagcccuccgaauaaccagguuaugcuuugugaacccacaauuaucgagagaaauauuaccgaaaucguguaucugacaaacaccacgauugagaaggaaaucugcccuaaacucgcugaguaccggaauugguccaagccccaguguaacauuaccggguucgccccuuuuucuaaagacaauagcauccgccuguccgcgggaggcgauaucugggugacaagagagcccuaugucucuugcgacccugauaaguguuaccaauucgcucuugggcagggaaccacacugaacaaugugcauagcaacuauaccguucacgaccggacgccguaccgcacacuccugaugaaugaacugggcgugcccuuucaucucgggaccaagcaggucugcauugccugguccucuagcuccugucacgauggaaaagccuggcugcaugugugcguuacaggcgacgauaagaacgcuaccgccagcuucaucuauaauggcagacuuguggacucuauugucuccuggagcaaagagauccugcggacccaggaaucugagugugugugcauuaacgggacauguacgguggucaugaccgauggauccgcuagcggcaaggccgacacaaaaauccucuuuaucgaggaagggaagauuguucacaccuccacacugucuggaagcgcgcaacacguggaggaaugcuccugcuacccucgcuaccccggcgugagaugugucugccgggauaacuggaaggggagcaaucgcccuaucguggacauuaacaucaaagauuauucuauuguuuccagcuacguguguucuggacuugucggcgacacccccagaaagaaugacagcuccucuagcggccauugccuggauccgaacaaugaggaagggggacacggcgugaaagggugggccuucgacgauggaaacgacguuuggaugggccggacgaucuccgagaagcuccgcagcggguaugagacauuuaaagugaucgaaggauggucuaauccuaacuccaagcugcagauuaauagacaggucaucguggaucggggcaaccgcagcggcuacucugggauuuucuccgucgagggaaaaagcuguaucaauagaugcuuuuauguggaacugauucggggcagaaaggaggaaaccgagguucucuggaccuccaacucuaucguggucuucugugggacaagcggaaccuacggcacaggguccuggcccgacggcgcugauauuaaucugaugccuaucuga

SEQ ID NO: 218158 - RNA, 1410 nt, Artificial Sequence
  derived and/or modified CDS sequence (opt5) from neuraminidase__InfluenzaA__BAF47960
augaaccccaaucagaagaucauuaccaucggcagcgugucccugacaauuucuacgaucugcuucuuuaugcaaauugccauccucaucaccacagucacccugcacuucaaacaguacgaguuuaacagcccuccgaauaaccagguuaugcuuugugaacccacaauuaucgagagaaauauuaccgaaaucguguaucugacaaacaccacgauugagaaggaaaucugcccuaaacucgcugaguaccggaauugguccaagccccaguguaacauuaccggguucgccccuuuuucuaaagacaauagcauccgccuguccgcgggaggcgauaucugggugacaagagagcccuaugucucuugcgacccugauaaguguuaccaauucgcucuugggcagggaaccacacugaacaaugugcauagcaacgacaccguucacaaucggacgccguaucgcacacuccugaugaacgaacugggcgugcccuuucaucucgggaccaagcaggucugcauugccugguccucuagcuccugucacgauggaaaagccuggcugcaugugugcguuacaggcgacgauaagaaugcuaccgccagcuucaucuacaacggcagacuuguggacucuauugucuccuggagcaaagagauccugcggacccaggaaucugagugugugugcauuaacgggacauguacgguggucaugaccgauggauccgcuagcggcaaggccgacacaaaaauccucuuuaucgaggaagggaagauuguucacaccuccacacugucuggaagcgcgcaacacguggaggaaugcuccugcuauccucgcuaccccggcgugagaugugucugccgggauaauuggaaggggagcaaccgcccuaucguggacauuaauaucaaagauuacucuauuguuuccagcuauguguguucuggacuugucggcgacacccccagaaagaacgacagcuccucuagcggccauugccuggauccgaauaacgaggaagggggacacggcgugaaagggugggccuucgacgauggaaaugacguuuggaugggccggacgaucuccgagaagcuccgcagcggguacgagacauuuaaagugaucgaaggauggucuaacccuaauuccaagcugcagauuaacagacaggucaucguggaucggggcaaucgcagcggcuauucugggauuuucuccgucgagggaaaaagcuguaucaacagaugcuuuuacguggaacugauucggggcagaaaggaggaaaccgagguucucuggaccuccaauucuaucguggucuucugugggacaagcggaaccuauggcacaggguccuggcccgacggcgcugauauuaaccugaugccuaucuga

SEQ ID NO: 218159 - RNA, 1410 nt, Artificial Sequence
  derived and/or modified CDS sequence (opt5) from neuraminidase__InfluenzaA__BAF47975
augaaccccaaucagaagaucauuaccaucggcagcgugucccugacaauuucuacgaucugcuucuuuaugcaaauugccauccucaucaccacagucacccugcacuucaaacaguacgaguuuaacagcccuccgaauaaccagguuaugcuuugugaacccacaauuaucgagagaaauauuaccgaaaucguguaucugacaaacaccacgauugagaaggaaaucugcccuaaacucgcugaguaccggaagugguccaaaccccaguguaauauuaccggguucgccccuuuuucuaaggacaacagcauccgccuguccgcgggaggcgauaucugggugacaagagagcccuaugucucuugcgacccugauaaguguuaccaauucgcucuugggcagggaaccacacugaauaacgugcauagcaaugacaccguucgggaucgcacgccguauagaacacuccugaugaacgaacugggcgugcccuuucaccucgggaccaaacaggucugcauugccugguccucuagcuccugucaugacggaaaggccuggcugcacgugugcguuacaggcgaugacaaaaaugcuaccgccagcuucaucuacaacggccggcuuguggauucuauugucuccuggagcaaggagauccugcgcacccaggaaucugagugugugugcauuaaugggacauguacgguggucaugaccgacggauccgcuagcggcaaagccgauacaaagauccucuuuaucgaggaagggaagauuguucauaccuccacacugucuggaagcgcgcaacacguggaggaaugcuccugcuauccuagauaccccggcgugcggugugucugccgcgacaacuggaaagggagcaacagaccuaucguggauauuaauaucaaggacuacucuauuguuuccagcuauguguguucuggacuugucggcgacacgccccggaaaaacgauagcuccucuagcucccacugccuggacccgaauaacgaggaaggcgggcauggagugaagggcugggccuucgaugacgggaaugauguuuggaugggacgcaccaucagcgagaaacucagaucuggcuacgagacauuuaaggugaucgaagggugguccaacccuaauagcaaacugcagauuaaccggcaggucaucguggaccgcggaaauagaucuggcuauuccggcauuuucagcgucgaggggaaguccuguaucaaccggugcuuuuacguggaacugauuagaggacgcaaggaggaaaccgagguucucuggaccucuaauagcaucguggucuucuguggcacauccgggaccuauggaacaggcucuuggcccgauggggcugacauuaaccacaugccuaucuga

SEQ ID NO: 218160 - RNA, 1410 nt, Artificial Sequence; identical to SEQ ID NO: 206784
  derived and/or modified CDS sequence (opt5) from neuraminidase__InfluenzaA__BAF47976

SEQ ID NO: 218161 - RNA, 1410 nt, Artificial Sequence
  derived and/or modified CDS sequence (opt5) from neuraminidase__InfluenzaA__BAF47977
augaaccccaaucagaagaucauuaccaucggcagcgugucccugacaauuucuacgaucugcuucuuuaugcaaauugccauccucaucaccacagucacccugcaguucaaacaguacgaguuuaacagcccuccgaauaaccagguuaugcuuugugaacccacaauuaucgagagaaauauuaccgaaaucguguaucugacaaacaccacgauugagaaggaaaucugcccuaaacucgcugaguaccggaauugguccaagccccaauguaacauuaccggguucgccccuuuuucuaaagacaauagcauccgccuguccgcgggaggcgauaucugggugacaagagagcccuaugucucuugcgacccugauaaguguuaccaguucgcucuugggcagggaaccacacugaacaaugugcacagcaacgacaccguucauggccggacgccguaucgcacacuccugaugaaugaacugggggugcccuuucaccucggaaccaagcaggucugcauugccugguccucuagcuccugucaugauggcaaagccuggcugcacgugugcguuacaggcgacgauaagaacgcuaccgccagcuucaucuacaaugggagacuuguggacucuauugucuccuggagcaaagagauccugcggacccaagaaucugagugugugugcauuaacggaacauguacgguggucaugaccgauggcuccgcuagcgggaaggccgacacaaaaauccucuuuaucgaggaaggaaagauuguucauaccuccacacugucuggcagcgcgcagcacguggaggaaugcuccugcuauccucgcuaccccggggugagaugugucugccgggauaacuggaagggaagcaaucgcccuaucguggacauuaacaucaaagauuacucuauuguuuccagcuauguguguucuggccuugucggcgacacccccagaaagaaugacagcuccucuagcucccacugccuggauccgaacaaugaggaagggggacauggcgugaaagggugggccuucgacgauggaaacgacguuuggaugggccggacgaucagcgagaagcuccgcucuggguacgagacauuuaaagugaucgaaggaugguccaauccuaacagcaagcugcagaccaauagacaggucauuguggaucggggcaaccgcucuggcuauuccgggaucuucagcgucgagggaaaauccuguauuaauagaugcuuuuacguggaacugauccggggcagaaaggaggaaaccgagguucucuggacaucuaacagcauuguggucuucugugggaccuccggaacauauggcacggggucuuggcccgacggcgcugauaucaaucugaugccuauuuga

SEQ ID NO: 218162 - RNA, 1410 nt, Artificial Sequence
  derived and/or modified CDS sequence (opt5) from neuraminidase__InfluenzaA__BAF47978
augaaccccaaucagaagaucauuaccaucggcagcgugucccugacaauuucuacgaucugcuucuuuaugcaaauugccauccucgucaccacaguuacccugcacuucaaacaguacgaguuuaacagcccuccgaauaaccaggugaugcuuugugaacccacaaucauugagagaaauaucaccgaaauuguguaucugacaaacaccacgaucgagaaggaaauuugcccuaaacucgcugaguaccggaauugguccaagccccaguguaacaucaccggguucgccccuuuuucuaaagacaauagcauucgccuguccgcgggaggcgauaucugggucacaagagagcccuaugugucuugcgacccugauaaguguuaccaauucgcucuugggcagggaaccacacugaacaauguucauagcaacgacaccgugcacgaucggacgccguaucgcacacuccugaugaaugaacugggcguccccuuucaucucgggaccaaacaggugugcaucgccugguccucuagcuccugucacgacggaaaggccuggcugcauguuugcgugacaggcgaugacaagaacgcuaccgccagcuucauuuacaauggcagacuugucgauucuaucguguccuggagcaaagagauucugcggacccaggaaucugagugugugugcaucaacgggacauguacggucguuaugaccgacggauccgcuagcggcaaggccgauacaaaaauucucuuuaucgaggaagggaagaucgugcacaccuccacacugucuggaagcgcgcaacacguggaggaaugcuccugcuauccucgcuaccccggcgucagaugugugugccgggacaacuggaaggggagcaaucgcccuauuguugauaucaacauuaaagacuacucuaucguguccagcuaugucuguucuggacuugugggcgacacccccagaaagaaugauagcuccucuagcucccauugccuggacccgaacaaugaggaaggcgggcacggaguuaaaggcugggccuucgaugacgggaacgaugcuuggaugggacggacgauuagcgagaagcuccgcucuggcuacgagacauuuaaagugaucgaagggugguccaauccuaacagcaagcugcagaucaauagacaggucauuguggaccggggaaaccgcucuggcuauuccggcaucuucagcgucgaggggaaauccuguauuaauagaugcuuuuacguggaacugauccggggaagaaaggaggaaaccgagguucucuggaccucuaacagcauuguggucuucuguggcacauccgggaccuauggaacaggcucuuggcccgauggggccgacaucaaucugaugccuauuuga

SEQ ID NO: 218163 - RNA, 1410 nt, Artificial Sequence
  derived and/or modified CDS sequence (opt5) from neuraminidase__InfluenzaA__BAF47979
augaaccccaaucagaagaucauuaccaucggcagcgugucccugacaauuucuacgaucugcuucuuuaugcaaauugccauccucaucaccacagucacccugcacuucaaacaguacgaguuuaacagcccuccgaauaaccagguuaugcuuugugaacccacaauuaucgagagaaauauuaccgaaaucguguaucugacaaacaccacgauugagaaggaaaucugcccuaaacucgcugaguaccggaauugguccaagccccaguguaacauuaccggguucgccccuuuuucuaaagacaauagcauccgccuguccgcgggaggcgauaucugggugacaagagagcccuaugucucuugcgacccugauaaguguuaccaauucgcucuugggcagggaaccacacugaacaaugugcauagcaacgacaccguucacaaucggacgccguaucgcacacuccugaugaacgaacugggcgugcccuuucaucucgggaccaagcaggucugcauugccugguccucuagcuccugucacgauggaaaagccuggcugcaugugugcguuacaggcgacgauaagaaugcuaccgccagcuucaucuacaacggcagacuuguggacucuauugucuccuggagcaaagagauccugcggacccaggaaucugagugugugugcauuaacgggacauguacgguggucaugaccgauggauccgcuagcggcaaggccgacacaaaaauccucuuuaucgaggaagggaagauuguucacaccuccacacugucuggaagcgcgcaacacguggaggaaugcuccugcuauccucgcuaccccggcgugagaugugucugccgggauaauuggaaggggagcaaccgcccuaucguggacauuaauaucaaagauuacucuauuguuuccagcuauguguguucuggacuugucggcgacacccccagaaagaacgacagcuccucuagcucccauugccuggauccgaauaacgaggaaggcgggcacggagugaaaggcugggccuucgacgaugggaaugacguuuggaugggacggacgaucagcgagaagcuccgcucuggcuacgagacauuuaaagugaucgaagggugguccaacccuaauagcaagcugcagaccaacagacaggucauuguggaucggggaaaucgcucuggcuauuccggcaucuucagcgucgaggggaaauccuguauuaacagaugcuuuuacguggaacugauccggggaagaaaggaggaaaccgagguucucuggacaucuaauagcauuguggucuucuguggcaccuccgggacauauggaacgggcucuuggcccgacggggcugauaucaaccugaugccuauuuga

SEQ ID NO: 218164 - RNA, 1410 nt, Artificial Sequence; identical to SEQ ID NO: 208636
  derived and/or modified CDS sequence (opt5) from neuraminidase__InfluenzaA__BAF47980

SEQ ID NO: 218165 - RNA, 1410 nt, Artificial Sequence
  derived and/or modified CDS sequence (opt5) from neuraminidase__InfluenzaA__BAF47981
augaaccccaaucagaagaucauuaccaucggcagcgugucccugacaauuucuacgaucugccucuucaugcaaauugccauccugaucaccacagucacccuucacuuuaaacaguacgaguucaacagcccuccgaauaaccagguuaugcugugugaacccacaauuaucgagagaaauauuaccgaaaucguguaucucacaaacaccacgauugagaaggaaaucugcccuaaacuggcugaguaccggaagugguccaaaccccaguguaauauuaccggguuugccccuuucucuaaggacaacagcauccgccuuuccgcgggaggcgauaucugggugacaagagagcccuaugucucuugcgacccugauaaguguuaccaauuugcucuggggcagggaaccacacucaauaacgugcauagcaaugacaccguucggaaccgcacgccguauagaacacugcugaugaaugaacucggcgugcccuuccaccuggggaccaaacaggucugcauugccugguccucuagcuccugucaugauggaaaggccuggcuucacgugugcguuacaggcgacgauaaaaacgcuaccgccagcuuuaucuacaauggccggcugguggacucuauugucuccuggagcaaggagauccuccgcacccaggaaucugagugugugugcauuaacgggacauguacgguggucaugaccgauggauccgcuagcggcaaagccgacacaaagauccuguucaucgaggaagggaagauuguucauaccuccacacuuucuggaagcgcgcaacacguggaggaaugcuccugcuauccuagauaccccggcgugcggugugucugccgcgauaacuggaaagggagcaauagaccuaucguggacauuaacaucaaggauuacucuauuguuuccagcuauguguguucuggacuggucggcgacacgccccggaaaaaugacagcuccucuagcucccacugccucgauccgaacaaugaggaaggcgggcauggagugaagggcugggccuuugacgaugggaacgacguuuggaugggacgcaccaucagcgagaaacugagaucuggcuacgagacauucaaggugaucgaagggugguccaauccuaacagcaaacugcagauuaaucggcaggucaucguggaucgcggaaacagaucuggcuauuccggcauuuuuagcgucgaggggaaguccuguaucaaucggugcuucuacguggaacucauuagaggacgcaaggaggaaaccgagguucuguggaccucuaacagcaucguggucuuuuguggcacauccgggaccuauggaacaggcucuuggcccgacggggcugauauuaaucuuaugccuaucuga

SEQ ID NO: 218166 - RNA, 1410 nt, Artificial Sequence
  derived and/or modified CDS sequence (opt5) from neuraminidase__InfluenzaA__BAF47982
augaaccccaaucagaagaucauuaccaucggcagcgugucccugacaauuucuacgaucugcuucuuuaugcaaauugccauccucaucaccacagucacccugcacuucaaacaguacgaguuuaacagcccuccgaauaaccagguuaugcuuugugaacccacaauuaucgagagaaauauuaccgaaaucguguaucugacaaacaccacgauugagaaggaaaucugcccuaaacucgcugaguaccggaagugguccaaaccccaguguaauauuaccggguucgccccuuuuucuaaggacaacagcauccgccuguccgcgggaggcgauaucugggugacaagagagcccuaugucucuugcgacccugauaaguguuaccaauucgcucuugggcagggaaccacacugaauaacgugcauagcaaugacaccguucggaaccgcacgccguauagaacacuccugaugaaugaacugggcgugcccuuucaccucgggaccaaacaggucugcauugccugguccucuagcuccugucaugauggaaaggccuggcugcacgugugcguuacaggcgacgauaaaaacgcuaccgccagcuucaucuacaauggccggcuuguggacucuauugucuccuggagcaaggagauccugcgcacccaggaaucugagugugugugcauuaacgggacauguacgguggucaugaccgauggauccgcuagcggcaaagccgacacaaagauccucuuuaucgaggaagggaagauuguucauaccuccacacugucuggaagcgcgcaacacguggaggaaugcuccugcuauccuagauaccccggcgugcggugugucugccgcgauaacuggaaagggagcaauagaccuaucguggacauuaacaucaaggauuacucuauuguuuccagcuauguguguucuggacuugucggcgacacgccccggaaaaaugacagcuccucuagcucccacugccuggauccgaacaaugaggaaggcgggcauggagugaagggcugggccuucgacgaugggaacgacguuuggaugggacgcaccaucagcgagaaacucagaucuggcuacgagacauuuaaggugaucgaagggugguccaauccuaacagcaaacugcagauuaaucggcaggucaucguggaucgcggaaacagaucuggcuauuccggcauuuucagcgucgaggggaaguccuguaucaaucggugcuuuuacguggaacugauuagaggacgcaaggaggaaaccgagguucucuggaccucuaacagcaucguggucuucuguggcacauccgggaccuauggaacaggcucuuggcccgacggggcugauauuaaucugaugccuaucuga

SEQ ID NO: 218167 - RNA, 1410 nt, Artificial Sequence; identical to SEQ ID NO: 208636
  derived and/or modified CDS sequence (opt5) from neuraminidase__InfluenzaA__BAF47983

SEQ ID NO: 218168 - RNA, 1410 nt, Artificial Sequence
  derived and/or modified CDS sequence (opt5) from neuraminidase__InfluenzaA__BAF47984
augaaccccaaucagaagaucauuaccaucggcagcgugucccugacaauuucuacgaucugcuucuuuaugcaaauugccauccucaucaccacagucacccugcacuucaaacaguacgaguuuaacagcccuccgaauaaccagguuaugcuuugugaacccacaauuaucgagagaaauauuaccgaaaucguguaucugacaaacaccacgauugagaaggaaaucugcccuaaacucgcugaguaccggaauugguccaagccccaguguaacauuaccggguucgccccuuuuucuaaagacaauagcauccgccuguccgcgggaggcgauaucugggugacaagagagcccuaugucucuugcgacccugauaaguguuaccaauucgcucuugggcagggaaccacacugaacaaugugcauagcaacgacaccguucacggccggacgccguaucgcacacuccugaugaaugaacugggggugcccuuucaucucggaaccaagcaggucugcauugccugguccucuagcuccugucacgauggcaaagccuggcugcaugugugcguuacaggcgacgauaagaacgcuaccgccagcuucaucuacaaugggagacuuguggacucuauugucuccuggagcaaagagauccugcggacccaggaaucugagugugugugcauuaacggaacauguacgguggucaugaccgauggcuccgcuagcgggaaggccgacacaaaaauccucuuuaucgaggaaggaaagauuguucacaccuccacacugucuggcagcgcgcaacacguggaggaaugcuccugcuauccucgcuaccccggggugagaugugucugccgggauaacuggaagggaagcaaucgcccuaucguggacauuaacaucaaagauuacucuauuguuuccagcuauguguguucuggccuugucggcgacacccccagaaagaaugacagcuccucuagcucccauugccuggauccgaacaaugaggaaggggaccacggagugaaaggcugggccuucgaugacgggaacgauguuuggaugggacggacgaucagcgagaagcuccgcucuggcuacgagacauuuaaagugaucgaagggugguccaauccuaacagcaagcugcagauuaauagacaggucaucguggaccggggaaaccgcucuggcuauuccggcauuuucagcgucgaggggaaauccuguaucaauagaugcuuuuacguggaacugauucggggaagaaaggaggaaaccgagguucucuggaccucuaacagcaucguggucuucuguggcacauccgggaccuauggaacaggcucuuggcccgauggggcugacauuaaucugaugccuaucuga

SEQ ID NO: 218169 - RNA, 1410 nt, Artificial Sequence
  derived and/or modified CDS sequence (opt5) from neuraminidase__InfluenzaA__BAF47985
augaaccccaaucagaagaucauuaccaucggcagcgugucccugacaauuucuacgaucugcuucuuuaugcaaauugccauccucaucaccacagucacccugcacuucaaacaguacgaguuuaacuucccuccgaauaaccagguuaugcuuugugaacccacaauuaucgagagaaauauuaccgaaaucguguaucugacaaacaccacgauugagaaggaaaucugcccuaaacucgcugaguaccggaauuggagcaagccccagugugacauuaccggguuugccccuuucuccaaagauaacucuauccgccugagcgcgggaggcgacaucugggugacaagagagcccuaugucuccugcgauccugacaaguguuaccaauuugcucuugggcagggaaccacacugaauaacgugcauucuaaugauaccguucacgaccggacgccguaucgcacacuccugaugaacgaacugggcgugcccuuccaucucgggaccaagcaggucugcauugccuggagcuccagcucuugucacgauggaaaagccuggcugcaugugugcguuacaggcgacgauaagaaugcuaccgccuccuuuaucuacaacggcagacuuguggacagcauugucucuugguccaaaaagauccugcggacccaggagagcgaaugugugugcauuaaugggacauguacgguggucaugaccgauggaucugcuuccggcaaagccgacacaaagauccucuucaucgaggaggggaagauuguucacaccagcacacuguccggaucugcgcaacacguggaagagugcagcugcuauccucgcuaccccggcgugagaugugucugccgggauaacuggaaaggguccaaccgcccuaucguggacauuaauaucaaggacuacagcauuguuucuuccuauguguguagcggacuugucggcgauacccccagaaagaacgacucuagcuccucuagccauugccuggauccgaauaacgaagagggcgggcacggagugaagggcugggccuuugacgaugggaaugacguuuggaugggacggacgaucuccgaaaaacuccgcagcggcuacgagacauucaaggugaucgagggguggucuaacccuaauuccaaacugcagauuaacagacaggucaucguggaucggggaaaucgcagcggcuauucuggcaucuuuuccgucgaagggaaaagcuguauuaacagaugcuucuacguggagcugauucggggaagaaaggaagagaccgaaguucucuggaccuccaauucuaucguggucuucuguggcacaagcgggaccuauggaacaggcuccuggcccgacggggcugauauuaaccugaugccuaucuga

SEQ ID NO: 218170 - RNA, 1410 nt, Artificial Sequence
  derived and/or modified CDS sequence (opt5) from neuraminidase__InfluenzaA__BAF47986
augaaccccaaucagaagaucauuaccaucggcagcgugucccugacaauuucuacgaucugcuucuuuaugcaaauugccauccucaucaccacagucacccugcacuucaaacaguacgaguuuaacuucccuccgaauaaccagguuaugcuuugugaacccacaauuaucgagagaaauauuaccgaaaucguguaucugacaaacaccacgauugagaaggaaaucugcccuaaacucgcugaguaccggaauuggagcaagccccagugugacauuaccggguuugccccuuucuccaaagauaacucuauccgccugagcgcgggaggcgacaucugggugacaagagagcccuaugucuccugcgauccugacaaguguuaccaauuugcucuugggcagggaaccacacugaauaacgugcauucuaaugauaccguucacgaccggacgccguaucgcacacuccugaugaacgaacugggcgugcccuuccaucucgggaccaagcaggucugcauugccuggagcuccagcucuugucacgauggaaaagccuggcugcaugugugcguuacaggcgacgauaagaaugcuaccgccuccuuuaucuacaacggcagacuuguggacagcauugucucuugguccaaaaagauccugcggacccaggagagcgaaugugugugcauuaaugggacauguacgguggucaugaccgauggaucugcuuccggcaaagccgacacaaagauccucuucaucgaggaggggaagauuguucacaccagcacacuguccggaucugcgcaacacguggaagagugcagcugcuauccucgcuaccccggcgugagaugugucugccgggauaacuggaaaggguccaaccgcccuaucguggacauuaauaucaaggacuacagcauuguuucuuccuauguguguagcggacuugucggcgauacccccagaaagaacgacucuagcuccucuagccauugccuggauccgaauaacgaagagggcgggcacggagugaagggcugggccuuugacgaugggaaugacguuuggaugggacggacgaucuccgaaaaacuccgcagcggcuacgagacauucaaggugaucgagggguggucuaacccuaauuccaaacugcagauuaacagacaggucaucguggaucggggaaaucgcagcggcuauucuggcaucuuuuccgucgaagggaaaagcuguauuaacagacgguucuacguggagcugauuagaggacgcaaggaagagaccgaaguucucuggaccuccaauucuaucguggucuucugcggcacaagcgggaccuauggaacaggcuccuggcccgacggggcugauauuaaccugaugccuaucuga

SEQ ID NO: 218171 - RNA, 1410 nt, Artificial Sequence
  derived and/or modified CDS sequence (opt5) from neuraminidase__InfluenzaA__BAF47987
augaaccccaaucagaagaucauuaccaucggcagcgugucccugacaauuucuacgaucugcuucuuuaugcaaauugccauccucaucaccacagucacccugcacuucaaacaguacgaguuuaacuucccuccgaauaaccagguuaugcuuugugaacccacaauuaucgagagaaauauuaccgaaaucguguaucugacaaacaccacgauugagaaggaaaucugcccuaaacucgcugaguaccggaauuggagcaagccccagugugacauuaccggguuugccccuuucuccaaagauaacucuauccgccugagcgcgggaggcgacaucugggugacaagagagcccuaugucuccugcgauccugacaaguguuaccaauuugcucuugggcagggaaccacacugaauaacgugcauucuaaugauaagguucacgaccggaccccguaucgcacgcuccugaugaacgaacugggcgugcccuuccaucucgggacaaaacaggucugcauugccuggagcuccagcucuugucacgauggaaaggccuggcugcaugugugcguuaccggcgacgauaaaaaugcuacagccuccuuuaucuacaacggcagacuuguggacagcauugucucuugguccaagaaaauccugcggacccaggagagcgaaugugugugcauuaaugggaccuguacaguggucaugacggauggaucugcuuccggcaaggccgacaccaagauccucuucaucgaggaggggaaaauuguucacacaagcacccuguccggaucugcgcaacacguggaagagugcagcugcuauccucgcuaccccggcgugagaugugucugccgggauaacuggaagggguccaaccgcccuaucguggacauuaauaucaaagacuacagcauuguuucuuccuauguguguagcggacuugucggcgauacacccagaaagaacgacucuagcuccucuagccauugccuggauccgaauaacgaagagggcgggcacggagugaaaggcugggccuuugacgaugggaaugacguuuggaugggacggaccaucuccgaaaagcuccgcagcggcuacgagacguucaaagugaucgagggguggucuaacccuaauuccaagcugcagauuaacagacaggucaucguggaucggggaaaucgcagcggcuauucuggcauuuuuagcgucgaagggaaguccuguaucaacagaugcuucuacguggagcugauucggggaagaaaagaagagacagaaguucucuggaccuccaauucuaucguggucuucuguggcaccagcgggacauauggaaccggcuccuggcccgacggggcugauauuaaccugaugccuaucuga

SEQ ID NO: 218172 - RNA, 1410 nt, Artificial Sequence; identical to SEQ ID NO: 206786
  derived and/or modified CDS sequence (opt5) from neuraminidase__InfluenzaA__BAF47988

SEQ ID NO: 218173 - RNA, 1410 nt, Artificial Sequence; identical to SEQ ID NO: 206786
  derived and/or modified CDS sequence (opt5) from neuraminidase__InfluenzaA__BAF47989

SEQ ID NO: 218174 - RNA, 1410 nt, Artificial Sequence
  derived and/or modified CDS sequence (opt5) from neuraminidase__InfluenzaA__BAF47990
augaaccccaaucagaagaucauuaccaucggcagcgugucccugacaauuucuacgaucugcuucuuuaugcaaauugccauccucaucaccacagucacccugcacuucaaacaguacgaguuuaacagcccuccgaauaaccagguuaugcuuugugaacccacaauuaucgagagaaauauuaccgaaaucguguaucugacaaacaccacgauugagaaggaaaucugcccuaaacucgcugaguaccggaauugguccaagccccaguguaacauuaccggguucgccccuuuuucuaaagacaauagcauccgccuguccgcgggaggcgauaucugggugacaagagagcccuaugucucuugcgacccugauaaguguuaccaauucgcucuugggcagggaaccacacugaacaaugugcauagcaacgacaccguucacgaucggacgccguaucgcacacuccugaugaaugaacugggcgugcccuuucaucucgggaccaagcaggucugcauugccugguccucuagcuccugucacgacggaaaagccuggcugcaugugugcguuacaggcgaugacaagaacgcuaccgccagcuucaucuacaauggcagacuuguggauucuauugucuccuggagcaaagagauccugcggacccaggaaucugagugugugugcauuaacgggacauguacggugaucaugaccgacggauccgcuagcggcaaggccgauacaaaaauccucuuuauugaggaagggaagaucguccacaccuccacacugucuggaagcgcgcaacacguugaggaaugcuccugcuauccucgcuaccccggcgugagaugugugugccgggacaacuggaaggggagcaaucgcccuauugucgauaucaacauuaaagacuacucuaucguguccagcuauguuuguucuggacuugugggcgacacccccagaaagaaugauagcuccucuagcucccauugccuggacccgaacaaugaggaaggcgggcacggagucaaaggcugggccuucgaugacgggaacgauguguggaugggacggacgguuagcgagaagcuccgcucuggcuacgagacauuuaaagugaucgaagggugguccaauccuaacagcaagcugcagauuaauagacaggucaucguggaccggggaaaccgcucuggcuauuccggcauuuucagcgucgaggggaaauccuguaucaauagaugcuuuuacguggaacugauucggggaagaaaggaggaaaccgagguucucuggaccucuaacagcaucguggucuucuguggcacauccgggaccuauggaacaggcucuuggcccgauggggcugacauuaaucugaugccuaucuga

SEQ ID NO: 218175 - RNA, 1410 nt, Artificial Sequence
  derived and/or modified CDS sequence (opt5) from neuraminidase__InfluenzaA__BAF47991
augaaccccaaucagaagaucauuaccaucggcagcgugucccugacaauuucuacgaucugcuucuuuaugcaaauugccauccucaucaccacagucacccugcacuucaaacaguacgaguuuaacagcccuccgaauaaccagguuaugcuuugugaacccacaauuaucgagagaaauauuaccgaaaucguguaucugacaaacaccacgauugagaaggaaaucugcccuaaacucgcugaguaccggaauugguccaagccccagugugacauuaccggguucgccccuuuuucuaaagauaacagcauccgccuguccgcgggaggcgacaucugggugacaagagagcccuaugucucuugcgauccugacaaguguuaccaauucgcucuugggcagggaaccacacugaauaacgugcauagcaaugauauuguucacgaccggaccccguaucgcacgcuccugaugaacgaacugggcgugcccuuucaucucgggacaaagcaggucugcaucgccugguccucuagcuccugucacgauggaaaagccuggcugcaugugugcguuaccggcgacgauaagaaugcuacagccagcuucauuuacaacggcagacuuguggacucuaucgucuccuggagcaaaaagauucugcggacccaggagucugaaugugugugcaucaaugggaccuguacaguggucaugacggauggauccgcuagcggcaaagccgacaccaagauccucuuuauugaggaggggaagaucguucacacauccacccugucuggaagcgcgcaacacguggaagagugcuccugcuauccucgcuaccccggcauuagaugugugugccgggauaacuggaaagggagcaaccgcccuaucgucgacauuaauaucaaggacuacucuaucguguccagcuauguuuguucuggacuugugggcgauacaccccggaaaaacgacagcuccucuagcucccauugccuggauccgaauaacgaagagggcgggcacggagucaagggcugggccuucgacgaugggaaugacguguggaugggaagaaccauuagcgaaaaacuccgcucuggcuacgagacguuuaagguuaucgaggggugguccaacccuaauagcaaacugcagauuaacagacaggugaucgucgaucggggaaaucgcucuggcuauuccggcauuuucagcguggaagggaaguccuguaucaacagaugcuuuuacgucgagcugauucggggaagaaaggaagagacagaagugcucuggaccucuaauagcaucguuguguucuguggcaccuccgggacauauggaaccggcucuuggcccgacggggcugauaucaaccugaugccuauuuga

SEQ ID NO: 218176 - RNA, 1410 nt, Artificial Sequence
  derived and/or modified CDS sequence (opt5) from neuraminidase__InfluenzaA__BAF47992
augaaccccaaucagaagaucauuaccaucggcagcgugucccugacaauuucuacgaucugcuucuuuaugcaaauugccauccucaucaccacagucacccugcacuucaaacaguacgaguuuaacagcccuccgaauaaccagguuaugcuuugugaacccacaauuaucgagagaaauauuaccgaaaucguguaucugacaaacaccacgauugagaaggaaaucugcccuaaacucgcugaguaccggaauugguccaagccccaguguaacauuaccggguucgccccuuuuucuaaagacaauagcauccgccuguccgcgggaggcgauaucugggugacaagagagcccuaugucucuugcgaaccugacaaguguuacccguucgcucuugugcaagggaccacacugaacaauguucauagcaacgauaccgugcacgaccggacgcccuaucgcacacuccugaugaaugagcugggagucccuuuucaucucggcaccaaacaggugugcauugccugguccucuagcuccugucacgaugggaaggccuggcugcauguuugcgugacaggagacgauaagaacgcuaccgccagcuucaucuacaauggcagacuugucgacucuauuguguccuggagcaaagaaauccugcggacccaggagucugagugugugugcauuaacggcacauguacggucguuaugaccgauggguccgcuagcggaaaggccgacacaaaaauccucuuuaucgaagagggcaagauugugcacaccuccacacugucugggagcgcgcagcacguggaagagugcuccugcuauccccgcuacccuggagucagaugugugugccgggauaacuggaagggcagcaaucgccccaucguugacauuaacaucaaagauuacucuauuguguccagcuaugucuguucugggcuugugggagacaccccgagaaagaaugacagcuccucuagcggccauugccuggauccuaacaaugaagagggcgggcacggaguuaaaggcugggccuucgacgaugggaacgacguguggaugggacggacgaucuccgagaagcuccgcagcggcuacgaaacauuuaaagucaucgagggguggucuaaucccaacuccaagcugcaaauuaauagacaggugaucgucgaucggggaaaccgcagcggcuauucuggcauuuucuccguggaagggaaaagcuguaucaauagaugcuuuuacguugagcugauucggggaagaaaggaagagaccgaggugcucuggaccuccaacucuuucgucguguucuguggcacaagcgggaccuauggaacaggcuccuggccugacggggcugauaucaaucugaugcccauuuga

SEQ ID NO: 218177 - RNA, 1410 nt, Artificial Sequence; identical to SEQ ID NO: 218133
  derived and/or modified CDS sequence (opt5) from neuraminidase__InfluenzaA__BAF47993

SEQ ID NO: 218178 - RNA, 1410 nt, Artificial Sequence; identical to SEQ ID NO: 206784
  derived and/or modified CDS sequence (opt5) from neuraminidase__InfluenzaA__BAF47994

SEQ ID NO: 218179 - RNA, 1410 nt, Artificial Sequence
  derived and/or modified CDS sequence (opt5) from neuraminidase__InfluenzaA__BAF47995
augaaccccaaucagaagaucauuaccaucggcagcgugucccugacaauuucuacgaucugcuucuuuaugcaaauugccauccucaucaccacagucacccugcacuucaaacaguacgaguuuaacagcccuccgaauaaccagguuaugcuuugugaacccacaauuaucgagagaaauauuaccgaaaucguguaucugacaaacaccacgauugagaaggaaaucugcccuaaacucgcugaguaccggaauugguccaagccccaguguaacauuaccggguucgccccuuuuucuaaagacaauagcauccgccuguccgcgggaggcgauaucugggugacaagagagcccuaugucucuugcgacccugauaaguguuaccaauucgcucuugggcagggaaccacacugaacaaugugcauagcaacgacaccguucacggccggacgccguaucgcacacuccugaugaaugaacugggggugcccuuucaucucggaaccaagcaggucugcauugccugguccucuagcuccugucacgauggcaaagccuggcugcaugugugcguuacaggcgacgauaagaacgcuaccgccagcuucaucuacaaugggagacuuguggacucuauugucuccuggagcaaagagauccugcggacccaggaaucugagugugugugcauuaacggaacauguacgguggucaugaccgauggcuccgcuagcgggaaggccgacacaaaaauccucuuuaucgaggaaggaaagauuguucacaccuccacacugucuggcagcgcgcaacacguggaggaaugcuccugcuauccucgcuaccccggggugagaugugucugccgggauaacuggaagggaagcaaucgcccuaucguggacauuaacaucaaagauuacucuauuguuuccagcuauguguguucuggccuugucggcgacacccccagaaagaaugacagcuccucuagcucccauugccuggauccgaacaaugaggaagggggacacggcgugaaagggugggccuucgacgauggaaacgacguuuggaugggccggacgaucagcgagaagcuccgcucuggguacgagacauuuaaagugaucgaaggaugguccaauccuaacagcaagcugcagauuaauagacaggucaucguggaucggggcaaccgcucuggcuauuccgggauuuucagcgucgagggaaaauccuguaucaauagaugcuuuuacguggaacugauucggggcagaaaggaggaaaccgagguucucuggaccucuaacagcaucguggucuucugugggacauccggaaccuauggcacagggucuuggcccgacggcgcugauauuaaucugaugccuaucuga

SEQ ID NO: 218180 - RNA, 1410 nt, Artificial Sequence; identical to SEQ ID NO: 218179
  derived and/or modified CDS sequence (opt5) from neuraminidase__InfluenzaA__BAF47996

SEQ ID NO: 218181 - RNA, 1410 nt, Artificial Sequence; identical to SEQ ID NO: 206786
  derived and/or modified CDS sequence (opt5) from neuraminidase__InfluenzaA__BAF47997

SEQ ID NO: 218182 - RNA, 1410 nt, Artificial Sequence
  derived and/or modified CDS sequence (opt5) from neuraminidase__InfluenzaA__BAF57504
augaaccccaaucagaagaucauuaccaucggcagcgugucccugacaauuucuacgaucugcuucuuuaugcaaauugccauccucaucaccacagucacccugcacuucaaacaguacgaguuuaacccuccgcccaauaaccagguuaugcuuugugaaccuacaauuaucgagagaaauauuaccgaaaucguguaucugacaaacaccacgauugagaaggaaaucugccccaaacucgcugaguaccggaauuggagcaagccucaguguaacauuaccggguucgcccccuuuuccaaagacaauucuauccgccugagcgcgggaggcgauaucugggugacaagagagccuuaugucuccucugacccggauaagugcuaccaauucgcucuugggcagggaaccacacugaacaaugugcauagcaacgacaccguucacgaucggacgcccuaucgcacacuccugaugaaggaacugggcgugccuuuucaucucgggaccaaacaggucuguauugccugguccucuagcuccugccacgacggaaaggccuggcugcauguguguguuacaggcgaugacgagaaugcuaccgccagcuucaucuacaacggcagacuuguggauucugucguguccuggagcaaaaagauucugcggacccaggaaucugagugcguguguaucaaugggacaugcacggucguuaugaccgacggauccgcuagcggcaaagccgauacaaagauucucuuuaucgaggaagggaagaucgugcacaccuccucucugagcggauccgcgcaacacguggaggaauguagcugcuauccccgcuacccuggcgucagaugcgugugucgggacaacuggaaagggucuaaccgccccauuguugauaucaauauuaaggacuacuccaucgugagcucuuaugucugcagcggacuugugggcgacacaccgcggaaaaacgauuccucuagcuccagccauugucuggacccuaauaacgaggaaggcgggcacggaguuaagggcugggccuucgaugacgggaaugauguguggaugggaagaaccauuucugagaaacuccgcuccggcuacgagacguuuaaggucaucgaaggguggagcaaccccaauucuaaacugcagaucaacagacaggugauugucgaccggggaaaucgcuccggcuauagcggcaucuucuccguggaggggaagucuugcauuaacagauguuuuuacguugaacugauccggggaagaaagcaggagacagaagugcucuggaccagcaauuccauugucguguucugcggcaccucugggacauauggaaccggcagcuggccugauggggcugacaucaaccugaugcccauuuga

SEQ ID NO: 218183 - RNA, 1410 nt, Artificial Sequence
  derived and/or modified CDS sequence (opt5) from neuraminidase__InfluenzaA__BAF57508
augaaccccaaucagaagaucauuaccaucggcagcgugucccugacaauuucuacgaucugcuucuuuaugcaaauugccauccucaucaccacacugacccuucacuucaaacaguacgaguuuaacagcccuccgaauaaccaggucaugcugugugaacccacaauuaucgagagaaauauuaccgaaaucguuuaucucacaaacaccacgauugagaaggaaaucugcccuaaacuggcugaguaccggaauugguccaagccccaguguaacauuaccggguucgccccuuuuucuaaagacaauagcauccgccuuuccgcgggaggcgauaucugggugacaagagagcccuaugugucuugcgacccugauaaguguuaccaauucgcucuggggcagggaaccacacucaacaauguccauagcaacgacaccgugcacgaucggacgccguaucgcacacugcugaugaaugaacucggcguucccuuucaucuggggaccaaacaggugugcauugccugguccucuagcuccugucacgacggaaaggccuggcuucaugucugcgugacaggcgaugacgagaacgcuaccgccagcuucaucuacaauggcagacugguugauucuauuguguccuggagcaagaaaauccuccggacccaggaaucugagugugucugcauuaacgggacauguacgguggugaugaccgacggauccgcuagcggcaaggccgauacaaaaauccuguuuaucgaggaagggaagauuguccacaccuccacacuuucuggaagcgcgcaacacguugaggaaugcuccugcuauccucgcuaccccggcgugagaugugugugccgggacaacuggaaggggagcaaucgcccuaucgucgauauuaacaucaaagacuacucuauuguguccagcuauguuuguucuggacuggugggcgacacccccagaaagaaugauagcuccucuagcucccauugccucgacccgaacaaugaggaaggcgggcacggagucaaaggcugggccuucgaugacgggaacgauguguggaugggacggacgaucagcgagaagcugcgcucuggcuacgagacauuuaaaguuaucgaagggugguccaauccuaacagcaagcugcagauuaauagacaggugaucgucgaccggggaaaccgcucuggcuauuccggcauuuucagcguggaggggaaauccuguaucaauagaugcuuuuacgucgaacucauucggggaagaaagcaggagaccgaagugcuguggaccucuaacagcaucguuguguucuguggcacauccgggaccuauggaacaggcucuuggcccgauggggcugacauuaaucuuaugccuaucuga

SEQ ID NO: 218184 - RNA, 1410 nt, Artificial Sequence; identical to SEQ ID NO: 208001
  derived and/or modified CDS sequence (opt5) from neuraminidase__InfluenzaA__BAF57511

SEQ ID NO: 218185 - RNA, 1410 nt, Artificial Sequence
  derived and/or modified CDS sequence (opt5) from neuraminidase__InfluenzaA__BAF57515
augaaccccaaucagagaaucauuaccaucggcagcgugucccugacaauuucuacgaucugcuucuuuaugcaaauugccauccucaucaccacagucacccugcacuucaagcaguacgaguuuaacagcccuccgaauaaccagguuaugcuuugugaacccacaauuaucgagcggaauauuaccgaaaucguguaucugacaaacaccacgauugagaaagaaaucugcccuaagcucgcugaguaccgcaauugguccaaaccccaguguaacauuaccggguucgccccuuuuucuaaggacaauagcaucagacuguccgcgggaggcgauaucugggugacacgggagcccuaugucucuugcgacccugauaaauguuaccaauucgcucuugggcagggaaccacacugaacaaugugcauagcaacgacaagguucacgaucgcaccccguauagaacgcuccugaugaaugaacugggcgugcccuuucaucucgggacaaagcaggucugcauugccugguccucuagcuccugucacgacggaaaagccuggcugcaugugugcguuaccggcgaugacgagaacgcuacagccagcuucaucuacaauggccggcuuguggauucuauugucuccuggagcaagaaaauccugcgcacccaggaaucugagugugugugcauuaacgggaccuguacaguggucaugacggacggauccgcuagcggcaaggccgauaccaaaauccucuuuaucgaggaagggaagauuguucacacauccacccugucuggaagcgcgcaacacguggaggaaugcuccugcuauccuagauaccccggcgugcggugugucugccgcgacaacuggaaggggagcaauagaccuaucguggauauuaacaucaaagacuacucuauuguuuccagcuaucuuuguucuggacuggugggcgacacaccccggaagaaugauagcuccucuagcucccauugccucgacccgaacaaugaggaaggcgggcacggagucaaaggcugggccuucgaugacgggaacgauguguggaugggacgcaccaucagcgagaagcugagaucuggcuacgagacguuuaaaguuaucgaaggguggucccauccuaauagccagcugcagauuaaccgccaggugaucgucgaccggggaaauagaucuggcuauuccggcauuuucagcguggaggggaaguccuguaucaaccggugcuuuuacgucgaacucauuagaggacgcaaacaagagacagaagugcuguggaccucuaauagcaucguuguguucuguggcaccuccgggacauauggaaccggcucuuggcccgauggggcugacauuaaccuuaugccuaucuga

SEQ ID NO: 218186 - RNA, 1410 nt, Artificial Sequence
  derived and/or modified CDS sequence (opt5) from neuraminidase__InfluenzaA__BAF57522
augaaccccaaucagaagaucauuaccaucggcagcgugucccugacaauuucuacgaucugcuucuuuaugcaaauugccauccucaucaccacagucacccugcacuucaaacaguacgaguuuaacagcccuccgaauaaccagguuaugcuuugugaacccacaauuaucgagagaaauauuaccgaaaucguguaucugacaaacaccauuaucgagaaggaaauuugcccuaaacucgcugaguaccggaauugguccaagccccaguguaacaucacgggguucgccccuuuuucuaaagacaauagcauccgccuguccgcgggaggcgauauuugggugaccagagagcccuaugucucuugcgacccugauaaguguuaccaauucgcucuugggcagggaacaacccugaacaaugugcauagcaacgacacaguucacgaucggaccccguaucgcacgcuccugaugaaugaacugggcgugcccuuucaucucgggacaaagcaggucugcaucgccugguccucuagcuccugucacgacggaaaagccuggcugcaugugugcguuaccggcgaugacgagaacgcuacagccagcuucauuuacaauggcagacuuguggauucuaucgucuccuggagcaagaaaauucugcggacccaggaaucugagugugugugcaucaacgggaccuguacaguggucaugacggacggauccgcuagcggcaaggccgauaccaaaauccucuuuauugaggaagggaagaucguucacacauccacccugucuggaagcgcgcaacacguggaggaaugcuccugcuauccucgcuaccccggcgugagaugugucugccgggacaacuggaaggggagcaaucgcccuauuguggauaucaacauuaaagacuacucuaucguuuccagcuauguguguucuggacuugucggcgacacacccagaaagaaugaucggagccgcuccucucauugccuggacccgaacaaugaggaaggcgggcacggagugaaaggcugggccuucgaugacgggaacgauguuuggaugggaagaaccaucagcgagaagcuccgguccggcuacgagacguuuaaagugauugaaggguggagcaagccuaauucuaaacugcagaucaaccgccaggucauuguggacagaggaaaucggacaggcuauuccggcaucuucagcgucgaggggaagucuuguauuaacagaugcuuuuacguggaacugauccgcggacggaagcaggagaccgaaguucucuggaccuccaauagcauuguggucuucuguggcacauccgggaccuauggaacaggcucuuggcccgauggggcugacaucaaccugaugccuaucuga

SEQ ID NO: 218187 - RNA, 1410 nt, Artificial Sequence
  derived and/or modified CDS sequence (opt5) from neuraminidase__InfluenzaA__BAF57529
augaaccccaaucagaagaucauuaccaucggcagcgugucccugacaauuucuacgaucugcuucuuuaugcaaauugccauccucaucaccacagucacccugcacuucaaacaguacgaguuuaacagcccuccgaauaaccagguuaugcuuugugaacccacaauuaucgagagaaauauuaccgaaaucguguaucugacaaacaccacgauugagaaggaaaucugcccuaaacucgcugaguaccggaauugguccaagccccagugugacauuaccggguucgccccuuuuucuaaagauaacagcauccgccuguccgcgggaggcgacaucugggugacaagagagcccuaugucucuugcgauccugacaaguguuaccaauucgcucuugggcagggaaccacacugaauaacgugcauagcaaugauaagguucacgaacggaccccguaucgcacgcuccugaugaacgagcugggcgugcccuuucaucucgggacaaaacaggucugcauugccugguccucuagcuccugucacgacggaaaggccuggcugcaugugugcguuaccggcgaugacaaaaaugcuacagccagcuucaucuacaacggcagacuuguggauucuauugucuccuggagcaagaaaauccugcggacccaggaaucugagugugugugcauuaaugggaccuguacaguggucaugacggacggauccgcuagcggcaaggccgauaccaagauccucuuuaucgaggaagggaaaauuguucacacauccacccugucuggaagcgcgcaacacguggaggaaugcuccugcuauccucgcuaccccggcgugagaugugucugccgggacaacuggaaggggagcaaccgcccuaucguggauauuaauaucaaagacuacucuauuguuuccagcuauguguguucuggacuugucggcgacacacccagaaagaacgauagcuccucuagcucccauugccuggacccgaauaacgaggaaggcgggcacggagugaaaggcugggccuucgaugacgggaaugauguuuggaugggacggaccaucagcgagaagcuccgcucuggcuacgagacguuuaaagugaucgaagggugguccaacccuaauagcaagcugcagauuaacagacaggucaucguggaccggggaaaucgcucuggcuauuccggcauuuucagcgucgaggggaaguccuguaucaacagaugcuuuuacguggaacugauucggggaagaaaagaggaaacagagguucucuggaccucuaauagcaucguggucuucuguggcaccuccgggacauauggaaccggcucuuggcccgauggggcugacauuaaccugaugccuaucuga

SEQ ID NO: 218188 - RNA, 1410 nt, Artificial Sequence; identical to SEQ ID NO: 213623
  derived and/or modified CDS sequence (opt5) from neuraminidase__InfluenzaA__BAF57532

SEQ ID NO: 218189 - RNA, 1410 nt, Artificial Sequence; identical to SEQ ID NO: 213623
  derived and/or modified CDS sequence (opt5) from neuraminidase__InfluenzaA__BAF57536

SEQ ID NO: 218190 - RNA, 1410 nt, Artificial Sequence
  derived and/or modified CDS sequence (opt5) from neuraminidase__InfluenzaA__BAF57539
augaaccccaaucagaagaucauuaccaucggcagcgugucccugacaauuucuacgaucugcuucuuuaugcaaauugccauccucaucaccacagucacccugcacuucaaacaguacgaguuuaacagcccuccgaauaaccagguuaugcuuugugaacccacaauuaucgagagaaauauuaccgaaaucguguaucugacaaacaccacgauugagaaggaaaucugcccuaaacucgcugaguaccggaauugguccaagccccagugugacauuaccggguucgccccuuuuucuaaagauaacagcauccgccuguccgcgggaggcgacaucugggugacaagagagcccuaugucucuugcgauccugacaaguguuaccaauucgcucuugggcagggaaccacacugaauaacgugcauagcaaugauaccguucacgaccggacgccguaucgcacacuccugaugaacgaacugggcgugcccuuucaucucgggaccaagcaggucugcauugccugguccucuagcuccugucacgauggaaaagccuggcugcaugugugcguuacaggcgacgauaagaaugcuaccgccagcuucaucuacaacggcagacuuauugacucuaucguguccuggagcaaaaagauucugcggacccaggagucugaaugugucugcaucaaugggacauguacgguggugaugaccgauggauccgcuagcggcaaagccgacacaaagauccucuuuauugaggaggggaagaucguccacaccuccacacugucuggaagcgcgcaacacguugaagagugcuccugcuauccucgcuaccccggcgugagaugugugugccgggauaacuggaaagggagcaaccgcccuauugucgacaucaauauuaaggacuacucuaucguguccagcuauguuuguucuggacuugugggcgauacccccagaaagaacgacagcuccucuagcucccauugccuggauccgaauaacgaagagggcgggcacggagucaaaggcugggccuucgacgaugggaaugacguguggaugggacggacgaucagcgaaaaacuccgcucuggcuacgagacauuuaagguuauugaggggugguccaacccuaauagcaaacugcagaucaacagacaggugauugucgaucggggaaaucgcucuggcuauuccggcaucuucagcguggaagggaaguccuguauuaacagaugcuuuuacgucgagcugauccggggaagaaaggagaaaaccgaagugcucuggaccucuaauagcauuguuguguucuguggcacauccgggaccuauggaacaggcucuuggcccgacggggcugauaucaaccugaugccuaucuga

SEQ ID NO: 218191 - RNA, 1410 nt, Artificial Sequence
  derived and/or modified CDS sequence (opt5) from neuraminidase__InfluenzaA__BAF57543
augaaccccaaucagaagaucauuaccaucggcagcgugucccugacaauuucuacgaucugcuucuuuaugcaaauugccauccucaucaccacagucacccugcacuucaaacaguacgaguuuaacagcccuccgaauaaccagguuaugcuuugugaacccacaauuaucgagagaaauauuaccgaaaucguguaucugacaaacaccacgauugagaaggaaaucugcccuaaacucgcugaguaccggaauugguccaagccccagugugacauuaccggguucgccccuuuuucuaaagauaacagcauccgccuguccgcgggaggcgacaucugggugacaagagagcccuaugucucuugcgauccugacaaguguuaccaauucgcucuugggcagggaaccacacugaauaacgugcauagcaaugauaccguucacgaccggacgccguaucgcacacuccugaugaacgaacugggcgugcccuuucaucucgggaccaagcaggucugcauugccugguccucuagcuccugucacgauggaaaagccuggcugcaugugugcguuacaggcgacgauaagaaugcuaccgccagcuucaucuacaacggcagacuuguggacucuauugucuccuggagcaaaaagauccugcggacccaggagucugaaugugugugcauuaaugggacauguacgguggucaugaccgauggauccgcuagcggcaaagccgacacaaagauccucuuuaucgaggaggggaagauuguucacaccuccacacugucuggaagcgcgcaacacguggaagagugcuccugcuauccucgcuaccccggcgugagaugugucugccgggauaacuggaaagggagcaaccgcccuaucguggacauuaauaucaaggacuacucuauuguuuccagcuauguguguucuggacuugucggcgauacccccagaaagaacgacagcuccucuagcucccauugccuggauccgaauaacgaagagggcgggcacggagugaaaggcugggccuucgacgaugggaaugacguuuggaugggacggacgaucagcgaaaaacuccgcucuggcuacgagacauuuaaggugaucgaggggugguccaacccuaauagcaaacugcagauuaacagacaggucaucguggaucggggaaaucgcucuggcuauuccgcuauuuucagcgucgaaggcaaguccuguaucaacagaugcuuuuacguggagcugauucgggggagaaaggaagagaccgaaguucucuggaccucuaauagcaucguggucuucuguggaacauccggcaccuaugggacaggaucuuggcccgacggcgccgauauuaaccugaugccuaucuga

SEQ ID NO: 218192 - RNA, 1410 nt, Artificial Sequence
  derived and/or modified CDS sequence (opt5) from neuraminidase__InfluenzaA__BAF57547
augaaccccaaucagaagaucauuaccaucggcagcgugucccugacaauuucuacgaucugcuucuuuaugcaaauugccauccucaucaccacagucacccugcacuucaaacaguacgaguuuaacagcccuccgaauaaccagguuaugcuuugugaacccacaauuaucgagagaaauauuaccgaaaucguguaucugacaaacaccacgauugagaaggaaaucugcccuaaacucgcugaguaccggaauugguccaagccccagugugacauuaccggguucgccccuuuuucuaaagauaacagcauccgccuguccgcgggaggcgacaucugggugacaagagagcccuaugucucuugcgauccugacaaguguuaccaauucgcucuugggcagggaaccacacugaauaacgugcauagcaaugauaccguucacgaccggacgccguaucgcacacuccugaugaacgaacugggcgugcccuuucaucucgggaccaagcaggucugcauugccugguccucuagcuccugucacgauggaaaagccuggcugcaugugugcguuacaggcgacgauaagaaugcuaccgccagcuucaucuacaacggcagacuuguggacucuauugucuccuggagcaaaaagauccugcggacccaggagucugaaugugugugcauuaaugggacauguacgguggucaugaccgauggauccgcuagcggcaaagccgacacaaagauccucuuuaucgaggaggggaagauuguucacaccuccacacugucuggaagcgcgcaacacguggaagagugcuccugcuauccucgcuaccccggcgugagaugugucugccgggauaacuggaaagggagcaaccgcccuaucguggacauuaauaucaaggacuacucuauuguuuccagcuauguguguucuggacuugucggcgauacccccagaaagaacgacagcuccucuagcucccauugccuggauccgaauaacgaagagggcgggcacggagugaaaggcugggccuucgacgaugggaaugacguuuggaugggacggacgaucagcgaaaaacuccgcucuggcuacgagacauuuaaggugaucgaggggugguccaacccuaauagcaaacugcagauuaacagacaggucaucguggaucggggaaaucgcucuggcuauuccggcauuuucagcgucgaagggaaguccuguaucaacagaugcuuuuacguggagcugauucggggaagaaaggaagagaccgaagcucucuggaccucuaauagcaucguuguguucuguggcacauccgggaccuauggaacaggcucuuggcccgacggggccgauauuaaccugaugccuaucuga

SEQ ID NO: 218193 - RNA, 1410 nt, Artificial Sequence; identical to SEQ ID NO: 206786
  derived and/or modified CDS sequence (opt5) from neuraminidase__InfluenzaA__BAF57551

SEQ ID NO: 218194 - RNA, 1410 nt, Artificial Sequence; identical to SEQ ID NO: 206786
  derived and/or modified CDS sequence (opt5) from neuraminidase__InfluenzaA__BAF57555

SEQ ID NO: 218195 - RNA, 1410 nt, Artificial Sequence; identical to SEQ ID NO: 206784
  derived and/or modified CDS sequence (opt5) from neuraminidase__InfluenzaA__BAF57559

SEQ ID NO: 218196 - RNA, 1410 nt, Artificial Sequence
  derived and/or modified CDS sequence (opt5) from neuraminidase__InfluenzaA__BAF57563
augaaccccaaucagaagaucauuaccaucggcagcgugucccugacaauuucuacgaucugcuucuuuaugcaaauugccauccucaucaccacagucacccugcacuucaaacaguacgaguuuaacagcccuccgaauaaccagguuaugcuuugugaacccacaauuaucgagagaaauauuaccgaaaucguguaucugacaaacaccacgauugagaaggaaaucugcccuaaacucgcugaguaccggaauugguccaagccccagugugacauuaccggguucgccccuuuuucuaaagauaacagcauccgccuguccgcgggaggcgacaucugggugacaagagagcccuaugucucuugcgauccugacaaguguuaccaauucgcucuugggcagggaaccacacugaauaacgugcauagcaaugauauuguucacgaccggaccccguaucgcacgcuccugaugaacgaacugggcgugcccuuucaucucgggacaaagcaggucugcaucgccugguccucuagcuccugucacgauggaaaagccuggcugcaugugugcguuaccggcgacgauaagaaugcuacagccagcuucauuuacaacggcagacuuguggacucuaucgucuccuggagcaaagagauucugcggacccaggaaucugagugugugugcaucaaugggaccuguacaguggucaugacggauggauccgcuagcggcaaggccgacaccaaaauccucuuuauugaggaagggaagaucguucacacauccacccugucuggaagcgcgcaacacguggaggaaugcuccugcuauccucgcuaccccggcgugagaugugucugccgggauaacuggaaggggagcaaccgcccuauuguggacaucaauauuaaagacuacucuaucguuuccagcuauguguguucuggacuugucggcgauacacccagaaagaacgacagcuccucuagcucccauugccuggauccgaauaacgaggaaggcgggcacggagugaaaggcugggccuucgacgaugggaaugacguuuggaugggacggaccaucagcgagaagcuccgcucuggcuacgagacguuuaaagugauugaagggugguccaacccuaauagcaagcugcagaucaacagacaggucauuguggaucggggaaaucgcucuggcuauuccggcaucuucagcgucgaggggaaauccuguauuaacagaugcuuuuacguggaacugauccggggaagaaaggaggaaacagagguucucuggaccucuaauagcauuguggucuucuguggcaccuccgggacauauggaaccggcucuuggcccgacggggcugauaucaaccugaugccuaucuga

SEQ ID NO: 218197 - RNA, 1410 nt, Artificial Sequence; identical to SEQ ID NO: 206784
  derived and/or modified CDS sequence (opt5) from neuraminidase__InfluenzaA__BAF57571

SEQ ID NO: 218198 - RNA, 1410 nt, Artificial Sequence; identical to SEQ ID NO: 213528
  derived and/or modified CDS sequence (opt5) from neuraminidase__InfluenzaA__BAF57575

SEQ ID NO: 218199 - RNA, 1410 nt, Artificial Sequence; identical to SEQ ID NO: 206399
  derived and/or modified CDS sequence (opt5) from neuraminidase__InfluenzaA__BAF57579

SEQ ID NO: 218200 - RNA, 1410 nt, Artificial Sequence
  derived and/or modified CDS sequence (opt5) from neuraminidase__InfluenzaA__BAF57583
augaaccccaaucagaagaucauuaccaucggcagcgugucccugacaauuucuacgaucugcuucuuuaugcaaauugccauccucaucaccacagucacccugcacuucaaacaguacgaguuuaacagcccuccgaauaaccagguuaugcuuugugaacccacaauuaucgagagaaauauuaccgaaaucguguaucugacaaacaccacgauugagaaggaaaucugcccuaaacucgcugaguaccggaauugguccaagccccaguguaacauuaccggguucgccccuuuuucuaaagacaauagcauccgccuguccgcgggaggcgauaucagagugacacgggagcccuaugucucuugcgacccugauaaguguuaccaauucgcucuugggcagggaaccacacugaacaaugugcauagcaacgacaccguucacgaucgcacgccguauagaacacuccugaugaaugaacugggcgugcccuuucaucucgggaccaagcaggucugcauugccugguccucuagcuccugucacgacggaaaagccuggcugcaugugugcguuacaggcgaugacaagaacgcuaccgccagcuucaucuacaauggccggcuuguggauucuauugucuccuggagcaaagagauccugcgcacccaggaaucugagugugugugcauuaacgggacauguacgguggucaugaccgacggauccgcuagcggcaaggccgauacaaaaauccucuuuaucgaggaagggaagauuguucacaccuccacacugucuggaagcgcgcaacacguggaggaaugcuccugcuauccuagauaccccggcgugcggugugucugccgcgacaacuggaaggggagcaauagaccuaucguggauauuaacaucaaagacuacucuauuguuuccagcuauguguguucuggacuugucggcgacacgccccggaagaaugauagcuccucuagcucccauugccuggacccgaacaaugaggaaggcgggcacggagugaaaggcugggccuucgaugacgggaacgauguuuggaugggacgcaccaucagcgagaagcucagaucuggcuacgagacauuuaaagugaucgaagggugguccaauccuaacagcaagcugcagauuaaucggcaggucaucguggaccgcggaaacagaucuggcuauuccggcauuuucagcgucgaggggaaauccuguaucaaucggugcuuuuacguggaacugauuagaggacgcaaggaggaaaccgagguucucuggaccucuaacagcaucguggucuucuguggcacauccgggaccuauggaacaggcucuuggcccgauggggcugacauuaaucugaugccuaucuga

SEQ ID NO: 218201 - RNA, 1410 nt, Artificial Sequence
  derived and/or modified CDS sequence (opt5) from neuraminidase__InfluenzaA__BAF57587
augaaccccaaucagaagaucauuaccaucggcagcgugucccugacaauuucuacgaucugcuucuuuaugcaaauugccauccucaucaccacagucacccugcacuucaaacagugugaguuuaacagcccuccgaauaaccagguuaugcuuugcgaacccacaauuaucgagagaaauauuaccgaaaucguguaccugacaaacaccacgauugagaaggaaaucuguccuaaacucgcugaguaucggaauugguccaagccccagugcaacauuaccggguucgccccuuuuucuaaagacaauagcauccgccuguccgcgggaggcgauaucugggugacaagagagcccuacgucucuugugacccugauaagugcuaucaauucgcucuugggcagggaaccacacugaacaaugugcauagcaacgacaccguucacgaucggacgccguaccgcacacuccugaugaaugaacugggcgugcccuuucaucucgggaccaagcaggucuguauugccugguccucuagcuccugccacgacggaaaagccuggcugcauguguguguuacaggcgaugacaagaacgcuaccgccagcuucaucuauaauggcagacuuguggauucuauugucuccuggagcaaagagauccugcggacccaggaaucugagugcguguguauuaacgggacaugcacgguggucaugaccgacggauccgcuagcggcaaggccgauacaaaaauccucuuuaucgaggaagggaagauuguucacaccuccacacugucuggaagcgcgcaacacguggaggaaugcuccuguuacccucgcuaucccggcgugagaugcgucugucgggacaacuggaaggggagcaaucgcccuaucguggauauuaacaucaaagacuacucuauuguuuccagcuacgugugcucuggacuugucggcgacacccccagaaagaaugauagcuccucuagcucccauugucuggacccgaacaaugaggaaggcgggcacggagugaaaggcugggccuucgaugacgggaacgauguuuggaugggacggacgaucagcgagaagcuccgcucuggcuaugagacauuuaaagugaucgaagggugguccaauccuaacagcaagcugcagauuaauagacaggucaucguggaccggggaaaccgcucuggcuacuccggcauuuucagcgucgaggggaaauccugcaucaauagauguuuuuauguggaacugauucggggaagaaaggaggaaaccgagguucucuggaccucuaacagcaucguggucuucugcggcacauccgggaccuacggaacaggcucuuggcccgauggggcugacauuaaucugaugccuaucuga

SEQ ID NO: 218202 - RNA, 1410 nt, Artificial Sequence
  derived and/or modified CDS sequence (opt5) from neuraminidase__InfluenzaA__BAF57591
augaaccccaaucagaagaucauuaccaucggcagcgugucccugacaauuucuacgaucugcuucuuuaugcaaauugccauccucaucaccacagucacccugcacuucaaacaguacgaguuuaacagcccuccgaauaaccagguuaugcuuugugaacccacaauuaucgagagaaauauuaccgaaaucguguaucugacaaacaccacgauugagaaggaaaucugcccuaaacucgcugaguaccggaauugguccaagccccagugugacauuaccggguucgccccuuuuucuaaagauaacagcauccgccuguccgcgggaggcgacaucugggugacaagagagcccuaugucucuugcgauccugacaaguguuaccaauucgcucuugggcagggaaccacacugaauaacgugcauagcaaugauaccguucacgaccggacgccguaucgcacacuccugaugaacgaacugggcgugcccuuucaucucgggaccaagcaggucugcauugccugguccucuagcuccugucacgauggaaaagccuggcugcaugugugcguuacaggcgacgauaagaaugcuaccgccagcuucaucuacaacggcagacuuguggacucuauugucuccuggagcaaagagauccugcggacccaggaaucugagugugugugcauuaaugggacauguacgguggucaugaccgauggauccgcuagcggcaaggccgacacaaaaauccucuuuaucgaggaagggaagauuguucacaccuccacacugucuggaagcgcgcaacacguggaggaaugcuccugcuauccucgcuaccccggcgugagaugugucugccgggauaacuggaaggggagcaaccgcccuaucgugcauauuaauaucaaagacuacucuauuguuuccagcuauguguguucuggacuugucggcgacacccccagaaagaacgauagcuccucuagcucccacugccugaauccgaacaaugaggaaggcgggcauggagugaaaggcugggccuucgacgaugggaacgacguuuggaugggacggacgaucagcgagaagcuccgccugggcuacgagacauuuaaagugaucgaaggguggucuaauccuaacuccaagcugcagauuaauagacaggucaucguggaucggggaaaccgcagcggcuauucuggcauuuucuccgucgaggggaaaagcuguaucaauagaugcuuuuacguggaacucauucggggaagaaaggaggaaaccgagguucuguggaccuccaacucuaucguggucuucuguggcacaagcgggaccuauggaacaggcuccuggcccgacggggcugauauuaaucuuaugccuaucuga

SEQ ID NO: 218203 - RNA, 1410 nt, Artificial Sequence
  derived and/or modified CDS sequence (opt5) from neuraminidase__InfluenzaA__BAF57595
augaaccccaaucagaagaucauuaccaucggcagcgugucccugacaauuucuacgaucugcuucuuuaugcaaauugccauccucaucaccacagucacccugcacuucaaacaguacgaguuuaacagcccuccgaauaaccagguuaugcuuugugaacccacaauuaucgagagaaauauuaccgaaaucguguaucugacaaacaccacgauugagaaggaaaucugcccuaaaauugcugaguaccggaauugguccaagccccaguguaacaucaccggguucgccccuuuuucuaaagacaauagcauccgccucuccgcgggaggcgauauuugggugacaagagagcccuaugucucuugcgacccugauaaguguuaccaauucgcucuggggcagggaaccacacuuaacaaugugcauagcaacgacaccguucacgaucggacgccguaucgcacacugcucaugaaugaacugggcgugcccuuucaucuggggaccaagcaggucugcaucgccugguccucuagcuccugucacgacggaaaagccuggcuccaugugugcguuacaggcgaugacaagaacgcuaccgccagcuucauuuacaauggcagacugguggauucuaucgucuccuggagcaaagagauucuucggacccaggaaucugagugugugugcgugaacgggacauguacggucguuaugaccgacggauccgcuagcggcaaggccgauacaaaaauccuguuuaucgaggaagggaagauugugcacaccuccacacucucuggaagcgcgcaacacguggaggaaugcuccugcuauccucgcuaccccggcgucagaugugugugccgggacaacuggaaggggagcaaucgcccuaucguugauauuaacaucaaagacuacucuauuguguccagcuaugucuguucuggacuggugggcgacacccccagaaagaaugauagcuccucuagcucccauugccuugacccgaacaaugaggaaggcgggcacggaguuaaaggcugggccuucgaugacgggaacgauguguggaugggacggacgaucagcgagaagcugcgcucuggcuacgagacauuuaaagucaucgaagggugguccaauccuaacagcaagcuccagauuaauagacaggugaucgucgaccggggaaaccgcucuggcuauuccggcauuuucagcguggaggggaaauccuguaucaauagaugcuuuuacguugaacugauucggggaagaaaggaggaaaccgaggugcuguggaccucuaacagcaucgucguguucuguggcacauccgggaccuauggaacaggcucuuggcccgauggggcugacauuaaucucaugccuaucuga

SEQ ID NO: 218204 - RNA, 1410 nt, Artificial Sequence; identical to SEQ ID NO: 213528
  derived and/or modified CDS sequence (opt5) from neuraminidase__InfluenzaA__BAF57599

SEQ ID NO: 218205 - RNA, 1410 nt, Artificial Sequence
  derived and/or modified CDS sequence (opt5) from neuraminidase__InfluenzaA__BAF57603
augaaccccaaucagaagaucauuaccaucggcagcgugucccugacaauuucuacgaucugcuucuuuaugcaaauugccauccucaucaccacagucacccugcacuucaaacaguacgaguuuaacagcccuccgaauaaccagguuaugcuuugugaacccacaauuaucgagagaaauauuaccgaaaucguguaucugacaaacaccacgauugagaaggaaaucugcccuaaacucgcugaguaccggaauugguccaagccccaguguaacauuaccggguucgccccuuuuucuaaagacaauagcauccgccuguccgcgggaggcgauaucugggugacaagagagcccuaugucucuugcgacccugauaaguguuaccaauucgcucuugggcagggaaccacacugaacaaugugcauagcaacgacaccguucacgaucggacgccguaucgcacacuccugaugaaugaacugggcgugcccuuucaucucgggaccaagcaggucugcauugccugguccucuagcuccugucacgacggaaaagccuggcugcaugugugcguuacaggcgaugacaagaacgcuaccgccagcuucaucuacaauggcagacuuguggauucuauugucuccuggagcaaagagauccugcggacccaggaaucugagugugugugcauuaacgggacauguacgguggucaugaccgacggauccgcuagcggcaaggccgauacaaaaauccucuuuaucgaggaagggaagauuguucacaccuccacacugucuggaagcgcgcaacacguggaggaaugcuccugcuauccucgcuaccccggcgugagaugugucugccgggacaacuggaaggggagcaaucgcccuaucguggauauuaacaucaaagacuacucuauuguuuccagcuauguguguucuggacuugucggcgacacccccagaaagaaugauagcuccucuagcucccauugccuggacccgaacaaugaggaaggcgggcacggagugaaaggcugggccuucgaugacgggaacgauguuuggaugggacggacgaucagcgagaagcuccgcucuggcuacgagacauuuaaagugaucgaagggugguccaauccugacagcaagcugcagauuaacagacaggucaucguggaucggggaaaucgcucuggcuauuccggcauuuucagcgucgaggggaaauccuguaucaacagaugcuuuuacguggaacugauucggggaagaaaggaggaaaccgagguucucggcaccucuaauagcaucguggucuucugugggacauccggaaccuauggcacagggucuuggcccgacggcgcugauauuaaccugaugccuaucuga

SEQ ID NO: 218206 - RNA, 1410 nt, Artificial Sequence; identical to SEQ ID NO: 213623
  derived and/or modified CDS sequence (opt5) from Neuraminidase__InfluenzaA__BAF62620

SEQ ID NO: 218207 - RNA, 1413 nt, Artificial Sequence
  derived and/or modified CDS sequence (opt5) from neuraminidase__InfluenzaA__BAF63036
augaaccccaaucagaagaucauuaccaucggcagcauuuccaucgccauugggaucaucucucugaugcuccaaauuggaaacaucauuagcaucugggcuucccacucuauucagacaggcagccagaaucauacggggaucugcaaccagagaauuaucaccuacgaaaauuccacaugggugaaccacaccuaugucacaaucaauaacaccaauguuguggccggaaaagacaagacaucugugacccuggcgggcaacagcucccuuuguagcauuucugggugggcuaucuacacgaaagauaauuccauucggaucggaagcaagggcgacgucuucgugauucgcgagccuuuuaucucuugcucccaucuggaguguagaaccuucuuucucacacaaggcgcccugcuuaacgauaaacacagcaaugggaccguuaaggaccggucuccguaucgcgcccugauguccugcccccucggagaagcuccuagccccuacaacuccaaguucgagucuguggccuggagcgcuuccgccugucaugauggcaugggguggcugacaaucggaauuagcggcccugacaauggggcggucgccgugcugaaauauaacggaaucauuaccgaaacgaucaagucuuggaaaaagcggauucucagaacacaggaguccgagugcguuugugugaacggcagcugcuuuaccaucaugacagauggccccucuaauggggcugccagcuacaaaaucuucaagauugaaaagggaaaagucaccaaguccaucgagcugaacgcuccuaauuuucacuaugaagaguguucuugcuacccggacaccggcacagugaugugugugugccgcgauaacuggcacgggagcaauagacccugggucuccuucaaccagaaucuugacuaccagauuggauauaucugcagcggcguuuuuggggauaacccucggcccaaagacggaaagggcucuuguaauccugugacgguggauggcgccgacggggucaaaggauucuccuacaaguauggcaacgggguguggauuggacgcaccaaaagcaauagacugcggaagggcuuugagaugaucugggaccccaacggguggacagauaccgacucugauuucuccguuaagcaagacguggucgcgauuacagauuggagcggcuacuccggaucuuuugugcagcauccggaacucaccggccuggacugcauccgcccuuguuucuggguugagcuugugagagggcugccccgggaaaauacgacaaucuggaccagcggauccucuauuagcuucugcggcgucaacuccgauaccgccaauuggagcuggccugacggggcugagcuccccuuuacaaucgauaaauga

SEQ ID NO: 218208 - RNA, 1413 nt, Artificial Sequence; identical to SEQ ID NO: 213513
  derived and/or modified CDS sequence (opt5) from neuraminidase__InfluenzaA__BAF63040

SEQ ID NO: 218209 - RNA, 1413 nt, Artificial Sequence
  derived and/or modified CDS sequence (opt5) from neuraminidase__InfluenzaA__BAF63047
augaaccccaaucagaagaucauuaccaucggcagcauuuccaucgccauugggaucaucucucuggugcuccaaauuggaaacaucauuagcaucugggcuucccacucuauucagacaggcagccagaaucauacggggaucugcaaccagagaauuaucaccuacgagaauagcacaugggugaaccacaccuauguuaauaucaacaauacaaacgugguggccggaaaagacaagaccucugucacacuggcgggcaauagcucccuuuguagcauuucugggugggcuaucuacaccaaagauaacuccauucggaucggaagcaagggcgacguguucguuauucgcgaaccuuuuaucucuugcucccaucuggaguguagaacguucuuucucacccaaggcgcccugcuuaaugauaaacacagcaacgggacagugaaggaccggucuccguaucgcgcccugauguccugcccccucggagaagcuccuagccccuacaauuccaaguucgagucugucgccuggagcgcuuccgccugucaugauggcaugggguggcugaccaucggaauuagcggcccugacaacggggcgguggccguucugaaauauaacggaaucauuacagaaaccaucaagucuuggaaaaagcggauucucagaacgcaggaguccgagugcgugugugucaauggcagcugcuuuacaaucaugaccgauggccccucuaacggggcugccagcuacaaaaucuucaagauugaaaagggaaaagugacaaaguccaucgagcugaaugcuccuaacuuucacuaugaagaguguucuugcuacccggacaccggcaccgugaugugugucugccgcgauaauuggcacgggagcaacagacccuggguuuccuucaaucagaaccuugacuaccagauuggauauaucugcagcggcguguuuggggauaauccucggcccaaagacggagagggcucuuguaacccugugacagucgauggcgccgacggggugaagggauucuccuacaaauauggcaaugggguuuggauuggacgcacgaaguccaacagacugcggaaaggcuuugaaaugaucugggaccccaauggguggaccgauacagacucugauuucuccgugaagcaagacgucguggcgauuaccgauuggagcggcuacuccggaucuuuuguucagcauccggagcucacaggccuggacugcauccgcccuuguuucuggguggaacuugucagagggcugccccgggagaacaccacgaucuggacaagcggauccucuauuagcuucugcggcgucaauuccgauaccgccgacuggagcuggccugauggggcugaacuccccuuuaccaucgacaaguga

SEQ ID NO: 218210 - RNA, 1413 nt, Artificial Sequence
  derived and/or modified CDS sequence (opt5) from neuraminidase__InfluenzaA__BAF63058
augaaccccaaucagaagaucauuaccaucggcagcauuuccaucgccauugggaucaucucucugaugcuccaaauuggaaacaucauuagcaucugggcuucccacucuauucagacaggcagccagaaucauacggggaucugcaaccagagaauuaucaccuacgaaaauuccacaugggugaaccacaccuaugucaauaucaacaauacaaacguuguggccggaaaagacaagaccucugugacacuggcgggcaauagcucccuuugugcuauuagcgggugggccaucuacaccaaagauaacucuauucggaucggauccaagggcgacgucuucgugauucgcgagccuuuuaucagcugcucucaucuggaguguagaacguucuuucucacccaaggcgcccugcuuaaugauaaacacuccaacgggacaguuaaggaccggagcccguaucgcgcucugaugucuugcccccucggagaagccccuucccccuacaauagcaaguucgaguccguggcuuggucugccagcgcgugucaugauggcaugggguggcugaccaucggaauuuccggcccugacaacggggccgucgcugugcugaaauauaacggaaucauuacagaaaccaucaagagcuggaaaaagcggauucucagaacgcaggagucugagugcguuugugugaauggcuccugcuuuacaaucaugaccgauggccccagcaacgaagccgcuucuuacaaaaucuucaagauugagaaggggaaagucacaaagagcaucgaacugaaugccccuaacuuucacuaugaggaguguuccugcuacccggacaccggaaccgugaugugugugugccgcgauaauuggcacggcucuaacagacccugggucagcuucaauccuaaccuugacuaccagauuggguauaucugcuccggaguuuuuggcgauaauccccggccuaaagacggggaaggaagcuguaaccccgugacaguggauggcgcggacggcgucaagggguucucuuacaaauauggaaauggcguguggauugggcgcacgaaguccaacagacugcggaaaggauuugagaugguuugggacccgaauggcuggaccgauacagacagcgauuucucugugaagcaggacgucguggccaucaccgauugguccggguacagcggcuccuuuguucaacauccugaacucacaggacuggacugcauucgccccuguuucuggguggagcuugucagaggccugccuaaggaaaacaccacgaucuggacaucugggagcuccaucucuuucugcggagugaauagcgauaccgcuaacugguccuggcccgacggcgccgagcuccccuuuaccauugauaaauga

SEQ ID NO: 218211 - RNA, 1413 nt, Artificial Sequence; identical to SEQ ID NO: 213513
  derived and/or modified CDS sequence (opt5) from neuraminidase__InfluenzaA__BAF63065

SEQ ID NO: 218212 - RNA, 1413 nt, Artificial Sequence; identical to SEQ ID NO: 213513
  derived and/or modified CDS sequence (opt5) from neuraminidase__InfluenzaA__BAF63069

SEQ ID NO: 218213 - RNA, 1413 nt, Artificial Sequence; identical to SEQ ID NO: 213513
  derived and/or modified CDS sequence (opt5) from neuraminidase__InfluenzaA__BAF63079

SEQ ID NO: 218214 - RNA, 1413 nt, Artificial Sequence; identical to SEQ ID NO: 213513
  derived and/or modified CDS sequence (opt5) from neuraminidase__InfluenzaA__BAF63092

SEQ ID NO: 218215 - RNA, 1413 nt, Artificial Sequence; identical to SEQ ID NO: 213513
  derived and/or modified CDS sequence (opt5) from neuraminidase__InfluenzaA__BAF63098

SEQ ID NO: 218216 - RNA, 1413 nt, Artificial Sequence
  derived and/or modified CDS sequence (opt5) from neuraminidase__InfluenzaA__BAF63104
augaaccccaaucagaagaucauuaccaucggcagcauuuccaucgccauugggaucaucucucugaugcuccaagugggaauugucguuagcaucugggcuucccacucuauucagacaggcagccagaaccauacggggaucugcaaucagagaauuaucaccuacgagaacuccacaugggugaaucacaccuaugugaacauuaauaacacaaaugucguggccggaaaagacaagaccucuguugcgcuggcuggcaacagcucccuuuguagcaucucugggugggccaucuacacaaaagauaauuccauucggaucggaagcaagggcgacguguucgucauucgcgaaccuuuuaucucuugcucccaucuggaguguagaaccuucuuucucacgcaaggcgcccugcuuaacgauaaacacagcaaugggaccgugaaggaccggucuccguaucgcgcucugauguccugcccccucggagaagccccuagccccuacaacuccaaguucgagucuguugcuuggagcgccuccgcgugucaugauggcaugggguggcugacaauuggaaucagcggcccugacaauggggccguggcuguccugaaauauaacggaaucauuaccgaaacaaucaagucuuggaaaaagcggauucucagaacccaggaguccgagugcgugugugugaacggcagcugcuuuacgaucaugacagauggccccucuaauggggccgcuagcuacaaaauuuucaagaucgaaaagggacaggucaccaaauccguugagcugaacgccccuaauuuucacuaugaagaguguucuugcuacccggacacaggcaccgugaugugugugugccgcgauaacuggcacgggagcaauagacccugggucuccuucaaccagaaucuugacuaccaaaucggauauauuugcagcggcguguuuggggauaacccucggcccaaggacggaaaaggcucuuguaauccuguuaccguggauggcgcggacggggucaagggauucuccuacaaauauggcaacgggguguggaucggacgcacaaagagcaauagacugcggaaaggcuuugagaugauuugggaccccaacggguggacggauaccgacucugauuucuccguuaagcaggacguggucgccaucacagauuggagcggcuacuccggaucuuuugugcagcauccggaacucaccggccuggacugcauucgcccuuguuucugggucgagcuugugagagggcugccccgggaaaauacaaccaucuggacgagcggauccucuauuagcuucugcggcguugauuccgacacagcuaacuggagcuggccugauggggccgagcuccccuuuaccaucgacaaguga

SEQ ID NO: 218217 - RNA, 1413 nt, Artificial Sequence
  derived and/or modified CDS sequence (opt5) from neuraminidase__InfluenzaA__BAF63112
augaaccccaaucagaagaucauuaccaucggcagcauuuccaucgccauugggaucaucucucugaugcuccaagugggaaacauuaucagcauuugggcuucccacucuauccagacaggcagccagaaucauacggggauuugcaaccagagaaucauuaccuacgaaaauuccacaugggucaaccacaccuauguuaauaucaacaauacaaacgugguggccggaaaagacaagaccucugucgcgcuggcuggcaauagcucccuuuguagcaucucugggugggccauuuacacaaaagauaacuccauccggauuggaagcaagggcgacguguucguuauccgcgagccuuuuauuucuugcucccaucuggaguguagaaccuucuuucucacgcaaggcgcccugcuuaaugauaaacacagcaacgggaccgugaaggaccggucuccguaucgcgcucugauguccugcccccucggagaagccccuagccccuacaauuccaaguucgagucugucgcuuggagcgccuccgcgugucaugauggcaugggguggcugacaaucggaaucagcggcccugacaacggggccguggcuguucugaaauauaacggaauuaucaccgaaacaauuaagucuuggaaaaagagaauccuccggacccaggaguccgagugcgugugugucaauggcagcugcuuuacgauuaugacagauggccccucuaacggggccgcuagcuacaaaaucuucaagaucgaaaagggacaggugaccaaauccguggagcugaaugccccuaacuuucacuaugaagaguguucuugcuacccggacacaggcaccgucauguguguuugccgcgauaauuggcacgggagcaacagacccuggguguccuucaaucagaaccuugacuaccaaauuggauauaucugcagcggcguguuuggggauaauccucggcccaaggacggaaaaggcucuuguaacccugucaccguggauggcgcggacgggguuaagggauucuccuacaaauauggcaaugggguguggauuggacgcacaaagagcaacagacugcggaaaggcuuugagaugaucugggaccccaauggguggacggauaccgacucugauuucuccgucaagcaggacgugguugccauuacagauuggagcggcuacuccggaucuuuugugcagcauccggaacucaccggccuggacugcauccgcccuuguuucugggucgagcuugugagagggcugccccgggaaaacacaaccauuuggacgagcggauccucuaucagcuucugcggcgucgauuccgacacagcuaauuggagcuggccugauggggccgagcuccccuuuaccaucgacaaguga

SEQ ID NO: 218218 - RNA, 1413 nt, Artificial Sequence
  derived and/or modified CDS sequence (opt5) from neuraminidase__InfluenzaA__BAF63116
augaaccccaaucagaagaucauuaccaucggcagcauuuccaucgccauugggaucaucucucugaugcuccaagugggaaacauuaucagcauuugggcuucccacucuauccagacaggcagccagaaucauacggggauuugcaaccagagaaucauuaccuacgaaaauuccacaugggucaaccacaccuauguuaauaucaacaauacaaacgugguggccggaaaagacaagaccucugucgcgcuggcuggcaauagcucccuuuguagcaucucugggugggccauuuacacaaaagauaacuccauccggauuggaagcaagggcgacguguucguuauccgcgagccuuuuauuucuugcucccaucuggaguguagaaccuucuuucucacgcaaggcgcccugcuuaaugauaaacacagcaacgggaccgugaaggaccggucuccguaucgcgcucugauguccugcccccucggagaagccccuagccccuacaauuccaaguucgagucugucgcuuggagcgccuccgcgugucaugauggccugggguggcugacaaucggaaucagcggcccugacaacggggccguggcuguucucaaauauaacggaauuaucaccgaaacaauuaagucuuggaaaaagagaauccugcggacccaggaguccgagugcgugugugucaauggcagcugcuuuacgauuaugacagauggccccucuaacggggccgcuagcuacaaaaucuucaagaucgaaaagggacaggugaccaaauccguggagcuuaaugccccuaacuuucacuaugaagaguguucuugcuacccggacacaggcaccgucauguguguuugccgcgauaauuggcacgggagcaacagacccuggguguccuucaauccugaccuggauuaccagauuggauauaucugcagcggcguguuuggggacaacccccggccuaaggauggaaaaggcucuuguaaucccgucaccguggacggcgcggacgggguuaagggauucuccuacaaauauggcaacgggguguggauuggacgcacaaagagcaauagacuccggaaaggcuuugagaugaucugggauccgaacggguggacggacaccgauucugacuucuccgucaagcaagaugugguugccauuacagacuggagcggcuacuccggaucuuuugugcagcauccugaacugaccggccuugauugcauccgccccuguuucugggucgagcuggugagagggcucccucgggaaaauacaaccauuuggacgagcggauccucuaucagcuucugcggcgucgacuccgauacagcuaacuggagcuggcccgacggggccgagcugcccuuuaccaucgauaaguga

SEQ ID NO: 218219 - RNA, 1413 nt, Artificial Sequence
  derived and/or modified CDS sequence (opt5) from neuraminidase__InfluenzaA__BAF63124
augaaccccaaucagaagaucauuaccaucggcagcauuuccaucgccauugggaucaucucucugaugcuccaaauuggaaacaucauuagcaucugggcuucccacucuauucagacaggcagccagaaucauacggggaucugcaaccagagaauuaucaccuacgaaaauuccacaugggugaaccacaccuaugucaauaucaacaauacaaacguuguggccggaaaagacaagaccucugugacacuggcgggcaauagcucccuuuguagcauuucugggugggcuaucuacaccaaagauaacuccauucggaucggaagcaagggcgacgucuucgugauucgcgagccuuuuaucucuugcucccaucuggaguguagaacguucuuucucacccaaggcgcccugcuuaaugauaaacacagcaacgggacaguuaaggaccggucuccguaucgcgcccugauguccugcccccucggagaagcuccuagccccuacaauuccaaguucgagucuguggccuggagcgcuuccgccugucaugauggcaugggguggcugaccaucggaauuagcggcccugacaacggggcggucgccgugcugaaauauaacggaaucauuacagaaaccaucaagucuuggaaaaagcggauucucagaacgcaggaguccgagugcguuugugugaauggcagcugcuuuacaaucaugaccgauggccccucuaacggggcugccagcuacaaaaucuucaagauugaaaagggaaaagucacaaagucccgcgagcugaaugcuccuaacuuucacuaugaagaguguucuugcuacccggacaccggcaccgugaugugugugugcagagauaauuggcacgggagcaaccggcccugggucuccuucaauccuaaccuugacuaccagaucggauauauuugcagcggcguugugggggauaauccccgcccuaaagacggaaagggcucuuguaaccccgugacagccgauggcgcggacggggucaaaggauuuuccuacaaguauggcaaugggguguggaucggaagaacgaaaagcaaccggcugcgcaagggcuucgagaugauuugggacccgaauggguggaccgauacagacucugauuuuuccguuaagcaggacguggucgccaucaccgauuggagcggcuacuccggaucuuucgugcaacauccugaacucacaggccuggacugcauuagacccuguuuuuggguugagcuugugcgggggcugccucgcgaaaacaccacgaucuggacaagcggauccucuaucagcuucugcggcgucgauuccgacaccgcuaauuggagcuggcccgauggggccgagcuccccuucaccauugacaaauga

SEQ ID NO: 218220 - RNA, 1413 nt, Artificial Sequence; identical to SEQ ID NO: 213575
  derived and/or modified CDS sequence (opt5) from neuraminidase__InfluenzaA__BAF63132

SEQ ID NO: 218221 - RNA, 1413 nt, Artificial Sequence
  derived and/or modified CDS sequence (opt5) from neuraminidase__InfluenzaA__BAF63136
augaaccccaaucagaagaucauuaccaucggcagcauuuccaucgccauugggaucaucucucugaugcuccaaauuggaaacaucauuagcaucugggcuucccacucuauucagacaggcagccagaaucauacggggaucugcaaccagagaauuaucaccuacgaaaauuccacaugggugaaccacaccuaugucaauaucaacaauacaaacguuguggccggaaaagacaagaccucugugacacuggcgggcaauagcucccuuuguagcauuucugggugggcuaucuacaccaaagauaacuccauucggaucggaagcaagggcgacgucuucgugauucgcgagccuuuuaucucuugcucccaucuggaguguaaaacguucuuucucacccaaggcgcccugcuuaaugauaagcacagcaacgggacaguuaaggacagaucuccguaucgggcccugauguccugcccccucggagaagcuccuagccccuacaauuccaaauucgagucuguggccuggagcgcuuccgccugucaugauggcaugggguggcugaccaucggaauuagcggcccugacaacggggcggucgccgugcugaaguauaacggaaucauuacaggcaccaucaaaucuuggaagaaacagauucuccgcacgcaggaauccgagugcguuuguaugaauggcagcugcuuuacaaucaugaccgaugggcccucuaacggagcugccagcuacaagaucuucaagauugagaaaggcaaggugacaaaauccaucgaacugaaugcuccuaacuuucacuaugaggaauguucuugcuacccggacaccgggaccgucaugugugugugcagagauaauuggcacggaagcaaccggcccuggguguccuucaaucagaaccuugacuaccaaauuggcuauaucugcagcggggucuuuggagauaauccucgccccaaggacggcgagggcucuuguaacccuguuacaguggauggggccaauggagugaaaggcuucuccuacaaguaugggaacggagucuggauuggcagaacgaaaagcaaucggcugcgcaagggguuugagaugaucugggaccccaacggcuggaccaauacagacucugauuucuccgugaagcaggacguuguggcgauuaccgauuggagcggauacuccggcucuuuuguccagcauccggaacucacagggcuggacugcaucagaccuuguuucuggguggagcuuguucggggacugccccgcgaaaacaccacgaucuggacaagcggcuccucuauuagcuucugcggggugaacuccgauaccgccaauuggagcuggccugacggagcugagcuccccuuuaccaucgauaaauga

SEQ ID NO: 218222 - RNA, 1350 nt, Artificial Sequence
  derived and/or modified CDS sequence (opt5) from neuraminidase__InfluenzaA__BAH24021
augaaccccaaucagaagaucauuaccaucggcagcauuugcauggugaucgggauugucucccugaugcuccaaaucggaaacaugguuucucugugggugagccacuccauccagacaggcaaucagcaucagguggagccuauuucuaacacgaauuuccuuaccgaaaaagccgucgcuagcgugacacuggccgggaacuccucucucuguccgaucagaggaugggcgguucacagcaaggacaauuccauucggaucggcagcaaaggggauguguuugucauucgcgagcccuucaucucuugcucccaucuggaauguagaaccuuuuuccuuacacaaggagcucugcucaacgacaagcacagcaauggcaccgugaaagaucggucuccucaucgcacacugauguccugccccguuggcgaggccccuagccccuacaacucuagauuugaauccguggccuggagcgcuuccgccugucacgacgggaccucuuggcugacgauuggaaucagcggcccugauaauggggcugucgccgugcucaaguauaacggaaugaucaccgacacaauuaaguccuggcggaauaacauccugcgcacccaggagagcgagugcgcgugugugaauggcucuugcuucacagucaugaccgaugggccguccaacggacaggccagcuacaaaauuuuuaagauggaaaaaggcaagguugugaaaucuguggagcuugacgcucccaacuaucacuacgaagaguguagcugcuauccugaugccggcgagaucacgugugucugcagagacaauuggcauggguccaaccggcccugggugucuuucaaucagaaccuggaauaccaaauuggauauaucugcagcggcguuuuuggggauaauccucgccccaacggaggcacaggguccuguggaccggugagcccuaauggcgcuuacggcgucaagggguucucuuuuaaguacggaaacggcguguggaucgggagaaccaaaucccccagcucucgguccggauucgagaugauuugggacccuaauggcuggacagaaaccgauagcuccuuuucuguuaagcaggacaucguggccauuaccgacuggagcggguauuccggcucuuucguccagcaccccgagcucacaggacuggauugcauccgccccuguuucuggguggaacuuauuagaggccggccuaaagagagcacgaucuggaccuccgggagcucuaucuccuuuugcggagucaacagcgacacagugucuugguccuggccggauggcgcggagcugcccuucaccauugacaaguga

SEQ ID NO: 218223 - RNA, 1410 nt, Artificial Sequence; identical to SEQ ID NO: 208965
  derived and/or modified CDS sequence (opt5) from neuraminidase__InfluenzaA__BAH95825

SEQ ID NO: 218224 - RNA, 1410 nt, Artificial Sequence; identical to SEQ ID NO: 208800
  derived and/or modified CDS sequence (opt5) from neuraminidase__InfluenzaA__BAH95826

SEQ ID NO: 218225 - RNA, 1410 nt, Artificial Sequence
  derived and/or modified CDS sequence (opt5) from neuraminidase__InfluenzaA__BAJ07994
augaaccccaaucagaagaucaccacaauuggcagcaucugcauggugauugggaucgucucccugaugcuccaaauuggaaacaucaucucuauuuggguuagccacuccauccagacgggcaaucagcaucaggccgagccuuguaaccaaucuauuaucaccuacgaaaauaacacaugggugaaucagaccuaugugaacauuagcaauacaaacuuccugaccgagaaagcugucgccuccgugacacuugcgggaaauucuagccugugcccgaucuccgggugggcuguuuacagcaaggacaacggcauuagaaucgggucuaaaggagauguguuugucauccgggaacccuucauuuccuguagccaccucgagugccgcaucuuuuuccugacccagggcgcccuucugaaugacaagcauucuaacggcacggugaaagauagauccccucaccggacccucaugagcugucccguuggggaagccccuucucccuauaauucccgcuuugagagcguggcuugguccgccucugcuugccaugacggaacaagcuggcugaccauuggcaucuccgggccugauaacggagccgucgcggugcugaaguacaacggcauuaucacagacaccaucaagagcuggagaaauaacauuaugcggacgcaggagucugaaugugccugcgugaauggguccuguuucacagucaugaccgauggaccgagcaacggccaagcuagcuauaaaaucuuucgcauugagaagggcaaaguugugaagucugccgaacucaaugcucccaacuaccacuaugaggagugcuccuguuacccugacgccggggaaaucacaugcgugugcagagauaauuggcacggaucuaaccggcccugggucagcuucaaucagaaccuggaguaccgcauuggcuauaucuguuccgggguguuuggagacaauccuagacccaacgauggcaccgggagcugcggaccgguuucuccuaaaggcgcguacggcaucaagggguucuccuuuaaguauggaaauggcguguggauugggcggaccaaaagcacaaacucucgcuccggauucgaaaugaucugggaccccaauggcuggacggggaccgauagcaacuuuuccgucaagcaggacauuguggccaucacagacuggucuggcuacagcggauccuucguucagcauccugagcuuaccggccuggauuguauuagacccugcuucuggguggaacucauccgggggcgccccaaagagucuacaauuuggaccagcggauccagcaucucuuuuuguggcgucaacuccgacacggugggguggagcuggccugauggagcugagcugccguucacaaucgacaaguga

SEQ ID NO: 218226 - RNA, 1350 nt, Artificial Sequence
  derived and/or modified CDS sequence (opt5) from neuraminidase__InfluenzaA__BAK23415
augaaccccaaucagaagaucauuaccaucggcagcgugugcaugauuaucgggauugucucccugaugcuccaaaucggaaacaugaucucuauuuggguuggccacagcauccagacagggaaucagugucaugccgagccuauuuccaacacgaaauucccgaccgaaaaggcugccgcgucugugacacuggcuggaaauagcucccuuugccccaucucuggcugggccguguacagcaaagacaacuccauuagaaucgggagccggggagaugucuuugugauucgcgagccuuucaucucuuguucccaccuggaaugcagaaccuuuuuccucacacagggcgcccugcuuaaugacaagcauagcaacggcaccguuaaagaucggucuccccaccgcacacugauguccuguccugugggggaggcucccagcccuuauaauucuagauuugaauccgucgccuggagcgcuuccgccugccaugacggaaccucuuggcucacgaucggcauuagcgggccggauaacggagcgguggccguucugaaguacaauggcaucauuaccgacacaaucaaguccuggcggaacaauauucugcgcacccaagagagcgagugugcuugcaucaacgggucuuguuucacagugaugaccgauggacccuccagcggccaggccucuuauaaaaucuuuaagauggaaaaaggcaaggucgugaaaagcguggagcucgacgcuccuaauuaccacuaugaagagugcuccuguuaccccgaugccggggagauuacgugcgucugcagagacaacuggcacggaucuaaccggccuuggguuagcuucaaucagaaccuggaauaucagaucggcuacauuuguuccgggguguuuggagauaauccccgcccgaacgacggcacagggagcugcggaccugugucucccaauggcgcguacggcgucaagggguucuccuuuaaguauggaaacggcguguggaucgggagaaccaaaagcacaaauucucgguccggauucgagaugauuugggauccuaacggcuggaccgggaccgacagcuccuuuucuguuaagcaagacaucguggccaucacagauuggagcggcuacuccggaucuuucguccagcaucccgaacuuacgggccuggacuguauucgccccugcuucuggguggagcucaucagagggcggccuaaagaaagcaccauuuggacauccggaagcucuaucuccuuuuguggcguuaauagcgauaccgugucuugguccuggccggacggggcugagcugcccuucacaauugauaaguga

SEQ ID NO: 218227 - RNA, 1350 nt, Artificial Sequence
  derived and/or modified CDS sequence (opt5) from neuraminidase__InfluenzaA__BAK23416
augaaccccaaucagaagaucauuaccaucggcagcauuugcauggugaucgggauugucucccugaugcuccaaaucggaaacaugaucucuauuuggguuagccacuccauccagacaggcaaucagugucaggccgagccuauuucuaacacgaaauuccugaccgaaaaggcuguggccagcgugacacuugcgggaaauuccucucugugcccgaucagcgggugggcugucuacuccaaagacaacagcauuagaaucggcucucgcggggauguguuuguuauucgggagcccuucaucuccuguagccaucucgaaugcagaaccuuuuuccugacacaaggagcccuucugaaugacaagcacucuaacggcaccgugaaagaucgguccccucaucgcacacucaugagcugucccgucggcgaggccccuucucccuauaauuccagauuugaaagcguggcuugguccgccucugcuugccacgacgggaccagcuggcugacgaucggaauuuccggcccugauaacggggccguugcggugcugaaguacaauggaaucauuaccgacacaaucaagagcuggcggaacaauauucuccgcacccaggagucugagugugccugcgucaacggcuccuguuucacagugaugaccgaugggccgagcucuggacaggcuagcuauaaaaucuuuaagauggaaaaaggcaagguggucaaauccguugagcuggacgcccccaauuaccauuaugaagagugcucuuguuacccugaugcuggcgagaucacgugcgugugcagagacaacuggcacgggagcaaccggcccuggguguccuucaaucagaaccuugaauaucaaauuggauacaucuguagcggcgucuuuggggauaauccucgccccaacgacggaacaggcucuugcgggccggccuccccuaauggagcguacggcgugaagggcuucagcuuuaaguaugggaacggaguuuggauuggcagaaccaaaucuacaaauucccggagcggguucgagaugaucugggaucccaacggauggaccggcaccgacuccucuuuuagcgugaagcaggacauugucgccaucacagauugguccggguacucuggcagcuucgugcagcacccugaacugacgggacucgacuguauccgccccugcuucuggguugagcugauuagaggccggcccaaagaauccaccaucuggacaagcgggucuuccauuagcuuuuguggagucaauucugauaccguguccuggagcuggccugacggcgcugagcuuccguucacaaucgauaaguga

SEQ ID NO: 218228 - RNA, 1350 nt, Artificial Sequence
  derived and/or modified CDS sequence (opt5) from neuraminidase__InfluenzaA__BAK23417
augaaccccaaucagaagaucauuaccaucggcagcauuugcauggugaucgggauugucucccugaugcuccaaaucggaaacaugaucucuauuuggguuagccacuccauccagacaggcaaucagugucagucugagccuauuagcaacacgaaauuccugaccgaaaaggccguggcuuccgugacacuugccggaaauucuagccugugcccgaucuccgggugggcggucuacagcaaagacaacucuauuagaaucggcucccgcggggauguguuuguuauucgggagcccuucaucagcuguucucaucucgaaugcagaaccuuuuuccugacacaaggagcccuucugaaugacaagcacuccaacggcaccgugaaagaucggagcccucaucgcacacucaugucuugucccgucggcgaggcuccuucccccuauaauagcagauuugaauccguggccuggucugcuagcgccugccacgacgggaucuccuggcugaccauuggaaucagcggcccugauaacggggcuguugccgugcugaaguacaauggaauuaucacggacaccauuaagucuuggcggaacaauauccuccgcacacaggaguccgagugugcgugcgucaacggcagcuguuucaccgugaugacagaugggccgucuagcggacaggccuccuauaaaaucuuuaagauggaaaaaggcaagguggucaaaucuguugagcuggacgcucccaauuaccauuaugaagagugcagcuguuacccugaugccggcgagauuaccugcgugugcagagacaacuggcacggguccaaccggcccugggugagcuucaaucagaaccuugaauaucaaaucggauacauuuguucuggcgucuuuggggauaauccucgccccaacgacggaacgggcuccugcgggccggugagcccuaauggagcuuacggcguuaagggcuucucuuuuaaguaugggaacggaguguggaucggcagaacaaaauccaccaauagccgguccggguucgagaugauuugggaucccaacggauggacaggcaccgacucuagcuuuuccgucaagcaggacaucguggccaucaccgauuggucuggguacagcggcuccuucguucagcacccugaacugacaggacucgacuguauucgccccugcuucuggguggagcugaucagaggccggcccaaagaaagcacgauuuggaccucuggguccagcaucucuuuuuguggagucaauggcgauacaguguccuggagcuggccugacggggcggagcuuccguucaccauugauaaguga

SEQ ID NO: 218229 - RNA, 1350 nt, Artificial Sequence
  derived and/or modified CDS sequence (opt5) from neuraminidase__InfluenzaA__BAK23418
augaaccccaaucagaccaucauuacaaucggcagcauuugcauggugaucgggauugucucccugaugcuccaaaucggaaacaugaucucuauuuggguuagccacuccauccagacgggcaaucagugucaggccgagccuauuucuaacaccaaguuccugacagaaaaagcuguggccagcgugacccuugcgggaaauuccucucugugcccgaucagcgggugggcugucuacuccaaggacaacagcauuagaaucggcucucgcggggauguguuuguuauucgggagcccuucaucuccuguagccaucucgaaugcagaacauuuuuccugacccaaggagcccuucugaaugacaaacacucuaacggcacagugaaggaucgguccccucaucgcacccucaugagcugucccgucggcgaggccccuucucccuauaauuccagauuugaaagcguggcuugguccgccucugcuugccacgacgggacgagcuggcugaccaucggaauuuccggcccugauaacggggccguugcggugcugaaauacaauggaaucauuacagacaccaucaagagcuggcggaacaauauucuccgcacacaggagucugagugugccugcgucaacggcuccuguuucaccgugaugacggaugggccgagcucuggacaggcuagcuauaagaucuuuaaaauggaaaagggcaaaguggucaaguccguugagcuggacgcccccaauuaccauuaugaagagugcucuuguuacccugaugcuggcgagaucacaugcgugugcagagacaacuggcacgggagcaaccggcccuggguguccuucaaucagaaccuugaauaucaaauuggauacaucuguagcggcgucuuuggggauaauccucgccccaacgacggaaccggcucuugcgggccgguguccccuaauggagccuacggcguuaaaggcuucagcuuuaaguaugggaacggaguguggauuggcagaacaaagucuaccaauucccggagcggguucgagaugaucugggaucccaacggauggaccggcacagacuccucuuuuagcgucaaacaggacauuguggcgaucacggauugguccggguacucuggcagcuucguucagcacccugaacugaccggacucgacuguauccgccccugcuucuggguggagcugauuagaggccggcccaaggaauccacaaucuggaccagcgggucuuccauuagcuuuuguggagucaauucugauacaguguccuggagcuggccugacggcgccgagcuuccguucaccaucgauaaauga

SEQ ID NO: 218230 - RNA, 1350 nt, Artificial Sequence; identical to SEQ ID NO: 208649
  derived and/or modified CDS sequence (opt5) from neuraminidase__InfluenzaA__BAK23420

SEQ ID NO: 218231 - RNA, 1350 nt, Artificial Sequence; identical to SEQ ID NO: 208649
  derived and/or modified CDS sequence (opt5) from neuraminidase__InfluenzaA__BAK23421

SEQ ID NO: 218232 - RNA, 1350 nt, Artificial Sequence
  derived and/or modified CDS sequence (opt5) from neuraminidase__InfluenzaA__BAK23422
augaaccccaaucagaagaucauuaccaucggcagcgugugcauggucauugggaucguuucccugaugcuccaaauuggaaacaugaucucuaucugggugggccacagcauucagacagggaaucagugucaugccgagccuaucuccaacacgaaauucccgaccgaaaaggcugccgcgucugugacacuggcuggaaauagcucccuuugccccauuucuggcugggccgucuacagcaaagacaacuccaucagaauugggagccggggagauguguuuguuauccgcgagccuuucauuucuuguucccaccuggaaugcagaaccuuuuuccucacacagggcgcccugcuuaaugacaagcauagcaacggcaccgugaaagaucggucuccccaccgcacacugauguccuguccugucggggaggcucccagcccuuauaauucuagauuugaauccguggccuggagcgcuuccgccugccaugacggaaccucuuggcucacgaucggcaucagcgggccggauaacggagcgguugccgugcugaaguacaauggcauuaucaccgacacaauuaaguccuggcggaacaauauccugcgcacccaagagagcgagugugcuugcgucaacgggucuuguuucacagugaugaccgauggacccuccagcggccaggccucuuauaaaauuuuuaagauggaaaaaggcaagguggucaaaagcguugagcucgacgcuccuaauuaccacuaugaagagugcuccuguuaccccgaugccggggagaucacgugcgugugcagagacaacuggcacggaucuaaccggccuugggugagcuucaaucagaaccuggaauaucagaucggcuacauuuguuccggggucuuuggagauaauccccgcccgaacgacggcacagggagcugcggaccugugucucccaauggcgcguacggcguuaagggguucuccuuuaaguauggaaacggcguguggaucgggagaaccaaaagcacaaauucucgguccggauucgagaugauuugggauccuaacggcuggaccgggaccgacagcuccuuuucugucaagcaagacaucguggccauuacagauuggagcggcuacuccggaucuuucguucagcaucccgaacuuacgggccuggacuguauccgccccugcuucuggguggagcucaucagagggcggccuaaagaaagcaccauuuggacauccggaagcucuaucuccuuuuguggcgucaauagcgauaccgugucuugguccuggccggacggggcugagcugcccuucacaauugauaaguga

SEQ ID NO: 218233 - RNA, 1350 nt, Artificial Sequence
  derived and/or modified CDS sequence (opt5) from neuraminidase__InfluenzaA__BAK23423
augaaccccaaucagaagaucauuaccaucggcagcauuugcauggugaucgggauugucucccugaugcuccaaaucggaaacaugaucucuauuuggguuagccacuccauccagacaggcaaucagugucaggccgagccuauuucuacgaccaaauuccugacagaaaaggcuguggccagcgugacccuugcggggaacuccucucugugcccgaucagcggaugggcugucuacuccaaagacaauagcauuagaaucggcccccgcggggauguguuuguuauucgggagccuuucaucucuuguucccaucucgaaugcagaacauuuuuccugacccaaggagcccuucugaacgacaagcacagcaauggcacagugaaagaucggucuccccaucgcacccucauguccuguccugucggcgaggcccccagcccuuauaacucuagauuugaauccguggcuuggagcgccuccgcuugccacgacgggaucucuuggcugacgauuggaaucagcggcccggauaauggggccguugcggugcugaaguacaacggaauuaucaccgacacaauuaaguccuggcggaauaacauccuccgcacccaggagagcgagugugccugcgucaauggcucuuguuucacagugaugaccgaugggcccuccagcggacaggcuucuuauaaaaucuuuaagauggaaaaaggcaagguggucaaaagcguugagcuggacgccccuaacuaccauuaugaagagugcuccuguuaccccgaugcuggcgagauuacgugcgugugcagagacaauuggcacgggucuaaccggccuugggugagcuucaaccagaaucuugaauaucaaaucggauacauuuguuccggcgucuuuggggauaacccccgcccgaaugacggaacaggcagcugcgggccugugucucccaacggagccuacggcguuaagggcuucuccuuuaaguaugggaauggaguguggaucggcagaaccaaaagcacaaacucucgguccggguucgagaugauuugggauccuaauggauggaccggcaccgacagcuccuuuucugucaagcaggacaucguggcgaucacagauuggagcggguacuccggcucuuucguucagcaccccgaacugacgggacucgacuguauucgccccugcuucuggguggagcugaucagaggccggccuaaagaaagcaccauuuggacauccgggagcucuaucuccuuuuguggagucaacagcgauaccgugucuugguccuggccggacggcgccgagcuucccuucacaauugauaaguga

SEQ ID NO: 218234 - RNA, 1350 nt, Artificial Sequence
  derived and/or modified CDS sequence (opt5) from neuraminidase__InfluenzaA__BAK23424
augaaccccaaucagaagaucauuaccaucggcagcauuugcauggugaucgggauugucucccugaugcuccaaaucggaaacaugaucucuauuuggguuagccacuccauccagacaggcaaucagugucagggggagccuauuucuaacacgaaauuccugaccgaaaaggccguggcuagcgugacacuugccggaaauuccucucugugcccgaucagcggcugggcggucuacuccaaagacaacagcauuagaaucgggucucggggagauguguuuguuauucgcgagcccuucaucuccuguagccaucucgaaugcagaaccuuuuuccugacacaaggcgcccuucugaaugacaagcacucuaacggcaccgugaaagaucgguccccucaucgcacacucaugagcugucccgucggggaggcuccuucucccuauaauuccagauuugaaagcguggccugguccgcuucugccugccacgacggaaccagcuggcugacgaucggcauuuccgggccugauaacggagcuguugccgugcugaaguacaauggcaucauuaccgacacaaucaagagcuggcggaacaauauucuccgcacccaggagucugagugugcgugcgucaacggguccuguuucacagugaugaccgauggaccgagcucuggccaggccagcuauaaaaucuuuaagauggaaaaaggcaagguggucaaauccguugagcuggacgcucccaauuaccauuaugaagagugcucuuguuacccugaugccggggagaucacgugcgugugcagagacaacuggcacggaagcaaccggcccuggguguccuucaaucagaaccuugaauaucaaauuggcuacaucuguagcggggucuuuggagauaauccucgccccaacgacggcacagggucuugcggaccgguguucuccaauggcgcuuacggcguuaagggguuuagcuucaaguauggaaacggcguguggauugggagaaccaaaucuacaaauucccggagcggauuugagaugaucugggauccuaacggcuggaccgggaccgacuccucuuucagcggcaagcaggacauugucgccaucacagauugguccggauacucuggcagcuucgugcagcaccccgaacugacggggcucgacuguauccgcccuugcuuuuggguugagcugauuagaggacggcccaaagaauccaccaucuggacaagcgggucuuccauuagcuucuguggcgucaauucugauaccguguccuggagcuggcccgacggagcggagcuuccuuuuacaaucgauaaguga

SEQ ID NO: 218235 - RNA, 1350 nt, Artificial Sequence
  derived and/or modified CDS sequence (opt5) from neuraminidase__InfluenzaA__BAK23425
augaaccccaaucagaagaucauuaccaucggcagcauuugcauggugaucgggauugucucccugaugcuccaaaucggaaacaugaucucuauuuggguuagccacuccauccagacaggcaaucagugucaggccgagccuauuucuaacacgaaauuccugaccgaaaaggcuguggccagcgugacacuugcgggaaauuccucucugugcccgaucagcgggugggcugucuacuccaaagacaacagcauuagaaucggcucucgcggggauguguuuguuauucgggagcccuucaucuccuguagccaucucgaaugcagaaccuuuuuccugacacaaggagcccuucugaaugacaagcacucuaacggcaccgugaaagaucgguccccucaucgcacacucaugagcugucccgucggcgaggccccuucucccuauaauuccagauuugaaagcguggcuugguccgccucugcuugccacgacgggaucagcuggcugaccauuggaaucuccggcccugauaacggggccguugcggugcugaaguacaauggaauuaucacggacaccauuaagagcuggcggaacaauauccuccgcacacaggagucugagugugccugcgucaacggcuccuguuucaccgugaugacagaugggccgagcucuggacaggcuagcuauaaaaucuuuaagauggaaaaaggcaagguggucaaauccguugagcuggacgcccccaauuaccauuaugaagagugcucuuguuacccugaugcuggcgagauuaccugcgugugcagagacaacuggcacgggagcaaccggcccuggguguccuucaaucagaaccuugaauaucaaaucggauacauuuguagcggcgucuuuggggauaauccucgccccaacgacggaacgggcucuugcgggccgguguccccuaauggagccuacggcguuaagggcuucagcuuuaaguaugggaacggaguguggaucggcagaacaaaaucuaccaauucccggagcggguucgagaugauuugggaucccaacggauggaucggcacagacuccucuuuuagcgucaagcaggacaucguggcgauuaccgauugguccggguacucuggcagcuucguucagcacccugaacugaccggacucgacuguauccgccccugcuucuggguggagcugauuagaggccggcccaaagaauccacaaucuggacgagcgggucuuccauuagcuuuuguggagucaauucugauaccguguccuggagcuggccugacggcgccgagcuuccguucacaaucgauaaguga

SEQ ID NO: 218236 - RNA, 1350 nt, Artificial Sequence
  derived and/or modified CDS sequence (opt5) from neuraminidase__InfluenzaA__BAK23426
augaaccccaaucagaagaucauuaccaucggcagcauuugcauggugaucgggauugucucccugaugcuccaaaucggaaacaugaucucuauuuggguuagccacuccauccagacaggcaaucagugucaggccgagccuauuucuaacacgaaauucuuuaccgaaaaggcuguggccagcgugacacuggcgggaaauuccucucuuugcccgaucagcgggugggcugucuacuccaaagacaacagcauuagaaucggcucucgcggggauguguucauuauccgggagcccuuuaucuccuguagccaucuggaaugcagaaccuucuuucucacacaaggagcccugcuuaaugacaagcacucuaacggcaccguuaaagaucgguccccucaucgcacacugaugagcugucccgugggcgaggccccuucucccuauaauuccagauucgaaagcgucgcuugguccgccucugcuugccacgacgggaccagcuggcucacgauuggaaucuccggcccugauaacggggccguggcgguucugaaguacaauggaauuaucaccgacacaauuaagagcuggcggaacaauauccugcgcacccaggagucugagugugccugcgugaacggcuccuguuuuacagucaugaccgaugggccgagcucuggacaggcuagcuauaaaaucuucaagauggaaaaaggcaagguggugaaauccgucgagcucgacgcccccaauuaccauuaugaagagugcucuuguuacccugaugcuggcgagauuacgugcguuugcagagacaacuggcacgggagcaaccggcccuggguguccuuuaaucagaaccuggaauaucaaaucggauacauuuguagcggcguguucggggauaauccucgccccaacgacggaacaggcucuugcgggccggucuccccuaauggagccuacggcgugaagggcuuuagcuucaaguaugggaacggaguuuggaucggcagaaccaaaucuacaaauucccggagcggguuugagaugauuugggaucccaacggauggaccggcaccgacuccucuuucagcgugaagcaggacaucgucgcgaucacagauugguccggguacucuggcagcuucgugcagcacccugaacuuacgggacuggacuguauucgccccugcuuuuggguugagcucaucagaggccggcccaaagaauccaccauuuggacaagcgggucuuccaucagcuucuguggagucaauucugauaccguguccuggagcuggccugacggcgccgagcugccguuuacaauugauaaguga

SEQ ID NO: 218237 - RNA, 1350 nt, Artificial Sequence; identical to SEQ ID NO: 218235
  derived and/or modified CDS sequence (opt5) from neuraminidase__InfluenzaA__BAK23427

SEQ ID NO: 218238 - RNA, 1350 nt, Artificial Sequence
  derived and/or modified CDS sequence (opt5) from neuraminidase__InfluenzaA__BAK23428
augaaccccaaucagaagaucauuaccaucggcagcauuugcauggugaucgggauugucucccugaugcuccaaaucggaaacaugaucucuauuuggguuagccacuccauccagacaggcaaucagugucaggccgagccuauuucuaacacgaaauuccugaccgaaaaggcuguggccagcgugacacuugcgggaaauuccucucugugcccgaucagcgggugggcugucuacuccaaagacaacagcauuagaaucggcucucgcggggauguguuuguuauucgggagcccuucaucuccuguagccaucucgaaugcagaaccuuuuuccugacacaaggagcccuucugaaugacaagcacucuaacggcaccgugaaagaucgguccccucaucgcacacucaugagcugucccgucggcgaggccccuucucccuauaauuccagauuugaaagcguggcuugguccgccucugcuugccacgacgggaccagcuggcugacgaucggaauuuccggcccugauaacggggccguugcggugcugaaguacaauggaaucauuaccgacacaaucaagagcuggcggaacaauauucuccgcacccaggagucugagugugccugcgucaacggcuccuguuucacagugaugaccgaugggccgagcucuggacaggcuagcuauaaaaucuuuaagauggaaaaaggcaagguggucaaauccguugagcuggacgcccccaauuaccauuaugaagagugcucuuguuacccugaugcuggcgagaucacgugcgugugcagagacaacuggcacgggagcaaccggcccuggguguccuucaaucagaaccuugaauaucaaauuggauacaucuguagcggcgucuuuggggauaauccucgccccaacgacggaacaggcucuugcgggccgguguccccuaauggagccuacggcguuaagggcuucagcuuuaaguaugggaacggaguguggauuggcagaaccaaaucuacaaauucccggagcggguucgagaugaucugggaucccaacggauggaccggcaccgacuccucugucagcgugaagcaggacauuguugcgaucacagauugguccggguacucuggcagcuuugugcagcacccugaacugacgggacucgacuguauccgccccugcuucagagucgagcugauucggggccgccccaaagaauccaccaucuggacaagcgggucuuccauuagcuucuguggagucaauucugauaccguguccuggagcuggccugacggcgccgagcuuccguuuacaaucgauaaguga

SEQ ID NO: 218239 - RNA, 1350 nt, Artificial Sequence; identical to SEQ ID NO: 218235
  derived and/or modified CDS sequence (opt5) from neuraminidase__InfluenzaA__BAK23429

SEQ ID NO: 218240 - RNA, 1350 nt, Artificial Sequence
  derived and/or modified CDS sequence (opt5) from neuraminidase__InfluenzaA__BAK23430
augaaccccaaucagaagaucauuaccaucggcagcauuugcauggugaucgggauugucucccugaugcuccaaaucggaaacaugaucucuauuuggguuagccacuccauccagacaggcaaucagugucaggccgagccuauuucuaacacgaaauuccugaccgaaaaggcuguggccagcgugacacuugcgggaaauuccucucugugcccgaucagcgggugggcugucuacuccaaagacaacagcauuagaaucggcucucgcggggauguguuuguuauucgggagcccuucaucuccuguagccaucucgaaugcagaaccuuuuuccugacacaaggagcccuucugaaugacaagcacucuaacggcaccgugaaagaucgguccccucaucgcacacucaugagcugucccgucggcgaggccccuucucccuauaauuccagauuugaaagcguggcuugguccgccucugcuugccacgacgggaucagcuggcugaccauuggaaucuccggcccugauaacggggccguugcggugcugaaguacaauggaauuaucacggacaccauuaagagcuggcggaacaauauccuccgcacacaggagucugagugugccugcgucaacggcuccuguuucaccgugaugacagaugggccgagcucuggacaggcuagcuauaaaaucuuuaagauggaaaaaggcaagguggucaaauccguugagcuggacgcccccaauuaccauuaugaagagugcucuuguuacccugaugcuggcgagauuaccugcgugugcagagacaacuggcacgggagcaaccggcccuggguguccuucaaucagaaccuugaauaucaaaucggauacauuuguagcggcgucuuuggggauaauccucgccccaacgacggaacgggcucuugcgggccgguguccccuaauggagccuacggcguuaagggcuucagcuuuaaguaugggaacggaguguggaucggcagaacaaaaucuaccaauucccggagcggguucgagaugauuugggaucccaacggauggaucggcacagacuccucuuuuagcgucaagcaggacaucguggcgauuaccgauugguccggguacucuggcagcuucguucagcacccugaacugaccggacucgacuguaugcgccccugcuucuggguggagcugaucagaggccggcccaaagaauccacaauuuggacgagcgggucuuccaucagcuuuuguggagucaauucugauaccguguccuggagcuggccugacggcgccgagcuuccguucacaauugauaaguga

SEQ ID NO: 218241 - RNA, 1350 nt, Artificial Sequence
  derived and/or modified CDS sequence (opt5) from neuraminidase__InfluenzaA__BAK23431
augaaccccaaucagaagaucauuaccaucggcagcauuugcauggugaucgggauugucucccugaugcuccaaaucggaaacaugaucucuauuuggguuagccacuccauccagacaggcaaucagugucaggccgagccuauuucuaacacgaaauuccugaccgaaaaggcuguggccagcgugacacuugcgggaaauuccucucugugcccgaucagcggaugggcugucuacuccaaagacaacagcauuagaaucggcucucgcggggauguguuuguuauucgggagcccuucaucuccuguagccaucucgaaugcagaaccuuuuuccugacacaaggagcccuucugaaugacaagcacucuaacggcaccgugaaagaucgguccccucaucgcacacucaugagcugucccgucggcgaggccccuucucccuauaauuccagauuugaaagcguggcuugguccgccucugcuugccacgacgggaccagcuggcugacgaucggaauuuccggcccugauaacggggccguugcggugcugaaguacaauggaaucauuaccgacacaaucaagagcuggcggaacaauauucuccgcacccaggagucugagugugccugcgucaacggcuccuguuucacagugaugaccgaugggccgagcucuggacaggcuagcuauaaaaucuuuaagauggaaaaaggcaagguggucaaauccguugagcuggacgcccccaauuaccauuaugaagagugcucuuguuacccugaugcuggcgagaucacgugcgugugcagagacaacuggcacgggagcaaccggcccuggguguccuucaaucagaaccuugaauaucaaauuggauacaucuguagcggcgucuuuggggauaauccucgccccaacgacggaacaggcucuugcgggccgguguccccuaauggagccuacggcguuaagggcuucagcuuuaaguaugggaacggaguguggauuggcagaaccaaaucuacaaauucccggagcggguucgagaugaucuggggacccaacggcuggaccgggaccgauuccucuuuuagcgucaagcaggacauuguggcgaucacagacugguccggcuacucugggagcuucguucagcacccugaacugacgggccucgauuguauccgccccugcuucuggguggagcugauuagagggcggcccaaagaauccaccaucuggacaagcggaucuuccauuagcuuuuguggcgucaauucugacaccguguccuggagcuggccugauggggccgagcuuccguucacaaucgacaaguga

SEQ ID NO: 218242 - RNA, 1350 nt, Artificial Sequence; identical to SEQ ID NO: 218235
  derived and/or modified CDS sequence (opt5) from neuraminidase__InfluenzaA__BAK23432

SEQ ID NO: 218243 - RNA, 1350 nt, Artificial Sequence; identical to SEQ ID NO: 218235
  derived and/or modified CDS sequence (opt5) from neuraminidase__InfluenzaA__BAK23433

SEQ ID NO: 218244 - RNA, 1410 nt, Artificial Sequence
  derived and/or modified CDS sequence (opt5) from neuraminidase__InfluenzaA__BAM65748
augaaccccaaucagaagaucauuaccaucggcagcgugucccugacaauuucuacgaucugcuucuuuaugcaaauugccauccucaucaccacagucacccugcacuucaaacaguacgaguuuaacagcccuccgaauaaccagguuaugcuuugugaacccacaauuaucgagagaaauauuaccgaaaucguguaucugacaaacaccacgauugagaaggaaaucugcccuaaacucgcugaguaccggaauugguccaagccccagugugacauuaccggguucgccccuuuuucuaaagauaacagcauccgccuguccgcgggaggcgacaucugggugacaagagagcccuaugucucuugcgauccugacaaguguuuccaauuugcucuugggcagggaaccacacugaauaacgugcauagcaaugauaccguucacgaccggacgccguaccgcacacuccugaugaacgaacugggcgugcccuuccaucucgggaccaagcaggucugcauugccugguccuccucuuccugucacgauggaaaagccuggcugcaugugugcguuacaggcgacgauaagaaugcuaccgccagcuuuaucuauaacggcagacuuguggacucuauugucuccuggagcaaaaagauccugcggacccaggagucugaaugugugugcauuaaugggacauguacgguggucaugaccgauggauccgcuagcggcaaagccgacacaaagauccucuucaucgaggaggggaagauuguucacaccuccacacugucuggaagcgcgcaacacguggaagagugcuccugcuacccucgcuaucccggcgugagaugugucugccgggauaacuggaaagggagcaaccgcccuaucguggacauuaauaucaaggacuacucuauuguuuccagcuacguguguucuggacuugucggcgauacccccagaaaaacggacagcuccucuagcucccauugccuggauccgaacaaugaagagggcgggcacggagugaagggcugggccuuugacgaugggaacgacguuuggaugggacggacaaucagcgaaaaaucucgccucggcuaugagaccuucaaggugaucgggggaugguccaauccuaacagcaaaucucagauuaauagacaggucaucguggauaugggcaaccgguccggcuacagcgggauuuuuagcgucgagggaaagucuuguaucaaucgcugcuucuauguggaacugauuagaggccggaaggacgagaccgaaguucuguggacaagcaacuccaucguggucuucugugggaccucuggaacauacggcacggggagcuggcccgauggcgcugacauuaaacucauguccaucuga

SEQ ID NO: 218245 - RNA, 1350 nt, Artificial Sequence
  derived and/or modified CDS sequence (opt5) from neuraminidase__InfluenzaA__BAM85817
augaaccccaaucagaagaucauuaccaucggcagcauuugcauggugacagggaucgucucccugaugcuccaaauuggaaacaugaucucuaucuggguuagccacuccauucauacgggcaaucagcaccagucugagccuaucagcaacaccaauuuccugacagaaaaagccguggcuuccgugaaacuugccgggaacucuagccuguguccgauuaauggaugggcggucuacuccaaggacaacagcaucagaauuggcucuaagggggauguguuuguuauccgggagcccuucauuuccugcagccaucucgaaugucgcaccuuuuuccugacacagggagcccuucugaaugacaaacacucuaacggcaccgugaaggauagauccccucaucggacacucaugagcugccccgucggcgaggcuccuucucccuauaauucccgcuuugaaagcguggccugguccgcuucugccugucacgacgggaccagcuggcugacgaucggaaucuccggcccugauaacggggcuguugccgugcugaaguacaauggaauuaucaccgacacaauuaaaagcuggagaaacaauauccuccggacccaagagucugagugcgcgugugucaacggcuccugcuucacagugaugaccgaugggccgagcaacggacaggccucucacaagauuuuuaaaauggaaaagggcaaaguggucaagagcguugagcuggacgcucccaauuaucauuacgaagaguguuccugcuauccuaacgccggcgagaucacgugugugugccgcgauaauuggcacgggucuaacagacccugggugagcuucaaucagaaccuugaauaccagaucggauauauuugcuccggcgucuuuggggacaauccucggcccaacgauggaacaggcagcugugggccggugucuuccaauggagcuuacggcguuaagggcuucagcuuuaaauacgggaacggaguguggaucggccgcaccaagucuacaaauuccagaagcggguucgagaugauuugggacccuaacggauggaccgaaaccgauuccucuuuuagcgucaaacaagacaucguggccauuacagacugguccggcuauucugggagcuucguucagcaucccgagcugacgggccucgauugcauccggccuuguuucuggguggaacugauccgcggaagacccaaggaguccaccauuuggacaagcgggucuuccaucagcuuuugcggcgucaauucugacaccgugggaugguccuggcccgauggcgcggagcuuccuuucacaauugacaaauga

SEQ ID NO: 218246 - RNA, 1350 nt, Artificial Sequence
  derived and/or modified CDS sequence (opt5) from neuraminidase__InfluenzaA__BAM85818
augaaccccaaucagaagaucauuaccaucggcagcauuugcauggugaucgggauugucucccugaugcuccaaaucggaaacaugaucucuauuuggguuagccacuccauccagacaggcaaucagcaucaggccgagccuauuagaaacacgaauuuccugaccgaaaacgcuguggccucugugacacuugcggggaauagcucccuguguccgauccggggaugggcuguccacucuaaagacaacagcauucgcaucggcuccaagggggauguguuuguuauuagagagcccuucaucagcugcucucaucucgaaugucggaccuuuuuccugacacaaggagcccuucugaaugacaaacacuccaacggcaccgugaaggaucgcagcccucauagaacacucaugucuugccccgucggcgaggccccuucccccuacaauagccgguuugaaucuguggcuugguccgccagcgcuugucacgacgggaccuccuggcugacgaucggaauuucuggcccugauaacggggccguugcggugcugaaauauaauggaaucauuaccgacacaaucaagagcuggcgcaacaauauucucagaacccaggaguccgagugcgccugugucaacggcagcugcuucacagugaugaccgaugggccgucuaacggacaggcuuccuacaagaucuuuaaaauggaaaagggcaaaguggucaagagcguugagcugaaugcccccaacuaucacuacgaagaguguucuugcuauccugacgcuggcgagaucauuugugugugccgggauaauuggcaugggagcaaccgccccuggguguccuucaaucagaaccuugaauaccaaaucggauauauuugcucuggcgucuuuggggacaauccuagacccaacgauggaacgggcagcugugggccgguguccccuaauggagccuacggcaucaaaggcuucagcuuuaaguacgggaacggaguuuggauuggccggacaaagucuaccaauucccgcagcggguucgagaugaucugggaccccaacggauggacaggcaccgauucuaauuuuuccgugaaacaggacaucgucgcgauuaccgacuggagcggguauuccggcucuuucgugcagcacccugaacugacaggacucgauugcaucagacccuguuucuggguugagcugauucggggccgccccaaggaaagcacgaucuggaccuccgggucuagcauuuccuuuugcggagugaacagcgacacagucucuugguccuggccugauggcgccgagcuuccguucaccaucgacaaauga

SEQ ID NO: 218247 - RNA, 1350 nt, Artificial Sequence
  derived and/or modified CDS sequence (opt5) from neuraminidase__InfluenzaA__BAM85819
augaaccccaaucagaagaucauuaccaucggcagcauuugcauggugaucgggauugucucccugaugcuccaaaucggaaacaugaucucuauuuggguuagccacuccauccagacaggcaaucagaaccagguggagccuauuaucaauacgaacuuccugaccgaaaaagccguggcuucuauuacacuugccgggaauagcucccuguguccgaucagaggaugggcgauucauucuaaggacaacagcauccggaucggcuccaaaggggaugucuuugugauucgcgagcccuucaucagcugcucucaccucgaauguagaaccuuuuuccugacacaaggagcccuucugaaugacaagcauuccaacggcaccguuaaagaucggagcccucaccgcacacucaugucuugccccgugggcgaggcuccuucccccuacaauagcagauuugaaucugucgccugguccgcuagcgccugucaugacgggaccuccuggcugacgauuggaaucucuggcccugauaacggggcuguggccguucugaaguauaauggaauuaucaccgacacaaucaagagcuggcggaacaauauucuccgcacccaggaguccgagugcgcgugugugaacggcagcugcuucacagucaugaccgaugggccgucugacggacaggccuccuacaaaaucuuuaagauggaaaaaggcaaggugauuaaaagcguggagcuggaugcucccaacuaucacuacgaagaguguucuugcuauccugacgccggcgagaucacgugugucugcagagauaauuggcacgggagcaaccggcccuggguuuccuucaaucagaaccuugaauaccaaauuggauauaucugcucuggcguguuuggggacaauccucgccccaacgauggaacaggcagcugugggccggugucccauaauggagcuuacggcgucaagggcuucagcuuuaaguacgggaacggaguguggaucggcagaaccaaaucuccuaauucccggagcggguucgagaugauuugggaccccaacggauggucugaaacagacuccagcuuuuccguuaagcaggauaucguggccauuaccgacuggucuggcuauagcggguccuucguccagcacccugagcugaccggccucgauugcauccgccccuguuucuggguggaacugauuagaggacggcccaaagagucuacaguuuggacgagcggcuccagcaucucuuuuugcgggguguccagcgacaccgucucuugguccuggccugauggagcggagcuuccguucacaauugacaaguga

SEQ ID NO: 218248 - RNA, 1350 nt, Artificial Sequence
  derived and/or modified CDS sequence (opt5) from neuraminidase__InfluenzaA__BAM85820
augaaccccaaucagaagaucauuaccaucggcagcauuugcauggugaucgggauugucucccugaugcuccaaaucggaaacaugaucucuauuuggguuagccacuccauccagacaggcaaucagcaucaggccgagccuauuucuaacacgaauuuccugaccgaaaaagcuguggccagcgugacacuugcggggaacuccucucuguguccgaucagaggaugggcuguccacagcaaggacaauuccauucggaucggcagcaaaggggauguguuuguuauucgcgagcccuucaucucuugcucccaucucgaauguagaaccuuuuuccugacacaaggagcccuucugaacgacaagcacagcaauggcaccgugaaagaucggucuccucaucgcacacucauguccugccccgucggcgaggccccuagccccuacaacucuagauuugaauccguggcuuggagcgccuccgcuugucacgacgggaccucuuggcugacgaucggaauuagcggcccugauaauggggccguugcggugcugaaguauaacggaaucauuaccgacacaaucaaguccuggcggaauaacauucuccgcacccaggagagcgagugcgccugugucaauggcucuugcuucacagugaugaccgaugggccguccaacggacaggcuagcuacaaaaucuuuaagauggaaaaaggcaagguggucaaaucuguugagcuggacgcccccaacuaucacuacgaagaguguagcugcuauccugaugcuggcgagaucacgugugugugcagagacaauuggcauggguccaaccggcccugggugucuuucaaucagaaccuugaauaccaaauuggauauaucugcagcggcgucuuuggggauaauccucgccccaacgacggaacaggcuccugugggccggugagcccuaauggagccuacggcguuaagggcuucucuuuuaaguacgggaacggaguguggauuggcagaaccaaauccacaaauagccggucuggguucgagaugaucugggaucccaacggauggaccggcaccgacuccagcuuuuccgucaagcaggacauuguggcgaucacagauuggucuggguauagcggcuccuucguucagcacccugaacugacgggacucgacugcauccgccccuguuucuggguggagcugauuagaggccggcccaaagaaucuaccaucuggacaagcggguccagcauuucuuuuugcggagucaauuccgauaccgugagcuggucuuggccugacggcgccgagcuuccguucacaaucgauaaguga

SEQ ID NO: 218249 - RNA, 1350 nt, Artificial Sequence; identical to SEQ ID NO: 207080
  derived and/or modified CDS sequence (opt5) from neuraminidase__InfluenzaA__BAM85821

SEQ ID NO: 218250 - RNA, 1350 nt, Artificial Sequence
  derived and/or modified CDS sequence (opt5) from neuraminidase__InfluenzaA__BAM85822
augaaccccaaucagaagaucauuaccaucggcagcauuugcauggugacagggaucgucucccugaugcuccaaauuggaaacaugaucucuaucuggguuagccacuccauucauacgggcaaucagcaccagucugagccuaucagcaacaccaauuuccugacagaaaaagccguggcuuccgugaaacuugccgggaacucuagccuguguccgauuaauggaugggcggucuacuccaaggacaacagcaucagaauuggcucuaagggggauguguuuguuauccgggagcccuucauuuccugcagccaucucgaaugucgcaccuuuuuccugacacagggagcccuucugaaugacaaacacucuaacggcaccgugaaggauagauccccucaucggacacucaugagcugccccgucggcgaggcuccuucucccuauaauucccgcuuugaaagcguggccugguccgcuucugccugucacgacgggaccagcuggcugacgaucggaaucuccggcccugauaacggggcuguugccguggucaaguacaauggaauuaucaccgacacaauuaaaagcuggagaaacaauauccugcggacccaagagucugagugcgcgugugugaacggcuccugcuucacagugaugaccgaugggccgagcaacucucaggccagccacaagauuuuuaaaauggaaaagggaaaagucguuaaguccguggagcucgacgcucccaauuaucauuacgaagaguguucuugcuauccugaugccggcgagaucacgugugugugccgcgacaacuggcacggcagcaauagacccugggucuccuucaaccagaaucuggaauaccagaucggguauauuugcagcggaguguuuggcgauaacccucggcccaaugacgggacaggaucuuguggcccgguuuccagcaacggggcuuacggagugaagggcuucucuuuuaaauacggcaauggggucuggaucggacgcaccaaguccacaaacagcagauccggcuucgagaugauuugggauccuaauggguggaccgaaaccgacucuagcuuuuccgugaaacaagacaucguugccauuacagauuggucuggauauagcggcuccuucgugcagcaucccgagcuuacggggcuggacugcauccggccuuguuucugggucgaacucauccgcggcagacccaaggagagcaccauuuggacaucuggauccagcaucucuuuuugcggcgugaacuccgauaccgucggguggagcuggcccgacggagcggagcugccuuucacaauugauaaauga

SEQ ID NO: 218251 - RNA, 1410 nt, Artificial Sequence
  derived and/or modified CDS sequence (opt5) from neuraminidase__InfluenzaA__BAM85823
augaaccccaaucagaagaucaccacaauuggcagcaucugcauggugauugggaucgucucccugaugcuccaaauuggaaacaucaucucuauuuggguuagccacuccauccagacgggcaaucagcaucaggccgggccuuguaaccaaucuauuaucaccuacgagaauaacacaugggugaaucagaccuaugugaacauuagcaauacaaacuuccugaccgagaaaacagucgcuuccgugacccuugccggaaauucuagccugugcccgaucuccggcugggcgguuuacagcaaggacaacgggauuagaaucggaucuaaaggcgauguguuugucauccgggaacccuucauuuccuguagccaccucgaaugccgcacguuuuuccugacccagggcgcccuucugaaugacaagcauucuaacgggacagugaaagauagauccccucaccggacccucaugagcugucccguuggagaggcuccuucucccuauaauucccgcuuugaaagcguggccugguccgcuucugccugccaugacggcaucaacuggcugacaauugggaucagcggaccugauaacggcgcugucgccgugcugaaguacaaugggauuaucaccgacacgaucaaguccuggagaaacaauauucuccggacacaggagagcgagugugcgugcgugaacggaucuuguuucaccaucaugacagauggcccguccaauggccaagccagcuauaaaauuuuucgcaucgaaaaggggaaagucguuaagucuguggagcugaacgcucccaauuaccacuaugaagagugcagcuguuacccugacgccggagagauuaccugcgugugcagagauaacuggcacggcuccaaucggcccugggucucuuucaaccagaaucuugaauaccagaucggguauaucuguagcggaauuuuuggcgacaacccucgccccaaugaugggaccggauccugcggcccggugagcccuaacggcgcuuacgggaucaaaggauucucuuuuaaguauggcaaugggguuuggauuggaagaacaaaguccacgaacagccggucuggcuucgagaugaucugggaccccaacggguggaccggcacagauuccaauuuuagcgugaaacaggacauugucgccaucaccgacugguccggauacucuggcagcuucgugcaacauccugaacugacagggcucgauuguauucgccccugcuucuggguugagcugaucagaggacggcccaaggaauccaccaucuggacgucuggcagcuccauuagcuuuuguggggugaacucugacacagucggaugguccuggccugauggcgcggagcuuccguucaccaucgacaaauga

SEQ ID NO: 218252 - RNA, 1350 nt, Artificial Sequence
  derived and/or modified CDS sequence (opt5) from neuraminidase__InfluenzaA__BAM85824
augaaccccaaucagaagaucauuaccaucggcagcauuugcauggugaucgggauugucucccugcuccugcaaaucggaaacaugaucucuauuuggaucagccacuccauucagacaggcaaucagcaucaggccgagucuaucagcaacacgaauccucuuaccgaaaaagcuguugccuccgugacacuggcggggaacucuagccucuguccgauuagaggaugggcugugcacuccaaggacaauagcauccggauuggcucuaaaggggaugucuucgugauccgcgagcccuuuaucuccugcagccaucuggaauguagaaccuucuuucuuacacaaggagcccugcucaacgacaagcacucuaauggcaccguuaaagaucgguccccucaucgcacacugaugagcugccccgugggcgaggccccuucucccuacaacuccagauucgaaagcgucgcuugguccgccucugcuugucacgacgggaccagcuggcugacgauuggaaucuccggcccugauaauggggccguggcgguucucaaguauaacggaauuaucaccgacacaauuaagagcuggcggaauaacauccugcgcacccaggagucugagugcgccugugugaauggcuccugcuuuacagucaugaccgaugggccgagcaacggacaggcuucuuacaaaaucuucaagauggaaaaaggcaagguggugaaaagcgucgagcuugacgcccccaacuaucacuacgaagaguguuccugcuauccugaugcuucugagauuacguguguuugcagagacaauuggcauggcagcaaccggcccuggguguccuuuaaucagaaccuggaauaccaaaucggguauauuugcagcggaguguucggcgauaauccucgccccaacgacgggacaggaucuuguggcccgauguuuccuaauggggccuacggaaucaagggcuucuccuuuaaguacggcaacggggucuggauuggaagaaccaaaagcacaaauucucgguccggcuucgagaugaucugggaucccaacggguggaccggaaccgacagcuccuuuucugugaagcaggacaucguugcgauuacagauuggagcggcuauuccgggucuuucgugcagcacccugaacucacgggccuggacugcauccgccccuguuucugggucgagcuuauuagaggacggcccaaagaaagcaccaucuggacauccggcagcucuauuuccuuuugcggggugaauagcgauaccguuucuugguccuggccugacggagccgagcugccguucacaaucgauaaguga

SEQ ID NO: 218253 - RNA, 1350 nt, Artificial Sequence
  derived and/or modified CDS sequence (opt5) from neuraminidase__InfluenzaA__BAM85825
augaaccccaaucagaagaucauuaccaucggcagcauuugcauggugaucgggauugucucccugaugcuccaaaucggaaacaugaucucuauuuggguuagccacuccauccagacaggcaaucagaaccagguggagccuauuaucaauacgaacuuccugaccgaaaaagccguggcuucuauuacacuugccgggaauagcucccuguguccgaucagaggaugggcgauucauucuaaggacaacagcauccggaucggcuccaaaggggaugucuuugugauucgcgagcccuucaucagcugcucucaccucgaauguagaaccuuuuuccugacacaaggagcccuucugaaugacaagcauuccaacggcaccguuaaagaucggagcccucaccgcacacucaugucuugccccgugggcgaggcuccuucccccuacaauagcagauuugaaucugucgccugguccgcuagcgccugucaugacgggaccuccuggcugacgauuggaaucucuggcccugauaacggggcuguggccguucugaaguauaauggaauuaucaccgacacaaucaagagcuggcggaacaauauucuccgcacccaggaguccgagugcgcgugugugaacggcagcugcuucacagucaugaccgaugggccgucuaacggacaggccuccuacaaaaucuuuaagauggaaaaaggcaaggugauuaaaagcguggagcuggacgcucccaauuaucacuacgaagaguguucuugcuauccugaugccggcgagaucacgugugucugcagagacaacuggcacgggagcaaucggcccuggguuuccuucaaccagaaucuugaauaccaaauuggauauaucugcucuggcguguuuggggauaacccucgccccaaugacggaacaggcagcugugggccggugucccauaacggagcuuacggcgucaagggcuucagcuuuaaguacgggaauggaguguggaucggcagaaccaaaucuccuaacucccggagcggguucgagaugauuugggaucccaauggauggucugaaacagacuccagcuuuuccguuaagcaggacaucguggccauuaccgauuggucuggcuauagcggguccuucguccagcacccugagcugaccggccucgacugcauccgccccuguuucuggguggaacugauuagaggacggcccaaagagucuacaguuuggacgagcggcuccagcaucucuuuuugcggggugaacuccgauaccgucagcuggucuuggccugacggagcggagcuuccguucacaauugauaaguga

SEQ ID NO: 218254 - RNA, 1350 nt, Artificial Sequence
  derived and/or modified CDS sequence (opt5) from neuraminidase__InfluenzaA__BAM85826
augaaccccaaucagaagaucauuaccaucggcagcauuugcauggugaucgggauugucucccugaugcuccaaaucggaaacaugaucucuauuuggguuagccacuccauccagacaggcaaucagagacaggccgagccuauuucuaacacgaaauuccugaccgaaaaggcuguggccagcgugacacuugcgggaaauuccucucuguguccgaucagcgggugggcugucuacuccaaagacaacagcauucggaucggcucucgcggggauguguuuguuauuagagagcccuucaucuccugcagccaucucgaaugucggaccuuuuuccugacacaaggagcccuucugaaugacaagcacucuaacggcaccgugaaagaucgcuccccucauagaacacucaugagcugccccgucggcgaggccccuucucccuauaauucccgguuugaaagcguggcuugguccgccucugcuugucacgacgggaccagcuggcugacgaucggaauuuccggcccugauaacggggccguugcggugcugaaguacaauggaaucauuaccgacacaaucaagagcuggcgcaacaauauucucagaacccaggagucugagugcgccugugucaacggcuccugcuucacagugaugaccgaugggccgagcaauggacaggcuucuuauaaaaucuuuaagauggaaaaaggcaagguggucaaaagcguugagcuggacgcccccaacuaccauuaugaagaguguuccugcuacccugaugcuggcgagaucacgugugugugccgggacaacuggcacgggucuaaucgccccugggugagcuucaaccagaaucuugaauaucaaauuggauacaucugcuccggcgucuuuggggauaacccuagacccaaugacggaacaggcagcugugggccggugucucugaacggagccuacggcguuaagggcuucuccuuuaaguaugggaauggaguguggauuggccggaccaaaagcacaaacucucgcuccggguucgagaugaucugggauccuaauggauggaccggcaccgacagcuccuuuucugucaagcaggacauuguggcgaucacagauuggagcggguacuccggcucuuucguucagcaccccgaacucacgggacuggacugcaucagaccuuguuucuggguggagcuuauucggggccgccccaaagaaagcaccaucuggacauccgggagcucuauuuccuuuugcggagucaacagcgauaccgugucuugguccuggcccgacggcgccgagcugccuuucacaaucgauaaguga

SEQ ID NO: 218255 - RNA, 1350 nt, Artificial Sequence
  derived and/or modified CDS sequence (opt5) from neuraminidase__InfluenzaA__BAM85827
augaaccccaaucagaagaucauuaccaucggcagcauuugcauggugaucggggucguuucccugaugcuccaaacaggaaacauuaucucuaucugggugagccacuccauucagaaaggcaaucagcaucaggccgagucuaucagcaacacgaauccucugaccgaaaaggcuguggccuccgucacacuugcggggaacucuagccuguguccgauuagaggaugggcugugcacuccaaagacaauaacauccggauuggcagcaagggggauguuuucgugauccgcgagcccuuuauuucuugcucccaucucgaauguagaaccuucuuucugacacaaggagcccuucugaaugacaaacacagcaacggcaccgucaaggaucggucuccucaucgcacacucauguccugccccgugggcgaggccccuagccccuacaauucuagauucgaauccguugcuuggagcgccuccgcuugucacgacgggaccucuuggcugacgaucggaaucagcggcccugauaacgaggccguggcgguccugaaguauaaugggauuaucaccgacacaauuaaauccuggcggaacaauauccuccgcacccaggagagcgaaugcgccugugugaacggaucuugcuuuacagugaugaccgauggcccguccaacgggcaggcuagcuacaagauuuucaaaauggagaagggaaaagucguuaagucuguggaacuggacgcccccaauuaucacuacgaggaguguagcugcuauccugaugcuggcgaaaucacgugugugugcagagacaacuggcauggcuccaaucggcccugggucucuuuuaaccagaaucuugaguaccaaaucggguauauuugcagcggaguguucggcgauaacccucgccccaaugacgggacaggauccuguggcccgaugagcccuaacggggccuacggaguuaagggcuuuucuuucaaauacggcaaugggguguggaucggaagaaccaaguccacaaccagccggucuggcuuugaaaugauuugggaucccaacggguggaccggaacagacuccagcuucuccgucaaacaggacaucguggcgauuacggauuggucuggcuauagcggguccuuuguucagcacccugagcugaccggccucgacugcauccgccccuguuucuggguggaacugaucagaggacggcccaaggagucuacaauuuggaccagcggcuccagcaucucuuucugcggggucgauuccgacacagugagcuggucuuggccugauggagccgagcuuccguuuaccauugacaaauga

SEQ ID NO: 218256 - RNA, 1350 nt, Artificial Sequence
  derived and/or modified CDS sequence (opt5) from neuraminidase__InfluenzaA__BAM85828
augaaccccaaucagaagaucauuaccaucggcagcauuugcauggugaucgggauugucucccugaugcuccaaaucggaaacaugaucucuauuuggguuagccacuccauccagacaggcaaucagagacaggccgagccuauuucuaacacgaaauuccugaccgaaaaggcuguggccagcgugacacuugcgggaaauuccucucuguguccgaucagcgggugggcugucuacuccaaagacaacagcauucggaucggcucucgcggggauguguuuguuauuagagagcccuucaucuccugcagccaucucgaaugucggaccuuuuuccugacacaaggagcccuucugaaugacaagcacucuaacggcaccgugaaagaucgcuccccucauagaacacucaugagcugccccgucggcgaggccccuucucccuauaauucccgguuugaaagcguggcuugguccgccucugcuugucacgacgggaccagcuggcugacgaucggaauuuccggcccugauaacggggccguugcggugcugaaguacaauggaaucauuaccgacacaaucaagagcuggcgcaacaauauucucagaacccaggagucugagugcgccugugucaacggcuccugcuucacagugaugaccgaugggccgagcaauggacaggcuucuuauaaaaucuuuaagauggaaaaaggcaagguggucaaaagcguugagcuggacgcccccaacuaccauuaugaagaguguuccugcuacccugaugcuggcgagaucacgugugugugccgggacaacuggcacgggucuaaucgccccugggugagcuucaaccagaaucuugaauaucaaauuggauacaucugcuccggcgucuuuggggauaacccuagacccaaugacggaacaggcagcugugggccggugucuccuaacggagccuacggcguuaagggcuucuccuuuaaguaugggaauggaguguggauuggccggaccaaaagcacaaacucucgcuccggguucgagaugaucugggaucccaauggauggaccggcaccgacagcuccuuuucugucaagcaggacauuguggcgaucacagauuggagcggguacuccggcucuuucguucagcacccugaacugacgggacucgacugcaucagacccuguuucuggguggagcugauucggggccgccccaaagaaagcaccaucuggacauccgggagcucuauuuccuuuugcggagucaacagcgauaccgugucuugguccuggccugacggcgccgagcuuccguucacaaucgauaaguga

SEQ ID NO: 218257 - RNA, 1350 nt, Artificial Sequence
  derived and/or modified CDS sequence (opt5) from neuraminidase__InfluenzaA__BAM85829
augaaccccaaucagaagaucauuaccaucggcagcauuugcaugaucauugggaucgugucccugaugcuccaaaucggaaacauuaucucuauuugggucagccacuccauccagacaggcaaucagcaucaggccgagccuauuucugacacgaacuuccugaccgaaaaagcuguugccagcgugauccuugcgggaaauuccucucugugucacauuagcgggugggcugugcauuccaaggauaacagcaucagaaucggcucuaaaggggacgucuuugugauucgggagccguucaucuccugcagccaccucgaaugucgcacauuuuuccugacccaaggagcccuucugaaugauaagcauucuaacggcacaguuaaagacagaagcccccaccggacccucauguccugcccugugggcgaggcccccucuccuuacaauucccgcuuugaaagcgucgcuugguccgccucugcuugucacgaugggacaagcuggcugaccauuggaaucuccggccccgacaacggggccguggcgguucugaaguauaauggaauuaucacggauaccaucaagagcuggagaaacuacauucuccggacacaggagucugagugcgccugugugaauggcuccugcuucaccgucaugacagacgggccuagcaacggacaggcuucuuauaaaaucuuuaagauugaaaaaggcaagguggugaaaagcgucgagcuggaugccccgaauuaccauuaugaagaguguuccugcuaccccgacgcuggcgagaucaccuguguuugccgcgauaacuggcacgggucuaacagaccuugggugagcuucaaucagaaccuugaauaucaaauuggauacaucugcuccggcguguuuggggacacgccccggccuaaugauggaacaggcagcugugggcccgucucuccgaacggagccuacggcgugaagggcuucuccuuuaaguaugggaauggaguuuggaucggccgcaccaaaagcacaaacucuagauccggguucgagaugauuugggacccuaauggauggaccggcaccgacagcuccuuuucugugaagcaggaucuggucgcgaucacagacuggagcggguacuccggcucuuucgugcagcaucccgaacucacgggacuggauugcauucggccuuguuucuggguugagcuuauccgcggcagacccaaagaaagcaccauuuggacauccgggagcucuaucuccuuuugcggagugaacagcgacaccgucggcuggucuuggcccgauggggccgagcugccuuucacaauugacaaguga

SEQ ID NO: 218258 - RNA, 1413 nt, Artificial Sequence
  derived and/or modified CDS sequence (opt5) from neuraminidase__InfluenzaA__BAM85830
augaaccccaaucagaagaucauuaccaucggcagcauuugcauggccaucgggacaauuucccugauccuccaaaucggaaacauuaucucuauuuggaucagccacuccauucagacgggcucucagaaucauaccgggaucuguaaccagagaauuaucacauacgagaauaacaccugggugaaucaaacauaugucaacaucagcaauaccaacguuguggcuggaaaagacacaaccuccaugauucuggccggcaauucuagccuuugcccuauccgggggugggcgauuuacuccaaggauaacagcauccgcauuggaucuaaaggcgacguguucgucaucagagaaccguuuaucuccuguagccaccuggagugccggacguucuuucucacccagggcgcucugcuuaaugauaagcauucuaacgggacagugaaagaccgcucccccuauagagcccugaugagcuguccuauuggagaagcccccucuccuuacaauucccgguucgagagcguugcuugguccgccucugcuugccacgauggcaugggguggcucaccaucggaauuagcggccccgacgauggggccguggcgguccugaaguauaacggaaucauuacagaaaucaucaaguccuggcgcaaacagauucugagaacccaggagagcgagugugugugcguuaacggcucuuguuuuacgaucaugacagacggcccuuccaaugggccggccagcuaccggauuuucaagaucaaaaagggaaaaauuaccaagucuaucgaacucgaugcucccaacagccauuaugaggaaugcuccuguuacccugacacaggcaaggugaugugcgucugccgcgauaauuggcacgggucuaacagacccugggugagcuuuaaucaaaaccuggacuaccagauuggauauaucuguuccggcguguucggggauaauccucggcccaaagacggaaagggcagcugcgacccggucaacguugauggcgccgacggggugaaaggauuuucuuaccgcuauggcaaugggguguggaucggaagaaccaaguccaacagcucucggaaaggcuucgagaugauuugggauccuaauggguggaccgacacagauggcaacuuucuugucaagcaggacgugguugcuaugacggauugguccggauacagcggcuccuucgugcagcaccccgagcugaccgggcucgacuguaugcgcccuugcuuuugggucgaacugaucagaggacaaccccgggagaaaacaaccauuuggacaucuggcagcuccaucucuuucuguggggugaauagcgauaccguuaacugguccuggcccgacggagccgaacuuccuuucacgauugauaaguga

SEQ ID NO: 218259 - RNA, 1413 nt, Artificial Sequence
  derived and/or modified CDS sequence (opt5) from neuraminidase__InfluenzaA__BAM85831
augaaccccaaucagaagaucauuaccaucggcagcauuuccaucgccauugggaucaucucucugaugcuccaaauuggaaacaucauuagcaucugggcuucccacucuauucagacaggcagccagaaucauacgggggugugcaaccagagaaucauuaccuacgaaaauuccacaugggucaaccacaccuauguuaauaucaacaauacaaacgugaucgccggaaaagacaagaccucugugacacuggcgggcaauagcucccuuuguagcauuucugggugggcuaucuacaccaaagauaacuccauucggaucggaagcaagggcgacgucuucgugauucgcgagccuuuuaucucuugcucccaucuggaguguagaacguucuuucucacccaaggcgcccugcuuaaugauaaacacagcaacgggacaguuaaggaccggucuccguaucgcgcccugauguccugcccccucggagaagcuccuagccccuacaauuccaaguucgagucuguggccuggagcgcuuccgccugucaugauggcaucggguggcugaccauuggaaucagcggcccugacaacggggcggucgccgugcugaaauauaacggaauuaucacagaaaccauuaagucuuggaaaaagcagauccucagaacgcaggaguccgagugcguuugugugaauggcagcugcuuuacaaucaugaccgauggccccucuaacggggcugccagcuacaaaauuuucaagaucgaaaagggaaaagucacaaaguccauugagcugaaugcuccuaacuuucacuaugaagaguguucuugcuacccggacaccggcaccgugaugugugugugccgggauaauuggcacgggagcaaccgccccugggucuccuucaaucagaaccuugacuaccaaaucggauauauuugcagcggcguuuuuggggauaauccuagaccccgggacggagagggcucuuguaacccugugacagccgauggcgcgaauggggugaaaggauucuccuacaaguauggcaacggggucuggaucggacgcacgaaaagcaauagacugcggaagggcuuugaaaugauuugggaccccaacggguggaccgacacagauucugacuucuccgugaaacaggauguuguggccaucaccgacuggagcggcuacuccggaucuuuuguccagcauccggagcucacaggccuggggugcauccgcccuuguuucuggguggaacuuguuagaggacugccccgggagaauaccacgauuuggacaagcggcuccucuaucagcuucugcggggugaacuccgauaccgcuaacuggagcuggccugacggagccgaacuccccuuuaccauugauaaguga

SEQ ID NO: 218260 - RNA, 1413 nt, Artificial Sequence; identical to SEQ ID NO: 213580
  derived and/or modified CDS sequence (opt5) from neuraminidase__InfluenzaA__BAM85832

SEQ ID NO: 218261 - RNA, 1410 nt, Artificial Sequence
  derived and/or modified CDS sequence (opt5) from neuraminidase__InfluenzaA__BAM85833
augaaccccaaucagaagaucauuaccaucggcagcacaugcauggugauugggaucauuucccugauccuccaaaucggaaacauuaucucuauuugggucagccacuccauccagacgggcaaucagaaccagccugagaccuguaaucaaucuguuauuacauacgaaaacaaaaccugggugaaucagacauaugugaacaucagcaauaccaaccuggucauugagagagacgugaucuccguugcccuucugggaaauucuagccucugcccgaucuccgggugggcuauuuacagcaaggauaacggcauccggauugggucuaaaggagacguguucgucauccgcgaacccuuuauuuccuguagccaucuggagugcagaacauucuuucuuacccagggcgcccugcucaaugauaagcacucuaacggcacggugaaagaccgguccccuuaucgcacccugaugagcugucccguuggggaagcgccuucucccuacaauuccagauucgagagcguggcuugguccgccucugccugccaugauggaaucagcuggcugacagucggcaucuccgggccugacaacggagcuguggccgugcucaaguauaacggcauuaucaccgauacagucaagagcuggcggaauaacauucugcgcacccaggagucugaaugugcuugcaucaauggguccuguuuuacgauuaugacagacggaccgagcaacggccaagccucuuacaaaaucuucaagaucgagaaaggcaagguugugaaaagcguggaacuuaaugcgcccaacuaucacuacgaggagugcuccuguuacccugaugccucugaaauuaugugcgucugcagagacaauuggcaugggagcaaccggcccuggguguccuuuaaucgcaaccuggaguaucagaucggauacauuuguagcggcguuuucggggauaauccuagacccaacgacggaaccggcucuugcgggccgguguccagcaauggagcuuauggcgucaagggcuuuucuuucaaguacgggaaaggaguguggaucggccggacaaaguccaccagcucccgcucuggguuugaaaugauuugggauccuaacggauggaccgagacagacagcuccuucucuguuaaacaggacaucguggccauuacggauuggagcggcuauuccgggagcuuuguccagcaccccgaacucaccggccuggacuguaucagaccuugcuucuggguggagcuuauccggggacgccccaaggagaauacaauuuggaccucuggcuccagcaucucuuucuguggggucaacuccgauacagugggauggagcuggcccgacggcgcugaacugccuuuuaccauugauaaauga

SEQ ID NO: 218262 - RNA, 1410 nt, Artificial Sequence
  derived and/or modified CDS sequence (opt5) from neuraminidase__InfluenzaA__BAM85834
augaaccccaaucagaagaucauuaccaucggcagcgugucccugacagucgccacgguuugcuuccucaugcaaauugcuauccugaccacaaccgugacacuucacuuuaaacagaacgaguguucuauuccugccaauaaccaggugaugccgugcgaacccaucgucaucgagagaaauauuaccgaaaucguguaccugaacaauacaaccauugagaaggaaaucugucucaaagcggcugaguaucggaacuggagcaagccucagugccaaauuacgggguucgcccccuuuuccaaagacaauucuauccgccugagcgccggaggcgauauuuggguuaccagagagccuuacguguccugugaccccucuaagugcuaucaguucgcucuugggcagggaacaacccuggaaaacaagcauagcaauggcacaauccacgaucggaucccucaucgcacccuccugaugaacgagcugggggucccguuucaccucggaacgaaacagguguguauugccugguccuccucuuccugccaugacggcaaggcuuggcugcacguuugugugacaggcgaugacagaaaugccaccgcgagcuucaucuacgaugggaugcuugucgacucuauuggauccuggagccaaaacauccugcggacacaggaaucugagugcguguguauuaaugggaccugcgccguggucaugaccgauggcuccgcuagcggacgcgccgacacaagaauccucuuuauccgggagggcaaaauuguucacaucagcccccugucugggagcgcucagcauauugaagagugcuccuguuauccucgcuaccccaucauuagaugcgugugucgggauaacuggaagggaagcaaccgcccugugaucgacaucaauauggccgauuauucuauugacuccagcuacgucugcucuggccuugugggcgacacgcccagaaacgaugacagcuccucuagcuccaauugucgggauccgaacaaugaacgcgggaacccuggaguuaaaggcugggcguucgacaaugggaacgauguguggaugggaagaaccaucagcaaggacucucgguccggcuacgagacauuuagagucauugggggaugggccaccgcuaauagcaagucucagacaaaccgccaagugaucguugauaauaacaauugguccggcuauagcggcauuuucuccguggaaucuaaaagcugcaucaaccgguguuuuuacgucgagcugauuagagggcgcccccaggagacccgggugugguggacguccaauucuaucgucguguucugcggaacaagcggcaccuaugggaccggauccuggccugacggcgccaacaucaacuuuaugcccauuuga

SEQ ID NO: 218263 - RNA, 1410 nt, Artificial Sequence
  derived and/or modified CDS sequence (opt5) from neuraminidase__InfluenzaA__BAM85835
augaaccccaaucagaagaucauuaccaucggcagcgugucccugacaauugccacggucugcuuccucaugcaaaucgcuauucuggccaccacaguuacccuucacuuuaaacagaacgaguguucuaucccugcgaauaaccagguggugccgugcgaacccaucauuaucgagagaaauauuacagaaaucgucuaccugaacaauaccacaauugagaaggaaaucuguagcaaagcuguggacuaucggaacugguccaagccucagugccaaauuaccggguucgcccccuuuucuaaagauaauagcauccgccucuccgccggaggcgacaucuggguuacgagagagccuuacgugucuugugauaccagcaagugcuaucaguucgcucuggggcagggaacaacccuugacaacaagcauuccaauggcacaauucacgaucggaucccccaucgcacccugcucaugaacgagcugggggucccuuuucaccugggaacgaaacagguguguauugccuggucuagcuccagcugccaugacggcaaggcuuggcuccacguuugugugacaggcgaugacagaaaugccaccgcgucuuucaucuacaacgggaugcuggucgauuccauuggaagcuggucucaaaauauccuucggacacaggaauccgagugcguguguaucaacggcagcugcaccguggucaugaccgacggguccgccucuggaaaagcugauacacgcauucuguuuguuaaggaaggcaaaaucauucacaucagcccgcucuccgggagcgcccagcauauugaggagugcucuuguuaucccagauacccuaacgugcggugcgugugucgcgacaauuggagaggauccaaccggcccgucaucgauaucaauauggcugacuauagcauugacucuagcuacgugugcuccggccugguuggcgauacgccucgcaacgacgauaauucuagcuccagcaacuguagagaccccaauaacgaacgggggaauccgggagugaagggcugggccuucgauucuggggacgaugucuggaugggacgcaccaucuccagagacagccggucuggcuacgagacauuuaaggugauugggggaugggcgaccgccaacuccaaaagccagacauccagacaaguuaucguggauaauaacaauuggucuggcuauagcggcgucuucuccguggaacacaagucuugcauuaaccgcuguuuuuacgucgagcuuauccgggggagaccucaggaaacccgcgugugguggacgagcaauuccauuguuguguucugcggaacaagcggcaccuaugggaccggaucuuggcccgacggcgcuaacaucaacuuuaugccuaucuga

SEQ ID NO: 218264 - RNA, 1410 nt, Artificial Sequence
  derived and/or modified CDS sequence (opt5) from neuraminidase__InfluenzaA__BAM85836
augaaccccaaucagaagaucauuaccaucggcagcgugucccugacaauugccacgaucugcuuccucaugcaaauugcuauccuggccaccacagucacccuucacuuuaaacagaacggguguucuaucccuagcaauaaccagguugugccgugcgagcccauuaucguggaaagaaauauuacagagaucgucuaccugaacaauaccacaauugaaaaggagcucuguccuaaagugcuggaauaucgggacugguccaagccccagugccaaaucaccggauucgcgccuuuuucuaaagauaacagcauucgccuuuccgcuggcggggacaucuggguuacgagagagcccuacgugucuuguagcccugauaagugcuaucaguucgcccugggacagggcaccacacucgacaaucggcauuccaacgggaccauccacgaucgcauuccgcauagaacacugcugaugaaugagcucggaguccccuuucaccugggcaccaaacagguguguaucgccuggucuagcuccagcugccaugacggccgggcuuggcuucacguuugugugacgggggaugaccgcaacgccacagcuucuuucauuuacgauggaaugcuggucgacuccaucggcagcuggucucaaaauauucucagaacccaggaauccgagugcguguguaucaacgggacaugcaccguggucaugaccgauggaagcgccuccggccgggcggacacacgcauccuguuuguuaaggaagggaagauugugcacaucucuccucuuagcggauccgcccagcauauugaggagugcagcuguuaucccagauacccugaugugcggugcgucugucgcgacaauuggaaaggcucuaacagacccaucauugacaucaacauggcugauuauuccaucggcagcucuuacgugugcagcgggcugguuggagacacgccgcggaaugaugacuccucuagcaacuccaauugucgcgauccuaacaaugaaagaggcaaccccggggugaagggaugggccuucgacuacggcaaugaugucuggauggggcggaccauuagcaaagacucuagauccggauaugagacauuucgcgugaucggcggcuggaccacagcuaacagcaagucucagguuaaucggcaagugauugucgauaacuccaauuggagcggguacuccggaaucuucucuguggaaggcaagagcugcauuaacagauguuuuuaugucgagcucauccgcgggcggccucaggaaaccagagugugguggacguccaauucuauuguuguguucugcggaacaagcggcaccuacgggaccggcuccuggcccgacggagccaacaucaauuuuaugcccaucuga

SEQ ID NO: 218265 - RNA, 1410 nt, Artificial Sequence
  derived and/or modified CDS sequence (opt5) from neuraminidase__InfluenzaA__BAO79717
augaaccccaaucagaagaucauuaccaucggcagcgugucccugacaauuucuacgaucugcuucuuuaugcaaauugccauccucaucaccacagucacccugcacuucaaacaguacgaguuuaacagcccuccgaauaaccagguuaugcuuugugaacccacaauuaucgagagaaauauuaccgaaaucguguaucugacaaacaccacgauugagaaggaaaucugcccuaaacccgcugaguaccggaauugguccaagccucagugugggauuaccggauucgcccccuuuucuaaagacaacagcauccgccucuccgcgggcggggauaucugggugacaagagagccuuaugucucuugcgacccggauaaguguuaccaauucgcucugggacagggcaccacacuuaauaacgugcauagcaauaacaccguucgggaccgcacgcccuauagaacacugcucaugaaugaacugggggugccuuuucaccugggaaccaagcaggucugcauugccugguccucuagcuccugucaugauggcaaagccuggcuccacgugugcaucacaggcgacgauaagaacgcuaccgccagcuucauuuacaaugggcggcugguugacucuguggucuccuggagcaaagauauccuucgcacccaggagucugaaugugugugcauuaacggaacauguacgguggucaugaccgacggcuccgcuagcgggaaggccgauacaaaaauccuguuuaucgaggagggaaagauuguucauaccuccacacucucuggcagcgcgcaacacguggaagagugcuccugcuaucccagauacccuggggugcggugugucugccgcgacaacuggaagggaagcaauagacccaucguggauauuaacaucaaagaccacucuauuguuuccagcuacguguguucuggccuggucggcgacaccccgcggaagaaugauagcuccucuagcucccauugccuugacccuaacaaugaagagggaggacacggcgugaaagggugggccuucgaugacggaaacgauguuuggaugggccgcacgaucaaugaaacaagcagacugggguaugagaccuuuaaggugaucgagggauggucuaaccccaaauccaagcuccagauuaaucggcaggucaucguggaccgcggcgauagaagcggcuacucugggauuuucuccgucgaagggaaaaacuguaucaaucggugcuuuuauguggagcugauuagaggccgcaaggaagagaccgaaguucuguggacaagcaacuccaucguggucuucugugggaccucuggaacauacggcacggggagcuggccugacggcgcugaucucaaucugaugcccauuuga

SEQ ID NO: 218266 - RNA, 1413 nt, Artificial Sequence; identical to SEQ ID NO: 207131
  derived and/or modified CDS sequence (opt5) from neuraminidase__InfluenzaA__CAA33354

SEQ ID NO: 218267 - RNA, 1404 nt, Artificial Sequence
  derived and/or modified CDS sequence (opt5) from Neuraminidase__InfluenzaA__CAB95858
augaaccccaaucagaagaucauugcccugggcagcguguccaucaccauugcuacaaucugccuccugaugcaaauugccauccuugcgacgaccaugacacugcacuucaacgaguguaccaauccuucuaacaaucaggcuaugccgugcgaacccaucauuaucgagagaaacauuacagaaaucguccaucucaauaacaccacaauugagaaagaaagcuguccuaagguugccgaguacaaaaauugguccaagccccagugccagaucaccggguuugccccuuucucuaaagacaacagcauucggcuguccgcuggaggcgauaucugggugacgcgcgagcccuaugugucuugugggcuuggaaauugcuaccaauuugcccugggccaggggaccacacucaacaauaagcacagcaacggaaccauccaugacagauccccucaccggacacugcugaugaaugaacucggcgucccguuccaucugggcaccaaacagguguguauugcuuggucuagcuccagcugccacgaugggaaggccuggcuucacguuugugugacgggagacgaucgcaacgcgacagccucuaucauuuaugacggcaugcugaccgauuccaucgggagcuggucuaagaacauucucagaacacaggaguccgaaugcgucuguaucaauggaaccugcaccgugguuaugacagacggcagcgcuuccgggcgggccgauacgaaaauccuguuuauucgcgagggaaagaucgugcauauuucuccccuuagcggcuccgcucaacacgucgaggaaugcagcuguuacccuagauaucccgaggugcggugcgugugucgcgacaacuggaaaggcucuaauagaccuguccuguacaucaacguugccgauuauuccguggacagcucuuacgugugcagcgggcucgucggagauacaccccggaaugacgacuccucuagcuccagcaacugucgcgauccgaauaacgaaagaggcgggccuggagugaagggcugggcguucgacaaugggaacgauguuuggaugggacggaccauuaagaaagacucucgcuccggcuacgagaccuuuagaguggucggcggguggacaaccgccaauagcaagucucagaucaacagacaggugaucguugauuccgacaauuggagcggauauuccggcauuuucucuguggaagggaaaacgugcaucaaccgguguuuuuacgucgagcugauucgcggacggccccaggagacaagagugugguggaccagcaauuccaucauugucuucugcggcaccucugggacauauggcaccggaagcuggccugauggcgcuaacaucaacuuuauguccauuuga

SEQ ID NO: 218268 - RNA, 1404 nt, Artificial Sequence
  derived and/or modified CDS sequence (opt5) from neuraminidase__InfluenzaA__CAB95859
augaaccccaaucagaagaucauugcccugggcagcguguccaucaccauugcuacaaucugccuccugaugcaaauugccauccuugcgacgaccaugacacugcacuucaacgaguguaccaauccuucuaacaaucaggcugucccgugcgaacccaucauuaucgagagaaacauuacagaaaucguucaucucaauaacaccacaauugagaaagaaagcuguccuaagguggccgaguacaaaaauugguccaagccccagugccagaucaccggguuugccccuuucucuaaagacaacagcauucggcuguccgcuggaggcgauaucugggugacgcgcgagcccuaugucucuugugggcuuggaaagugcuaccaauuugcccugggccaggggaccacacucaauaacaagcacagcaauggaaccauccaugacagauccccucaccggacacugcugaugaacgaacucggcgugccguuccaucugggcaccaaacagguuuguauugcuuggucuagcuccagcugccacgaugggaaggccuggcuucacgugugugucacgggagacgaucgcaaugcgacagccucuaucauuuaugacggcaugcugaccgauuccaucgggagcuggucuaaaaacauucucagaacacaggaguccgaaugcguguguaucaacggaaccugcaccguugugaugacagacggcagcgcuuccgggcgggccgauacgaagauccuguuuauucgcgagggaaaaaucguccauauuggcccccuuucuggcagcgcucaacacguggaggaaugcuccuguuacccuagauaucccgaggugcggugcgucugucgcgacaauuggaaggggagcaacagaccuguucuguacaucaauguggccgauuauucuguggacuccagcuacgucugcucuggacucgugggcgauacaccccggaacgacgacagcuccucuagcuccaauugucgcgauccgaacaaugaaagagggggaccuggcguuaaggggugggcguucgacaacggaaaugauguguggaugggccggaccauuaaaaaggacagccgcucuggcuacgagaccuuuagagucgugggaggguggacaaccgccaacuccaaaagccagaucaaucggcagguuaucguggauucugacaacugguccggcuauagcgggauuuucuccgucgaaggaaagacgugcaucaauagauguuuuuacguggagcugauucgcggccggccccaggagacaagagucugguggaccucuaacagcaucauuguguucugcgggaccuccggcacauauggaaccggcucuuggccugauggggcuaauaucaacuuuaugagcauuuga

SEQ ID NO: 218269 - RNA, 1410 nt, Artificial Sequence; identical to SEQ ID NO: 206645
  derived and/or modified CDS sequence (opt5) from Neuraminidase__InfluenzaA__CAC19707

SEQ ID NO: 218270 - RNA, 1410 nt, Artificial Sequence
  derived and/or modified CDS sequence (opt5) from neuraminidase__InfluenzaA__CAD29959
augaaccccaaucagaagaucauuaccaucggcagcgugucccugacaauugccacgaucugcuuccucaugcaaauugcuauccuggucaccacaguuacccuucacuuuaaacaguacgaguguaacucuccuccgaauaaccaggugaugcugugcgaacccacaaucauugagagaaauaucaccgaaauuguguaucucacaaacaccacgaucgagaaggaaauuuguccuaaacuggccgaguaccggaauuggagcaagccccagugcaacaucaccggguucgcgccuuuuuccaaagacaauucuauucgccuuagcgcuggaggcgauaucugggucacaagagagcccuauguguccugugacccugauaagugcuaccaauucgcccuggggcagggaaccacacucaacaauggccauucuaacgacaccguucacgaucggacgccguaucgcacacugcugaugaaugaacucggggugcccuuucaucugggaaccaagcaggucuguaucgccuggagcuccagcucuugccacgacggcaaagccuggcuucauguguguguuacaggcgaugacgagaacgcuaccgcuuccuucauuuacaaugggagacugguggauagcaucggaucuugguccaagaaaauucuccggacccaggaaagcgagugcgucuguaucaacggcacaugcacgguggugaugaccgacgggucugccuccggaaaggcggauacaaaaauucuguuuaucgaggaaggcaagaucguccacaccagcccucuuuccgggucugcccaacacguugaggaaugcagcuguuauccccgcuacccuggagugagaugcgugugucgggacaacuggaagggcuccaaucgccccauugucgauaucaacgugaaagacuacagcauuguuucuuccuaugugugcagcggccuggucggggacacaccgagaaagaaugauucuagcuccucuagccauugucucaacccuaauaacgaggaaggaggccacggggugaaaggaugggcuuucgacgauggcaaugacguuuggauggggcggaccaucuccgagaagcugcgcagcggauacgagacguuuaaagugauugaaggcuggucuaagcccaacuccaaacugcagaucaauagacaggucaucguggaucggggcaaccgcagcggguauucuggaauuuucuccgucgagggcaagagcugcaucaauagauguuuuuacguggaacucauucgggggagaaagcaggagacagaaguucuguggaccuccaacucuaucguggucuucugcggaaccagcggcacauaugggaccggcuccuggccugacggagccgauauuaaucuuaugcccaucuga

SEQ ID NO: 218271 - RNA, 1410 nt, Artificial Sequence
  derived and/or modified CDS sequence (opt5) from neuraminidase__InfluenzaA__CAD29960
augaaccccaaucagaagaucauuaccaucggcagcgugucccugacaauugccacgaucugcuuccucaugcaaauugcuauccuggucaccacaguuacccuucacuuuaaacaguacgaguguaacccuccgcccaauaaccaggugaugcugugcgaaccuacaaucauugagagaaauaucaccgaaauuguguaucucacaaacaccacgaucgagaaggaaauuugucccaaacuggccgaguaccggaauuggucuaagccucagugcaacaucaccggguucgcgcccuuuagcaaagacaauuccauucgccuuucugcuggaggcgauaucugggucacaagagagccuuaugugagcugugacccggauaagugcuaccaauucgcccuggggcagggaaccacacucaacaauggccauuccaacgacaccguucacgugcggacgcccuaucgcacacugcugaugaaugaacucggggucccuuuucaucugggaaccaaacagguguguaucgccuggucuagcuccagcugccacgauggcaaggcuuggcuucauguuugugugacaggcgacgaugagaacgccaccgcuucuuucauuuacaaugggagacuggucgacuccaucggaagcuggucuaagaaaauucuccggacccaggaauccgagugcguguguaucaacggcacaugcacgguggucaugaccgaugggagcgccucuggaaaggcggacacaaaaauucuguuuaucgaggaaggcaagaucguucacaccagcccccuuuccggguccgcccaacacguggaggaaugcucuuguuauccucgcuaccccggagugagaugcgucugucgggauaacuggaagggcagcaaucgcccgauuguggacaucaacguuaaagauuacuccauugugagcucuuaugucugcuccggccuggugggggacacaccuagaaagaaugacagcucuagcuccucucauugucucaaccccaauaacgaggaaggaggccacgggguuaaaggaugggcuuucgaugacggcaaugauguguggauggggcggaccaucagcgagaagcugcgcuccggauacgagacguuuaaagucauugaaggcuggagcaagccuaacucuaaacugcagaucaauagacaggugaucgucgaccggggcaaccgcuccggguauagcggaauuuucucuguggagggcaaguccugcaucaauagauguuuuuacguugaacucauucgggggagaaagcaggagacagaagugcuguggaccagcaacuccaucgucguguucugcggaaccucuggcacauaugggaccggcagcuggcccgauggagccgacauuaaucuuaugcccaucuga

SEQ ID NO: 218272 - RNA, 1410 nt, Artificial Sequence
  derived and/or modified CDS sequence (opt5) from neuraminidase__InfluenzaA__CAD29961
augaaccccaaucagaagaucauuaccaucggcagcgugucccugacaauuucuacgaucugcuucuuuaugcaaauugccauccucgucaccacaguuacccugcacuucaaacaguacgaguguaacagcccuccgaauaaccaggugaugcuuugcgaacccacaaucauugagagaaauaccacagaaaucguguaucugaccaacacgaccauugagaaggaaaucuguccuaaacucgcugaguaccggaauugguccaagccccagugcaacauuacaggguuugccccuuucucuaaagacaauagcauccgccuguccgcgggaggcgauauuugggucaccagagagcccuaugugucuugugacccugauaagugcuaccaauuugcucuugggcagggaacaacccugaacaauggccauagcaacgacacgguucacgaucggacaccguaucgcacccuccugaugaaugaacugggggugcccuuccaucucggaacaaagcaggucuguaucgccugguccucuagcuccugccacgacggcaaagccuggcugcauguguguguuaccggcgaugacgagaacgcuaccgccagcuuuaucuacaaugggagacuuguggauucuauuggauccuggagcaagaaaauccugcggacacaggaaucugagugcgucuguauuaacggcacgugcaccguggugaugacagacggguccgcuagcggaaaggccgauaccaaaauccucuucauugaggaaggcaagaucguccacacauccacccugucugggagcgcgcaacacguugaggaaugcuccuguuauccucgcuaccccggagugagaugcgugugucgggacaacuggaagggcagcaaucgcccuaucgucgauauuaacaucaaagacuacucuauuguguccagcuauguuugcucuggccuugugggggacacgcccagaaagaaugauagcuccucuagcucccauugucuggacccgaacaaugaggaaggaggccacggggucaaaggaugggccuuugaugacggcaacgauguguggauggggcggacaaucagcgagaagcuccgcucuggauacgagaccuucaaaguuauugaaggcugguccaagccuaauagcaaacugcagaucaacagacaggugaucgucgaccggggcaaucgcucuggguauuccggaauuuuuagcguggagggcaaguccugcaucaacagauguuucuacgucgaacugauucgggggagaaagcaggagaccgaagugcucuggacaucuaauagcaucguuguguuuugcggaaccuccggcacauaugggacgggcucuggacccgauggcgcugacauuaaccugaugccuaucuga

SEQ ID NO: 218273 - RNA, 1410 nt, Artificial Sequence; identical to SEQ ID NO: 213617
  derived and/or modified CDS sequence (opt5) from neuraminidase__InfluenzaA__CAD29962

SEQ ID NO: 218274 - RNA, 1410 nt, Artificial Sequence; identical to SEQ ID NO: 206356
  derived and/or modified CDS sequence (opt5) from neuraminidase__InfluenzaA__CAD29963

SEQ ID NO: 218275 - RNA, 1410 nt, Artificial Sequence; identical to SEQ ID NO: 206356
  derived and/or modified CDS sequence (opt5) from neuraminidase__InfluenzaA__CAD29964

SEQ ID NO: 218276 - RNA, 1410 nt, Artificial Sequence; identical to SEQ ID NO: 206356
  derived and/or modified CDS sequence (opt5) from neuraminidase__InfluenzaA__CAD29965

SEQ ID NO: 218277 - RNA, 1410 nt, Artificial Sequence; identical to SEQ ID NO: 206356
  derived and/or modified CDS sequence (opt5) from neuraminidase__InfluenzaA__CAD29966

SEQ ID NO: 218278 - RNA, 1410 nt, Artificial Sequence; identical to SEQ ID NO: 206112
  derived and/or modified CDS sequence (opt5) from neuraminidase__InfluenzaA__CAD29967

SEQ ID NO: 218279 - RNA, 1410 nt, Artificial Sequence; identical to SEQ ID NO: 206112
  derived and/or modified CDS sequence (opt5) from neuraminidase__InfluenzaA__CAD29968

SEQ ID NO: 218280 - RNA, 1410 nt, Artificial Sequence; identical to SEQ ID NO: 206645
  derived and/or modified CDS sequence (opt5) from neuraminidase__InfluenzaA__CAD29969

SEQ ID NO: 218281 - RNA, 1410 nt, Artificial Sequence
  derived and/or modified CDS sequence (opt5) from neuraminidase__InfluenzaA__CAD29970
augaaccccaaucagaagaucauuaccaucggcagcgugucccugacaauugccacgaucugcuuccucaugcaaauugcuauccuggucaccacaguuacccuucacuuuaaacaguacgaguguaacucuccuccgaauaaccaggugaugcugugcgaacccacaaucauugagagaaauaucaccgaaauuguguaucucacaaacaccacgaucgagaaggaaauuuguccuaaacuggccgaguaccggaauuggagcaagccccagugcaaaaucaccggguucgcgccuuuuuccaaggacaacucuauucgccuuagcgcuggaggcgauaucugggucacaagagagcccuauguguccugugacccugauaagugcuaccaauucgcccuggggcagggaaccacacucaauaaccggcauucuaaugacaccguucacgaucgcacgccguauagaacacugcugaugaacgaacucggcgugcccuuucaucuggggaccaaacaggucuguaucgccuggagcuccagcucuugccacgacggaaaggcuuggcuucauguguguguuacaggccacgaugagaaugccaccgcuuccuucauuuacgacggccggcugguggauagcaucgggucuugguccaaaaagauucuccgcacccaggaaagcgagugcgucuguaucaacggaacaugcacgguggugaugaccgacggcucugccuccgggagagcggauacaaaaauucuguuuaucgaggaaggaaagaucguccacauuagcccucuuuccggcucugcccaacauguugaggaaugcagcuguuauccccgguacccugggauccgcugcguguguagagacaauuggaagggauccaaccggcccauuguggauaucaacgucaaagacuacagcauugugucuuccuauguuugcagcggccuggugggcgacaccccgcgcaagaaugauucuagcuccucuagccacugucucaacccuaauaacgaggaagggggacauggcgucaaagggugggcuuucgacgauggaaaugacguguggaugggcagaacaaucuccgagaagcugcggagcggguacgagaccuuuaaaguuaucgaaggauggucuaagcccaacuccaaacugcagauuaaucgccaggugaucgucgauagaggcaaccggagcggcuauucugggauuuucuccguggagggaaagagcugcaucaauagauguuuuuacgucgaacucauucgcggccggaagcaggagacggaagugugguggacauccaacucuaucguuguguucugcgggaccagcggaaccuauggcacaggguccuggccugacggcgccgauauuaaucugaugcccaucuga

SEQ ID NO: 218282 - RNA, 1410 nt, Artificial Sequence; identical to SEQ ID NO: 208627
  derived and/or modified CDS sequence (opt5) from neuraminidase__InfluenzaA__CAD29971

SEQ ID NO: 218283 - RNA, 1410 nt, Artificial Sequence
  derived and/or modified CDS sequence (opt5) from neuraminidase__InfluenzaA__CAD29972
augaaccccaaucagaagaucauuaccaucggcagcgugucccugacaauugccacgaucugcuuccucaugcaaauugucauccugguuaccacagugacccuucacuuuaaacaguacgaguguaacucuccuccgaauaaccaggugaugcugugcgaacccacaaucauugagagaaauaucaccgaaauugucuaucucacaaacaccacgaucgagaaggaaauuuguccuaaacuggcugaguaccggaauuggagcaagccccagugcaacaucaccggguucgccccuuuuuccaaagacaauucuauucgccuuagcgcgggaggcgauaucugggugacaagagagcccuauguuuccugugacccugauaagugcuaccaauucgcucuggggcagggaaccacacucaacaauggccauucuaacgacaccgugcacgaucggacgccguaucgcacacugcugaugaaugaacucgggguccccuuucaucugggaaccaaacagguguguaucgccuggagcuccagcucuugccacgacggcaaagccuggcuucauguuugugugacaggcgaugacaagaacgcuaccgccuccuucauuuacaaugggagacuggucgauagcaucggaucuugguccaaaaagauucuccggacccaggagagcgaaugcguguguaucaacggcacaugcgcuguggucaugacggacgggucugccuccggaaaagcggauaccaagauucuguuuaucgaggagggcaagaucgggcacacaagccuucuguccggaucugcccaacacguugaagagugcagcuguuauccucgcuaccccggcgugagaugcgugugucgggacaacuggaaaggcuccaaucgcccuauugucgauaucaacgugaaggacuacagcauuguuucuuccuaugugugcagcgggcucgucggagacacccccagaaagaaugauucuagcuccucuagccauugucuggacccgaacaaugaagagggcgggcacggagugaagggcugggcuuucgaugacgggaacgauguuuggaugggacggacaaucuccgaaaaacugcgcagcggcuacgagaccuuuaaggugauugagggcuggucuaaaccuaauuccaagcuccagaucaacagacaggucaucguggaccgggggaaucgcagcggauauucuggcauuuucuccgucgaaggaaagagcugcaucaacagauguuuuuacguggagcugauucgggggagaaaucaggaaacggagauccuuuggacauccaacucuauuguuguguucugcggcaccagcgggaccuauggcacaggauccuggcccgauggcgccgacaucaaucugaugccuauuuga

SEQ ID NO: 218284 - RNA, 1410 nt, Artificial Sequence
  derived and/or modified CDS sequence (opt5) from neuraminidase__InfluenzaA__CAD29973
augaaccccaaucagaagaucauuaccaucggcagcgugucccugacaauugccacgaucugcuuccucaugcaaauugcuauccuggucaccacaguuacccuucacuuuaaacaguacgaguguaacucuccuccgaauaaccaggugaugcugugcgaacccacaaucauugagagaaauaucaccgaaauuguguaucucacaaacaccacgaucgagaaggaaauuuguccuaaacuggccgaguaccggaauuggagcaagccccagugcaaaaucaccggguucgcgccuuuuuccaaggacaacucuauucgccuuagcgcuggaggcgauaucugggucacaagagagcccuauguguccugugacccugggaagugcuaccaauucgcccugggacagggcaccacacucaauaaccggcauucuaaugauaccguucacgaccgcacgccguauagaacacugcugaugaacgaacucggggugcccuuucaucugggaaccaaacaggucuguaucgccuggagcuccagcucuugccacgauggcaaggcuuggcuucauguguguguuacaggccacgacgagaaugccaccgcuuccuucauuuacgaugggcggcugguggacagcaucggaucuugguccaaaaagauucuccgcacccaggaaagcgagugcgucuguaucaacggcacaugcacgguggugaugaccgaugggucugccuccggacgcgcggacacaaaaauucuguuuaucgaggaaggcaagaucguccacauuagcccucuuuccgggucugcccaacauguugaggaaugcagcuguuauccccgguacuccggagugcgcugcguguguagagauaauuggaagggcagcaaccggccuaucgucgacauuaacgugaaagauuacucuaucguuuccagcuaugugugcucuggccuggucggggacacccccagaaagaaugacagcuccucuagcucccacugucucaacccgaauaacgaggaaggaggccauggggugaaaggaugggcuuucgaugacggcaaugauguuuggauggggagaacaauuagcgagaagcugcggucuggauacgagaccuuuaaagugaucggcggcugguccaagccuaacagcaaacugcagaucaaucgccaggucauuguggacagagggaaccggucuggauauuccggcaucuucagcgucgaagggaaguccugcauuaauagauguuuuuacguggagcucauccgcggacggaagcaggaaacggagguuugguggacaucuaacagcauuguggucuucugcggcaccuccgggaccuauggcacaggaucuuggcccgauggcgccgacaucaaucugaugccuauuuga

SEQ ID NO: 218285 - RNA, 1410 nt, Artificial Sequence; identical to SEQ ID NO: 214656
  derived and/or modified CDS sequence (opt5) from neuraminidase__InfluenzaA__CAD29974

SEQ ID NO: 218286 - RNA, 1410 nt, Artificial Sequence
  derived and/or modified CDS sequence (opt5) from neuraminidase__InfluenzaA__CAD29984
augaaccccaaucagaagaucauuaccaucggcagcgugucccugacaauugccacgaucugcuuccucaugcaaauugcuauccuggucaccacaguuacccuucacuuuaaacaguacgaguguaacucuccuccgaauaaccaggugaugcugugcgaacccacaaucauugagagaaauaucaccgaaauuguguaucucacaaacaccacgaucgagaaggaaauuuguccuaaacuggccgaguaccggaauuggagcaagccccagugcaacaucaccggguucgcgccuuuuuccaaagacaauucuauucgccuuagcgcuggaggcgauaucugggucacaagagagcauuauguguccugugaccgggauaagugcuaccaauucgcccuggggcagggaaccacacucaacaauggccacucuaacgacaccguucaugaucgcacgcccuauagaacacugcugaugaaugaacucggggugccuuuucaccugggaaccaagcaggucuguaucgccuggagcuccagcucuugccaucacggcaaagccuggcuucacguguguguuacaggcgacgaugagaacgcuaccgcuuccuucauuuacaaugggcggcugguggacagcaucggaucuugguccaagaaaauucuccgcacccaggaaagcgagugcgucuguaucaacggcacaugcacgguggugaugaccgaugggucugccuccggaaaggcggacacaaaaauucuguuuaucaaggagggcaagaucguccauaccagcucccuuucugggagcgcccaacacguugaagagugcuccuguuauccgagauaccccggagugcggugcgugugucgcgauaacuggaaaggcagcaauagaccuauugucgacaucaacgugaaggauuacucuauuguuuccagcuaugugugcucuggccuggucggggacacaccccggaaaaaugacagcuccucuagcucccauugucucgauccuaacaaugaagagggaggccacggggugaagggaugggcuuucgacgauggcaacgacguuuggauggggcgcaccaucagcgaaaaacugagaucuggauacgagacguuuaaggugauugagggcugguccaaagccaauagcaagcugcagaucaaccggcaggucaucguggaucgcggcaauagaucuggguauuccggaauuuucagcgucgaauccaagucuugcaucaaccgguguuuuuacguggagcucauuagaggccgcaaacaggaaacagagguucuguggaccagcaauuccaucguggucuucugcgggaccucuggaacauauggcaccgggagcuggcccgacggcgcugauauuaaccuuaugccgaucuga

SEQ ID NO: 218287 - RNA, 1410 nt, Artificial Sequence
  derived and/or modified CDS sequence (opt5) from neuraminidase__InfluenzaA__CAD29985
augaaccccaaucagaagaucauuaccaucggcagcgugucccugacaauugccacgaucugcuuccucaugcaaauugcuauccuggucaccacaguuacccuucacuuuaaacaguacgaguguaacucuccuccgaauaaccaggugaugcugugcgaacccacaaucauugagagaaauaucaccgaaauuguguaucucacaaacaccacgaucgagaaggaaauuuguccuaaacuggccgaguaccggaauuggagcaagccccagugcaacaucaccggguucgcgccuuuuuccaaagacaauucuauucgccuuagcgcuggaggcgauaucugggucacaagagagcccuauguguccugugacccugauaagugcuaccaauucgcccuggggcagggaaccacacucaacaauggccauucuaacgacaccguucacgaucggacgccguaucgcacacugcugaugaaugaacucggggugcccuuucaucugggaaccaagcaggucuguaucgccuggagcuccagcucuugccacgacggcaaagccuggcuucauguguguguuacaggcgaugacgagaacgcuaccgcuuccuucauuuacaaugggagacugguggauagcaucggaucuugguccaagaaaauucuccggacccaggaaagcgagugcgucuguaucaacggcacaugcacgguggugaugaccgacgggucugccuccggaaaggcggauacaaaaauucuguuuaucgaggaaggcaagaucguccacauuagcacccuuuccgggucugcccaacacguugaggaaugcagcuguuauccucgcuaccccggagugagaugcgugugucgggacaacuggaagggcuccaaucgcccuaucgucgauauuaacgugaaagacuacagcaucguuucuuccuaugugugcagcggccuggucggggacacacccagaaagaaugauucuuucagcuccucucauugucucgacccgaacaaugaggaaggaggccacggggugaaaggaugggcuuuugaugacggcaacgauguuuggauggggcggaccauuagcgagaagcugcgcuccggauacgagacguucaaagugaucgaaggcuggagcaagccuaauucuaaacugcagaucaacagacaggucauuguggagcggggcaaucgcuccggguauagcggaaucuuuucugucgaaggcaaguccugcauuaacagauguuucuacguggagcucauccgggggagaaaggaagagacagagguuugguggaccagcaauuccauuguggucuuuugcggaaccucucgcacauauggcaccgggagcuggcccgacggcgccgauaucaaccugaugccuauuuga

SEQ ID NO: 218288 - RNA, 1410 nt, Artificial Sequence
  derived and/or modified CDS sequence (opt5) from neuraminidase__InfluenzaA__CAD29988
augaaccccaaucagaagaucauuaccaucggcagcgugucccugacaauugccacgaucugcuuccucaugcaaauugcuauccuggucaccacaguuacccuucacuuuaaacaguacgaguguaacucuccuccgaauaaccaggugaugcugugcgaacccacaaucauugagagaaauaucaccgaaauuguguaucucacaaacaccacgaucgagaaggaaauuuguccuaaacuggccgaguaccggaauuggagcaagccccagugcaacaucaccggguucgcgccuuuuuccaaagacaauucuauucgccuuagcgcuggaggcgauaucugggucacaagagagcccuauguguccugugacccugauaagugcuaccaauucgcccuggggcagggaaccacacucaacaauggccauucuaacgacaccguucacgaucggacgccguaucgcacacugcugaugaaugaacucggggugcccuuucaucugggaaccagacaggucuguaucgccuggagcuccagcucuugccacgacggcaaggcuuggcuucauguguguguuacaggcgaugacgagaacgccaccgcuuccuucauuuacaaugggcggcugguggauagcaucggaucuugguccaaaaagauucuccgcacccaggaaagcgagugcgucuguaucaacggcacaugcacgguggugaugaccgacgggucugccuccgagaaagcggauacaaagauucuguuuaucgaagagggaaaaaucguccacauuagcacccuuuccggcucugcccaacacguugaagagugcagcuguuauccuagauaccccggggugcggugcgugugucgcgacaacuggaagggauccaauagaccuaucgucgauauuaacgugaaggacuacagcaucguuucuuccuaugugugcagcggccuggucggcgacacaccccggaaaaaugauucuuucagcuccucucauugucucgacccgaacaaugaagaagggggacacggcgugaaggggugggcuuuugaugacggaaacgauguuuggaugggccgcaccauuagcgagaaacugagauccggguacgagacguucaaggugaucgagggauggagcaaaccuaauucuaagcugcagaucaaccggcaggucauuguggaacgcggcaauagauccggcuauagcgggaucuuuucugucgagggaaaauccugcauuaaccgguguuucuacguggaacucaucagaggccgcaaggaggagacagaaguuugguggaccagcaauuccauuguggucuuuugcgggaccucuggaacauauggcaccgggagcuggcccgacggcgccgauaucaaccugaugccuauuuga

SEQ ID NO: 218289 - RNA, 1410 nt, Artificial Sequence
  derived and/or modified CDS sequence (opt5) from neuraminidase__InfluenzaA__CAD29990
augaaccccaaucagaagaucauuaccaucggcagcgugucccugacaauugccacgaucugcuuccucaugcaaauugcuauccuggucaccacaguuacccuucacuuuaaacaguacgaguguaacucuccuccgaauaaccaggugaugcugugcgaacccacaaucauugagagaaauaucaccgaaauuguguaucucacaaacaccacgaucgagaaggaaauuuguccuaaacuggccgaguaccggaauuggagcaagccccagugcaacaucaccggguucgcgccuuuuuccaaagacaauucuauucgccuuagcgcuggaggcgauaucugggucacaagagagcccuauguguccugugacccugauaagugcuaccaauucgcccuggggcagggaaccacacucaacaauggccauucuaacgacaccguucacgggcggacgccguaucgcacacugcugaugaaugaacucggagugcccuuucaucugggcaccaagcaggucuguaucgccuggagcuccagcucuugccacgauggcaaagccuggcuucauguguguguuacaggggacgaugagaacgcuaccgcuuccuucauuuacaauggaagacugguggacagcaucggcucuugguccaagaaaauucuccggacccaggaaagcgagugcgucuguaucaacgggacaugcacgguggugaugaccgauggaucugccuccggcaaggcggacacaaaaauucuguuuaucgaggaagggaagaucguccacaccagccuucuguccggaucugcccaacacguugaggaaugcagcuguuauccucgcuaccccggcgugagaugcgugugucgggauaacuggaagggcuccaaucgcccuauugucgacaucaacgugaaagauuacagcauuguuucuuccuaugugugcagcgggcucgucggagacacacccagaaagaaugacaacucuagcuccucucauugucuggauccgaauaacgaggaaggcgggcacggagugaaaggcugggcuuucgacgaugggaaugacguuuggaugggacggaccaucagcgagaagcugcgcuccggcuacgagacguuuaaagugauugaaggcuggagcaagccuaacucuaaacuccagaucaauagacaggucaucguggaucgggggaaccgcuccggauauagcggcauuuucucugucgaggggaaguccugcaucaauagauguuuuuacguggaacugauucggggaagaaagcaggagacagaaguucuuuggaccagcaacuccaucguggucuucugcggcaccucugggacauauggcaccggaagcuggcccgacggcgccgauauuaaucugaugccuaucuga

SEQ ID NO: 218290 - RNA, 1410 nt, Artificial Sequence; identical to SEQ ID NO: 206133
  derived and/or modified CDS sequence (opt5) from neuraminidase__InfluenzaA__CAD29991

SEQ ID NO: 218291 - RNA, 1410 nt, Artificial Sequence
  derived and/or modified CDS sequence (opt5) from neuraminidase__InfluenzaA__CAD29992
augaaccccaaucagaagaucauuaccaucggcagcgugucccugacaauugccacgaucugcuuccucaugcaaauugcuauccuggucaccacaguuacccuucacuuuaaacaguacgaguguaacucuccuccgaauaaccaggugaugcugugcgaacccacaaucauugagagaaauaucaccgaaauuguguaucucacaaacaccacgaucgagaaggaaauuuguccuaaacuggccgaguaccggaauuggagcaagccccagugcaacaucaccggguucgcgccuuuuuccaaagacaauucuauucgccuuagcgcuggaggcgauaucugggucacaagagagcccuauguguccugugacccugauaagugcuaccaauucgcccuggggcagggaaccacacucaacaauggccauucuaacgacaccguucacgaucggacgccguaucgcacacugcugaugaaugaacucggggugcccuuucaucugggaaccaagcaggucuguaucgccuggagcuccagcucuugccacgacggcaaagccuggcuucauguguguguuacaggcgaugacgagaacgcuaccgcuuccuucauuuacaaugggagacugguggauagcaucggaucuugguccaagaaaauucuccggacccaggaaagcgagugcgucuguaucaacggcacaugcacgguggugaugaccgacgggucugccuccggaaaggcggauacaaaaauucuguuuaucgaggaaggcaagaucguccacaccagccuucuguccgggucugcccaacacguugaggaaugcagcuguuauccucgcuaccccggagugagaugcgugugucgggacaacuggaagggcuccaaucgcccuauugucgauaucaacgugaaagacagaagcauuguuucuuccuacgugugcagcggccucgucggggacacaccccggaagaaugauucuagcuccucuagccauugucuggacccgaacaaugaggaaggaggccacggggugaaaggaugggcuuucgaugacggcaacgauguuuggauggggcgcaccaucuccgagaagcugagaagcggauaugagacguuuaaagugauugaaggcuggucuaagccuaauuccaaacuccagaucaaccggcaggucaucguggaccgcggcaauagaagcggguacucuggaauuuucuccgucgagggcaagagcugcaucaaccgguguuuuuauguggaacugauuagagggcgcaagcaggagacagaaguucuuuggaccuccaauucuaucguggucuucugcggaaccagcggcacauacgggaccggcuccuggcccgauggagccgacauuaaccugaugccuaucuga

SEQ ID NO: 218292 - RNA, 1410 nt, Artificial Sequence
  derived and/or modified CDS sequence (opt5) from neuraminidase__InfluenzaA__CAD29993
augaaccccaaucagaagaucauuaccaucggcagcgugucccugacaauugccacgaccugcuuccucaugcaaaucgcuauucuggucacaaccguuacacuucacuuuaaacaguacgaguguaacucuccuccgaauaaccaggugaugcugugcgaacccaccaucaucgagagaaauauuacagaaaucguguaucucaccaacacgaccauugagaaggaaaucuguccuaaacuggccgaguaccggaauuggagcaagccccagugcaacauuacaggguucgcgccuuuuuccaaagacaauucuauccgccuuagcgcuggaggcgauauuugggucaccagagagcccuauguguccugugacccugauaagugcuaccaauucgcccuggggcagggaacaacccucaacaauggccauucuaacgacacgguucacgaucggacaccguaucgcacccugcugaugaaugaacucggggugcccuuucaucugggaacaaagcaggucuguaucgccuggagcuccagcucuugccacgacggcaaagccuggcuucauguguguguuaccggcgaugacgagaacgcuaccgcuuccuucaucuacaaugggagacugguggauagcauuggaucuugguccaagaaaauccuccggacacaggaaagcgagugcgucuguauuaacggcacgugcaccguggugaugacagacgggucugccuccggaaaggcggauaccaaaauccuguuuauugaggaaggcaagaucguccacacaagcccucuuuccgggucugcccaacacguugaggaaugcagcuguuauccccgcuacccuggagugagaugcgugugucgggacaacuggaagggcuccaaucgccccaucgucgauauuaacgugaaagacuacagcaucguuucuuccuaugugugcagcggccuggucggggacaccccgagaaagaaugauucuagcuccucuagccauugucucgacccuaacaaugaggaaggaggccacggggugaaaggaugggcuuucgaugacggcaacgauguuuggauggggcggacgauuuccgagaagcugcgcagcggauacgagacauuuaaagugaucgaaggcuggucuaagcccaauuccaaacugcagauuaacagacaggucaucguggaccggggcaaucgcagcggguauucuggaaucuucuccgucgagggcaagagcugcauuaacagauguuuuuacguggaacucauccgggggagaaagcaggagaccgaaguucuguggaccuccaauucuauuguggucuucugcggaacaagcggcaccuaugggacaggcuccuggccugauggagccgacaucaaccuuaugcccauuuga

SEQ ID NO: 218293 - RNA, 1410 nt, Artificial Sequence; identical to SEQ ID NO: 207821
  derived and/or modified CDS sequence (opt5) from neuraminidase__InfluenzaA__CAD29994

SEQ ID NO: 218294 - RNA, 1413 nt, Artificial Sequence; identical to SEQ ID NO: 208525
  derived and/or modified CDS sequence (opt5) from neuraminidase__InfluenzaA__CAD57252

SEQ ID NO: 218295 - RNA, 1413 nt, Artificial Sequence
  derived and/or modified CDS sequence (opt5) from neuraminidase__InfluenzaA__CAD57253
augaaccccaaucagaagaucauuaccaucggcagcauuagaaucgccauugggaucaucucccugaugcuccaaauuggaaacaucauuucuaucugggcuagccacuccauucagacaggcucucagaaucauacgggggugugcaaccagcggaucauuaccuacgagaauagcacaugggucaaccacaccuauguuaauaucaacaauacaaacgugaucgccggaaaagacaagaccuccgugacacuggcgggcaauucuagccuuuguuccauuagcgggugggcuaucuacaccaaagauaacucuauucgcaucggauccaagggcgacgucuucgugauuagagaaccuuuuaucagcugcucucaucuggagugucggacguucuuucucacccaaggcgcccugcuuaaugauaaacacuccaacgggacaguuaaggaccgcagcccguauagagcccugaugucuugcccccucggagaagcuccuucccccuacaauagcaaguucgaguccguggccuggucugcuagcgccugucaugauggcaugggguggcugaccaucggaauuuccggcccugacaacggggcggucgccgugcugaaauauaacggaaucauuacagaaaccaucaagagcuggaaaaagcagauucuccggacgcaggagucugagugcguuugugugaauggcuccugcuuuacaaucaugaccgauggccccagcaacggggcugccucuuacaaaaucuucaagauugaaaagggaaaaaucacaaagagcauugagcugaaugcuccuaacuuucacuaugaagaguguuccugcuacccggacaccggcaccgucaugugugugugccgcgauaauuggcacgggucuaacagacccugggugagcuucaaucagaaccuugacuaccaaaucggauauauuugcuccggcgucuuuggggauaauccucggcccaaagacggagagggcagcuguaacccuguuacaguggauggcgccaauggggugaagggauucucuuacaaauauggcaacggggucuggaucggacgcacgaaguccaauagacugcggaaaggcuuugaaaugauuugggaccccaacggguggaccgacacagauagcgacuucucugugaagcaggauguuguggcgaucaccgacugguccggcuacagcggauccuuuguccagcauccggagcucacaggccuggauugcauccgcccuuguuucuggguggaacuuguuagagggcugcccaaggagaauaccacgauuuggacaucuggaagcuccaucucuuucugcggcgugaacagcgacaccgccaacugguccuggccugauggggcugaacuccccuuuaccauugacaaauga

SEQ ID NO: 218296 - RNA, 1413 nt, Artificial Sequence; identical to SEQ ID NO: 206468
  derived and/or modified CDS sequence (opt5) from neuraminidase__InfluenzaA__CAD57255

SEQ ID NO: 218297 - RNA, 1413 nt, Artificial Sequence
  derived and/or modified CDS sequence (opt5) from neuraminidase__InfluenzaA__CAD57256
augaaccccaaucagaagaucauuaccaucggcagcauuuccguggccaucgggauuaucucucugaugcuccaaaucggaaacauuaucagcauuugggcuucccacucuauccagacaggcagccagaaucauacggggauuugcaaccagagaaucauuaccuacgagaauagcacaugggucaaccacaccuauguuaauaucaacaauacaaacgugguggccggaaaagacaagaccucugucacacuggcgggcaauagcucccuuuguagcaucucugggugggcuauuuacaccaaagauaacuccauccggauuggaagcaagggcgacguguucguuauccgcgaaccuuuuauuucuugcucccaucuggaguguagaacguucuuucucacccaaggcgcccugcuuaaugauaaacacagcaacgggacagugaaggaccggucuccguaucgcgcccugauguccugcccccucggagaagcuccuagccccuacaauuccaaguucgagucugucgccuggagcgcuuccgccugucaugauggcaugggguggcugaccaucggaaucagcggcccugacaacggggcgguggccguucugaaauauaacggaauuaucacagaaaccauuaagucuuggaaaaagagaauccuccggacgcaggaguccgagugcgugugugucaauggcagcugcuuuacaauuaugaccgauggccccucuaacggggcugccagcuaccgcaucuucaaaaucgaaaagggaagagugacaaaguccauugagcuggacgcuccuaauuaucacuacgaagaguguucuugcuacccggauaccggcaccgugaugugugucugccgggacaacuggcacgggagcaaucgccccuggguuuccuuuaaccagaaucuugauuaucagaucggauacauuugcagcggcguguucggggacaacccuagacccaaagauggagagggcucuuguaauccugugacagucgacggcgccgacggggugaagggauuuuccuauaaauacggcaacgggguuuggaucggacggacgaaguccaaucgccugagaaaaggcuucgaaaugauuugggaucccaacggguggaccgacacagauucugacuuuuccgugaagcaagaugucguggcgaucaccgacuggagcggcuauuccggaucuuucguucagcauccggagcucacaggccuggauugcauucggccuuguuuuuggguggaacuuguccgcgggagaccccgggagaauaccacgaucuggacaagcggauccucuaucagcuucugcggcgugaacuccgacaccgccaauuggagcuggccugauggggcugaacugcccuucaccauugacaaauga

SEQ ID NO: 218298 - RNA, 1413 nt, Artificial Sequence
  derived and/or modified CDS sequence (opt5) from neuraminidase__InfluenzaA__CAD57257
augaaccccaaucagaagaucauuaccaucggcagcauuuccaucgccauugggaucaucucucugaugcuccaaauuggaaacaucauuagcaucugggcuucccacucuauucagacaggcagccagaaucauacggggaucugcaaccagagaauuaucaccuacgagaauagcacaugggugaaccacaccuaugucaauaucaacaauacaaacguuguggccggaaaagacaagaccucugugacacuggcgggcaauagcucccuuuguagcauuucugggugggcuaucuacaccaaagauaacuccauucggaucggaagcaagggcgacgucuucgugauucgcgaaccuuuuaucucuugcucccaucuggaguguagaacguucuuucucacccaaggcgcccugcuuaaugauaaacacagcaacgggacaguuaaggaccggucuccguaucgcgcccugauguccugcccccucggagaagcuccuagccccuacaauuccaaguucgagucuguggccuggagcgcuuccgccugucaugauggcaugggguggcugaccaucggaauuagcggcccugacaacggggcggucgccgugcugaaauauaacggaaucauuacagaaaccaucaagucuuggaaaaagcggauucucagaacgcaggaguccgagugcguuugugugaauggcagcugcuuuacaaucaugaccgauggccccucuaacggggcugccagcuacaaaaucuucaagauugaaaagggaaaagucacaaaguccaucgagcugaaugcuccuaacucucacuaugaagaguguagcugcuacccggacaccggcaccgugaugugugugugccgcgauaauuggcacggguccaacagacccugggucagcuuuaaucagaaccuugacuaccagauuggauauaucugcucuggcguuuucggggauaauccucggcccaaagacggagagggcuccuguaacccugugacaguggauggcgccgacggggucaagggauuuagcuaccgcuauggcaaugggguguggauuggaagaacgaaaucuaaccggcugcgcaagggcuucgaaaugaucugggaccccaauggguggaccgauacagacuccgauuuuagcaugaaacaagacguuguggcgaugaccgauugguccggcuacucuggauccuucguccagcauccggagcucacaggccuggacugcauuagaccuuguuuuuggguggaacuuguucgggggcgccccagagagaacaccacgaucuggacauccggaucuagcaucuccuucugcggcgugaauagcgauaccgccaacuggucuuggccugacggggcugaacugcccuucaccauugauaaguga

SEQ ID NO: 218299 - RNA, 1413 nt, Artificial Sequence
  derived and/or modified CDS sequence (opt5) from neuraminidase__InfluenzaA__CAD57258
augaaccccaaucagaagaucauuaccaucggcagcauuuccguggccaucgggauuaucucucugauccuccaaauuggaaacaucauuagcaucugggcuucccacucuauucagacaggcagccagaauuacacggggaucugcaaccagagaauuaucaccuaugaaaauuccacaugggucaaccaaaccuacguuaauaucaacaauacaaacgugguggccggaaaagacaagaccucuaugguccuggcgggcaauagcucccuuuguccuauucgggggugggcuaucuauacaaaagauaacagcauucgcaucggaucuaagggcgacauuuucgugaucagagagccguuuaucuccugcagccaucuggagugucggaccuucuuucucacgcagggcgcccugcuuaaugauaaacacucuaacgggaccguuaaggaccgcucccccuacagagcccugaugagcugcccucucggagaagcucccucuccuuauaauucccgguucgagagcguggccugguccgcuucugccugucaugauggccugggguggcugacaauuggaaucagcggccccgacaacggggcggucgccgugcucaaguacaacggaauuaucaccgaaacaauuaaauccuggaagaaacagauccugcgcacccaggagagcgagugcguuugugugaauggcucuugcuuuacgaucaugacagauggcccuuccaacagagcugccagcuaucggauuuucaagaucgaaaaagggcgcgucaccaagucuauugagcuugacgcuccgaauuaccacuacgaagaguguagcugcuaucccgauacaggaaccgugaugugugugugcagagacaacuggcauggcuccaaucggccuugggucucuuuuaaccaaaaucuggauuaccagaucggguauauuugcagcggaguuuucggcgacaacccccgcccuaaggauggggagggauccuguaaucccgugaccguggacggcgccgacggcgucaaaggguuuagcuacagauauggaaacggcguguggaucgggcggacaaagucuaaucgccucagaaaaggauucgaaaugauuugggauccgaacggcuggacggacaccgauuccgacuuuagcaugaagcaggauguuguggcgaugacagacuggucuggguacuccggcagcuucguccagcacccugagcugaccggacuugauugcaugcggcccuguuuuuggguggaacugguuagaggccucccucgcgagaauacaaccaucuggacguccgggucuagcaucuccuucugcggagugaacucugaaacagccaauuggagcuggcccgacggcgcugagcugcccuucaccauugauaaauga

SEQ ID NO: 218300 - RNA, 1413 nt, Artificial Sequence
  derived and/or modified CDS sequence (opt5) from neuraminidase__InfluenzaA__CAD57259
augaaccccaaucagaagaucauuaccaucggcagcauuuccaucgccauugggaucaucucucugauucuccaaaucggaaacauuaucagcauuugggcuucccacucuauccagacagagagccagaaucauacgggcauuugcaaccagagaaucaucaccuacgaaaauuccacaugggugaaccaaaccuaugucaauauuaacaauacaaacguugccgcggggaaagacaagaccucuaugacacuggcuggaaauagcucccuuuguccuauccggggcugggccauuuacaccaaagauaacagcauccgcauugggucuaagggagacaucuucgugaucagagagccguuuauuuccugcagccaccuggaaugucggacguucuuucucacccagggcgcccugcuuaaugauaaacauucuaacggcacagugaaggaccgcucccccuauagagcucugaugagcugcccucucggggaggcccccucuccuuacaauucccgguucgaaagcgucgcuugguccgccucugcgugucacgauggacugggcuggcugaccaucgggauuagcggacccgacaacggcgccguggcuguucucaaguauaacgggaucauuacagagaccaucaaauccuggaagaaacgcauccugagaacgcaggagagcgaaugcguguguaugaauggaucuugcuuuacaauuaugaccgauggcccuuccaacggcgccgcuagcuaccggaucuucaagauugagaaagggcgcgucacaaagucuaucgaacuugacgccccgaauuaucauuacgaggaguguagcugcuaccccgaaaccggaaccgugauguguguuugcagagauaacuggcacggcuccaaucggccuugggugucuuuuaaccagaaucuggacuaucaaauuggguacaucugcagcggagucuucggcgauaacccccgcccuaaggacggggagggauccuguaaucccgugacaguggauggcgcggacggcgucaaaggguuuagcuauagauacggaaacggcguuuggauugggcggacgaagucuaaucgccucagaaaaggauucgaaaugaucugggacccgaacggcuggaccgauacagacuccgauuuuagcaugaagcaggacaucguggccaugaccgauuggucuggguauuccggcagcuucgugcagcacccugagcugacaggacuugacugcaugcggcccuguuuuugggucgaacuggugagaggccucccucgcgagaauaccacgauuuggacauccgggucuagcaucuccuucugcggaguuaacucugauaccgcuaauuggagcuggcccgacggcgccgagcugcccuucaccauugauaaauga

SEQ ID NO: 218301 - RNA, 1413 nt, Artificial Sequence
  derived and/or modified CDS sequence (opt5) from neuraminidase__InfluenzaA__CAD57264
augaaccccaaucagaagaucauuaccaucggcagcauuuccguggccaucgggauuaucucucugauccuccaaauuggaaacaucauuagcaucugggcuucccacucuauucagacaggcagccagaauuacacggggaucugcaaccagagaauuaucaccuaugagaauagcacaugggugaaccaaaccuacguuaauaucaacaauacaaacgugguggccggaaaagacaagaccucuaugacacuggcgggcaauagcucccuuuguccuauucgggggugggcuaucuauaccaaagauaacagcauucgcaucggaucuaagggcgacgucuucgugauuagagaaccguuuaucuccugcagccaucuggagugucggacguucuuucucacccagggcgcccugcuuaaugauaaacacucuaacgggacaguuaaggaccgcucccccuacagagcccugaugagcugcccucucggagaagcucccucuccuuauaauucccgguucgagagcguggccugguccgcuucugccugucaugauggccugggguggcugaccaucggaauuagcggccccgacaacggggcggucgccgugcucaaguacaacggaaucauuacagaaaccaucaaauccuggaagaaacagauucugcgcacgcaggagagcgagugcguuugugugaauggcucuugcuuuacaaucaugaccgauggcccuuccaacggggcugccagcuauagaaucuucaagauugaaaaaggacgggucacaaagucuaucgagcuugacgcuccgaauuaccacuacgaagaguguagcugcuaucccgauaccggcaccgugaugugugugugccgcgacaacuggcauggguccaauagaccuugggucucuuuuaaccaaaaucuggauuaccagauuggauauaucugcagcggcguuuucggggacaacccccggccuaaggauggagagggcuccuguaaucccgugacaguggacggcgccaacggggucaaaggauuuagcuaccgcuauggcaaugggguguggauuggaagaacgaagucuaaccggcuccgcaaaggcuucgaaaugaucugggacccgaauggguggaccgauacagacuccgauuuuagcaugaagcaggacguuguggcgaugaccgauuggucuggcuacuccggauccuucguccagcacccugagcugacaggccuugacugcaugagacccuguuuuuggguggaacugguucgggggcucccuagagagaacaccacgauuuggacauccggaucuagcaucuccuucugcggcgucaauucugaaaccgccaacuggagcuggcccgauggggcugagcugcccuucaccaucgacaaauga

SEQ ID NO: 218302 - RNA, 1350 nt, Artificial Sequence
  derived and/or modified CDS sequence (opt5) from neuraminidase__InfluenzaA__CBW54819
augaaccccaaucagaagaucauuaccaucggcagcauuugcauggugaucgggauugucucccugaugcuccaaaucggaaacaugaucucuauuuggguuagccacuccauccagacaggcaaucagugucaggccgagccuauuucuaacacgaaauuccugaccgaaaaggcuguggccagcgugacacuugcgggaaauuccucucugugcccgaucagcgggugggcugucuacuccaaagacaacagcauuagaaucggcucucgcggggauguguuuguuauucgggagcccuucaucuccuguagccaucucgaaugcagaaccuuuuuccugacacaaggagcccuucugaaugacaagcacucuaacggcaccgugaaagaucgguccccucaucgcacacucaugagcugucccgucggcgaggccccuucucccuauaauuccagauuugaaagcguggcuugguccgccucugcuugccacgacgggaucagcuggcugaccauuggaaucuccggcccugauaacggggccguugcggugcugaaguacaauggaauuaucacggacaccauuaagagcuggcggaacaauauccuccgcacacaggagucugagugugccugcgucaacggcuccuguuucaccgugaugacagaugggccgagcucuggacaggcuagcuauaaaaucuuuaagauggaaaaaggcaagguggucaaauccguugagcuggacgcccccaauuaccauuaugaagagugcucuuguuacccugaugcuggcgagauuaccugcgugugcagagacaacuggcacgggagcaaccggcccuggguguccuucaaucagaaccuugaauaucgcaucggauacauuuguagcggcgucuuuggggauaauccuagacccaacgacggaacgggcucuugcgggccgguguccccuaauggagccuacggcguuaagggcuucagcuuuaaguauggggauggaguguggaucggccggacaaaaucuaccaacucccgcagcggguucgagauggucugggaccccaauggauggacaggcaccgacuccucuuuuagcgugaagcaagauauuguugcgaucaccgacugguccggguacucuggcagcuucgugcagcacccugaacugacaggacucgauuguaucagacccugcuucugggucgagcugauucggggccgccccaaagaauccacgaucuggaccagcgggucuuccauuagcuuuuguggagugaacucugacacagucuccuggagcuggccugauggcgccgagcuuccguucaccaucgacaaguga

SEQ ID NO: 218303 - RNA, 1350 nt, Artificial Sequence
  derived and/or modified CDS sequence (opt5) from neuraminidase__InfluenzaA__CBW54821
augaaccccaaucagaagaucauuaccaucggcagcauuugcaucgugauugggaucgucucccugaugcuccaaaucggaaacaugauuucuaucuggguuagccacuccauucagacaggcaaucagugucaggccgagccuaucucuaacacgaaauuccugaccgaaaaggcuguggccagcgugacacuugcgggaaauuccucucugugcccgauuagcgggugggcugucuacuccaaagacaacagcaucagaauuggcucucgcggggauguguuuguuauccgggagcccuucaucuccuguagccaucucgaaugcagaaccuuuuuccugacacaaggagcccuucugaaugacaagcacucuaacggcaccgugaaagaucgguccccucaucgcacacucaugagcugucccgucggcgaggccccuucucccuauaauuccagauuugaaagcguggcuugguccgccucugcuugccacgacgggauuagcuggcugaccaucggaauuuccggcccugauaacggggccguugcggugcugaaguacaauggaaucauuacggacaccaucaagagcuggcggaacaauauccuccgcacacaggagucugagugugccugcauuaacggcuccuguuucaccgucaugacagaugggccgagcucuggacaggcuagcuauaaaaucuuuaagauggaaaaaggcaagguggugaaauccgucgagcuggacgcccccaauuaccauuaugaagagugcucuuguuacccugaugcuggcgagauuaccugcguuugcagagacaacuggcacgggagcaaccggcccuggguguccuucaaucagaaccuugaauaucaaaucggauacauuuguagcggcguguuuggggauaauccucgccccaacgacggaacgggcucuugcgggccggucuccccuaauggagccuacggcgugaagggcuucagcuuuaaguaugggaacggaguuuggaucggcagaacaaaaucuaccaauucccggagcggguucgagaugaucugggaucccaacggauggacaggcaccgacuccucuuuuagcgugaagcaggacauugucgcgaucaccgauugguccggguacucuggcagcuucgugcagcacccugaacugacaggacucgacuguauucgccccugcuucuggguugagcugaucagaggccagcccaaagaauccacgauuuggaccagcgggucuuccaucagcuuuuguggagucaauucugauacaguguccuggagcuggccugacggcgccgagcuuccguucaccauugauaaguga

SEQ ID NO: 218304 - RNA, 1410 nt, Artificial Sequence
  derived and/or modified CDS sequence (opt5) from neuraminidase__InfluenzaA__CCG47912
augaaccccaaucagaagaucauuaccaucggcagcgugucccugacaauugccacgaugugccucuucaugcaaaucgcuauucugaucaccacagucacccuucacuuuaaacaguacgagugugacucuccugccaacaaucagguuaugccgugcgaacccaucauuaucgagaagaacauuacaaaaaucguguaucugaccaauacaaccauugaaaaggagguguguccuaaacucggggaauacagaaacuggagcaagccccagugccggaucacgggauucgcgccuuuuuccaaggauaauucuauucgccugagcgcuggcggggccaucugggucaccagagagcccuauguguccugugacccuaacaaaugcuaccaauucgcccuuggacagggcacaacccuggauaaucggcauucuaacgacacaauccacgaucgcaccccguauagaacgcuccugaugaaugagcuggggguucccuuucaucucggaacacgccagguguguauugcuuggagcuccagcucuugccacgacggcaaggccuggcugcaugucugugugaccggccacgauaaaaacgcuacagccuccuucaucuacgacgggaaacuuguugauagcauuucuuccuggagccagaauauccugcggacccaagaaucugagugcguguguauuaacggaaucugcaccgucgugaugacagacggcuccgcgagcgggaaggccgauacgaagauccucuuuauugaagagggaaaggugauccacauuuccccucugcuuggcucugcucagcaugucgaggaaugcagcuguuaucccagauacccugacguucggugcaucugucgcgauaauuggaaaggguccaacagacccauuguggacauccggaugaaggacuacagcaucggaucuuccuauaugugcagcggccuggugggcgauaccccgcgcaacaaugacgggucuagcaacuccaauuguagaaacccuaauaacgagcggggaaaucacggcgucaaagggugggccuucgaugacggaaacgauauuuggaugggccgcacaaucucuaaggacagcagacucggguacgaaaccuuuaaagugguuggaggcuggucccagcccaauagcaaguuccagauuaaccggcaagugaucgucgauucugacaauagauccggcuauagcgggaucuuuucuguggagggaaaauccugcauuaaccgcuguuucuacguugaacugauucggggcagacgccaggagacacgggugugguggaccagcaauuccaucgucguguuuugcgggacgucuggaacauauggcagcggguccuggccugauggcgcugacaucaacuucaugcccauuuga

SEQ ID NO: 218305 - RNA, 1353 nt, Artificial Sequence
  derived and/or modified CDS sequence (opt5) from neuraminidase__InfluenzaA__AAF74321
augaaccccaaucagaagaucauuaccaucggcagcauuugcaugguggucgggaucauuucccugaugcuccaaaucggaaacaucauuucuguuugggugagccacacaauccagacguggcauccuaaucagccggagcccuguaaccaguccauuaauuucuacaccgaacaagccgcugccucugugacacuggcgggcaacagcucccuuugcccuaucucugggugggcuauuuauagcaaagacaauuccaucagaauuggaagcaagggcgaugucuuugugauccgggagcccuucaucucuuguucccaccuggaaugccgcaccuuuuuccucacacagggggcccugcuuaacgacaaacauagcaauggaaccguuaaggauagaucuccuuaccggacacugauguccugucccgugggcgaggccccuagcccguauaacucucgcuuugaauccgucgcuuggagcgccuccgcuugccacgacggcauuucuuggcucaccaucgggauuagcggacccgauaauggcgccguggcgguucugaaauacaacgggaucauuacggacaccaucaaguccuggagaaauaacauccugcggacacaggagagcgagugugccugcgugaauggaucuuguuucaccgucaugacagauggcccuuccaacgaacaggcuagcuauaagauuuuuaaaaucgagaaggggcgcguggugaaaucugucgaacucaacgcccccaauuaccauuaucaagagugcagcuguuacccugacgcuggagagauuaccugcguuugcagagauaacuggcacggcuccaaucggcccugggugucuuucaaccagaaucuggaauaccagaucggcuauauuuguagcgggguguuuggagacuccccgcgcccuaacgauggcacggggagcugcggacccgucucucuuaauggcgccuacggggugaagggauucuccuuuaaauauggcaacggcguuuggaucgggagaacaaagagcaccucuucccggagcggauucgagaugaucugggacccuaauggcuggacagaaaccgauuccucuuuuagccugaagcaggacauuaucgcgauuaccgacugguccggguacucuggcagcuucauccaacaccccgagcucacaggacugaacuguaugcgccccugcuucuggguggaacuuauuagagggcggccuaaagagaagacgaucuggaccuccggcagcucuauuuccuuuuguggagucaauagcgauacagugggcuggucuuggccggacggggccgagcugcccuucaccaucgauaaauga

SEQ ID NO: 218306 - RNA, 1353 nt, Artificial Sequence
  derived and/or modified CDS sequence (opt5) from neuraminidase__InfluenzaA__AAF74322
augaaccccaaucagaagaucauuaccaucggcagcauuugcaugguggucgggaucauuucccugaugcuccaaaucggaaacacaaucucuguuugggugagccacauuaucaaaacguggcauccuaaucagccggagcccuguaaccaguccauuaauuucuacaccgaacaggccgcugccucugugacacuggcgggcaacagcucccuuugcccuaucucugggugggcuauuuauagcaaggacaauuccaucagaauuggaagcaaaggcgaugucuuugugauccgggagcccuucaucucuuguucccaccuggaaugccgcaccuuuuuccucacacaaggggcccugcuuaacgacaagcauagcaauggaaccguuaaagauagaucuccuuaccggacacugauguccugucccgugggcgaggccccuagcccguauaacucucgcuuugaauccgucgcuuggagcgccuccgcuugccacgacggcauuucuuggcucaccaucgggauuagcggacccgauaauggcgccguggcgguucugaaguacaacgggaucauuacggacaccaucaaguccuggagaaauaacacacugcggacccaggagagcgagugugccugcgugaauggaucuuguuucacagucaugaccgauggcccuuccaacgaacaggcuagcuauaaaaucuuuaagauugagaaagggcgcguggugaagucugucgaacucaacgcccccaauuaccauuaugaggagugcagcuguuacccugacgcuggagaaaucacgugcguuugcagagauaacuggcacggcuccaaucggcccugggugucuuucaaccagaaucuggaguaccaaauuggcuauaucuguagcgggguguuuggagacuccccgcgcccuaacgauggcacagggagcugcggacccgucucucuuaauggcgccuacggggugaaaggauucuccuuuaaguauggcaacggcguuuggauugggagaaccaagagcacaucuucccggagcggauucgaaaugaucugggacccuaauggcuggaccgagaccgauuccucuuuuagccugaaacaggacaucauugcgaucacagacugguccggguacucuggcagcuucauucagcaccccgaacucacgggacugaacuguaugcgccccugcuucuggguggagcuuaucagagggcggccuaaggagaaaaccauuuggacauccggcagcucuaucuccuuuuguggagucaauagcgauaccgugggcuggucuuggccggacggggccgaacugcccuucacaauugauaaguga

SEQ ID NO: 218307 - RNA, 1353 nt, Artificial Sequence
  derived and/or modified CDS sequence (opt5) from neuraminidase__InfluenzaA__AAF74323
augaaccccaaucagaagaucauuaccaucggcagcauuugcaugguggucgggaucauuucccugaugcuccaaaucggaaacaucauuucuguuuggaucagccacauuauccagacauggcauccuaaucagccggagcccuguaaccaguccauuaauuucuacacggaacaagccgcugccucugugacccuggcgggcaacagcucccuuugcccuaucucugggugggcuauuuauagcaaagacaauuccaucagaaucggaagcaagggcgauguguuugucauucgggagcccuucaucucuuguucccaccuggaaugccgcacauuuuuccucacccagggggcccugcuuaacgacaaacauagcaauggaacagugaaggauagaucuccuuaccggacccugauguccugucccguuggcgaggccccuagcccguauaacucucgcuuugaauccguggcuuggagcgccuccgcuugccacgacggcauuucuuggcucacaaucgggauuagcggacccgauaaugaggccgucgcggugcugaaauacaacggcaucaucaccgacacgauuagauccuggcggaauaacauccugcgcacccaggagagcgaaugugccugcguuaaugggucuuguuucacagugaugaccgauggaccuuccaacgagcaggcuagcuauaagauuuuuaagaucgaaaaaggcagagucgugaagucuguggagcucaacgcccccaauuaccauuaugaggaaugcagcuguuacccugacgcuggggagauuacaugcgucugccgggauaacuggcacggauccaaucgccccuggguuucuuucaaccaaaaucuggaauaccagaucggcuauaucuguagcggcguguuuggggacuccccgagaccuaacgauggaaccggcagcugcgggcccgugucucuuaauggagccuacggcgucaaaggguucuccuuuaaguauggaaacggcguguggauuggccggacgaaaagcacaucuucccgcagcggguucgagaugaucugggacccuaauggauggaccgaaacagauuccucuuuuagccugaagcaggacauuaucgcgguuaccgacugguccggcuacucugggagcuucauucagcaccccgagcucaccggacugaacuguaugagacccugcuucuggguggagcuuauccggggccgcccuaaggagaaaacaauuuggacguccgggagcucuaucuccuuuuguggcgucaauagcgauaccgugggauggucuuggccggacggcgccgaacugcccuucacaaucgauaaguga

SEQ ID NO: 218308 - RNA, 1353 nt, Artificial Sequence
  derived and/or modified CDS sequence (opt5) from neuraminidase__InfluenzaA__AAF74324
augaaccccaaucagaagaucauuaccaucggcagcauuugcaugguggucgggaucauuucccugaugcuccaaaucggaaacaucauuucuguuugggugagccacaucauucagacauggcauccuaaucagccggagcccuguaaccaguccaucaauuucuacacggaacaagccgcugccucugugacccuggcgggcaacagcucccuuugcccuauuucugggugggcuaucuauagcaaagacaauuccauuagaaucggaagcaagggcgaugucuuugugauccgggagcccuucauuucuuguucccaccuggaaugccgcacauuuuuccucacccagggggcccugcuuaacgacaaacauagcaauggaacaguuaaggauagaucuccuuaccggacccugauguccugucccgugggcgaggccccuagcccguauaacucucgcuuugaauccgucgcuuggagcgccuccgcuugccacgacggcaucucuuggcucacaauugggaucagcggacccgauaauggcgccguggcgguucugaaauacaacgggauuaucaccgacacgaucaaguccuggagaaauaacauucugcggacccaggagagcgagugugccugcgugaauggaucuuguuucacagucaugaccgauggcccuuccaacgaacaggcuagcuauaagaucuuuaaaauugagaaggggcgcguggugaaaucugucgaacucaacgcccccaauuaccauuaugaggagugcagcuguuacccugacgcuggagaaaucacaugcguuugcagagauaacuggcacggcuccaaucggcccugggugucuuucaaccaaaaucuggaguaccagauuggcuauaucuguagcgggguguuuggagacuccccgcgcccuaacgauggcaccgggagcugcggacccgucucucuuaauggcgccuacggggugaagggauucuccuuuaaauauggcaacggcguuuggaucgggagaacaaagagcacgucuucccggagcggauucgaaaugauuugggacccuaauggcuggaccgagacagauuccucuuuuagccugaagcaggacaucauugcgaucaccgacugguccggguacucuggcagcuucauucagcaccccgaacucaccggacugaacuguaugcgccccugcuucuggguggagcuuaucagagggcggccuaaagagaagacaauuuggacguccggcagcucugucuccuuuuguggagugaauagcgauaccaugggcuggucuuggccggacggggccgaacugcccuucacaaucgauaaauga

SEQ ID NO: 218309 - RNA, 1353 nt, Artificial Sequence
  derived and/or modified CDS sequence (opt5) from neuraminidase__InfluenzaA__AAF74325
augaaccccaaucagaagaucauuaccaucggcagcauuugcaugguggucgggaucauuucccugaugcuccaaaucggaaacacaaucucuguuugggugagccacauuaucaaaacguggcauccuaaucagccggagcccuguaaccaguccauuaauuucuacaccgaacaggccgcugccucugugacacuggcgggcaacagcucccuuugcccuaucucugggugggcuauuuauagcaaggacaauuccaucagaauuggaagcaaaggcgaugucuuugugauccgggagcccuucaucucuuguucccaccuggaaugccgcaccuuuuuccucacacaaggggcccugcuuaacgacaagcauagcaauggaaccguuaaagauagaucuccuuaccggacacugauguccugucccgugggcgaggccccuagcccguauaacucucgcuuugaauccgucgcuuggagcgccuccgcuugccacgacggcauuucuuggcucaccaucgggauuagcggacccgauaauggcgccguggcgguucugaaguacaacgggaucauuacggacaccaucaaguccuggagaaauaacacacugcggacccaggagagcgagugugccugcgugaauggaucuuguuucacagucaugaccgauggcccuuccaacgaacaggcuagcuauaaaaucuuuaagauugagaaagggcgcguggugaagucugucgaacucaacgcccccaauuaccauuaugaggagugcagcuguuacccugacgcuggagaaaucacgugcguuugcagagauaacuggcacggcuccaaucggcccugggugucuuucaaccagaaucuggaguaccaaauuggcuauaucuguagcgggguguuuggagacuccccgcgcccuaacgauggcacagggagcugcggacccgucucucuuaauggcgccuacggggugaaaggauucuccuuuaaguauggcaacggcguuuggauugggagaaccaagagcacaucuucccggagcggauucgaaaugaucugggacccuaauggcuggaccgagaccgauuccucuuuuagccugaaacaggacaucauugcgaucacagacugguccggguacucuggcagcuucauucagcaccccgaacucacgggacugaacuguaugcgccccugcuucuggguggagcuuaucagagggcggccuaaggagaaaaccauuuggacauccggcagcucuaucuccuuuuguggagucaauagcgauaccgugggcuggucuuggccggacggggccgaacugcccuauacaauugauaaguga

SEQ ID NO: 218310 - RNA, 1410 nt, Artificial Sequence; identical to SEQ ID NO: 208800
  derived and/or modified CDS sequence (opt5) from neuraminidase__InfluenzaA__EPI239900

SEQ ID NO: 218311 - RNA, 1410 nt, Artificial Sequence; identical to SEQ ID NO: 209149
  derived and/or modified CDS sequence (opt5) from neuraminidase__InfluenzaA__EPI221062

SEQ ID NO: 218312 - RNA, 1410 nt, Artificial Sequence; identical to SEQ ID NO: 208800
  derived and/or modified CDS sequence (opt5) from neuraminidase__InfluenzaA__EPI534079

SEQ ID NO: 218313 - RNA, 1410 nt, Artificial Sequence; identical to SEQ ID NO: 208800
  derived and/or modified CDS sequence (opt5) from neuraminidase__InfluenzaA__AGM53851

SEQ ID NO: 218314 - RNA, 1410 nt, Artificial Sequence
  derived and/or modified CDS sequence (opt5) from neuraminidase__InfluenzaA__EPI731464
augaaccccaaucagaagaucauuaccaucggcagcgugugcaugacaauugggauggccaaccugauccuccaaauuggaaauaucaucuccauuuggaucucucacagcauucagcugggcaaccagaaucagaucgagacguguaaccaauccgucauuaccuacgaaaauaacacauggguuaaucagaccuaugugaacaucucuaauacaaacuucgcugccgggcagagcguggucuccgugaaacuugcgggaggcucuagccugugcccuguuuccgggugggcuauuuacagcaaggacaauucugugagaaucggauccaaaggcgaugucuuugugauccgggagccguucauuagcuguucuccccucgaaugccgcaccuuuuuccugacacagggcgcccuucugaacgacaagcauuccaaugggaccaucaaagauagaagcccuuaucggacgcucaugucuugucccauuggagagguuccuucccccuacaacagccgcuuugaauccguggccuggucugcuagcgccugccacgacggcaucaacuggcugaccauugggaucuccggaccugauaauggcgcugucgccgugcugaaguauaacgggaucauuacagacaccaucaagagcuggagaaauaacauucuccggacacaagagucugagugugcgugcgugaauggauccuguuucaccgucaugacggauggcccgagcaacggccaggccucuuacaaaaucuuucgcauugaaaaggggaaaaucguuaagagcguggagaugaaugcucccaacuaucauuacgaagagugcuccuguuacccugacucuagcgagaucacaugcgugugcagagauaauuggcacggauccaaccggcccugggucagcuucaaucagaaccuggaauaucagauuggcuacaucuguucugggauuuuuggagacaauccucgccccaacgauaaaaccggcuccugcgggccggugagcucuaauggagccaacggcguuaagggcuucuccuuuaaguaugggaacggaguguggaucggcagaacaaaaagcauuuccucucggaauggguucgagaugaucugggacccuaacggauggaccggcaccgauaauaacuuuagcauuaagcaagacaucgucgggaucaaugaaugguccggcuacucuggcagcuucgugcagcaucccgagcuuacaggacuggacuguauucgcccuugcuucuggguugaacucaucagagggcggcccaaagagaacacgauuuggaccuccggaagcucuaucuccuuuuguggcgugaauagcgauacagucggguggucuuggcccgacggagcugagcugccuuucaccauugauaaguga

SEQ ID NO: 218315 - RNA, 1410 nt, Artificial Sequence; identical to SEQ ID NO: 208800
  derived and/or modified CDS sequence (opt5) from neuraminidase__InfluenzaA__EPI696973

SEQ ID NO: 218316 - RNA, 1410 nt, Artificial Sequence
  derived and/or modified CDS sequence (opt5) from neuraminidase__InfluenzaA__EPI662593
augaaccccaaucagaagaucauuaccaucggcagcauuugcaugacaaucgggauggccaaccugauucuccaaaucggaaauaucauuuccaucugggugucucacagcauucagaucggcaaccagucccagauugagacguguaaucaaucugucaucaccuacgaaaacaauacauggguuaaccagaccuaugugaauauuagcaacacaaauuucgcugccgggcaguccguggucucugugaaacuggcgggaaacagcucccuuugcccuguuagcggcugggcuaucuacucuaaggacaauuccgugagaaucgggagcaaaggagaugucuuugugauucgggagccguucaucucuuguagcccccuggaaugccgcaccuuuuuccucacacagggcgcccugcuuaacgacaagcauuccaauggcaccauuaaagauagaucuccuuaucggacgcugauguccugucccaucggggagguuccuagccccuacaacucccgcuuugaaucuguggccuggagcgcuuccgccugccacgacggaauuaacuggcucaccaucggcaucagcgggccugauucuggagcugucgccgugcugaaguauaauggcauuaucacagacaccauuaaguccuggagaaacaauauccugcggacacaagagagcgagugugcgugcgugaacgggucuuguuucaccauuaugacggauggaccgagcgacggccaggccuccuacaaaaucuuucgcaucgaaaagggcaaaauuaucaagucugucgagaugaaagcucccaauuaucauuacgaagagugcagcuguuacccugauuccagcgagauuacaugcguuugcagagacaacuggcacgggucuaaucggcccuggguguccuucaaccagaaucucgaauaucagaugggauacaucuguagcggcguguuuggggauaacccucgccccaaugacaagaccggaucuugcggcccggucuccagcaacggggccaauggagugaagggcuucuccuuuaaauauggcaacgggguuuggauuggaagaacaaagucuaucagcucccggaaaggcuucgagaugauuugggauccuaauggguggaccggaaccgacaacaaguuuucuaucaaacaagacaucgugggcauuaacgaauggagcggguacuccggcagcuucguccagcaucccgagcugacaggacuugauuguauccgcccuugcuucuggguggaacugauuagaggccggcccgaggagaauacgaucuggaccucuggguccagcauuucuuuuuguggaguuaacuccgacacagugggcuggagcuggcccgauggggcugaacucccuuucaccaucgacaaguga

SEQ ID NO: 218317 - RNA, 1410 nt, Artificial Sequence; identical to SEQ ID NO: 218316
  derived and/or modified CDS sequence (opt5) from neuraminidase__InfluenzaA__EPI830229

SEQ ID NO: 218318 - RNA, 1410 nt, Artificial Sequence; identical to SEQ ID NO: 215909
  derived and/or modified CDS sequence (opt5) from neuraminidase__InfluenzaA__AGU92879

SEQ ID NO: 218319 - RNA, 1410 nt, Artificial Sequence; identical to SEQ ID NO: 215908
  derived and/or modified CDS sequence (opt5) from neuraminidase__InfluenzaA__AGU92857

SEQ ID NO: 218320 - RNA, 1410 nt, Artificial Sequence; identical to SEQ ID NO: 215907
  derived and/or modified CDS sequence (opt5) from neuraminidase__InfluenzaA__AGU92846

SEQ ID NO: 218321 - RNA, 1410 nt, Artificial Sequence; identical to SEQ ID NO: 215918
  derived and/or modified CDS sequence (opt5) from neuraminidase__InfluenzaA__AGU92835

SEQ ID NO: 218322 - RNA, 1410 nt, Artificial Sequence; identical to SEQ ID NO: 215894
  derived and/or modified CDS sequence (opt5) from neuraminidase__InfluenzaA__AGU92703

SEQ ID NO: 218323 - RNA, 1410 nt, Artificial Sequence
  derived and/or modified CDS sequence (opt5) from neuraminidase__InfluenzaA__EPI643117
augaaccccaaucagaagaucauuaccaucggcagcgugucccugacaauuucuacgaucugcuucuuuaugcaaauugccauccucaucaccacagucacccugcacuucaaacaguacgaguuuaacagcccuccgaauaaccagguuaugcuuugugaacccacaauuaucgagagaaauauuaccgaaaucguguaucugacaaacaccacgauugagaaggaaaucugcccuaaacccgcugaguaccggaauugguccaagccucagugugggauuaccggauucgcccccuuuucuaaagacaacagcauccgccucuccgcgggcggggauaucugggugacaagagagccuuaugucucuugcgacccggauaaguguuaccaauucgcucugggacagggcaccacacuuaauaacgugcauagcaauaacaccguucgggaccgcacgcccuauagaacacugcucaugaaugaacugggggugccuuuucaccugggaaccaagcaggucugcauugccugguccucuagcuccugucaugauggcaaagccuggcuccacgugugcaucacaggcgacgauaagaacgcuaccgccagcuucauuuacaaugggcggcugguugacucuguggucuccuggagcaaagauauccuucgcacccaggagucugaauguauuugcaucaacggaacauguacgguggugaugaccgacggcuccgcuagcgggaaggccgauacaaaaauccuguuuauugaggagggaaagaucguccauaccuccacacucucuggcagcgcgcaacacguugaagagugcuccugcuaucccagauacccuggggugcggugugugugccgcgacaacuggaagggaagcaauagacccauugucgauaucaacauuaaagaccacucuaucguguccagcuacguuuguucuggccuggugggcgacaccccgcggaagaaugauagcuccucuagcucccauugccuugacccuaacaaugaagaagggggacacggcgucaaagggugggccuucgaugacggaaacgauguguggaugggccgcacgaucaaugagacaagcagacugggguaugagaccuuuaagguuauugagggauggucuaaccccaaauccaagcuccagaccaaucgccaggugaucgucgaccggggcgauagaagcggcuacucugggauuuucuccguggaaggaaaaagcuguaucaaccggugcuuuuaugucgagcugauuagaggccgcaaggaagagacagaagugcuguggaccuccaauucuaucguuguguucugugggacaagcggaacguacggcaccggguccuggccugacggcgcugaucucaaccugaugcccauuuga

SEQ ID NO: 218324 - RNA, 1410 nt, Artificial Sequence
  derived and/or modified CDS sequence (opt5) from neuraminidase__InfluenzaA__EPI675797
augaaccccaaucagaagaucauuaccaucggcagcgugucccugacaauuucuacgaucugcuucuuuaugcaaauugccauccucaucaccacagucacccugcacuucaaacaguacgaguuuaacagcccuccgaauaaccagguuaugcuuugugaacccacaauuaucgagagaaauauuaccgaaaucguguaucugacaaacaccacgauugagaaggaaaucugcccuaaacccgcugaguaccggaauugguccaagccucagugugggauuaccggauucgcccccuuuucuaaagacaacagcauccgccucuccgcgggcggggauaucugggugacaagagagccuuaugucucuugcgacccggauaaguguuaccaauucgcucugggacagggcaccacacuuaauaacgugcauagcaauaacaagguucgggaccgcacccccuauagaacgcugcucaugaaugaacugggggugccuuuucaccugggaacaaaacaggucugcauugccugguccucuagcuccugucaugauggcaaggccuggcuccacgugugcaucaccggcgacgauaaaaacgcuacagccagcuucauuuacaaugggcggcugguugacucuguggucuccuggagcaaggauauccuucgcacccaggagucugaauguauuugcaucaacggaaccuguacaguggugaugacggacggcuccgcuagcgggaaagccgauaccaagauccuguuuauugaggagggaaagaucguccauacauccacccucucuggcagcgcgcaacacguugaagagugcuccugcuaucccagauacccuggggugcggugugugugccgcgacaacuggaaaggaagcaauagacccauugucgauaucaacauuaaggaccacucuaucguguccagcuacguuuguucuggccuggugggcgacacaccgcggaaaaaugauagcuccucuagcucccauugccuugacccuaacaaugaagaagggggacacggcgucaaggggugggccuucgaugacggaaacgauguguggaugggccgcaccaucaaugagacgagcagacugggguaugagacauuuaaaguuauugagggauggucuaaccccaaguccaaacuccagaccaaucgccaggugaucgucgaccggggcgauagaagcggcuacucugggauuuucuccguggaaggaaagagcuguaucaaccggugcuuuuaugucgagcugauuagaggccgcaaggaagagaccgaagugcuguggacauccaauucuaucguuguguucugugggaccagcggaacauacggcacgggguccuggccugacggcgcugaucucaaccugaugcccauuuga

SEQ ID NO: 218325 - RNA, 1410 nt, Artificial Sequence; identical to SEQ ID NO: 218323
  derived and/or modified CDS sequence (opt5) from neuraminidase__InfluenzaA__EPI578429

SEQ ID NO: 218326 - RNA, 1410 nt, Artificial Sequence; identical to SEQ ID NO: 218323
  derived and/or modified CDS sequence (opt5) from neuraminidase__InfluenzaA__EPI614405

SEQ ID NO: 218327 - RNA, 1350 nt, Artificial Sequence; identical to SEQ ID NO: 218245
  derived and/or modified CDS sequence (opt5) from neuraminidase__InfluenzaA__AAT73329

SEQ ID NO: 218328 - RNA, 1350 nt, Artificial Sequence; identical to SEQ ID NO: 218245
  derived and/or modified CDS sequence (opt5) from neuraminidase__InfluenzaA__AAW80723

SEQ ID NO: 218329 - RNA, 1350 nt, Artificial Sequence; identical to SEQ ID NO: 218245
  derived and/or modified CDS sequence (opt5) from neuraminidase__InfluenzaA__EF541467

SEQ ID NO: 218330 - RNA, 1398 nt, Artificial Sequence; identical to SEQ ID NO: 215526
  derived and/or modified CDS sequence (opt5) from neuraminidase__InfluenzaA__EPI439509

SEQ ID NO: 218331 - RNA, 1410 nt, Artificial Sequence
  derived and/or modified CDS sequence (opt5) from neuraminidase__InfluenzaA__EPI482776
augaacaccaaucagagaaucauuacaaucggcacggugugcaugauugucgggaucauuagccugcuccugcaaaucggaaacaucguuucccuuuggauuucucacagcauccagaccggcugggagaaucauacagugauguguaaccaguccgugauuaccuacgucaauaacacaugggugaaucggaccuauguuaacaucucuaauauuaagaucgccacaauucaggacgugaccagcaucauccuggcugggaacuccucucucugccccgucagcggaugggccguguacuccaaagauaauagcauucgcaucggcucuaagggggacauuuucguuaucagagaaccuuuuauuuccuguagccaacuggagugccggacguucuuucuuacccagggagcgcugcucaacgauaaacacucuaauggcacagugaaggaccgcuccccguauagaacccugaugagcugucccaucggcgaagcuccuucucccuacaacucccgguucgagagcgucgccugguccgccucugcuugccaugaugggaugggauggcugacaaucggcauuagcgggccugacaauggagccguggcugugcucaaauauaacggcaucauuaccgauacgaucaaguccuggcgcaacaagauucugagaacacaggaaagcgagugugucugcaugaaugggucuuguuuuaccguucuuacagacggacccuccaacggccaggccagcuacaaaaucuucaagguggagaaaggcaagaucauuaaaucuaucgaacuggaugcgccuaauuaucacuacgaggaaugcagcuguuacccggacaccgggaaggugaugugcgucugccgggauaacuggcaugccuccaaucgccccugggugucuuuuaaccaaaaucucgacuaucagauuggauacaucuguagcggcguuuucggggauaacccuagauccaaugacggaaagggcaacugcgggcccgugcugagcaauggagcuaacggcgucaaaggcuuuucuuaucgguacgggaauggaguguggauuggccgcaccaaguccaucaacagcagaucuggguucgagaugauuugggacccuaauggauggacagagacggauuccagcuuuuccaugaaacaggacaucaucgcccuuaacgauuggucuggcuauagcggguccuucguucagcaccccgaacugaccggcaugaacuguauucggccgugcuuuuggguggagcucauccgcggacaaccuaaggaaucuacaauuugggcuagcggcuccagcaucucuuucuguggggucaauuccgagaccgccagcuggucuuggcccgacggagcggaucugccuuucacaauugacaaauga

SEQ ID NO: 218332 - RNA, 1410 nt, Artificial Sequence
  derived and/or modified CDS sequence (opt5) from neuraminidase__InfluenzaA__EPI745533
augaaccccaaucagaagaucauuaccaucggcagcgugugcauuacaaucgggauggccaaccugauucuccaaaucggaaauaucauuuccaucuggauuucucacagcauccagcugggcaaccagaaucagauugagacguguaaccaauccgucaucaccuacgaaaauaacacauggguuaaucagaccuaugugaacauuucuaauacaaacuucgcugccgggcagagcguggucuccgugaaacuugcgggaaauucuagccugugcccuguuuccggcugggcuaucuacagcaaggacaacucuaucagaauuggguccaaaggagauguguuugucauccgggagccguucauuagcuguucuccccucgaaugccgcaccuuuuuccugacacagggcgcccuucugaaugacaagcauuccaacggcaccaucaaagauagaagcccuuaucggacgcucaugucuugucccauuggggaggugccuucccccuacaacagccgcuuugaauccguugccuggucugcuagcgccugccacgacggaaucuccuggcugaccaucggcauuagcgggccugauaauggagcuguggccguccugaaguauaacggcaucauuacagacaccaucaagucuuggagaaauaacauucuccggacacaagaguccgagugugcgugcgugaaugggagcuguuucaccgugaugacggauggaccgucugacggccaggccagcuacaaaaucuuucgcaucgaaaagggcaaaauugucaaguccguugagaugaacgcucccaauuaucauuacgaagagugcucuuguuacccugauagcuccgagaucacaugcgugugcagagacaacuggcacgggagcaaucggcccugggugucuuucaaccagaaucuggaauaucagauuggauacaucuguuccggcauuuuuggggauaacccucgccccaaugacaaaaccggaagcugcggcccggucucuuccaacggggccaauggagugaagggcuucagcuuuaaguauggcaacgggguuuggaucggaagaacaaaauccauuucuagccggaacggcuucgagaugaucugggauccuaauggguggaccggaaccgacaacaauuuuuccaucaagcaagacauugugggcaucaacgaauggucuggguacagcggcuccuucguccagcaucccgagcuuacaggacuggauuguauuaaaccuugcuucuggguggaacucauccgcggcagacccaaggagaauacgauuuggaccagcgggucuuccaucagcuuuuguggaguuaacucugacacagugggcugguccuggcccgauggggcugagcugccuuucaccaucgacaaauga

SEQ ID NO: 218333 - RNA, 1410 nt, Artificial Sequence; identical to SEQ ID NO: 208800
  derived and/or modified CDS sequence (opt5) from neuraminidase__InfluenzaA__AEE69012

SEQ ID NO: 218334 - RNA, 1410 nt, Artificial Sequence; identical to SEQ ID NO: 208800
  derived and/or modified CDS sequence (opt5) from neuraminidase__InfluenzaA__EPI176609

SEQ ID NO: 218335 - RNA, 1410 nt, Artificial Sequence; identical to SEQ ID NO: 208800
  derived and/or modified CDS sequence (opt5) from neuraminidase__InfluenzaA__EPI176472

SEQ ID NO: 218336 - RNA, 1410 nt, Artificial Sequence
  derived and/or modified CDS sequence (opt5) from neuraminidase__InfluenzaA__EPI280340
augaaccccaaucagaagaucauuaccaucggcagcgugugcauuacaaucgggauggccaaccugauucuccaaaucggaaauaucauuuccaucuggauuucucacagcauccagcugggcaaccagaaucagauugagacguguaaccaauccgucaucaccuacgaaaauaacacauggguuaaucagaccuaugugaacauuucuaauacaaacuucgcugccgggcagagcguggucuccgugaaacuugcgggaaauucuagccugugcccuguuuccggcugggcuaucuacagcaaggacaacucuaucagaauuggguccaaaggagauguguuugucauccgggagccguucauuagcuguucuccccucgaaugccgcaccuuuuuccugacacagggcgcccuucugaaugacaagcauuccaacggcaccaucaaagauagaagcccuuaucggacgcucaugucuugucccauuggggaggugccuucccccuacaacagccgcuuugaauccguugccuggucugcuagcgccugccacgacggaaucuccuggcugaccaucggcauuagcgggccugauaauggagcuguggccguccugaaguauaacggcaucauuacagacaccaucaagucuuggagaaauaacauucuccggacacaagaguccgagugugcgugcgugaaugggagcuguuucaccgugaugacggauggaccgucugacggccaggccagcuacaaaaucuuucgcaucgaaaagggcaaaauugucaaguccguugagaugaacgcucccaauuaucauuacgaagagugcucuuguuacccugauagcuccgagaucacaugcgugugcagagacaacuggcacgggagcaaucggcccugggugucuuucaaccagaaucuggaauaucagauuggauacaucuguuccggcauuuuuggggauaacccucgccccaaugacaaaaccggaagcugcggcccggucucuuccaacggggccaauggagugaagggcuucagcuuuaaguauggcaacgggguuuggaucggaagaacaaaauccauuucuagccggaacggcuucgagaucaucugggauccuaauggguggaccggaaccgacaacaauuuuuccauuaagcaagacaucgugggcauuaacgaauggucuggguacagcggcuccuucguccagcaucccgagcuuacaggacuggauuguauccgcccuugcuucuggguggaacucauuagaggccggcccaaagagaauacgaucuggaccagcgggucuuccaucagcuuuuguggaguuaacucugacacagugggcugguccuggcccgauggggcugagcugccuuucaccauugacaaguga

SEQ ID NO: 218337 - RNA, 1410 nt, Artificial Sequence; identical to SEQ ID NO: 208800
  derived and/or modified CDS sequence (opt5) from neuraminidase__InfluenzaA__EPI240318

SEQ ID NO: 218338 - RNA, 1410 nt, Artificial Sequence; identical to SEQ ID NO: 208800
  derived and/or modified CDS sequence (opt5) from neuraminidase__InfluenzaA__EPI183133

SEQ ID NO: 218339 - RNA, 1410 nt, Artificial Sequence; identical to SEQ ID NO: 208800
  derived and/or modified CDS sequence (opt5) from neuraminidase__InfluenzaA__EPI369141

SEQ ID NO: 218340 - RNA, 1410 nt, Artificial Sequence
  derived and/or modified CDS sequence (opt5) from neuraminidase__InfluenzaA__EPI482787
augaacaccaaucagagaaucauuacaaucggcacggugugccugauugucgggaucguuagccuccugcuucaaauuggaaacaucgugucccuguggaucucucacagcauucagaccggcaagcggucccaucccgagacauguucucagaaugugaucaccuacgaaaacaauacaugggucaaccagaccuaugugaauauuagcaacacaaauaucguugacgggcaaggagugaccuccauuauccucgccggcaacucuccucugugcccgauuagcgggugggcuaucuacuccaaagauaauagcauccgcauuggaucuaagggcgacaucuucgucauuagagagcccuuuaucuccuguagccaccuugaaugccggacguucuuucugacccagggcgcccuccugaacgaucgccauucuaaugggacagugaaagacagauccccuuaucggacccugaugagcugucccauuggagaggcgccuucucccuacaacucccgcuucgaaagcguugcuugguccgccucugccugccacgauggcaugggguggcucacaaucggaaucagcggcccugacaauggggcuguggccguccugaaguauaacggaauuaucaccgauacgauuaaauccuggagaaacaagauccuucggacacaggagagcgagugugugugcauuaauggcucuuguuuuaccaucaugacagacggcccguccaacgggcaggcuagcuacaagaucuucaaaauggaaaagggaaaaauuaucaagucuguggagcuggaugcccccaauuaucauuacgaagagugcagcuguuacccugacaccggcaaagucguuugcgugugccgcgauaacuggcacgcguccaauagacccugggugaccuuugaccaaaaccucaauuaucagauuggguacaucuguucuggagucuucggcgauaacccucggagcaaugacgggaagggaaacugcggccccgugccguccaauggcgccaacgggguuaagggauuuagcuuccgcuauggcaaugggguguggauuggaagaacaaaaucuaucuccagccggucuggcuuugagaugauuugggacccuaacggguggacggaaaccgauuccagcuucuccaucaagcaggacaucauugcucugacagauuggucuggcuacagcggauccuuuguccagcaccccgagcuuaccggcaugaauuguaucaaaccuugcuucuggguggaacugauucgcgggcaacccaaggagucuacaaucuggaccagcggauccagcauuucuuucuguggcguugacuccgaaacggugagcuggucuuggcccgauggggccgaccucccuuuuacaaucgauaaauga

SEQ ID NO: 218341 - RNA, 1410 nt, Artificial Sequence
  derived and/or modified CDS sequence (opt5) from neuraminidase__InfluenzaA__EPI482790
augaacaccaaucagagaaucauuacaaucggcacggugugccugauugucgggaucauuagccuccugcuucaaaucggaaacaugguuucccuguggaucucucacagcauucagaccggcgggaagaaucauacagagauguguaaccagaaugugaucaccuacgugaacaauacaugggucaaccggaccuaugugaauauuuccaacacaaaaaucguuaaugugcaggacgucgugucuguuauucucaccggaaacagcucccugugccccaucucuggcugggccauuuacagcaaggauaauuccauccgcaucgggagcaaaggagacauuuucgugaucagagaaccuuuuauuucuuguucccaccuugagugccggacguucuuucugacccaaggcgcucuccugaacgauaagcauagcaauggcacagucaaagaccgcucuccguauagaacccugauguccugucccgugggggaagccccuagccccuacaacucucgguucgaguccguggcguggagcgcuuccgccugccacgauggaaugggcuggcucacaaucgggauuucuggaccugacaacggcgccgucgcuguucugaaguauaaugggaucaucaccgauacgauuaagagcuggcgcaacaaaauccuuagaacacaggaauccgagugugugugcaugaauggaagcuguuuuaccgugcugacagacggccccucuaacggccaggccuccuacaagauuuucaaaauggagaaggggaaaaucauuaagagcaucgaacucgaugcuccuaauuaucauuacgaggaaugcucuuguuacccggacgccggaaaggucaugugcgugugccgggauaacuggcacgcgagcaaucgccccuggguuuccuuugaccagaaccuggauuaucaaaucggcuacauuuguucugggguguucggagacaauccuagaagcaacgacggcaaagggaauugcggacccguccacuccaacggcgccaauggcgugaagggguuuagcuaucgguacggaaacggcguuuggaucgggcgcaccaaaucuauuaauuccagaagcggauucgagaugaucugggauccuaacggcuggaccgggacagacucuuccuuuagcaugaagcaggauauuaucgcucuuacggacugguccggcuauucuggcagcuucgugcagcaucccgagcugaccggaaugaacuguauucggccgugcuuuugggucgaacucauccgcgggcagccuaaagagaauacaaucugggccuccggaucuagcauuuccuucuguggcgugaacggggaaaccgcuagcuggucuuggcccgauggagccgaccugccuuucacaaucgauaaguga

SEQ ID NO: 218342 - RNA, 1410 nt, Artificial Sequence
  derived and/or modified CDS sequence (opt5) from neuraminidase__InfluenzaA__EPI291797
augaacaccaaucagagaaucauuacaaucggcacggugugcaugauugucgggaucauuagccugcuccugcaaaucggaaacaucguuucccuuuggauuucucacagcauccagaccggcugggagaaucauacagaaauguguaaccaguccgugauuaccuacgugaauaacacaugggucaaucggaccuaugugaacaucucuaauacaaacauugccaccauccaggacguuacgagcauuauccuggcuggaaauuccucucucugccccgugagcgggugggccaucuacuccaaggauaacagcauucgcaucggcucuaaaggggacauuuucgucaucagagagccuuuuauuuccuguagccaacuggaaugccggaccuucuuucuuacacagggagcgcugcucaaugauaagcacucuaacggcaccgugaaagaccgcuccccguauagaacacugaugagcugucccaucggcgaggcuccuucucccuacaauucccgguucgaaagcguugccugguccgccucugcuugccaugaugggaugggauggcugaccaucggcauuagcgggccugacaacggagccguggcuguccucaaguauaacggcaucauuacggauacaaucaaauccuggcgcaauaagauucugagaacccaggagagcgagugugugugcaugaacgggucuuguuuuacagugcuuaccgacggacccuccaauggccaggccagcuacaagaucuucaaagucgaaaagggcaaaaucauuaagucuaucgagcuggaugcgccuaacuaucacuacgaagagugcagcuguuacccggacaccgggaaaguuaugugcgugugccgggauaauuggcaugccuccaaccgccccugggugucuuuuaaucaaaaccucgacuaucagauuggauacaucuguagcggcgucuucggggauaauccuagauccaacgacggaaagggcaauugcgggcccgugcugagcaacggagcuaauggcguuaagggcuuuucuuaucgguacgggaacggaguguggauuggccgcacaaaauccaucaauagcagaucuggguucgagaugauuugggacccuaacggauggacggaaaccgauuccagcuuuuccaugaagcaggacaucaucgcccuuacagauuggucuggcuauagcggguccuucguccagcaccccgagcugaccggcaugaacuguauucggccgugcuuuuggguggaacucauccgcggacaaccuaaagagucuacaauuugggcuagcggcuccagcaucucuuucugugggguuaauuccgaaaccgccagcuggucuuggcccgacggagcggaucugccuuucacgauugacaaguga

SEQ ID NO: 218343 - RNA, 1410 nt, Artificial Sequence; identical to SEQ ID NO: 218342
  derived and/or modified CDS sequence (opt5) from neuraminidase__InfluenzaA__EPI482798

SEQ ID NO: 218344 - RNA, 1410 nt, Artificial Sequence
  derived and/or modified CDS sequence (opt5) from neuraminidase__InfluenzaA__EPI638969
augaacaccaaucagagaaucauuacaaucggcacggugugcaugauugucgggaugaucagccugcuccugcaaauuggauccaucguuucucuuuggaucagccacuccauucagaccggcugggagaaccauacagggguguguaaucagucugugaucaccuacgucaacaauacaugggugaaccggaccuauguuaauauuagcaacaucaagauugccacaauccaggacgugacccccauuauccuggcuggaaauuccucucucugcccugucaacggcugggccguguacagcaaagauaauuccauccgcauugggagcaagggagacaucuucguuauuagagaaccguuuaucucuuguucccaacuggagugccggacguucuuucuuacccagggcgcgcugcucaacgauaaacacagcaauggcacagugaaggaccgcucucccuauagaacccugauguccuguccuauuggggaagcucccagcccuuacaacucucgguucgaguccgucgccuggagcgccuccgcuugccaugauggaaugggcuggcugacaaucgggaucucuggacccgacaauggcgccguggcugugcucaaauauaacgggauuaucaccgauacgauuaagagcuggcgcaacaagauccugagaacacaggaauccgagugugucugcaugaauggaagcuguuuuaccguucuuacagacggcccuucuaacggccaggccuccuacaaaauuuucaagguggagaaagggaagaucaucaaaagcauugaacuggaugcgccgaauuaucacuacgaggaaugcucuuguuaccccgacaccggaaaggugaugugcgucugccgggauaacuggcaugccagcaaucgcccuuggguguccuuuaaccaaaaucucgacuaucagaucggcuacauuuguucugggguuuucggagauaaccccagaagcaccgacggcaaggggaauugcggaccugugcuguccaacggcgcuaauggcgucaaaggguuuagcuaucgguacggaaacggcguguggaucgggcgcacaaagucuauuaauuccagaagcggauucgagaugaucugggaccccaacggcuggacggagaccgauucuuccuuuagcaugaaacaggacauuaucgcccuuaaugauuauuccggguacucuggcagcuucguucagcacccggaacugacaggaaugaacuguauccggccuugcuuuuggguggagcucauucgcggccaacccaaggaauccaccaucugggcuucugggagcuccauuagcuucuguggagucaacucugagacagccuccuggagcuggccugacggcgcggaucugcccuucgccaucgacaaauga

SEQ ID NO: 218345 - RNA, 1410 nt, Artificial Sequence
  derived and/or modified CDS sequence (opt5) from neuraminidase__InfluenzaA__ABI19012
augaacaccaaucagagaaucauuacaaucggcacggugugccugauugucgggaucauuagccuccugcuucaaaucggaaacaugguuucccuguggaucucucacagcauucagaccggcgggaagaaucauacagagauguguaaccagaaugugaucaccuacgugaacaauacaugggucaaccggaccuaugugaauauuuccaacacaaaaaucguuaaugugcaggacgucgugucuguuauucucaccggaaacagcucccugugccccaucucuggcugggccauuuacagcaaggauaauuccauccgcaucgggagcaaaggagacauuuucgugaucagagaaccuuuuauuucuuguucccaccuugagugccggacguucuuucugacccaaggcgcucuccugaacgauaagcauagcaauggcacagucaaagaccgcucuccguauagaacccugauguccugucccaucggggaagccccuagccccuacaacucucgguucgaguccguggcguggagcgcuuccgccugccacgauggaaugggcuggcucacaauugggaucucuggaccugacaacggcgccguggcuguccugaaguauaaugggaucauuaccgauacgaucaagagcuggcgcaacaaaauucuuagaacacaggaauccgaguguguuugcaugaauggaagcuguuuuaccgugcugacagacggccccucuaacggccaggccuccuacaagaucuucaaaauggagaaggggaaaauuaucaagagcaucgaacucgaugcuccuaauuaucauuacgaggaaugcucuuguuacccggacgccggaaaggugaugugcgucugccgggauaacuggcacgcgagcaaucgccccuggguguccuuugaccagaaccuggauuaucaaauuggcuacaucuguucugggguuuucggagacaauccuagaagcaacgacggcaaagggaauugcggacccgugcacuccaacggcgccaauggcgucaagggguuuagcuaucgguacggaaacggcguguggauugggcgcaccaaaucuaucaauuccagaagcggauucgagaugauuugggauccuaacggcuggaccgggacagacucuuccuuuagcaugaagcaggauaucauugcucuuacggacugguccggcuauucuggcagcuucguucggcaucccgagcugaccggaaugaacuguauccgcccgugcuuuuggguggaacucaucagagggcagccuaaagagaauacaauuugggccuccggaucuagcaucuccuucuguggcgucaacggggaaaccgcuagcuggucuuggcccgauggagccgaccugccuuucacaauugauaaguga

SEQ ID NO: 218346 - RNA, 1410 nt, Artificial Sequence
  derived and/or modified CDS sequence (opt5) from neuraminidase__InfluenzaA__EPI687791
augaaccccaaucagaagaucauuaccaucggcagcauuugcaugacaaucgggauggccaaccugauucuccaaaucggaaauaucauuuccaucugggugucucacagcauucagaucggcaaccagucccagauugagacguguaaucaaucugucaucaccuacgaaaacaauacauggguuaaccagaccuaugugaauauuagcaacacaaauuucgcugccagacaguccguggucucugugaaacuggcggggaacagcucccuuugcccuguuagcggaugggcuaucuacucuaaggacaauuccgugcggaucggcagcaaaggggaugucuuugugauucgcgagccguucaucucuuguagcccccuggaaugcagaaccuuuuuccucacacagggagcccugcuuaacgacaagcauuccaauggcaccauuaaagaucggucuccuuaucgcacgcugauguccugucccaucggcgagguuccuagccccuacaacuccagauuugaaucuguggccuggagcgcuuccgccugccacgacgggauuaacuggcucaccaucggaaucagcggcccugauucuggggcugucgccgugcugaaguauaauggaauuaucacagacaccauuaaguccuggcggaacaauauccugcgcacacaagagagcgagugugcgugcgugaacggcucuuguuucaccauuaugacggaugggccgagcgacggacaggccuccuacaaaaucuuuagaaucgaaaagggcaaaauuaucaagucugucgagaugaaagcucccaauuaucauuacgaagagugcagcuguuacccugauuccagcgagauuacaugcguuugccgggacaacuggcacggcucuaaucgccccuggguguccuucaaccagaaucucgaauaucagaugggguacaucuguagcggaguguuuggcgauaacccuagacccaaugacaagaccgggucuugcggaccggucuccagcaacggcgccaauggggugaagggauucuccuuuaaauauggcaacggcguuuggauugggcggacaaagucuaucagcucccgcaaaggauucgagaugauuugggauccuaauggcuggaccgggaccgacaacaaguuuucuaucaaacaagacaucgugggaauuaacgaauggagcggcuacuccgggagcuucguccagcaucccgagcugacaggccuugauuguaucagaccuugcuucuggguggaacugauucggggacgccccgaggagaauacgaucuggaccucuggcuccagcauuucuuuuugugggguuaacuccgacacagugggauggagcuggcccgauggcgcugaacucccuuucaccaucgacaaguga

SEQ ID NO: 218347 - RNA, 1410 nt, Artificial Sequence
  derived and/or modified CDS sequence (opt5) from neuraminidase__InfluenzaA__EPI841266
augaaccccaaucagaagaucauuaccaucggcagcauuugcaugacaaucgggauggccaaccugauucuccaaaucggaaauaucauuuccaucugggugucucacagcauucagaucggcaaccagucccagauugagacguguaaucaaucugucaucaccuacgaaaacaauacauggguuaaccagaccuaugugaauauuagcaacacaaauuucgcugccagacaguccguggucucugugaaacuggcggggaacagcucccuuugcccuguuagcggaugggcuaucuacucuaaggacaauuccgugcggaucggcagcaaaggggaugucuuugugauucgcgagccguucaucucuuguagcccccuggaaugcagaaccuuuuuccucacacagggagcccugcuuaacgacaagcauuccaauggcaccauuaaagaucggucuccuuaucgcacgcugauguccugucccaucggcgagguuccuagccccuacaacuccagauuugaaucuguggccuggagcgcuuccgccugccacgacgggauuaacuggcucaccaucggaaucagcggcccugauucuggggcugucgccgugcugaaguauaauggaauuaucacagacaccauuaaguccuggcggaacaauauccugcgcacacaagagagcgagugugcgugcgugaacggcucuuguuucaccauuaugacggaugggccgagcgacggacaggccuccuacaaaaucuuuagaaucgaagagggcaagauuaucaaaucugucgaaaugaaggcucccaauuaucauuacgaggagugcagcuguuacccugauuccagcgaaauuacaugcguuugccgggacaacuggcacggcucuaaucgccccuggguguccuucaaccagaaucucgaguaucagaugggguacaucuguagcggaguguuuggcgauaacccuagacccaaugacaaaaccgggucuugcggaccggucuccagcaacggcgccaauggggugaagggauucuccuuuaaguauggcaacggcguuuggauugggcggacaaaaucuaucagcucccgcaagggauucgaaaugauuugggauccuaauggcuggaccgggaccgacaacaaauuuucuaucaagcaagacaucgugggaauuaacgaguggagcggcuacuccgggagcuucguccagcaucccgaacugacaggccuugauuguaucagaccuugcuucuggguggagcugauucggggacgccccgaggaaaauacgaucuggaccucuggcuccagcauuucuuuuugugggguuaacuccgacacagugggauggagcuggcccgauggcgcugagcucccuuucaccaucgacaaauga

SEQ ID NO: 218348 - RNA, 1410 nt, Artificial Sequence
  derived and/or modified CDS sequence (opt5) from neuraminidase__InfluenzaA__EPI291844
augaacaccaaucagagaaucauuacaaucggcacggugugccugauugucgggaucauuagccuccugcuucaaaucggaaccaugguuucccuguggaucucucacagcauucagacaggcgggaagaaccauaccgagauguguaaucagaacgugaucacauacgugaauaacaccugggucaaucggacauaugugaacauuuccaauaccaaaaucguuaacgugcaggacgucgugucuguuauucucacgggaaauagcucccugugccccaucucuggcugggccauuuacagcaaggauaacuccauccgcaucgggagcaaaggagacauuuucgugaucagagaaccuuuuauuucuuguucccaccuugagugccggaccuucuuucugacacaaggcgcucuccugaaugauaagcauagcaacggcaccgucaaagaccgcucuccguauagaacacugauguccugucccaucggggaagccccuagccccuacaauucucgguucgaguccguggcguggagcgcuuccgccugccacgauggaaugggcuggcucaccauugggaucucuggaccugacaacggcgccguggcuguccugaaguauaacgggaucauuacggauacaaucaagagcuggcgcaauaaaauucuuagaacccaggaauccgaguguguuugcaugaacggaagcuguuuuacagugcugaccgacggccccucuaauggccaggccuccuacaagaucuucaaaauggagaaggggaaaauuaucaagagcaucgaacucgaugcuccuaacuaucauuacgaggaaugcucuuguuacccggacgccggaaaggugaugugcgucugccgggauaauuggcacgcgagcaaccgccccuggguguccuuugaccagaaucuggauuaucaaauuggcuacaucuguucugggguuuucggagacaacccuagaagcaaugacggcaaagggaacugcggacccgugcacuccaauggcgccaacggcgucaagggguuuagcuauaaauacggaaauggcguguggauugggcggaccaagucuaucaacucccgcagcggauucgagaugauuugggauccuaauggcuggacagggacggacucuuccuuuagcaugaaacaggauaucauugcucuuaccgacugguccggcuauucuggcagcuucguucagcaucccgagcugacaggaaugaacuguaucagaccgugcuuuuggguggaacucauccgggggcagccuaaggagaacaccauuugggccuccggaucuagcaucuccuucuguggcgucaauggggaaacagcuagcuggucuuggcccgauggagccgaccugccuuucaccauugauaaauga

SEQ ID NO: 218349 - RNA, 1410 nt, Artificial Sequence
  derived and/or modified CDS sequence (opt5) from neuraminidase__InfluenzaA__EPI558120
augaacaccaaucagagaaucauuacaaucggcacggugugcaugauugucgggaucauuagccugcuccugcaaaucggaaacaucguuucccuuuggauuucucacagcauccagaccggcugggagaaucauacagaaauguguaaccaguccgugauuaccuacgugaauaacacauggaugaaucggaccuaugucaacaucucuaauauuaagaucgccacaauucaggacgugaccagcaucguucuggcugggaacuccucucucugccccgugagcggaugggccgucuacuccaaagauaauagcauccgcauuggcucuaagggggacaucuucgugauuagagagccuuuuaucuccuguagccaacuggaaugccggacguucuuucuuacccagggagcgcugcucaacgauaaacacucuaauggcacaguuaaggaccgcuccccguauagaacccugaugagcugucccauuggcgaggcuccuucucccuacaacucccgguucgaaagcguggccugguccgccucugcuugccaugaugggaugggauggcugacaaucggcaucagcgggccugacaauggagccgucgcugugcucaaauauaacggcauuaucaccgauacgauuaaguccuggcgcaacaagauccugagaacacaggagagcgagugugugugcauuaaugggucuuguuuuaccguccuuacagacggacccuccaacggccaggccagcuacaaaaucuucaagguugaaaaaggcaagaucauuaaaucuaucgagcuggaugcgccuaauuaucacuacgaagagugcagcuguuacccggacaccgggaaggugaugugcauuugccgggauaacuggcaugccuccaaucgccccugggugucuuuugaccaaaaccucgauuaucagaucggauacauuuguagcggcgucuucggggacaauccuagauccaacgacggaaagggcaauugcgggcccgugcugagcaacggagcuaauggcguuaaaggcuuuucuuaucgguacgggaacggaguguggaucggccgcaccaaguccauuaauagcagaucuggguucgagaugaucugggauccuaacggauggacagaaacggacuccagcuuuuccaugaaacaggauaucauugcccuuaaugacuggucuggcuauagcggguccuucguccagcaccccgagcugaccggcaugaacuguauccggccgugcuuuuggguggaacucauucgcggacaaccuaaggagucuacaaucugggcuagcggcuccagcauuucuuucugugggguuaacuccgaaaccgccagcuggucuuggcccgauggagcggaccugccuuucacaaucgauaaauga

SEQ ID NO: 218350 - RNA, 1410 nt, Artificial Sequence
  derived and/or modified CDS sequence (opt5) from neuraminidase__InfluenzaA__EPI564138
augaaccccaaucagaagaucauuaccaucggcagcgugucccugacaauuucuacgaucugcuucuuuaugcaaauugccauccucaucaccacagucacccugcacuucaaacaguacgaguuuaacagcccuccgaauaaccagguuaugcuuugugaacccacaauuaucgagagaaauauuaccgaaaucguguaucugacaaacaccacgauugagaaggaaaucugcccuaaacccgcugaguaccggaauugguccaagccucagugugggauuaccggauucgcccccuuuucuaaagacaacagcauccgccucuccgcgggcggggauaucugggugacaagagagccuuaugucucuugcgacccggauaaguguuaccaauucgcucugggacagggcaccacacuuaauaacgugcauagcaauaacaccguucgggaccgcacgcccuauagaacacugcucaugaaugaacugggggugccuuuucaccugggaaccaagcaggucugcauugccugguccucuagcuccugucaugauggcaaagccuggcuccacgugugcaucacaggcgacgauaagaacgcuaccgccagcuucauuuacaaugggcggcugguugacucuguggucuccuggagcaaagauauccuucgcacccaggagucugaaugugugugcauuaacggaacauguacgguggucaugaccgacggcuccgcuagcgggaaggccgauacaaaaauccuguuuaucgaggagggaaagauuguucauaccuccaagcucucuggcagcgcgcaacacguggaagagugcuccugcuaucccagauacccuggggugcggugugucugccgcgacaacuggaaaggaagcaauagacccaucguggauauuaacaucaaggaccacucuauuguuuccagcuacguguguucuggccuggucggcgacacaccgcggaaaaaugauagcuccucuagcucccauugccuugacccuaacaaugaagaagggggacacggcgugaaggggugggccuucgaugacggaaacgauguuuggaugggccgcaccaucaaugagacgagcagacugggguaugagacauuuaaaguggucgagggauggucuaaccccaaguccaaacuccagaucaaucgccaggugauugucgaccggggcgauagaagcggcuacucugggaucuucuccguggaaggaaagagcuguauuaaccggugcuuuuauguugagcugaucagaggccgcaaggaagagaccgaagugcuguggaccuccaauucuauugucguguucugugggacaagcggaaccuacggcacaggguccuggccugacggcgcugaucucaaccugaugcccaucuga

SEQ ID NO: 218351 - RNA, 1410 nt, Artificial Sequence
  derived and/or modified CDS sequence (opt5) from neuraminidase__InfluenzaA__ANM92825
augaaccccaaucagaagaucauuaccaucggcagcauuugcaugacaaucgggauggccaaccugauucuccaaaucggaaauaucauuuccaucugggugucucacagcauucagaucggcaaccagucccagauugagacguguaaucaaucugucaucaccuacgaaaacaauacauggguuaaccagaccuaugugaauauuagcaacacaaauuucgcugccgggcaguccguggucucugugaaacuggcgggaaacagcucccuuugcccuguuagcggcugggcuaucuacucuaaggacaauuccgugagaaucgggagcaaaggagaugucuuugugauucgggagccguucaucucuuguagcccccuggaaugccgcaccuuuuuccucacacagggcgcccugcuuaacgacaagcauuccaauggcaccauuaaagauagaucuccuuaucggacgcugauguccugucccaucggggagguuccuagccccuacaacucccgcuuugaaucuguggccuggagcgcuuccgccugccacgacggaauuaacuggcucaccaucggcaucagcgggccugauucuggagcugucgccgugcugaaguauaauggcauuaucacagacaccauuaaguccuggagaaacaauauccugcggacacaagagagcgagugugcgugcgugaacgggucuuguuucaccauuaugacggauggaccgagcgacggccaggccuccuacaaaaucuuucgcaucgaaaagggcaaaauuaucaagucugucgagaugaaagcucccaauuaucauuacgaagagugcagcuguuacccugauuccagcgagauuacaugcguuugcagagacaacuggcacgggucuaaucggcccuggguguccuucaaccagaaucucgaauaucagaugggauacaucuguagcggcguguuuggggauaacccucgccccaaugacaagaccggaaacugcggcccggucucuuccaauggggccaacggagugaagggcuucagcuuuaaauauggcaaugggguuuggauuggaagaacaaaguccaucucuagccggaaaggcuucgagaugauuugggauccuaacggguggaccggaaccgacaacaaguuuuccaucaaacaagacaucgugggcauuaaugaauggucuggguacagcggcuccuucguccagcaucccgagcugacaggacuugauuguauccgcccuugcuucuggguggaacugauuagaggccggcccgaggagaacacgaucuggaccagcgggucuuccauuagcuuuuguggaguuaauucugacacagugggcugguccuggcccgauggggcugaacucccuuucaccaucgacaaguga

SEQ ID NO: 218352 - RNA, 1410 nt, Artificial Sequence
  derived and/or modified CDS sequence (opt5) from neuraminidase__InfluenzaA__EPI291694
augaacaccaaucagagaaucauuacaaucggcacggugugccugauugucgggaucguuagccuccugcuucaaauuggaaacaucgugucccuguggaucucucacagcauucagaccggcgagaagaaucauuccgaaguguguaaccagaauaucauuacauacgagaacaaaaccugggucaaucagacauaugugaacaucucuaauaccaacauugccgaagggcaaggaguuacaagcaucauucucgcuggcaauuccucucugugccccgugagcgggugggccaucuacuccaaggacaacagcauccggauuggaucuaaaggcgauaucuucgucauucgcgagccuuuuaucuccuguagccaccuugaaugcagaaccuucuuucugacgcagggcgcgcuccugaaugaccggcauucuaacgggaccgugaaggaucgcuccccguauagaacacugaugagcugucucaccggagaggcucccucuccuuacaauucccgguucgagagcguugccugguccgccucugcuugccacgacggcaugggguggcugacaauuggaaucagcggccccgauaacggggccguggcuguccuuaaauauaacggaaucauuaccgacacgaucaaguccuggcgcaauaagauucugagaacacaggaaagcgagugugugugcaucaacggcucuuguuuuaccauuaugacagauggcccuuccaaugggcaggccagcuacaaaaucuucaagauggaaaaaggaaagaucauuaaaucuguggagcucgacgcgcccaacuaucauuacgaggaaugcagcuguuacccugauaccggcaaggucguuugcgugugccgggacaauuggcacgccuccaaccgcccgugggugucuuuugaucaaaaucuggacuaucagaucggguacauuuguagcggagucuucggcgauaaccccagauccaaugacgggaagggaaacugcggcccugugcccagcaauggcgcuaacgggguuaaaggauuuucuuuccgguauggcaaugggguguggaucggacgcaccaaguccauuaucagcagaucuggcuuugagaugauuugggacccuaacggguggacagaaacggauuccagcuucuccaucaaacaggacaucauugcccuuaccgauuggucuggcuacagcggauccuuuguccagcaccccgagcugacaggcaugaauuguauccggccgugcuucuggguggaacucauucgcgggcaaccuaaggagucuaccaucuggacaagcggauccagcauuucuuucuguggcguugacuccgagaccgcuagcuggucuuggcccgauggggccgaccugccuuuuacgaucgauaaauga

SEQ ID NO: 218353 - RNA, 1410 nt, Artificial Sequence; identical to SEQ ID NO: 209286
  derived and/or modified CDS sequence (opt5) from neuraminidase__InfluenzaA__EPI241027

SEQ ID NO: 218354 - RNA, 1410 nt, Artificial Sequence; identical to SEQ ID NO: 208810
  derived and/or modified CDS sequence (opt5) from neuraminidase__InfluenzaA__EPI177405

SEQ ID NO: 218355 - RNA, 1410 nt, Artificial Sequence; identical to SEQ ID NO: 208810
  derived and/or modified CDS sequence (opt5) from neuraminidase__InfluenzaA__EPI242475

SEQ ID NO: 218356 - RNA, 1410 nt, Artificial Sequence
  derived and/or modified CDS sequence (opt5) from neuraminidase__InfluenzaA__EPI590131
augaacgccaaucagagaaucauuaccaucggcacagugugccugauuaucgggauuaucagccuccugcuucaaaucggaaacauggucucccuguggauuucucacagcauccagacgggcgggaagaaucauaccgagauguguaaccagaauguuauuacauacgugaacaauaccugggugaaccggacauaugucaauaucuccaacaccaaaauugugaauguucaggacguggucucugugauccucacaggaaacagcucccugugcucuauuagcggcugggcuaucuacuccaaggauaauagcauccgcauugggucuaaaggagacaucuucguuauuagagaacccuuuaucuccuguagccaccuugagugccggaccuucuuucugacgcaaggcgcccuccugaacgauaagcauucuaauggcaccgugaaagaccgcuccccuuauagaacacugaugagcuguccgauuggggaagcgcccucuccuuacaacucccgguucgagagcgucgcuugguccgccucugccugccacgauggaaucggcuggcucaccaucgggauuagcggacccgacaacggcgcuguggccgugcugaaguauaaugggaucauuacagauaccaucaaguccuggcgcaacaaaauucuuagaacgcaggaaagcgagugugucugcaugaauggaucuuguuuugcuguucugacagacggcccuuccaacggccaggccagcuacaagaucuucaaagugaagcaggggaaaaucauuaagucuaucgagcucgaugcgcccaauuaucauuacgaagagugcagcuguuacccugacgccggaaaggugaugugcgucugccgggauaacuggcacgcuuccaaucgcccgugggugucuuuugaccaagaucugaacuaucagauuggcuacaucuguagcgggguuuucggagacaaucccagauccaacgacggcaaagggaauugcggaccugugcacagcaacggcgccaauggcgucaagggguuuucuuaucgguacggaaacggcguguggauugggcgcaccaaauccauccauagcagaucuggauucgaaaugauuugggaucccaauggcuggacagggaccgacuccagcuuuuccaugaagcaggauaucaucgcucuuaccgacuggucuggcuauagcggauccuucguucagcacccugagcugacaggcaugaacuguauucggcccugcuuuuggguggagcucauccgcgggcaaccgaaagaaaacacgauuugggccucuggaagcuccaucagcuucuguggcgucaauggggagaccgcgucuugguccuggccugauggagccgaccugcccuucacaauugauaaguga

SEQ ID NO: 218357 - RNA, 1410 nt, Artificial Sequence
  derived and/or modified CDS sequence (opt5) from neuraminidase__InfluenzaA__EPI68596
augaacaccaaucagagaaucauuacaaucggcacggugugccugauugucgggaucguuagccuccugcuucaaauuggaaacaucgugucccuguggaucucucacagcauucagaccggcgagaagaaucauuccgaaaucuguucucagaacgugauuacauacgagaauaacaccugggucaaucagacauaugugaacaucagcaauaccaacauugccgacgggcaaggaguuacauccaucauucucgcuggcaauucuagccugugccccaucuccgggugggccaucuacagcaaagauaacucuauucggaucggauccaagggcgacauuuucgugauccgcgaaccuuuuauuagcuguucucaccuugagugcagaaccuucuuucugacgcagggcgcgcuccugaaugaucggcauuccaacgggaccgucaaagaccgcagcccguauagaacacugaugucuugucccaucggagaagcuccuucccccuacaauagccgguucgaguccguggccuggucugccagcgcuugccacgauggcaugggguggcucaccaucggaauuuccggcccugacaacggggccguugcugugcugaaguauaacggaaucauuacagauaccaucaaaagcuggcgcaauaagauucuuagaacgcaggagucugaaugugucugcaucaacggcuccuguuuuacaaucaugaccgacggccccagcaaugggcaggccucuuacaagauuuucaaaauggagaagggaaaaaucauuaagagcguggaacuggaugcgccuaacuaucauuacgaggagugcuccuguuacccggacacaggcaaaguggucugcguuugccgggauaauuggcacgccucuaaccgccccugggugagcuuugaccaaaaucucgauuaucagaucggguacauuuguuccggaguguucggcgacaacccuagaagcaaugacgggaagggaaacugcggccccguccugucuaauggcgcuaacggggugaagggauuuuccuuccgguauggcaaugggguuuggaucggacgcaccaaaagcauuucuuccagaagcggcuuugaaaugaucugggauccuaacggguggaccgagacagacuccucuuucagcaucaagcaggauauuaucgcccuuacggacugguccggcuacucuggcagcuuugugcagcaccccgaacugaccggaaugaauuguauucggccgugcuucugggucgagcucauccgcgggcaaccuaaagaauccacaauuuggaccagcggaucuuccaucagcuucuguggcguggauucugagacagcuuccuggagcuggcccgacggggccgaucugccuuuuaccaucgacaaguga

SEQ ID NO: 218358 - RNA, 1365 nt, Artificial Sequence; identical to SEQ ID NO: 207791
  derived and/or modified CDS sequence (opt5) from neuraminidase__InfluenzaA__EPI115409

SEQ ID NO: 218359 - RNA, 1365 nt, Artificial Sequence; identical to SEQ ID NO: 207791
  derived and/or modified CDS sequence (opt5) from neuraminidase__InfluenzaA__ABD77678/m1

SEQ ID NO: 218360 - RNA, 1410 nt, Artificial Sequence; identical to SEQ ID NO: 208800
  derived and/or modified CDS sequence (opt5) from neuraminidase__InfluenzaA__EPI185224

SEQ ID NO: 218361 - RNA, 1410 nt, Artificial Sequence; identical to SEQ ID NO: 218316
  derived and/or modified CDS sequence (opt5) from neuraminidase__InfluenzaA__EPI697745

SEQ ID NO: 218362 - RNA, 1410 nt, Artificial Sequence; identical to SEQ ID NO: 218316
  derived and/or modified CDS sequence (opt5) from neuraminidase__InfluenzaA__EPI768524

SEQ ID NO: 218363 - RNA, 1410 nt, Artificial Sequence
  derived and/or modified CDS sequence (opt5) from neuraminidase__InfluenzaA__EPI726929
augaaccccaaucagaagaucauuaccaucggcagcauuuccaugacaaucgggauggccaaccugauucuccaaaucggaaauaucauuucuaucugggugagccacuccauucagaucggcaaccagucucagauugagacgugcaaucaaagcgucaucaccuacgaaaacaauacauggguuaaccagaccuaugugaauauuuccaacacaaauuucgcugccgggcagucuguggucagcgugaaacuggcgggaaacuccagccuuuguccuguuucuggcugggcuaucuacuccaaggacaauagcgugagaaucgggucuaaaggagaugucuuugugauucgggagccguucaucuccugcagcccccuggaaugucgcaccuuuuuccucacacagggcgcccugcuuaacgacaagcauucuaauggcaccauuaaagauagauccccuuaucggacgcugaugagcugccccaucggggagguuccuucccccuacaacucucgcuuugaaagcguggccugguccgcuagcgccugucacgacggaauuaacuggcucaccaucggcaucucugggccugauuccggagcugucgccgugcugaaguauaauggcauuaucacagacaccauuaagagcuggagaaacaauauccugcggacacaagagucugagugcgcgugugugaacgggagcugcuucaccauuaugacggauggaccguccgacggccaggccucuuacaaaaucuuucgcaucgaaaagggcaaaauuaucaagagcgucgagaugaaagcucccaauuaucauuacgaagaguguuccugcuacccugauagcucugagauuacauguguuugcagagacaacuggcacggguccaaucggcccugggugagcuucaaccagaaucucgaauaucagaugggauacaucugcucuggcguguuuggggauaacccucgccccaaugacaagaccggauccuguggcccggucagcuccaacggggccaauggagugaagggcuucucuuuuaaauauggcaacgggguuuggauuggaagaacaaagagcaucuccucucggaaaggcuucgagaugauuugggauccuaauggguggaccggaaccgacaacaaguuuagcaucaaacaagacaucgugggcauuaacgaaugguccggguacagcggcucuuucguccagcaucccgagcugacaggacuugauugcauccgcccuuguuucuggguggaacugauuagaggccggcccgaggagaauacgaucuggaccuccgggagcucuauuuccuuuugcggaguuaacagcgacacagugggcuggucuuggcccgauggggcugaacucccuuucaccaucgacaaguga

SEQ ID NO: 218364 - RNA, 1410 nt, Artificial Sequence; identical to SEQ ID NO: 218363
  derived and/or modified CDS sequence (opt5) from neuraminidase__InfluenzaA__EPI813816

SEQ ID NO: 218365 - RNA, 1410 nt, Artificial Sequence
  derived and/or modified CDS sequence (opt5) from neuraminidase__InfluenzaA__EPI466627
augaaccccaaucagaagaucauuaccaucggcagcgugugcaugacaauugggauggccaaccugauccuccaaauuggaaauaucaucuccauuugggucucucacagcauccagcugggcaaccagucccagauugagacguguaaucaaucuguuaucaccuacgaaaacaauacaugggugaaccagaccuaugugaauauuagcaacacaaauuucgcugccgggcaguccgucgugucuguuaaacuugcgggaaacagcucccugugcccugugagcggcugggcuaucuacucuaaggacaauuccgucagaauugggagcaaaggagauguguuuguuauccgggagccguucaucucuuguagcccccucgaaugccgcaccuuuuuccugacacagggcgcccuucugaacgacaagcauuccaauggcaccauuaaagauagaucuccuuaucggacgcucauguccugucccaucggggaggugccuagccccuacaacucccgcuuugaaucugucgccuggagcgcuuccgccugccacgacggaauuaacuggcugaccaucggcauuagcgggccugauucuggagcuguggccgugcugaaguauaauggcaucaucacagacaccauuaaguccuggagaaacaauauccuccggacacaagagagcgagugugcgugcgucaacgggucuuguuucaccauuaugacggauggaccgagcgacggccaggccuccuacaaaaucuuucgcauugaaaagggcaaaaucguuaagucuguggagaugaaugcucccaacuaucauuacgaagagugcagcuguuacccugauuccagcgagaucacaugcgugugcagagacaauuggcacgggucuaaccggcccugggucuccuucaaucagaaccuggaauaucagauuggauacaucuguagcggcguguuuggggauaauccucgccccaacgacaaaaccggaucuugcggcccgguuuccagcaauggggccaacggagugaagggcuucuccuuuaaguauggcaauggggucuggauuggaagaacaaaaucuaucagcucccggaagggcuucgagaugauuugggauccuaacggguggaccggaaccgacaacaauuuuucuaucaaacaagacauugugggcaucaacgaauggagcggguacuccggcagcuucguucagcaucccgagcuuacaggacuggauuguauccgcccuugcuucuggguggaacucauuagaggccggcccgaggagaauacgaucuggaccucuggguccagcauuucuuuuuguggagucaacuccgacacagugggcuggagcuggcccgauggggcugaacugccuuucaccaucgacaaguga

SEQ ID NO: 218366 - RNA, 1410 nt, Artificial Sequence
  derived and/or modified CDS sequence (opt5) from neuraminidase__InfluenzaA__EPI541965
augaaccccaaucagaagaucauuaccaucggcagcgugugcaugacaauugggauggccaaccugauccuccaaauuggaaauaucaucuccauuugggucucucacagcauccagcugggcaaccagucccagauugagacguguaaucaaucuguuaucaccuacgaaaacaauacaugggugaaccagaccuaugugaauauuagcaacacaaauuucgcugccgggcagccugucguguccguuaaacuugcgggaaacucuagccugugcccgguguccggcugggcuaucuacagcaaggacaauucugucagaauuggguccaaaggagauguguuuguuauccgggagcccuucaucagcuguucuccucucgaaugccgcaccuuuuuccuggcccagggcgcccuucugaacgacaagcauuccaauggcacaauuaaagauagaagccccuaucggacccucaugucuuguccuaucggggaggugcccuccccuuacaacagccgcuuugaauccgucgcuuggucugccagcgcuugccacgacggaauuaacuggcugacgaucggcauuuccgggccggauagcggagccguggcggugcugaaguauaauggcaucaucaccgacacaauuaagucuuggagaaacaauauccuccggacccaagaguccgagugugccugcgucaacgggagcuguuucacaauuaugaccgauggacccucugacggccaggcuagcuacaaaaucuuucgcauugaaaagggcaaaaucguuaaguccguggagaugaaugccccuaacuaucauuacgaagagugcucuuguuaccccgauagcuccgagaucacgugcgugugcagagacaauuggcacgggagcaaccggccuugggucucuuucaaucagaaccuggaauaucagauuggauacaucuguuccggcguguuuggggauaauccccgcccgaacgacaaaacaggaagcugcggcccuguuucuuccaauggggcuaacggagugaagggcuucagcuuuaaguauggcaauggggucuggauuggaagaaccaaauccaucucuagccggaagggcuucgagaugauuugggaucccaacggguggacaggaaccgacaacaauuuuuccaucaaacaagacauugugggcaucaacgaauggucuggguacagcggcuccuucguucagcauccugagcuuaccggacuggauuguauccgccccugcuucuggguggaacucauuagaggccggcccgaggagaauacaaucuggacgagcgggucuuccauuagcuuuuguggagucaacucugacaccgugggcugguccuggccugauggggccgaacugccguucacaaucgacaaguga

SEQ ID NO: 218367 - RNA, 1410 nt, Artificial Sequence
  derived and/or modified CDS sequence (opt5) from neuraminidase__InfluenzaA__EPI652004
augaaccccaaucagaagaucauuaccaucggcagcgugugcaugacaauugggauggccaaccugauccuccaaauuggaaauaucaucuccauuugggucucucacagcauccagauuggcaaccagucccagaucgagacguguaaucaaucuguuauuaccuacgaaaacaauacaugggugaaccagaccuaugugaauaucagcaacacaaauuucgcugccgggcaguccgucgugucuguuaaacuggcgggaaacagcucccuuugcccugugagcggcugggcuauuuacucuaaggacaauuccgucagaaucgggagcaaaggagauguguuuguuauccgggagccguucauuucuuguagcccccuggaaugccgcaccuuuuuccucgcccagggcgcccugcuuaacgacaagcauuccaauggcacaaucaaagauagaucuccuuaucggacccugauguccugucccauuggggaggugccuagccccuacaacucccgcuuugaaucugucgcuuggagcgccuccgcuugccacgacggaaucaacuggcucacgauuggcaucagcgggccugauucuggagccguggcggugcugaaguauaauggcaucauuaccgacacaaucaaguccuggagaaacaauauucugcggacccaagagagcgagugugccugcgucaacgggucuuguuucacaaucaugaccgauggaccgagcgacggccaggcuuccuacaaaauuuuucgcaucgaaaagggcaaaaucguuaagucuguggagaugaaugcccccaacuaucauuacgaagagugcagcuguuacccugauuccagcgagauuacgugcgugugcagagacaauuggcacgggucuaaccggcccugggucuccuucaaucagaaccucgaauaucagaucggauacauuuguagcggcguguuuggggauaauccucgccccaacgacaaaacaggaucuugcggcccgguuuccagcaauggggcuaacggagugaagggcuucuccuuuaaguauggcaauggggucuggaucggaagaaccaaaucuauuagcucccggaagggcuucgagaugaucugggauccuaacggguggacaggaaccgacaacaauuuuucuauuaaacaagacaucgugggcaucaacgaauggagcggguacuccggcagcuucguucagcaucccgagcugaccggacuugauuguauucgcccuugcuucuggguggaacugaucagaggccggcccgaggagaauacaauuuggacgucuggguccagcaucucuuuuuguggagucaacuccgacaccgugggcuggagcuggcccgauggggccgaacucccuuucacaauugacaaguga

SEQ ID NO: 218368 - RNA, 1410 nt, Artificial Sequence
  derived and/or modified CDS sequence (opt5) from neuraminidase__InfluenzaA__EPI62526
augaacaccaaucagagaaucauuacaaucggcacggugugccugauugucgggaucguuagccuccugcuucaaauuggaaacaucgugucccuguggaucucucacagcauucagaccggcgagaagaaucaucccgaaaucuguucccagaacgugauuacauacgagaauaacaccugggucaaucagacauaugugaacaucucuaauaccaacauuguugacgggcaaggagugacaagcaucauucucgccggcaauuccucucugugcccuaucagcgggugggcuaucuacuccaaagauaacagcauucggaucggaucuaagggcgacauuuucgucauccgcgaaccguuuauuuccuguagccaccuugagugcagaaccuucuuucugacgcagggcgcccuccugaaugaucggcauucuaacgggaccgugaaagaccgcucccccuauagaacacugaugagcuguccuaucggagaagcgcccucuccuuacaauucccgguucgagagcguugcuugguccgccucugccugccacgauggcaugggguggcucaccaucggaauuagcggccccgacaacggggcuguggccguccugaaguauaacggaaucauuacagauaccaucaaauccuggcgcaauaagauucuuagaacgcaggagagcgaaugugugugcaucaacggcucuuguuuuacaaucaugaccgacggcccuuccaaugggcaggcuagcuacaagauuuucaaaauggagaagggaaaaaucauuaagucuguggaacuggaugccccgaacuaucauuacgaggagugcagcuguuaccccgacacaggcaaagucguuugcgugugccgggauaauuggcacgcguccaaccgcccuugggugucuuuugaccaaaaucucgauuaucagaucggguacauuuguagcggagucuucggcgacaaccccagauccaaugacgggaagggaaacugcggcccugugcugagcaauggcgccaacgggguuaagggauuuucuuuccgguauggcaaugggguguggaucggacgcaccaaauccauuagcucuagauccggcuuugaaaugaucugggaucccaacggguggaccgagacagacagcuccuucucuaucaagcaggauauuaucgcucuuacggacuggagcggcuacuccggaucuuuuguccagcacccggaacugaccggcaugaauuguauucggccuugcuucuggguggagcucauccgcgggcaacccaaagaaagcacaauuuggaccuccggaagcucuaucuccuucuguggcguugauagcgagacagccucuugguccuggccugacggggcugaucugcccuuuaccaucgacaaguga

SEQ ID NO: 218369 - RNA, 1410 nt, Artificial Sequence; identical to SEQ ID NO: 208800
  derived and/or modified CDS sequence (opt5) from neuraminidase__InfluenzaA__EPI189183

SEQ ID NO: 218370 - RNA, 1410 nt, Artificial Sequence; identical to SEQ ID NO: 208800
  derived and/or modified CDS sequence (opt5) from neuraminidase__InfluenzaA__EPI180576

SEQ ID NO: 218371 - RNA, 1410 nt, Artificial Sequence
  derived and/or modified CDS sequence (opt5) from neuraminidase__InfluenzaA__EPI346918
augaacaccaaucagagaaucauuacaaucggcacggugugcaugauugucgggaucauuagccugcuccugcaaaucggaaacaucguuucccuuuggauuucucacagcauccagaccggcugggagaaucauacagaaauguguaaccagaaugugauuaccuacgugaacaauacaugggucaaccggaccuaugugaauguuuccaacacaaauaucgccaccauucaggacgugacgucuaucguccuggcugggaacagcucccucugccccgugucuggaugggccauuuacagcaaggauaauuccauccgcaucggcagcaaaggggacauuuucguuaucagagagccuuuuauuucuuguucccaacuggaaugccggaccuucuuucuuacacagggagcgcugcucaacgauaagcacagcaauggcaccgugaaagaccgcucuccguauagaacacugauguccugucccaucggcgaggcuccuagccccuacaacucucgguucgaauccgucgccuggagcgccuccgcuugccaugaugggaugggauggcugaccauuggcaucucugggccugacaacggagccguggcugugcucaaguauaauggcaucauuacggauacaaucaaaagcuggcgcaacaagauucugagaacccaggaguccgagugugucugcaugaaugggagcuguuuuacaguucuuaccgacggacccucuaacggccaggccuccuacaagaucuucaaaguggaaaagggccggauuaucaaaagcaucgagcuggaugcgccuaauuaucacuacgaagagugcucuuguuacccggacaccgggaaggugaugugcgucugccgcgauaacuggcaugccagcaauagacccuggguguccuuuaaccaaaaucucgacuaucagauuggauacaucuguucuggcguuuucggggauaacccucggagcaaugacggaaaaggcaacugcgggcccgugcuguccaauggagcuaacggcgucaagggcuuuagcuaucgcuacgggaauggaguguggauuggcagaacaaagucuaucaacucccggcgcggguucgagauuaucugggacccuaacggauggacggaaaccgauagcucuuuuuccaugaaacaggacauuaucgcccuuacagauuggagcggcuauuccgggucuuucguucagcaccccgagcugaccggcaugaauuguaucagaccgugcuuuuggguggaacucauucggggacaaccuaaggagagcacaaucugggcuuccggcucuagcauuuccuucuguggggucaacagcgaaaccgccucuugguccuggcccgacggagcggaucugccuuucacgaucgacaaauga

SEQ ID NO: 218372 - RNA, 1410 nt, Artificial Sequence; identical to SEQ ID NO: 209388
  derived and/or modified CDS sequence (opt5) from neuraminidase__InfluenzaA__EPI240976

SEQ ID NO: 218373 - RNA, 1410 nt, Artificial Sequence; identical to SEQ ID NO: 206167
  derived and/or modified CDS sequence (opt5) from neuraminidase__InfluenzaA__EPI3165

SEQ ID NO: 218374 - RNA, 1410 nt, Artificial Sequence; identical to SEQ ID NO: 218093
  derived and/or modified CDS sequence (opt5) from neuraminidase__InfluenzaA__EPI957

SEQ ID NO: 218375 - RNA, 1410 nt, Artificial Sequence; identical to SEQ ID NO: 214218
  derived and/or modified CDS sequence (opt5) from neuraminidase__InfluenzaA__EPI507593

SEQ ID NO: 218376 - RNA, 1410 nt, Artificial Sequence; identical to SEQ ID NO: 214218
  derived and/or modified CDS sequence (opt5) from neuraminidase__InfluenzaA__EPI461954

SEQ ID NO: 218377 - RNA, 1410 nt, Artificial Sequence; identical to SEQ ID NO: 214218
  derived and/or modified CDS sequence (opt5) from neuraminidase__InfluenzaA__EPI461954

SEQ ID NO: 218378 - RNA, 1410 nt, Artificial Sequence
  derived and/or modified CDS sequence (opt5) from neuraminidase__InfluenzaA__EPI668104
augaaccccaaucagaagaucauuaccaucggcagcgugucccugacaauuucuacgaucugcuucuuuaugcaaauugccauccucaucaccacagucacccugcacuucaaacaguacgaguuuaacagcccuccgaauaaccagguuaugcuuugugaacccacaauuaucgagagaaauauuaccgaaaucguguaucugacaaacaccacgauugagaaggaaaucugcccuaaacccgcugaguaccggaauugguccaagccucagugugggauuaccggauucgcccccuuuucuaaagacaacagcauccgccucuccgcgggcggggauaucugggugacaagagagccuuaugucucuugcgacccggauaaguguuaccaauucgcucugggacagggcaccacacuuaauaacgugcauagcaauaacaccguucgggaccgcacgcccuauagaacacugcucaugaaugaacugggggugccuuuuuaccugggaaccaagcaggucugcauugccugguccucuagcuccugucacgauggcaaagccuggcuccaugugugcaucacaggcgacgauaagaacgcuaccgccagcuucauuuauaaugggcggcugguugacucuguggucuccuggagcaaagauauccuucgcacccaggagucugaaugugugugcauuaacggaacauguacgguggucaugaccgacggcaacgcuuccgggaaggccgauacaaaaauccuguuuaucgaggagggaaagauuguucacaccagcaagcucuccggcucugcgcaacauguggaagagugcagcugcuaccccagauacccuggggugcggugugucugccgcgacaauuggaaaggauccaacagacccaucguggauauuaauaucaaggaccacagcauuguuucuuccuauguguguagcggccuggucggcgacacaccgcggaaaaacgauucuagcuccucuagccacugccuugacccuaauaacgaagaagggggacauggcgugaaggggugggccuucgaugacggaaaugauguuuggaugggccgcaccaucaacgagacguccagacugggguacgagacauuuaaaguggucgagggauggagcaaucccaagucuaaacuccagaucaaccgccaggugauugucgaccggggcgauagauccggcuauagcgggaucuucucuguggaaggaaaguccuguauuaaucggugcuuuuacguugagcugaucagaggccgcaaggaagagaccgaagugcuguggaccagcaacuccauugucguguucugugggacaucuggaaccuauggcacagggagcuggccugacggcgcugaucucaaucugaugcccaucuga

SEQ ID NO: 218379 - RNA, 1410 nt, Artificial Sequence
  derived and/or modified CDS sequence (opt5) from neuraminidase__InfluenzaA__EPI578445
augaaccccaaucagaagaucauuaccaucggcagcgugucccugacaauuucuacgaucugcuucuuuaugcaaauugccauccucaucaccacagucacccugcacuucaaacaguacgaguuuaacagcccuccgaauaaccagguuaugcuuugugaacccacaauuaucgagagaaauauuaccgaaaucguguaucugacaaacaccacgauugagaaggaaaucugcccuaaacccgcugaguaccggaauugguccaagccucagugugggauuaccggauucgcccccuuuucuaaagacaacagcauccgccucuccgcgggcggggauaucugggugacaagagagccuuaugucucuugcgacccggauaaguguuaccaauucgcucugggacagggcaccacacuuaauaacgugcauagcaauaacaccguucgggaccgcacgcccuauagaacacugcucaugaaugaacugggggugccuuuucaccugggaaccaagcaggucugcauugccugguccucuagcuccugucaugauggcaaagccuggcuccacgugugcaucacaggcgacgauaagaacgcuaccgccagcuucauuuacaaugggcggcugguugacucuguggucuccuggagcaaagauauccuucgcacccaggagucugaaugugugugcauuaacggaacauguacgguggucaugaccgacggcaacgcuuccgggaaggccgauacaaaaauccuguuuaucgaggagggaaagauuguucauaccagcaagcucuccggcucugcgcaacacguggaagagugcagcugcuaucccagauacccuggggugcggugugucugccgcgacaauuggaaaggauccaacagacccaucguggauauuaauaucaaggaccacagcauuguuucuuccuacguguguagcggccuggucggcgacacaccgcggaaaaacgauucuagcuccucuagccauugccuugacccuaauaacgaagaagggggacacggcgugaaggggugggccuucgaugacggaaaugauguuuggaugggccgcaccaucaacgagacguccagacugggguaugagacauuuaaaguggucgagggauggagcaaucccaagucuaaacuccagaucaaccgccaggugauugucgaccggggcgauagauccggcuacagcgggaucuucucuguggaaggaaaguccuguauuaaucggugcuuuuauguugagcugaucagaggccgcaaggaagagaccgaagugcuguggaccagcaacuccauugucguguucugugggacaucuggaaccuacggcacagggagcuggccugacggcgcugaucucaaucugaugcccaucuga

SEQ ID NO: 218380 - RNA, 1410 nt, Artificial Sequence; identical to SEQ ID NO: 218379
  derived and/or modified CDS sequence (opt5) from neuraminidase__InfluenzaA__EPI551883

SEQ ID NO: 218381 - RNA, 1410 nt, Artificial Sequence
  derived and/or modified CDS sequence (opt5) from neuraminidase__InfluenzaA__EPI344388
augaaccccaaucagaagaucauuaccaucggcagcgugucccugauuaucgccacaauuugcuuccucaugcaaaucgcuauccuggucacgaccguuacacuucacuuuaaacagcaugacuacaacucuccuccgaauaaccaggccaugcugugugagcccaccauuaucgaaagaaauacaaccgagauuguguaucucacaaacaccacgaucgaaaaggagauuugcccuaaacuggcggaauaccggaauuggagcaagccccaguguaacaucaccggguucgcuccuuuuuccaaagauaauucuauucgccuuagcgccggaggcgacaucugggugacaagagagcccuaugucuccugcgauccugacaaguguuaccaauucgcccuggggcagggaaccacacucaacaauggccacucuaacaauaccgugcaugaucggacgccguaucgcacacugcugaugaacgagcucgggguucccuuucaccugggaaccagacaggugugcauggcuuggagcuccagcucuugucaugacggcaaggccuggcuucacgucugcaucacaggcaaugauaacaacgcuaccgccuccuucauuuacaaugggcggcugguggacagcaucggaucuugguccaaaaacauucuccgcacccaggaaagcgaguguguuugcaucaauggcacauguacgguggucaugaccgaugggucugcguccggaaaggccgacacaaaaauucuguuuguggaagagggcaagaucgugcacaucagcacccuuuccgggucugcucaacaugucgaggaaugcagcugcuauccuagauuccccggaguucggugugugugccgcgauaacuggaaaggcuccaauagaccuauuguggacaucaacgucaagaauuacagcauugugucuuccuacguuuguagcggccuggugggggauacaccccggaagucugacagcgucuccucuagcuauugccucgacccgaacaaugagaaaggaggccacggggugaagggaugggccuuugaugacggcaacgauguuuggauggggcgcaccaucaaugaaacgcugagacugggauacgagacauucaaagugauugaaggcugguccaaggcuaacagcaaacuccagaccaaucggcaggucaucguggagaagggcgaccgcucuggguauuccggaaucuuuagcgucgagggcaaaucuuguauuaacagaugcuucuacguggaacugauccgggggagaaaggaggaaaccaagguuugguggacauccaauagcauuguggucuuuuguggaaccuccggcacauaugggacgggcucuuggccugauggagccgacaucaaccuuaugcccauuuga

SEQ ID NO: 218382 - RNA, 1410 nt, Artificial Sequence; identical to SEQ ID NO: 218381
  derived and/or modified CDS sequence (opt5) from neuraminidase__InfluenzaA__EPI347601

SEQ ID NO: 218383 - RNA, 1410 nt, Artificial Sequence
  derived and/or modified CDS sequence (opt5) from neuraminidase__InfluenzaA__EPI642512
augaaccccaaucagaagaucauuaccaucggcagcauuucccugaucauugccacaaucugcuuccucaugcaaaucgcuauucuggugaucacggucacccuucacuuuaaacagcauaacugugacucuagcccuaauaaccagguuauguucugcgagccgacaauuaucgaaagaaauaagaccgagauuguguaccugaucaacacaaccguggaaaaagagauuugucccaagccuacagaauaucggaauugguccaaaccccagugcaacaucaccggguuugccccuuucucuaaggauaauagcauccgccucuccgcgggaggcgacauuugggucacgagagagcccuacgugucuugugauccugacaagugcuaucaauuugcucuggggcagggaaccacacuuaacaauggccacagcaacgauaccguucaugaccggacaccguaccgcacccugcucaugaaugagcugggggugcccuuccaccugggaacgagacaggucuguaucgccugguccucuagcuccugccaugauggcaaagccuggcuccacguguguauuacaggcgacgaugggaacgcuaccgccagcuuuaucuauaauggacggcugguugacucuauuggcuccuggagcaagaacauccuucgcacacaggaaucugagugcguguguaucaacgggaccugcaccgucgugaugacagauggauccgcuagcggcaaagccgacacgaagauucuguucaucgaagaggggaaaauuauccacauuuccacccucucuggaagcgcgcaacauguggaggaaugcuccuguuacccuagauaucccggcguccggugcguuugucgcgauaauuggaagggcagcaacagaccuaucguggacaucaaugugaaggacuacucuauugucuccagcuacgugugcucugggcugguuggagauacaccccggaaaaacgacagcuuuuccucuagccacugucuugauccgaauaacgaggaaggcgggcauggagugaagggcugggccuucgacgaugggaaugacgucuggaugggacgcaccaucuccgagaaaagcagacugggcuaugaaacauuuaaggugguuaaaggcuggucugagccuaacuccaagcuccagaccaaucgccaggugauugucgggcggggaaacagaagcggcuacucugggaucuucuccauugagggcaaaaauugcaucaaccgguguuuuuauguggaacugauuagaggacgcaaggaggaaacgaaggucugguggacaagcaauuccaucgugguuuucugcgggaccucuggcaccuacggaacaggcagcuggcccgauggggcugacaucaaccugaugccuauuuga

SEQ ID NO: 218384 - RNA, 1410 nt, Artificial Sequence
  derived and/or modified CDS sequence (opt5) from neuraminidase__InfluenzaA__AIE52540
augaaccccaaucagaagaucauuaccaucggcagcgugucccugauuaucgccacaauuugcuuccucaugcaaaucgcuauccuggucacgaccguuacacuucacuuuaaacagcaugacuacaacucuccuccgaauaaccaggugaugcugugugagcccaccauuaucgaaagaaauacaaccgagauuguguaucucacaaacaucaccauugaaaaggagaucugcccuaaacuggccgaauaccggaauuggagcaagccccaguguaacauuacgggguucgcgccuuuuuccaaagauaauucuauccgccuuagcgcuggaggcgacaucugggucaccagagagcccuauguguccugcgauccugacaaguguuaccaauucgcccuggggcagggaacaacccucaacaaucggcacucuaacaauacaguucaugaucgcagcccguauagaacccugcugaugaacgagcucggcgugcccuuucaccuggggacgcggcaggucugcauugccugguccucuagcuccugucaugacggaaaggcuuggcuucacgugugcaucacaggcgaugacaauaacgccaccgcuagcuucauuuacaacggccgccugguugauucuaucggguccuggagcaaaaauauucucagaacacaggaaucugagugugugugcaucaacggaaccuguaccgucgugaugacagacggcuccgccagcgggaaggcggauacgaaaauccuguuuauugaagagggaaagaucgugcacauuuccacccuuucuggcagcgcccaacaugucgaggaaugcuccugcuauccucgguaccccgggguucgcugugugugcagagacaauuggaaaggaagcaaccggccuaucguggauauuaauaugaaggacuacucuaucgcuuccagcuaugucuguucuggccuggugggcgacacaccccgcaagaacgauagcuucuccucuagccacugccucgacccgaauaacgagaaagggggacauggcguuaaggggugggccuuugaugacggaaaugauguguggaugggcagaaccaucuccgaagaguuccggcugggguacgaaacauuuaaagucauuaagggauggagcaacccuaauucuaaacugcagaccaaccgccaggugaucguugagaagggcaauagauccggcuauagcgggguguucucuauugaggacaaauccuguaucaaccggugcuuuuacgucgaacucauuagaggacgcaaggaggaaacgaaggugugguggacaagcaauuccaucgucguguucuguggcaccucugggaccuauggaacaggcagcuggcccgauggggcugacauuaaccugaugccuaucuga

SEQ ID NO: 218385 - RNA, 1410 nt, Artificial Sequence; identical to SEQ ID NO: 218384
  derived and/or modified CDS sequence (opt5) from neuraminidase__InfluenzaA__EPI465399

SEQ ID NO: 218386 - RNA, 1410 nt, Artificial Sequence; identical to SEQ ID NO: 218384
  derived and/or modified CDS sequence (opt5) from neuraminidase__InfluenzaA__EPI328899

SEQ ID NO: 218387 - RNA, 1410 nt, Artificial Sequence; identical to SEQ ID NO: 218384
  derived and/or modified CDS sequence (opt5) from neuraminidase__InfluenzaA__EPI328901

SEQ ID NO: 218388 - RNA, 1410 nt, Artificial Sequence
  derived and/or modified CDS sequence (opt5) from neuraminidase__InfluenzaA__EPI574645
augaaccccaaucagaagaucauuaccaucggcagcgugucccugacaauuucuacgaucugcuucuuuaugcaaauugccauccucaucaccacagucacccugcacuucaaacaguacgaguuuaacagcccuccgaauaaccagguugugcuuugugaacccacaauuaucgagagaaauauuaccgaaaucguguaucugacaaacaccacgauugagaaggaaaucugcccuaaacccgcugaguaccggaauugguccaagccucagugugggauuaccggauucgcccccuuuucuaaagacaacagcauccgccucuccgcgggcggggauaucugggucacaagagagccuuaugugucuugcgacccggauaaguguuaccaauucgcucugggacagggcaccacacuuaauaacgggcauagcaauaacaccguucgggaccgcacgcccuauagaacacugcucaugaaugaacugggagugccuuuucaccugggcaccaagcaggucugcauugccugguccucuagcuccugucaugauggcaaagccuggcuccacgugugcaucacaggggacgauaagaacgcuaccgccagcuucauuuacaauggacggcugguugacucuguggucuccuggagcaaagauauccuucgcacccaggagucugaaugugugugcauuaacggcacauguacgguggucaugaccgacggguccgcuagcggaaaggccgauacaaaaauccuguuuaucgaggagggcaagauuauccauaccuccacacucucugggagcgcgcaacacguugaagagugcuccugcuaucccagauacccuggagugcggugugugugccgcgacaacuggaagggcagcaauagacccauugucgauaucaacauuaaagaccacucuaucguguccagcuacguuuguucuggccuggugggggacaccccgcggaagaaugauagcuccucuagcucccauugccuugacccuaacaaugaagagggaggccacggggucaaaggaugggccuucgaugacggcaacgauguguggauggggcgcacgaucaaugaaacaagcagacugggauaugagaccuuuaagguuauugagggcuggucuaaccccaaauccaagcuccagaucaaucgccaggugauugucgaccggggcgauagaagcggguacucuggaaucuucuccguggaaggcaaaagcuguauuaaccggugcuuuuaugucgagcugaucagagggcgcaaggaagagaaugaagugcuguggaccuccaacucuauuguuguguucuguggaacaagcggcaccuacgggacaggcuccuggccugacggagcugaucucaaucugaugcccaucuga

SEQ ID NO: 218389 - RNA, 1410 nt, Artificial Sequence
  derived and/or modified CDS sequence (opt5) from neuraminidase__InfluenzaA__EPI563214
augaaccccaaucagaagaucauuaccaucggcagcgugucccugacaauuucuacgaucugcuucuuuaugcaaauugccauccucaucaccacagucacccugcacuucaaacaguacgaguuuaacagcccuccgaauaaccagguuaugcuuugugaacccacaauuaucgagagaaauauuaccgaaaucguguaucugacaaacaccacgauugagaaggaaaucugcccuaaacccgcugaguaccggaauugguccaagccucaguguucuauuaccggguucgcccccuuuagcaaagacaacuccauccgccucucugcgggaggcgauaucugggugacaagagagccuuaugucagcugcgacccggauaaguguuaccaauucgcucuggggcagggaaccacacuuaauaacgugcauuccaauaacaccguucgggaccgcacgcccuauagaacacugcucaugaaugaacugggcgugccuuuucaccuggggaccaagcaggucugcauugccuggucuagcuccagcugucaugauggaaaagccuggcuccacgugugcaucacaggcgacgauaagaacgcuaccgccucuuucauuuacaauggccggcugguugacuccguggucagcuggucuaaagauauccuucgcacccaggaguccgaaugugugugcauuaacgggacauguacgguggucaugaccgacggaagcgcuuccggcaaggccgauacaaaaauccuguuuaucgaggaggggaagauuguuuauaccucuaagcucagcggauccgcgcaacauguggaagagugcagcugcuaccccagauacccuggcgugcggugugucugccgcgacaacuggaaagggucuaauagacccaucguggauauuaacaucaaggaccacuccauuguuagcucuuauguguguagcggacuggucggcgacacaccgcggaaaaaugauuccucuagcuccagccacugccuugacccuaacaaugaagagggcgggcauggagugaagggcugggccuucgaugacgggaacgauguuuggaugggacgcaccaucaaugaaacgucuagacugggcuacgagacauuuaaaguggucgaggggugguccaaccccaagagcaaacuccagaucaaucgccaggugauugucgaccggggagauagaucuggcuauuccggcaucuucagcguggaagggaaguccuguauuaaccggugcuuuuacguugagcugaucagaggacgcaaggaagagaccgaagugcuguggaccucuaauagcauugucguguucuguggcacauccgggaccuauggaacaggcucuuggccugacggggcugaucucaaccugaugcccaucuga

SEQ ID NO: 218390 - RNA, 1410 nt, Artificial Sequence; identical to SEQ ID NO: 218389
  derived and/or modified CDS sequence (opt5) from neuraminidase__InfluenzaA__EPI553998

SEQ ID NO: 218391 - RNA, 1410 nt, Artificial Sequence
  derived and/or modified CDS sequence (opt5) from neuraminidase__InfluenzaA__EPI551568
augaaccccaaucagaagaucauuaccaucggcagcgugucccugacaauuucuacgaucugcuucuuuaugcaaauugccauccucaucaccacagucacccugcacuucaaacaguacgaguuuaacagcccuccgaauaaccagguuaugcuuugugaacccacaauuaucgagagaaauauuaccgaaaucguguaucugacaaacaccacgauugagaaggaaaucugcccuaaacccgcugaguaccggaauugguccaagccucaguguucuauuaccggguucgcccccuuuagcaaagacaacuccauccgccucucugcgggaggcgauaucugggugacaagagagccuuaugucagcugcgacccggauaaguguuaccaauucgcucuggggcagggaaccacacuuaauaacgugcauuccaauaacauuguucgggaccgcacccccuauagaacgcugcucaugaaugaacugggcgugccuuuucaccuggggacaaagcaggucugcaucgccuggucuagcuccagcugucaugauggaaaagccuggcuccacgugugcauuaccggcgacgauaagaacgcuacagccucuuucaucuacaauggccggcugguugacuccguggucagcuggucuaaagauauucuucgcacccaggaguccgaaugugugugcaucaacgggaccuguacaguggucaugacggacggaagcgcuuccggcaaggccgauaccaaaauccuguuuauugaggaggggaagaucguuuauacaucuaagcucagcggauccgcgcaacauguggaagagugcagcugcuaccccagauacccuggcgugcggugugucugccgcgacaacuggaaagggucuaauagacccauuguggauaucaacauuaaggaccacuccaucguuagcucuuauguguguagcggacuggucggcgacaccccgcggaaaaaugauuccucuagcuccagccacugccuugacccuaacaaugaagagggcgggcauggagugaagggcugggccuucgaugacgggaacgauguuuggaugggacgcacaaucaaugaaaccucuagacugggcuacgagacguuuaaaguggucgaggggugguccaaccccaagagcaaacuccagauuaaucgccaggugaucgucgaccggggagauagaucuggcuauuccggcauuuucagcguggaagggaaguccuguaucaaccggugcuuuuacguugagcugauuagaggacgcaaggaagagacagaagugcuguggaccucuaauagcaucgucguguucuguggcaccuccgggacauauggaaccggcucuuggccugacggggcugaucucaaccugaugcccauuuga

SEQ ID NO: 218392 - RNA, 1410 nt, Artificial Sequence
  derived and/or modified CDS sequence (opt5) from neuraminidase__InfluenzaA__EPI629737
augaaccccaaucagaagaucauugccaucggcagcgugucccugaccauuucuacaaucugcuucuuuaugcaaauugcuauccucaucacgaccgucacacugcacuucaaacaguacgaguuuaacagcccuccgaauaaccagguuaugcuuugugaacccaccauuaucgagagaaauauuacagaaaucguguaucugaccaacacaaccauugagaaggaaaucugcccuaaacccgccgaguaccggaauugguccaagccucaguguucuauuacgggguucgcgcccuuuagcaaagacaacuccauccgccucucugcuggaggcgauaucugggugaccagagagccuuaugucagcugcgacccggauaaguguuaccaauucgcccuggggcagggaacaacccuuaauaacgugcauuccaauaacacaguucgggaccgcacccccuauagaacgcugcucaugaaugaacugggcgugccuuuucaccuggggacaaagcaggucugcauugccuggucuagcuccagcugucaugauggaaaggcuuggcuccacgugugcaucaccggcgacgauaaaaacgccacagcuucuuucauuuacaauggccggcugguugacuccguggucagcuggucuaaagauauccuucgcacccaggaguccgaaugugugugcauuaacgggaccuguacaguggucaugacggacggaagcgccuccggcaaggcggauaccaaaauccuguuuaucgaggaggggaagauuguuuauacaucuaagcucagcggauccgcccaacauguggaagagugcagcugcuaccccagauacccuggcgugcggugugucugccgcgacaacuggaaagggucuaauagacccaucguggauauuaacaucaaggaccacuccauuguuagcucuuauguguguagcggacuggucggcgacaccccgcggaaaaaugauuccucuagcuccagccacugccuugacccuaacaaugaagagggcgggcauggagugaagggcugggcuuucgaugacgggaacgauguuuggaugggacgcacaaucaaugaaaccucuagacugggcuacgagacguuuaaaguggucgaggggugguccaaccccaagagcaaacuccagaucaaucgccaggugauugucgaccggggagauagaucuggcuauuccggcaucuucagcguggaagggaaguccuguauuaaccggugcuuuuacguugagcugaucagaggacgcaaggaagagacagaagugcuguggaccucuaauagcauugucguguucuguggcaccuccgggacauauggaaccggcucuuggccugacggggccgaucucaaccugaugcccaucuga

SEQ ID NO: 218393 - RNA, 1410 nt, Artificial Sequence; identical to SEQ ID NO: 218389
  derived and/or modified CDS sequence (opt5) from neuraminidase__InfluenzaA__EPI631886

SEQ ID NO: 218394 - RNA, 1410 nt, Artificial Sequence; identical to SEQ ID NO: 218389
  derived and/or modified CDS sequence (opt5) from neuraminidase__InfluenzaA__EPI577025

SEQ ID NO: 218395 - RNA, 1410 nt, Artificial Sequence; identical to SEQ ID NO: 215943
  derived and/or modified CDS sequence (opt5) from neuraminidase__InfluenzaA__EPI404926

SEQ ID NO: 218396 - RNA, 1410 nt, Artificial Sequence; identical to SEQ ID NO: 215943
  derived and/or modified CDS sequence (opt5) from neuraminidase__InfluenzaA__EPI492687

SEQ ID NO: 218397 - RNA, 1410 nt, Artificial Sequence
  derived and/or modified CDS sequence (opt5) from neuraminidase__InfluenzaA__EPI530648
augaaccccaaucagaagaucauuaccaucggcagcgugucccugacaauuucuacgaucugcuucuuuaugcaaauugccauccucaucaccacagucacccugcacuucaaacaguacgaguuuaacagcccuccgaauaaccagguuaugcuuugugaacccacaauuaucgagagaaauauuaccgaaaucguguaucugacaaacaccacgauugagaaggaaaucugcccuaaacccgcugaguaccggaauugguccaagccucagugugggauuaccggauucgcccccuuuucuaaagacaacagcauccgccucuccgcgggcggggauaucugggugacaagagagccuuaugucucuugcgacccggauaaguguuaccaauucgcucugggacagggcaccacacuuaauaacgugcauagcaauaacaccguucgggaccgcacgcccuauagaacacugcucaugaaugaacugggggugccuuuucaccugggaaccaagcaggucugcauugccugguccucuagcuccugucaugauggcaaagccuggcuccacgugugcaucacaggcgacgauaagaacgcuaccgccagcuucauuuacaaugggcggcugguugacucuguggucuccuggagcaaagauauccuucgcacccaggagucugaaugugugugcauuaacggaacauguacgguggucaugaccgacggcuccgcuagcgggaaggccgauacaaaaauccuguuuaucgaggagggaaagauuguucauaccuccacacucucuggcagcgcgcaacacguggaagagugcuccugcuaucccagauacccuggggugcggugugucugccgcgacaacuggaagggaagcaauagacccaucguggauauuaacaucaaagaccacucuauuguuuccagcuacguguguucuggccuggucggcgacaccccgcggaagaaugauagcuccucuagcucccauugccuugacccuaacaaugaagaagggggacacggcgugaaagggugggccuucgaugacggaaacgauguuuggaugggccgcacgaucaaugagacaagcagacugggguaugagaccuuuaaggugaucgagggauggucuaaccccaaauccaagcuccagaccaaucggcaggucauuguggaccgcggcgauagaagcggcuacucugggaucuucuccgucgaaggaaaaagcuguauuaaccggugcuuuuauguggagcugaucagaggccgcaaggaagagacagaaguucuguggaccuccaauucuauuguggucuucugugggacaagcggaacguacggcaccggguccuggccugacggcgcugaucucaaccugaugcccaucuga

SEQ ID NO: 218398 - RNA, 1410 nt, Artificial Sequence; identical to SEQ ID NO: 218379
  derived and/or modified CDS sequence (opt5) from neuraminidase__InfluenzaA__EPI684314

SEQ ID NO: 218399 - RNA, 1410 nt, Artificial Sequence
  derived and/or modified CDS sequence (opt5) from neuraminidase__InfluenzaA__EPI614459
augaaccccaaucagaagaucauuaccaucggcagcgugucccugacaauuucuacgaucugcuucuuuaugcaaauugccauccucaucaccacagucacccugcacuucaaacaguacaaguuuaacagcccuccgaauaaccagguuaugcuuugugagcccacaauuaucgaaagaaauauuaccgagaucguguaucugacaaacaccacgauugaaaaagagaucugcccuaagcccgcugaauaccggaauugguccaaaccucagugugggauuaccggauucgcccccuuuucuaaggacaacagcauccgccucuccgcgggcggggauaucugggugacaagagagccuuaugucucuugcgacccggauaaguguuaccaauucgcucugggacagggcaccacacuuaauaacgugcauagcaauaacaccguucgggaccgcacgcccuauagaacacugcucaugaaugagcugggggugccuuuucaccugggaaccaaacaggucugcauugccugguccucuagcuccugucaugauggcaaggccuggcuccacgugugcaucacaggcgacgauaaaaacgcuaccgccagcuucauuuacaaugggcggcugguugacucuguggucuccuggagcaaggauauccuucgcacccaggaaucugagugugugugcauuaacggaacauguacgguggucaugaccgacggcuccgcuagcgggaaagccgauacaaagauccuguuuaucgaagagggaaagauuguucauaccuccacacucucuggcagcgcgcaacacguggaggaaugcuccugcuaucccagauacccuggggugcggugugucugccgcgacaacuggaaaggaagcaauagacccaucguggauauuaacaucaaggaccacucuauuguuuccagcuacguguguucuggccuggucggcgacaccccgcggaaaaaugauagcuccucuagcucccauugccuugacccuaacaaugaggaagggggacacggcgugaaggggugggccuucgaugacggaaacgauguuuggaugggccgcacgaucaaugagacaagcagacugggguaugaaaccuuuaaagugaucgagggauggucuaaccccaaguccaaacuccagaccaaucggcaggucauuguggaccgcggcgauagaagcggcuacucugggaucuucuccgucgagggaaagagcuguauuaaccggugcuuuuauguggaacugaucagaggccgcaaggaggaaacagagguucuguggaccuccaauucuauuguggucuucugugggacaagcggaacguacggcaccggguccuggccugacggcgcugaucucaaccugaugcccaucuga

SEQ ID NO: 218400 - RNA, 1410 nt, Artificial Sequence; identical to SEQ ID NO: 218399
  derived and/or modified CDS sequence (opt5) from neuraminidase__InfluenzaA__EPI541466

SEQ ID NO: 218401 - RNA, 1410 nt, Artificial Sequence; identical to SEQ ID NO: 218399
  derived and/or modified CDS sequence (opt5) from neuraminidase__InfluenzaA__EPI696968

SEQ ID NO: 218402 - RNA, 1410 nt, Artificial Sequence; identical to SEQ ID NO: 218399
  derived and/or modified CDS sequence (opt5) from neuraminidase__InfluenzaA__EPI674598

SEQ ID NO: 218403 - RNA, 1410 nt, Artificial Sequence; identical to SEQ ID NO: 218397
  derived and/or modified CDS sequence (opt5) from neuraminidase__InfluenzaA__EPI530678

SEQ ID NO: 218404 - RNA, 1410 nt, Artificial Sequence
  derived and/or modified CDS sequence (opt5) from neuraminidase__InfluenzaA__EPI530680
augaaccccaaucagaagaucauuaccaucggcagcgugucccugacaauuucuacgaucugcuucuuuaugcaaauugccauccucaucaccacagucacccugcacuucaaacaguacgaguuuaacagcccuccgaauaaccagguuaugcuuugugaacccacaauuaucgagagaaauauuaccgaaaucguguaucugacaaacaccacgauugagaaggaaaucugcccuaaacccgcugaguaccggaauugguccaagccucagugugggauuaccggauucgcccccuuuucuaaagacaacagcauccgccucuccgcgggcggggauaucugggugacaagagagccuuaugucucuugcgacccggauaaguguuaccaauucgcucugggacagggcaccacacuuaauaacgugcauagcaauaacaccguucgggaccgcacgcccuauagaacacugcucaugaaugaacugggggugccuuuucaccugggaaccaagcaggucugcauugccugguccucuagcuccugucaugauggcaaagccuggcuccacgugugcaucacaggcgacgauaagaacgcuaccgccagcuucauuuacaaugggcggcugguugacucuguggucuccuggagcaaagauauccuucgcacccaggagucugaaugugugugcauuaacggaacauguacgguggucaugaccgacggcuccgcuagcgggaaggccgauacaaaaauccuguuuaucgaggagggaaagauuguucauaccuccacacucucuggcagcgcgcaacacguggaagagugcuccugcuaucccagauacccuggggugcggugugucugccgcgacaacuggaagggaagcaauagacccaucguggauauuaacaucaaagaccacucuauuguuuccagcuacguguguucuggccuggucggcgacaccccgcggaagaaugauagcuccucuagcucccauugccuugacccuaacaaugaagaagggggacacggcgugaaagggugggccuucgaugacggaaacggcguuuggauggggcgcacgaucaaugagacaagcagacugggauaugagaccuuuaaggugaucgagggcuggucuaaccccaaauccaagcuccagaccaaucggcaggucauuguggaucgcggcgacagaagcggguacucuggaaucuucuccgucgaaggcaaaagcuguauuaaccggugcuuuuauguggagcugaucagagggcgcaaggaagagacagaaguucuguggaccuccaauucuauuguggucuucuguggaacaagcggcacguacgggaccggcuccuggccugauggagcugaccucaaccugaugcccaucuga

SEQ ID NO: 218405 - RNA, 1410 nt, Artificial Sequence; identical to SEQ ID NO: 206110
  derived and/or modified CDS sequence (opt5) from neuraminidase__InfluenzaA__EPI7603

SEQ ID NO: 218406 - RNA, 1410 nt, Artificial Sequence; identical to SEQ ID NO: 218397
  derived and/or modified CDS sequence (opt5) from neuraminidase__InfluenzaA__EPI814527

SEQ ID NO: 218407 - RNA, 1410 nt, Artificial Sequence; identical to SEQ ID NO: 218397
  derived and/or modified CDS sequence (opt5) from neuraminidase__InfluenzaA__EPI674737

SEQ ID NO: 218408 - RNA, 1410 nt, Artificial Sequence; identical to SEQ ID NO: 218397
  derived and/or modified CDS sequence (opt5) from neuraminidase__InfluenzaA__EPI614443

SEQ ID NO: 218409 - RNA, 1410 nt, Artificial Sequence; identical to SEQ ID NO: 218397
  derived and/or modified CDS sequence (opt5) from neuraminidase__InfluenzaA__EPI551812

SEQ ID NO: 218410 - RNA, 1410 nt, Artificial Sequence; identical to SEQ ID NO: 218397
  derived and/or modified CDS sequence (opt5) from neuraminidase__InfluenzaA__EPI696961

SEQ ID NO: 218411 - RNA, 1410 nt, Artificial Sequence; identical to SEQ ID NO: 218397
  derived and/or modified CDS sequence (opt5) from neuraminidase__InfluenzaA__EPI740789

SEQ ID NO: 218412 - RNA, 1410 nt, Artificial Sequence
  derived and/or modified CDS sequence (opt5) from neuraminidase__InfluenzaA__EPI377498
augaaccccaaucagaagaucauuaccaucggcagcgugucccugacaauuucuacgaucugcuucuuuaugcaaauugccauccucaucaccacagucacccugcacuucaaacaguacgaguuuaacagcccuccgaauaaccagguuaugcuuugugaacccacaauuaucgagagaaauauuaccgaaaucguguaucugacaaacaccacgauugagaaggaaaucugcccuaaacccgcugaguaccggaauugguccaagccucagugugggauuaccggauucgcccccuuuucuaaagacaacagcauccgccucuccgcgggcggggauaucugggugacaagagagccuuaugucucuugcgacccggauaaguguuaccaauucgcucugggacagggcaccacacuuaauaacgugcauagcaauaacaccguucacgaccggacgcccuaucgcacacugcucaugaaugaacugggggugccuuuucaucugggaaccaagcaggucugcauugccugguccucuagcuccugucacgauggcaaagccuggcuccaugugugcaucacaggcgacgauaagaacgcuaccgccagcuucauuuacaaugggagacugguugacucuguggucuccuggagcaaagagauccuucggacccaggaaucugagugugugugcauuaacggaacauguacgguggucaugaccgauggcuccgcuagcgggaaggccgacacaaaaauccuguuuaucgaggaaggaaagauuguucacaccuccacacucucuggcagcgcgcaacacguggaggaaugcuccugcuauccccgcuacccuggggugagaugugucugccgggauaacuggaagggaagcaaucgccccaucguggacauuaacaucaaagaucauucuauuguuuccagcuacguguguucuggccuggucggcgacaccccgagaaagaaugacagcuccucuagcucccacugccuugauccuaacaaugaggaagggggacauggcgugaaagggugggccuucgacgauggaaacgacguuuggaugggccggacgaucaaugagacaagccgccugggguaugagaccuuuaaggugaucgaaggauggucuaaccccaaauccaagcuccagauuaauagacaggucaucguggaucggggcgaccgcagcggcuacucugggauuuucuccgucgagggaaaaagcuguaucaacagaugcuuuuauguggaacugauucggggcagaaaggaggaaaccgagguucuguggacauccaauucuaucguggucuucugugggaccagcggaacauacggcacgggguccuggccugauggcgcugaccucaaccugaugcccauuuga

SEQ ID NO: 218413 - RNA, 1410 nt, Artificial Sequence; identical to SEQ ID NO: 218412
  derived and/or modified CDS sequence (opt5) from neuraminidase__InfluenzaA__EPI377498

SEQ ID NO: 218414 - RNA, 1410 nt, Artificial Sequence; identical to SEQ ID NO: 218412
  derived and/or modified CDS sequence (opt5) from neuraminidase__InfluenzaA__EPI391246

SEQ ID NO: 218415 - RNA, 1410 nt, Artificial Sequence; identical to SEQ ID NO: 218412
  derived and/or modified CDS sequence (opt5) from neuraminidase__InfluenzaA__EPI407122

SEQ ID NO: 218416 - RNA, 1410 nt, Artificial Sequence; identical to SEQ ID NO: 218412
  derived and/or modified CDS sequence (opt5) from neuraminidase__InfluenzaA__EPI407125

SEQ ID NO: 218417 - RNA, 1410 nt, Artificial Sequence; identical to SEQ ID NO: 218379
  derived and/or modified CDS sequence (opt5) from neuraminidase__InfluenzaA__EPI562038

SEQ ID NO: 218418 - RNA, 1410 nt, Artificial Sequence; identical to SEQ ID NO: 218379
  derived and/or modified CDS sequence (opt5) from neuraminidase__InfluenzaA__EPI562038

SEQ ID NO: 218419 - RNA, 1410 nt, Artificial Sequence; identical to SEQ ID NO: 214689
  derived and/or modified CDS sequence (opt5) from neuraminidase__InfluenzaA__EU716525

SEQ ID NO: 218420 - RNA, 1350 nt, Artificial Sequence
  derived and/or modified CDS sequence (opt5) from neuraminidase__InfluenzaA__EPI232422
augaaccccaaucagaagaucauuaccaucggcagcauuugcauggugaucgggauugucucccugaugcuccaaaucggaaacaugaucucuauuuggguuagccacuccauccagacaggcaaucagagacaggccgagccuauuucuaacacgaaauuccugaccgaaaaggcuguggccagcgugacacuugcgggaaauuccucucuguguccgaucagcgggugggcugucuacuccaaagacaacagcauucggaucggcucucgcggggauguguuuguuauuagagagcccuucaucuccugcagccaucucgaaugucggaccuuuuuccugacacaaggagcccuucugaaugacaagcacucuaacggcaccgugaaagaucgcuccccucauagaacacucaugagcugccccgucggcgaggccccuucucccuauaauucccgguuugaaagcguggcuugguccgccucugcuugucacgacgggaccagcuggcugacgaucggaauuuccggcccugauaacggggccguugcggugcugaaguacaauggaaucauuaccgacacaaucaagagcuggcgcaacaauauucucagaacccaggagucugagugcgccugugucaacggcuccugcuucacagugaugaccgaugggccgagcucuggacaggcuagcuauaaaaucuuuaagauggaaaaaggcaagguggucaaauccguugagcuggacgcccccaauuaccauuaugaagaguguucuugcuacccugaugcuggcgagaucacgugugugugccgggacaacuggcacgggagcaaccgccccuggguguccuucaaucagaaccuugaauaucaaauuggauacaucugcagcggcgucuuuggggauaauccuagacccaacgacggaacaggcucuugugggccgguguccccuaauggagccuacggcguuaagggcuucagcuuuaaguaugggaacggaguguggauuggccggaccaaaucuacaaauucccgcagcggguucgagaugaucugggaucccaacggauggaccggcaccgacuccucuuuuagcgucaagcaggacauuguggcgaucacagauugguccggguacucuggcagcuucguucagcacccugaacugacgggacucgacugcaucagacccuguuucuggguggagcugauucggggccgccccaaagaauccaccaucuggacaagcgggucuuccauuagcuuuugcggagucaauucugauaccguguccuggagcuggccugacggcgccgagcuuccguucacaaucgauaaguga

SEQ ID NO: 218421 - RNA, 1350 nt, Artificial Sequence; identical to SEQ ID NO: 218256
  derived and/or modified CDS sequence (opt5) from neuraminidase__InfluenzaA__EPI227593

SEQ ID NO: 218422 - RNA, 1350 nt, Artificial Sequence
  derived and/or modified CDS sequence (opt5) from neuraminidase__InfluenzaA__EPI435658
augaaccccaaucagaagaucgugaccauuggcagcaucugcauggucauugggaucauuucccugaugcuccaaaucggaaacaucauuucuaucuggguuagccacuccauucagacaggcaaucagcaucagacggagccuaucagaaacaccaauuuccugacagaaaacgccguggcuucugugacccuugccgggaauagcucccuguguccgauucggggaugggcgguccacucuaaagacaacagcauccgcauuggcuccaagggggauguguuuguuaucagagagcccuucaucagcugcucucaucucgaaugucggacauuuuuccugacccaaggagcccuucugaaugacaaacacuccaacggcacagugaaggaucgcagcccucauagaacccucaugucuugccccauuggcgaggcuccuucccccuacaauagccgguuugaaucugucgccugguccgcuagcgccugucacgacgggacguccuggcugaucauuggaaucucuggcccugauaacggggcuguggccguucugaaauauaauggaauuaucaccgacacaaucaagagcuggcgcaacaauauucucagaacccaggaguccgagugcgcgugugugaacggcagcugcuucacagucaugaccgaugggccgucuaacggacaggccuccuacaagaucuuuaaaauugaaaagggcaaaguggucaagagcguggagcugaaugcucccaacuaucacuacgaagaguguucuugcuauccugacgccggcgagaucauuuguguuugccgggauaauuggcaugggagcaaccgccccuggguguccuucaaucagaaccuugaauaccaaaucggauauaucugcucuggcguguuuggggacaauccuagacccaacgauggaacgggcagcugugggccggucuccccuaauggagcuuacggcgugaaaggcuucagcuuuaaguacgggaacggaguuuggauuggccggacaaagucuacccacucccgcagcggguucgagaugaucugggaccccaauggauggacaggcaccgauucugaauuuuccaugaaacaggacauuguggccaucaccgacuggagcggguauuccggcucuuucguccagcauccugagcugacaggacucgauugcauuagacccuguuucuggguggaacugauccggggccgccccaaggagagcacgauuuggaccuccgggucuagcaucuccuuuugcggaguuaacagcgacacagugucuugguccuggccugauggcgcggagcuuccguucaccaucgacaaauga

SEQ ID NO: 218423 - RNA, 1350 nt, Artificial Sequence; identical to SEQ ID NO: 218422
  derived and/or modified CDS sequence (opt5) from neuraminidase__InfluenzaA__EPI492513

SEQ ID NO: 218424 - RNA, 1350 nt, Artificial Sequence; identical to SEQ ID NO: 211769
  derived and/or modified CDS sequence (opt5) from neuraminidase__InfluenzaA__EPI165066

SEQ ID NO: 218425 - RNA, 1350 nt, Artificial Sequence
  derived and/or modified CDS sequence (opt5) from neuraminidase__InfluenzaA__EPI531308
augaaccccaaucagaagaucauuaccaucggcagcauuugcauggugacaggggucguuucccugaugcuccaagugggaaacaugaucucuauuuggaucagccacuccauccauacgggcaaucagcaccaggccgagccuauuucuaacaccaauuuccauacagaaaaagcuguggucagcgccaagcuggcggggaacuccucucuuuguccgaucaauggaugggcuguguacagcaaagacaacuccauuagaaucggcagcaagggggauguuuuugugauucgggagcccuucaucucuugcucccaccuggaaugucgcaccuuuuuccucacacagggagcccugcuuaaugacaaacauagcaacggcaccgccaaggauagaucuccucaccggacacugauguccugccccgucggcgaggcuccuagccccuauaauucucgcuuugaauccguggccuggagcgcuuccgccugucacgacgggaccucuuggcucacgauuggaaucagcggcccugauaacggggcgguugccgugcugaaguacaauggaaucauuaccgacacaaucaaauccuggagaaacaauguccugcggacccaagagagcgagugcgcuugugugaacggcuauugcuucacagugaugaccgaugggccgucuaacggacaggccucccauaagauuuuuaaaauggaaaagggcaaagucaucaagagcguugagcucgacgcucccaauuaccacuaugaagaguguucuugcuacccugaugccggcgagauuacgugugugugccgcgacaacuggcaugggagcaauagacccuggaucuccuucaaccagaaucuggaauaucagaucggauacauuugcucuggcguguuuggggauaacccucggcccaaugacggaaagggcagcugugggccggucuccagcaacggagcguacggcgugaaaggcuucucuuuuaaguaugggaauggaguuuggaucggccgcacaaaauccaccaacagcagaucuggguucgagaugauuugggauccuaauggauggacagaaaccgacuccagcuuuuccgugaagcaagacaucgucgccauuaccgauuggucuggcuacagcggguccuucgugcagcaccccgagcuuacaggccuggacugcauccggccuuguuucuggguugaacucauccgcggaagacccaaagagggcacgauuuggaccucugggagcuccaucagcuuuugcggagugucuggcgauacagucgggugguccuggcccgacggagcugagcugccuuucaccauugauaaguga

SEQ ID NO: 218426 - RNA, 1350 nt, Artificial Sequence
  derived and/or modified CDS sequence (opt5) from neuraminidase__InfluenzaA__EPI433308
augaaccccaaucagaagaucauuaccaucggcagcauuugcauggugaucgggauugucucccugaugcuccaaaucggaaaccugaucucuauuuggguuagccacuccauccagagaggcaaucuuaaccagguggagccuauuucuaauacauccuucccgacggaaaaagccguggcuuccgucacccuggccgggaacucuagccucugucccauccggggaugggcggugcauuccaaggacaauagcauucgcaucggcucuaaaggggauguuuuugugauuagagagccuuucaucuccugcagccaccuggaaugucggacauuuuuccuuacccagggagcucugcucaacgacaagcauucuaauggcacagucaaagaucgcagcccccacagaacccugaugagcugcccugugggcgaggcccccucuccuuacaacucccgguuugaaagcguugccugguccgcuucugccugucaugacgggacaagcuggcugaccaucggaauuuccggcccggauaauggggcuguggccgucgugaaguauaacggaaucauuacggacaccaucaagagcuggggcaauaacauucuccgcacacaagagucugagugcgcgugugugaauggguccugcuucaccgucaugacagauggacccagcaacggccaggccucuuacaaaaucuuuaagauggaaaaaggcaagguuaucaaaagcguggagcuggacgcuccuaacuaucacuacgaagaguguuccugcuaucccgaugccggggagauuaccugugugugcagagacaauuggcacggaucuaaccggccuugggucagcuucaaucagaaccuugaauaccagaucggcuauauuugcuccgggguguuuggagauaauccccgcccgaacgacggcacggggagcuguggaccuguuucucccaauggcgcuuacggcgugaagggguucuccuuuaaguacggaaacggcgucuggaucgggagaacaaaaagcccuaauucucgguccggauucgagaugauuugggaucccaacggcuggagcgaaaccgacuccucuuuuagcgugaagcaagacauccuggccguuacagauugguccggguauucuggcagcuucgugcagcaucccgagcucaccggacuggacugcauccgcccuuguuucugggucgaacuuauuagaggccggccggaggaguccaccaucuggacaagcgggucuuccauuagcuuuugcggagucaauucugauacgguguccuggagcuggcccgacggcgcggaacugccuuucaccaucgauaaauga

SEQ ID NO: 218427 - RNA, 1350 nt, Artificial Sequence
  derived and/or modified CDS sequence (opt5) from neuraminidase__InfluenzaA__EPI114974
augaaccccaaucagaagaucauuaccaucggcagcauuugcauggugaucgggauugucucccugaugcuccaaaucggaaacaugaucucuauuuggguuagccacuccauccagacaggcaaucagagacaggccgagccuauuucuaacacgaaauuccugaccgaaaaggcuguggccagcgugacacuugcgggaaauuccucucuguguccgaucagcgggugggcugucuacuccaaagacaacagcauucggaucggcucucgcggggauguguuuguuauuagagagcccuucaucuccugcagccaucucgaaugucggaccuuuuuccugacacaaggagcccuucugaaugacaagcacucuaacggcaccgugaaagaucgcuccccucauagaacacucaugagcugccccgucggcgaggccccuucucccuauaauucccgguuugaaagcguggcuugguccgccucugcuugucacgacgggaccagcuggcugacgaucggaauuuccggcccugauaacggggccguugcggugcugaaguacaauggaaucauuaccgacacaaucaagagcuggcgcaacaauauucucagaacccaggagucugagugcgccugugucaacggcuccugcuucacagugaugaccgaugggccgagcaauggacaggcuucuuauaaaaucuuuaagauggaaaaaggcaagguggucaaaagcaucgagcuggacgcccccaacuaccauuaugaagaguguuccugcuacccugaugcuggcgagauuacguguguuugccgggacaacuggcacgggucuaaucgccccugggugagcuucaaccagaaucuugaauaucaaaucggauacauuugcuccggcguguuuggggauaacccuagacccaaugacggaacaggcagcugugggccggucucuccuaacggagccuacggcgugaagggcuucuccuuuaaguaugggaauggaguuuggaucggccggaccaaaagcacaaacucucgcuccggguucgagaugauuugggaucccaauggauggaccggcaccgacagcuccuuuucugugaagcaggacaucgucgcgaucacagauuggagcggguacuccggcucuuucgugcagcacccugaacugacgggacucgacugcauuagacccuguuucuggguugagcugauccggggccgccccaaagaaagcaccauuuggacauccgggagcucuaucuccuuuugcggagugaacagcgauaccgucucuugguccuggccugacggcgccgagcuuccguucacaauugauaaguga

SEQ ID NO: 218428 - RNA, 1350 nt, Artificial Sequence
  derived and/or modified CDS sequence (opt5) from neuraminidase__InfluenzaA__EPI622495
augaaccccaaucagaagaucaccacaauuggcagcaucugcauggugauugggaucgucucccugaugcuccaaauuggaaacaugguuucuaucugggugagccacuccauccagacgagaaaucagcggcaggccgagccuauuucuaacacccgcagccugacagaaaaagcuguggccuccgucacccuugcgggcaauucuagccuguguccgaucuccgggugggcuguguacagcaaggacaacucuauuagaaucggauccaaaggcgauguuuucgugauucgggagcccuuuaucagcugcucucaucucgaaugucgcacauucuuucugacccaaggggcccuucugaaugacaagcacuccaacggaacagucaaagauagaagcccucaucggacccucaugucuugccccgugggcgaggccccuucccccuauaauagccgcuucgaauccguugcuuggucugccagcgcuugucacgacggcacguccuggcugaccauugggaucagcggaccugauaacggcgccguggcggucgugaaguacaaugggaucauuacagacaccaucaagucuuggagaaacaauauucugcggacacaggaguccgagugcgugugugucaacggaagcugcuuuaccguuaugacggauggcccgucuaauaaacaggccagcuauaagaucuucaaaauggaaaaggggaaaguggugaaguccauugagcucgacgcucccaacuaccauuaugaagaguguucuugcuacccugaugccggagagaucacaugugucugccgcgacaacuggcacggcagcaauagacccuggcuguccuuuaaccagaaucuugaauaucaaaucggcuacauuugcagcgggguguucggagauaacccucggcccaaugacggcaccgggucuuguggaccgguuuccagcaacggcgcuuacggggugaagggauuuucuuucaaauauggcaauggcgucuggaucgggcgcacaaaguccaccaacagcagauccggauuugagaugauuugggauccuaauggcuggaccgggacagacucuagcuucuccaugaaacaggacaucguggccauuacggauuggucuggauacagcggcuccuuuguucagcaccccgaacugaccgggcucgacugcauccggccuuguuucuggguggagcugguccgcggcagacccaaggaaggaacaaucuggaccagcgggucuuccauuagcuucugcggcgugaacucugauacagucuccuggagcuggcccgacggagcggagcuuccuuuuaccaucgauaaauga

SEQ ID NO: 218429 - RNA, 1350 nt, Artificial Sequence
  derived and/or modified CDS sequence (opt5) from neuraminidase__InfluenzaA__EPI349847
augaaccccaaucagaagaucaccacaauuggcagcaucugcauggugauugggaucgucucccugaugcuccaaauuggaaacaugguuucuaucugggugagccacuccauccagacgagaaaucagcggcaggccgagccuauuucuaacacccgcagccugacagaaaaagcuguggccuccgucacccuugcgggcaauucuagccuguguccgaucuccgggugggcuguguacagcaaggacaacucuauuagaaucggauccaaaggcgauguuuucgugauucgggagcccuuuaucagcugcucucaucucgaaugucgcacauucuuucugacccaaggggcccuucugaaugacaagcacuccaacggaacagucaaagauagaagcccucaucggacccucaugucuugccccgugggcgaggccccuucccccuauaauagccgcuucgaauccguugcuuggucugccagcgcuugucacgacggcacguccuggcugaccauugggaucagcggaccugauaacggcgccguggcggucgugaaguacaaugggaucauuacagacaccaucaagucuuggagaaacaauauucugcggacacaggaguccgagugcgugugugucaacggaagcugcuuuaccguuaugacggauggcccgucuaauaaacaggccagcuauaagaucuucaaaauggaaaaggggaaaguggugaaguccauugagcucgacgcucccaacuaccauuaugaagaguguucuugcuacccugaugccggagagaucacaugugucugccgcgacaacuggcacggcagcaauagacccuggcuguccuuuaaccagaaucuugaauaucaaaucggcuacauuugcagcgggguguucggagauaacccucggcccaaugacggcaccgggucuuguggaccgguuucccacaacggcgcuuacggggugaagggauuuagcuucaaauauggcaauggcgucuggaucgggcgcacaaagucuaccaacuccagaagcggauuugagaugauuugggauccuaauggcuggaccgggacagacuccucuuucagcaugaaacaggacaucguggccauuacggauugguccggauacucuggcagcuuuguucagcaucccgaacugaccgggcucgacugcauccggccuuguuucuggguggagcugguccgcggcagacccaaggaaggaacaaucuggaccuccggcagcucuauuuccuucugcggggugaacagcgauacagucucuugguccuggcccgacggagcggagcuuccuuuuaccaucgauaaauga

SEQ ID NO: 218430 - RNA, 1350 nt, Artificial Sequence
  derived and/or modified CDS sequence (opt5) from neuraminidase__InfluenzaA__EPI174804
augaaccccaaucagaagaucauuaccaucggcagcauuugcauggugaucgggauugucucccugaugcuccaaaucggaaacaugguuucuaucugggugagccacuccauucagacaagaaaucagcggcaggccgagccuaucucuaacacgaaaagccugaccgaaaaggcuguggccuccgucacacuugcgggcaauucuagccuguguccgauuuccgggugggcuguguacagcaaagacaacucuauccgcauuggauccaagggcgauguuuucgugaucagagagcccuuuauuagcugcucucaucucgaaugucggaccuucuuucugacacaaggggcccuucugaaugacaaacacuccaacggaaccaucaaggaucgcagcccucauagaacacucaugucuugccccgucggcgaggccccuucccccuauaauagccgguucgaauccguggcuuggucugccagcgcuugucacgacggcaccuccuggcugacgaucgggauuagcggaccugauaacggcgccguugcggugcugaaguacaaugggaucauuaccgacacaaucaaaucuuggcgcaacaauauucucagaacccaggaguccgagugcgccugugucaacggaagcugcuuugcugugaugacagauggcccgucuaaucggcaggccagcuauaagaucuucaaaauggaaaaggggaaaguggucaaguccaucgagcuggacgcucccaacuaccauuaugaagaguguucuugcuacccugaugccggagagauuaccuguguuugccgcgacaacuggcacggcagcaauagacccuggcuuuccuuuaaccagaaucuggaauaucaaaucggcuacauuugcagcgggguguucggagauaacccucggcccaaugacggcacggggucuuguggaccgguguccagcaacggcgcguacggggucaagggauuuucuuucaaauauggcaauggcguguggaucgggcgcacaaaguccaccaacagcagauccggauuugagaugauuugggauccuaauggcuggacagaaaccgacucuagcuucuccaugaaacaggacaucguugccaucaccgauuggucuggguacagcggauccuuugugcagcaccccgagcucacaggccuggacugcauucggccuuguuucugggucgaacuugugcgcgggagacccaaggagagcacgaucuggaccucuggcuccagcauuucuuucugcggaguuaacuccgauacagugagcuggucuuggcccgacggcgcugagcugccuuuuaccaucgauaaauga

SEQ ID NO: 218431 - RNA, 1350 nt, Artificial Sequence
  derived and/or modified CDS sequence (opt5) from neuraminidase__InfluenzaA__EPI492441
augaaccccaaucagaagaucauggccauuggcagcgugugcauggucaucgggauuguuucccugaugcuccaaaucggaaacaccauuucuaucugggugagccacuccuuccagacaagagugcagcaucaggcugagccuauccggaauacgaacuuucugaccgaaaaugccgucgcgucugugacacuugcuggcaacagcucccuguguccgauucgcgggugggccguucacucuaaagacaauagcaucagaauuggauccaagggcgauguguucgucauccgggagcccuuuauuagcugcucucaucucgaaugucgcaccuucuuucugacacaaggggcccuucugaacgacaaacacuccaauagaaccgugaaggaucggagcccucaucgcacacucaugucuugccccguuggagaggugccuucccccuacaacagcagauucgaaucugucgcuugguccgccagcgcuugucacgacggcaccuccuggcugacgaucggcauuucugggccugauaauggagccguggcggugcugaaauauaacggcaucaucaccgacacaauuaagagcuggcggaauaacauccuccgcacccaggaguccgagugcgccugugucaauggguuuugcuucacaguuaugaccgauggaccgagcaacggccaggcuucuuacaagauuuuuaaaaugaagaaagggaagguggugaaauccgucgaacugaacgcccccaauuaucacuacgaggaauguagcugcuauccugacgcuggagagaucaugugugugugcagagauaacuggcauggcucuaaucggcccuggguuagcuucaaccagaaucuugaguaccaaauuggcuauaucugcuccgggguguuuggagacaacccucgccccaaugauggcacggggucuuguggaccggucagcccuaacggcgccuacgggaucaagggauucuccuuuaaguacggcaauggcguguggauugggagaacaaaaagcaccaacucucgguccggauucgaaaugguuugggaccccaauggcuggacagauaccgacagcgacuucucuaucaagcaggauauuguggcgaucaccgacugguccggguauagcggauccuuuguccagcacccugagcugacaggccucgauugcauucgccccuguuucuggguggaacugaucagagggcggcccaaagagucuacgaucuggaccagcggcuccucuauuagcuuuugcggagucaacuccgaaacagugagcuggucuuggccugacggcgccgagcuuccguucaccaucgauaaguga

SEQ ID NO: 218432 - RNA, 1350 nt, Artificial Sequence; identical to SEQ ID NO: 218059
  derived and/or modified CDS sequence (opt5) from neuraminidase__InfluenzaA__EPI164142

SEQ ID NO: 218433 - RNA, 1350 nt, Artificial Sequence
  derived and/or modified CDS sequence (opt5) from neuraminidase__InfluenzaA__EPI827076
augaaccccaaucagaagaucgugaccauuggcagcaucugcauggucauugggaucauuucccugaugcuccaaaucggaaacaucauuucuaucuggguuagccacuccauucagacaggcaaucagcaucagacggagccuaucagaaacaccaauuuccugacagaaaacgccguggcuucugugacccuugccgggaauagcucccuguguccgauuaaaggaugggcgguccacucuaaggacaacagcauccggauuggcuccaaaggggauguguuuguuauccgcgagcccuucaucagcugcucucaucucgaauguagaacauuuuuccugacccaaggagcccuucugaaugacaagcacuccaacggcacagugaaagaucggagcccucaucgcacccucaugucuugccccauuggcgaggcuccuucccccuacaauagcagauuugaaucugucgccugguccgcuagcgccugucacgacgggacguccuggcugaucauuggaaucucuggcccugauaacggggcuguggccguucugaaguauaauggaauuaucaccgacacaaucaagagcuggcggaacaauauucuccgcacccaggaguccgagugcgcgugugugaacggcagcugcuucgccgucaugacagaugggccgucuaacggacaggcuuccuacaaaaucuuuaagauugaaaaaggcaagguggugaaaagcgucgagcugaaugcccccaacuaucacuacgaagaguguucuugcuauccugacgcuggcgagaucauuuguguuugcagagauaauuggcaugggagcaaccggcccuggguguccuucaaucagaaccuugaauaccaaaucggauauaucugcucuggcguguuuggggacaauccucgccccaacgauggaaccggcagcugugggccggucuccagcaauggagccuacggcgugaagggcuucucuuuuaaguacgggaacggaguuuggauuggcagaacgaaauccacacacagccggucuggguucgagaugaucugggacccuaauggauggaccggcacagauuccgaauuuagcaugaagcaggacauuguggcgaucaccgacugguccggguauucuggcagcuucguccagcaucccgagcugaccggacucgauugcauucgcccuuguuucuggguggaacugaucagaggccggcccaaagaguccacaauuuggacgucugggagcuccaucagcuuuugcggaguuaacucugacaccguguccuggagcuggcccgauggcgccgagcuuccuuucacaaucgacaaguga

SEQ ID NO: 218434 - RNA, 1350 nt, Artificial Sequence; identical to SEQ ID NO: 208651
  derived and/or modified CDS sequence (opt5) from neuraminidase__InfluenzaA__EPI168491

SEQ ID NO: 218435 - RNA, 1350 nt, Artificial Sequence
  derived and/or modified CDS sequence (opt5) from neuraminidase__InfluenzaA__EPI827078
augaaccccaaucagaagaucauuaccaucggcagcauuugcauggugaucgggauugccucccugaugcuccaaaucggaaacaucauuucuaucuggauuagccacuccauccagacaggcaaucagugucagaacgagucuauuagcaauacgaaauuccuggcugaaaaggccgucgcguccguuacccuugcugggaacucuagccugugcccuguguccggaugggccguguacagcaaagacaauucuaucagaauuggcuccaagggggaugucuuugugauccgggagccguucaucagcuguucucaucucgaaugccgcacauuuuuccugacccaaggagcccuucugaacgacaaacacuccaauggcacaguuaaggauagaagcccccaucggacccucaugucuuguccugugggcgaggcucccuccccuuauaacagccgcuuugaauccgucgccuggucugcuagcgccugccacgacgggacauccuggcugaccauuggaaucagcggccccgauucuggggcgguggccguucugaaguacaauggaauuaucacggacaccauuaaauccuggagaaacaauaucaugcggacacaggagagcgagugugcuugcgugaacggcucuuguuucaccaucaugacagaugggccuagcuccggacaggccucuuauaagauuuuuaaaauggaaaagggcaaagucaucaagagcguggagcucgacgcuccgaauuaccauuaugaagagugcuccuguuaccccgaugccggcgagauuaccugcgugugccgcgacaacuggcacgggagcaacagaccuuggaucucuuucaaucagaaccuggaauaucaaauuggauacaucuguuccggcgucuuuggggauaauccccggccuaacgacggaacgggcagcugcgggcccguuuucccgaauggagcguacggcgugaagggcuuuucuuucaaauaugggaacggaguguggaucggccgcacaaaguccaccaauagcagauccggguuugagaugauuugggauccuaacggauggacaggcaccgacucuagcuucuccgucaaacaggacaucguggccauuaccgaauggucuggguacagcggcuccuucguucagcaccccgagcuuacaggacuggauuguauccggccuugcuuuuggguggaacucauucgcggcagacccaaggagagcacgaucuggaccucuggguccagcauuucuuucuguggagucaauggcgacacaguguccuggagcuggcccgauggggcugagcugccuuuuaccaucgacaaauga

SEQ ID NO: 218436 - RNA, 1350 nt, Artificial Sequence
  derived and/or modified CDS sequence (opt5) from neuraminidase__InfluenzaA__EPI594521
augaaccccaaucagaagaucauuaccaucggcagcauuugcguggggaucggaauugucucccugaugcuccaaaucggcaacaugguuucuaucugggugaaucacagcauucagacagagaaccagugucaggccgaauccaucucuaauacgaaauuccugaccgagaaggcuguggccccugucacacuuauggggaacagcucccugugcccgauuucuggaugggcggugcauagcaaagacaauuccaucagaauuggcagcaagggggauguuuuugugauccgggaacccuucauuucuuguucccaccucgagugccgcaccuuuuuccugacacaaggagcccuucugaacgacaaacauagcaauggcaccgucaaggauagaucuccucaccgggcucucauguccugucccgugggcgaagccccuagccccuacaacucucgcuuugaguccguugcuuggagcgccuccgcuugccaugacgggacaggauggcugaccaucggcaucucugggccugauaauggagccguggcgguccugaaguauaacggcauuaucacggacaccauuaaaagcuggagaaauaacauccuccggacacaggaguccgaaugugccugcgugaaugggagcuguuucaccgugaugacagauggaccgucuaacggccaggcuuccuacaagauuuuuaaacuggagaagggcaaagucguuaagagcguggaacuugacgcccccaacuaucacuacgaggagugcucuuguuauccugaugcuggggaaauuaccugcgugugccgcgacaauuggcacggaagcaacagacccugggucuccuucaaucagaaccuggaguaccaaaucggcuauaucuguucugggguguuuggagauaauccucggcccaacgacggcacggggagcugcggaccgguuuccccuaauggcgccuacggcgugaagggguucagcuuuaaauacggaaacggcgucuggaucgggcgcacaaagucuaccaauuccagaagcggauucgaaaugauuugggaucccaacggcuggacagagaccgacucuuccuuuagcgugaaacaggacaucguugcgauuaccgauugguccggguauucuggcagcuucgugcagcauccugaacucacaggacuggacuguauccggcccugcuucugggucgagcuuauccgcggcagacccaaggaguccacgauuuggaccucugggagcuccaucagcuuuuguggagucaauucugauacagugggcugguccuggccugacggggccgaagugccguucaccauugauaaauga

SEQ ID NO: 218437 - RNA, 1410 nt, Artificial Sequence
  derived and/or modified CDS sequence (opt5) from neuraminidase__InfluenzaA__EPI5787
augaaccccaaucagaagaucauuaccaucggcagcauuugcaugguggucgggaucauuucccugaugcuccaaaucggaaacaucauuucuaucuggguuagccacuccauucagacaggcaaucagcaucaggccgagccuuguaaccaaucuaucauuacguacgaaaauaacaccugggugaaucagacauaugugaacaucagcaauaccaacuuccugacagagaaagcugucgccuccgugacccuugcgggaaauucuagccugugcccgauuuccgggugggcuguucacagcaaggacaacggcaucagaaucgggucuaaaggagauguguuugucauucgggaacccuucaucuccuguagccaucucgagugccgcacauuuuuccugacccagggcgcccuucugaaugacaagcacucuaacggcacggugaaagauagauccccucaucggacccucaugagcugucccguuggggaagccccuucucccuacaauucccgcuuugagagcguggcuugguccgccucugcuugccacgacggaacaagcuggcugaccauuggcaucuccgggccugauaacggagccgucgcggugcugaaguauaacggcauuaucacagacaccaucaagagcuggagaaauaacauucuccggacgcaggagucugaaugugccugcgugaauggguccuguuucacagucaugaccgauggaccgagcaacggccaggcuucuuacaaaaucuuuaagauggagaaaggcaagguugugaaaagcguggaacugaaugcccccaacuaucacuacgaggagugcuccuguuauccugacgcuggggaaauuacaugcgucugccgcgauaauuggcauggaucuaacagacccugggugagcuucaaucaaaaccuugaguaccagaucggcuacauuuguuccgggguuuuuggagacaauccucggcccaacgauggcaccgggagcugcggaccggugucuccuaauggcgccuauggcgucaagggguucuccuuuaaguacggaaacggcguguggaucgggcgcaccaaaagcacaaauucuagauccggauucgaaaugaucugggaccccaacggcuggacggggaccgauagcuccuuuucuguuaagcaggacauuguggcgaucacagacuggagcggcuauuccggaucuuucguccaacacccugagcugaccggccucgauuguauucggcccugcuucuggguggaacugauccgcgggagacccaaagagagcacaauuuggaccuccggaagcucuaucuccuuuuguggcgucaacagcgacacggugggguggucuuggccugaugacgccgagcuuccguucacaauugauaaguga

SEQ ID NO: 218438 - RNA, 1410 nt, Artificial Sequence; identical to SEQ ID NO: 218437
  derived and/or modified CDS sequence (opt5) from neuraminidase__InfluenzaA__EPI5787

SEQ ID NO: 218439 - RNA, 1350 nt, Artificial Sequence; identical to SEQ ID NO: 213137
  derived and/or modified CDS sequence (opt5) from neuraminidase__InfluenzaA__EPI267031

SEQ ID NO: 218440 - RNA, 1350 nt, Artificial Sequence; identical to SEQ ID NO: 214717
  derived and/or modified CDS sequence (opt5) from neuraminidase__InfluenzaA__EPI376539

SEQ ID NO: 218441 - RNA, 1350 nt, Artificial Sequence
  derived and/or modified CDS sequence (opt5) from neuraminidase__InfluenzaA__EPI124069
augaaccccaaucagaagaucauuaccaucggcagcauuugcauggugaucgggauugucucccugaugcuccaaaucggaaacaugaucucuauuuggguuagccacuccauccagacaggcaaucagcaucaggccgagucuauuagcaacacgaauccucugaccgaaaaagcuguggccuccgugacacuugcggggaacucuagccuguguccgaucagaggaugggcuguccacuccaaggacaauaacauucggaucggcagcaaaggggauguguucguuauucgcgagcccuuuaucucuugcucccaucucgaauguagaaccuucuuucugacacaaggagcccuucugaaugacaagcacagcaacggcaccgugaaagaucggucuccucaucgcacacucauguccugccccgucggcgaggccccuagccccuacaauucuagauucgaauccguggcuuggagcgccuccgcuugucacgacgggaccucuuggcugacgaucggaauuagcggcccugauaacgaggccguugcggugcugaaguauaaugggaucauuaccgacacaaucaaguccuggcggaacaauauucuccgcacccaggagagcgaaugcgccugugucaacggaucuugcuuuacagugaugaccgauggcccguccgacgggcaggcuagcuacaaaaucuucaagauggagaaaggaaagguggucaaaucuguugaacuggaugcccccaacuaucacuacgaggaguguagcugcuauccugacgcuggcgaaaucacgugugugugcagagauaauuggcauggcuccaaccggcccugggugucuuuuaaucagaaccuugaguaccaaauuggguauaucugcagcggagucuucggcgacaauccucgccccaacgaugggacaggauccuguggcccgaugagcccuaauggggccuacggagugaagggcuuuucuuucaaguacggcaacgggguuuggauuggaagaaccaaauccacaaauagccggucuggcuuugaaaugaucugggaccccaacggguggaccggaaccgacuccagcuucuccgugaagcaggauauugucgcgaucacagacuggucuggcuauagcggguccuuugugcagcacccugagcugacgggccucgauugcauccgccccuguuucuggguugaacugauuagaggacggcccaaagagucuaccaucuggacaagcggcuccagcauuucuuucugcggggucaauuccgacaccgugagcuggucuuggccugauggagccgagcuuccguuuacaaucgacaaguga

SEQ ID NO: 218442 - RNA, 1350 nt, Artificial Sequence
  derived and/or modified CDS sequence (opt5) from neuraminidase__InfluenzaA__EPI342499
augaaccccaaucagaagaucauuaccaucggcagcauuugcauggugaucgggauugucucccugaugcuccaaaucggaaacaugaucucuauuuggaucagccacuccauucagaaaggcaaucagcauagaacagagucuaucagcaacacgaauccucugaccgaaaaggccguugcuuccgugacacuuaccgggaacucuagccuguguccgauucggggaugggccgugcacuccaaagacaauaacauccgcauuggcagcaagggggaugucuucgugaucagagagcccuuuaucucuugcucccaucucgaaugucggacauucuuucugacccagggagcgcuucugaaugacaaacacagcaacggcacaguuaaggaucgcucuccucauagaacccucauguccugcccccugggcgaggcuccuagccccuacaauucucgguucgaauccguggccuggagcgccuccgcuugucacgacgggacgggauggcugaccauuggcaucucugggccugauaacgaggccgucgcugugcucaaguauaauggaauuaucacagacaccauuaaaagcuggcgcaacaauauccugagaacacaagaguccgaaugcgccuguguuaacggcagcugcuuuaccgugaugacggaugggccgucuaacggacaggcguccuacaagaucuucaaaaugcggaagggcaaagucgucaagagcguggagcuugacgcccccaauuaucacuacgaagaguguucuugcuauccugauacaggcgagauuaccugugugugccgcgacaacuggcaugggagcaauagacccuggaucuccuuuaaccagaaucuggaauaccagauuggauauaucugcucuggcauuuucggggauaacccucggcccaaugacggaacaggcagcugugggccgauguccccuaacggagcuuacggcguuaagggcuuuagcuucaaauacgggaauggaguguggaucggccgcaccaagucuaccaacuccagaagcggguuugagaugaucugggaucccaauggauggacagaaacggacucuuccuucagcgugaaacaagacauugucgccaucaccgauugguccggcuauucugggagcuuugugcagcacccugagcucacaggccuggacugcauucggcccuguuucuggguugaacuuauccgcggaagacccaaggaguccaccauuuggacaucuggcagcuccaucagcuucugcggggugaacucugauaccgucuccuggagcuggccugacggagcugagcugccguuuacgauugauaaauga

SEQ ID NO: 218443 - RNA, 1350 nt, Artificial Sequence
  derived and/or modified CDS sequence (opt5) from neuraminidase__InfluenzaA__EPI103069
augaaccccaaucagaagaucauuaccaucggcagcauuugcauggugaucgggauugucucccugaugcuccaaaucggaaacaugaucucuauuuggguuagccacuccauccagacaggcaaucagagacaggccgagccuauuucuaacacgaaauuccugaccgaaaaggcuguggccagcgugacacuugcgggaaauuccucucuguguccgaucagcgggugggcugucuacuccaaagacaacagcauucggaucggcucucgcggggauguguuuguuauuagagagcccuucaucuccugcagccaucucgaaugucggaccuuuuuccugacacaaggagcccuucugaaugacaagcacucuaacggcaccaucaaagaucgcuccccucauagaacacucaugagcugccccgugggcgaggccccuucucccuauaauucccgguuugaaagcgucgcuugguccgccucugcuugucacgacgggaccagcuggcugacgauuggaaucuccggcccugauaacggggccguggcgguucugaaguacaauggaauuaucaccgacacaauuaagagcuggcgcaacaauauccucagaacccaggagucugagugcgccugugugaacggcuccugcuucacagucaugaccgaugggccgagcucuggacaggcuagcuauaaaaucuuuaagauggaaaaaggcaagguggugaaauccgucgagcuggacgcccccaauuaccauuaugaagaguguucuugcuacccugaugcuggcgagauuacguguguuugccgggacaacuggcacgggagcaaccgccccuggguguccuucaaucagaaccuugaauaucaaaucggauacauuugcagcggcguguuuggggauaauccuagacccaacgacggaacaggcucuugugggccggucuccccuaauggagccuacggcgugaagggcuucagcuuuaaguaugggaacggaguuuggaucggccggaccaaaucuacaaauucccgcagcggguucgagaugauuugggaucccaacggauggaccggcaccgacuccucuuuuagcgugaagcaggacaucgucgcgaucacagauugguccggguacucuggcagcuucgugcagcacccugaacugacgggacucgacugcauuagacccuguuucuggguugagcugauccggggccgccccaaagaauccaccauuuggacaagcgggucuuccaucagcuuuugcggagucaauucugauaccguguccuggagcuggccugacggcgccgagcuuccguucacaauugauaaguga

SEQ ID NO: 218444 - RNA, 1350 nt, Artificial Sequence; identical to SEQ ID NO: 218420
  derived and/or modified CDS sequence (opt5) from neuraminidase__InfluenzaA__EPI227595

SEQ ID NO: 218445 - RNA, 1410 nt, Artificial Sequence
  derived and/or modified CDS sequence (opt5) from neuraminidase__InfluenzaA__EPI569385
augaaccccaaucagaagaucauuaccaucggcagcgugucccugacaauugccacggucugcuuccucaugcaaaucgcuauucuggccaccacaguuacccuucacuuuaaacagaacgaguguucuaucccuccgaauaaccagguggugcccugcgaaccuaucauuaucgagaagaauauuacagaaaucgucuaccugaacaauaccacaauugagaaagaagugugucccgagguuccugaguauagaaacuggagcaagccccagugccaaaucaccggguucgcgccuuuuuccaaagacaauucuauucggcucagcgcuggaggcgauaucugggugacgcgcgaaccguacgucuccuguucucccgggaagugcuaucaguucgcccugggacagggcaccacacuuaacaauaagcauagcaacgggaccauccacgaccggauuccucauagaacacugcucauguccgagcugggagugcccuuucaccugggcaccaaacagguuuguaucgccuggucuagcuccagcugccaugauggcaaggcuuggcuccacgugugugucacgggggacgaucgcaaugccacagcuucuuucauuuacgacggaaugcuggccgauuccaucggcagcuggucucaaaacauucuuagaacccaggaauccgagugcguguguaucaaugggacaugcaccguggucaugaccgacggaagcgcguccggccgggccgauacacgcauccuguuuauuaaagaggggaagaucguucacauuucuccucucagcggauccgcucagcauaucgaagagugcagcuguuaucccagauacccggacgugcggugcgugugucgcgauaacuggaaaggcucuaacagaccugucauugacaucaauauggccgauuauuccaucgacagcucuuacgugugcagcggccugguuggggacacgccccggaacgaugacuccucuagcuccagcaauugucgcgauccuaacaaugaaagaggaaaccccggcgugaaggggugggcuuucgacaauggaaacgaugucuggaugggccggaccauuucugaggacucccgcagcggguacgaaacauuuagagugaccgauggauggacaaccgccaauucuaagucccagguuaaccggcaaaucauuguggacaauaacaauuggagcggcuauuccggcaucuucucugucgaggggaaaagcugcauuaacagauguuuuuacguggagcuuauccgcggacggccccaggaaacgagagucugguggacauccaauucuauugugguuuucugcggcaccagcgggaccuauggaacaggcuccuggccugauggggcgaacaucaacuuuaugccgaucuga

SEQ ID NO: 218446 - RNA, 1380 nt, Artificial Sequence
  derived and/or modified CDS sequence (opt5) from neuraminidase__InfluenzaA__EPI736916
augaaccccaaucagaagauuaccugcaucagcgccacaggcgugacgcuguccgucguuucucuccugaucgggauugcuaaccuuggacugaauaucggccuccacuacaaagugagcgacuccaccacaauuucuaucccuaacaugaaugagaccaacccgacaaccacaaauaucaccaacauuaucgugaauaagaacgaagagagaacguuccugaaucuuaccaaaccccugugugaagucaacagcuggcauauucucuccaaggauaaugccauccggauuggggaggacgcgcacauccuggugacacgcgaaccuuaucugucuugcgauccccaaggauguagaauguuugcucucagccagggcaccacacugcgggggcgccaugccaacggaaccauucacgacagauccccuuuccgggcccuuaucagcugggagaugggccaggcucccucuccuuacaauacgcgcguugagugcaucggcugguccagcacaucuugucaugaugggauuuccagaaugagcaucugcauuucuggaccgaacaacaaugccuccgcuguggucugguaucggggccgccccgugaccgaaaucccuagcugggccgggaacauucugagaacacaggaguccgaauguguuugccacaaaggaaucugucccguggucaugaccgacggcccugcgaauaacaaggccgcuaccaagaucauuuacuuuaaagaggggaaggugcagaaaaucgaggaacuccaaggaaaugcccagcacauugaggaaugcucuuguuauggcgcugccggcaugaucaagugcgugugccgggauaacuggaaaggggcgaaucgccccauuaucacaaucgacccggagaugaugacgcauaccagcaaguaccuguguuccaagauucuuacagauaccagcagaccuaacgaccccacaaauggaaacugcgaugccccuaucaccggcgggucucccgaccccggagucaaaggcuucgcuuuucuggauggggaaaauuccuggcucggacggacgauuagcaaggacucucgcagcggcuaugagaugcugaaaguuccuaacgccgagacagacacccaguccggcccgaccucuuaccaacugaucgugaauaaccagaauuggagcggguacuccggagcuuucauugauuauugggccaacaaggaauguuuuaaccccugcuucuacguggagcucaucagaggccggccuaaagaaagcgacguccuguggacaucuaauuccaugguggcccuuugugggagcagagagcgccugggaucuugguccuggcacgauggcgcugaaauuaucuauuuuaaguga

SEQ ID NO: 218447 - RNA, 1380 nt, Artificial Sequence; identical to SEQ ID NO: 218066
  derived and/or modified CDS sequence (opt5) from neuraminidase__InfluenzaA__EPI593891

SEQ ID NO: 218448 - RNA, 1380 nt, Artificial Sequence
  derived and/or modified CDS sequence (opt5) from neuraminidase__InfluenzaA__EPI691380
augaaccccaaucagaagaucgugugcauuagcgucaccggcguuacacuguccguggugucucuccugaucgggauuacgaaccuuggacugaauaucggccuccacuacaaagucagcgacuccaccacaauuaacaucccuaauaugaacgagaccaauccgacaaccacaaacaucaccaauauuaucaugaacaagaaugaagagagaacguuccugaaacuuaccaagccccugugugaagugaacucuuggcauauucucagcaaagauaaugccauccggauuggggaggacgcucacauccugguuacacgcgaaccuuaucuguccugcgauccccaaggauguagaauguuugcccucucucagggcaccacacugcgggggcagcaugcgaacggaaccauucacgaccgcagcccuuucagagcucuuaucuccugggagaugggccaggcccccagcccuuacaauacgcggguggagugcaucggcuggucuuccacaagcugucaugaugggauuucucgcauguccaucugcauuagcggaccgaacaacaaugccucugcugucgugugguauagaggccggcccguuaccgaaaucccuuccugggccgggaacauucugcgcacacaagagagcgaaugugugugccacaagggaaucugucccgucgugaugaccgacggcccugcuaauaacaaggccgcgaccaaaaucauuuacuuuaaggaggggaaaauccagaagacagaggaacuccagggaaaugcccagcacauugaggaaugcuccuguuauggcgcugccggcaugaucaaaugcgugugcagagauaacuggaagggggcuaaucggcccauuaucacgaucgacccggagaugaugacccauacaucuaaguaccuguguagcaaaauucuuaccgauacaucccgcccuaacgaccccaccaauggaaacugcgaugccccuaucacgggcgggagccccgaccccggagucaagggcuucgcguuucuggauggggaaaauucuuggcucggaagaacaauuuccaaagacagccggucuggcuaugagaugcugaagguuccuaacgccgagaucgacauucaaagcggcccgaucuccuaccagcugguggugaauaaccagaauuggucuggguacagcggagcuuucauugauuauugggccaacaaagaauguuuuaaccccugcuucuacgucgagcucauccgcggcagaccuaaggaauccggggugcuguggaccagcaauucuaugguugcucuuuguggaucccgggagagacugggcagcuggucuuggcacgacggggccgaaaucauuuauuuuaaauga

SEQ ID NO: 218449 - RNA, 1413 nt, Artificial Sequence
  derived and/or modified CDS sequence (opt5) from neuraminidase__InfluenzaA__EPI533584
augaaccccaaucagaagauuaccugcaucagcgccacaggcaugacgcuguccguggucucuaugcucaucgggauugcuaaccugggacuuaauaucggccugcacuacaaaguuagcgacuccaccaacauuaauaucccuaacaugaaugagacaucuccgaccacaaccaucauuaacaaucauccccaaaacaauuucacaaacaucaccaauauuaucgugacgaagaacgaagaggggcaccuccugaaucuuaccaaaccucugugugaagugaacagcuggcauauucucuccaaggauaacgccaucagaauuggagaggacgcgcacaucaucgucacacgggaacccuaucugucuugcgauccucagggcugucgcauguuugcucugagccaggggaccacacucagaggaaaacaugccaauggcaccauucacgaccggucccccuuccgcgcccuggugagcugggagaugggccaggcuccuucuccguacaacacgagaguugagugcaucgggugguccagcacaucuugucacgauggaauuucccggaugagcaucugcauuucuggccccaauaacaaugccuccgcuguggucugguaugggggacgcccugugaccgaaauccccagcugggccggcaacauccuuagaacacaagaguccgaauguguuugccaugggggaauuuguccuguggucaugaccgacggccccgcgaauaaccgggccgagaccaagaucauuuacuuuaaggagggcaaaaucaagaaaauugaggaacugaagggggaugcucagcacaucgaagagugcucuuguuauggagccagcgaaaugaucaaaugcauuugccgcgacaauuggaagggcgcuaacagaccggugaucacaauugauccugagaugaugacgcauaccuccaaguaccucuguagcaaaauccugacagacaccucucggcccaaugauccuacaaacgggaagugcgaggcccccauuaccggaggcucccccgacccuggggugaaaggauucgcguuucuugauggcgaaaauagcuggcugggccgcacgaucucuaaggacagcagauccggguaugagaugcucaaagucccgaacgccgaaacagacacccagucuggagcuauuagccaccagaucaucguuaauaaccaaaacugguccggcuacagcggggccuucauugauuacugggcuaauaaggaguguuuuaaccccugcuucuauguggaacugauccggggacgcccuaaagagucuuccgugcuguggaccagcaauucuauugucgcccucuguggcuccaaggagagacuggggagcugguccuggcacgacggcgccgaaaucauuuacuuuaaguga

SEQ ID NO: 218450 - RNA, 1380 nt, Artificial Sequence; identical to SEQ ID NO: 218070
  derived and/or modified CDS sequence (opt5) from neuraminidase__InfluenzaA__EPI641400

SEQ ID NO: 218451 - RNA, 1380 nt, Artificial Sequence; identical to SEQ ID NO: 218070
  derived and/or modified CDS sequence (opt5) from neuraminidase__InfluenzaA__EPI587620

SEQ ID NO: 218452 - RNA, 1410 nt, Artificial Sequence
  derived and/or modified CDS sequence (opt5) from neuraminidase__InfluenzaA__EPI569392
augaaccccaaucagaagaucgugaccauuggcagccugucccucgggcuggucguuuucaacgugcuucugcacgccgugucuaucauucucacaguccuggcucuuggaaaaagcgagaauaacggcaucugcaaugggacggugguuagagaauacaacgagaccgugcggauugaaaaggucacacaaugguauaauaccuccgugguugaguacgugccucauuggaacgaaggaacauauaucaauaacaccgagccgaucugugacgucaaaggcuuugcccccuucucuaaggauaaugggauucgcgugggaagcagaggccacaucuuugugauucgggagccuuucgucuccugcucucccguuggcugucgcacauuuuuccugacccaggggagccuccugaacgacaaacauuccaauggaacggugaaggauagaagcccuuuucggacccugaugucuguggaagucggccagucccccaacguguaccaggcgcgcuucgaggcuguugccuggagcgccacagcuugccacgacgggaagaaauggauggccaucggagugaccggcccugauucuaaggcugucgccgugguucauuaugggggagugccgacagacgucgucaauuccugggcgggcgauauucucagaacccaagaaagcucuuguacgugcauccagggcaacuguuacugggugaugacagacgggcccgccaaccggcaggcucaguaucgcauuuacaaagccaaucaaggaaagaucaucggcagaaaagauguguccuuuagcgggggacacauugaggagugcuccuguuacccuaacgacggcaagguugaaugcgugugucgggauaauuggaccgggacaaaccgccccguccugaucauuucuccugaccuuagcuauagagugggauaccugugcgcuggccuccccuccgauaccccgcggggcgaggacacccaguucguugggagcugcacaucuccuaugggaaaucagggcuauggggugaagggauuuggcuuccgccaggggacggacgucugggugggcagaaccaucucccggacaagcagaucuggauuugaaauuauccgcaucaaaaacggcuggacccaaacaagcaaggagcagauucggagacaggugguugucgauaauuccaacuggucuggguacagcggauccuucacccugcccguggaacuuagcggccgcgagugucuggugccuugcuucugggucgagaugauccgggggagacccgaggaacgcacgauuuggacaucuuccagcucuaucgugauguguggaguugacuaugaaauugccgauugguccuggcacgacggcgcgauccuccccuuugauaucgacaaauga

SEQ ID NO: 218453 - RNA, 1368 nt, Artificial Sequence
  derived and/or modified CDS sequence (opt5) from neuraminidase__InfluenzaA__EPI459857
augaaccccaaucagaagaucauuaccaucggcagcauuugcauggugaucgggacagucucccugauuguucaagugggaaacaucauccucauuugggugaaucacucuauccagacguguauuaccuacgagaacaauacaugggucaaccagaccuaugugagcaauacaaacuuccugaccggccaggccguugcuuccgugacacuugccggaaauucuagccugugcccuaucuccgggugggcgauuuacucuaaagacaacggcaucagaauugggagcaagggagaugucuuugugauccgggaaccguucaucuccuguagccaucucgagugccgcaccuuuuuccugacgcaaggcgcccuucugaaugacaaacacucuaacggcaccauuaaggauagaucccccuaucggacacucaugagcuguccuguuggggaagcucccucuccuuacaauucccgcuuugagagcguggccuggucugcuuccgccugccaugacggaaucaacuggcugaccauuggcaucagcgggcccgauaaugaagcugucgccgugcugaaauauaacggagugauuacagacaccaucaaguccuggagaaacaauauccuccggacgcaggagucugagugugcgugcgucaacggcagcuguuucacaguuaugaccgaugggccuuccaauggacaggccagcuacaagauuuuuaaaaucgaaaagggcaaaguggugcgcucugucgagcuggacgcuccgaacuaucacuacgaagagugcuccuguuaccccgaugccggcgagauuacaugcgugugcagagacaauuggcaugggagcaaccggccuuggguuucuuucaaucagaaccuugaauaucaaaccggauacaucuguagcggcguguuuggggauucuccccgcccuaaugacggaaccggcuccugcgggcccgucagcuccaacggagcuuucggcgugaagggcuuuagcuucaaauaugggaauggaguuuggauuggcagaacaaagacgaccaacucucgguccggguuugagaugaucugggauccgaauggauggacagaaaccgacagcucuuucuccaugaagcaggacaucauugccaucacagauuggagcggcuacuccgggucuuucgugcagcacccugagcugaccggccucaacuguaugcgccccugcuuuugggucgaacugauuagaggacagccucgggagaauacgaucuggacaagcggcuccucuauuagcuucuguggggugaacuccgagaccgucggauggagcuggcccgacggcgcggaacuucccuuuaccaucgauaaauga

SEQ ID NO: 218454 - RNA, 1416 nt, Artificial Sequence
  derived and/or modified CDS sequence (opt5) from neuraminidase__InfluenzaA__EPI242204
augaaccccaaucagaagcuguucgcccucagcggcguggcuaucgcccuguccguccuuaaccugcucauugggaucucuaauguuggacugaacgugagccuucaccugaaaggcgagggggugaagcaagaaaauaaccugaccugcacaacgauuacccagaauaacacaaccgucguggagaauacauacguuaacaauaccacaaucauuaacaaaggaaccaaucucaaggcgccuaacuaucugcuccugaauaaaucccuuuguucuguggaaggcugggucgugaucgcuaaggacaacgccaucagauuuggggagagcgaacagauuaucguuacgcgggagccguacguguccugcgaucccucuggauguaagauguaugcccugcaucagggcaccacaauucgcaacaaacacagcaauggcaccauccaugacagaacaaccuuccgggggcucauuuccacgccucugggaacacccccuaccgucagcaacucugauuuuaucugcgugggcugguccagcacaucuugucacgacggggugggacgcaugaccauuugcauccaaggcaauaacgauaaugcuaccgccacagucuacuauaacagacggcuuacgaccacaaucaagaccugggcuaaaaauauucugcgcacacaggaguccgaauguguuugccauaacgggaccugugccguggugaugacggacggacccgcgagcucucaggccuacacaaagaucauguauuuccacaaaggccucauuaucaaggaggaaccucugagaggcuccgcucggcacauugaggagugcagcuguuacgggcaugaucagaaggucuccugcgugugccgcgacaauuggcaaggagccaacagaccgaucaucgaaauugauaugucuacccuggagcacaccagccgguacguuuguacaggcgugcucaccgacacaucccgccccggggauaaaccuaauggagacugcagcaaccccaucacgggcucuccuggggcucccggagucaagggcuuuggcuuccugaauggggauaacaccuggcuuggaagaacaauuuccccgcggagccgcucuggcuuugaaaugcugaaaaucccuaaugccgagaccgaccccaacagcagaauuaucgaacggcaggagaucguggacaacuccaauuggucuggguauagcggauccuucauugauuacugggacgaggcgaacgaauguuauaauccuugcuuuuacguugagcucaucagaggccgccccgaagaggccaaguaugugugguggacaagcaacucucugauugcucuuugugggucccccgucagcgugggcucuggauccuucccugauggcgcccagauccaguacuuuagcuga

SEQ ID NO: 218455 - RNA, 1416 nt, Artificial Sequence
  derived and/or modified CDS sequence (opt5) from neuraminidase__InfluenzaA__EPI408029
augaaccccaaucagaagcuguucgcccucagcggcguggcuaucgcccuguccguccuuaaccugcucauugggaucucuaauguuggacugaacaugagccuucaccugaaaggcgagggggugaagcaagaaaauaaccugaccugcacaacgauuacccagaauaacacaaccguggucgagaauacauacgugaacaauaccacaaucauuaacaaaggaaccaaucucaaggcgccuaacuaucugcuccugaauaaaucccuuuguucuguugaaggcuggguggucaucgcuaaggacaacgccaucagauuuggggagagcgaacagauuaucgugacgcgggagccguacguuuccugcgaucccucuggauguaagauguaugcccugcaucagggcaccacaauucgcaacaaacacagcaauggcaccauccaugacagaacaaccuuccgggggcuccuguccacgccucuuggaacacccccuaccgugagcaacucugauuuuauuugcgucggcugguccagcacaucuugucacgacggggugggacgcaugaccaucugcauucaaggcaauaacgauaaugcuaccgccacaguguacuauaacagacggcugacgaccacaaucaagaccugggcuaaaaauauccuccgcacacaggaguccgaaugugucugccauaacgggaccugugccguugugaugacggacggacccgcgagcucucaggccuacacaaagauuauguauuuccacaaaggccugaucauuaaggaggaaccucugagaggcuccgcucggcacaucgaggagugcagcuguuacgggcaugaucagaagguguccugcgucugccgcgacaauuggcaaggagccaacagaccgauuaucgaaaucgauaugucuacccucgagcacaccagccgguacguguguacaggcguucugaccgacacaucccgccccggggauaaaccuaauggagacugcagcaaccccauuacgggcucuccuggggcucccggagugaagggcuuuggcuuccuuaauggggauaacaccuggcugggaagaacaaucuccccgcggagccgcucuggcuuugaaaugcucaaaauuccuaaugccgagaccgaccccaacagcagaaucauugaacggcaggagaucgucgacaacuccaauagaucuggguauagcggauccuucaucgauuacugggacgaggcgaacgaauguuauaauccuugcuuuuacguggagcugauucgcggccggcccgaagaggccaaguauguuugguggacaagcaacucucuuaucgcucugugugggucccccgugagcgucggcucuggauccuucccugauggcgcccagauucaguacuuuagcuga

SEQ ID NO: 218456 - RNA, 1398 nt, Artificial Sequence; identical to SEQ ID NO: 215526
  derived and/or modified CDS sequence (opt5) from neuraminidase__InfluenzaA__EPI439509

SEQ ID NO: 218457 - RNA, 1350 nt, Artificial Sequence; identical to SEQ ID NO: 218059
  derived and/or modified CDS sequence (opt5) from neuraminidase__InfluenzaA__EPI164223

SEQ ID NO: 218458 - RNA, 1398 nt, Artificial Sequence; identical to SEQ ID NO: 215526
  derived and/or modified CDS sequence (opt5) from neuraminidase__InfluenzaA__EPI486493

SEQ ID NO: 218459 - RNA, 1398 nt, Artificial Sequence
  derived and/or modified CDS sequence (opt5) from neuraminidase__InfluenzaA__EPI740737
augaaccccaaucagaagauccugugcaccagcgccacagcuauuacgaucuccgccauugcggugcucaucggcauugcuaaccuggggcuuaauaucggacugcaccucaaaccuggcuguaacugcucucauagccaaccggagaccacaaauaccucccagacaaucauuaacaauuacuauaacgaaaccaauaucacaaacauucagaucgaggaaagaaccucucggaauuucaacaaucugacgaaggggcuuuguaccauuaacagcuggcacaucuacggaaaagacaaugccguccgcauuggcgaguccucugauguucuggugacaagagaacccuaugugagcugcgacccugaugagugucgguuuuacgcccucucccaggggaccacaauccgcggaaagcauagcaacggcaccauccacgacagaucucaauaucgggcucugauuuccuggccccugagcucuccucccacgguccauaacucccgcguggagugcaucggcuggagcucuacauccugucacgaugggaaaagcagaauguccauuugcaucucuggaccuaauaacaaugccagcgcuguugugugguacaaccggcgcccggucgccgaaauuaauaccugggcgagaaacauccuccggacacaggaguccgaaugugugugccacaauggcguuugucccguggucuucaccgacgggccugccaccggacccgcugauacacgcaucuauuacuuuaaggagggcaagauucugaaaugggagagccuuacggggaccgccaagcauaucgaagagugcucuugcuacggagaaagaacaggcauuaccuguacaugccgggacaacuggcagggcuccaaucgcccuguggugcagaucgaucccgucgcuaugacccacacgagccaauauauuuguucuccgguucugacagacagcccuagacccaacgauccuaauaucgggaaaugcaacgaccccuaccccggaaauaacaauaacggcgugaagggguucuccuaucucgauggagccaacaccuggcugggccggaccaucucuacagcgagcagauccggguacgagaugcuuaaagugccuaaugcccugaccgacgaccgcagcaagccgauucagggacagacaaucguccucaacgcugauuggucuggcuauuccggcagcuuuauggacuacugggccgaaggggauuguuaucgggcuugcuucuacguggagcugauuagaggacgccccaaggaggacaaaguuugguggacgucuaauuccaucgugagcauguguuccucuaccgaauuucugggccaguggaacuggccugauggggccaagauugaguacuuccucuga

SEQ ID NO: 218460 - RNA, 1398 nt, Artificial Sequence
  derived and/or modified CDS sequence (opt5) from neuraminidase__InfluenzaA__EPI730494
augaaccccaaucagaagauccugugcaccagcgccacagcuauuacgaucggcgccauugcggugcucaucgggauugcuaaccugggacuuaauaucggccugcaccucaaaccuggguguaacugcucccauucucaaccggagaucaccaauacaagccagaccauuaucaacaauuacuauuccgaaacaaacauuaccaauauccagauggaggaaagaacaucuaagaacuucaauaaccugaccaaaggacuuuguacgauuaauagcuggcacaucuacggcaaggacaacgccguccggauuggggaguccucugauguucuggugacccgcgaacccuaugugagcugcgacccugaugaguguagauuuuacgcccucucccagggaacaaccauccggggcaaacauagcaauggcacaauccacgaccgcucucaauauagagcucugauuuccuggccccugagcucuccucccaccgucuacaacucccggguggagugcaucggguggagcucuacguccugucaugauggaaagagccgcauguccauuugcaucucuggcccuaacaauaacgccagcgcuguugugugguauaauagacggccggucgccgaaauuaacacaugggcgcgcaauauccucagaacccaggaguccgaaugugugugccacaacgggguuugucccguggucuucacagacggaagcgccaccggcccugcugauacccggaucuacuacuuuaaggaggggaaaauucugaagugggagucucuuacaggaacggccaaacacaucgaagagugcuccugcuauggcgaacgcaccggcauuacauguaccugcagagacaauuggcaggggagcaaccggcccgugauccagauugauccuguggcuaugacacauaccucucaauacaucuguagccccguccugacggacaauccgcgcccuaacgaucccaauaucggaaagugcaacgacccuuaucccggcaauaacaauaacgggauuaaaggauucuccuaccucgauggcgccaacacauggcuggggagaaccaucucuaccgcgagccgguccggauaugagaugcuuaagguucccaaugcccugacagacgacagaagcaagccuauucagggccagaccaucgugcucaacgcugauuggucuggcuacuccgggagcuuuauggacuauugggccgaaggagauuguuaccgcgcuugcuucuacguggagcugauucggggcagaccgaaagaggacaaggucugguggacaucuaauuccaucgugagcauguguuccucuacggaauuucuggggcaguggaacuggcccgauggagccaaaauugaguauuuccucuga

SEQ ID NO: 218461 - RNA, 1398 nt, Artificial Sequence
  derived and/or modified CDS sequence (opt5) from neuraminidase__InfluenzaA__EPI712925
augaaccccaaucagaagauccugugcaccagcgccacagcuauuacgaucggcgccauugcggugcucaucgggauugcuaaccugggacuuaauaucggccugcaccucaaaccuggguguaacugcucccauucucaaccggagaccacaaauaccagccagacaaucauuaacaauuacuauaacgaaaccaauaucacaaacauucagaucgaggaaagaaccucccggaauuucaacaaucugacgaagggacuuuguaccauuaacucuuggcacaucuacggcaaagacaaugccguccgcauuggggagagcuccgauguucuggugacaagagaacccuaugugucuugcgacccugaugagugucgguuuuacgcccucagccagggaaccacaauccgcggcaagcauuccaacggcaccauccacgacagaagccaauaucgggcucugauuucuuggccccuguccagcccucccacgguccauaacucucgcguggagugcaucgggugguccagcacaucuugucacgauggaaaauccagaaugagcauuugcaucuccggcccuaauaacaaugccucugcuguugugugguacaaccggcgcccggucgccgaaauuaauaccugggcgagaaacauccuccggacacaggagagcgaaugugugugccacaaugggguuugucccguggucuucaccgacggaccugccaccggccccgcugauacacgcaucuauuacuuuaaggaggggaagauucugaaaugggagucccuuacgggaaccgccaagcauaucgaagagugcagcugcuacggcgaaagaacaggcauuaccuguacaugccgggacaacuggcaggggucuaaucgcccuguggugcagaucgaucccgucgcuaugacccacacgucccaauauauuuguagcccgguucugacagacucuccuagacccaacgauccuaauaucggaaaaugcaacgaccccuaccccggcaauaacaauaacggggugaagggauucagcuaucucgauggcgccaacaccuggcuggggcggaccaucuccacagcgucuagaagcggauacgagaugcuuaaagugccuaaugcccugaccgacgaccgcuccaagccgauucagggccagacaaucguccucaacgcugauuggagcggcuauucuggguccuuuauggacuacugggccgaaggagauuguuaucgggcuugcuucuacguggagcugauuagaggccgccccaaggaggacaaaguuugguggacgagcaauucuaucguguccauguguagcuccaccgaauuucuggggcaguggaacuggccugauggagccaagauugaguacuuccucuga

SEQ ID NO: 218462 - RNA, 1398 nt, Artificial Sequence
  derived and/or modified CDS sequence (opt5) from neuraminidase__InfluenzaA__EPI448938
augaaccccaaucagaagauccugugcaccagcgccacagcuauuaucauuggcgccaucgcggugcucauugggauggcuaaccugggacuuaauaucggccugcaccucaaaccuggguguaacugcucccauucucaaccggagacgaccaauacaagccagaccaucauuaacaauuacuauaacgaaacaaauaucaccaacauucagauggaggaaagaacaucccggaauuucaacaaucugaccaagggacuuuguacgaucaacucuuggcacauuuacggcaaagacaaugccguccgcaucggggagagcuccgauguucuggugaccagagaacccuaugugucuugcgacccugaugagugucgguuuuacgcccucagccagggaacaaccauucgcggcaagcauuccaacggcacaauccacgacagaagccaauaucgggcucugaucucuuggccccuguccagcccucccaccgucuacaacucucgcguggagugcauugggugguccagcacgucuugucaugauggaaaauccagaaugagcaucugcauuuccggcccuaauaacaaugccucugcuguugugugguauaaccggcgcccggucgccgaaaucaauacaugggcgagaaacauucuccggacccaggagagcgaaugugugugccacaaugggguuugucccguggucuucacagacggauccgccaccggcccugcugauacccgcaucuacuacuuuaaggaggggaagauccugaaaugggagagccuuacaggaacggccaagcacauugaagagugcucuugcuauggcgaaagaaccggcaucacauguaccugccgggacaacuggcagggguccaaucgccccgugauucagaucgauccuguggcuaugacacauaccagccaauacauuuguucucccguccugacggacaacccgagaccuaaugaucccaacaucggaaaaugcaaugacccuuaucccggcaacaauaacaacgggguuaagggauucagcuaccucgauggcgccaauacauggcuggggcggaccaucuccaccgcgucuagaagcggauaugagaugcuuaaagugcccaacgcccugacagacgaccgcuccaagccuauucagggccagaccaucgugcucaaugcugauuggagcggcuacucuggguccuuuauggacuauugggccgaaggagauuguuaccgggcuugcuucuacgucgagcugauuagaggccgcccgaaggaggacaaagugugguggacaagcaacucuaucguuuccauguguagcuccacggaauuucuggggcaguggaauuggcccgauggagccaagauugaguauuuccucuga

SEQ ID NO: 218463 - RNA, 1410 nt, Artificial Sequence
  derived and/or modified CDS sequence (opt5) from neuraminidase__InfluenzaA__EPI445995
augaaccccaaucagaagaucauugcccugggcagcgcuucccucaccaucgccauuaucugccugcuuauucaaaucgcgauccuggcuacaacgaugacccuccacuucaugcagaacgagcauacaaauucuaccagaaacaaaguggucccuugugaaagcauuaucauugagcggaauaucacagaaauuguucaccugaacgggaccaucauugagaaggaauccugcccgaaagccguggaguacaagaauuggucuaaaccccagugucagaucacaggauuugccccuuucagcaaggacaacuccauccgccuuucugcuggcggggauauuugggugaccagagagcccuaugucagcugcucccugagcaaguguuaccaauuugcccucggacagggcacgacccugaauaaccggcauucuaaugggacaacccacgaccgcuccccuuauagaacacugcucaugagcgaacugggagugcccuuccaucuuggcaccaaacagguuugcaucgcuuggucuuccagcucuugucacgauggccgggccuggcugcacgugugcgucacgggggacgauaagaacgcgacagccuccgugauuuacggaggcaugcucaccgacagcaucggguccuggucuaaaaauauucugcgcacacaggagagcgaauguguuugcaucaacggaaccuguaccguggucaugacagauggcuccgcuagcgggagagccgacacgcggauccuuuuuauucgcgagggaaagaucgugcauauuucuccucuguccggcagcgcucaacacguggaggaaugcucuugcuauccgagauaccccgagguccgguguguuugccgcgauaauuggaaaggcagcaacagaccugugcucuauaucaacguggccgacuacuccauugauucuagcuacgucuguuccgggcuggugggagacacaccccggaaugaagauucuagcuccagcucuaacugccgcgacccuaauaacgagagaggcgggcccggaguuaagggcugggcguucgacaauggggaugacguguggaugggacggaccaucaagaaagauuccagagccggcuaugaaaccuuucgcgucguggacggcuggacacuggcuaacagcaagucccagaccaaucggcagguuaucguggauucugacaacuggagcggguacuccggaauguucucugucgagggcaaaacguguauuaauagaugcuuuuauguggagcucauccgcgggcggccgcaggaaacaagagucugguggaccagcaacuccauuaucguguucuguggaaccagcggcacauacgggaccggcucuuggccugauggagccgacauuaauuuuauguccaucuga

SEQ ID NO: 218464 - RNA, 1410 nt, Artificial Sequence
  derived and/or modified CDS sequence (opt5) from neuraminidase__InfluenzaA__EPI470861
augaaccccaaucagaagaucauugccaucggcagcgugucccugaccauugcuacaaucugccuccugaugcaaauugccauccuugcgacgaccaugacacugcacuucaaacagaacgaguguaucaauucuagcaacaaucaggucguuccuugcgaaccgauuaucauugagagaaacaucaccgaaauugugcaucucaauuccacaacccuggagaaggaaaucugucccaaaguggcugacuaccggaacuggucuaagccucagugccaaauuacaggguuugcccccuucagcaaagauaauuccauccgccuuucugccggaggcgacaucugggucaccagagagccuuaugugagcugugggcugggaaagugcuaccaguuugcucucggccaggggacgacccuggagaacaagcacuccaauggaacagcccaugaucggacaccccaccgcacccugcucaugaacgaacugggcguuccuuuccaucuugcuaccaaacagguguguauugccuggucuagcuccagcugccacgacggcaaggcguggcugcacgucugugugacgggggaugacagaaaugccacagcuucuaucauuuaugauggaauccucguugacuccauuggcagcuggucuaaaaacauccugcggacccaagaguccgaaugcguguguaucaaugggacaugcgccgucgugaugaccgauggaagcgcuuccggccgcgccgacacccggauucuuuuuauccgggaggggaagauugcgcauaucucuccgcugagcggauccgcccagcacguggaggaaugcagcuguuacccccgcuauccugaggucagaugcguuugucgggauaacuggaaaggcucuaaccgccccgugcucuacauuaauauggcuaacuauuccaucgacagcucuuacgugugcagcggccuggucggggauacaccuagaaaugacgaccgguccucuagcuccaacugucgcgaucccaauaacgaaagaggagccccgggcgugaaggggugggcuuucgacaauggaaacgauaucuggaugggccggacgauuaagaaagacagcagaucuggguacgagaccuuucgcguuaucggaggcuggacaaccgccaauuccaagagccagauuaacagacaggugaucgucgauucugacaauuccagcggcuauuccgggauuuucucuguggaaggaaaaagcugcaucaacagauguuuuuacguugagcugauucgcggccggccuaaggagacaagagugugguggaccuccaauucuaucaucgucuucugcgggacgagcggaacauauggcaccggguccuggcccgauggcgccaacauuaauuuuaugccuaucuga

SEQ ID NO: 218465 - RNA, 1401 nt, Artificial Sequence
  derived and/or modified CDS sequence (opt5) from neuraminidase__InfluenzaA__EPI498036
augaaccccaaucagaagaucauugccaucggcagcgugucccugauuaucgcuauuaucugccuccugaugcaaaucgccauucuuaccacaacgaugacccugcacuucagacagaacgaguguucuaauccuagcaacaaucaggucaugccgugcgaacccaucauucucgagcggaacacaguucaucuuaauuccaccaucauugaacgcgagaucuguccuaaaguggcggacuacaagaacuggucuaaaccccagugccaaauuacaggguuugcuccuuucagcaaggauaauuccaucagacugucugccggaggcgacaucugggugacccgggaacccuaugucagcuguucccuggauaaaugcuaccaguuugcccucgggcagggaacaacccugaagaacaagcacagcaauggcacgacccaugaccgcacaccucacagaacccugcucaugaacgagcugggggugccguuccaucuuggaacaaaacagguuuguauugcuuggucuuccagcucuugcuaugauggcaaggccuggcugcacaucugugugaccggcgacgauaaaaaugcuacggccuccauuaucuacgacgggaugcucgucgauagcauuggaucuugguccaagaacauccugcggacacaagagagcgaaugcguguguaucaaugggaccugcgcgguugugaugacagacggguccgccucuggaaaagcugauacccgcguccuuuuuauuagagagggcaagaucauuaacaucagcccccuguccgggagcgcccagcacguggaagagugcucuuguuauccucgguaccccgaggugcgcugcgucuguagagacaacuggaagggauccaaucggccuauucucuauaucaacauggcugauuacagcaucgaaucuagcuacguuugcuccggccuggugggcgacacaccccgcaaugacgauucuagcuccagcucuaacuguagagacccgaauaacgagcggggcgccccuggagugaaaggcugggcguucgaugacgggaaugaugucuggaugggacgcaccauuaagaacggcuccagaagcggguaugaaacguuucgggugguuaauggauggaccauggccaacucuaaaucccagaucaauagacaggugauugucgacagcgaugacugguccggcuacucuggcaucuucagcguggaggggaagaaaugcauuaaccgcuguuuuuauguugaacugauccggggaagaccccaagagccucgcgugugguggacauccaauucuauuaucgucuucugcggcaccagcgggacauacggaaccggcuccuggcccgauggggcuaacaucaauuuuaugcccguguga

SEQ ID NO: 218466 - RNA, 1410 nt, Artificial Sequence
  derived and/or modified CDS sequence (opt5) from neuraminidase__InfluenzaA__EPI470902
augaaccccaaucagaagaucguggccauuggcagcgcuucccugaccaucgccacaaugugccuccugaugcaaauugcgcuuuucgcuacgaccaugacacugcacuuuaaacagaccggguguacaaacucuagcgacaaucaggccgucccuugcggaccgaucauuaucgagagaaacaucaccgaaauuguucaucucaauuccacaacccuggagaaggaaacgugucccaaaucugccggcuaccggaacuggagcaagccucagugccaaaucaccggguucgcucccuuuuccaaagauaauucuauucgccuugccgcugccggagacaucugggugacaagagagccuuaugugagcuguggccuggggaagugcuaccaguucgcgcucggacagggcaccacacuggauaacaagcacuccaauggcaccacgcaugaccggacaccccaccgcacccugcucaugaacgaacugggggucccuuuucaucuugccacaaaacagguguguauugcuuggucuagcuccagcugccacgauggaaaggccuggcugcacguuugugugaccggcgacgauaaaaaugcuaccgccucuaucauuuaugacgggauccucgucgauuccaucgcgagcuggucuaagaacauucugagaacacaagaguccgagugcguguguaucaauggaacgugcaccguugugaugacagacggcagcgccuccgggcgggcugauacccgcauucuuuucaucagagaaggaaaaauuguccauaucucuccgcugagcggcuccgcccagcacguggaggaaugcagcuguuacccccgguauccugaggugcgcugcgucuguagagacaacuggaagggcucuaaucggcccguucucuuuaucaacauggcugauuacuccauugacagcucuuaugugugcagcgggcuggugggagacacaccucgcaacgaugacagauccucuagcuccaauugucgggaucccaacaaugagcgcggcgccccgggggucaagggaugggccuucgacagcggcaacgauaucuggauggggagaaccauugaaaaagacucucgguccggauacgagacguuuagagugaucggcggcuggagcacagcuaauucuaagucccagauuaaccgccagguuaucguggaucgggacaauagcuccggguacucuggaaucuucagcgucgaaggcaaauccugcauuaacagauguuuuuauguggagcugauccgcgggcggccuaaggaaaauagaguuugguggaccucuaacagcauuaucguguucugcggaaccuccggcacauacgggaccggcagcuggcccgauggagcgaauauuaaccucaugccuaucuga

SEQ ID NO: 218467 - RNA, 1401 nt, Artificial Sequence
  derived and/or modified CDS sequence (opt5) from neuraminidase__InfluenzaA__EPI838241
augaaccccaaucagaagaucaccgccauuggcagcgugucccugaucauugcuaucauuugccuccugaugcaaaucgccauccuuacaacgaccaugacacugcacuucagacagaacgaguguucuaauagcuccaacaaucaggucaugccuugcgaaccgauuaucauugagcggaacaccguucaucucaauucuacaaccaucgaacgcgagauuugucccaaaguggcggaauacaagaacuggagcaaaccucagugccaaaucacaggguuugcucccuucuccaaggacaauucuauuagacugagcgccuccggagauaucugggugacccgggagccuuaugucagcuguucucuugacaaaugcuaccaguuugcccugggccaggggacgacccucaagaacaagcacuccaauggaacagcucaugaucgcacaccccacagaacccugcugaugaacgagcucggcgugccuuuccaucuggggaccaaacagguuuguaucgccuggagcagcuccagcugcuaugacggaaaggcuuggcuucacgugugugucacgggcgaugacaaaaaugccacagcgucuauuaucuacgauggcaugcugguggacuccauugggagcugguccaagaacauccuccggacccaagaaucugagugcguuuguauuaauggaacaugcgccguggucaugaccgauggcagcgcuuccgggaaagccgacacccgcgugcuguuuaucagagaaggaaagaucauuaacaucagcccgcuuucuggcuccgcucagcacguggaggagugcagcuguuauccccgguacccugaaguccgcugcguuuguagagauaacuggaaggggucuaaucggcccauucuguauaucaacauggccgacuacagcauugaguccucuuacgugugcagcggacucgugggcgauacaccucgcaaugacgacuccucuucuuccagcaacuguagagaucccaauaacgaacggggcgcgccgggggucaaaggaugggccuucgacgauggcaaugacguguggauggggcgcacgaucaagaacggaucuagauccggcuaugagaccuuucggguugugaauggguggacaauggcuaacagcaaaucccagaucaauagacaggucauuguggaaucugaugacuggagcggauacuccggcaucuucucuguugagggcaagaaaugcauuaaccgcuguuuuuauguggagcugauccgggggagaccucaagaaccccgcgucugguggaccagcaauuccauuaucguguucugcggaacaagcggcaccuacgggacgggaucuuggccugauggcgccaacauuaauuuuaugcccaucuga

SEQ ID NO: 218468 - RNA, 1401 nt, Artificial Sequence; identical to SEQ ID NO: 218467
  derived and/or modified CDS sequence (opt5) from neuraminidase__InfluenzaA__EPI680525

SEQ ID NO: 218469 - RNA, 1401 nt, Artificial Sequence; identical to SEQ ID NO: 218075
  derived and/or modified CDS sequence (opt5) from neuraminidase__InfluenzaA__EPI690481

SEQ ID NO: 218470 - RNA, 1755 nt, Artificial Sequence
  derived and/or modified CDS sequence (opt5) from hemagglutinin__InfluenzaB__ABL76276
augaaggccaucauugugcugcucauggucguuaccagcaacgcugacagaaucugcacaggcauuacguccucuaauagcccccacguggugaaaaccgccacacagggggaagucaacgugaccggaguuaucccucugacaaccacaccgaccaagucccauuucgcgaaucuuaaaggcacgaagacccgggggaaacugugucccacaugccucaacuguaccgaucuggacguggcucuuggacgcccuaugugcgucggcauuacacccucugccaaggccagcauccugcacgaagugagaccuguuaccuccggguguuuucccaucaugcaugaucggacgaagauucgccaacucccuaaucugcugagaggauacgagaaaauccggcucucuacacagaacgugauuaaugcugaaaaggccccgggcggccccuaucgccuggggaccagcggauccugcccuaacgcuacaagcagaucuggcuucuuugccaccauggcgugggccgucccccgggacaauaacaaaaccgcuacaaauccucuuacgguggaggugccccacaucuguaccaaggaagaggaucagauuacagucuggggguuccauuccgacaacaaaacccagaugaagaaucuguacggagauagcaacccgcaaaaguuuacaucuuccgccaauggcguuaccacgcacuaugugagccagaucgggggauucccugaccagacagaggauggcggccucccccagucugggcgcauuguggucgacuacauggugcaaaaaccuggaaagaccggcaccaucguuuaucagagagggauccugcuuccccagaaaguguggugcgcuuccggacggagcaaggucauuaaaggcucccugccccucaucggggaagccgauugucugcacgagaaguacggaggccugaacaaaucuaagccuuauuacacaggcgaacaugcgaaggccauugggaacugcccgaucugggugaaaacaccccucaagcuggcuaauggaacaaaauaccgcccucccgccaaacuucugaaggagagaggcuuuuucggggcuauugccggauuucucgagggcgggugggaaggcaugaucgccggauggcacggcuauacgagccauggggcucacggaguugcgguggccgcugaccugaaguccacccaggaggccaucaacaagauuaccaaaaaucuuaacagccugucugaacucgaggucaagaaucugcaacggcuguccggcgccauggaugaacuccacaacgagauccuggagcuugacgaaaaaguggacgaucugcgcgcugacaccauuagcucucagaucgagcucgccguccugcuuagcaaugaagggauuaucaacuccgaggaugaacaucugcucgcgcuggagagaaagcugaaaaagaugcucggaccuucugcuguggacaucggcaauggguguuucgagacaaagcacaaaugcaaccagaccugccuggaucggauugccgccggcacguuuaaugcuggagaguucagccuucccaccuuugacucccugaacaucacagccgcuagccucaaugaugacggccuggauaaccauaccauucugcuuuacuauucuacagccgcguccagccucgccguuacccugaugaucgcuauuuucaucguguacaugauuucuagagacaaugucuccuguagcaucugccuguga

SEQ ID NO: 218471 - RNA, 1755 nt, Artificial Sequence
  derived and/or modified CDS sequence (opt5) from hemagglutinin__InfluenzaB__ABL76287
augaaggccaucauugugcugcucauggucguuaccagcaacgcugacagaaucugcacaggcauuacguccucuaauagcccccacguggugaaaaccgccacacagggggaagucaacgugaccggaguuaucccucugacaaccacaccgaccaagucccauuucgcgaaucuuaaaggcacgaagacccgggggaaacugugucccacaugccucaacuguaccgaucuggacguggcucuuggacgcccuaugugcgucggcgugacacccucugccaaggccagcauucugcacgaaguuagaccugugaccuccggguguuuucccaucaugcaugaucggacgaagauccgccaacucccuaaucugcugagaggauacgagaaaauucggcucucuacacagaacgucaucaaugcugaaaaggccccgggcggccccuaucgccuggggaccagcggauccugcccuaacgcuacaagcagaucuggcuucuuugccaccauggcgugggccgugccccgggacaauaacaaaaccgcuacaaauccucuuacgauugaggugccccacaucuguaccaaggaagaggaucagauuacagucuggggguuccauuccgacaacaaaauccagaugaagaaucuguacggagauagcaacccgcaaaaguuuaccucuuccgccaauggcguuacaacccacuaugugagccagauugggggauucccugaccagacggaggauggcggccucccccagucugggcgcaucguggucgacuacauggugcaaaaaccuggaaagacaggcaccaucguuuaucagagagggauucugcuuccccagaaaguguggugcgcuuccggacggagcaaggucaucaaaggcucccugccccucauuggggaagccgauugucugcacgagaaguacggaggccugaacaaaucuaagccuuauuacaccggcgaacaugcgaaggccaucgggaacugcccgauuugggugaaaacaccccucaagcuggcuaauggaaccaaauaccgcccucccgccaaacuucugaaggagagaggcuuuuucggggcuaucgccggauuucucgagggcgggugggaaggcaugaucgccggauggcacggcuauacaagccauggggcucacggaguugcgguggccgcugaccugaaguccacgcaggaggccauuaacaagaucaccaaaaaucuuaacagccugucugaacucgaggucaagaaucugcaacggcuguccggcgccauggaugaacuccacaacgagauucuggagcuugacgaaaaaguggacgaucugcgcgcugacacaaucagcucucagauugagcucgccguccugcuuagcaaugaagggaucaucaacuccgaggaugaacaucugcucgcgcuggagagaaagcugaaaaagaugcucggaccuucugcuguggacauuggcaauggguguuucgagaccaagcacaaaugcaaccagacaugccuggaucggaucgccgccggcaccuuuaaugcuggagaguucagccuucccacguuugacucccugaacauuaccgccgcuagccucaaugaugacggccuggauaaccauacaauccugcuuuacuauucuaccgccgcguccagccucgccguuacacugaugauugcuaucuucauuguguacaugaucucuagagacaaugucuccuguagcaucugccuguga

SEQ ID NO: 218472 - RNA, 1755 nt, Artificial Sequence
  derived and/or modified CDS sequence (opt5) from hemagglutinin__InfluenzaB__ABL76298
augaaggccaucauugugcugcucauggucguuaccagcaacgcugacagaaucugcacaggcauuacguccucuaauagcccccacguggugaaaaccgccacacagggggaagucaacgugaccggaguuaucccucugacaaccacaccgaccaagucccauuucgcgaaucuuaaaggcacgaagacccgggggaaacugugucccacaugccucaacuguaccgaucuggacguggcucuuggacgcccuaugugcgucggcgugacacccucugccaaggccagcauucugcacgaaguuagaccugugaccuccggguguuuucccaucaugcaugaucggacgaagauccgccaacucccuaaucugcugagaggauacgagaaaauucggcucucuacacagaacgucaucaaugcugaaaaggccccgggcggccccuaucgccuggggaccagcggauccugcccuaacgcuacaagcagaucuggcuucuuugccaccauggcgugggccgugccccgggacaauaacaaaaccgcuacaaauccucuuacgguggaggucccccacauuuguaccaaggaagaggaucagaucacaguuuggggguuccauuccgacaacaaaacccagaugaagaaucuguacggagauagcaacccgcaaaaguuuacaucuuccgccaauggcgugaccacgcacuaugugagccagauugggggauucccugaccagacagaggauggcggccucccccagucugggcgcaucgucguggacuacaugguucaaaaaccuggaaagaccggcaccauuguguaucagagagggauccugcuuccccagaaagucuggugcgcuuccggacggagcaaggugaucaaaggcucccugccccucauuggggaagccgauugucugcacgagaaguacggaggccugaacaaaucuaagccuuauuacacaggcgaacaugcgaaggccaucgggaacugcccgauuuggguuaaaacaccccucaagcuggcuaauggaacaaaauaccgcccucccgccaaacuucugaaggagagaggcuuuuucggggcuaucgccggauuucucgagggcgggugggaaggcaugauugccggauggcacggcuauacgagccauggggcucacggaguggcggucgccgcugaccugaaguccacccaggaggccaucaacaagaucaccaaaaaucuuaacagccugucugaacucgaggugaagaaucugcaacggcuguccggcgccauggaugaacuccacaacgagauucuggagcuugacgaaaaagucgacgaucugcgcgcugacaccaucagcucucagauugagcucgccgugcugcuuagcaaugaagggaucauuaacuccgaggaugaacaucugcucgcgcuggagagaaagcugaaaaagaugcucggaccuucugcuguugacaucggcaauggguguuucgagacaaagcacaaaugcaaccagaccugccuggaucggaucgccgccggcacguuuaaugcuggagaguucagccuucccaccuuugacucccugaacauuacagccgcuagccucaaugaugacggccuggauaaccauaccauccugcuuuacuauucuacagccgcguccagccucgccgugacccugaugauugcuaucuucauugucuacauggugucuagagacaauguuuccuguagcaucugccuguga

SEQ ID NO: 218473 - RNA, 1755 nt, Artificial Sequence
  derived and/or modified CDS sequence (opt5) from hemagglutinin__InfluenzaB__ABL76309
augaaggccaucauugugcugcucauggucguuaccagcaacgcugacagaaucugcacaggcauuacguccucuaauagcccccacguggugaaaaccgccacacagggggaggucaacgugaccggaguuaucccucugacaaccacaccgaccaagucccauuucgcgaaucuuaaaggcacgaagacccgggggaaacugugucccacaugccucaacuguaccgaucuggacguggcucuuggacgcccuaugugcgucggcgugacacccucugccaaggccagcauucugcacgaaguuagaccugugaccuccggguguuuucccaucaugcaugaucggacgaagauccgccaacucccuaaucugcugagaggauacgagaaaauucggcucucuacacagaacgucaucaaugcugaaaaggccccgggcggccccuaucgccuggggaccagcggauccugcccuaacgcuacaagcagaucuggcuucuuugccaccauggcgugggccgugccccgggacaauaacaaaaccgcuacaaauccucuuacgguggaggucccccacauuuguaccaaggaagaggaucagaucacaguuuggggguuccauuccgacaacaaaacccagaugaagaaucuguacggagauagcaacccgcaaaaguuuacaucuuccgccaauggcgugaccacgcacuaugugagccagauugggggauucccugaccagacagaggauggcggccucccccagucugggcgcaucgucguggacuacaugguucaaagaccuggaaaaaccggcaccauuguguaucagcgggggauccugcuuccccagaaggucuggugcgcuuccggacgcagcaaagugaucaagggcucccugccccucauuggggaagccgauugucugcacgagaaauacggaggccugaacaagucuaaaccuuauuacacaggcgaacaugcgaaggccaucgggaacugcccgauuuggguuaagacaccccucaaacuggcuaauggaaccaaguacagaccucccgccaaacuucugaaggagcggggcuuuuucggggcuaucgccggauuucucgagggcgggugggaaggcaugauugccggauggcacggcuauacgagccauggggcucacggaguggcggucgccgcugaccugaaauccacccaggaggccaucaacaagaucacaaagaaucuuaacagccugucugaacucgaggugaaaaaucugcaacgccuguccggcgccauggaugaacuccacaacgagauucuggagcuugacgaaaaggucgacgaucugagagcugacaccaucagcucucagauugagcucgccgugcugcuuagcaaugaagggaucauuaacuccgaggaugaacaucugcucgcgcuggagcggaaacugaagaaaaugcucggaccuucugcuguugacaucggcaauggguguuucgagacaaagcacaagugcaaccagaccugccuggauagaaucgccgccggcacguuuaaugcugaagaguucagccuucccaccuuugacucccugaacauuacagccgcuagccucaaugaugacggacuggauaaccauaccauccugcuuuacuauucuacagccgcguccagccucgccgugacccugaugauugcuaucuucauugucuacaugaucucucgcgacaauguguccuguagcauuugccuguga

SEQ ID NO: 218474 - RNA, 1755 nt, Artificial Sequence
  derived and/or modified CDS sequence (opt5) from hemagglutinin__InfluenzaB__ABL76331
augaaggccaucauugugcugcucauggucguuaccagcaacgcugacagaaucugcacaggcauuacguccucuaauagcccccacguggugaaaaccgccacacagggggaagucaacgugaccggaguuaucccucugacaaccacaccgaccaagucccauuucgcgaaucuuaaaggcacgaagacccgggggaaacugugucccacaugccucaacuguaccgaucuggacguggcucuuggacgcccuaugugcgucggcauuacacccucugccaaggccagcauccugcacgaagugagaccuguuaccuccggguguuuucccaucaugcaugaucggacgaagauucgccaacucccuaaucugcugagaggauacgagaaaauccggcucucuacacagaacgugauuaaugcugaaaaggccccgggcggccccuaucgccuggggaccagcggauccugcccuaacgcuacaagcagaucuggcuucuuugccaccauggcgugggccgucccccgggacaauaacaaaaccgcuacaaauccucuuacgaucgaggugccccacauuuguaccaaggaagaggaucagaucacaguguggggguuccauuccgacaacaaaacccagaugaagaaucuguacggagauagcaacccgcaaaaguuuacaucuuccgccaauggcgucaccacgcacuauguuagccagauugggggauucccugaccagacagaggauggcggccucccccagucugggcgcaucgugguggacuacaugguccaaaaaccuggaaagaccggcaccaucguguaucagagagggauucugcuuccccagaaaguuuggugcgcuuccggacggagcaaggugaucaaaggcucccugccccucauuggggaagccgauugucugcacgagaaguacggaggccugaacaaaucuaagccuuauuacacaggcgaacaugcgaaggccaucgggaacugcccgauuugggucaaaacaccccucaagcuggcuaauggaacaaaauaccgcccucccgccaaacuucugaaggagagaggcuuuuucggggcuaucgccggauuucucgagggcgggugggaaggcaugaucgccggauggcacggcuauacgagccauggggcucacggaguggcgguugccgcugaccugaaguccacccaggaggccauuaacaagaucaccaaaaaucuuaacagccugucugaacucgaggugaagaaucugcaacggcuguccggcgccauggaugaacuccacaacgagauucuggagcuugacgaaaaagucgacgaucugcgcgcugacaccaucagcucucagauugagcucgccgugcugcuuagcaaugaagggaucaucaacuccgaggaugaacaucugcucgcgcuggagagaaagcugaaaaagaugcucggaccuucugcugucgacauuggcaauggguguuucgagacaaagcacaaaugcaaccagaccugccuggaucggaucgccgccggcacguuuaaugcuggagaguucagccuucccaccuuugacucccugaacauuacagccgcuagccucaaugaugacggccuggauaaccauaccauccugcuuuacuauucuacagccgcguccagccucgccgugacccugaugauugcuaucuucauuguuuacaugaucucuagagacaauguguccuguagcaucugccuguga

SEQ ID NO: 218475 - RNA, 1755 nt, Artificial Sequence
  derived and/or modified CDS sequence (opt5) from hemagglutinin__InfluenzaB__ABL76342
augaaggccaucauugugcugcucauggucguuaccagcaacgcugacagaaucugcacaggcauuacguccucuaauagcccccacguggugaaaaccgccacacagggggaggucaacgugaccggaguuaucccucugacaaccacaccgaccaagucccauuucgcgaaucuuaaaggcacgaagacccgggggaaacugugucccacaugccucaacuguaccgaucuggacguggcucuuggacgcccuaugugcgucggcgugacacccucugccaaggccagcauucugcacgaaguuagaccugugaccuccggguguuuucccaucaugcaugaucggacgaagauccgccaacucccuaaucugcugagaggauacgagaaaauucggcucucuacacagaacgucaucaaugcugaaaaggccccgggcggccccuaucgccuggggaccagcggauccugcccuaacgcuacaagcagaucuggcuucuuugccaccauggcgugggccgugccccgggacaauaacaaaaccgcuacaaauccucuuacgguggaggucccccacauuuguaccaaggaagaggaucagaucacaguuuggggguuccauuccgacaacaaaacccagaugaagaaucuguacggagauagcaacccgcaaaaguuuacaucuuccgccaauggcgugaccacgcacuaugugagccagauuggggacuucccugaucagacagaggacggaggccucccccagucuggccgcaucgucguggauuacaugguucaaaaaccugggaagaccggaaccauuguguaucagagaggcauccugcuuccccagaaagucuggugcgcuuccgggcggagcaaggugauccgcggaucccugccccucauuggcgaagccgacugucugcacgagaaauacgggggacugaacaagucuaaaccuuauuacacaggcgaacaugcgaaggccaucggcaacugcccgauuuggguuaagacaccccucaaacuggcuaaugggaccaaguacagaccucccgccaaacuucugaaggagcggggauuuuucggcgcuaucgccggguuucucgagggaggcugggaagggaugauugccggcuggcacggauauacgagccauggcgcucacgggguggcggucgccgcugaucugaaauccacccaggaggccaucaacaagaucacaaagaaucuuaacagccugucugaacucgaggugaaaaaucugcaacgccuguccggagccauggacgaacuccacaacgagauucuggagcuugacgaaaaggucgaugaccugagagcugauaccaucagcucucagauugagcucgccgugcugcuuagcaaugaaggcaucauuaacuccgaggacgaacaucugcucgcgcuggagcggaaacugaagaaaaugcucgggccuucugcuguugauaucggaaauggcuguuucgagacaaagcacaagugcaaccagaccugccuggacagaaucgccgccgggacguuuaaugcuggcgauuucagccuucccaccuuugacucccugaacauuacagccgcuagccucaaugaugacggacuggauaaccauaccauccugcuuuacuauucuacagccgcguccagccucgccgugacccugaugauugcuaucuucauugucuacaugaucucucgcgacaauguguccuguagcauuugccuguga

SEQ ID NO: 218476 - RNA, 1755 nt, Artificial Sequence
  derived and/or modified CDS sequence (opt5) from hemagglutinin__InfluenzaB__ABL76353
augaaggccaucauugugcugcucauggucguuaccagcaacgcugacagaaucugcacaggcauuacguccucuaauagcccccacguggugaaaaccgccacacagggggaggucaacgugaccggaguuaucccucugacaaccacaccgaccaagucccauuucgcgaaucuuaaaggcacgaagacccgggggaaacugugucccacaugccucaacuguaccgaucuggacguggcucuuggacgcccuaugugcgucggcgugacacccucugccaaggccagcauucugcacgaaguuagaccugugaccuccggguguuuucccaucaugcaugaucggacgaagauccgccaacucccuaaucugcugagaggauacgagaaaauucggcucucuacacagaacgucaucaaugcugaaaaggccccgggcggccccuaucgccuggggaccagcggauccugcccuaacgcuacaagcagaucuggcuucuuugccaccauggcgugggccgugccccgggacaauaacaaaaccgcuacaaauccucuuacgguggaggucccccacauuuguaccaaggaagaggaucagaucacaguuuggggguuccauuccgacaacaaaacccagaugaagaaucuguacggagauagcaacccgcaaaaguuuacaucuuccgccaauggcgugaccacgcacuaugugagccagauugggggauucccugaccagacagaggauggcggccucccccagucugggcgcaucgucguggacuacaugguucaaaaaccuggaaagaccggcaccauuguguaucagagagggauccugcuuccccagaaagucuggugcgcuuccggacggagcaaggugauccgcggcucccugccccucauuggggaagccgauugucugcacgagaaauacggaggccugaacaagucuaaaccuuauuacacaggcgaacaugcgaaggccaucgggaacugcccgauuuggguuaagacaccccucaaacuggcuaauggaaccaaguacagaccucccgccaaacuucugaaggagcggggcuuuuucggggcuaucgccggauuucucgagggcgggugggaaggcaugauugccggauggcacggcuauacgagccauggggcucacggaguggcggucgccgcugaccugaaauccacccaggaggccaucaacaagaucacaaagaaucuuaacagccugucugaacucgaggugaaaaaucugcaacgccuguccggcgccauggaugaacuccacaacgagauucuggagcuugacgaaaaggucgacgaucugagagcugacaccaucagcucucagauugagcucgccgugcugcuuagcaaugaagggaucauuaacuccgaggaugaacaucugcucgcgcuggagcggaaacugaagaaaaugcucggaccuucugcuguugacaucggcaauggguguuucgagacaaagcacaagugcaaccagaccugccuggauagaaucgccgccggcacguuuaaugcuggagacuucagccuucccaccuuugauucccugaacauuacagccgcuagccucaaugacgauggccuggacaaccauaccauccugcuuuacuauucuacagccgcguccagccucgccgugacccugaugauugcuaucuucauugucuacaugaucucucgcgauaauguguccuguagcauuugccuguga

SEQ ID NO: 218477 - RNA, 1755 nt, Artificial Sequence
  derived and/or modified CDS sequence (opt5) from hemagglutinin__InfluenzaB__ABL76375
augaaggccaucauugugcugcucauggucguuaccagcaacgcugacagaaucugcacaggcauuacguccucuaauagcccccacguggugaaaaccgccacacagggggaagucaacgugaccggagcgaucccucugacaaccacaccgaccaagucccauuucgcuaaucuuaaaggcacgaagacccgggggaaacugugucccacaugccucaacuguaccgaucuggacguugcccuuggacgcccuaugugcgugggcauuacacccucugccaaggcuagcauccugcacgaagucagaccugugaccuccggguguuuucccaucaugcaugaucggacgaagauucgccaacucccuaaucugcugagaggauacgagaaaauccggcucucuacacagaacguuauuaaugccgaaaaggcuccgggcggccccuaucgccuggggaccagcggauccugcccuaacgccacaagcaaaucuggcuucuuugcgaccauggccugggcugugcccagagacaauaacaagaccgccacaaauccucuuacggucgaggugccccacaucuguaccaaagaagaggaucagauuacaguguggggguuccauuccgacaacaagacccagaugaagaaucuguacggagauagcaacccgcaaaaauuuacaucuuccgcuaauggcaucaccacgcacuaugucagccagauugggggauucccugaccagacagaggauggcggccucccccagucugggcggaucguuguggacuacauggugcaaaagccuggaaaaaccggcaccaucgucuaucagcgcgggauucugcuuccccagaagguguggugcgccuccggaagaagcaaaguuaucaagggcucccugccccucauuggggaagcggauugucugcacgagaaauacggaggccugaacaagucuaagccuuauuacacaggcgaacaugccaaagcuaucgggaacugcccgauuugggugaagacaccccucaaacuggccaauggaaccaaguaccggccucccgcuaaacuucugaaggagcgcggcuuuuucggggccaucgccggauuucucgagggcgggugggaaggcaugaucgcuggauggcacggcuauacgagccauggggcgcacggagucgccguggcugccgaccugaaguccacccaggaggccauuaacaaaaucacaaagaaucuuaacagccugucugaacucgagguuaaaaaucugcaaagacuguccggcgcuauggaugaacuccacaacgagauucuggagcuugacgaaaagguggacgaucugcgggccgacaccaucagcucucagauugagcucgcgguccugcuuagcaaugaagggaucaucaacuccgaggaugaacaucugcucgcucuggagcgcaaacugaagaagaugcucggaccuucugccguggacauuggcaauggguguuucgagacaaaacacaagugcaaccagaccugccuggauagaaucgccgcuggcacguuuaaugccggagaguucagccuucccaccuuugacucccugaacauuacagcugccagccucaaugaugacggccuggauaaccauaccauccugcuuuacuauucuacagcggccuccagccucgcugucacccugaugauugccaucuucauuguguacaugaucucucgggacaauguuuccuguagcaucugccuguga

SEQ ID NO: 218478 - RNA, 1755 nt, Artificial Sequence; identical to SEQ ID NO: 218477
  derived and/or modified CDS sequence (opt5) from hemagglutinin__InfluenzaB__ABL76386

SEQ ID NO: 218479 - RNA, 1755 nt, Artificial Sequence
  derived and/or modified CDS sequence (opt5) from hemagglutinin__InfluenzaB__ABL76408
augaaggccaucauugugcugcucauggucguuaccagcaacgcugacagaaucugcacaggcauuacguccucuaauagcccccacguggugaaaaccgccacacagggggaggucaacgugaccggagcgaucccucugacaaccacaccgaccaagucccauuucgcuaaucuuaaaggcacgaagacccgggggaaacugugucccacaugcuuuaacuguaccgaucucgacguugcccugggacgcccuaugugcgugggcauuacacccucugccaaggcuagcauccuucacgaagucagaccugugaccuccggguguuuccccaucaugcaugaucggacgaagauucgccaacugccuaaucuccugagaggauacgagaaaauccggcugucuacacagaacguuauugacgccgaaaaggcuccgggcggccccuaucgccucgggaccagcggauccugcccuaaugccacaagcaaaucuggcuuuuucgcgaccauggccugggcugugcccagagggaacaauaagaccgccacaaacccucugacggucgaggugccccacaucuguaccaaagaagaggaucagauuacaguguggggauuucauuccgacaauaagacccagaugaagaaccuuuacggcgauagcaauccgcaaaaauucacaucuuccgcuaacgggaucaccacgcacuaugucagccagauuggaggcuuuccugaccagacagaggauggcgggcugccccagucuggacggaucguuguggacuacauggugcaaaagccuggcaaaaccgggaccaucgucuaucagcgcgggauucuccugccccagaagguguggugcgccuccggcagaagcaaaguuaucaaggggucccuuccccugauuggagaagcggauugucuccacgagaaauacggcggccugaauaagucuaagccuuauuacacaggggaacaugccaaagcuaucggaaacugcccgauuugggugaagacaccccugaaacucgccaacggcaccaaguaccggccucccgcuaaacugcuuaaggagcgcggguucuuuggagccaucgccggcuuccuggagggaggcugggaaggaaugaucgcuggcuggcacggguauacgagccauggagcgcacggcgucgccguggcugccgaccucaaguccacccaggaggccauuaauaaaaucacaaagaaccugaauagccuuucugaacuggagguuaaaaaccuccaaagacuguccggggcuauggaugaacugcacaaugagauucucgagcuggacgaaaagguggacgaucuucgggccgacaccaucagcucucagauugagcuggcgguccuccugagcaacgaaggaaucaucaauuccgaggaugaacaucuucuggcucucgagcgcaaacugaagaagaugcugggcccuucugccguggacauugggaacggcuguuuugagacaaaacacaagugcaaucagaccugccucgauagaaucgccgcuggaacguucaacgccggcgaauuuagccugcccaccuucgacucccuuaauauuacagcugccagccugaacgaugacgggcucgauaaucauaccauccugcuguacuauucuacagcggccuccagccuugcugucacccucaugauugccaucuucauuguguacaugaucucucgggacaacguuuccuguagcaucugccuguga

SEQ ID NO: 218480 - RNA, 1755 nt, Artificial Sequence
  derived and/or modified CDS sequence (opt5) from hemagglutinin__InfluenzaB__ABL76419
augaaggccaucauugugcugcucauggucguuaccagcaacgcugacagaaucugcacaggcauuacguccucuaauagcccccacguggugaaaaccgccacacagggggaggucaacgugaccggagcgaucccucugacaaccacaccgaccaagucccauuucgcuaaucuuaaaggcacgaagacccgggggaaacugugucccacaugcuuuaacuguaccgaucucgacguugcccugggacgcccuaugugcgugggcauuacacccucugccaaggcuagcauccuucacgaaaucagaccugucaccuccggguguuuccccauuaugcaugaucggacgaagauccgccaacugccuaaucuccugagaggauacgagaaaauucggcugucuacacagaacgugaucgacgccgaaaaggcuccgggcggccccuaucgccucgggaccagcggauccugcccuaaugccacaagcaaaucuggcuuuuucgcgaccauggccugggcuguucccagagggaacaauaagaccgccacaaacccucugacgguggaggucccccacauuuguaccaaagaagaggaucagaucacaguguggggauuucauuccgacaauaagacccagaugaagaaccuuuacggcgauagcaauccgcaaaaauucacaucuuccgcuaacgggauuaccacgcacuaugugagccagaucggaggcuuuccugaccagacagaggauggcgggcugccccagucuggacggaucgucguugacuacauggugcaaaagccuggcaaaaccgggaccauuguguaucagcgcggaauccuccugccccagaaggucuggugcgccuccggcagaagcaaagugauuaaggggucccuuccccugaucggagaagcggauugucuccacgagaaauacggcggccugaauaagucuaagccuuauuacacaggggaacaugccaaagcuauuggaaacugcccgaucuggguuaagacaccccugaaacucgccaacggcaccaaguaccggccucccgcuaaacugcuuaaggagcgcggguucuuuggagccaucgccggcuuccuggaagggggcugggagggaaugauugcuggcuggcacggguauacgagccauggagcgcacggcguggccgucgcugccgaccucaaguccacccaggaggccaucaauaaaauuacaaagaaccugaauagccuuucugaacuggaggugaaaaaccuccaaagacuguccggggcuauggaugaacugcacaaugagauccucgagcuggacgaaaagguugacgaucuucgggccgacaccauuagcucucagaucgagcuggcggugcuccugagcaacgaaggaaucauuaauuccgaggaugaacaucuucuggcucucgagcgcaaacugaagaagaugcugggcccuucugccgucgacaucgggaacggcuguuuugagacaaaacacaagugcaaucagaccugccucgauagaauugccgcuggaacguucaacgccggcgaauuuagccugcccaccuucgacucccuuaauaucacagcugccagccugaacgaugacgggcucgauaaucauaccauucugcuguacuauucuacagcggccuccagccuugcugugacccucaugaucgccauuuucaucgucuacaugaucucucgggacaacguguccuguagcauuugccuguga

SEQ ID NO: 218481 - RNA, 1758 nt, Artificial Sequence
  derived and/or modified CDS sequence (opt5) from hemagglutinin__InfluenzaB__ABL76441
augaaggccaucauugugcugcucauggucguuaccagcaacgcugacagaaucugcacaggcauuacguccucuaauagcccccacguggugaaaaccgccacacagggggaggucaacgugaccggaguuaucccucugacaaccacaccgaccaagucccauuucgcgaaucuuaaaggcacgaagacccgggggaaacugugucccaagugccucaacuguacagaucuggacguggcucuuggacgcccuaagugcaccggcaauauucccucugccaaagucagcauccugcacgaagugagaccuguuacauccggguguuuucccaucaugcaugaucggaccaagauucgccaacucccuaaccugcugagaggauacgagcacauccggcucucuacgcauaaugugauuaacgccgaaaaagcuccgggcggccccuauaagaucgggacaagcggauccugcccuaaugucaccaacggcaauggguucuuugccacaauggcuugggccgugcccaaaaacgacaauaacaagaccgcgaccaauagccugacaauugaggugccuuacaucuguacggaaggagaggaucagauuaccgucuggggcuuccacucugacaacgagacacagauggccaaacuuuauggggauuccaagccccagaaguuuaccagcucugcuaacggaguuacaacccacuacgugucccaaaucggcggcuucccgaaucagacggaagacgggggacugccucagagcggccgcaucguggucgauuauauggugcagaaaucugggaagcccggaacaauuaccuaccaaagaggcauccuccugccucagaaaguuuggugcgccuccgggcggagcaaggugauuaaaggaucccuuccccugaucggcgaggcugacugucuccaugaaaaguauggcgggcugaacaagucuaaacccuacuacaccggagagcacgccaaggcgauuggcaauugcccuaucugggucaaaacaccgcugaagcucgccaacgggaccaaauauagacccccugcuaagcugcuuaaggagcgcggauuuuucggcgccaucgcuggguuucuggaaggcggaugggagggcaugauugccggguggcauggauacacaagccacggcgcccacgggguggcuguugcggccgaucucaaauccacgcaggaagcuaucaauaagauuaccaaaaaccugaauagccuuucugagcuggaagugaagaaccuccagcggcuguccggagccauggacgagcugcauaaugagauccucgaacuggaugagaaagucgacgaccuucgcgccgauacaauuagcucucaaaucgaacuggcugugcuccugagcaacgagggcaucauuaauuccgaagacgagcaccuucuggcccucgagagaaagcugaagaaaaugcuggggcccucugcggucgaaaucggcaacggauguuucgagaccaagcauaaaugcaaucagacaugccucgaucggauugcugccggcaccuuugacgccggggaguucagccugccuacguuugauucccuuaacaucaccgcugccagccugaaugacgaugaacucgacaaccacacaauucugcuguauuacucuaccgcugccuccagccuugcggugacacucaugaucgccauuuucguuguguauauggucucucgcgauaacguguccuguagcaucugccuguga

SEQ ID NO: 218482 - RNA, 1758 nt, Artificial Sequence
  derived and/or modified CDS sequence (opt5) from hemagglutinin__InfluenzaB__ABL76463
augaaggccaucauugugcugcucauggucguuaccagcaacgcugacagaaucugcacaggcauuacguccucuaauagcccccacguggugaaaaccgccacacagggggaagucaacgugaccggaguuaucccucugacaaccacaccgaccaagucccauuucgcgaaucuuaaaggcacgaagacccgggggaaacugugucccaagugccucaacuguacagaucuggacguggcucuuggacgcccuaagugcaccggcaauauucccucugccaaagucagcauccugcacgaagugagaccuguuacauccggguguuuucccaucaugcaugaucggaccaagauucgccaacucccuaaccugcugagaggauacgagcacauccggcucucuacgcauaaugugauuaacgccgaaaaagcuccgggcggccccuauaagaucgggacaagcggauccugcccuaaugucaccaacggcaauggguucuuugccacaauggcuugggccgugcccaaaaacgacaauaacaagaccgcgaccaauagccugacaauugaggugccuuacaucuguacggaaggagaggaucagauuaccgucuggggcuuccacucugacaacgagacacagauggccaaacuuuauggggauuccaaaccccagaaguuuaccagcucugcuaacggaguuacaacccacuacgugucccaaaucggcggcuucccgaaucagacggaagacgggggacugccucagagcggccgcaucguggucgauuauauggugcagaaaucugggaagacaggaaccauuaccuaccaaagaggcauccuccugccccagaaaguuuggugcgccuccgggcggagcaaggugauuaaaggaucccuuccucugaucggcgaggcugacugucuccaugaaaaguauggcgggcugaacaagucuaaacccuacuacacaggagagcacgccaaggcgauuggcaauugccccaucugggucaaaaccccucugaagcucgccaacgggacaaaauaucgcccgcccgcuaagcugcuuaaggagagaggauuuuucggcgccaucgcuggguuucuggaaggcggaugggagggcaugauugccggguggcauggauacacgagccacggcgcccacgggguggcuguugcggccgaucucaaauccacccaggaagcuaucaauaagauuacaaagaaccugaauagccuuucugagcuggaagugaagaaccuccagcggcuguccggagccauggacgagcugcauaaugagauccucgaacuggaugagaaagucaacgaccuucgcgccgacaccauuagcucucaaaucgaacuggcugugcuccugagcaaugagggcaucauuaacuccgaagaugagcaccuucuggcccucgagagaaagcugaagaaaaugcuggggccuucugcggucgaaaucggcaauggauguuucgagacaaagcauaaaugcaaccagaccugccucgaccggauugcugccggcacguuugaugccggggaguucagccugcccaccuuugacucccuuaauaucacagcugccagccugaacgaugacggacucgauaaccacaccauucugcuguauuacucuacagcugccuccagccuugcggugacccucaugaucgccauuuucguuguguauauggucucucgcgacaauguguccuguagcaucugccuguga

SEQ ID NO: 218483 - RNA, 1758 nt, Artificial Sequence
  derived and/or modified CDS sequence (opt5) from hemagglutinin__InfluenzaB__ABL76474
augaaggccaucauugugcugcucauggucguuaccagcaacgcugacagaaucugcacaggcauuacguccucuaauagcccccacguggugaaaaccgccacacagggggaggucaacgugaccggaguuaucccucugacaaccacaccgaccaagucccauuucgcgaaucuuaaaggcacgaagacccgggggaaacugugucccaagugccucaacuguacagaucuggacguggcucuuggacgcccuaagugcaccggcaauauucccucugccaaagucagcauccugcacgaagugagaccuguuacauccggguguuuucccaucaugcaugaucggaccaagauucgccaacucccuaaccugcugagaggauacgagcacauccggcucucuacgcauaaugugauuaacgccgaaaaagcuccgggcggccccuauaagaucgggacaagcggauccugcccuaaugucaccaacggcaauggguucuuugccacaauggcuugggccgugcccaaaaacgacaauaacaagaccgcgaccaauagccugacaauugaggugccuuacaucuguacggaaggagaggaucagauuaccgucuggggcuuccacucugacaacgagacacagauggccaaacuuuauggggauuccaaaccccagaaguuuaccagcucugcuaacggaguuacaacccacuacgugucccaaaucggcggcuucccgaaucagacggaagacgggggacugccucagagcggccgcaucguggucgauuauauggugcagaaaucugggaagacaggaaccauuaccuaccaaagaggcauccuccugccccagaaaguuuggugcgccuccgggcggagcaaggugauuaaaggaucccuuccucugaucggcgaggcugacugucuccaugaaaaguauggcgggcugaacaagucuaaacccuacuacacaggagagcacgccaaggcgauuggcaauugccccaucugggucaaaaccccucugaagcucgccaacgggacaaaauaucgcccgcccgcuaagcugcuuaaggagagaggauuuuucggcgccaucgcuggguuucuggaaggcggaugggagggcaugauugccggguggcauggauacacgagccacggcgcccacgggguggcuguugcggccgaucucaaauccacccaggaagcuaucaauaagauuacaaagaaccugaauagccuuucugagcuggaagugaagaaccuccagcggcuguccggagccauggacgagcugcauaaugagauccucgaacuggaugagaaagucgacgaccuucgcgccgauaccauuagcucucaaaucgaacuggcugugcuccugagcaacgagggcaucauuaauuccgaagacgagcaccuucuggcccucgagagaaagcugaagaaaaugcuggggccuucugcggucgaaaucggcaacggauguuucgagacaaagcauaaaugcaaucagaccugccucgaucggauugcugccggcacguuugacgccggggaguucagccugcccaccuuugauucccuuaacaucacagcugccagccugaaugacgaugaacucgacaaccacaccauucugcuguauuacucuacagcugccuccagccuugcggugacccucaugaucgccauuuucguuguguauauggucucucgcgauaacguguccuguagcaucugccuguga

SEQ ID NO: 218484 - RNA, 1758 nt, Artificial Sequence
  derived and/or modified CDS sequence (opt5) from hemagglutinin__InfluenzaB__ABL76485
augaaggccaucauugugcugcucauggucguuaccagcaacgcugacagaaucugcacaggcauuacguccucuaauagcccccacguggugaaaaccgccacacagggggaggucaacgugaccggaguuaucccucugacaaccacaccgaccaagucccauuucgcgaaucuuaaaggcacgaagacccgggggaaacugugucccaagugccucaacuguacagaucuggacguggcucuuggacgcccuaagugcaccggcaauauucccucugccgaagucagcauccugcacgaggugagaccuguuacauccggguguuuucccaucaugcaugaucggaccaaaauucgccaacucccuaaccugcugagaggauacgaacacauccggcucucuacgcauaaugugauuaacgccgagaaggcuccgggcggccccuauaaaaucgggacaagcggauccugcccuaaugucaccaacggcaauggguucuuugugacaauggccugggcugugcccaagaacgacaauaacaaaaccgccaccaauagccugacaauugaagucccuuacaucuguacggagggagaggaucagauuaccguuuggggcuuccacucugacaacgaaacacagauggcgaaacuuuauggggauuccaagccccagaaguuuaccagcucugccaacggagugacaacccacuacgugucccaaaucggcggcuucccgaaucagacggaggacgggggacugccucagagcggccgcaucgucguggauuauaugguucagaagucugggaaaacaggaaccauuaccuaccaaagaggcauccuccugccccagaagguguggugcgcuuccgggcggagcaaagucauuaagggaucccuuccucugaucggcgaagccgacugucuccaugagaaauauggcgggcugaacaagucuaagcccuacuacacaggagagcacgcuaaagccauuggcaauugccccaucugggugaagaccccucugaaacucgcgaacgggacaaaguaucgcccgcccgccaaacugcuuaaggaaagaggauuuuucggcgcuaucgccggguuucuggagggcggaugggaaggcaugauugcuggguggcauggauacacgagccacggcgcccacgggguugccguggcugcggaucucaaguccacccaggaggccaucaauaaaauuacaaagaaccugaauagccuuucugaacuggaggucaaaaaccuccagcggcuguccggagcuauggacgagcugcauaaugaaauccucgagcuggaugaaaagguggacgaccuucgcgccgauaccauuagcucucaaaucgagcuggccguccuccugagcaacgaaggcaucauuaauuccgagaacgagcaccuucuggcucucgaaagaaaacugaagaagaugcuggggccuucugccguggagaucggcaauggauguuucgaaacaaaacauaagugcaaccagaccugccucgaccggauugcggcuggcacguuugaugccggggaguucagccugcccaccuuugacucccuuaauaucacagccgcuagccugaacgaugacggacucgauaaccacaccauucugcuguauuacucuacagccgcuuccagccuugccguuacccucaugaucgcgauuuucguggucuauauggugucucgcgacaauguuuccuguagcaucugccuguga

SEQ ID NO: 218485 - RNA, 1758 nt, Artificial Sequence
  derived and/or modified CDS sequence (opt5) from hemagglutinin__InfluenzaB__ABL76507
augaaggccaucauugugcugcucauggucguuaccagcaacgcugacagaaucugcacaggcauuacguccucuaauagcccccacguggugaaaaccgccacacagggggaggucaacgugaccggaguuaucccucugacaaccacaccgaccaagucccauuucgcgaaucuuaaaggcacgaagacccgggggaaacugugucccaagugccucaacuguacagaucuggacguggcucuuggacgcccuaagugcaccggcaauauucccucugccgaagucagcauccugcacgaggugagaccuguuacauccggguguuuucccaucaugcaugaucggaccaaaauucgccaacucccuaaccugcugagaggauacgaacacauccggcucucuacgcauaaugugauuaacgccgagaaggcuccgggcggccccuauaaaaucgggacaagcggauccugcccuaaugucaccaacggcaauggguucuuugccacaauggcuugggccgugcccaagaacgacaauaacaaaaccgcgaccaauagccugacaauugaagugccuuacaucuguacggagggagaggaucagauuaccgucuggggcuuccacucugacaacgaaauccagauggccaaacuuuauggggauuccaagccccagaaguuuacaagcucugcuaacggaguuaccacacacuacgugucccaaaucggcggcuucccgaaucagaccgaggacgggggacugccucagagcggccgcauuguggucgauuauauggugcagaagucugggaaaacgggaacaaucaccuaccaaagaggcauucuccugccccagaagguuuggugcgccuccgggcggagcaaagugaucaagggaucccuuccucugauuggcgaagcugacugucuccaugagaaauauggcgggcugaacaagucuaagcccuacuacaccggagagcacgccaaagcgaucggcaauugccccaucugggucaagacaccucugaaacucgccaacgggaccaaguaucgcccgcccgcuaaacugcuuaaggaaagaggauuuuucggcgccauugcuggguuucuggagggcggaugggaaggcaugaucgccggguggcauggauacacaagccacggcgcccacgggguggcuguugcggccgaucucaaguccacgcaggaggcuauuaauaaaaucaccaagaaccugaauagccuuucugaacuggaggugaaaaaccuccagcggcuguccggagccauggacgagcugcauaaugaaauucucgagcuggaugaaaaggucgacgaccuucgcgccgauacaaucagcucucaaaucgagcuggcugugcuccugagcaacgaaggcauuaucaauuccgaggacgagcaccuucuggcccucgaaagaaaacugaagaagaugcuggggccuucugcggucgagauuggcaacggauguuucgaaaccaaacauaagugcaaucagacaugccucgaucggaucgcugccggcaccuuugacgccggggaguucagccugcccacguuugauucccuuaacauuaccgcugccagccugaaugacgauggacucgacaaccacacaauccugcuguauuacucuaccgcugccuccagccuugcggugacacucaugauugccaucuucguuguguauauggucucucgcgauaacguguccuguagcaucugccuguga

SEQ ID NO: 218486 - RNA, 1758 nt, Artificial Sequence
  derived and/or modified CDS sequence (opt5) from hemagglutinin__InfluenzaB__ABL76518
augaaggccaucauugugcugcucauggucguuaccagcaacgcugacagaaucugcacaggcauuacguccucuaauagcccccacguggugaaaaccgccacacagggggaggucaacgugaccggaguuaucccucugacaaccacaccgaccaagucccauuucgcgaaucuuaaaggcacgaagacccgggggaaacugugucccaagugccucaacuguacagaucuggacguggcucuuggacgcccuaagugcaccggcaauauucccucugccgaagucagcauccugcacgaggugagaccuguuacauccggguguuuucccaucaugcaugaucggaccaaaauucgccaacucccuaaccugcugagaggauacgaacacauccggcucucuacgcauaaugugauuaacgccgagaaggcuccgggcggccccuauaaaaucgggacaagcggauccugcccuaaugucaccaacggcaauggguucuuugccacaauggcuugggccgugcccaagaacgacaauaacaaaaccgcgaccaauagccugacaauugaagugccuuacaucuguacggagggagaggaucagauuaccgucuggggcuuccacucugacaacgaaaaccagauggccaaacuuuauggggauuccaagccccagaaguuuacaagcucugcuaauggaguuaccacacacuacgugucccaaaucggcggcuucccgaaccagaccgaggacgggggacugccucagagcggccgcaucguggucgauuauauggugcagaagucugggaaaacgggaacaauuaccuaccaaagaggcauccuccugccccagaagguuuggugcgccuccgggcggagcaaagugauuaagggaucccuuccucugaucggcgaagcugacugucuccaugagaaauauggcgggcugaauaagucuaagcccuacuacaccggagagcacgccaaagcgauuggcaacugccccaucugggucaagacaccucugaaacucgccaaugggaccaaguaucgcccgcccgcuaaacugcuuaaggaaagaggauuuuucggcgccaucgcuggguuucuggagggcggaugggaaggcaugauugccggguggcauggauacacaagccacggcgcccacgggguggcuguugcggccgaucucaaguccacgcaggaggcuaucaacaaaauuaccaagaaucugaacagccuuucugaacuggaggugaaaaaucuccagcggcuguccggagccauggacgagcugcauaacgaaauccucgagcuggaugaaaaggucgacgaccuucgcgccgauacaauuagcucucaaaucgagcuggcugugcuccugagcaaugaaggcaucauuaacuccgaggacgagcaccuucuggcccucgaaagaaaacugaagaagaugcuggggccuucugcggucgagaucggcaauggauguuucgaaaccaaacauaagugcaaccagacaugccucgaucggauugcugccggcaccuuugacgccggggaguucagccugcccacguuugauucccuuaauaucaccgcugccagccugaacgacgauggacucgacaaccacacaauucugcuguauuacucuaccgcugccuccagccuugcggugacacucaugaucgccauuuucguuguguauauggucucucgcgauaauguguccuguagcaucugccuguga

SEQ ID NO: 218487 - RNA, 1758 nt, Artificial Sequence
  derived and/or modified CDS sequence (opt5) from hemagglutinin__InfluenzaB__ABL76529
augaaggccaucauugugcugcucauggucguuaccagcaacgcugacagaaucugcacaggcauuacguccucuaauagcccccacguggugaaaaccgccacacagggggaggucaacgugaccggaguuaucccucugacaaccacaccgaccaagucccauuucgcgaaucuuaaaggcacgaagacccgggggaaacugugucccaagugccucaacuguacagaucuggacguggcucuuggacgcccuaagugcaccggcaauauucccucugccgaagucagcauccugcacgaggugagaccuguuacauccggguguuuucccaucaugcaugaucggaccaaaauucgccaacucccuaaccugcugagaggauacgaacacauccggcucucuacgcauaaugugauuaacgccgagaaggcuccgggcggccccuauaaaaucgggacaagcggauccugcccuaaugucaccaacggcaauggguucuuugugacaauggccugggcugugcccaagaacgacaauaacaaaaccgccaccaauagccugacaauugaagucccuuacaucuguacggagggagaggaucagauuaccguuuggggcuuccacucugacaacgaaacacagauggcgaaacuuuauggggauuccaagccccagaaguuuaccagcucugccaacggagugacaacccacuacgugucccaaaucggcggcuucccgaaucagacggaggacgggggacugccucagagcggccgcaucgucguggauuauaugguucagaagucugggaaaacaggaaccauuaccuaccaaagaggcauccuccugccccagaagguguggugcgcuuccgggcggagcaaagucauuaagggaucccuuccucugaucggcgaagccgacugucuccaugagaaauauggcgggcugaacaagucuaagcccuacuacacaggagagcacgcuaaagccauuggcaauugccccaucugggugaagaccccucugaaacucgcgaacgggacaaaguaucgcccgcccgccaaacugcuuaaggaaagaggauuuuucggcgcuaucgccggguuucuggagggcggaugggaaggcaugauugcuggguggcauggauacacgagccacggcgcccacgggguugccguggcugcggaucucaaguccacccaggaggccaucaauaaaauuacaaagaaccugaauagccuuucugaacuggaggucaaaaaccuccagcggcuguccggagcuauggacgagcugcauaaugaaauccucgagcuggaugaaaagguggacgaccuucgcgccgauaccauuagcucucaaaucgagcuggccguccuccugagcaacgaaggcaucauuaauuccgaggacgagcaccuucuggcucucgaaagaaaacugaagaagaugcuggggccuucugccguggagaucggcaacggauguuucgaaacaaaacauaagugcaaucagaccugccucgaucggauugcggcuggcacguuugacgccggggaguucagccugcccaccuuugauucccuuaacaucacagccgcuagccugaaugacgauggacucgacaaccacaccauucugcuguauuacucuacagccgcuuccagccuugccguuacccucaugaucgcgauuuucguggucuauauggugucucgcgauaacguuuccuguagcaucugccuguga

SEQ ID NO: 218488 - RNA, 1758 nt, Artificial Sequence
  derived and/or modified CDS sequence (opt5) from hemagglutinin__InfluenzaB__ABL76540
augaaggccaucauugugcugcucauggucguuaccagcaacgcugacagaaucugcacaggcauuacguccucuaauagcccccacguggugaaaaccgccacacagggggaggucaacgugaccggaguuaucccucugacaaccacaccgaccaagucccauuucgcgaaucuuaaaggcacgaagacccgggggaaacugugucccaagugccucaacuguacagaucuggacguggcucuuggacgcccuaagugcaccggcaauauucccucugccgaagucagcauccugcacgaggugaaaccuguuacauccggguguuuucccaucaugcaugauagaaccaagauucggcaacucccuaaccugcugcgcggauacgaacacaucagacucucuacgcauaaugugauuaacgccgagaaagcuccgggcggccccuauaagaucgggacaagcggauccugcccuaaugucaccaacggcaauggguucuuugccacaauggcuugggccgugcccaaaaacgacaauaacaagaccgcgaccaauagccugacaauugaagugccuuacaucuguacggagggagaggaucagauuaccgucuggggcuuccacucugacaacgaaacacagauggccaaacuuuauggggauuccaaaccccagaaguuuaccagcucugcuaacggaguuacaacccacuacgugucccaaaucggcggcuucccgaaucagacggaggacgggggacugccucagagcggccggaucguggucgauuauauggugcagaaaucugggaagacaggaaccauuaccuaccaacgcggcauccuccugccccagaaaguuuggugcgccuccgggagaagcaaggugauuaaaggaucccuuccucugaucggcgaagcugacugucuccaugagaaguauggcgggcugaacaagucuaaacccuacuacacaggagagcacgccaaggcgauuggcaauugccccaucugggucaaaaccccucugaagcucgccaacgggacaaaauaucggccgcccgcuaagcugcuuaaggaacgcggauuuuucggcgccaucgcuggguuucuggagggcggaugggaaggcaugauugccggguggcauggauacacgagccacggcgcccacgggguggcuguugcggccgaucucaaauccacccaggaggcuaucaauaagauuacaaagaaccugaauagccuuucugaacuggaggugaagaaccuccagagacuguccggagccauggacgagcugcauaaugaaauccucgagcuggaugaaaaagucgacgaccuucgggccgauaccauuagcucucaaaucgagcuggcugugcuccugagcaacgaaggcaucauuaauuccgaggacgagcaccuucuggcccucgaacgcaagcugaagaaaaugcuggggccuucugcggucgagaucggcaacggauguuucgaaacaaagcauaaaugcaaucagaccugccucgauagaauugcugccggcacguuugacgccggggaguucagccugcccaccuuugauucccuuaacaucacagcugccagccugaaugacgauggacucgacaaccacaccauucugcuguauuacucuacagcugccuccagccuugcggugacccucaugaucgccauuuucguuguguauauggucucucgggauaacguguccuguagcaucugccuguga

SEQ ID NO: 218489 - RNA, 1758 nt, Artificial Sequence
  derived and/or modified CDS sequence (opt5) from hemagglutinin__InfluenzaB__ABL76551
augaaggccaucauugugcugcucauggucguuaccagcaacgcugacagaaucugcacaggcauuacguccucuaauagcccccacguggugaaaaccgccacacagggggaggucaacgugaccggaguuaucccucugacaaccacaccgaccaagucccauuucgcgaaucuuaaaggcacgaagacccgggggaaacugugucccaagugccucaacuguacagaucuggacguggcucuuggacgcccuaagugcaccggcaauauucccucugccgaagucagcauccugcacgaggugagaccuguuacauccggguguuuucccaucaugcaugaucggaccaaaauucgccaacucccuaaccugcugagaggauacgaacacauccggcucucuacgcauaaugugauuaacgccgagaaggcuccgggcggccccuauaaaaucgggacaagcggauccugcccuaaugucaccaacggcaauggguucuuugccacaauggcuugggccgugcccaagaacgacaauaacaaaaccgcgaccaauagccugacaauugaagugccuuacaucuguacggagggagaggaucagauuaccgucuggggcuuccacucugacaacgaaacacagauggccaaacuuuauggggauuccaagccccagaaguuuaccagcucugcuaacggaguuacaacccacuacgugucccaaaucggcggcuucccgaaucagacggaggacgggggacugccucagagcggccgcaucguggucgauuauauggugcagaagucugggaaaacaggaaccauuaccuaccaaagaggcauccuccugccccagaagguuuggugcgccuccgggcggagcaaagugauuaagggaucccuuccucugaucggcgaagcugacugucuccaugagaaauauggcgggcugaacaagucuaagcccuacuacacaggagagcacgccaaagcgauuggcaauugccccaucugggucaagaccccucugaaacucgccaacgggacaaaguaucgcccgcccgcuaaacugcuuaaggaaagaggauuuuucggcgccaucgcuggguuucuggagggcggaugggaaggcaugauugccggguggcauggauacacgagccacggcgcccacgggguggcuguugcggccgaucucaaguccacccaggaggcuaucaauaaaauuacaaagaaccugaauagccuuucugaacuggaggugaaaaaccuccagcggcuguccggagccauggacgagcugcauaaugaaauccucgagcuggaugaaaaggucgacgaccuucgcgccgauaccauuagcucucaaaucgagcuggcugugcuccugagcaacgaaggcaucauuaauuccgaggacgagcaccuucuggcccucgaaagaaaacugaagaagaugcuggggccuucugcggucgagaucggcaacggauguuucgaaacaaaacauaagugcaaucagaccugccucgaucggauugcugccggcacguuugacgccggggaguucagccugcccaccuuugauucccuuaacaucacagcugccagccugaaugacgauggacucgacaaccacaccauucugcuguauuacucuacagcugccuccagccuugcggugacccucaugauggccaucuucguuguguauauggucucucgcgauaacguguccuguagcauuugccuguga

SEQ ID NO: 218490 - RNA, 1758 nt, Artificial Sequence
  derived and/or modified CDS sequence (opt5) from hemagglutinin__InfluenzaB__ABL76562
augaaggccaucauugugcugcucauggucguuaccagcaacgcugacagaaucugcacacggauuacguccucuaauagcccccacguggugaaaaccgccacacagggcgaggucaacgugaccgggguuaucccucugacaaccacaccgaccaagucccauuucgcgaaucuuaaaggaacgaagacccgcggcaaacugugucccaagugccucaacuguacagaucuggacguggcucuugggagaccuaagugcaccggaaauauucccucugccgaagucagcauccugcacgaggugcggccuguuacauccggcuguuuucccaucaugcaugaucgcaccaaaauuagacaacucccuaaccugcugcggggguacgaacacauccgccucucuacgcauaaugugauuaacgccgagaaggcuccgggaggccccuauaaaaucggcacaagcggguccugcccuaaugucaccaacggaaauggcuucuuugccacaauggcuugggccgugcccaagaacgacaauaacaaaaccgcgaccaauagccugacaauugaagugccuuacaucuguacggagggggaggaucagauuaccgucuggggauuccacucugacaacgaaacacagauggccaaacuuuauggcgauuccaagccccagaaguuuaccagcucugcuaacgggguuacaacccacuacgugucccaaaucggaggcuucccgaaucagacggaggacggcgggcugccucagagcggaagaaucguggucgauuauauggugcagaagucuggcaaaacagggaccauuaccuaccaacggggaauccuccugccccagaagguuuggugcgccuccggccgcagcaaagugauuaaggggucccuuccucugaucggagaagcugacugucuccaugagaaauauggcggccugaacaagucuaagcccuacuacacaggggagcacgccaaagcgauuggaaauugccccaucugggucaagaccccucugaaacucgccaacggcacaaaguauagaccgcccgcuaaacugcuuaaggaacggggguuuuucggagccaucgcuggcuuucuggaagggggcugggagggaaugauugccggcuggcauggguacacgagccacggagcccacggcguggcuguugcggccgaucucaaguccacccaggaggcuaucaauaaaauuacaaagaaccugaauagccuuucugaacuggaggugaaaaaccuccagcgccuguccggggccauggacgagcugcauaaugaaauccucgagcuggaugaaaaggucgacgaccuuagagccgauaccauuagcucucaaaucgagcuggcugugcuccugagcaacgaaggaaucauuaauuccgaggacgagcaccuucuggcccucgaacggaaacugaagaagaugcugggcccuucugcggucgagaucgggaacggcuguuucgaaacaaaacauaagugcaaucagaccugccucgaucgcauugcugccggaacguuugacgugggcgaguucagccugcccaccuuugauucccuuaacaucacagccgcuagccugaaugacgaugggcucgacaaccacaccauucugcuguauuacucuacagccgcuuccagccuugccguuacccucaugaucgcgauuuucguggucuauauggugucuagagauaacguuuccuguagcaucugccuguga

SEQ ID NO: 218491 - RNA, 1758 nt, Artificial Sequence
  derived and/or modified CDS sequence (opt5) from hemagglutinin__InfluenzaB__ABL76573
augaaggccaucauugugcugcucauggucguuaccagcaacgcugacagaaucugcacaggcauuacguccucuaauagcccccacguggugaaaaccgccacacagggggaggucaacgugaccggaguuaucccucugacaaccacaccgaccaagucccauuucgcgaaucuuaaaggcacgaagacccgggggaaacugugucccaagugccucaacuguacagaucuggacguggcucuuggacgcccuaagugcaccggcaauauucccucugccgaagucagcauccugcacgaggugagaccuguuacauccggguguuuucccaucaugcaugaucggaccaaaauucgccaacucccuaaccugcugagaggauacgaacacauccggcucucuacgcauaaugugauuaacgccgagaaggcuccgggcggccccuauaaaaucgggacaagcggauccugcccuaaugucaccaacggcaauggguucuuugccacaauggcuugggccgugcccaagaacgacaauaacaaaaccgcgaccaauagccugacaauugaagugccuuacaucuguacggagggagaggaucagauuaccgucuggggcuuccacucugacaacgaaacacagauggccaaacuuuauggggauuccaagccccagaaguuuaccagcucugcuaacggaguuacaacccacuacgugucccaaaucggcggcuucccgaaucagacggaggacgggggacugccucagagcggccgcaucguggucgauuauauggugcagaagucugggaaaacaggaaccauuaccuaccaaagaggcauccuccugccccagaagguuuggugcgccuccgggcggagcaaagugauuaagggaucccuuccucugaucggcgaagcugacugucuccaugagaaauauggcgggcugaacaagucuaagcccuacuacacaggagagcacgccaaagcgauuggcaauugccccaucugggucaagaccccucugaaacucgccaacgggacaaaguaucgcccgcccgcuaaacugcuuaaggaaagaggauuuuucggcgccaucgcuggguuucuggagggcggaugggaaggcaugauugccggguggcauggauacacgagccacggcgcccacgggguggcuguugcggccgaucucaaguccacccaggaggcuaucaauaaaauuacaaagaaccugaauagccuuucugaacuggaggugaaaaaccuccagcggcuguccggagccauggacgagcugcauaaugaaauccucgagcuggaugaaaaggucgacgaccuucgcgccgauaccauuagcucucaaaucgagcuggcugugcuccugagcaacgaaggcaucauuaauuccgaggacgagcaccuucuggcccucgaaagaaaacugaagaagaugcuggggccuucugcggucgagaucggcaacggauguuucgaaacaaaacauaagugcaaucagaccugccucgaucggauugcugccggcacguuugacgccggggaguucagccugcccaccuuugauucccuuaacaucacagcugccagccugaaugacgauggacucgacaaccacaccauucugcuguauuacucuacagcugccuccagccuugcggugacccucaugaucgccauuuucguuguguauauggucucucgcgauaacguguccuguagcaucugccuguga

SEQ ID NO: 218492 - RNA, 1758 nt, Artificial Sequence; identical to SEQ ID NO: 218491
  derived and/or modified CDS sequence (opt5) from hemagglutinin__InfluenzaB__ABL76584

SEQ ID NO: 218493 - RNA, 1758 nt, Artificial Sequence; identical to SEQ ID NO: 218491
  derived and/or modified CDS sequence (opt5) from hemagglutinin__InfluenzaB__ABL76595

SEQ ID NO: 218494 - RNA, 1758 nt, Artificial Sequence; identical to SEQ ID NO: 218491
  derived and/or modified CDS sequence (opt5) from hemagglutinin__InfluenzaB__ABL76606

SEQ ID NO: 218495 - RNA, 1758 nt, Artificial Sequence
  derived and/or modified CDS sequence (opt5) from hemagglutinin__InfluenzaB__ABL76617
augaaggccaucauugugcugcucauggucguuaccagcaacgcugacagaaucugcacaggcauuacguccucuaauagcccccacguggugaaaaccgccacacagggggaggucaacgugaccggaguuaucccucugacaaccacaccgaccaagucccauuucgcgaaucuuaaaggcacggaaacccgggggaagcugugucccaaaugccucaacuguacagaucuggacguggcucuuggacgcccuaagugcaccggcaauauucccucugccaaggucagcauccugcacgaggugagaccuguuacauccggguguuuucccaucaugcaugaucggaccaaaauucgccaacucccuaaccugcugagaggauacgaacacauccggcucucuacgcauaaugugauuaacgccgagaaggcuccgggcggccccuauaaaaucgggacaagcggauccugcccuaaugucaccaacggcaauggguucuuugccacaauggcuugggccgugcccaagaacgacaauaacaaaaccgcgaccaauagccugacaauugaagugccuuacaucuguacggagggagaggaucagauuaccgucuggggcuuccacucugacaacgaaacacagauggccaaacuuuauggggauuccaagccccagaaguuuaccagcucugcuaacggaguuacaacccacuacgugucccaaaucggcggcuucccgaaucagacggaggacgggggacugccucagagcggccgcaucguggucgauuauauggugcagaagucugggaaaacaggaaccauuaccuaccaaagaggcauccuccugccccagaagguuuggugcgccuccgggcggagcaaagugauuaagggaucccuuccucugaucggcgaagcugacugucuccaugagaaauauggcgggcugaacaagucuaagcccuacuacacaggagagcacgccaaagcgauuggcaauugccccaucugggucaagaccccucugaaacucgccaacgggacaaaguaucgcccgcccgcuaaacugcuuaaggaaagaggauuuuucggcgccaucgcuggguuucuggagggcggaugggaaggcaugauugccggguggcauggauacacgagccacggcgcccacgggguggcuguugcggccgaucucaaguccacccaggaggcuaucaauaaaauuacaaagaaccugaauagccuuucugaacuggaggugaaaaaccuccagcggcuguccggagccauggacgagcugcauaaugaaauccucgagcuggaugaaaaggucgacgaccuucgcgccgauaccauuagcucucaaaucgagcuggcugugcuccugagcaacgaaggcaucauuaauuccgaggacgagcaccuucuggcccucgaaagaaaacugaagaagaugcuggggccuucugcggucgagaucggcaacggauguuucgaaacaaaacauaagugcaaucagaccugccucgaucggauugcugccggcacguuugacgccggggaguucagccugcccaccuuugauucccuuaacaucacagcugccagccugaaugacgauggacucgacaaccacaccauucugcuguauuacucuacagcugccuccagccuugcggugacccucaugaucgccauuuucguuguguauauggucucucgcgauaacguguccuguagcaucugccuguga

SEQ ID NO: 218496 - RNA, 1755 nt, Artificial Sequence
  derived and/or modified CDS sequence (opt5) from hemagglutinin__InfluenzaB__ABL76628
augaaggccaucauugugcugcucauggucguuaccagcaacgcugacagaaucugcacaggcauuacguccucuaauagcccccacguggugaaaaccgccacacagggggaggucaacgugaccggaguuaucccucugacaaccacaccgaccaaguccuacuucgcgaaucuuaaaggcacgcggacccgcgggaagcugugucccgauugccucaacuguacagaccuggauguggcucuuggaagaccuaugugcgucggcaccacacccucugccaaagccagcauucugcaugaagugcggccuguuaccuccggguguuuucccaucaugcacgaccgcacgaagaucagacaacucgcuaaucugcugcggggauaugagaacauucgccucucuacacagaaugugaucgaugccgaaaaggcuccuggcggcccguacagacuggggaccagcggauccugccccaacgccacaagcaaaucuggcuucuuugcgaccauggccugggcugucccuaaggacaauaacaaaaaugccaccaacccccuuacaguggaggugccucauauuuguacggaaggggaggaucagaucaccgucuggggauuccacuccgacaauaagacacagaugaaaaaccuguauggcgauagcaauccccaaaaguuuaccucuuccgcuaacgggguuacaacccauuacgugagccagauuggaggcuucccggaccagacggaggauggcgggcucccucagucuggacggaucguggucgacuauaugaugcaaaagcccggcaaaacagggaccauuguguaccagcgcggaguucugcuuccucagaagguguggugcgccuccggcagaagcaaagucaucaaggggucccugccccucaucggagaagcggauugucugcacgagaaauauggcggccugaacaagucuaaacccuacuacaccggggaacacgccaaggcuauuggaaauugcccuaucugggugaagacaccgcucaaacuggccaacggcaccaaguaucggcccccugcuaaacuucugaaggagcgcggguuuuucggagccauugccggcuuucucgaagggggcugggaaggaaugaucgcuggcuggcauggguacacaagccacggagcgcauggcguugccguggcugccgaccugaaauccacgcaggaggccauuaauaagaucaccaagaaccuuaauagccugucugaacucgaggucaaaaaccugcaaagacuguccggggcuauggacgaacuccacaaugagauccuggagcuugaugaaaagguggacgaucugcgggccgacacaauuagcucucagaucgagcucgcgguccugcuuagcaacgaaggaauuaucaauuccgaggaugaacaucugcucgcucuggagcgcaaacugaagaaaaugcucggccccucugccguggacauugggaacggcuguuucgagaccaagcacaagugcaaucagacaugccuggauagaaucgccgcuggaaccuuuaacgccggcgaguucagccuuccuacguuugacucccugaauaucaccgcugccagccucaacgaugacgggcuggauaaucacacaauucugcuuuauuacucuaccgcggccuccagccucgcuguuacacugaugcuggccaucuucauuguguauauggucucucgggacaacguguccuguagcaucugccucuga

SEQ ID NO: 218497 - RNA, 1755 nt, Artificial Sequence
  derived and/or modified CDS sequence (opt5) from hemagglutinin__InfluenzaB__ABL76639
augaaggccaucauugugcugcucauggucguuaccagcaacgcugacagaaucugcacaggcauuacguccucuaauagcccccacguggugaaaaccgccacacagggggaggucaacgugaccggaguuaucccucugacaaccacaccgaccaaguccuacuucgcgaaucuuaaaggcacgcggacccgcgggaagcugugucccgauugccucaacuguacagaccuggauguggcucuuggaagaccuaugugcgucggcaccacacccucugccaaagccagcauucugcaugaagugcggccuguuaccuccggguguuuucccaucaugcacgaccgcacgaagaucagacaacucgcuaaucugcugcggggauaugagaacauucgccucucuacacagaaugugaucgaugccgaaaaggcuccuggcggcccguacagacuggggaccagcggauccugccccaacgccacaagcaaaucuggcuucuuugcgaccauggccugggcugucccuaaggacaauaacaaaaaugccaccaacccccuuacaguggaggugccuuauauuuguacggaaggggaggaucagaucaccgucuggggauuccauuccgacaauaagacacagaugaaaaaccuguacggcgauagcaauccccaaaaguuuaccucuuccgcuaacgggguuacaacccacuaugugagccagauuggaggcuucccggaccagacggaggauggcgggcucccucagucuggacggaucguggucgacuacaugaugcaaaagcccggcaaagccgggacaauuguguaucagcgcggaguucugcuuccucagaagguguggugcgcguccggcagaagcaaagucaucaaggggucccugccccucaucggagaagccgauugucugcaugagaaauacggcggccugaacaagucuaaacccuacuauaccggggaacacgcuaaggccauuggaaauugcccuaucugggugaagaccccgcucaaacuggcuaacggcacaaaguaccggcccccugccaaacuucugaaggagcgcggguuuuucggagccauugcuggcuuucucgaagggggcugggaaggaaugaucgcgggcuggcacggguauaccagccauggagcccacggcguugcuguggccgccgaccugaaauccacacaggaggcuauuaauaagaucacgaagaaccuuaauagccugucugaacucgaggucaaaaaccugcaaagacuguccggggccauggacgaacuccauaaugagauccuggagcuugaugaaaagguggacgaucugcgggcggacaccauuagcucucagaucgagcucgcuguccugcuuagcaacgaaggaauuaucaauuccgaggaugaacaucugcucgcccuggagcgcaaacugaagaaaaugcucggccccucugccguggacauugggaacggcuguuucgagacaaagcacaagugcaaucagaccugccuggauagaaucgcugccggaacauuuaacgcuggcgaguucagccuuccuaccuuugacucccugaauaucacggccgcgagccucaacgaugacgggcuggauaaucacaccauucugcuuuacuauucuacagccgcuuccagccucgccguuacccugaugcuggcuaucuucauuguguacauggucucucgggacaacguguccuguagcaucugccucuga

SEQ ID NO: 218498 - RNA, 1755 nt, Artificial Sequence
  derived and/or modified CDS sequence (opt5) from hemagglutinin__InfluenzaB__ABL76683
augaaggccaucauugugcugcucauggucguuaccagcaacgcugacagaaucugcacaggcauuacguccucuaauagcccccacguggugaaaaccgccacacagggggaggucaacgugaccggaguuaucccucugacaaccacaccgaccaaguccuacuucgcgaaucuuaaaggcacgcggacccgcgggaagcugugucccgauugccucaacuguacagaccuggauguggcucuuggaagaccuaugugcgucggcaccacacccucugccaaagccagcauucugcaugaagugcggccuguuaccuccggguguuuucccaucaugcacgaccgcacgaagaucagacaacucgcuaaucugcugcggggauaugagaacauucgccucucuacacagaaugugaucgaugccgaaaaggcuccuggcggcccguacagacuggggaccagcggauccugccccaacgccacaagcaaaucuggcuucuuugcgaccauggccugggcugucccuaaggacaauaacaaaaaugccaccaacccccuuacaguggaggugccuuauauuuguacggaaggggaggaucagaucaccgucuggggauuccauuccgacaauaagacacagaugaaaaaccuguacggcgauagcaauccccaaaaguuuaccucuuccgcuaacgggguuacaacccacuaugugagccagauuggaggcuucccggaccagacggaggauggcgggcucccucagucuggacggaucguggucgacuacaugaugcaaaagcccggcaaaacagggaccauuguguaucagcgcggaguucugcuuccucagaagguguggugcgccuccggcagaagcaaagucaucaaggggucccugccccucaucggagaagcggauugucugcaugagaaauacggcggccugaacaagucuaaacccuacuauaccggggaacacgccaaggcuauuggaaauugcccuaucugggugaagacaccgcucaaacuggccaacggcaccaaguaccggcccccugcuaaacuucugaaggagcgcggguuuuucggagccauugccggcuuucucgaagggggcugggaaggaaugaucgcuggcuggcacggguauacaagccauggagcgcacggcguugccguggcugccgaccugaaauccacgcaggaggccauuaauaagaucaccaagaaccuuaauagccugucugaacucgaggucaaaaaccugcaaagacuguccggggcuauggacgaacuccauaaugagauccuggagcuugaugaaaagguggacgaucugcgggccgacacaauuagcucucagaucgagcucgcgguccugcuuagcaacgaaggaauuaucaauuccgaggaugaacaucugcucgcucuggagcgcaaacugaagaaaaugcucggccccucugccguggacauugggaacggcuguuucgagaccaagcacaagugcaaucagacaugccuggauagaaucgccgcuggaaccuuuaacgccggcgaguucagccuuccuacguuugacucccugaauaucaccgcugccagccucaacgaugacgggcuggauaaucacacaauucugcuuuacuauucuaccgcggccuccagccucgcuguuacacugaugcuggccaucuucauuguguacauggucucucgggacaacguguccuguagcaucugccucuga

SEQ ID NO: 218499 - RNA, 1752 nt, Artificial Sequence
  derived and/or modified CDS sequence (opt5) from hemagglutinin__InfluenzaB__ABL76694
augaaggccaucauugugcugcucauggucguuaccagcaacgcugacagaaucugcacaggcauuacguccucuaauagcccccacguggugaaaaccgccacacagggggaggucaacgugaccggaguuaucccucugacaaccacaccgaccaagucccauuucgcgaaucuuaaaggcacgaagacccgggggaaacugugucccaacugccucaauuguacagaucuggacguggcucuuggacgcccuaugugcgucggcaccacacccucugccaaggccagcauucugcacgaagugagaccuguuaccuccggguguuuucccaucaugcaugaucggacgaagauccgccaacucccuaaccugcugagaggauacgagaauauucggcucucuacacagaacgugaucaaugcugaacgcgccccgggcggccccuauagacuggggaccagcggauccugcccuaacgucacaagccgggacggcuucuuugcuaccauggccugggcggugccccgcgauaauaaaaccgccacaaacccucuuacgguggagguccccuacauuuguaccaagggggaagaccagaucacaguuuggggauuccacucugauaauaaaacccagaugaagaaccuguauggcgacuccaauccgcaaaaauuuacaagcucugcuaacggggugaccacgcauuacgugucccagauuggaggcuucccuaaccagacagaggauggcgggcucccccagagcggaagaaucgucguggacuauaugguucaaaagccuggcaagaccgggaccauuguguaccagcggggaguccugcuuccccagaaaguguggugcgccucuggccgcuccaagguuaucaaagggagccugccccucaucggagaggcugauugucugcacgaaaaguauggcggccugaauaaauccaagccuuacuacacaggggagcacgccaaagcgauuggaaacugcccgaucugggugaagacaccccucaagcuggccaauggcaccaaauauagaccucccgcuaagcugcugaaagaacggggguuuuucggagccauugcuggcuuucucgaagggggcugggagggaaugaucgccggcuggcauggguacacgucucacggagcccauggcgucgcuguggcggccgaccuuaagagcacccaggaggcuauuaacaaaaucacaaagaaucuuaacucccugagcgagcucgaagucaagaaucugcaacgccugucuggggccauggaugagcuccacaacgaaauccuggagcuugacgagaaaguggacgaucugagagccgacaccauuuccagccagaucgaacucgcuguucugcuuucuaaugagggaauuaucaacagcgaagaugagcaucugcucgcccuggaacggaagcugaaaaagaugcucggcccuuccgcgguggacauugggaauggcuguuucgagacaaaacacaagugcaaccagaccugccuggauagaaucgcugccggaacguuuaaugccggcgaguucucucuucccaccuuugacagccugaacaucacagcugccucccucaaugaugacgggcuggauaaccacaccauucugcuuuauuacagcacagcugccucuucccucgcggucacccugaugaucgccauuuucaucguguauaugguuagccgcgacaacgugucuuguuccauuugccuguga

SEQ ID NO: 218500 - RNA, 1758 nt, Artificial Sequence
  derived and/or modified CDS sequence (opt5) from hemagglutinin__InfluenzaB__ABL76716
augaaggccaucauugugcugcucauggucguuaccagcaacgcugacagaaucugcacaggcauuacguccucuaauagcccccacguggugaaaaccgccacacagggggaggucaacgugaccggaguuaucccucugacaaccacaccgaccaagucccauuucgcgaaucuuaaaggcacggaaacccgggggaagcugugucccaaaugccucaacuguacagaucuggacguggcucuuggacgcccuaagugcaccggcaauauucccucugccagagucagcauccugcacgaggugcggccuguuacauccggguguuuucccaucaugcaugaucgcaccaagauuagacaacucccuaaccugcugcggggauacgaacacauccgccucucuacgcauaaugugauuaacgccgagaaugcuccgggcggccccuauaaaaucgggacaagcggauccugcccuaacgucaccaauggcaacggguucuuugccacaauggcuugggccgugcccaagaaugacaacaauaaaaccgcgaccaacagccugacaauugaagugccuuacaucuguacggagggagaggaucagauuaccgucuggggcuuccacucugacaacgaaacacagauggccaaacuuuauggggauuccaagccccagaaguuuaccagcucugcuaauggaguuacaacccacuacgugucccaaaucggcggcuucccgaaccagacggaggacgggggacugccucagagcggcagaaucguggucgauuauauggugcagaagucugggaaaacaggaaccauuaccuaccaacggggcauccuccugccccagaagguuuggugcgccuccgggcgcagcaaagugauuaagggaucccuuccucugaucggcgaagcugacugucuccaugagaaauauggcgggcugaauaagucuaaacccuacuacacaggagagcacgccaaggcgauuggcaacugccccaucugggucaagaccccucugaaacucgugaaugggacaaaguauagaccgcccgccaaacugcuuaaggaacggggauuuuucggcgcuaucgccggguuucuggagggcggaugggaaggcaugauugcuggguggcauggauacacgagccacggcgcccacgggguugccguggcugcggaucucaaauccacccaggaggccaucaacaagauuacaaagaaucugaacagccuuucugaacuggaggucaaaaaucuccagcgccuguccggagcuauggacgagcugcauaacgaaauccucgagcuggaugaaaagguggacgaccuuagagccgauaccauuagcucucaaaucgagcuggccguccuccugagcaaugaaggcaucauuaacuccgaggacgagcaccuucuggcucucgaacggaaacugaagaaaaugcuggggccuucugccguggagaucggcaauggauguuucgaaacaaagcauaagugcaaccagaccugccucgaucgcauugcggcuggcacguuugacgccggggaguucagccugcccaccuuugauucccuuaauaucacagccgcuagccugaacgacgauggacucgacaaccacaccauucugcuguauuacucuacagccgcuuccagccuugccguuacccucaugaucgcgauuuucguggucuauauggugucuagagauaauguuuccuguagcaucugccuguga

SEQ ID NO: 218501 - RNA, 1755 nt, Artificial Sequence
  derived and/or modified CDS sequence (opt5) from hemagglutinin__InfluenzaB__ABL76760
augaaggccaucauugugcugcucauggucguuaccagcaacgcugacagaaucugcacaggcauuacguccucuaauagcccccacguggugaaaaccgccacacagggggaagucaacgugaccggaguuaucccucugacaaccacaccgaccaagucccauuucgcgaaucuuaaaggcacgaagacccgggggaaacugugucccacaugccucaacuguaccgaucuggacguggcucuuggacgcccuaugugcgucggcgugacacccucugccaaggccagcauucugcacgaaguuagaccugugaccuccggguguuuucccaucaugcaugaucggacgaagauccgccaacucccuaaucugcugagaggauacgagaaaauucggcucucuacacagaacgucaucaaugcugaaaaggccccgggcggccccuaucgccuggggaccagcggauccugcccuaacgcuacaagcagaucuggcuucuuugccaccauggcgugggccgugccccgggacaauaacaaaaccgcuacaaauccucuuacgauugaggugccccacaucuguaccaaggaagaggaucagauuacagucuggggguuccauuccgacaacaaaacccagaugaagaaucuguacggagauagcaacccgcaaaaguuuacaucuuccgccaauggcguuaccacgcacuaugugagccagaucgggggauucccugaccagacagaggauggcggccucccccagucugggcgcauuguggucgacuacauggugcaaaaaccuggaaagaccggcaccaucguuuaucagagagggauccugcuuccccagaaaguguggugcgcuuccggacggagcaaggucauuaaaggcucccugccccucaucggggaagccgauugucugcacgagaaguacggaggccugaacaaaucuaagccuuauuacacaggcgaacaugcgaaggccauugggaacugcccgaucugggugaaaacaccccucaagcuggcuaauggaacaaaauaccgcccucccgccaaacuucugaaggagagaggcuuuuucggggcuauugccggauuucucgagggcgggugggaaggcaugaucgccggauggcacggcuauacgagccauggggcucacggaguugcgguggccgcugaccugaaguccacccaggaggccaucaacaagauuaccaaaaaucuuaacagccugucugaacucgaggucaagaaucugcaacggcuguccggcgccauggaugaacuccacaacgagauccuggagcuugacgaaaaaguggacgaucugcgcgcugacaccauuagcucucagaucgagcucgccguccugcuuagcaaugaagggauuaucaacuccgaggaugaacaucugcucgcgcuggagagaaagcugaaaaagaugcucggaccuucugcuguggacaucggcaauggguguuucgagacaaagcacaaaugcaaccagaccugccuggaucggauugccgccggcacguuugacgcuggagaguucagccuucccaccuuugauucccugaauaucacagccgcuagccucaacgacgauggccuggacaaucauaccauucugcuuuacuauucuacagccgcguccagccucgccguuacccugaugaucgcuauuuucaucguguacaugauuucuagagauaacgucuccuguagcaucugccuguga

SEQ ID NO: 218502 - RNA, 1755 nt, Artificial Sequence
  derived and/or modified CDS sequence (opt5) from hemagglutinin__InfluenzaB__ABL76771
augaaggccaucauugugcugcucauggucguuaccagcaacgcugacagaaucugcacaggcauuacguccucuaauagcccccacguggugaaaaccgccacacagggggaagucaacgugaccggaguuaucccucugacaaccacaccgaccaagucccauuucgcgaaucuuaaaggcacgaagacccgggggaaacugugucccacaugccucaacuguaccgaucuggacguggcucuuggacgcccuaugugcgucggcgugacacccucugccaaggccagcauucugcacgaaguuagaccugugaccuccggguguuuucccaucaugcaugaucggacgaagauccgccaacucccuaaucugcugagaggauacgagaaaauucggcucucuacacagaacgucaucaaugcugaaaaggccccgggcggccccuaucgccuggggaccagcggauccugcccuaacgcuacaagcagaucuggcuucuuugccaccauggcgugggccgugccccgggacaauaacaaaaccgcuacaaauccucuuacgauugaggugccccacaucuguaccaaggaagaggaucagauuacagucuggggguuccauuccgacgauaaaacccagaugaagaaccuguacggagacagcaauccgcaaaaguuuacaucuuccgccaacggcguuaccacgcacuaugugagccagaucgggggauucccugaucagacagaggacggcggccucccccagucugggcgcauuguggucgauuacauggugcaaaaaccuggaaagaccggcaccaucguuuaucagagagggauccugcuuccccagaaaguguggugcgcuuccggacggagcaaggucauuaaaggcucccugccccucaucggggaagccgacugucugcacgagaaguacggaggccugaauaaaucuaagccuuauuacacaggcgaacaugcgaaggccauugggaacugcccgaucugggugaaaacaccccucaagcuggcuaacggaacaaaauaccgcccucccgccaaacuucugaaggagagaggcuuuuucggggcuauugccggauuucucgagggcgggugggaaggcaugaucgccggauggcacggcuauacgagccauggggcucacggaguugcgguggccgcugaucugaaguccacccaggaggccaucaauaagauuaccaaaaaccuuaauagccugucugaacucgaggucaagaaccugcaacggcuguccggcgccauggacgaacuccacaaugagauccuggagcuugacgaaaaaguggaugaccugcgcgcugauaccauuagcucucagaucgagcucgccguccugcuuagcaacgaagggauuaucaauuccgaggacgaacaucugcucgcgcuggagagaaagcugaaaaagauccucggaccuucugcuguggauauuggcaacggguguuucgagacaaagcacaaaugcaaucagaccugccuggaccggaucgccgccggcacguuugaugcuggagaguucagccuucccaccuuugacucccugaacauuacagccgcuagccucaaugaugacggccuggauaaccauaccauccugcuuuacuauucuacagccgcguccagccucgccguuacccugaugauugcuaucuucauuguguacaugaucucuagagacaaugucuccuguagcaucugccuguga

SEQ ID NO: 218503 - RNA, 1755 nt, Artificial Sequence
  derived and/or modified CDS sequence (opt5) from hemagglutinin__InfluenzaB__ABL76782
augaaggccaucauugugcugcucauggucguuaccagcaacgcugacagaaucugcacaggcauuacguccucuaauagcccccacguggugaaaaccgccacacagggggaagucaacgugaccggaguuaucccucugacaaccacaccgaccaagucccauuucgcgaaucuuaaaggcacgaagacccgggggaaacugugucccacaugccucaacuguaccgaucuggacguggcucuuggaucuccuaugugcgucggcauuacacccagcgccaaggccuccauccugcacgaagugcgcccuguuaccucuggguguuuucccaucaugcaugauagaacgaagauucggcaacucccuaaucugcugcgcggauacgagaaaaucagacucagcacacagaacgugauuaauaucgaaaaggcuccgggcggccccuaucggcuggggaccuccggaagcugcccuaacgccacaucucgcuccggcuucuuugcuaccauggccugggcgguccccagagacaauaacaaaaccgccacaaauccucuuacgguggaggugccccacauuuguaccaaggaagaggaucagaucacagucuggggguuccauagcgacaacaaagcucagaugaagaaucuguacggagauucuaacccgcaaaaguuuaccuccagcgccaauggcguuacaacccacuaugugucucagauugggggauucccugaccagacggaggauggcggccucccccaguccgggcggaucguggucgacuacauggugcaaaaaccuggaaagacaggcaccaucguuuaucagcgcgggauucugcuuccccagaaaguguggugcgcuagcggaagauccaaggucaucaaaggcucucugccccucauuggggaagccgauugucugcacgagaaguacggaggccugaacaaaagcaagccuuauuacaccggcgaacaugcgaaggccaucgggaacugcccgauuugggugaaaacaccccucaagcuggcuaauggaaccaaauaccggccucccgccaagcugcugaaagagcgcggcuuuuucggggcuaucgccggauuucucgagggcgggugggaaggcaugaucgccggauggcacggcuauacaucccauggggcucacggaguugcgguggccgcugaccuuaagagcacgcaggaggccauuaacaagaucaccaaaaaucuuaacucucuguccgaacucgaggucaagaaucugcaaagacugagcggcgccauggaugaacuccacaacgagauucuggagcuugacgaaaaaguggacgaucugcgggcugacacaaucucuagccagauugagcucgccguccugcuuuccaaugaagggaucaucaacucugaggaugaacaucugcucgcgcuggagcgcaagcugaaaaagaugcucggaccuagcgcuguggacauuggcaauggguguuucgagaccaagcacaaaugcaaccagacaugccuggauagaaucgccgccggcaccuuuaaugcuggagaguucucccuucccacguuugacagccugaacauuaccgccgcuucucucaaugaugacggccuggauaaccauacaauccugcuuuacuauuccaccgccgcgagcucucucgccguuacacugaugauugcuaucuucauuguguacaugaucucccgggacaaugucagcuguuccaucugccuguga

SEQ ID NO: 218504 - RNA, 1755 nt, Artificial Sequence; identical to SEQ ID NO: 218477
  derived and/or modified CDS sequence (opt5) from hemagglutinin__InfluenzaB__ABL76793

SEQ ID NO: 218505 - RNA, 1755 nt, Artificial Sequence; identical to SEQ ID NO: 218477
  derived and/or modified CDS sequence (opt5) from hemagglutinin__InfluenzaB__ABL76815

SEQ ID NO: 218506 - RNA, 1758 nt, Artificial Sequence
  derived and/or modified CDS sequence (opt5) from hemagglutinin__InfluenzaB__ABL76826
augaaggccaucauugugcugcucauggucguuaccagcaacgcugacagaaucugcacaggcauuacguccucuaauagcccccacguggugaaaaccgccacacagggggaggucaacgugaccggaguuaucccucugacaaccacaccgaccaagucccauuucgcgaaucuuaaaggcacgaagacccgggggaaacugugucccgaaugccucaacuguacagaucuggacguggcucuuggacgcccuaagugcaccggcaauauucccucugccaaggucagcauccugcacgaggugagaccuguuacauccggguguuuucccaucaugcaugaucggaccaaaauucgccaacucccuaaccugcugagaggauacgaacacauccggcucucuacgcauaaugugauuaacgccgagaaggcuccgggcggccccuauaaaaucgggacaagcggauccugcccuaaugucaccaacggcaauggguucuuugccacaauggcuugggccgugcccaagaacgacaauaacaaaaccgcgaccaauagccugacaauugaagugccuuacaucuguacggagggagaggaucagauuaccgucuggggcuuccacucugacaacgaaacacagauggccaaacuuuauggggauuccaagccccagaaguuuaccagcucugcuaacggaguuacaacccacuacgugucccaaaucggcggcuucccgaaucagacggaggacgggggacugccucagagcggccgcaucguggucgauuauauggugcagaagucugggaaaacaggaaccauuaccuaccaaagaggcauccuccugccccagaagguuuggugcgccuccgggcggagcaaagugauuaagggaucccuuccucugaucggcgaagcugacugucuccaugagaaauauggcgggcugaacaagucuaagcccuacuacacaggagagcacgccaaagcgauuggcaauugccccaucugggucaagaccccucugaaacucgccaacgggacaaaguaucgcccgcccgcuaaacugcuuaaggaaagaggauuuuucggcgccaucgcuggguuucuggagggcggaugggaaggcaugauugccggguggcauggauacacgagccacggcgcccacgggguggcuguugcggccgaucucaaguccacccaggaggcuaucaauaaaauuacaaagaaccugaauagccuuucugaacuggaggugaaaaaccuccagcggcuguccggagccauggacgagcugcauaaugaaauccucgagcuggaugaaaaggucgacgaccuucgcgccgauaccauuagcucucaaaucgagcuggcugugcuccugagcaacgaaggcaucauuaauuccgaggacgagcaccuucuggcccucgaaagaaaacugaagaagaugcuggggccuucugcggucgagaucggcaacggauguuucgaaacaaaacauaagugcaaucagaccugccucgaucggauugcugccggcacguuugacgccggggaguucagccugcccaccuuugauucccuuaacaucacagcugccagccugaaugacgauggacucgacaaccacaccauucugcuguauuacucuacagcugccuccagccuugcggugacccucaugaucgccauuuucguuguguauauggucucucgcgauaacguguccuguagcaucugccuguga

SEQ ID NO: 218507 - RNA, 1758 nt, Artificial Sequence
  derived and/or modified CDS sequence (opt5) from hemagglutinin__InfluenzaB__ABL76837
augaaggccaucauugugcugcucauggucguuaccagcaacgcugacagaaucugcacaggcauuacguccucuaauagcccccacguggugaaaaccgccacacagggggaggucaacgugaccggaguuaucccucugacaaccacaccgaccaagucccauuucgcgaaucuuaaaggcacgaagacccgggggaaacugugucccaagugccucaacuguacagaucuggacguggcucuuggacgcccuaagugcaccggcaauauucccucugccgaagucagcauccugcacgaggugagaccuguuacauccggguguuuucccaucaugcaugaucggaccaaagugcgccaacucccuaaccugcugagaggauacgaacacauucggcucucuacgcauaaugucaucaacgccgagaaggcuccgggcggccccuauaaaauugggacaagcggauccugcccuaaugugaccaacggcaauggguucuuugccacaauggcuugggccgugcccaagaacgacaauaacaaaaccgcgaccaauagccugacagucgaaguuccuuacaucuguacggagggagaggaucagauuaccguguggggcuuccacucugacuccgaaacacagauggccaaacuuuauggggauagcaagccccagaaauuuaccucuuccagcaacggagugacaacccacuacgucucucaaaucggcggcuucccgaaccagacggaggacgggggacugccucaguccggccgcauugugguugauuauauggugcaaaagagcgggaaaacaggaaccaucaccuaccagagaggcauccuccugccccagaaggucuggugcgcuuccgggcggucuaaagugauuaagggaagccuuccucugaucggcgaagccgacugucuccaugagcgcuauggcgggcugaauaaauccaagcccuacuacacaggagagcacgcuaaggccauuggcaacugccccaucuggguuaaaaccccucugaagcucgcgaaugggacaaaauauagaccgcccgccaagcugcuuaaagaacggggauuuuucggcgcuauugccggguuucuggagggcggaugggaaggcaugaucgcuggguggcauggauacacgagccacggcgcccacgggguggccgucgcugcggaucucaagucuacccaggaggccaucaacaagauuacaaagaaucugaacucccuuagcgaacuggaggugaagaaucuccagcgccugucuggagcuauggacgagcugcauaacgaaauccucgagcuggaugaaaaagucgacgaccuuagagccgauaccauuagcucccaaaucgagcuggccgugcuccugucuaaugaaggcauuaucaacagcgaggacgagcaccuucuggcucucgaacggaagcugaaaaagaugcuggggccuuccgccguugagaucggcaauggauguuucgaaacaaagcauaaaugcaaccagaccugccucgaucgcauugcggcuggcacguuugacgccggggaguucagccugcccaccuuugauucucuuaauaucacagccgcuucccugaacgacgauggacucgacaaucacaccauucugcuguauuacagcacagccgcuucuucccuugccgugacccucaugaucgcgauuuucgucguguauaugguuagcagagauaacguguccuguucuaucugccuguga

SEQ ID NO: 218508 - RNA, 1755 nt, Artificial Sequence
  derived and/or modified CDS sequence (opt5) from hemagglutinin__InfluenzaB__ABL76848
augaaggccaucauugugcugcucauggucguuaccagcaacgcugacagaaucugcacaggcauuacguccucuaauagcucccacguggugaaaaccgccacacagggggaagucaacgugaccggagcgaucccccugacaaccacaccuaccaagucucauuucgcuaaucuuaaaggcacgaagacccgggggaaacuguguccgacaugccucaacuguaccgaucuggacguugcccuuggacgccccaugugcgugggcauuacaccucccgccaaggcuagcauccugcacgaagucagaccugugaccuccggguguuuucccaucaugcaugaucggacgaagauucgccaacucccuaaucugcugagaggauacgagaaaauccggcucucuacacagaacguuauuaaugccgaaaaggcuccgggcggccccuaucgccuggggaccagcggauccugcccuaacgccacaagcaaaucuggcuucuuugcgaccauggccugggcugugcccagagacaauaacaagaccgccacaaauccucuuacggucgaggugccccacaucuguaccaaagaagaggaucagauuacaguguggggguuccauuccgacaacaagacccagaugaagaaucuguacggagauagcaacccgcaaaaauuuacaucuuccgcuaauggcaucaccacgcacuaugucagccagauugggggauucccugaccagacagaggauggcggccucccccagucugggcggaucguuguggacuacauggugcaaaagccuggaaaaaccggcaccaucgucuaucagcgcgggauucugcuuccccagaagguguggugcgccuccggaagaagcaaaguuaucaagggcucccugccccucauuggggaagcggauugucugcacgagaaauacggaggccugaacaagucuaagccuuauuacacaggcgaacaugccaaagcuaucgggaacugcccgauuugggugaagacaccccucaaacuggccaauggaaccaaguaccggccucccgcuaaacuucugaaggagcgcggcuuuuucggggccaucgccggauuucucgagggcgggugggaaggcaugaucgcuggauggcacggcuauacgagccauggggcgcacggagucgccguggcugccgaccugaaguccacccaggaggccauuaacaaaaucacaaagaaucuuaacagccugucugaacucgagguuaaaaaucugcaaagacuguccggcgcuauggaugaacuccacaacgagauucuggagcuugacgaaaagguggacgaucugcgggccgacaccaucagcucucagauugagcucgcgguccugcuuagcaaugaagggaucaucaacuccgaggaugaacaucugcucgcucuggagcgcaaacugaagaagaugcucggaccuucugccguggacauuggcaauggguguuucgagacaaaacacaagugcaaccagaccugccuggauagaaucgccgcuggcacguuuaaugccggagaguucagccuucccaccuuugacucccugaacauuacagcugccagccucaaugaugacggccuggauaaccauaccauccugcuuuacuauucuacagcggccuccagccucgcugucacccugaugauugccaucuucauuguguacaugaucucucgggacaauguuuccuguagcaucugccuguga

SEQ ID NO: 218509 - RNA, 1755 nt, Artificial Sequence; identical to SEQ ID NO: 218477
  derived and/or modified CDS sequence (opt5) from hemagglutinin__InfluenzaB__ABL76859

SEQ ID NO: 218510 - RNA, 1755 nt, Artificial Sequence
  derived and/or modified CDS sequence (opt5) from hemagglutinin__InfluenzaB__ABL76881
augaaggccaucauugugcugcucauggucguuaccagcaacgcugacagaaucugcacaggcauuacguccucuaauagcccccacguggugaaaaccgccacacagggggaggucaacgugaccggaguuaucccucugacaaccacaccgaccaagucccauuucgcgaaucuuaaaggcacgcggacccgcgggaagcugugucccgauugccucaacuguacagaccuggauguggcucuuggaagaccuaugugcgucggcaccacacccucugccaaagccagcauucugcacgaagugcggccuguuaccuccggguguuuucccaucaugcaugaccgcacgaagaucagacaacucccuaaucugcugcggggauacgagaacauucgccucucuacacagaaugugaucgaugcugaaaaggccagcggcggcccguauagacuggggaccuccggaagcugccccaacgcuacaucuaaauccggcuucuuugccaccauggcgugggccgucccuaaggacaauaacaaaaaugcuaccaacccccuuacaguggaggugccuuacauuuguacggaaggggaggaucagaucaccgucuggggauuccacagcgacaaugagacacagaugaagaaccuguauggcgauucuaauccccaaaaauuuaccuccagcgccaacgggguuacaacccauuacgugucucagauuggaggcuucccggaccagaaggaagauggcgggcucccucaguccggacggaucguggucgacuauauggugcaaaagcccggcaaaacggggacaauuguuuaccagcgcggagugcugcuuccucagaaggucuggugcgcuagcggcagauccaaagugaucaaggggucucugccccucaucggagaggccgauugucugcacgaaaaauauggcggccugaacaagagcaaacccuacuacaccggggagcacgcgaaggccauuggaaauugcccuaucuggguuaagaccccgcucaaacuggcuaacggcacaaaguaucggcccccugccaaacuucugaaggagcgcggguuuuucggagcuauugccggcuuucucgaagggggcugggagggaaugaucgccggcuggcauggguacaccucccacggagcucauggcguggcggucgccgcugaccugaaaagcacacaggaagccauuaauaagaucacgaagaaccuuaauucucuguccgagcucgaagugaaaaaccugcaaagacugagcggggccauggacgagcuccacaaugagauccuggaacuugaugagaaggucgacgaucugcgggcugacaccauuucuagccagaucgaacucgccgugcugcuuuccaacgagggaauuaucaauucugaagaugagcaucugcucgcgcuggagcgcaaacugaagaaaaugcucggccccagcgcuguugacauugggaacggcuguuucgaaacaaagcacaagugcaaucagaccugccuggauagaaucgccgccggaacauuuaacgcuggcgaguucucccuuccuaccuuugacagccugaauaucacggccgcuucucucaacgaugacgggcuggauaaucacaccauucugcuuuauuacuccacagccgcgagcucucucgccgugacccugaugcuggcuaucuucauugucuauauggugucccgggacaacguuagcuguuccaucugccucuga

SEQ ID NO: 218511 - RNA, 1755 nt, Artificial Sequence
  derived and/or modified CDS sequence (opt5) from hemagglutinin__InfluenzaB__ABL76892
augaaggccaucauugugcugcucauggucguuaccagcaacgcugacagaaucugcacaggcauuacguccucuaauagcccccacguggugaaaaccgccacacagggggaggucaacgugaccggaguuaucccucugacaaccacaccgaccaagucccauuucgcgaaucuuaaaggcacgcggacccgcgggaagcugugucccgauugccucaacuguacagaccuggauguggcucuuggaagaccuaugugcgucggcaccacacccucugccaaagccagcauucugcacgaagugcggccuguuaccuccggguguuuucccaucaugcaugaccgcacgaagaucagacaacucccuaaucugcugcggggauacgagaacauucgccucucuacacagaaugugaucgaugcugaaaaggccccgggcggccccuauagacuggggaccagcggauccugcccuaacgcuacaagcaaaucuggcuucuuugccaccauggcgugggccguccccaaggacaauaacaaaaaugcuaccaacccucuuacaguggaggugcccuacgucuguacggaaggggaggaucagauuaccguuuggggauuccacuccgacaauaagacacagaugaaaaaccuguauggcgauagcaauccgcaaaaguuuaccucuuccgccaacggggugacaacccauuacgugagccagaucggaggcuucccugaccagacggaggauggcgggcucccccagucuggacggauugucguggacuauaugguucaaaagccuggcaaaacagggaccaucguguaccagcgcggaguccugcuuccccagaagguguggugcgcuuccggcagaagcaaaguuauuaaggggucccugccccucaucggagaagccgauugucugcacgagaaauauggcggccugaacaagucuaaaccuuacuacaccggggaacacgcgaaggccaucggaaauugcccgauuugggugaagacaccccucaaacuggcuaacggcaccaaguaucggccucccgccaaacuucugaaggagcgcggguuuuucggagcuaucgccggcuuucucgaagggggcugggaaggaaugauugccggcuggcauggguacacaagccacggagcucauggcgucgcgguggccgcugaccugaaauccacgcaggaggccaucaauaagauuaccaagaaccuuaauagccugucugaacucgaggucaaaaaccugcaaagacuguccggggccauggacgaacuccacaaugagauccuggagcuugaugaaaagguggacgaucugcgggcugacacaaucagcucucagauugagcucgccguucugcuuagcaacgaaggaaucauuaauuccgaggaugaacaucugcucgcgcuggagcgcaaacugaagaaaaugcucggcccuucugcuguggacaucgggaacggcuguuucgagaccaagcacaagugcaaucagacaugccuggauagaauugccgccggaaccuuuaacgcuggcgaguucagccuucccacguuugacucccugaauaucaccgccgcuagccucaacgaugacgggcuggauaaucacacaauccugcuuuauuacucuaccgccgcguccagccucgccgucacacugaugcuggcuauuuucaucguguauaugguuucucgggacaacguguccuguagcauuugccucuga

SEQ ID NO: 218512 - RNA, 1755 nt, Artificial Sequence
  derived and/or modified CDS sequence (opt5) from hemagglutinin__InfluenzaB__ABL76903
augaaggccaucauugugcugcucauggucguuaccagcaacgcugacagaaucugcacaggcauuacguccucuaauagcccccacguggugaaaaccgccacacagggggaggucaacgugaccggaguuaucccucugacaaccacaccgaccaaguccuacuucgcgaaucuuaaaggcacgcggacccgcgggaagcugugucccgauugccucaacuguacagaccuggauguggcucuuggaagaccuaugugcgucggcaccacacccucugccaaagccagcauucugcaugaagugcggccuguuaccuccggguguuuucccaucaugcacgaccgcacgaagaucagacaacucccuaaucugcugcggggauaugagaacauucgccucucuacacagagcgugaucgaugcugaaaaggccccgggcggccccuacagacuggggaccuccggaagcugcccuaaugcuacaucuaaauccggcuucuuugccaccauggcgugggccguccccaaggacaacaauaaaaacgcuaccaauccucuuacaguggaggugcccuauauuuguacggaaggggaggaucagaucaccgucuggggauuccauagcgacgauaagacacagaugaaaaaccuguacggcgacucuaauccgcaaaaguuuaccuccagcgccaacgggguuacaacccacuaugugucucagauuggaggcuucccugaucagacggaggacggcgggcucccccaguccggacggaucguggucgauuacaugauucaaaagccuggcaaaacagggaccaucguguaucagcgcggaguucugcuuccccagaagguguggugcgcuagcggcagauccaaagucaucaaggggucucugccccucauuggagaagccgacugucugcaugagaaauacggcggccugaauaagagcaaaccuuacuauaccggggaacacgcgaaggccaucggaaacugcccgauuugggugaagacaccccucaaacuggcuaacggcaccaaguaccggccucccgccaaacuucugaaggagcgcggguuuuucggagcuaucgccggcuuucucgaagggggcugggaaggaaugauugccggcuggcacggguauacaucccauggagcucacggcguugcgguggccgcugaccugaaaagcacgcaggaggccaucaauaagaucaccaagaaccuuaauucucuguccgaacucgaggucaaaaaccugcaaagacugagcggggccauggaugaacuccauaaugagauucuggagcuugacgaaaagguggaugaccugcgggcugauacaaucucugcccagauugagcucgcgguccugcuuagcaacgaaggaaucauuaauuccgaggacgaacaucugcucgcucuggagcgcaaacugaagaaaaugcucggcccuucugccguggauaucgggaacggcuguuucgagaccaagcacaagugcaaucagacaugccuggacagaaucgccgcuggaaccuuuaacgccggcgaguucagccuucccacguuugauucccugaauauuaccgcugccagccucaacgacgaugggcuggacaaucacacaauccugcuuuacuauucuaccgcggccuccagccucgcuguuacacugaugcuggccauuuucaucguguacauggucucucgggacaacguguccuguagcauuugccucuga

SEQ ID NO: 218513 - RNA, 1758 nt, Artificial Sequence
  derived and/or modified CDS sequence (opt5) from hemagglutinin__InfluenzaB__ABL76914
augaaggccaucauugugcugcucauggucguuaccagcaacgcugacagaaucugcacaggcauuacguccucuaauagcccccacguggugaaaaccgccacacagggggaggucaacgugaccggaguuaucccucugacaaccacaccgaccaagucccauuucgcgaaucuuaaaggcacgaagacccgggggaaacugugucccaagugccucaacuguacagaucuggacguggcucuuggacgcccuaagugcaccggcaauauucccucugccgaagucagcauccugcacgaggugagaccuguuacauccggguguuuucccaucaugcaugaucggaccaaaauucgccaacucccuaaccugcugagaggauacgaacacauccggcucucuacgcauaaugugauuaacgccgagaaggcuccgggcggccccuauaaaaucgggacaagcggauccugcccuaaugucaccaacggcaauggguucuuugccacaauggcuugggccgugcccaagaacgacaauaacaaaaccgcgaccaauagccugacaauugaagugccuuacaucuguacggagggagaggaucagauuaccgucuggggcuuccacucugacaacgaagcccagauggcuaagcuguauggggauuccaagccccagaaauuuacaucuagcuccaacggaguuaccacacacuacgugagccaaaucggcggcuucccgaaucagaccgaggacgggggacugccucagucuggccgcaucguggucgauuauauggugcagaaguccgggaaaacgggaacaauuaccuaccaaagaggcauccuccugccccagaagguuuggugcgccagcgggcgguccaaagugauuaagggaucucuuccucugaucggcgaagcugacugucuccaugagcgcuauggcgggcugaacaaaagcaagcccuacuacaccggagagcacgccaaggcgauuggcaauugccccaucugggucaaaacaccucugaagcucgccaacgggaccaaauauagaccgcccgcuaagcugcuuaaagaacggggauuuuucggcgccaucgcuggguuucuggagggcggaugggaaggcaugauugccggguggcauggauacacaucccacggcgcccacgggguggcuguugcggccgaucucaagagcacgcaggaggcuaucaauaagauuaccaaaaaccuuaauucucuuuccgaacuggaggugaagaaccuccagcgccugagcggagccauggacgagcugcauaaugaaauccucgagcuggaugaaaaagucgacgaccuuagagccgauacaauuucuagccaaaucgagcuggcugugcuccuguccaacgaaggcaucauuaauucugaggacgagcaccuucuggcccucgaacggaagcugaaaaagaugcuggggccuagcgcggucgagaucggcaacggauguuucgaaaccaagcauaaaugcaaucagacaugccucgaucgcauugcugccggcaccuuugacgccggggaguucucccugcccacguuugauagccuuaacaucaccgcugccucucugaaugacgauggacucgacaaccacacaauucugcuguauuacuccaccgcugccagcucucuugcggugacacucaugaucgccauuuucguuguguauauggucuccagagauaacgugagcuguuccaucugccuguga

SEQ ID NO: 218514 - RNA, 1755 nt, Artificial Sequence
  derived and/or modified CDS sequence (opt5) from hemagglutinin__InfluenzaB__ABL76936
augaaggccaucauugugcugcucauggucguuaccagcaacgcugacagaaucugcacaggcauuacguccucuaauagcccccacguggugaaaaccgccacacagggggaagucaacgugaccggaguuaucccucugacaaccacaccgaccaagucccauuucgcgaaucuuaaaggcacgaagacccgggggaaacugugucccacaugccucaacuguaccgaucuggacguggcucuuggacgcccuaugugcgucggcacaacccccucugccaaggccagcauucugcacgaagugagaccuguuacguccggguguuuucccaucaugcaugaucggacaaagauccgccaacucccuaaucugcugagaggauacgagaaaauucggcucucuacccagaacgugaucaaugcugaaaaggccccgggcggccccuaucgccuggggacaagcggauccugcccuaacgcuaccagcagaucuggcuucuuugccaccauggcgugggccgucccccgggacaauaacaaaacagcuacgaauccucuuaccguggaggugcccuacauuuguacaaaggaagaggaucagaucaccgucuggggguuccacuccgacgauaaaacacagaugaagaaccuguauggagacagcaauccgcaaaaguuuaccucuuccgccaacggcguuacgacacauuacgugagccagauugggggauucccugaucagaccgaggacggcggccucccccagucugggcgcaucguggucgauuauauggugcaaaaaccuggaaagaccggcacaauuguuuaccagagaggggugcugcuuccccagaaagucuggugcgcuuccggacggagcaaggugaucaaaggcucccugccccucaucggggaagccgacugucugcacgagaaguauggaggccugaauaaaucuaagccuuacuacaccggcgaacacgcgaaggccauugggaacugcccgaucuggguuaaaacaccccucaagcuggcuaacggaacgaaauaucgcccucccgccaagcugcugaaagagagaggcuuuuucggggcuauugccggauuucucgagggcgggugggaaggcaugaucgccggauggcauggcuacaccagccacggggcucauggaguggcggucgccgcugaucugaaguccacacaggaggccauuaauaagaucaccaaaaaccuuaauagccugucugaacucgaggugaagaaccugcaacggcuguccggcgccauggacgaacuccacaaugagauccuggagcuugacgaaaaagucgaugaccugcgcgcugauacaauuagcucucagaucgagcucgccgugcugcuuagcaacgaagggauuaucaauuccgaggacgaacaccuucucgcgcuggagagaaagcugaaaaagaugcucggaccuucugcuguugauauuggcaacggguguuucgagaccaagcauaaaugcaaucagacgugccuggaccggaucgccgccggcaccuuuaacgcuggagaguucagccuucccacauuugauucccugaauaucaccgccgcuagccucaacgacgauggccuggacaaucacacaauucugcuuuauuacucuaccgccgcguccagccucgccgugacgcugaugaucgcuauuuucaucgucuauauggugucuagagauaacguuuccuguagcauuugccuguga

SEQ ID NO: 218515 - RNA, 1755 nt, Artificial Sequence
  derived and/or modified CDS sequence (opt5) from hemagglutinin__InfluenzaB__ABL76947
augaaggccaucauugugcugcucauggucguuaccagcaacgcugacagaaucugcacaggcauuacguccucuaauagcccccacguggugaaaaccgccacacagggggaagucaacgugaccggagcgaucccucugacaaccacaccgaccaagucccauuucgcuaaucuuaaaggcacgaagacccgggggaaacugugucccacaugccucaacuguaccgaucuggacguugcccuuggacgcccuaugugcgugggcauuacacccucugccaaggcuagcauccugcacgaagucagaccugugaccuccggguguuuucccaucaugcaugaucggacgaagauucgccaacucccuaaucugcugagaggauacgagaaaauccggcucucuacacagaacguuauuaaugccgaaaaggcuccgggcggccccuaucgccuggggaccagcggauccugcccuaacgccacaagcagaucuggcuucuuugcgaccauggccugggcugugccccgggacaauaacaaaaccgccacaaauccucuuacggucgaggugccccacaucuguaccaaggaagaggaucagauuacaguguggggguuccauuccgacgauaaaacccagaugaagaaccuguacggagacagcaauccgcaaaaguuuacaucuuccaccaacggcaucacgacacacuaugucagccagauugggggauucccugaucagaccgaggacggcggccucccccagucugggcgcaucguuguggauuacauggugcaaaaaccuggaaagaccggcacaaucgucuaucagagagggauucugcuuccccagaaaguguggugcgcuuccggacggagcaagguuaucaaaggcucccugccccucauuggggaagccgacugucugcacgagaaguacggaggccugaauaaaucuaagccuuauuacaccggcgaacaugcgaaggccaucgggaacugcccgauuugggugaaaacaccccucaagcuggcuaacggaacgaaauaccgcccucccgccaaacuucugaaggagagaggcuuuuucggggcuaucgccggauuucucgagggcgggugggaaggcaugaucgccggauggcacggcuauaccagccauggggcucacggagucgcgguggccgcugaucugaaguccacacaggaggccauuaauaagaucaccaaaaaccuuaauagccugucugaacucgagguuaagaaccugcaacggcuguccggcgccauggacgaacuccacaaugagauucuggagcuugacgaaaaaguggaugaccugcgcgcugauacaaucagcucucagauugagcucgccguccugcuuagcaacgaagggaucaucaauuccgaggacgaacaucugcucgcgcuggagagaaagcugaaaaagaugcucggaccuucugcuguggauauuggcaacggguguuucgagaccaagcacaaaugcaaucagacgugccuggaccggaucgccgccggcaccuuuaacgcuggagaguucagccuucccacauuugauucccugaauauuaccgccgcuagccucaacgacgauggccuggacaaucauacaauccugcuuuacuauucuaccgccgcguccagccucgccgucacgcugaugauugcuaucuucauuguguacaugaucucuagagauaacguuuccuguagcaucugccuguga

SEQ ID NO: 218516 - RNA, 1758 nt, Artificial Sequence
  derived and/or modified CDS sequence (opt5) from hemagglutinin__InfluenzaB__ABL76958
augaaggccaucauugugcugcucauggucguuaccagcaacgcugacagaaucugcacaggcauuacguccucuaauagcccccacguggugaaaaccgccacacagggggaagucaacgugaccggaguuaucccucugacaaccacaccgaccaagucccauuucgcgaaucuuaaaggcacgaagacccgggggaaacugugucccaagugccucaacuguacagaucuggacguggcucuuggacgcccuaagugcaccggcaauauucccucugccaaagucagcauccugcacgaagugagaccuguuacauccggguguuuucccaucaugcaugaucggaccaagauucgccaacucccuaaccugcugagaggauacgagcacauccggcucucuacgcauaaugugauuaacgccgaaaaagcuccgggcggccccuauaagaucgggacaagcggauccugcccuaaugucaccaacggcaauggguucuuugccacaauggcuugggccgugcccaaaaacgacaauaacaagaccgcgaccaauagccugacaauugaggugccuuacaucuguacggaaggagaggaucagauuaccgucuggggcuuccacucugacaacgaggcccagauggcuaaacuuuauggggauuccaagccccagaaguuuacaagcucugccaacggaguuaccacacacuacgugucccaaaucggcggcuucccgaaucagaccgaagacgggggacugccucagagcggccgcaucguggucgauuauauggugcagaaaucugggaagacgggaacaauuaccuaccaaagaggcauccuccugccccagaaaguuuggugcgcuuccgggcggagcaaggugauuaaaggaucccuuccucugaucggcgaggccgacugucuccaugaaaaguauggcgggcugaacaagucuaaacccuacuacaccggagagcacgcgaaggccauuggcaauugccccaucugggucaaaacaccucugaagcucgcuaacgggaccaaauaucgcccgcccgccaagcugcuuaaggagagaggauuuuucggcgcuaucgccggguuucuggaaggcggaugggagggcaugauugccggguggcauggauacacaagccacggcgcucacgggguggcgguugccgcugaucucaaauccacgcaggaagccaucaauaagauuaccaaaaaccugaauagccuuucugagcuggaagugaagaaccuccagcggcuguccggagccauggacgagcugcauaaugagauccucgaacuggaugagaaagucgacgaccuucgcgcugauacaauuagcucucaaaucgaacuggccgugcuccugagcaacgagggcaucauuaauuccgaagacgagcaccuucuggcgcucgagagaaagcugaagaaaaugcuggggccuucugcugucgaaaucggcaacggauguuucgagaccaagcauaaaugcaaucagacaugccucgaucggauugccgccggcaccuuuaacgcuggggaguucagccugcccacguuugacucccuuaauaucaccgccgcuagccugaacgaugacggacucgauaaccacacaauucugcuguauuacucuaccgccgcguccagccuugccgugacacucaugaucgcuauuuucguuguguauauggucucucgcgacaauaucuccuguagcaucugccuguga

SEQ ID NO: 218517 - RNA, 1758 nt, Artificial Sequence
  derived and/or modified CDS sequence (opt5) from hemagglutinin__InfluenzaB__ABL76969
augaaggccaucauugugcugcucauggucguuaccagcaacgcugacagaaucugcacaggcauuacguccucuaauagcccccacguggugaaaaccgccacacagggggaagucaacgugaccggaguuaucccucugacaaccacaccgaccaagucccauuucgcgaaucuuaaaggcacgcggacccgcgggaagcugugucccaaaugccucaacuguacagaucuggacguggcucuuggaagaccuaagugcaccggcaauauucccucugccaaggucagcauccugcacgaagugcggccuguuacauccggguguuuucccaucaugcaugaucgcaccaaaauuagacaacucccuaaccugcugcggggauacgagcacauccgccucucuauucauaaugugaucaacgccgaaaaggcuccgggcggccccuauaaaauugggacgagcggauccugcccuaaugucacaaacggcaauggguucuuugccaccauggcuugggccgugcccaagaacgacaauaacaaaacagcgaccaauagccugaccaucgaggugccuuacauuuguacagaaggagaggaucagaucacggucuggggcuuccacucugacaacgaggcccagauggcuaaacuuuauggggauuccaagccccagaaguuuaccagcucugccaacggaguuacaacccacuacgugucccaaaucggcggcuucccgaaucagacagaagacgggggacugccucagagcggcagaauuguggucgauuauauggugcagaagucugggaaaaccggaacgaucacauaccaacggggcauucuccugccccagaagguuuggugcgcuuccgggcgcagcaaagugaucaagggaucccuuccucugauuggcgaggccgacugucuccaugaaaaauauggcgggcugaacaagucuaagcccuacuacaccggagagcacgcgaaagccaucggcaauugccccaucugggucaagaccccucugaaacucgcuaacgggacaaaguauagaccgcccgccaaacugcuuaaggagcggggauuuuucggcgcuauugccggguuucuggaaggcggaugggagggcaugaucgccggguggcauggauacaccagccacggcgcucacgggguggcgguugccgcugaucucaaguccacacaggaagccauuaauaaaaucacgaagaaccugaauagccuuucugagcuggaagugaaaaaccuccagcgccuguccggagccauggacgagcugcauaaugagauucucgaacuggaugagaaggucgacgaccuuagagcugauaccaucagcucucaaaucgaacuggccgugcuccugagcaacgagggcauuaucaauuccgaagacgagcaccuucuggcgcucgagcggaaacugaagaagaugcuggggccuucugcugucgaaauuggcaacggauguuucgagacaaaacauaagugcaaucagaccugccucgaucgcaucgccgccggcacauuugacgcuggggaguucagccugcccaccuuugauucccuuaacauuacggccgcuagccugaaugacgauggacucgacaaccacaccauccugcuguauuacucuacagccgcguccagccuugccgugacccucaugauugcuaucuucguuguguauauggucucuagagauaacguguccuguagcaucugccuguga

SEQ ID NO: 218518 - RNA, 1755 nt, Artificial Sequence
  derived and/or modified CDS sequence (opt5) from hemagglutinin__InfluenzaB__ABL76980
augaaggccaucauugugcugcucauggucguuaccagcaacgcugacagaaucugcacaggcauuacguccucuaauagcccccacguggugaaaaccgccacacagggggaagucaacgugaccggaguuaucccucugacaaccacaccgaccaagucccauuucgcgaaucuuaaaggcacgaagacccgggggaaacugugucccacaugccucaacuguaccgaucuggacguggcucuuggacgcccuaugugcgucggcauuacacccucugccaaggccagcauccugcacgaagugagaccuguuaccuccggguguuuucccaucaugcaugaucggacgaagauucgccaacucccuaaucugcugagaggauacgagaaaauccggcucucuacacagaacgugauuaaugcugaaaaggccccgggcggccccuaucgccuggggaccagcggauccugcccuaacgcuacaagcaaaucuggcuucuuugccaccauggcgugggccguccccagagacaauaacaagaccgcuacaaauccucuuacgguggaggugcccuacaucuguaccaaagaagaggaucagauuacagucuggggguuccacuccgacaacaagacccagaugaagaaucuguauggagauagcgacccgcaaaaauuuacaucuuccgccaacggcguuaccacgcauuacgugagccagaucgggggauucccugaucagacagaggacggcggccucccccagucugggcggauuguggucgauuauauggugcaaaagccuggaaaaaccggcaccaucguuuaccagcgcgggauccugcuuccccagaagguguggugcgcuuccggaagaagcaaagucauuaagggcucccugccccucaucggggaagccgacugucugcacgagaaauauggaggccugaauaagucuaagccuuacuacacaggcgaacacgcgaaagccauugggaacugcccgaucugggugaagacaccccucaaacuggcuaacggaaccaaguaucggccucccgccaaacuucugaaggagcgcggcuuuuucggggcuauugccggauuucucgagggcgggugggaaggcaugaucgccggauggcauggcuacacgagccacggggcucauggaguugcgguggccgcugaucugaaguccacccaggaggccaucaauaaaauuacaaagaaccuuaauagccugucugaacucgaggucaaaaaccugcaaagacuguccggcgccauggacgaacuccacaaugagauccuggagcuugacgaaaagguggaugaccugcgggcugauaccauuagcucucagaucgagcucgccguccugcuuagcaacgaagggauuaucaauuccgaggacgaacaucugcucgcgcuggagcgcaaacugaagaagaugcucggaccuucugcuguggauaucggcaacggguguuucgagacaaaacacaagugcaaucagaccugccuggacagaauugccgccggcacguuuaacgcuggagaguucagccuucccaccuuugauucccugaauaucacagccgcuagccucaacgacgauggccuggacaaucacaccauucugcuuuauuacucuacagccgcguccagccucgccguuacccugaugaucgcuauuuucaucguguauaugauuucucgggauaacgucuccuguagcaucugccuguga

SEQ ID NO: 218519 - RNA, 1752 nt, Artificial Sequence
  derived and/or modified CDS sequence (opt5) from hemagglutinin__InfluenzaB__ABL76991
augaaggccaucauugugcugcucauggucguuaccagcaacgcugacagaaucugcacaggcauuacguccucuaauagcccccacguggugaaaaccgccacacagggggaggucaacgugaccggaguuaucccucugacaaccacaccgaccaagucccauuucgcgaaucuuaaaggcacgaagacccgggggaaacugugucccaacugccucaauuguacagaucuggacguggcucuuggacgcccuaugugcauuggcaucacccccucugccaaggccagcauccugcacgaagucagaccugugacauccggguguuuucccauuaugcaugaucggaccaagauccgccaacucccuaaccugcugagaggauacgagcacauucggcucucuacgcauaauguuaucaacgcugaacgcgccccgggcggccccuauagacuggggacaagcggauccugcccuaaugugaccagccggucuggcuucuuugcuacaauggccugggcggucccccgcgacaacaaaaccgccaccaauccucuuacaguggaggugcccuacauuuguacgaagggggaagaucagaucaccgucuggggauuccacuccgacaacaaaauucagaugaagaaucuguauggcgauagcaacccgcagaaauuuacaucuuccgcuaaugggaucaccacacacuacguuagccaaaucggaggcuucccuaaccagaccgaggacggcgggcucccccagucuggaagaauugugguggauuauaugguccagaagccuggcaagacggggacaaucguguaccaacggggaguucugcuuccccagaaaguguggugcgccuccggccgcagcaaggucauuaaagggucccugccccucaucggagaggcugacugucugcaugaaaaguauggcggccugaacaaaucuaagccuuacuacaccggggagcacgccaaagcgauuggaaauugcccgaucugggugaagacaccccucaagcuggccaacggcaccaaauauagaccucccgcuaagcugcugaaagaaaagggguuuuucggagccaucgcuggcuuucucgaagggggcugggagggaaugauugccggcuggcauggguacaccagccacggagcccacggcguugcuguggcggccgaucugaaauccacacaggaggcuaucaauaagauuacgaagaaccuuaauagccugucugagcucgaagucaaaaaccugcagcggcuguccggggccauggacgagcuccauaaugaaauccuggagcuugaugagaagguggacgaccugcgcgccgauaccauuagcucucaaaucgaacucgcuguccugcuuagcaacgagggaaucauuaauuccgaagacgagcaccuucucgcccuggaaagaaaacugaagaaaaugcucggcccuucugcgguggauaucgggaacggcuguuucgagacaaagcauaagugcaaucagaccugccuggaccggauugcugccggaacauuuaacgccggcgaguucagccuucccaccuuugauucccugaauaucacggcugccagccucaacgacgaugggcuggacaaucacaccauucugcuuuauuacucuacagcugccuccagccucgcgguuacccugaugaucgccauuuucaucguguauauggucucuagagauaacguguccuguagcaucugccuguga

SEQ ID NO: 218520 - RNA, 1755 nt, Artificial Sequence
  derived and/or modified CDS sequence (opt5) from hemagglutinin__InfluenzaB__ABL77002
augaaggccaucauugugcugcucauggucguuaccagcaacgcugacagaaucugcacaggcauuacguccucuaauagcccccacguggugaaaaccgccacacagggggaagucaacgugaccggaguuaucccucugacaaccacaccgaccaagucccauuucgcgaaucuuaaaggcacgaagacccgggggaaacugugucccacaugccucaacuguaccgaucuggacguggcucuuggacgcccuaugugcgucggcgugacacccucugccaaggccagcauucugcacgaaguuagaccugugaccuccggguguuuucccaucaugcaugaucggacgaagauccgccaacucccuaaucugcugagaggauacgagaaaauucggcucucuacacagaacgucaucaaugcugaaaaggccccgggcggccccuaucgccuggggaccagcggauccugcccuaacgcuacaagcagaucuggcuucuuugccaccauggcgugggccgugccccgggacaauaacaaaaccgcuacaaauccucuuacgauugaggugccccacaucuguaccaaggaagaggaucagauuacaaucuggggguuccauuccgacgauaaaacccagaugaagaaccuguacggagacagcaauccgcaaaaguuuacaucuuccgccaacggcgucaccacgcacuauguuagccagauugggggauucccugaucagacagaggacggcggccucccccagucugggcgcaucgugguggauuacaugguccaaaaaccuggaaagaccggcaccaucguguaucagagagggauucugcuuccccagaaaguuuggugcgcuuccggacggagcaaggugaucaaaggcucccugccccucauuggggaagccgacugucugcacgagaaguacggaggccugaauaaaucuaagccuuauuacacaggcgaacaugcgaaggccaucgggaacugcccgauuugggucaaaacaccccucaagcuggcuaacggaacaaaauaccgcccucccgccaaacuucugaaggagagaggcuuuuucggggcuaucgccggauuucucgagggcgggugggaaggcaugaucgccggauggcacggcuauacgagccauggggcucacggaguggcgguugccgcugaucugaaguccacccaggaggccauuaauaagaucaccaaaaaccuuaauagccugucugaacucgaggugaagaaccugcaacggcuguccggcgccauggacgaacuccacaaugagauucuggagcuugacgaaaaagucgaugaccugcgcgcugauaccaucagcucucagauugagcucgccgugcugcuuagcaacgaagggaucaucaauuccgaggacgaacaucugcucgcgcuggagagaaagcugaaaaagaugcucggaccuucugcugucgauauuggcaacggguguuucgagacaaagcacaaaugcaaucagaccugccuggaccggaucgccgccggcacguuugaugcuggagaguucagccuucccaccuuugacucccugaacauuacagccgcuagccucaaugaugacggccuggauaaccauaccauccugcuuuacuauucuacagccgcguccagccucgccgugacccugaugauugcuaucuucauuguuuacaugaucucuagagacaauguguccuguagcaucugccuguga

SEQ ID NO: 218521 - RNA, 1755 nt, Artificial Sequence
  derived and/or modified CDS sequence (opt5) from hemagglutinin__InfluenzaB__ABL77013
augaaggccaucauugugcugcucauggucguuaccagcaacgcugacagaaucugcacaggcauuacguccucuaauagcccccacguggugaaaaccgccacacagggggaagucaacgugaccggaguuaucccucugacaaccacaccgaccaaguccuacuucgcgaaucuuaaaggcacgaagacccgggggaaacugugucccacaugccucaacuguaccgaucuggacguggcucuuggacgcccuaugugcgucggcauuacacccucugccaaggccagcauccugcaugaagugagaccuguuaccuccggguguuuucccaucaugcacgaucggacgaagauucgccaacucccuaaucugcugagaggauaugagaaaauccggcucucuacacagaacgugauuaaugcugaaaaggccccgggcggccccuaccgccuggggaccagcggauccugcccuaacgcuacaagcaaaucuggcuucuuugccaccauggcgugggccguccccagagacaauaacaagaccgcuacaaauccucuuacgguggaggugcccuauaucuguaccaaagaagaggaucagauuacagucuggggguuccauuccgacaacaagaaucagaugaagaaccuguacggagauagcgacccgcaaaaauuuaccucuuccgccaauggcguuacaacccacuaugugagccagaucgggggauucccugaucagacggaggacggcggccucccccagucugggcggauuguggucgauuacauggugcaaaagccuggaaaaacaggcaccaucguuuaucagcgcgggauccugcuuccccagaagguguggugcgcuuccggaagaagcaaagucauuaagggcucccugccccucaucggggaagccgacugucugcaugagaaauacggaggccugaacaagucuaagccuuacuauaccggcgaacacgcgaaagccauugggaacugcccgaucugggugaagacaccccucaaacuggcuaauggaaccaaguaccggccucccgccaaacuucugaaggagcgcggcuuuuucggggcuauugccggauuucucgagggcgggugggaaggcaugaucgccggauggcacggcuauacaagccauggggcucacggaguugcgguggccgcugaucugaaguccacgcaggaggccaucaacaaaauuaccaagaaucuuaacagccugucugaacucgaggucaaaaaucugcaaagacuguccggcgccauggacgaacuccauaacgagauccuggagcuugacgaaaagguggaugaccugcgggcugauacaauuagcucucagaucgagcucgccguccugcuuagcaaugaagggauuaucaacuccgaggacgaacaucugcucgcgcuggagcgcaaacugaagaagaugcucggaccuucugcuguggauaucggcaauggguguuucgagaccaaacacaagugcaaccagacaugccuggacagaauugccgccggcaccuuuaaugcuggagaguucagccuucccacguuugauucccugaacaucaccgccgcuagccucaaugacgauggccuggacaaccacacaauucugcuuuacuauucuaccgccgcguccagccucgccguuacacugaugaucgcuauuuucaucguguacaugauuucucgggauaaugucuccuguagcaucugccuguga

SEQ ID NO: 218522 - RNA, 1755 nt, Artificial Sequence
  derived and/or modified CDS sequence (opt5) from hemagglutinin__InfluenzaB__ABL77024
augaaggccaucauugugcugcucauggucguuaccagcaacgcugacagaaucugcacaggcauuacguccucuaauagcccccacguggugaaaaccgccacacagggggaagucaacgugaccggagcgaucccucugacaaccacaccgaccaagucccauuucgcuaaucuuaaaggcacgaagacccgggggaaacugugucccacaugccucaacuguaccgaucuggacguugcccuuggacgcccuaugugcgugggcauuacacccucugccaaggcuagcauccugcacgaagucagaccugugaccuccggguguuuucccaucaugcaugaucggacgaagauucgccaacucccuaaucugcugagaggauacgagaaaauccggcucucuacacagaacguuauuaaugccgaaaaggcuccgggcggccccuaucgccuggggaccagcggauccugcccuaacgccacaagcaaaucuggcuucuuugcgaccauggccugggcugugcccagagacaauaacaagaccgccacaaauccucuuacggucgaggugccccacaucuguaccaaagaagaggaucagauuacaguguggggguuccauuccgacgauaagacccagaugaagaaccuguacggagacagcaauccgcaaaaauuuacaucuuccgcuaacggcaucaccacgcacuaugucagccagauugggggauucccugaucagacagaggacggcggccucccccagucugggcggaucguuguggauuacauggugcaaaagccuggaaaaaccggcaccaucgucuaucagcgcgggauucugcuuccccagaagguguggugcgccuccggaagaagcaaaguuaucaagggcucccugccccucauuggggaagcggacugucugcacgagaaauacggaggccugaauaagucuaagccuuauuacacaggcgaacaugccaaagcuaucgggaacugcccgauuugggugaagacaccccucaaacuggccaacggaaccaaguaccggccucccgcuaaacuucugaaggagcgcggcuuuuucggggccaucgccggauuucucgagggcgggugggaaggcaugaucgcuggauggcacggcuauacgagccauggggcgcacggagucgccguggcugccgaucugaaguccacccaggaggccauuaauaaaaucacaaagaaccuuaauagccugucugaacucgagguuaaaaaccugcaaagacuguccggcgcuauggacgaacuccacaaugagauucuggagcuugacgaaaagguggaugaccugcgggccgauaccaucagcucucagauugagcucgcgguccugcuuagcaacgaagggaucaucaauuccgaggacgaacaucugcucgcucuggagcgcaaacugaagaagaugcucggaccuucugccguggauauuggcaacggguguuucgagacaaaacacaagugcaaucagaccugccuggacagaaucgccgcuggcacguuuaacgccggagaguucagccuucccaccuuugauucccugaauauuacagcugccagccucaacgacgauggccuggacaaucauaccauccugcuuuacuauucuacagcggccuccagccucgcugucacccugaugauugccaucuucauuguguacaugaucucucgggauaacguuuccuguagcaucugccuguga

SEQ ID NO: 218523 - RNA, 1755 nt, Artificial Sequence
  derived and/or modified CDS sequence (opt5) from hemagglutinin__InfluenzaB__ABL77035
augaaggccaucauugugcugcucauggucguuaccagcaacgcugacagaaucugcacaggcauuacguccucuaauagcccccacguggugaaaaccgccacacagggggaagucaacgugaccggagcgaucccucugacaaccacaccgaccaagucccauuucgcuaaucuuaaaggcacgaagacccgggggaaacugugucccacaugccucaacuguaccgaucuggacguugcccuuggacgcccuaugugcgugggcauuacacccucugccaaggcuagcauccugcacgaagucagaccugugaccuccggguguuuucccaucaugcaugaucggacgaagauucgccaacucccuaaucugcugagaggauacgagaaaauccggcucucuacacagaacguuauuaaugccgaaaaggcuccgggcggccccuaucgccuggggaccagcggauccugcccuaacgccacaagcagaucuggcuucuuugcgaccauggccugggcugugccccgggacaauaacaaaaccgccacaaauccucuuacggucgaggugccccacaucuguaccaaggaagaggaucagauuacaguguggggguuccauuccgacgauaaaacccagaugaagaaccuguacggagacagcaauccgcaaaaguuuacaucuuccgcuaacggcgucaccacgcacuauguuagccagaucgggggauucccugaucagacagaggacggcggccucccccagucugggcgcauugugguggauuacaugguccaaaaaccuggaaagaccggcaccaucguguaucagagagggauccugcuuccccagaaaguuuggugcgccuccggacggagcaaggugauuaaaggcucccugccccucaucggggaagcggacugucugcacgagaaguacggaggccugaauaaaucuaagccuuauuacacaggcgaacaugccaaggcuauugggaacugcccgaucugggucaaaacaccccucaagcuggccaacggaacaaaauaccgcccucccgcuaaacuucugaaggagagaggcuuuuucggggccauugccggauuucucgagggcgggugggaaggcaugaucgcuggauggcacggcuauacgagccauggggcgcacggaguggccguugcugccgaucugaaguccacccaggaggccaucaauaagauuaccaaaaaccuuaauagccugucugaacucgaggugaagaaccugcaacggcuguccggcgcuauggacgaacuccacaaugagauccuggagcuugacgaaaaagucgaugaccugcgcgccgauaccauuagcucucagaucgagcucgcggugcugcuuagcaacgaagggauuaucaauuccgaggacgaacaucugcucgcucuggagagaaagcugaaaaagaugcucggaccuucugccgucgauaucggcaacggguguuucgagacaaagcacaaaugcaaucagaccugccuggaccggauugccgcuggcacguuuaacgccggagaguucagccuucccaccuuugauucccugaauaucacagcugccagccucaacgacgauggccuggacaaucauaccauucugcuuuacuauucuacagcggccuccagccucgcugugacccugaugaucgccauuuucaucguuuacaugauuucuagagauaacguguccuguagcaucugccuguga

SEQ ID NO: 218524 - RNA, 1755 nt, Artificial Sequence
  derived and/or modified CDS sequence (opt5) from hemagglutinin__InfluenzaB__ABL77046
augaaggccaucauugugcugcucauggucguuaccagcaacgcugacagaaucugcacaggcauuacguccucuaauagcccccacguggugaaaaccgccacacagggggaagucaacgugaccggagcgaucccucugacaaccacaccgaccaagucccauuucgcuaaucuuaaaggcacgaagacccgggggaaacugugucccacaugccucaacuguaccgaucuggacguugcccuuggacgcccuaugugcgugggcauuacacccucugccaaggcuagcauccugcacgaagucagaccugugaccuccggguguuuucccaucaugcaugaucggacgaagauucgccaacucccuaaucugcugagaggauacgagaaaauccggcucucuacacagaacguuauuaaugccgaaaaggcuccgggcggccccuaucgccuggggaccagcggauccugcccuaacgccacaagcaaaucuggcuucuuugcgaccauggccugggcugugcccagagacaauaacaagaccgccacaaauccucuuacggucgaggugccccacaucuguaccaaagaagaggaucagauuacaguguggggguuccauuccgacgauaagacccagaugaagaaccuguacggagacagcaauccgcaaaaauuuacaucuuccgcuaacggcaucaccacgcacuaugucagccagauugggggauucccugaucagacagaggacggcggccucccccagucugggcggaucguuguggauuacauggugcaaaagccuggaaaaaccggcaccaucgucuaucagcgcgggauucugcuuccccagaagguguggugcgccuccggaagaagcaaaguuaucaagggcucccugccccucauuggggaagcggacugucugcacgagaaauacggaggccugaauaagucuaagccuuauuacacaggcgaacaugccaaagcuaucgggaacugcccgauuugggugaagacaccccucaaacuggccaacggaaccaaguaccggccucccgcuaaacuucugaaggagcgcggcuuuuucggggccaucgccggauuucucgagggcgggugggaaggcaugaucgcuggauggcacggcuauacgagccauggggcgcacggagucgccguggcugccgaucugaaguccacccaggaggccauuaauaaaaucacaaagaaccuuaauagccugucugaacucgagguuaaaaaccugcaaagacuguccggcgcuauggacgaacuccacaaugagauucuggagcuugacgaaaagguggaugaccugcgggccgauaccaucagcucucagauugagcucgcgguccugcuuagcaacgaagggaucaucaauuccgaggacgaacaucugcucgcucuggagcgcaaacugaagaagaugcucggaccuucugccauugauaucggcaacggguguuucgagacaaaacacaagugcaaucagaccugccuggacagaauugccgcuggcacguuuaacgccggagaguucagccuucccaccuuugauucccugaauaucacagcugccagccucaacgacgauggccuggacaaucauaccauucugcuuuacuauucuacagcggccuccagccucgcugugacccugaugaucgccauuuucaucgucuacaugaucucucgggauaacguguccuguagcauuugccuguga

SEQ ID NO: 218525 - RNA, 1755 nt, Artificial Sequence
  derived and/or modified CDS sequence (opt5) from hemagglutinin__InfluenzaB__ABL77057
augaaggccaucauugugcugcucauggucguuaccagcaaagcugacagaaucugcacaggcauuacguccucuaacagcccccacguggugaagaccgccacacagggggaggucaaugugaccggagcgaucccucugacaaccacaccgaccaaaucccauuucgcuaaccuuaagggcacgaaaacccgggggaagcugugucccacaugccucaauuguaccgaucuggacguugcccuuggacgcccuaugugcgugggcauuacacccucugccaaggcuagcauccugcacgaagucaaaccugugaccuccggguguuuucccaucaugcaugauagaacgaagauucggcaacucccuaaccugcugcgcggauacgagaaaaucagacucucuacacagaauguuauuaacgccgaaaaggcuccgggcggccccuaucggcuggggaccagcggauccugcccuaaugccacaagcaaaucuggcuucuuugcgaccauggccugggcugugccccgcgacaacaauaagaccgccacaaacccucuuacggucgaggugccccacaucuguaccaaggaagaggaucagauuacaguguggggguuccauuccgacaauaaaccgcagaugaagaaccuguacggagauagcaauccucaaaaauuuaccucuuccgcuaacggcaucacaacccacuaugucagccagauugggggauuccccgagcagacggaagacggcggccucccucagucugggagaaucguuguggauuacauggugcaaaagcccggaaaaacaggcaccaucgucuaucagcgggggauucugcuuccccagaagguguggugcgccuccggacgcagcaaaguuaucaagggcucccugccucucauuggggaggcggacugucugcacgaaaaguacggaggccugaauaaaucuaagccguauuacaccggcgagcaugccaaagcuaucgggaacugccccauuugggugaagacaccucucaaacuggccaacggaaccaaguacagacccccugcuaaacuucugaaggagcggggcuuuuucggggccaucgccggauuucucgaaggcgggugggagggcaugaucgcuggauggcacggcuauacaagccauggggcgcacggagucgccguggcugccgaucugaaguccacgcaggaagccauuaauaaaaucaccaagaaccuuaauagccugucugagcucgaaguuaaaaaccugcaacgccuguccggcgcuauggacgagcuccacaaugagauucuggaacuugaugagaagguggacgaccugagagccgauacaaucagcucucagauugaacucgcgguccugcuuagcaacgaggggaucaucaauuccgaagacgagcaucugcucgcucuggagcggaagcugaaaaagaugcucggacccucugccguggauauuggcaacggguguuucgaaaccaaacacaagugcaaucagacaugccuggaccgcaucgccgcuggcaccuuuaacgccggagaguucagccuuccgacguuugauucccugaauauuaccgcugccagccucaacgacgauggccuggacaaucauacaauccugcuuuacuauucuaccgcggccuccagccucgcugucacacugaugauugccaucuucauuguguacaugaucucuagagauaacguuuccuguagcaucugccuguga

SEQ ID NO: 218526 - RNA, 1758 nt, Artificial Sequence
  derived and/or modified CDS sequence (opt5) from hemagglutinin__InfluenzaB__ABL77068
augaaggccaucauugugcugcucauggucguuaccagcaacgcugacagaaucugcacaggcauuacguccucuaauagcccccacguggugaaaaccgccacacagggggaggucaacgugaccggaguuaucccucugacaaccacaccgaccaagucccauuucgcgaaucuuaaaggcacgaagacccgggggaaacugugucccaagugccucaacuguacagaucuggacguggcucuuggacgcccuaagugcaccggcaauauucccucugccaaagucagcauccugcacgaagugagaccuguuacauccggguguuuucccaucaugcaugaucggaccaagauucgccaacucccuaaccugcugagaggauacgagcggauccgccucucuaaucacaacgugauuaaugccgaaaaagcuccgggcggccccuauaagaucgggacgagcggauccugcccuaacgucacaaauggcaacggguucuuugccaccauggcuugggccgugcccaaaaaugagaacaauaagacagcgaccaacagccugaccauugaagugccuuacaucuguacagagggagaggaccagauuacggucuggggcuuccauucugauaacgaaaaucagauggccaaacuuuauggggacuccaagccccagaaguuuaccagcucugcuaacggaguuacaacccacuacgugucccaaaucggcggcuucccgaaucagacagaggaugggggacugccucagagcggcagaaucguggucgacuauauggugcagaaaucugggaagaccggaacgauuacauaccaacggggcauccuccugccccagaaaguuuggugcgccuccgggcgcagcaaggugauuaaaggaucccuuccucugaucggcgaagcugauugucuccacgagaaguauggcgggcugaacaagucuaaacccuacuacaccggagagcaugccaaggcgauuggcaauugccccaucugggucaaaaccccucugaagcucgccaacgggacaaaauauagaccgcccgcuaagcugcuuaaggaacggggauuuuucggcgccaucgcuggguuucuggagggcggaugggaaggcaugauugccggguggcacggauacaccagccauggcgcccacgggguggcuguugcggccgaccucaaauccacacaggaggcuaucaauaagauuacgaaaaaccugaauagccuuucugaacuggaggugaagaaccuccagcgccuguccggagccauggaugagcugcacaaugaaauccucgagcuggacgaaaaagucgaugaccuuagagccgacaccauuagcucucaaaucgagcuggcugugcuccugagcaacgaaggcaucauuaauuccgaggaugagcaucuucuggcccucgaacggaagcugaagaaaaugcuggggccuucugcggucgagaucggcaacggauguuucgaaacaaagcacaaaugcaaucagaccugccucgaccgcauugcugccggcacauuuaacgccggggaguucagccugcccaccuuugauucccuuaacaucacggcugccagccugaaugacgauggacucgacaaccauaccauucugcuguauuacucuacagcugccuccagccuugcggugacccucaugaucgccauuuucguuguguauauggucucuagagauaauguguccuguagcaucugccuguga

SEQ ID NO: 218527 - RNA, 1758 nt, Artificial Sequence
  derived and/or modified CDS sequence (opt5) from hemagglutinin__InfluenzaB__ABL77090
augaaggccaucauugugcugcucauggucguuaccagcaacgcugacagaaucugcacaggcauuacguccucuaauagcccccacguggugaaaaccgccacacagggggaggucaacgugaccggaguuaucccucugacaaccacacuuaccaagucccauuucgcgaaucugaaaggcacgaagacccgggggaaacucuguccgaagugccugaacuguacagaucuugacguggcucugggacgccccaagugcaccggcaauauuccuucugccaaagucagcauccuccacgaagugagacccguuacauccggguguuuuccuaucaugcaugaucggaccaagauucgccaacugcccaaccugcucagaggauacgagcggauccgccugucuaaucacaacgugauuaaugccgaaaaagcuccuggcggcccguauaagaucgggacgagcggauccugccccaacgucacaaauggcaacggguucuuugccaccauggcuugggccgugccuaaaaaugagaacaauaagacagcgaccaacagccuuaccauugaagugcccuacaucuguacagagggagaggaccagauuacggucuggggcuuccauucugauaacgaaauccagaugguuaagcuguauggggacuccaaaccucagaaguuuaccagcucugccaauggagugacaacccacuacgugucccaaaucggcggcuuccccaaccagauugaggaugggggacucccgcagagcggcagaaucgucguggacuauaugguucagaaaucugggaagacaggaaccauuacguaccaacggggcauccugcuuccucagaaaguguggugcgcuuccgggcgcagcaagauuaucaaaggaucccugccccucaucggcgaagccgauugucugcacgagaaguauggcgggcugaauaagucuaaaccuuacuacacaggagagcaugcuaaggccauuggcaacugccccaucugggucaaaacaccccucaagcuggcgaaugggaccaaauauagaccuccggccaaacuucugaaggaacggggauuuuucggcgcuauugccggguuucucgagggcggaugggaaggcaugaucgcuggguggcacggauacacaagccauggcgcccacgggguggccguugcugcggaccugaaguccacccaggaggccauuaacaagaucaccaaaaaucuuaacagccugucugaacucgaggugaagaaucugcagcgccuguccggagcuauggaugagcuccacaacgaaauccuggagcuugacgaaaaagucgaugaccugagagccgacacgauuagcucucaaaucgagcucgccgugcugcuuagcaaugaaggcauuaucaacuccgaggaugagcaucugcucgcucuggaacggaagcugaagaaaaugcucgggcccucugccgucgagauuggcaauggauguuucgaaaccaagcacaaaugcaaccagacaugccuggaccgcaucgcggcuggcaccuuuaaugccggggaguucagccuuccuacauuugauucccugaacauuaccgccgcuagccucaacgacgauggacuggacaaucauacgauccugcuuuauuacucuaccgccgcuuccagccucgccgugacacugaugaucgcgauuuucguuguguauauggucucuagagauaacguguccuguagcaucugccuguga

SEQ ID NO: 218528 - RNA, 1755 nt, Artificial Sequence
  derived and/or modified CDS sequence (opt5) from hemagglutinin__InfluenzaB__ABL77101
augaaggccaucauugugcugcucauggucguuaccagcaaagcugacagaaucugcacaggcauuacguccucuaacagcccccacguggugaagaccgccacacagggggaggucaaugugaccggagcgaucccucugacaaccacaccgaccaaaucccauuucgcuaaccuuaagggcacgaaaacccgggggaagcugugucccacaugccucaauuguaccgaucuggacguugcccuuggacgcccuaugugcgugggcauuacacccucugccaaggcuagcauccugcacgaagucaaaccugugaccuccggguguuuucccaucaugcaugauagaacgaagauucggcaacucccuaaccugcugcgcggauacgagaaaaucagacucucuacacagaauguuauuaacgccgaaaaggcuccgggcggccccuaucggcuggggaccagcggauccugcccuaaugccacaagcaaaucuggcuucuuugcgaccauggccugggcugugccccgcgacaacaauaagaccgccacaaacccucuuacggucgaggugccccacaucuguaccaaggaagaggaucagauuacaguguggggguuccauuccgacgauaaaacccagaugaagaaucuguacggagacagcaacccgcaaaaauuuacaucuuccgcuaauggcaucaccacgcacuaugucagccagauugggggauucccugagcagacagaagauggcggccucccccagucugggagaaucguuguggacuacauggugcaaaagccuggaaaaaccggcaccaucgucuaucagcgggggauucugcuuccccagaagguguggugcgccuccggacgcagcaaaguuaucaagggcucccugccccucauuggggaggcggauugucugcacgaaaaguacggaggccugaacaaaucuaagccuuauuacacaggcgagcaugccaaagcuaucgggaauugcccgauuugggugaagacaccccucaaacuggccaacggaaccaaguacagaccucccgcuaaacuucugaaggagcggggcuuuuucggggccaucgccggauuucucgaaggcgggugggagggcaugaucgcuggauggcacggcuauacgagccauggggcgcacggagucgccguggcugccgaccugaaguccacccaggaagccauuaacaaaaucacaaagaaucuuaacagccugucugagcucgaaguuaaaaaucugcaacgccuguccggcgcuauggaugagcuccacaacgagauucuggaacuugacgagaagguggacgaucugagagccgacaccaucagcucucagauugaacucgcgguccugcuuagcaaugaggggaucaucaacuccgaagaugagcaucugcucgcucuggagcggaagcugaaaaagaugcucggaccuucugccguggacauuggcaauggguguuucgaaacaaaacacaagugcaaccagaccugccuggaucgcaucgccgcuggcacguuuaaugccggagaguucagccuucccaccuuugacucccugaacauuacagcugccagccucaaugaugacggccuggauaaccauaccauccugcuuuacuauucuacagcggccuccagccucgcugucacccugaugauugccaucuucauuguguacaugaucucuagagacaauguuuccuguagcaucugccuguga

SEQ ID NO: 218529 - RNA, 1758 nt, Artificial Sequence
  derived and/or modified CDS sequence (opt5) from hemagglutinin__InfluenzaB__ABL77134
augaaggccaucauugugcugcucauggucguuaccagcaacgcugacagaaucugcacaggcauuacguccucuaauagcccccacguggugaaaaccgccacacagggggaggucaacgugaccggaguuaucccucugacaaccacaccgaccaagucccauuucgcgaaucuuaaaggcacgaagacccgggggaaacugugucccaagugccucaacuguacagaucuggacguggcucuuggacgcccuaagugcaccggcaauauucccucugccaaagucagcauccugcacgaagugagaccuguuacauccggguguuuucccaucaugcaugaucggaccaagauucgccaacucccuaaccugcugagaggauacgagcggauccgccucucuaaucacaacgugauuaaugccgaaaaagcuccgggcggccccuauaagaucgggacgagcggauccugcccuaacgucacaaauggcaacggguucuuugccaccauggcuugggccgugcccaaaaaugagaacaauaagacagcgaccaacagccugaccauugaagugccuuacaucuguacagagggagaggaccagauuacggucuggggcuuccauucugauaacgaagcccagauggcuaaacuuuauggggacuccaagccccagaaguuuaccagcucugccaauggaguuacaacccacuacgugucccaaaucggcggcuucccgaaccagacagaggaugggggacugccucagagcggcagaaucguggucgacuauauggugcagaaaucugggaagaccggaacgauuacauaccaacggggcauccuccugccccagaaaguuuggugcgcuuccgggcgcagcaaggugauuaaaggaucccuuccucugaucggcgaagccgauugucuccacgagaaguauggcgggcugaauaagucuaaacccuacuacaccggagagcaugcgaaggccauuggcaacugccccaucugggucaaaaccccucugaagcucgcuaaugggacaaaauauagaccgcccgccaagcugcuuaaggaacggggauuuuucggcgcuaucgccggguuucuggagggcggaugggaaggcaugauugccggguggcacggauacaccagccauggcgcucacgggguggcgguugccgcugaccucaaauccacacaggaggccaucaacaagauuacgaaaaaucugaacagccuuucugaacuggaggugaagaaucuccagcgccuguccggagccauggaugagcugcacaacgaaauccucgagcuggacgaaaaagucgaugaccuuagagcugacaccauuagcucucaaaucgagcuggccgugcuccugagcaaugaaggcaucauuaacuccgaggaugagcaucuucuggcgcucgaacggaagcugaagaaaaugcuggggccuucugcugucgagaucggcaauggauguuucgaaacaaagcacaaaugcaaccagaccugccucgaccgcauugccgccggcacauuuaaugcuggggaguucagccugcccaccuuugauucccuuaacaucacggccgcuagccugaacgacgauggacucgacaaucauaccauucugcuguauuacgccacagcggccucuucccuugcugugacccucaugaucgccauuuucguuguguauauggucagcagagauaacgugucuuguuccaucugccuguga

SEQ ID NO: 218530 - RNA, 1758 nt, Artificial Sequence
  derived and/or modified CDS sequence (opt5) from hemagglutinin__InfluenzaB__ABL77145
augaaggccaucauugugcugcucauggucguuaccagcaacgcugacagaaucugcacaggcauuacguccucuaauagcccccacguggugaaaaccgccacacagggggaagucaacgugaccggaguuaucccucugacaaccacaccgaccaagucccauuucgcgaaucuuaaaggcacgaagacccgggggaaacugugucccaagugccucaacuguacagaucuggacguggcucuuggacgcccuaagugcaccggcaauauucccucugccaaagucagcauccugcacgaagugagaccuguuacauccggguguuuucccaucaugcaugaucggaccaagauucgccaacucccuaaccugcugagaggauacgagcggauccgccucucuaaucacaacgugauuaaugccgaagaggcuccgggcggccccuauaaaaucgggacgagcggauccugcccuaacgucacaaauggcaacggguucuuugccaccauggcuugggccgugcccaagaaugaaaacaauaaaacagcgaccaacagccugaccauugaggugccuuacaucuguacagagggagaagaccagauuacggucuggggcuuccauucugauuccgagacccagauggccaagcuguauggggacagcaagccccagaaauuuacaucuuccgcuaacggaguuaccacacacuacgugagccaaaucggcggcuucccgaaucagaccgaagaugggggacugccucagucuggcagaaucguggucgacuauauggugcagaaguccgggaaaacgggaacaauuaccuaccaacggggcauccuccugccccagaagguuuggugcgccagcgggcgcuccaaagugauuaagggaucucuuccucugaucggcgaggcugauugucuccacgagaaauauggcgggcugaacaagagcaagcccuacuacaccggagaacaugccaaagcgauuggcaauugccccaucugggucaagacaccucugaaacucgccaacgggaccaaguauagaccgcccgcuaaacugcuuaaggagcggggauuuuucggcgccaucgcuggguuucuggaaggcggaugggagggcaugauugccggguggcacggauacacaucccauggcgcccacgggguggcuguugcggccgaccucaagagcacgcaggaagcuaucaauaaaauuaccaagaaccuuaauucucuuuccgagcuggaggugaaaaaccuccagcgccugagcggagccauggaugaacugcacaaugagauccucgaacuggacgagaaggucgaugaccuuagagccgacacaauuucuagccaaaucgaacuggcugugcuccuguccaacgagggcaucauuaauucugaggaugaacaucuucuggcccucgagcggaaacugaagaagaugcuggggccuagcgcggucgaaaucggcaacggauguuucgagaccaaacacaagugcaaucagacaugccucgaccgcauugcugccggcaccuuuaacgccggggaguucucccugcccacguuugauagccuuaauaucaccgcugccucucugaacgacgauggacucgacaaccauacaauucugcuguauuacuccaccgcugccagcucucuugcggugacacucaugaucgccauuuucguuguguauauggucuccagagauaaugugagcuguuccaucugccuguga

SEQ ID NO: 218531 - RNA, 1755 nt, Artificial Sequence
  derived and/or modified CDS sequence (opt5) from hemagglutinin__InfluenzaB__ABL77156
augaaggccaucauugugcugcucauggucguuaccagcaacgcugacagaaucugcacaggcauuacguccucuaauagcccccacguggugaaaaccgccacacagggggaggucaacgugaccggaguuaucccucugacaaccacaccgaccaaguccuacuucgcgaaucuuaaaggcacgcggacccgcgggaagcugugucccgauugccucaacuguacagaccuggauguggcucuuggaagaccuaugugcgucggcaccacacccucugccaaagccagcauucugcaugaagugcggccuguuaccuccggguguuuucccaucaugcacgaccgcacgaagaucagacaacucccuaaucugcugcggggauaugagaacauucgccucucuacacagaaugugaucgaugcugaaaaggccccgggcggccccuacagacuggggaccagcggauccugcccuaacgcuacaagcaaaucuggcuucuuugccaccauggcgugggccguccccaaggacaauaacaaaaaugcuaccaacccucuuacaguggaggugcccuaugucuguacggaaggggaggaucagauuaccguuuggggauuccauuccgacgauaagacacagaugaaaaaucuguacggcgacagcaacccgcaaaaguuuaccucuuccgccaauggggugacaacccacuaugugagccagaucggaggcuucccugaucagacggaggacggcgggcucccccagucuggacggauugucguggauuacaugguucaaaagccuggcaaaacagggaccaucguguaucagcgcggaguccugcuuccccagaagguguggugcgcuuccggcagaagcaaaguuauuaaggggucccugccccucaucggagaagccgacugucugcaugagaaauacggcggccugaacaagucuaaaccuuacuauaccggggaacacgcgaaggccaucggaaacugcccgauuugggugaagacaccccucaaacuggcuaauggcaccaaguaccggccucccgccaaacuucugaaggagcgcggguuuuucggagcuaucgccggcuuucucgaagggggcugggaaggaaugauugccggcuggcacggguauacaagccauggagcucacggcgucgcgguggccgcugaccugaaauccacgcaggaggccaucaacaagauuaccaagaaucuuaacagccugucugaacucgaggucaaaaaucugcaaagacuguccggggccauggaugaacuccauaacgagauccuggagcuugacgaaaagguggaugaccugcgggcugauacaaucagcucucagauugagcucgccguucugcuuagcaaugaaggaaucauuaacuccgaggacgaacaucugcucgcgcuggagcgcaaacugaagaaaaugcucggcccuucugcuguggauaucgggaauggcuguuucgagaccaagcacaagugcaaccagacaugccuggacagaauugccgccggaaccuuuaaugcuggcgaguucagccuucccacguuugauucccugaacaucaccgccgcuagccucaaugacgaugggcuggacaaccacacaauccugcuuuacuauucuaccgccgcguccagccucgccgucacacugaugcuggcuauuuucaucguguacaugguuucucgggacaauguguccuguagcauuugccucuga

SEQ ID NO: 218532 - RNA, 1758 nt, Artificial Sequence
  derived and/or modified CDS sequence (opt5) from hemagglutinin__InfluenzaB__ABL77178
augaaggccaucauugugcugcucauggucguuaccagcaacgcugacagaaucugcacaggcauuacguccucuaauagcccccacguggugaaaaccgccacacagggggaggucaacgugaccggaguuaucccucugacaaccacaccgaccaagucccauuucgcgaaucuuaaaggcacgaagacccgggggaaacugugucccaagugccucaacuguacagaucuggacguggcucuuggacgcccuaagugcaccggcaauauucccucugccaaagucagcauccugcacgaagugagaccuguuacauccggguguuuucccaucaugcaugaucggaccaagauucgccaacucccuaaccugcugagaggauacgagcggauccgccucucuaaucacaacgugauuaaugccgaaaaagcuccgggcggccccuauaagaucgggacgagcggauccugcccuaacgucacaaauggcaacggguucuuugccaccauggcuugggccgugcccaaaaaugagaacaauaagacagcgaccaacagccugaccauugaagugccuuacaucuguacagagggagaggaccagauuacggucuggggcuuccauucugauuccgaaacccagauggccaagcuguauggggacagcaaaccccagaaguuuacaucuuccgcuaacggaguuaccacacacuacgugagccaaaucggcggcuucccgaaucagaccgaggaugggggacugccucagucuggcagaaucguggucgacuauauggugcagaaauccgggaagacgggaacaauuaccuaccaacggggcauccuccugccccagaaaguuuggugcgccagcgggcgcuccaaggugauuaaaggaucucuuccucugaucggcgaagcugauugucuccacgagaaguauggcgggcugaacaagagcaaacccuacuacaccggagagcaugccaaggcgauuggcaauugccccaucugggucaaaacaccucugaagcucgccaacgggaccaaauauagaccgcccgcuaagcugcuuaaggaacggggauuuuucggcgccaucgcuggguuucuggagggcggaugggaaggcaugauugccggguggcacggauacacaucccauggcgcccacgggguggcuguugcggccgaccucaaaagcacgcaggaggcuaucaauaagauuaccaaaaaccuuaauucucuuuccgaacuggaggugaagaaccuccagcgccugagcggagccauggaugagcugcacaaugaaauccucgagcuggacgaaaaagucgaugaccuuagagccgacacaauuucuagccaaaucgagcuggcugugcuccuguccaacgaaggcaucauuaauucugaggaugagcaucuucuggcccucgaacggaagcugaagaaaaugcuggggccuagcgcggucgagaucggcaacggauguuucgaaaccaagcacaaaugcaaucagacaugccucgaccgcauugcugccggcaccuuuaacgccggggaguucucccugcccacguuugauagccuuaauaucaccgcugccucucugaacgacgauggacucgacaaccauacaauucugcuguauuacuccaccgcugccagcucucuugcggugacacucaugaucgccauuuucguuguguauauggucuccagagauaaugugagcuguuccaucugccuguga

SEQ ID NO: 218533 - RNA, 1755 nt, Artificial Sequence
  derived and/or modified CDS sequence (opt5) from hemagglutinin__InfluenzaB__ABL77189
augaaggccaucauugugcugcucauggucguuaccagcaacgcugacagaaucugcacaggcauuacguccucuaauagcccccacguggugaaaaccgccacacagggggaggucaacgugaccggaguuaucccucugacaaccacaccgaccaaguccuacuucgcgaaucuuaaaggcacgcggacccgcgggaagcugugucccgauugccucaacuguacagaccuggauguggcucuuggcauuccuaugugcgucggaaccacacccucugccaaagccagcauccugcaugaagugagaccuguuaccuccggguguuuucccaucaugcacgaccggacgaagauucgccaacucccuaaucugcugagaggauaugagaacauccggcucucuacacagaaugugauugaugcugaaaaggccccgggcggccccuaccgccuggggaccagcggauccugcccuaacgcuacaagcaaaucuggcuucuuugccaccauggcgugggccguccccaaggacaauaacaaaaaugcuaccaacccucuuacaguggaggugcccuaugucuguacggaaggggaggaucagaucaccguuuggggauuccauuccgacaauaagauucagaugaaaaaccuguacggcgauagcaauccgcaaaaguuuacaucuuccgccaacggggugaccacacacuaugugagccagaucggaggcuucccugaccagaccgaggauggcgggcucccccagucuggaagaauugucguggacuacaugguucaaaagccuggcaaaacggggacaaucguguaucagcggggaguccugcuuccccagaagguguggugcgcuuccggccgcagcaaaguuaucaaggggucccugccccucauuggagaagccgauugucugcaugagaaauacggcggccugaacaagucuaaaccuuacuauaccggggaacacgcgaaggccaucggaaauugcccgauuugggugaagacaccccucaaacuggcuaacggcaccaaguacagaccucccgccaaacuucugaaggagcggggguuuuucggagcuaucgccggcuuucucgaagggggcugggaaggaaugauugccggcuggcacggguauaccagccauggagcucacggcgucgcgguggccgcugaccugaaauccacacaggaggccaucaauaagaucacgaagaaccuuaauagccugucugaacucgaggucaaaaaccugcaacgccuguccggggccauggacgaacuccauaaugagauucuggagcuugaugaaaagguggacgaucugagagcugacaccaucagcucucagauugagcucgccguucugcuuagcaacgaaggaaucauuaauuccgaggaugaacaucugcucgcgcuggagcggaaacugaagaaaaugcucggcccuucugcuguggacaucgggaacggcuguuucgagacaaagcacaagugcaaucagaccugccuggaucgcaucgccgccggaacauuuaacgcuggcgaguucagccuucccaccuuugacucccugaauauuacggccgcuagccucaacgaugacgggcuggauaaucacaccauccugcuuuacuauucuacagccgcguccagccucgccgucacccugaugcuggcuauuuucaucguguacaugguuucuagagacaacguguccuguagcauuugccucuga

SEQ ID NO: 218534 - RNA, 1758 nt, Artificial Sequence
  derived and/or modified CDS sequence (opt5) from hemagglutinin__InfluenzaB__ABL77200
augaaggccaucauugugcugcucauggucguuaccagcaacgcugacagaaucugcacaggcauuacguccucuaauagcccccacguggugaaaaccgccacacagggggaggucaacgugaccggaguuaucccucugacaaccacaccgaccaagucccauuucgcgaaucuuaaaggcacgaagacccgggggaaacugugucccaagugccucaacuguacagaucuggacguggcucuuggacgcccuaagugcaugggcaauauucccucugccaaagucagcauccugcacgaagugagaccuguuaccuccggguguuuucccaucaugcaugaucggacaaagauucgccaacucccuaaccugcugagaggauacgagcacauccggcucucuacccauaaugugauuaacgccgaaaaagcuccgggcggccccuauaagaucgggacgagcggauccugcccuaaugucacaaacggcaauggguucuuugccaccauggcuugggccgugcccaaaaacgacaauaacaagacagcgaccaauagccugaccauugaggugccuuacaucuguacagaaggagaggaucagauuacggucuggggcuuccacucugacaacgagacccagauggccaaacuuuauggggauuccaagccccagaaguuuacaagcucugcuaacggaguuaccacacacuacgugucccaaaucggcggcuucccgaaucagaccgaagacgggggacugccucagagcggccgcaucguggucgauuauauggugcagaaaucugggaaggccggaacgauuacauaccaaagaggcauccuccugccccagaaaguuuggugcgcuuccgggcggagcaaggugauuaaaggaucccuuccucugaucggcgaggccgacugucuccaugaaaaguauggcgggcugaacaagucuaaacccuacuacaccggagagcacgcgaaggccauuggcaauugccccaucugggucaaaaccccucugaagcucgcuaacgggacaaaauaucgcccgcccgccaagcugcuuaaggagagaggauuuuucggcgcuaucgccggguuucuggaaggcggaugggagggcaugauugccggguggcauggauacaccagccacggcgcucacgggguggcgguugccgcugaucucaaauccacacaggaagccaucaauaagauuacgaaaaaccugaauagccuuucugagcuggaagugaagaaccuccagcggcuguccggagccauggacgagcugcauaaugagauccucgaacuggauggcaaagucgacgaccuucgcgcugauaccauuagcucucaaaucgagcuggccgugcuccugagcaacgaagggaucauuaauuccgaggacgaacaccuucuggcgcucgagagaaagcugaagaaaaugcugggcccuucugcugucgagaucggaaacggcuguuucgaaacaaagcauaaaugcaaucagaccugccucgaucggauugccgccgggacauuugacgcuggagaguucagccugcccaccuuugauucccuuaacaucacggccgcuagccugaaugacgauggccucgacaaccacaccauucugcuguauuacucuacagccgcguccagccuugccgugacccucaugaucgcuauuuucguuguguauauggucucucgcgauaacguguccuguagcaucugccuguga

SEQ ID NO: 218535 - RNA, 1755 nt, Artificial Sequence
  derived and/or modified CDS sequence (opt5) from hemagglutinin__InfluenzaB__ABL77222
augaaggccaucauugugcugcucauggucguuaccagcaacgcugacagaaucugcacaggcauuacguccucuaauagcccccacguggugaaaaccgccacacagggggaggucaacgugaccggaguuaucccucugacaaccacaccgaccaaguccuacuucgcgaaucuuaaaggcacgcggacccgcgggaagcugugucccgauugccucaacuguacagaccuggauguggcucuuggaagaccuaugugcgucggcaccacacccucugccaaagccagcauucugcaugaagugcggccuguuaccuccggguguuuucccaucaugcacgaccgcacgaagaucagacaacucgcuaaucugcugcggggauaugagaacauucgccucucuacacagaaugugaucgaugccgaaaaggcuccuggcggcccguacagacuggggaccagcggauccugccccaacgccacaagcaaaucuggcuucuuugcgaccauggccugggcugucccuaaggacaauaacaaaaaugccaccaacccccuuacaguggaggugccuuauauuuguacggaaggggaggaucagaucaccgucuggggauuccauuccgacagcaagacacagaugaaaaaucuguacggcgauucuaacccccaaaaguuuaccuccagcgcuaaugggguuacaacccacuaugugucucagauuggaggcuucccggaccagacggaggauggcgggcucccucaguccggacggaucguggucgacuacaugaugcaaaagcccggcaaaacagggaccauuguguaucagcgcggaguucugcuuccucagaagguguggugcgccagcggcagauccaaagucaucaaggggucucugccccucaucggagaagcggauugucugcaugagaaauacggcggccugaacaagagcaaacccuacuauaccggggaacacgccaaggcuauuggaaacugcccuaucugggugaagacaccgcucaaacuggccaauggcaccaaguaccggcccccugcuaaacuucugaaggagcgcggguuuuucggagccauugccggcuuucucgaagggggcugggaaggaaugaucgcuggcuggcacggguauacaucccauggagcgcacggcguugccguggcugccgaccugaaaagcacgcaggaggccauuaacaagaucaccaagaaucuuaacucucuguccgaacucgaggucaaaaaucugcaaagacugagcggggcuauggacgaacuccauaacgagauccuggagcuugaugaaaagguggacgaucugcgggccgacacaauuucuagccagaucgagcucgcgguccugcuuuccaaugaaggaauuaucaacucugaggaugaacaucugcucgcucuggagcgcaaacugaagaaaaugcucggccccagcgccguggacauugggaauggcuguuucgagaccaagcacaagugcaaccagacaugccuggauagaaucgccgcuggaaccuuuaaugccggcgaguucucccuuccuacguuugacagccugaacaucaccgcugccucucucaaugaugacgggcuggauaaccacacaauucugcuuuacuauuccaccgcggccagcucucucgcuguuacacugaugcuggccaucuucauuguguacauggucucccgggacaaugugagcuguuccaucugccucuga

SEQ ID NO: 218536 - RNA, 1758 nt, Artificial Sequence
  derived and/or modified CDS sequence (opt5) from hemagglutinin__InfluenzaB__ABL77233
augaaggccaucauugugcugcucauggucguuaccagcaacgcugacagaaucugcacaggcauuacguccucuaauagcccccacguggugaaaaccgccacacagggggaggucaacgugaccggaguuaucccucugacaaccacaccgaccaagucccauuucgcgaaucuuaaaggcacgaagacccgggggaaacugugucccaagugccucaacuguacagaucuggacguggcucuuggacgcccuaagugcaccggcaauauucccucugccgaagucagcauccugcacgaggugagaccuguuacauccggguguuuucccaucaugcaugaucggaccaaaauucgccaacucccuaaccugcugagaggauacgaacacauccggcucucuacgcauaaugugauuaacgccgagaaggcuccgggcggccccuauaaaaucgggacaagcggauccugcccuaaugucaccaacggcaauggguucuuugccacaauggcuugggccgugcccaagaacgacaauaacaaaaccgcgaccaauagccugacaauugaagugccuuacaucuguacggagggagaggaucagauuaccaucuggggcuuccacucugacaacgaagcccagauggcuaaacuuuauggggauuccaagccccagaaguuuacaagcucugccaacggagucaccacacacuacguuucccaaaucggcggcuucccgaaucagaccgaggacgggggacugccucagagcggccgcauugugguggauuauaugguccagaagucuagaaaaacggggacaaucaccuaccaacgggggauucuccugccccagaagguguggugcgcuuccggccgcagcaaaguuaucaaggggucccuuccucugauuggagaagccgacugucuccaugagaaauauggcggccugaacaagucuaagcccuacuacaccggggagcacgcgaaagccaucggaaauugccccaucugggugaagacaccucugaaacucgcuaacggcaccaaguauagaccgcccgccaaacugcuuaaggaacggggguuuuucggagcuauugccggcuuucuggagggaggcugggaaggaaugaucgccggcuggcauggguacacaagccacggagcucacggcgucgcgguggccgcugaucucaaguccacgcaggaggccauuaauaaaaucaccaagaaccugaauagccuuucugaacuggagguuaaaaaccuccagcgccuguccggggccauggacgagcugcauaaugaaauucucgagcuggaugaaaagguggacgaccuuagagcugauacaaucagcucucaaaucgagcuggccguccuccugagcaacgaaggaauuaucaauuccgaggacgagcaccuucuggcgcucgaacggaaacugaagaagaugcugggcccuucugcuguggagauugggaacggcuguuucgaaaccaaacauaagugcaaucagacaugccucgaucgcaucgccgccggaaccuuugacgcuggcgaguucagccugcccacguuugauucccuuaacauuaccgccgcuagccugaaugacgaugggcucgacaaccacacaauccugcuguauuacucuaccgccgcguccagccuugccgucacacucaugauugcuaucuucgugguuuauauggugucuagagauaacgucuccuguagcaucugccuguga

SEQ ID NO: 218537 - RNA, 1758 nt, Artificial Sequence
  derived and/or modified CDS sequence (opt5) from hemagglutinin__InfluenzaB__ABL77244
augaaggccaucauugugcugcucauggucguuaccagcaacgcugacagaaucugcacaggcauuacguccucuaauagcccccacguggugaaaaccgccacacagggggaggucaacgugaccggaguuaucccucugacaaccacaccgaccaagucccauuucgcgaaucuuaaaggcacgaagacccgggggaaacugugucccaagugccucaacuguacagaucuggacguggcucuuggacgcccuaagugcaccggcacaauucccucugccaaagccagcauccugcacgaagucaagccugugaccuccggguguuuucccaucaugcaugauagaacgaaaauucggcaacucccuaaucugcugcgcggauacgagcacaucagacucucuacacauaacguuauuaaugcugaaaccgccccgggcggccccuauaagguggggacaagcggauccugcccuaacgucaccaauggcaacggguucuuugcuaccauggccugggcggugcccaaaaaugacaacaauaagacagccacgaacccucugaccguggagguccccuacaucuguacagaaggagaggaucagauuaccguuuggggcuuccacagcgacaaugaggcucagauggugaaacuuuauggggauucuaagccgcagaaguuuacauccagcgccaacggagugaccacgcacuacgucucucaaaucggcggcuucccuaaccaggcugaagacgggggacugccccaguccggccggauugugguugauuauauggugcagaaaagcgggaagacaggaaccaucaccuaccaacgcggcauccuccugccucagaaagucuggugcgccucugggagauccaaggugauuaaaggaagccuuccccugaucggcgaggcggacugucuccaugaaaaguauggcgggcugaauaaguccaaacccuacuacacaggagagcacgccaaggcuauuggcaacugcccuaucuggguuaaaaccccgcugaagcucgccaaugggacaaaauaucggcccccugcuaagcugcuuaaggagaaaggauuuuucggcgccauugccggguuucuggaaggcggaugggagggcaugaucgcuggguggcauggauacacgucucacggcgcgcacgggguggccgucgcugccgaucucaagagcacccaggaagccaucaacaaaauuacaaagaaucugaacucccuuagcgagcuggaagugaaaaaucuccagcgccugucuggagcuauggacgagcugcauaacaagauccucgagcuggaugaaaaggucgacgaccuuagagccgauaccauuuccagccaaaucgagcuggcggugcuccugucuaaugaaggcauuaucaacagcgaggacgaacaccuucuggcucucgagcggaaacugaagaaaaugcuggggcccuccgccguugagaucggcaauggauguuucgaaacaaagcauaaaugcaaccagaccugccucgaucgcauugccgcuggcacguuuaaugccggggaguucucucugccuaccuuugacagccuuaacaucacagcugccucccugaaugaugacggacucgauaaccacaccauucugcuguauuacagcacagcggccucuucccuugcugugacccucaugaucgccauuuucaucgucuauauggugagcagagacaacguuucuuguuccauuugccuguga

SEQ ID NO: 218538 - RNA, 1752 nt, Artificial Sequence
  derived and/or modified CDS sequence (opt5) from hemagglutinin__InfluenzaB__ABL77255
augaaggccaucauugugcugcucauggucguuaccagcaacgcugacagaaucugcacaggcauuacguccucuaauagcccccacguggugaaaaccgccacacagggggaggucaacgugaccggaguuaucccucugacaaccacaccgaccaagucccauuucgcgaaucuuaaaggcacgaagacccgggggaaacugugucccaacugccucaauuguacagaucuggacguggcucuuggacgcccuaugugcaugggcaccauucccucugccaaggccagcauccugcacgaagucagaccugugacauccggguguuuucccaucaugcaugaucggaccaagauucgccaacucccuaaccugcugagaggauacgagaauauccggcucucuacgcacaacguuauuaaugcugaacgcgccccgggcggccccuauagacuggggacaagcggauccugcccuaacgugaccagccggaauggcuucuuugcuacaauggccugggcggucccccgcgacaacaaaaccgccaccaauccucuuacaguggaggugcccuacaucuguacgaagggggaagaucagauuaccgucuggggauuccauucugacgauaaaacacagaugaagaaccuguauggcgacuccaauccgcagaaauuuaccagcucugcuaacgggguuacaacccacuacgugucccaaaucggagauuucccuaaccagacggaggacggcggccucccccagagcgggagaauuguggucgauuauauggugcagaagccuggaaagacaggcaccaucguuuaccaacgcggggugcugcuuccccagaaagucuggugcgccucuggacgguccaaggugaucaaaggcagccugccccucauuggggaggcugacugucugcacgaaaaguauggaggccugaauaaauccaagccuuacuacaccggcgagcaugccaaagcgaucgggaacugcccgauuuggguuaagacaccccucaagcuggccaauggaaccaaauauagaccucccgcuaagcugcugaaagaacggggcuuuuucggggccaucgcuggauuucucgagggcgggugggagggcaugauugccggauggcacggcuacacaucucauggggcccacggaguggcugucgcggccgaucuuaagagcacgcaggaagcuaucaacaaaaucaccaagaaucuuaacucccugagcgagcucgaagugaagaaucugcagcgccugucuggcgccauggacgagcuccacaacgaaauucuggagcuugacgagaaagucgaugaccugagagccgauacaaucuccagccaaauugaacucgcugugcugcuuucuaaugaggggaucauuaacagcgaagacgagcaucugcucgcccuggaacggaagcugaaaaagaugcucggaccuuccgcgguugauaucggcaauggguguuucgagaccaaacacaagugcaaccagacaugccuggacagaaucgcugccggcaccuuuaaugccggagaguucucucuucccacguuugauagccugaacauuaccgcugccucccucaaugacgauggccuggacaaccauacaauccugcuuuauuacagcaccgcugccucuucccucgcggugacacugaugauugccaucuucauugucuauauggugagccgcgauaacguuucuuguuccaucugccuguga

SEQ ID NO: 218539 - RNA, 1752 nt, Artificial Sequence
  derived and/or modified CDS sequence (opt5) from hemagglutinin__InfluenzaB__ABL77266
augaaggccaucauugugcugcucauggucguuaccagcaacgcugacagaaucugcacaggcauuacguccucuaauagcccccacguggugaaaaccgccacacagggggaggucaacgugaccggaguuaucccucugacaaccacaccgaccaagucccauuucgcgaaucuuaaaggcacgaagacccgggggaaacugugucccaacugccucaauuguacagaucuggacguggcucuuggacgcccuaugugcgucggcaccacacccucugccaaggccagcauucugcacgaagugagaccuguuaccuccggguguuuucccaucaugcaugaucggacgaagauccgccaacucccuaaccugcugagaggauacgagaauauucggcucucuacacagaacgugaucaaugcugaacgcgccccgggcggccccuauagacuggggaccagcggauccugcccuaacgucacaagccgggacggcuucuuugcuaccauggccugggcggugccccgcgauaauaaaaccgccacaaacccucuuacgguggagguccccuacauuuguaccaagggggaagaccagaucacaguuuggggauuccacucugauuccaaaacccagaugaagaaucuguauggcgacagcaacccgcaaaaauuuacaucuuccgcuaauggggugaccacgcauuacgugagccagauuggaggcuucccuaaccagacagaggauggcgggcucccccagucuggaagaaucgucguggacuauaugguucaaaagccuggcaagaccgggaccauuguguaccagcggggaguccugcuuccccagaaaguguggugcgccuccggccgcagcaagguuaucaaagggucccugccccucaucggagaggcugauugucugcacgaaaaguauggcggccugaacaaaucuaagccuuacuacacaggggagcacgccaaagcgauuggaaauugcccgaucugggugaagacaccccucaagcuggccaacggcaccaaauauagaccucccgcuaagcugcugaaagaacggggguuuuucggagccauugcuggcuuucucgaagggggcugggagggaaugaucgccggcuggcauggguacacgagccacggagcccauggcgucgcuguggcggccgaccugaaguccacccaggaggcuauuaauaaaaucacaaagaaccuuaauagccugucugagcucgaagucaagaaccugcaacgccuguccggggccauggaugagcuccacaaugaaauccuggagcuugacgagaaaguggacgaucugagagccgacaccauuagcucucagaucgaacucgcuguucugcuuagcaacgagggaauuaucaauuccgaagaugagcaccuucucgcccuggaacggaagcugaaaaagaugcucggcccuucugcgguggacauugggaacggcuguuucgagacaaaacauaagugcaaucagaccugccuggauagaaucgcugccggaacguuuaacgccggcgaguucagccuucccaccuuugacucccugaauaucacagcugccagccucaacgaugacgggcuggauaaucacaccauucugcuuuauuacucuacagcugccuccagccucgcggucacccugaugaucgccauuuucaucguguauaugguuucucgcgacaacguguccuguagcauuugccuguga

SEQ ID NO: 218540 - RNA, 1752 nt, Artificial Sequence
  derived and/or modified CDS sequence (opt5) from hemagglutinin__InfluenzaB__ABL77277
augaaggccaucauugugcugcucauggucguuaccagcaacgcugacagaaucugcacaggcauuacguccucuaauagcccccacguggugaaaaccgccacacagggggaggucaacgugaccggaguuaucccucugacaaccacaccgaccaagucccauuucgcgaaucuuaaaggcacgaagacccgggggaaacugugucccaacugccucaauuguacagaucuggacguggcucuuggacgcccuaugugcgucggcaacacccccucugccaaggccagcauucugcacgaagugagaccuguuacauccggguguuuucccaucaugcaugaucggaccaagauccgccaacucccuaaucugcugagaggauacgagaacauucggcucucuacgcagaaugugaucaacgcugaacgcgccccgggcggccccuauagacuggggacaagcggauccugcccuaaugucaccaaccgggacggcuucuuugcuacaauggccugggcggugccccgcgauaauaaaaccgccaccaacccucuuacaguggagguccccuacauuuguacgaagggggaagaccagaucaccguuuggggauuccacagcgauaauaaaauucagaugaagaaccuguauggcgacucuaacccgcaaaaauuuacauccagcgcuaauggggugaccacacauuacgugucucagaucggaggcuucccuaaccagaccgaggauggcgggcucccccaguccggaagaauugucguggacuauaugguucaaaagccuggcaagacggggacaaucguguaccagcggggaguccugcuuccccagaaaguguggugcgccagcggccgcucuaagguuaucaaagggucccugccccucauuggagaggcugauugucugcacgaaaaguauggcggccugaauaaaagcaagccuuacuacaccggggagcacgccaaagcgaucggaaacugcccgauuugggugaagacaccccucaagcuggccaauggcaccaaauauagaccucccgcuaagcugcugaaagaacggggguuuuucggagccaucgcuggcuuucucgaagggggcugggagggaaugauugccggcuggcauggguacaccucccacggagcccauggcgucgcuguggcggccgaccugaagucuacacaggaggcuaucaacaaaaucacgaagaaucuuaacagccuguccgagcucgaagucaagaaucugcaacgccugagcggggccauggaugagcuccacaacgaaauucuggagcuugacgagaaaguggacgaucugagagccgacaccaucucuucccagauugaacucgcuguucugcuuagcaaugagggaaucauuaacucugaagaugagcaccuucucgcccuggaacggaagcugaaaaagaugcucggcccuagcgcgguggacaucgggaauggcuguuucgagacaaaacauaagugcaaccagaccugccuggauagaaucgcugccggaacauuuaaugccggcgaguucucccuucccaccuuugacucucugaacauuacggcugccagccucaacgaugacgggcuggauaaucacaccauccugcuuuauuacuccacagcugccagcucucucgcggucacccugaugauugccaucuucauuguguauaugguuucccgcgacaacgugagcuguucuaucugccuguga

SEQ ID NO: 218541 - RNA, 1752 nt, Artificial Sequence
  derived and/or modified CDS sequence (opt5) from hemagglutinin__InfluenzaB__ABL77288
augaaggccaucauugugcugcucauggucguuaccagcaacgcugacagaaucugcacaggcauuacguccucuaauagcccccacguggugaaaaccgccacacagggggaggucaacgugaccggaguuaucccucugacaaccacaccgaccaagucccauuucgcgaaucuuaaaggcacgaagacccgggggaaacugugucccaacugccucaauuguacagaucuggacguggcucuuggacgcccuaugugcgucggcaccacacccucugccaaggccagcauucugcacgaagugagaccuguuaccuccggguguuuucccaucaugcaugaucggacgaagauccgccaacucccuaaccugcugagaggauacgagcacauucggcucucuacacagaaugugaucaacgcugaaaaagccccgggcggccccuauaagcuggggaccagcggauccugcccuaaugcuacaagccgcucuggcuucuuugccaccauggcgugggccguccccagagacaacaaaaccgcuacaaauccucuuacgguggaggugcccuacauuuguaccaagggggaagaucagaucacagucuggggauuccauuccgacaccaaaacacagaugaagaaccuguauggcgauagcaauccgcaaaaguuuaccucuuccgccaacgggguuacgacacacuacgugagccagauuggaggcuucccugaccagaccgaggauggcgggcucccccagucuggacggaucguggucgacuauauggugcaaaaaccuggcaagaccgggacaauuguuuaccagcgcggagugcugcuuccccagaaagucuggugcgcuuccggcagaagcaaggugaucaaagggucccugccccucaucggagaggccgauugucugcacgaaaaguauggcggccugaauaaaucuaagccuuacuacaccggggagcaugcgaaggccauuggaaacugcccgaucuggguuaaaacaccccucaagcuggcuaacggcacgaaauaucggccucccgccaaacuucugaaggaacgcggguuuuucggagcuauugccggcuuucucgaagggggcugggagggaaugaucgccggcuggcacggguacaccagccauggagcucacggcguggcggucgccgcugaccugaaguccacacaggaggccauuaauaagaucaccaaaaaccuuaauagccugucugagcucgaagugaagaaccugcaaagacuguccggggccauggaugagcuccacaaugaaauccuggagcuugacgagaaagucgacgaucugcgggcugacacaauuagcucucagaucgaacucgccgugcugcuuagcaacgagggaauuaucaauuccgaagaugagcaucugcucgcgcuggaacgcaagcugaaaaagaugcucggcccuucugcuguugacauugggaacggcuguuucgagaccaagcacaaaugcaaucagacgugccuggauagaaucgccgccggaaccuuuaacgcuggcgaguucagccuucccacauuugacucccugaauaucaccgccgcuagccucaacgaugacgggcuggauaaucauacaauucugcuuuauuacucuaccgccgcguccagccucgccgugacgcugaugaucgcuauuuucaucgucuauauggugucucgggacaacguuuccuguagcauuugccuguga

SEQ ID NO: 218542 - RNA, 1752 nt, Artificial Sequence
  derived and/or modified CDS sequence (opt5) from hemagglutinin__InfluenzaB__ABL77299
augaaggccaucauugugcugcucauggucguuaccagcaacgcugacagaaucugcacaggcauuacguccucuaauagcccccacguggugaaaaccgccacacagggggaggucaacgugaccggaguuaucccucugacaaccacaccgaccaagucccauuucgcgaaucuuaaaggcacgaagacccgggggaaacugugucccaacugccucaauuguacagaucuggacguggcucuuggacgcccuaugugcauuggcaacauccccucugccaaggccagcauccugcacgaagucagaccugugaccuccggguguuuucccauuaugcaugaucggacaaagauccgccaacucccuaaucugcugagaggauacgagcacauucggcucucuacccauaacguuaucaaugcugaacgcgccccgggcggccccuauagacuggggacgagcggauccugcccuaacgugacaagccggucuggcuucuuugcuaccauggccugggcggucccccgcgacaauaaaacagccaccaacccucuuaccguggaggugcccuacauuuguacaaagggggaagaucagaucacggucuggggauuccacuccgacaaugagacccagaugaaaaaccuguauggcgauagcaauccgcagaaguuuacaucuuccgcuaacgggauuaccacacacuacguuagccaaaucggaggcuucccuaaccagaccgaggacggcgggcucccccagucuggaagaaucgugguggauuauaugguccagaaaccuggcaagacggggacaauuguguaccaacggggaguucugcuuccccagaagguguggugcgccuccggccgcagcaaagucaucaaggggucccugccccucauuggagaagcugacugucugcaugagaaauauggcggccugaauaagucuaaaccuuacuacaccggggaacacgccaaggcgaucggaaacugcccgauuugggugaaaacaccccucaagcuggccaauggcaccaaguauagaccucccgcuaaacuucugaaggagcggggguuuuucggagccaucgcuggcuuucucgaagggggcugggaaggaaugaucgccggcuggcauggguacaccagccacggagcccacggcguugcuguggcggccgaucugaaauccacacaggaggcuauuaacaagaucacgaaaaaucuuaacagccugucugaacucgaggucaagaaucugcagcgccuguccggggccauggacgaacuccauaacgagauucuggagcuugaugaaaagguggacgaccugagagccgauaccaucagcucucaaauugagcucgcuguccugcuuagcaaugaaggaaucaucaacuccgaggacgaacaucugcucgcccuggagcggaaacugaagaaaaugcucggcccuucugcgguggauauugggaauggcuguuucgagacaaagcacaaaugcaaccagaccugccuggacagaaucgcugccggaacauuuaaugccggcgaguucagccuucccaccuuugauucccugaacauuacggcugccagccucaaugacgaugggcuggacaaccacaccauccugcuuuauuacucuacagcugccuccagccucgcgguuacccugaugauugccaucuucauuguguauauggucucucgcgauaacguguccuguagcaucugccuguga

SEQ ID NO: 218543 - RNA, 1752 nt, Artificial Sequence
  derived and/or modified CDS sequence (opt5) from hemagglutinin__InfluenzaB__ABL77310
augaaggccaucauugugcugcucauggucguuaccagcaacgcugacagaaucugcacaggcauuacguccucuaauagcccccacguggugaaaaccgccacacagggggaggucaacgugaccggaguuaucccucugacaaccacaccgaccaagucccauuucgcgaaucuuaaaggcacgaagacccgggggaaacugugucccaacugccucaauuguacagaucuggacguggcucuuggacgcccuaugugcauuggcaccauccccucugccaaggccagcauccugcacgaagucagaccugugacauccggguguuuucccauuaugcaugaucggaccaagauccgccaacucccuaaccugcugagaggauacgagcacauucggcucucuacgcauaauguuaucaacgcugaacgcgccccgggcggccccuauagacuggggacaagcggauccugcccuaaugugaccagccggucuggcuucuuugcuacaauggccugggcggucccccgcgacaacaaaaccgccaccaauccucuuacaguggaggugcccuacauuuguacgaagggggaagaucagaucaccgucuggggauuccacuccgacaacaaaaaucagaugaagaaccuguauggcgauagcaauccgcagaaauuuacaucuuccgcuaacgggguuaccacacacuacgugagccaaauuggaggcuucccuaaccagaccgaggacggcgggcucccccagucuggaagaaucguggucgauuauauggugcagaagccuggcaagacggggacaaucguuuaccaacggggagugcugcuuccccagaaagucuggugcguguccggccgcagcaagguuauuaaagggucccugccccucaucggagaggccgacugucugcaugaaaaguauggcggccugaauaaaucuaagccuuacuacaccggggagcacgcuaaagccauuggaaacugcccgaucugggugaagacaccccucaagcuggcgaauggcaccaaauauagaccucccgccaagcugcugaaagaacggggguuuuucggagcuauugccggcuuucucgaagggggcugggagggaaugaucgcuggcuggcauggguacaccagccacggagcccacggcgucgccguggcugcggaucugaaguccacacaggaggccaucaacaaaauuacgaagaaucuuaacagccugucugagcucgaagucaagaaucugcagcgccuguccggggcuauggacgagcuccauaacgaaauccuggagcuugaugagaaaguggacgaccugagagccgauaccauuagcucucaaaucgaacucgccguucugcuuagcaaugagggaauuaucaacuccgaagacgagcaccuucucgcucuggaacggaagcugaaaaagaugcucggcccuucugccguggauaucgggaauggcuguuucgagacaaaacauaagugcaaccagaccugccuggacagaauugcggcuggaacauuuaaugccggcgaguucagccuucccaccuuugauucccugaacaucacggccgcuagccucaaugacgaugggcuggacaaccacaccauucugcuuuauuacucuacagccgcuuccagccucgccgucacccugaugaucgcgauuuucaucguguauaugguuucucgcgauaacguguccuguagcauuugccuguga

SEQ ID NO: 218544 - RNA, 1758 nt, Artificial Sequence
  derived and/or modified CDS sequence (opt5) from hemagglutinin__InfluenzaB__ABL77321
augaaggccaucauugugcugcucauggucguuaccagcaacgcugacagaaucugcacaggcauuacguccucuaauagcccccacguggugaaaaccgccacacagggggaagucaacgugaccggaguuaucccucugacaaccacaccgaccaagucccauuucgcgaaucuuaaaggcacgaagacccgggggaaacugugucccaagugccucaacuguacagaucuggacguggcucuuggacgcccuaagugcaccggcacaauucccucugccaaagucagcauccugcacgaagugaagccuguuaccuccggguguuuucccaucaugcaugauagaacgaaaauucggcaacucccuaaucugcugcgcggauacgagcacaucagacucucuacacauaacgugauuaaugccgaaaaggcuccgggcggccccuauaaaaucgggaccagcggauccugcccuaacauuacaaauggcaacggguucuuugccaccauggcuugggccguccccaagaaugacaacaauaagaccgcgacaaacagccugacgguggaggugccuuacaucuguaccgaaggagaggaucagauuacagucuggggcuuccacucugacaaugagacccagauggccaaacuuuauggggauuccaagccccagaaauuuacaagcucugcuaacggaguuaccacgcacuacgugucccaaaucggcggcuucccgaaccaggccgaagacgggggacugccucagagcggccggaucguggucgauuauauggugcagaagucugggaaaacaggaaccauuaccuaccaacgcggcauccuccugccccagaagguuuggugcgcuuccgggagaagcaaagugauuaagggaucccuuccucugaucggcgaggccgacugucuccaugaaaaguauggcgggcugaauaaaucuaagcccuacuacacaggagagcacgcgaaagccauuggcaacugccccaucugggucaagaccccucugaaucucgcuaacgggacaaaauaucggccgcccgccaagcugcuuaaggagcgcggauuuuucggcgcuaucgccggguuucuggaaggcggaugggagggcaugauugccggguggcauggauacacgagccacggcgcucacgggguggcgguugccgcugaucucaaauccacccaggaagccaucaauaagauuaccaaaaaccugaauagccuuucugagcuggaagugaagaaccuccagagacuguccggagccauggacgagcugcauaaugagauccucgaacuggaugagaaagucgacgaccuucgggcugauacaauuagcucucaaaucgaacuggccgugcuccugagcaacgagggcaucauuaauuccgaagacgagcaccuucuggcgcucgagcgcaagcugaagaaaaugcuggggccuucugcugucgaaaucggcaacggauguuucgagacaaagcauaaaugcaaucagaccugccucgauagaauugccgccggcacguuuaacgcuggggaguucagccugcccaccuuugacucccuuaauaucacagccgcuagccugaacgaugacggacucgauaaccacaccauucugcuguauuacucuacagccgcguccagccuugccgugacccucaugaucgcuauuuucaucguuuauauggugucucgggacaaugucuccuguagcaucugccuguga

SEQ ID NO: 218545 - RNA, 1755 nt, Artificial Sequence
  derived and/or modified CDS sequence (opt5) from hemagglutinin__InfluenzaB__ABL77332
augaaggccaucauugugcugcucauggucguuaccagcaacgcugacagaaucugcacaggcauuacguccucuaauagcccccacguggugaaaaccgccacacagggggaggucaacgugaccggaguuaucccucugacaaccacaccgaccaagucccauuucgcgaaucuuaaaggcacgaagacccgggggaaacugugucccaacugccucaauuguacagaucuggacguggcucuuggacgcccuaugugcgucggcaccacacccucugccaaggccagcauucugcacgaagugagaccuguuaccuccggguguuuucccaucaugcaugaucggacgaagauccgccaacucccuaaccugcugagaggauacgagaauauucggcucucuacacagaacgugaucaaugcugaaaaagccccgggcggccccuauaagcuggggaccagcggauccugcccuaacgcuacaagccgcucuggcuucuuugccaccauggcgugggccguccccagagacaauaacaaaaccgcuacaaauccucuuacgguggaggugcccuacauuuguaccaagggggaagaucagaucacagucuggggauuccacuccgacgauaaaacccagaugaagaaccuguauggcgacagcaauccgcaaaaguuuacaucuuccgccaacgggguuaccacgcauuacgugagccagauuggaggcuucccugaucagacagaggacggcgggcucccccagucuggacggaucguggucgauuauauggugcaaaaaccuggcaagaccgggaccauuguuuaccagcgcggagugcugcuuccccagaaagucuggugcgcuuccggcagaagcaaggugaucaaagggucccugccccucaucggagaggccgacugucugcacgaaaaguauggcggccugaacaaaucuaagccuuacuacacaggggagcacgcgaaggccauuggaaauugcccgaucuggguuaaaacaccccucaagcuggcuaacggcacaaaauaucggccucccgccaagcugcugaaagaacgcggguuuuucggagcuauugccggcuuucucgaagggggcugggagggaaugaucgccggcuggcauggguacacgagccacggagcucauggcguggcggucgccgcugaucugaaguccacccaggaggccauuaauaagaucaccaaaaaccuuaauagccugucugagcucgaagugaagaaccugcaaagacuguccggggccauggacgagcuccacaaugaaauccuggagcuugacgagaaagucgaugaccugcgggcugauaccauuagcucucagaucgaacucgccgugcugcuuagcaacgagggaauuaucaauuccgaagacgagcaccuucucgcgcuggaacgcaagcugaaaaagaugcucggcccuucugcuguugauauugggaacggcuguuucgagacaaagcauaaaugcaaucagaccugccuggacagaaucgccgccggaacguuuaacgcuggcgaguucagccuucccaccuuugauucccugaauaucacagccgcuagccucaacgacgaugggcuggacaaucacgccauucugcuuuauuacucuaccgcggccuccagccucgcugugacacugaugaucgccauuuucaucgucuauauggugucucgggauaacguuuccuguagcauuugccuguga

SEQ ID NO: 218546 - RNA, 1755 nt, Artificial Sequence
  derived and/or modified CDS sequence (opt5) from hemagglutinin__InfluenzaB__ABL77343
augaaggccaucauugugcugcucauggucguuaccagcaacgcugacagaaucugcacaggcauuacguccucuaauagcccccacguggugaaaaccgccacacagggggaggucaacgugaccggaguuaucccucugacaaccacaccgaccaagucccauuucgcgaaucuuaaaggcacgaagacccgggggaaacugugucccaacugccucaauuguacagaucuggacguggcucuuggacgcccuaugugcgucggcaccacacccucugccaaggccagcauucugcacgaagugagaccuguuaccuccggguguuuucccaucaugcaugaucggacgaagauccgccaacucccuaaccugcugagaggauacgagaauauucggcucucuacacagaacgugaucaaugcugaaaaagccccgggcggccccuaucgccuggggaccagcggauccugcccuaacgcuacaagcagaucuggcuucuuugccaccauggcgugggccgucccccgggacaauaacaagaccgcuacaaauccucuuacgguggaggugcccuacauuuguaccaaaggggaagaucagaucacagucuggggauuccacuccgacaacaagauucagaugaaaaaucuguauggcgauagcaacccgcaaaaguuuaccucuuccgccaacgggguuacaacccauuacgugagccagaucggaggcuucccugaccagacggaggauggcgggcucccccagucuggacgcauuguggucgacuauauggugcaaaagccuggcaaaacagggaccaucguuuaccagagaggagugcugcuuccccagaaggucuggugcgcuuccggccggagcaaagugguuaaggggucccugccccucaucggagaggccgauugucugcacgaaaaauauggcggccugaauaagucuaaaccuuacuacaccggggagcacgcgaaggccauuggaaacugcccgaucugggugaagacaccccucaaacuggcuaauggcaccaaguaucgcccucccgccaaacuucugaaggaaagaggguuuuucggagcuauugccggcuuucucgaagggggcugggagggaaugaucgccggcuggcauggguacacaagccacggagcucauggcgucgcgguggccgcugaccugaaauccacgcaggaggccauuaacaagaucaccaagaaucuuaacagccugucugagcucgaagucaaaaaucugcaacggcuguccggggccauggaugagcuccacaacgaaauccuggagcuugacgagaagguggacgaucugcgcgcugacacaauuagcucucagaucgaacucgccguucugcuuagcaaugagggaauuaucaacuccgaagaugagcaucugcucgcgcuggaaagaaaacugaagaaaaugcucggcccuucugcuguggacauugggaauggcuguuucgagaccaagcacaagugcaaccagacaugccuggaucggaucgccgccggaaccuuuaaugcuggcgaguucagccuucccacguuugacucccugaacaucaccgccgcuagccucaaugaugacgggcuggauaaccacacaauucugcuuuauuacucuaccgccgcguccagccucgccgucacacugaugaucgcuauuuucaucguguauaugguuucuagagacaacguguccuguagcauuugccuguga

SEQ ID NO: 218547 - RNA, 1755 nt, Artificial Sequence
  derived and/or modified CDS sequence (opt5) from hemagglutinin__InfluenzaB__ABL77365
augaaggccaucauugugcugcucauggucguuaccagcaacgcugacagaaucugcacaggcauuacguccucuaauagcccccacguggugaaaaccgccacacagggggaggucaacgugaccggaguuaucccucugacaaccacaccgaccaagucccauuucgcgaaucuuaaaggcacgaagacccgggggaaacugugucccaacugccucaauuguacagaucuggacguggcucuuggacgcccuaugugcgucggcaccacacccucugccaaggccagcauucugcacgaagugagaccuguuaccuccggguguuuucccaucaugcaugaucggacgaagauccgccaacucccuaaccugcugagaggauacgagaauauucggcucucuacacagaacgugaucaaugcugaaaaagccccgggcggccccuaucgccuggggaccagcggauccugcccuaacgcuacaagcagaucuggcuucuuugccaccauggcgugggccgucccccgggacaauaacaagaccgcuacaaauccucuuacgguggaggugcccuacgucuguaccgaaggggaggaucagauuacaguuuggggauuccacuccgacaacaaaacccagaugaagaaucuguauggcgauagcaacccgcaaaaauuuacaucuuccgccaacggggugaccacgcauuacgugagccagaucggaggcuucccugaccaggcugaggauggcgggcucccccagucuggacgcauugucguggacuauaugguucaaaagccuggcaagacagggaccaucguguaccagagaggaguccugcuuccccagaaaguguggugcgccuccggccggagcaagguuauuaaagggucccugccccucaucggagaagcggauugucugcacgagaaguauggcggccugaauaaaucuaagccuuacuacaccggggaacacgccaaagcuaucggaaacugcccgauuugggugaagacaccccucaagcuggccaauggcaccaaauaucgcccucccgcuaagcugcugaaagagagaggguuuuucggagccaucgccggcuuucucgaagggggcugggaaggaaugauugcuggcuggcauggguacacaagccacggagcgcauggcgucgccguggcugccgaccugaaguccacgcaggaggccaucaacaaaauuaccaagaaucuuaacagccugucugaacucgaggucaagaaucugcaacggcuguccggggcuauggaugaacuccacaacgagauccuggagcuugacgaaaaaguggacgaucugcgcgccgacacaaucagcucucagauugagcucgcgguucugcuuagcaaugaaggaaucauuaacuccgaggaugaacaccuucucgcucuggagagaaagcugaaaaagaugcucggcccuucugccguggacaucgggaauggcuguuucgagaccaaacauaagugcaaccagacaugccuggaucggauugccgcuggaaccuuuaaugccggcgaguucagccuucccacguuugacucccugaacaucaccgcugccagccucaaugaugacgggcuggauaaccacacaauccugcuuuauuacucuaccgcggccuccagccucgcugucacacugaugauugccaucuucauuguguauaugguuucuagagacaacguguccuguagcaucugccuguga

SEQ ID NO: 218548 - RNA, 1755 nt, Artificial Sequence
  derived and/or modified CDS sequence (opt5) from hemagglutinin__InfluenzaB__ABL84340
augaaggccaucauugugcugcucauggucguuaccagcaacgcugacagaaucugcacaggcauuacguccucuaauagcccccacguggugaaaaccgccacacagggggaagucaacgugaccggaguuaucccucugacaaccacaccgaccaagucccauuucgcgaaucuuaaaggcacgaagacccgggggaaacugugucccacaugccucaacuguaccgaucuggacguggcucuuggacgcccuaugugcgucggcauuacacccucugccaaggccagcauccugcacgaagugagaccuguuaccuccggguguuuucccaucaugcaugaucggacgaagauucgccaacucccuaaucugcugagaggauacgagaaaauccggcucucuacacagaacgugauuaaugcugaaaaggccccgggcggccccuaucgccuggggaccagcggauccugcccuaacacaaccagcaaaucuggcuucuuugcuaccauggccugggcgguccccagagacaauaacaagacagccacgaauccucuuaccguggaggugccccacaucuguacaaaagaagaggaucagauuaccgucuggggguuccauuccgacaacaagacacagaugaagaaucuguacggagauagcaacccgcaaaaauuuaccucuuccgcuaauggcguuacgacacacuaugugagccagaucgggggauucccugaccagaccgaggauggcggccucccccagucugggcggauuguggucgacuacauggugcaaaagccuggaaaaaccggcacaaucguuuaucagcgcgggauccugcuuccccagaagguguggugcgccuccggaagaagcaaagucauuaagggcucccugccccucaucggggaagcugauugucugcacgagaaauacggaggccugaacaagucuaagccuuauuacaccggcgaacaugccaaagcgauugggaacugcccgaucugggugaagacaccccucaaacuggccaauggaacgaaguaccggccucccgcuaaacuucugaaggagcgcggcuuuuucggggccauugcuggauuucucgagggcgggugggaaggcaugaucgccggauggcacggcuauaccagccauggggcccacggaguugcuguggcggccgaccugaaguccacacaggaggcuaucaacaaaauuaccaagaaucuuaacagccugucugaacucgaggucaaaaaucugcaaagacuguccggcgccauggaugaacuccacaacgagauccuggagcuugacgaaaagguggacgaucugcgggccgacacaauuagcucucagaucgagcucgcuguccugcuuagcaaugaagggauuaucaacuccgaggaugaacaucugcucgcccuggagcgcaaacugaagaagaugcucggaccuucugcgguggacaucggcaauggguguuucgagaccaaacacaagugcaaccagacgugccuggauagaauugcugccggcaccuuuaaugccggagaguucagccuucccacauuugacucccugaacaucaccgcugccagccucaauggcgaugggcuggacaaccauacaauucugcuuuacuauucuaccgcugccuccagccucgcgguuacgcugaugaucgccauuuucaucguguacaugauuucucgggauaaugucuccuguagcaucugccuguga

SEQ ID NO: 218549 - RNA, 1755 nt, Artificial Sequence; identical to SEQ ID NO: 218470
  derived and/or modified CDS sequence (opt5) from hemagglutinin__InfluenzaB__ABN50382

SEQ ID NO: 218550 - RNA, 1755 nt, Artificial Sequence; identical to SEQ ID NO: 218470
  derived and/or modified CDS sequence (opt5) from hemagglutinin__InfluenzaB__ABN50393

SEQ ID NO: 218551 - RNA, 1755 nt, Artificial Sequence
  derived and/or modified CDS sequence (opt5) from hemagglutinin__InfluenzaB__ABN50404
augaaggccaucauugugcugcucauggucguuaccagcaacgcugacagaaucugcacaggcauuacguccucuaauagcccccacguggugaaaaccgccacacagggggaagucaacgugaccggaguuaucccucugacaaccacaccgaccaagucccauuucgcgaaucuuaaaggcacgaagacccgggggaaacugugucccacaugccucaacuguaccgaucuggacguggcucuuggacgcccuaugugcgucggcgugacacccucugccaaggccagcauucugcacgaaguuagaccugugaccuccggguguuuucccaucaugcaugaucggacgaagauccgccaacucccuaaucugcugagaggauacgagaaaauucggcucucuacacagaacgucaucaaugcugaaaaggccccgggcggccccuaucgccuggggaccagcggauccugcccuaacgcuacaagcagaucuggcuucuuugccaccauggcgugggccgugccccgggacaauaacaaaaccgcuacaaauccucuuacgguggaggucccccacauuuguaccaaggaagaggaucagaucacaguuuggggguuccauuccgacaacaaaacccagaugaagaaucuguacggagauagcaacccgcaaaaguuuacaucuuccgccaauggcgugaccacgcacuaugugagccagauugggggauucccugaccagacagaggauggcggccucccccagucugggcgcaucgucguggacuacaugguucaaaaaccuggaaagaccggcaccauuguguaucagagagggauccugcuuccccagaaagucuggugcgcuuccggacggagcaaggugaucaaaggcucccugccccucauuggggaagccgauugucugcacgagaaguacggaggccugaacaaaucuaagccuuauuacacaggcgaacaugcgaaggccaucgggaacugcccgauuuggguuaaaacaccccucaagcuggcuaauggaacaaaauaccgcccucccgccaaacuucugaaggagagaggcuuuuucggggcuaucgccggauuucucgagggcgggugggaaggcaugauugccggauggcacggcuauacgagccauggggcucacggaguggcggucgccgcugaccugaaguccacccaggaggccaucaacaagaucaccaaaaaucuuaacagccugucugaacucgaggugaagaaucugcaacggcuguccggcgccauggaugaacuccacaacgagauucuggagcuugacgaaaaagucgacgaucugcgcgcugacaccaucagcucucagauugagcucgccgugcugcuuagcaaugaagggaucauuaacuccgaggaugaacaucugcucgcgcuggagagaaagcugaaaaagaugcucggaccuucugcuguugacaucggcaauggguguuucgagacaaagcacaaaugcaaccagaccugccuggaucggaucgccgccggcacguuuaaugcuggagaguucagccuucccaccuuugacucccugaacauuacagccgcuagccucaaugaugacggccuggauaaccauaccauccugcuuuacuauucuacagccgcguccagccucgccgugacccugaugauugcuaucuucauugucuacaugaucucuagagacaauguguccuguagcauuugccuguga

SEQ ID NO: 218552 - RNA, 1755 nt, Artificial Sequence; identical to SEQ ID NO: 218479
  derived and/or modified CDS sequence (opt5) from hemagglutinin__InfluenzaB__ABN50415

SEQ ID NO: 218553 - RNA, 1755 nt, Artificial Sequence; identical to SEQ ID NO: 218479
  derived and/or modified CDS sequence (opt5) from hemagglutinin__InfluenzaB__ABN50426

SEQ ID NO: 218554 - RNA, 1755 nt, Artificial Sequence
  derived and/or modified CDS sequence (opt5) from hemagglutinin__InfluenzaB__ABN50437
augaaggccaucauugugcugcucauggucguuaccagcaacgcugacagaaucugcacaggcauuacguccucuaauagcccccacguggugaaaaccgccacacagggggaggucaacgugaccggaguuaucccucugacaaccacaccgaccaaguccuacuucgcgaaucuuaaaggcacgcggacccgcgggaagcugugucccgauugccucaacuguacagaccuggauguggcucuuggaagaccuaugugcgucggcaccacacccucugccaaagccagcauucugcaugaagugcggccuguuaccuccggguguuuucccaucaugcacgaccgcacgaagaucagacaacucccuaaucugcugcggggauaugagaacauucgccucucuacacagaaugugaucgaugcugaaaaggccccgggcggccccuacagacuggggaccagcggauccugcccuaacgcuacaagcaaaucuggcuucuuugccaccauggcgugggccguccccaaggacaauaacaaaaaugcuaccaacccucuuacaguggaggugcccuauauuuguacggaaggggaggaucagaucaccgucuggggauuccauuccgacaauaagacacagaugaaaaaccuguacggcgauccgaauccucaaaaguuuaccagcucugccaacgggguuacaacccacuaugugucccagauuggaggcuuccccgaccagacggaggauggcgggcucccucagagcggacggaucguggucgacuacaugaugcaaaagcccggcaaaacagggaccauuguguaucagcgcggaguucugcuuccccagaagguguggugcgcuucuggcaaauccaaggucaucaaagggagccugccucucaucggagaagccgauugucugcaugagaaguacggcggccugaacaaauccaagccguacuauaccggggaacacgcgaaggccauuggaaauugccccaucugggugaaaacaccucucaagcuggcuaacggcaccaaauacagacccccugccaagcugcugaaagagcggggguuuuucggagcuauugccggcuuucucgaagggggcugggaaggaaugaucgccggcuggcacggguauacaucucauggagcucacggcguugcgguggccgcugaccuuaagagcacgcaggaggccauuaauaagaucaccaaaaaccuuaauucccugagcgaacucgaggucaagaaccugcaacgccugucuggggccauggacgaacuccauaaugagauccuggagcuugaugaaaaaguggacgaucugagagcugacacaauuuccagccagaucgagcucgccguccugcuuucuaacgaaggaauuaucaauagcgaggaugaacaucugcucgcgcuggagcggaagcugaaaaagaugcucggccccuccgcuguggacauugggaacggcuguuucgagaccaagcacaaaugcaaucagacaugccuggaucgcaucgccgccggaaccuuuaacgcuggcgaguucucucuuccgacguuugacagccugaauaucaccgccgcuucccucaacgaugacgggcuggauaaucacacaauucugcuuuacuauagcaccgccgcgucuucccucgccguuacacugaugcuggcuaucuucauuguguacauggucagcagagacaacgugucuuguuccaucugccucuga

SEQ ID NO: 218555 - RNA, 1758 nt, Artificial Sequence
  derived and/or modified CDS sequence (opt5) from hemagglutinin__InfluenzaB__ABN50459
augaaggcccugaucgugcuccugauggucguuaccagcaacgcugacagaauuugcacaggcaucacguccucuaauagcccccacguggugaaaaccgccacacagggggaggucaacgugaccggaguuauuccucuuacaaccacaccgaccaagucccauuucgcgaaucugaaaggcacgaagacccgggggaaacucugucccaagugccugaacuguacagaucuugacguggcucugggacgcccuaagugcaccggcaauauccccucugccgaagucagcauucuccacgaggugagaccuguuacauccggguguuuucccaucaugcaugaucggaccaaaauccgccaacugccuaaccugcucagaggauacgaacacauucggcugucuacgcauaaugugaucaacgccgagaaggcuccgggcggccccuauaaaauugggacaagcggauccugcccuaaugucaccaacggcaauggguucuuugccacaauggcuugggccgugcccaagaacgacaauaacaaaaccgcgaccaauagccuuacaaucgaagugccuuacauuuguacggagggagaggaucagaucaccauuuggggcuuccacucugacaacgaaauccagauggccaagcuguauggggauuccaagccccagaaauuuacaagcucugcuaacggagucaccacacacuacguuucccaaaucggcggcuucccgaaucagaccgaggacgggggacucccucagagcggccgcauugugguggauuauaugguccagaagucugggaaaacgggaacaaucaccuaccaaagaggcauucugcuuccccagaagguguggugcgccuccgggcggagcaaaguuaucaagggaucccugccucucauuggcgaagcugacugucugcaugagaaauauggcgggcugaacaagucuaagcccuacuacaccggagagcacgccaaagcgaucggcaauugccccaucugggugaagacaccucucaaacuggccaacgggaccaaguaucgcccgcccgcuaaacuucugaaggaaagaggauuuuucggcgccauugcuggguuucucgagggcggaugggaaggcaugaucgccggguggcauggauacacaagccacggcgcccacggggucgcuguggcggccgaucugaaguccacgcaggaggcuauuaauaaaaucaccaagaaccuuaauagccugucugaacucgagguuaaaaaccugcagcggcuguccggagccauggacgagcuccauaaugaaauucuggagcuugaugaaaagguggacgaccugcgcgccgauacaaucagcucucaaaucgagcucgcuguccugcuuagcaacgaaggcauuaucaauuccgaggacgagcaucugcucgcccuggaaagaaaacugaagaagaugcucgggccuucugcgguggagauuggcaacggauguuucgaaaccaaacacaagugcaaucagacaugccuggaucggaucgcugccggcaccuuugacgccggggaguucagccuucccacguuugauucccugaacauuaccgcugccagccucaaugacgauggacuggacaaccacacaauccugcuuuauuacucuaccgcugccuccagccucgcggucacacugaugauugccaucuucgugguuuauauggugucucgcgauaacgucuccuguagcaucugccuguga

SEQ ID NO: 218556 - RNA, 1758 nt, Artificial Sequence
  derived and/or modified CDS sequence (opt5) from hemagglutinin__InfluenzaB__ABN50470
augaaggccaucauugugcugcucauggucguuaccagcaacgcugacagaaucugcacaggcauuacguccucuaauagcccccacguggugaaaaccgccacacagggggaggucaacgugaccggaguuaucccucugacaaccacaccgaccaagucccauuucgcgaaucuuaaaggcacgaagacccgggggaaacugugucccaagugccucaacuguacagaucuggacguggcucuuggacgcccuaagugcaccggcaauauucccucugccaaagucagcauccugcacgaagugagaccuguuacauccggguguuuucccaucaugcaugaucggaccaagauucgccaacucccuaaccugcugagaggauacgagcggauccgccucucuaaucacaacgugauuaaugccgaaaaagcuccgggcggccccuauaagaucgggacgagcggauccugcccuaacgucacaaauggcaacggguucuuugccaccauggcuugggccgugcccaaaaaugagaacaauaagacagcgaccaacagccugaccauugaagugccuuacaucuguacagagggagaggaccagauuacggucuggggcuuccauucugauaacgaaauccagauggccaaacuuuauggggacuccaagccccagaaguuuaccagcucugcuaauggaguuacaacccacuacgugucccaaaucggcggcuucccgaaccagacagaggaugggggacugccucagagcggcagaauuguggucgacuauauggugcagaaaucugggaagaccggaacgaucacauaccaacggggcauucuccugccccagaaaguuuggugcgccuccgggcgcagcaaggugaucaaaggaucccuuccucugauuggcgaagcugauugucuccacgagaaguauggcgggcugaauaagucuaaacccuacuacaccggagagcaugccaaggcgaucggcaacugccccaucugggucaaaaccccucugaagcucgccaaugggacaaaauauagaccgcccgcuaagcugcuuaaggaacggggauuuuucggcgccauugcuggguuucuggagggcggaugggaaggcaugaucgccggguggcacggauacaccagccauggcgcccacgggguggcuguugcggccgaccucaaauccacacaggaggcuauuaacaagaucacgaaaaaucugaacagccuuucugaacuggaggugaagaaucuccagcgccuguccggagccauggaugagcugcacaacgaaauucucgagcuggacgaaaaagucgaugaccuuagagccgacaccaucagcucucaaaucgagcuggcugugcuccugagcaaugaaggcauuaucaacuccgaggaugagcaucuucuggcccucgaacggaagcugaagaaaaugcuggggccuucugcggucgagauuggcaauggauguuucgaaacaaagcacaaaugcaaccagaccugccucgaccgcaucgcugccggcacauuuaaugccggggaguucagccugcccaccuuugauucccuuaacauuacggcugccagccugaacgacgauggacucgacaaucauaccauccugcuguauuacucuacagcugccuccagccuugcggugacccucaugauugccaucuucguuguguauauggucucuagagauaacguguccuguagcaucugccuguga

SEQ ID NO: 218557 - RNA, 1755 nt, Artificial Sequence
  derived and/or modified CDS sequence (opt5) from hemagglutinin__InfluenzaB__ABN50481
augaaggccaucauugugcugcuccuggucguuaccagcaacgcugacagaaucugcacaggcauuacguccucuaauagcccccacguggugaaaaccgccacacagggggaggucaacgugaccggagcgaucccucuuacaaccacaccgaccaagucccauuucgcuaaucugaaaggcacgaagacccgggggaaacucugucccacaugcuuuaacuguaccgaucuggacguugcccuuggacgcccuaugugcgugggcauuacacccucugccaaggcuagcauccugcacgaagucagaccugugaccuccggguguuuccccaucaugcaugaucggacgaagauucgccaacucccuaaucugcugagaggauacgagaaaauccggcucucuacacagaacguuauugacgccgaaaaggcuccgggcggccccuaucgccuggggaccagcggauccugcccuaaugccacaagcaaaucuggcuuuuucgcgaccauggccugggcugugcccagagauaacaauaagaccgccacaaacccucuuacggucgaggugccccacaucuguaccaaagaagaggaccagauuacaguguggggguuucauuccgauaauaagacccagaugaagaaccuguacggagacagcaauccgcaaaaauucacaucuuccgcuaacggcaucaccacgcacuaugucagccagauugggggauuuccugaucagacagaggacggcggccucccccagucugggcggaucguuguggauuacauggugcaaaagccuggaaaaaccggcaccaucgucuaucagcgcgggauucugcuuccccagaagguguggugcgccuccggaagaagcaaaguuaucaagggcucccugccccucauuggggaagcggacugucugcacgagaaauacggaggccugaauaagucuaagccuuauuacacaggcgaacaugccaaagcuaucgggaacugcccgauuugggugaagacaccccucaaacuggccaacggaaccaaguaccggccucccgcuaaacuucugaaggagcgcggcuucuuuggggccaucgccggauuccucgagggcgggugggaaggcaugaucgcuggauggcacggcuauacgagccauggggcgcacggagucgccguggcugccgaucugaaguccacccaggaggccauuaauaaaaucacaaagaaccuuaauagccugucugaacucgagguuaaaaaccugcaaagacuguccggcgcuauggacgaacuccacaaugagauucuggagcuugacgaaaagguggaugaccugcgggccgauaccaucagcucucagauugagcucgcgguccugcuuagcaacgaagggaucaucaauuccgaggacgaacaucugcucgcucuggagcgcaaacugaagaagaugcucggaccuucugccguggauauuggcaacggguguuuugagacaaaacacaagugcaaucagaccugccuggacagaaucgccgcuggcacguucaacgccggagaauuuagccuucccaccuucgauucccugaauauuacagcugccagccucaacgacgauggccuggacaaucauaccauccugcuuuacuauucuacagcggccuccagccucgcugucacccugaugauugccaucuucauuguguacaugaucucucgggauaacguuuccuguagcaucugccuguga

SEQ ID NO: 218558 - RNA, 1755 nt, Artificial Sequence
  derived and/or modified CDS sequence (opt5) from hemagglutinin__InfluenzaB__ABN50503
augaaggccaucauugugcugcucauggucguuaccagcaacgcugacagaaucugcacaggcauuacguccucuaauagcccccacguggugaaaaccgccacacagggggaagucaacgugaccggaguuaucccucugacaaccacaccgaccaagucccauuucgcgaaucuuaaaggcacgaagacccgggggaaacugugucccacaugccucaacuguaccgaucuggacguggcucuuggacgcccuaugugcgucggcgugacacccucugccaaggccagcauucugcacgaaguuagaccugugaccuccggguguuuucccaucaugcaugaucggacgaagauccgccaacucccuaaucugcugagaggauacgagaaaauucggcucucuacacagaacgucaucaaugcugaaaaggccccgggcggccccuaucgccuggggaccagcggauccugcccuaacgcuacaagcagaucuggcuucuuugccaccauggcgugggccgugcccaaagacaauaacaagaccgcuacaaauccucuuacgguggaggucccccacauuuguaccaaagaagaggaucagaucacaguuuggggguuccauuccgacgauaagacccagaugaagaaccuguacggagacagcaauccgcaaaaauuuacaucuuccgccaacggcgugaccacgcacuaugugagccagauugggggauucccugaucagacagaggacggcggccucccccagucugggcggaucgucguggauuacaugguucaaaagccuggaaaaaccggcaccauuguguaucagcgcgggauccugcuuccccagaaggucuggugcgcuuccggaagaagcaaagugaucaagggcucccugccccucauuggggaagccgacugucugcacgagaaauacggaggccugaauaagucuaagccuuauuacacaggcgaacaugcgaaagccaucgggaacugcccgauuuggguuaagacaccccucaaacuggcuaacggaaccaaguaccggccucccgccaaacuucugaaggagcgcggcuuuuucggggcuaucgccggauuucucgagggcgggugggaaggcaugauugccggauggcacggcuauacgagccauggggcucacggaguggcggucgccgcugaucugaaguccacccaggaggccaucaauaaaaucacaaagaaccuuaauagccugucugaacucgaggugaaaaaccugcaaagacuguccggcgccauggacgaacuccacaaugagauucuggagcuugacgaaaaggucgaugaccugcgggcugauaccaucagcucucagauugagcucgccgugcugcuuagcaacgaagggaucauuaauuccgaggacgaacaucugcucgcgcuggagcgcaaacugaagaagaugcucggaccuucugcuguugauaucggcaacggguguuucgagacaaaacacaagugcaaucagaccugccuggacagaaucgccgccggcacguuuaacgcuggagaguucagccuucccaccuuugauucccugaauauuacagccgcuagccucaacgacgauggccuggacaaucauaccauccugcuuuacuauucuacagccgcguccagccucgccgugacccugaugauugcuaucuucauugucuacaugaucucucgggauaacguguccuguagcauuugccuguga

SEQ ID NO: 218559 - RNA, 1755 nt, Artificial Sequence
  derived and/or modified CDS sequence (opt5) from hemagglutinin__InfluenzaB__ABN50514
augaaggccaucauugugcugcucauggucgcuaccagcaacgccgacagaaucugcacaggcauuacguccucuaauagcccccacguugugaaaaccgcgacacagggggaggugaacgucaccggagugaucccucugacaaccacaccgaccaaguccuacuucgcuaaucuuaaaggcacgcggacccgcgggaagcugugucccgauugccucaacuguacagaccuggauguugcccuuggaagaccuaugugcgugggcaccacacccucugccaaagcuagcauucugcaugaaguccggccugugaccuccggguguuuucccaucaugcacgaccgcacgaagaucagacaacucccuaaucugcugcggggauaugagaacauucgccucucuacacagaauguuaucgaugccgaaaaggcuccgggcggccccuacagacuggggaccagcggauccugcccuaacgccacaagcaaaucuggcuucuuugcgaccauggccugggcugugcccaaggacaauaacaaaaaugccaccaacccucuuacagucgaggugcccuauguguguacggaaggggaggaucagauuaccgucuggggauuccauuccgacaauaagccgcagaugaaaaaccuguacggcgauagcaauccucaaaaguuuacaucuuccgcuaacgggguuaccacacacuaugugagccagaucggaggcuuccccgaccagaccgaggauggcgggcucccucagucuggacggauuguggucgacuacauggugcaaaagcccggcaaaacggggacaaucguuuaucagcgcggagugcugcuuccccagaaggucuggugcgccuccggcagaagcaaagugauuaaggggucccugccucucaucggagaagcggauugucugcaugagaaauacggcggccugaacaagucuaaaccguacuauaccggggaacacgccaaggcuaucggaaauugccccauuuggguuaagaccccucucaaacuggccaacggcacaaaguaccggcccccugcuaaacuucugaaggagcgcggguuuuucggagccaucgccggcuuucucgaagggggcugggaaggaaugauugcuggcuggcacggguauaccagccauggagcgcacggcguggccgucgcugccgaccugaaauccacacaggaggccaucaauaagauuacgaagaaccuuaauagccugucugaacucgaggugaaaaaccugcaaagacuguccggggcuauggacgaacuccaugaugagauccuggagcuugacgaaaaggucgaugaccugcgggccgauaccaucagcucucagauugagcucgcggugcugcuuagcaaugaaggaaucauuaacuccgaggacgaacaucugcucgcucuggagcgcaaacugaagaaaaugcucggccccucugccguugauaucgggaauggcuguuucgagacaaagcacaagugcaaccagaccugccuggacagaauugccgcuggaacauuuaaugccggcgaguucagccuuccgaccuuugauucccugaacaucacggcugccagccucaaugacgaugggcuggacaaccacaccauccugcuuuacuauucuacagcggccuccagccucgcugugacccugaugcuggccauuuucaucgucuacauggugucucgggacaauguuuccuguagcauuugccucuga

SEQ ID NO: 218560 - RNA, 1755 nt, Artificial Sequence
  derived and/or modified CDS sequence (opt5) from hemagglutinin__InfluenzaB__ABN50525
augaaggccaucauugugcugcucauggucguuaccagcaacgcugacagaaucugcacaggcauuacguccucuaauagcccccacguggugaaaaccgccacacagggggaggucaacgugaccggaguuaucccucugacaaccacaccgaccaaguccuacuucgcgaaucuuaaaggcacgcggacccgcgggaagcugugucccgauugccucaacuguacagaccuggauguggcucuuggaagaccuaugugcgucggcaccacacccucugccaaagccagcauucugcaugaagugcggccuguuaccuccggguguuuucccaucaugcacgaccgcacgaagaucagacaacucccuaaucugcugcggggauaugagaacauucgccucucuacacagaaugugaucgaugcugaaaaggccccgggcggccccuacagacuggggaccagcggauccugcccuaacgcuacaagcaaaucuggcuucuuuuccaccauggccugggcgguccccaaggacaauaacaaaaaugccaccaacccucuuacaguggaggugcccuaugucuguacggaaggggaggaucagauuaccguuuggggauuccauagcgacaauaagacacagaugaaaaaccuguacggcgauucuaauccgcaaaaguuuaccuccagcgcuaacggggugacaacccacuaugugucucagaucggaggcuucccugaccagacggaggauggcgggcucccccaguccggacggauugucguggacuacaugguucaaaagccuggcaaaacagggaccaucguguaucagcgcggaguccugcuuccccagaagguguggugcgccagcggcagauccaaaguuauuaaggggucucugccccucaucggagaagcugauugucugcaugagaaauacggcggccugaacaagagcaaaccuuacuauaccggggaacacgccaaggcgaucggaaauugcccgauuugggugaagacaccccucaaacuggccaacggcaccaaguaccggccucccgcuaaacuucugaaggagcgcggguuuuucggagccaucgcuggcuuucucgaagggggcugggaaggaaugauugccggcuggcacggguauacaucccauggagcccacggcgucgcuguggcggccgaccugaaaagcacgcaggaggcuaucaauaagauuaccaagaaccuuaauucucuguccgaacucgaggucaaaaaccugcaaagacugagcggggccauggacgaacuccauaaugagauccuggagcuugaugaaaagguggacgaucugcgggccgacacaaucucuagccagauugagcucgcuguucugcuuuccaacgaaggaaucauuaauucugaggaugaacaucugcucgcccuggagcgcaaacugaagaaaaugcucggcccuagcgcgguggacaucgggaacggcuguuucgagaccaagcacaagugcaaucagacaugccuggauagaauugcugccggaaccuuuaacgccggcgaguucucccuucccacguuugacagccugaauaucaccgcugccucucucaacgaugacgggcuggauaaucacacaauccugcuuuacuauuccaccgcugccagcucucucgcggucacacugaugcuggccauuuucaucguguacaugguuucccgggacaacgugagcuguuccauuugccucuga

SEQ ID NO: 218561 - RNA, 1758 nt, Artificial Sequence
  derived and/or modified CDS sequence (opt5) from hemagglutinin__InfluenzaB__ABN50536
augaaggccaucauugugcugcucauggucguuaccagcaacgcugacagaaucugcacaggcauuacguccucuaauagcccccacguggugaaaaccgccacacagggggaagucaacgugaccggaguuaucccucugacaaccacaccgaccaagucccauuucgcgaaucuuaaaggcacgaagacccgggggaaacugugucccaagugccucaacuguacagaucuggacguggcucuuggacgcccuaagugcaccggcaauauucccucugccaaagucagcauccugcacgaagugagaccuguuacauccggguguuuucccaucaugcaugaucggaccaagauucgccaacucccuaaccugcugagaggauacgagcggauccgccucucuaaucacaacgugauuaaugccgaagaggcuccgggcggccccuauaaaaucgggacgagcggauccugcccuaacgucacaaauggcaacggguucuuugccaccauggcuugggccgugcccaagaaugaaaacaauaaaacagcgaccaacagccugaccauugaggugccuuacaucuguacagagggagaagaccagauuacggucuggggcuuccauucugauaacgagauccagauggccaaacuuuauggggacuccaagccccagaaguuuaccagcucugcuaauggaguuacaacccacuacgugucccaaaucggcggcuucccgaaccagacagaagaugggggacugccucagagcggcagaauuguggucgacuauauggugcagaagucugggaaaaccggaacgaucacauaccaacggggcauucuccugccccagaagguuuggugcgccuccgggcgcagcaaagugaucaagggaucccuuccucugauuggcgaggcugauugucuccacgagaaauauggcgggcugaauaagucuaagcccuacuacaccggagaacaugccaaagcgaucggcaacugccccaucugggucaagaccccucugaaacucgccaaugggacaaaguauagaccgcccgcuaaacugcuuaaggagcggggauuuuucggcgccauugcuggguuucuggaaggcggaugggagggcaugaucgccggguggcacggauacaccagccauggcgcccacgggguggcuguugcggccgaccucaaguccacacaggaagcuauuaacaaaaucacgaagaaucugaacagccuuucugagcuggaggugaaaaaucuccagcgccuguccggagccauggaugaacugcacaacgagauucucgaacuggacgagaaggucgaugaccuuagagccgacaccaucagcucucaaaucgaacuggcugugcuccugagcaaugagggcauuaucaacuccgaggaugaacaucuucuggcccucgagcggaaacugaagaagaugcuggggccuucugcggucgaaauuggcaauggauguuucgagacaaaacacaagugcaaccagaccugccucgaccgcaucgcugccggcacauuuaaugccggggaguucagccugcccaccuuugauucccuuaacauuacggcugccagccugaacgacgauggacucgacaaucauaccauccugcuguauuacucuacagcugccuccagccuugcggugacccucaugauugccaucuucguuguguauauggucucuagagauaacguguccuguagcaucugccuguga

SEQ ID NO: 218562 - RNA, 1758 nt, Artificial Sequence
  derived and/or modified CDS sequence (opt5) from hemagglutinin__InfluenzaB__ABN50547
augaaggccaucauugugcugcucauggucguuaccagcaacgcugacagaaucugcacaggcauuacguccucuaauagcccccacguggugaaaaccgccacacagggggaagucaacgugaccggaguuaucccucugacaaccacaccgaccaagucccauuucgcgaaucuuaaaggcacgaagacccgggggaaacugugucccaagugccucaacuguacagaucuggacguggcucuuggacgcccuaagugcaccggcaauauucccucugccaaagucagcauccugcacgaagugagaccuguuacauccggguguuuucccaucaugcaugaucggaccaagauucgccaacucccuaaccugcugagaggauacgagcacauccggcucucuacgcauaaugugauuaacgccgaaaaagcuccgggcggccccuauaagaucgggacaagcggauccugcccuaaugucaccaacggcaauggguucuuugccacaauggcuugggccgugcccaaaaacgacaauaacaagaccgcgaccaauagccugacaauugaggugccuuacaucuguacggaaggagaggaucagcuuaccgucuggggcuuccacucugacaacgagaaccagauggccaagcuguauggggauuccaaaccccagaaguuuacaagcucugcuaauggaguuaccacacacuacgugucccaaauuggcggcuucccgaaccagaccgaagacgggggacucccucagagcggccgcaucguggucgauuauauggugcagaaaucugggaagacgggaacaaucaccuaccaaagaggcauucugcuuccccagaaaguuuggugcgccuccgggcggagcaaggugaucaaaggaucccugccucucauuggcgaggcugacugucugcaugaaaaguauggcgggcugaauaagucuaaacccuacuacaccggagagcacgccaaggcgaucggcaacugccccauuugggucaaaacaccucucaagcuggccaaugggaccaaauaucgcccgcccgcuaagcugcugaaggagagaggauuuuucggcgccaucgcuggguuucucgaaggcggaugggagggcaugaucgccggguggcauggauacacaagccacggcgcccacgggguggcuguugcggccgaucugaaauccacgcaggaagcuauuaacaagaucaccaaaaaucuuaacagccugucugagcucgaagugaagaaucugcagcggcuguccggagccauggacgagcuccauaacgagauucuggaacuugaugagaaagucgacgaccugcgcgccgauacaaucagcucucaaauugaacucgcugugcugcuuagcaaugagggcaucaucaacuccgaagacgagcaccuucucgcccuggagagaaagcugaagaaaaugcucgggccuucugcggucgaaauuggcaauggauguuucgagaccaagcauaaaugcaaccagacaugccuggaucggaucgcugccggcaccuuugacgccggggaguucagccuucccacguuugauucccugaauauuaccgcugccagccucaacgacgauggacuggacaaccacacaauccugcuuuauuacucuaccgcugccuccagccucgcggugacacugaugauugccaucuucguuguguauauggucucucgcgauaauguguccuguagcauuugccuguga

SEQ ID NO: 218563 - RNA, 1758 nt, Artificial Sequence
  derived and/or modified CDS sequence (opt5) from hemagglutinin__InfluenzaB__ABN50558
augaaggccaucauugugcugcucauggucguuaccagcaacgcugacagaaucugcacaggcauuacguccucuaauagcccccacguggugaaaaccgccacacagggggaagucaacgugaccggaguuaucccucugacaaccacaccgaccaagucccauuucgcgaaucuuaaaggcacgaagacccgggggaaacugugucccaagugccucaacuguacagaucuggacguggcucuuggacgcccuaagugcaccggcaauauucccucugccaaagucagcauccugcacgaagugagaccuguuacauccggguguuuucccaucaugcaugaucggaccaagauucgccaacucccuaaccugcugagaggauacgagcacauccggcucucuacgcauaaugugauuaacgccgaaaaagcuccgggcggccccuauaagaucgggacaagcggauccugcccuaaugucaccaacggcaauggguucuuugccacaauggcuugggccgugcccaaaaacgacaauaacaagaccgcgaccaauagccugacaauugaggugccuuacaucuguacggaaggagaggaucagauuaccgucuggggcuuccacucugacaaggagacacagauggccaaacuuuauggggauuccaagccccagaaauuuaccagcucugcuaacggaguuacaacccacuacgugucccaaaucggcggcuucccgaaccagacggaagacgggggacugccucagagcggccgcaucguggucgauuauaugaugcagaagucugggaaaacaggaaccauuaccuaccaaagaggcauccuccugccccagaagguguggugcgccuccgggcggagcaaaguuauuaagggaucccuuccucugaucggcgaggcugacugucuccaugaaaaguauggcgggcugaauaaaucuaagcccuacuacacaggagagcacgccaaagcgauuggcaacugccccaucugggugaagaccccucugaaacucgccaaugggacaaaguaucgcccgcccgcuaagcugcuuaaagagagaggauuuuucggcgccaucgcuggguuucuggaaggcggaugggagggcaugauugccggguggcauggauacacgagccacggcgcccacggggucgcuguggcggccgaucucaaguccacccaggaagcuaucaacaaaauuacaaagaaucugaacagccuuucugagcuggaaguuaaaaaucuccagcggcuguccggagccauggacgagcugcauaacgagauccucgaacuggaugagaagguggacgaccuucgcgccgauaccauuagcucucaaaucgaacuggcuguccuccugagcaaugagggcaucauuaacuccgaagacgagcaccuucuggcccucgagagaaagcugaaaaagaugcuggggccuucugcgguggaaaucggcaauggauguuucgagacaaaacauaagugcaaccagaccugccucgaucggauugcugccggcacguuugacgccggggaguucagccugcccaccuuugauucccuuaauaucacagcugccagccugaacgacgauggacucgacaaucacaccauucugcuguauuacucuacagcugccuccagccuugcggucacccucaugaucgccauuuucgugguuuauauggugucucgcgauaacgucuccuguagcaucugccuguga

SEQ ID NO: 218564 - RNA, 1755 nt, Artificial Sequence; identical to SEQ ID NO: 218479
  derived and/or modified CDS sequence (opt5) from hemagglutinin__InfluenzaB__ABN50569

SEQ ID NO: 218565 - RNA, 1758 nt, Artificial Sequence; identical to SEQ ID NO: 218491
  derived and/or modified CDS sequence (opt5) from hemagglutinin__InfluenzaB__ABN50580

SEQ ID NO: 218566 - RNA, 1758 nt, Artificial Sequence
  derived and/or modified CDS sequence (opt5) from hemagglutinin__InfluenzaB__ABN50591
augaaggccaucauugugcugcucauggucguuaccagcaacgcugacagaaucugcacaggcauuacguccucuaauagcccccacguggugaaaaccgccacacagggggaggucaacgugaccggaguuaucccucugacaaccacaccgaccaagucccauuucgcgaaucuuaaaggcacgaagacccgggggaaacugugucccaagugccucaacuguacagaucuggacguggcucuuggacgcccuaagugcaccggcaauauucccucugccaaagucagcauccugcacgaagugagaccuguuacauccggguguuuucccaucaugcaugaucggaccaagauucgccaacucccuaaccugcugagaggauacgagcggauccgccucucuaaucacaacgugauuaaugccgaaaaagcuccgggcggccccuauaagaucgggacgagcggauccugcccuaacgucacaaauggcaacggguucuuugccaccauggcuugggccgugcccaaaaaugagaacaauaagacagcgaccaacagccugaccauugaagugccuuacaucuguacagagggagaggaccagauuacggucuggggcuuccauucugauaacgaagcccagauggcuaaacuuuauggggacuccaagccccagaaguuuaccagcucugccaauggaguuacaacccacuacgugucccaaaucggcggcuucccgaaccagacagaggaugggggacugccucagagcggcagaaucguggucgacuauauggugcagaaaucugggaagaccggaacgauuacauaccaacggggcauccuccugccccagaaaguuuggugcgcuuccgggcgcagcaaggugauuaaaggaucccuuccucugaucggcgaagccgauugucuccacgagaaguauggcgggcugaauaagucuaaacccuacuacaccggagagcaugcgaaggccauuggcaacugccccaucugggucaaaaccccucugaagcucgcuaaugggacaaaauauagaccgcccgccaagcugcuuaaggaacggggauuuuucggcgcuaucgccggguuucuggagggcggaugggaaggcaugauugccggguggcacggauacaccagccauggcgcucacgggguggcgguugccgcugaccucaaauccacacaggaggccaucaacaagauuacgaaaaaucugaacagccuuucugaacuggaggugaagaaucuccagcgccuguccggagccauggaugagcugcacaacgaaauccucgagcuggacgaaaaagucgaugaccuuagagcugacaccauuagcucucaaaucgagcuggccgugcuccugagcaaugaaggcaucauuaacuccgaggaugagcaucuucuggcgcucgaacggaagcugaagaaaaugcuggggccuucugcugucgagaucggcaauggauguuucgaaacaaagcacaaaugcaaccagaccugccucgaccgcauugccgccggcacauuuaaugcuggggaguucagccugcccaccuuugauucccuuaacaucacggccgcuagccugaacgacgauggacucgacaaucauaccauucugcuguauuacucuacagccgcguccagccuugccgugacccucaugaucgcuauuuucguuguguauauggucucuagagauaacguguccuguagcaucugccuguga

SEQ ID NO: 218567 - RNA, 1758 nt, Artificial Sequence
  derived and/or modified CDS sequence (opt5) from hemagglutinin__InfluenzaB__ABN50602
augaaggccaucauugugcugcucauggucguuaccagcaacgcugacagaaucugcacaggcauuacguccucuaauagcccccacguggugaaaaccgccacacagggggaggucaacgugaccggaguuaucccucugacaaccacaccgaccaagucccauuucgcgaaucuuaaaggcacgaagacccgggggaaacugugucccaagugccucaacuguacagaucuggacguggcucuuggacgcccuaagugcaugggcaccauucccucugccaaagccagcauccugcacgaagucaagccugugacauccggguguuuucccaucaugcaugauagaaccaaaauucggcaacucccuaaucugcugcgcggauacgagaacaucagacucucuacgcacaauguuauuaacgcugaaacagccccgggcggccccuauaagaucgggaccagcggauccugcccuaauauuacaaacggcaauggguucuuugcuaccauggccugggcggugcccaaaaacgacaauaacaagaccgccacaaauccucugacggucgaggugcccuacaucuguaccgaaggagaggaucagauuacaguguggggcuuccauagcgacaacgagacccagauggucaagcuguauggggauucuaaaccgcagaaguuuacauccagcgcuaacggaguuaccgcccacuacgugucucaaaucggcggcuucccuaaucaggcugaagacgggggacugccccaguccggccggaucguggucgauuauauggugcagaaaagcgggaagacgggaacaauuaccuaccaacgcggcauccuccugccucagaaaguuuggugcgccucugggagauccaaggugauuaaaggaagccuuccccugaucggcgaggcggacugucuccacgaaaaguauggcgggcugaacaaguccaaacccuacuacaccggagagcaugccaaggcuauuggcaauugcccuaucugggucaaaacaccgcugaagcucgccaacgggaccaaauaucggcccccugcuaagcugcuuaaggagcgcggauuuuucggcgccaucgccggguuucuggaaggcggaugggagggcaugauugcuggguggcacggauacacaucucauggcgcgcacgggguggccguugcugccgaucucaaaagcacgcaggaagccaucaauaagauuaccaaaaaccuuaauucccuuagcgagcuggaagugaagaaccuccagagacugucuggagcuauggacgagcugcacaaugagauccucgaacuggaugagaaagucgacgaccuucgggccgauacaauuuccagccaaaucgaacuggcggugcuccugucuaacgagggcaucauuaauagcgaagacgagcaucuucuggcucucgagcgcaagcugaagaaaaugcuggggcccuccgccgucgauaucggcaacggauguuucgaaaccaagcacaaaugcaaucagacaugccucgacagaauugccgcuggcaccuuuaacgccggggaguucucucugccuacguuugauagccuuaauaucaccgcugccucccugaacgacgauggacucgacaaccauacaauucugcuguauuacagcaccgcggccucuucccuugcugugacacucaugaucgccauuuucaucguuuauauggugagccgggauaaugucucuuguuccaucugccuguga

SEQ ID NO: 218568 - RNA, 1752 nt, Artificial Sequence
  derived and/or modified CDS sequence (opt5) from hemagglutinin__InfluenzaB__ABN50624
augaaggccaucauugugcugcucauggucguuaccagcaacgcugacagaaucugcacaggcauuacguccucuaauagcccccacguggugaaaaccgccacacagggggaggucaacgugaccggaguuaucccucugacaaccacaccgaccaagucccauuucgcgaaucuuaaaggcacgaagacccgggggaaacugugucccaacugccucaauuguacagaucuggacguggcucuuggacgcccuaugugcauuggcaccauccccucugccaaggccagcauccugcacgaagucagaccugugacauccggguguuuucccauuaugcaugaucggaccaagauccgccaacucccuaaccugcugagaggauacgagaauauucggcucucuacgcacaacguuaucaaugcugaacgcgccccgggcggccccuauagacuggggacaagcggauccugcccuaacgugaccagcaaaucuggcuucuuugcuacaauggccugggcggucccccgggacaauaagaccgccaccaacccucuuacaguggaggugcccuacauuuguacgaaaggggaagaucagaucaccgucuggggauuccauuccgacaauaagaaccagaugaaaaaucuguauggcgauagcaacccgcagaaguuuacaucuuccguuaacggggugaccacacacuacgugagccaaauuggaggcuucccuaaucagaccgaggacggcgggcucccccagucuggacgcaucgucguggauuauaugguucagaagccuggcaaaacggggacaaucguguaccaaagaggaguccugcuuccccagaagguguggugcgcuuccggccggagcaaaguuauuaaggggucccugccccucaucggagaggccgacugucugcacgaaaaauauggcggccugaacaagucuaaaccuuacuacaccggggagcaugcuaaggccauuggaaauugcccgaucugggugaagacaccccucaaacuggcgaacggcaccaaguaucgcccucccgccaaacuucugaaggaaagaggguuuuucggagcuauugccggcuuucucgaagggggcugggagggaaugaucgcuggcuggcacggguacaccagccauggagcccacggcgucgccguggcugcggaucugaaauccacacaggaggccaucaauaagauuacgaagaaccuuaauagccugucugagcucgaagucaaaaaccugcagcggcuguccggggcuauggacgagcuccacaaugaaauccuggagcuugaugagaagguggacgaccugcgcgccgauaccauuagcucucaaaucgaacucgccguucugcuuagcaacgagggaauuaucaauuccgaagacgagcaucugcucgcucuggaaagaaaacugaagaaaaugcucggcccuucugccguggauaucgggaacggcuguuucgagacaaagcacaagugcaaucagaccugccuggaccggauugcggcuggaacauuuaacgccggcgaguucagccuucccaccuuugauucccugaauaucacggccgcuagccucaacgacgaugggcuggacaaccauaccauucugcuuuauuacucuacagccgcuuccagccucgccgucacccugaugaucgcgauuuucaucguguauaugguuucuagagauaauguguccuguagcauuugccuguga

SEQ ID NO: 218569 - RNA, 1752 nt, Artificial Sequence
  derived and/or modified CDS sequence (opt5) from hemagglutinin__InfluenzaB__ABN50635
augaaggccaucauugugcugcucauggucguuaccagcaacgcugacagaaucugcacaggcauuacguccucuaauagcccccacguggugaaaaccgccacacagggggaggucaacgugaccggaguuaucccucugacaaccacaccgaccaagucccauuucgcgaaucuuaaaggcacgaagacccgggggaaacugugucccaacugccucaauuguacagaucuggacguggcucuuggacgcccuaugugcauuggcaccauccccucugccaaggccagcauccugcacgaagucagaccugugacauccggguguuuucccauuaugcaugaucggaccaagauccgccaacucccuaaccugcugagaggauacgagcacauucggcucucuacgcauaauguuaucaacgcugaacgcgccccgggcggccccuauagacuggggacaagcggauccugcccuaaugugaccagccggucuggcuucuuugcuacaauggccugggcggucccccgcgacaacaaaaccgccaccaauccucuuacaguggaggugcccuacauuuguacgaagggggaagaucagaucaccgucuggggauuccacuccgacagcaaaacacagaugaagaaccuguauggcgauucuaauccgcagaaauuuaccuccagcgcuaacgggguuacaacccacuacgugucucaaauuggaggcuucccuaaucagacggaggacggcgggcucccccaguccggaagaaucguggucgauuauauggugcagaagccuggcaagacagggaccaucguuuaccaacggggagugcugcuuccccagaaagucuggugcgccagcggccgcuccaaggugauuaaagggucucugccccucaucggagaggcugacugucugcaugaaaaguauggcggccugaacaaaagcaagccuuacuacaccggggagcacgccaaagcgauuggaaacugcccgaucuggguuaagacaccccucaagcuggccaauggcaccaaauauagaccucccgcuaagcugcugaaagaacggggguuuuucggagccauugcuggcuuucucgaagggggcugggagggaaugaucgccggcuggcauggguacacaucccacggagcccacggcguggcugucgcggccgaucuuaagagcacgcaggaggcuaucaacaaaauuaccaagaaucuuaacucucuguccgagcucgaagugaagaaucugcagcgccugagcggggccauggacgagcuccauaacgaaauccuggagcuugaugagaaagucgacgaccugagagccgauacaauuucuagccaaaucgaacucgcugugcugcuuuccaaugagggaauuaucaacucugaagacgagcaucugcucgcccuggaacggaagcugaaaaagaugcucggcccuagcgcgguugauaucgggaauggcuguuucgagaccaaacacaagugcaaccagacaugccuggacagaauugcugccggaaccuuuaaugccggcgaguucucccuucccacguuugauagccugaacaucaccgcugccucucucaaugacgaugggcuggacaaccacacaauucugcuuuauuacuccaccgcugccagcucucucgcggugacacugaugaucgccauuuucaucgucuauauggugucccgcgauaauguuagcuguuccauuugccuguga

SEQ ID NO: 218570 - RNA, 1752 nt, Artificial Sequence
  derived and/or modified CDS sequence (opt5) from hemagglutinin__InfluenzaB__ABN50646
augaaggccaucauugugcugcucauggucguuaccagcaacgcugacagaaucugcacaggcauuacguccucuaauagcccccacguggugaaaaccgccacacagggggaggucaacgugaccggaguuaucccucugacaaccacaccgaccaagucccauuucgcgaaucuuaaaggcacgaagacccgggggaaacugugucccaacugccucaauuguacagaucuggacguggcucuuggacgcccuaugugcauuggcaccauccccucugccaaggccagcauccugcacgaagucagaccugugacauccggguguuuucccauuaugcaugaucggaccaagauccgccaacucccuaaccugcugagaggauacgagcacauucggcucucuacgcauaauguuaucaacgcugaacgcgccccgggcggccccuauagacuggggacaagcggauccugcccuaaugugaccagccggucuggcuucuuugcuacaauggccugggcggucccccgcgacaacaaaaccgccaccaauccucuuacaguggaggugcccuacauuuguacgaagggggaagaucagaucaccgucuggggauuccacuccgacaacaaaaaucagaugaagaaccuguauggcgauagcaauccgcagaaauuuacaucuuccgcuaacgggguuaccacacacuacgugagccaaauuggaggcuucccuaaccagaccgaggacggcgggcucccccagucuggaagaaucguggucgauuauauggugcagaagccuggcaagacggggacaaucguuuaccaacggggagugcugcuuccccagaaagucuggugcgccuccggccgcagcaaggugauuaaagggucccugccccucaucggagaggcugacugucugcaugaaaaguauggcggccugaauaaaucuaagccuuacuacaccggggagcacgccaaagcgauuggaaacugcccgaucuggguuaagacaccccucaagcuggccaauggcaccaaauauagaccucccgcuaagcugcugaaagaacggggguuuuucggagccauugcuggcuuucucgaagggggcugggagggaaugaucgccggcuggcauggguacaccagccacggagcccacggcguggcugucgcggccgaucugaaguccacacaggaggcuaucaacaaaauuacgaagaaucuuaacagccugucugagcucgaagugaagaaucugcagcgccuguccggggccauggacgagcuccauaacgaaauccuggagcuugaugagaaagucgacgaccugagagccgauaccauuagcucucaaaucgaacucgcugugcugcuuagcaaugagggaauuaucaacuccgaagacgagcaccuucucgcccuggaacggaagcugaaaaagaugcucggcccuucugcgguugauaucgggaauggcuguuucgagacaaaacauaagugcaaccagaccugccuggacagaauugcugccggaacauuuaaugccggcgaguucagccuucccaccuuugauucccugaacaucacggcugccagccucaaugacgaugggcuggacaaccacaccauucugcuuuauuacucuacagcugccuccagccucgcggugacccugaugaucgccauuuucaucgucuauauggugucucgcgauaacguuuccuguagcauuugccuguga

SEQ ID NO: 218571 - RNA, 1752 nt, Artificial Sequence
  derived and/or modified CDS sequence (opt5) from hemagglutinin__InfluenzaB__ABN50657
augaaggccaucauugugcugcucauggucguuaccagcaacgcugacagaaucugcacaggcauuacguccucuaauagcccccacguggugaaaaccgccacacagggggaggucaacgugaccggaguuaucccucugacaaccacaccgaccaagucccauuucgcgaaucuuaaaggcacgaagacccgggggaaacugugucccaacugccucaauuguacagaucuggacguggcucuuggacgcccuaugugcgucggcauuacccccucugccaaggccagcauccugcacgaagugagaccuguuacauccggguguuuucccaucaugcaugaucggaccaagauucgccaacucccuaaccugcugagaggauacgagaauauccggcucucuacgcagaacgugauuaaugcugaaaaagccccgggcggccccuaucgccuggggacaagcggauccugcccuaacgucaccagcagaacaggcuucuuugcuaccauggccugggcggugccccgggacaauaagaccgccacaaacccucuuacgguggagguccccuacaucuguaccaaaggggaagaucagauuacaguuuggggauuccacucugacaauaagacccagaugaaaaaccuguauggcgauuccaauccgcaaaaguuuacaagcucugcuaacggggugaccacgcauuacgugucccagaucggaggcuucccugaccagacagaggauggcgggcucccccagagcggacgcauugucguggacuauaugguucaaaagccuggcaaaaccgggaccaucguguaccagagaggaauccugcuuccccagaaggucuggugcgccucuggccgguccaaagugauuaaggggagccugccccucaucggagaggcugauugucugcacgaaaaauauggcggccugaacaaguccaaaccuuacuacacaggggagcacgccaaggcgauuggaaauugcccgaucuggguuaagacaccccucaaacuggccaacggcaccaaguaucgcccucccgcuaaacuucugaaggaaagaggguuuuucggagccauugcuggcuuucucgaagggggcugggagggaaugaucgccggcuggcauggguacacgucucacggagcccauggcguggcugucgcggccgaccugaaaagcacccaggaggcuaucaauaagauuacaaagaaccuuaauucccugagcgagcucgaagugaaaaaccugcaacggcugucuggggccauggaugagcuccacaaugaaauccuggagcuugacgagaaggucgacgaucugcgcgccgacaccauuuccagccagaucgaacucgcugugcugcuuucuaacgagggaauuaucaauagcgaagaugagcaucugcucgcccuggaaagaaaacugaagaaaaugcucggcccuuccgcgguugacaucgggaacggcuguuucgagacaaagcacaagugcaaucagaccugccuggaucggauugcugccggaacguuuaacgccggcgaguucucucuucccaccuuugacagccugaauaucacagcugccucccucaacgaugacgggcuggauaaucacaccauucugcuuuauuacagcacagcugccucuucccucgcggugacccugaugaucgccauuuucaucgucuauauggugagcagagacaacguuucuuguuccauuugccuguga

SEQ ID NO: 218572 - RNA, 1755 nt, Artificial Sequence
  derived and/or modified CDS sequence (opt5) from hemagglutinin__InfluenzaB__ABN50679
augaaggccaucauugugcugcucauggucguuaccagcaacgcugacagaaucugcacaggcauuacguccucuaauagcccccacguggugaaaaccgccacacagggggaggucaacgugaccggaguuaucccucugacaaccacaccgaccaagucccauuucgcgaaucuuaaaggcacgaagacccgggggaaacugugucccaacugccucaauuguacagaucuggacguggcucuuggacgcccuaugugcgucggcaccacacccucugccaaggccagcauucugcacgaagugagaccuguuaccuccggguguuuucccaucaugcaugaucggacgaagauccgccaacucccuaaccugcugagaggauacgagaauauucggcucucuacacagaacgugaucaaugcugaaaaagccccgggcggccccuaucgccuggggaccagcggauccugcccuaacgcuacaagcagaucuggcuucuuugccaccauggcgugggccgucccccgggacaauaacaagaccgcuacaaauccucuuacgguggaggugcccuacauuuguaccaaaggggaagaucagaucacagucuggggauuccacuccgacgauaagacccagaugaaaaaccuguauggcgacagcaauccgcaaaaguuuacaucuuccgccaacgggguuaccacgcauuacgugagccagauuggaggcuucccugaucagacagaggacggcgggcucccccagucuggacgcaucguggucgauuauauggugcaaaagccuggcaaaaccgggaccauuguuuaccagagaggagugcugcuuccccagaaggucuggugcgcuuccggccggagcaaagugaucaaggggucccugccccucaucggagaggccgacugucugcacgaaaaauauggcggccugaacaagucuaaaccuuacuacacaggggagcacgcgaaggccauuggaaauugcccgaucuggguuaagacaccccucaaacuggcuaacggcaccaaguaucgcccucccgccaaacuucugaaggaaagaggguuuuucggagcuauugccggcuuucucgaagggggcugggagggaaugaucgccggcuggcauggguacacgagccacggagcucauggcguggcggucgccgcugaucugaaauccacccaggaggccauuaauaagaucacaaagaaccuuaauagccugucugagcucgaagugaaaaaccugcaacggcuguccggggccauggacgagcuccacaaugaaauccuggagcuugacgagaaggucgaugaccugcgcgcugauaccauuagcucucagaucgaacucgccgugcugcuuagcaacgagggaauuaucaauuccgaagacgagcaucugcucgcgcuggaaagaaaacugaagaaaaugcucggcccuucugcuguugauauugggaacggcuguuucgagacaaagcacaagugcaaucagaccugccuggaccggaucgccgccggaacguuuaacgcuggcgaguucagccuucccaccuuugauucccugaauaucacagccgcuagccucaacgacgaugggcuggacaaucacaccauucugcuuuauuacucuacagccgcguccagccucgccgugacccugaugaucgcuauuuucaucgucuauauggugucuagagauaacguuuccuguagcauuugccuguga

SEQ ID NO: 218573 - RNA, 1755 nt, Artificial Sequence
  derived and/or modified CDS sequence (opt5) from hemagglutinin__InfluenzaB__ABN50690
augaaggccaucauugugcugcucauggucguuaccagcaacgcugacagaaucugcacaggcauuacguccucuaauagcccccacguggugaaaaccgccacacagggggaggucaacgugaccggaguuaucccucugacaaccacaccgaccaagucccauuucgcgaaucuuaaaggcacgaagacccgggggaaacugugucccaacugccucaauuguacagaucuggacguggcucuuggacgcccuaugugcgucggcaccacacccucugccaaggccagcauucugcacgaagugagaccuguuaccuccggguguuuucccaucaugcaugaucggacgaagauccgccaacucccuaaccugcugagaggauacgagaauauucggcucucuacacagaacgugaucaaugcugaaaaagccccgggcggccccuaucgccuggggaccagcggauccugcccuaacgcuacaagcagaucuggcuucuuugccaccauggcgugggccgucccccgggacaauaacaagaccgcuacaaauccucuuacgguggaggugcccuacgucuguaccgaaggggaggaucagauuacaguuuggggauuccacuccgacaacaaaacccagaugaagaaucuguauggcgauagcaacccgcaaaaauuuacaucuuccgccaacggggugaccacgcauuacgugagccagaucggaggcuucccugaccagacagaggauggcgggcucccccagucuggacgcauugucguggacuauaugguucaaaagccuggcaagaccgggaccaucguguaccagagaggaguccugcuuccccagaaaguguggugcgcuuccggccggagcaagguuauuaaagggucccugccccucaucggagaagccgauugucugcacgagaaguauggcggccugaauaaaucuaagccuuacuacacaggggaacacgcgaaagccaucggaaacugcccgauuugggugaagacaccccucaagcuggcuaauggcaccaaauaucgcccucccgccaagcugcugaaagagagaggguuuuucggagcuaucgccggcuuucucgaagggggcugggaaggaaugauugccggcuggcauggguacacgagccacggagcucauggcgucgcgguggccgcugaccugaaguccacccaggaggccaucaacaaaauuacaaagaaucuuaacagccugucugaacucgaggucaagaaucugcaacggcuguccggggccauggaugaacuccacaacgagauccuggagcuugacgaaaaaguggacgaucugcgcgcugacaccaucagcucucagauugagcucgccguucugcuuagcaaugaaggaaucauuaacuccgaggaugaacaccuucucgcgcuggagagaaagcugaaaaagaugcucggcccuucugcuguggacaucgggaauggcuguuucgagacaaaacauaagugcaaccagaccugccuggaucggauugccgccggaacguuuaaugcuggcgaguucagccuucccaccuuugacucccugaacaucacagccgcuagccucaaugaugacgggcuggauaaccacaccauccugcuuuauuacucuacagccgcguccagccucgccgucacccugaugauugcuaucuucauuguguauaugguuucuagagacaacguguccuguagcaucugccuguga

SEQ ID NO: 218574 - RNA, 1752 nt, Artificial Sequence
  derived and/or modified CDS sequence (opt5) from hemagglutinin__InfluenzaB__ABN50701
augaaggccaucauugugcugcucauggucguuaccagcaacgcugacagaaucugcacaggcauuacguccucuaauagcccccacguggugaaaaccgccacacagggggaggucaacgugaccggaguuaucccucugacaaccacaccgaccaagucccauuucgcgaaucuuaaaggcacgaagacccgggggaaacugugucccaacugccucaauuguacagaucuggacguggcucuuggacgcccuaugugcgucggcauuacccccucugccaaggccagcauccugcacgaagugagaccuguuacauccggguguuuucccaucaugcaugaucggaccaagauucgccaacucccuaaccugcugagaggauacgagaauauccggcucucuacgcagaacgugauuaaugcugaaaaagccccgggcggccccuaucgccuggggacaagcggauccugcccuaacgucaccagcagaacaggcuucuuugcuaccauggccugggcggugccccgggacaauaagaccgccacaaacccucuuacgguggagguccccuacaucuguaccaaaggggaagaucagauuacaguuuggggauuccacucugacaauaaggcucagaugaaaaaccuguauggcgauuccaauccgcaaaaguuuaccagcucugccaacggggugacaacccauuacgugucccagaucggaggcuucccugaccagacggaggauggcgggcucccccagagcggacgcauugucguggacuauaugguucaaaagccuggcaaaacagggaccaucguguaccagagaggaauccugcuuccccagaaggucuggugcgcuucuggccgguccaaagugauuaaggggagccugccccucaucggagaggccgauugucugcacgaaaaauauggcggccugaacaaguccaaaccuuacuacaccggggagcacgcgaaggccauuggaaauugcccgaucuggguuaagacaccccucaaacuggcuaacggcaccaaguaucgcccucccgccaaacuucugaaggaaagaggguuuuucggagcuauugccggcuuucucgaagggggcugggagggaaugaucgccggcuggcauggguacacaucucacggagcucauggcguggcggucgccgcugaccugaaaagcacgcaggaggccaucaauaagauuaccaagaaccuuaauucccugagcgagcucgaagugaaaaaccugcaacggcugucuggggccauggaugagcuccacaaugaaauccuggagcuugacgagaaggucgacgaucugcgcgcugacacaauuuccagccagaucgaacucgccgugcugcuuucuaacgagggaauuaucaauagcgaagaugagcaucugcucgcgcuggaaagaaaacugaagaaaaugcucggcccuuccgcuguugacaucgggaacggcuguuucgagaccaagcacaagugcaaucagacaugccuggaucggauugccgccggaaccuuuaacgcuggcgaguucucucuucccacguuugacagccugaauaucaccgccgcuucccucaacgaugacgggcuggauaaucacacaauucugcuuuauuacagcaccgccgcgucuucccucgccgugacacugaugaucgcuauuuucaucgucuauauggugagcagagacaacguuucuuguuccauuugccuguga

SEQ ID NO: 218575 - RNA, 1755 nt, Artificial Sequence; identical to SEQ ID NO: 218573
  derived and/or modified CDS sequence (opt5) from hemagglutinin__InfluenzaB__ABN50712

SEQ ID NO: 218576 - RNA, 1755 nt, Artificial Sequence
  derived and/or modified CDS sequence (opt5) from hemagglutinin__InfluenzaB__ABN50723
augaaggccaucauugugcugcucauggucguuaccagcaacgcugacagaaucugcacaggcauuacguccucuaauagcccccacguggugaaaaccgccacacagggggaagucaacgugaccggaguuaucccucugacaaccacaccgaccaagucccauuucgcgaaucuucggggcacgaaaacccgcgggaagcugugucccacaugccucaacuguaccgaucuggacguggcucuuggaagaccuaugugcgucggcacaacccccucugccaaagccagcauucugcacgaagugcggccuguuacguccggguguuuucccaucaugcaugaucgcacaaagaucagacaacucccuaaucugcugcggggauacgagaagauucgccucucuacccagaacgugaucaaugcugaaaaagccccgggcggccccuauagacuggggacaagcggauccugcccuaacgcuaccagccggucuggcuucuuugccaccauggcgugggccgucccccgcgacaauaacaagacagcuacgaauccucuuaccguggaggugcccuacauuuguacaaaagaagaggaucagaucaccgucuggggguuccacuccgacaacaagacacagaugaaaaaucuguauggagauagcaacccgcaaaaguuuaccucuuccgccaauggcguuacgacacauuacgugagccagauugggggauucccugaccagaccgaggauggcggccucccccagucugggagaaucguggucgacuauauggugcaaaagccuggaaaaaccggcacaauuguuuaccagcgggggauccugcuuccccagaagguguggugcgcuuccggacgcagcaaagucaucaagggcucccugccccucauuggggaagccgauugucugcacgagaaauauggaggccugaacaagucuaaaccuuacuacaccggcgaacacgcgaaggccaucgggaacugcccgauuugggugaagacaccccucaaacuggcuaauggaacgaaguauagaccucccgccaaacuucugaaggagcggggcuuuuucggggcuaucgccggauuucucgagggcgggugggaaggcaugauugccggauggcauggcuacaccagccacggggcucauggaguugcgguggccgcugaccugaaauccacacaggaggccaucaacaagaucaccaagaaucuuaacagccugucugaacucgaggucaaaaaucugcaacgccuguccggcgccauggaugaacuccacaacgagauucuggagcuugacgaaaagguggacgaucugagagcugacacaaucagcucucagauugagcucgccguccugcuuagcaaugaagggaucauuaacuccgaggaugaacaucugcucgcgcuggagcggaaacugaagaaaaugcucggaccuucugcuguggacaucggcaauggguguuucgagaccaagcacaagugcaaccagacgugccuggauagaaucgccgccggcaccuuuaaugcuggagaguucagccuucccacauuugacucccugaacauuaccgccgcuagccucaaugaugacggccuggauaaccacacaauccugcuuuauuacucuaccgccgcguccagccucgccguuacgcugaugauugcuaucuucauuguguauaugaucucucgcgacaaugucuccuguagcauuugccuguga

SEQ ID NO: 218577 - RNA, 1755 nt, Artificial Sequence
  derived and/or modified CDS sequence (opt5) from hemagglutinin__InfluenzaB__ABN50734
augaaggccaucauugugcugcucauggucguuaccagcaacgcugacagaaucugcacaggcauuacguccucuaauagcccccacguggugaaaaccgccacacagggggaagucaacgugaccggagcgaucccucugacaaccacaccgaccaagucccauuucgcuaaucuuaaaggcacgaagacccgggggaaacugugucccacaugccucaacuguaccgaucuggacguugcccuuggacgcccuaugugcgugggcauuacacccucugccaaggcuagcauccugcacgaagucagaccugugaccuccggguguuuucccaucaugcaugaucggacgaagauucgccaacucccuaaucugcugagaggauacgagaaaauccggcucucuacacagaacguuauuaaugccgaaaaggcuccgggcggccccuaucgccuggggaccagcggauccugcccuaacgccacaagcagaucuggcuucuuuaccaccauggcgugggccgugccccgggacaauaacaaaacagcuacgaauccucuuaccgucgaggugccccacaucuguacaaaggaagaggaucagauuaccguguggggguuccauuccgacgauaaaacacagaugaagaaccuguacggagacagcaauccgcaaaaguuuaccucuuccacgaacggcaucacaacccacuaugucagccagauugggggauucccugaucagaccgaggacggcggccucccccagucugggcgcaucguuguggauuacauggugcaaaaaccuggaaagacaggcaccaucgucuaucagagagggauucugcuuccccagaaaguguggugcgccuccggacggagcaagguuaucaaaggcucccugccccucauuggggaagcugacugucugcacgagaaguacggaggccugaauaaaucuaagccuuauuacacaggcgaacaugccaaggcgaucgggaacugcccgauuugggugaaaacgccccucaagcuggccaacggaaccaaauaccgcccucccgcuaaacuucugaaagagagaggcuuuuucggggccaucgcuggauuucucgagggcgggugggaaggcaugaucgccggauggcacggcuauacaagccauggggcccacggagucgcuguggcggccgaucugaaguccacccaggaggcuauuaauaagaucacaaagaaccuuaauagccugucugaacucgagguuaagaaccugcaacggcuguccggcgccauggacgaacuccacaaugagauucuggagcuugacgaaaaaguggaugaccugcgcgccgauaccaucagcucucagauugagcucgcuguccugcuuagcaacgaagggaucaucaauuccgaggacgaacaucugcucgcccuggagagaaagcugaaaaagaugcucggaccuucugcgguggauauuggcaacggguguuucgagacgaagcacaaaugcaaucagaccugccuggaccggaucgcugccggcacauuuaacgccggagaguucagccuucccaccuuugauucccugaauauuacagcugccagccucaacgacgauggccuggacaaucauaccauccugcuuuacuauucuacggcugccuccagccucgcggucacacugaugauugccaucuucauuguguacaugaucucuagagauaacguuuccuguagcaucugccuguga

SEQ ID NO: 218578 - RNA, 1758 nt, Artificial Sequence
  derived and/or modified CDS sequence (opt5) from hemagglutinin__InfluenzaB__ABN50745
augaaggccaucauugugcugcucauggucguuaccagcaacgcugacagaaucugcacaggcauuacguccucuaauagcccccacguggugaaaaccgccacacagggggaagucaacgugaccggaguuaucccucugacaaccacaccgaccaagucccauuucgcgaaucuuaaaggcacgaagacccgggggaaacugugucccaagugccucaacuguacagaucuggacguggcucuuggacgcccuaagugcaccggcaauauucccucugccaaagucagcauccugcacgaagugagaccuguuacauccggguguuuucccaucaugcaugaucggaccaagauucgccaacucccuaaccugcugagaggauacgagcacauccggcucucuacgcauaaugugauuaacgccgaaaaagcuccgggcggccccuauaagaucgggacaagcggauccugcccuaauauuaccaacggcaauggguucuuugccacaauggcuugggccguccccaaaaacgacaauaacaagaccgcgaccaauagccugacaaucgaggugccuuacauuuguacggaaggagaggaucagaucaccguguggggcuuccacucugacaacgagacacagauggccaaacuuuauggggauuccaaaccccagaaguuuaccagcucugcuaacggagucacaacccacuacguuucccaaaucggcggcuucccgaaucagacggaagacgggggacugccucagagcggccgcauugugguggauuauaugguccagaaaucugggaagacaggaaccaucaccuaccaaagaggcauucuccugccccagaaaguguggugcgccuccgggcggagcaagguuaucaaaggaucccuuccucugauuggcgaggcugacugucuccaugaaaaguauggcgggcugaacaagucuaaacccuacuacacaggagagcacgccaaggcgaucggcaauugccccaucugggugaaaaccccucugaagcucgccaacgggacaaaauaucgcccgcccgcuaagcugcuuaaggagagaggauuuuucggcgccauugcuggguuucuggaaggcggaugggagggcaugaucgccggguggcauggauacacgagccacggcgcccacggggucgcuguggcggccgaucucaaauccacccaggaagcuauuaauaagaucacaaagaaccugaauagccuuucugagcuggaaguuaagaaccuccagcggcuguccggagccauggacgagcugcauaaugagauucucgaacuggaugagaaaguggacgaccuucgcgccgauaccaucagcucucaaaucgaacuggcuguccuccugagcaacgagggcauuaucaauuccgaagacgagcaccuucuggcccucgagagaaagcugaagaaaaugcuggggccuucugcgguggaaauuggcaacggauguuucgagacaaagcauaaaugcaaucagaccugccucgaucggaucgcugccggcacguuuaacgccggggaguucagccugcccaccuuugacucccuuaauauuacagcugccagccugaacgaugacggacucgauaaccacaccauccugcuguauuacucuacagcugccuccagccuugcggucacccucaugauugccaucuucgugguuuauauggugucucgcgacaaugucuccuguagcaucugccuguga

SEQ ID NO: 218579 - RNA, 1752 nt, Artificial Sequence
  derived and/or modified CDS sequence (opt5) from hemagglutinin__InfluenzaB__ABN51184
augaaggccaucauugugcugcucauggucguuaccagcaacgcugacagaaucugcacaggcauuacguccucuaauagcccccacguggugaaaaccgccacacagggggaggucaacgugaccggaguuaucccucugacaaccacaccgaccaagucccauuucgcgaaucuuaaaggcacgaagacccgggggaaacugugucccaacugccucaauuguacagaucuggacguggcucuuggacgcccuaugugcauuggcaccauccccucugccaaggccagcauccugcacgaagucagaccugugacauccggguguuuucccauuaugcaugaucggaccaagauccgccaacucccuaaccugcugagaggauacgagaauauucggcucucuacgcacaacguuaucaaugcugaacgcgccccgggcggccccuauagacuggggacaagcggauccugcccuaacgugaccagcaaaucuggcuucuuugcuacaauggccugggcggucccccgggacaauaagaccgccaccaacccucuuacaguggaggugcccuacauuuguacgaaaggggaagaucagaucaccgucuggggauuccauuccgacaauaagauucagaugaaaaaccuguauggcgauagcaauccgcagaaguuuacaucuuccgcuaacgggguuaccacacacuacgugagccaaaucggaggcuucccuaaccagaccgaggacggcgggcucccccagucuggacgcaucguggucgauuauauggugcagaagccuggcaaaacggggacaauuguuuaccaaagaggagugcugcuuccccagaaggucuggugcgccuccggccggagcaaagugaucaaggggucccugccccucauuggagaggcugacugucugcacgaaaaauauggcggccugaauaagucuaaaccuuacuacaccggggagcaugccaaggcgaucggaaacugcccgauuuggguuaagacaccccucaaacuggccaauggcaccaaguaucgcccucccgcuaaacuucugaaggaaagaggguuuuucggagccaucgcuggcuuucucgaagggggcugggagggaaugaucgccggcuggcacggguacaccagccauggagcccacggcguggcugucgcggccgaucugaaauccacacaggaggcuauuaacaagaucacgaagaaucuuaacagccugucugagcucgaagugaaaaaucugcagcggcuguccggggccauggacgagcuccacaacgaaauucuggagcuugaugagaaggucgacgaccugcgcgccgauaccaucagcucucaaauugaacucgcugugcugcuuagcaaugagggaaucaucaacuccgaagacgagcaucugcucgcccuggaaagaaaacugaagaaaaugcucggcccuucugcgguugauauugggaauggcuguuucgagacaaagcacaagugcaaccagaccugccuggaccggaucgcugccggaacauuuaaugccggcgaguucagccuucccaccuuugauucccugaacauuacggcugccagccucaaugacgaugggcuggacaaccauaccauccugcuuuauuacucuacagcugccuccagccucgcggugacccugaugauugccaucuucauugucuauauggugucuagagauaacguuuccuguagcaucugccuguga

SEQ ID NO: 218580 - RNA, 1752 nt, Artificial Sequence
  derived and/or modified CDS sequence (opt5) from hemagglutinin__InfluenzaB__ABN51195
augaaggccaucauugugcugcucauggucguuaccagcaacgcugacagaaucugcacaggcauuacguccucuaauagcccccacguggugaaaaccgccacacagggggaggucaacgugaccggaguuaucccucugacaaccacaccgaccaagucccauuucgcgaaucuuaaaggcacgaagacccgggggaaacugugucccaacugccucaauuguacagaucuggacguggcucuuggacgcccuaugugcauuggcaccauccccucugccaaggccagcauccugcacgaagucagaccugugacauccggguguuuucccauuaugcaugaucggaccaagauccgccaacucccuaaccugcugagaggauacgagaauauucggcucucuacgcacaacguuaucaaugcugaacgcgccccgggcggccccuauagacuggggacaagcggauccugcccuaacgugaccagccggucuggcuucuuugcuacaauggccugggcggucccccgcgacaauaaaaccgccaccaacccucuuacaguggaggugcccuacauuuguacgaagggggaagaucagaucaccgucuggggauuccauuuugacaauaaaauucagaugaagaaccuguauggcgauuccaauccgcagaaauucacaagcucugcuaacgggguuaccacacacuacgugucccaaaucggaggcuuuccuaaccagaccgaggacggcgggcucccccagagcggaagaaucguggucgauuauauggugcagaagccuggcaagacggggacaauuguuuaccaacggggagugcugcuuccccagaaagucuggugcgccucuggccgcuccaaggugaucaaagggagccugccccucauuggagaggcugacugucugcacgaaaaguauggcggccugaauaaauccaagccuuacuacaccggggagcaugccaaagcgaucggaaacugcccgauuuggguuaagacaccccucaagcuggccaauggcaccaaauauagaccucccgcuaagcugcugaaagaacggggguucuuuggagccaucgcuggcuuccucgaagggggcugggagggaaugaucgccggcuggcacggguacaccucucauggagcccacggcguggcugucgcggccgaucuuaagagcacacaggaggcuauuaacaaaaucacgaagaaucuuaacucccugagcgagcucgaagugaagaaucugcagcgccugucuggggccauggacgagcuccacaacgaaauucuggagcuugaugagaaagucgacgaccugagagccgauaccaucuccagccaaauugaacucgcugugcugcuuucuaaugagggaaucaucaacagcgaagacgagcaucugcucgcccuggaacggaagcugaaaaagaugcucggcccuuccgcgguugauauugggaauggcuguuuugagacaaaacacaagugcaaccagaccugccuggacagaaucgcugccggaacauucaaugccggcgaguuuucucuucccaccuucgauagccugaacauuacggcugccucccucaaugacgaugggcuggacaaccauaccauccugcuuuauuacagcacagcugccucuucccucgcggugacccugaugauugccaucuucauugucuauauggugagccgcgauaacguuucuuguuccaucugccuguga

SEQ ID NO: 218581 - RNA, 1758 nt, Artificial Sequence
  derived and/or modified CDS sequence (opt5) from hemagglutinin__InfluenzaB__ABN58661
augaaggccaucauugugcugcucauggucguuaccagcaacgcugacagaaucugcacaggcauuacguccucuaauagcccccacguggugaaaaccgccacacagggggaagucaacgugaccggaguuaucccucugacaaccacaccgaccaagucccauuucgcgaaucuuaaaggcacgaagacccgggggaaacugugucccaagugccucaacuguacagaucuggacguggcucuuggacgcccuaagugcaccggcacaauucccucugccaaagucagcauccugcacgaagugaagccuguuaccuccggguguuuucccaucaugcaugauagaacgaaaauucggcaacucccuaaucugcugcgcggauacgagcacaucagacucucuacacauaacgugauuaaugccgaaaaggcuccgggcggccccuauaaaaucgggaccagcggauccugcccuaacgucacaaauggcaacggguucuuugccaccauggcuugggccgugcccaagaaugacaacaauaagaccgcgacaaacagccugacgguggaggucccuuacauuuguaccgaaggagaggaucagaucacaguuuggggcuuccacucugacaaugagacccagauggccaaacuuuauggggauuccaagccccagaaauuuacaagcucugcuaacggagugaccacgcacuacgugucccaaauuggcggcuucccgaaccaggccgaagacgggggacugccucagagcggccggaucgucguggauuauaugguucagaagucugggaaaacaggaaccaucaccuaccaacgcggcauucuccugccccagaagguguggugcgcuuccgggagaagcaaagucaucaagggaucccuuccucugauuggcgaggccgacugucuccaugaaaaguauggcgggcugaauaaaucuaagcccuacuacacaggagagcacgcgaaagccaucggcaacugccccauuugggugaagaccccucugaaacucgcuaaugggacaaaguaucggccgcccgccaagcugcuuaaagagcgcggauuuuucggcgcuaucgccggguuucuggaaggcggaugggagggcaugaucgccggguggcauggauacacgagccacggcgcucacgggguugcgguggccgcugaucucaaguccacccaggaagccauuaacaaaaucacaaagaaucugaacagccuuucugagcuggaagucaaaaaucuccagagacuguccggagccauggacgagcugcauaacgagauucucgaacuggaugagaagguggacgaccuucgggcugauaccaucagcucucaaauugaacuggccguccuccugagcaaugagggcaucaucaacuccgaagacgagcaccuucuggcgcucgagcgcaagcugaaaaagaugcuggggccuucugcuguggaaauuggcaauggauguuucgagacaaaacauaagugcaaccagaccugccucgauagaaucgccgccggcacguuuaaugcuggggaguucagccugcccaccuuugacucccuuaacauuacagccgcuagccugaaugaugacggacucgauaaccacaccauccugcuguauuacucuacagccgcguccagccuugccguuacccucaugauugcuaucuucauuguguauauggucucucgggacaacguguccuguagcaucugccuguga

SEQ ID NO: 218582 - RNA, 1755 nt, Artificial Sequence; identical to SEQ ID NO: 218470
  derived and/or modified CDS sequence (opt5) from hemagglutinin__InfluenzaB__ABN59445

SEQ ID NO: 218583 - RNA, 1755 nt, Artificial Sequence
  derived and/or modified CDS sequence (opt5) from hemagglutinin__InfluenzaB__ABO72377
augaaggccaucauugugcugcucauggucguuaccagcaacgcugacagaaucugcacaggcauuacguccucuaauagcccccacguggugaaaaccgccacacagggggaggucaacgugaccggagcgaucccucugacaaccacaccgaccaagucccauuucgcuaaucuuaaaggcacgaagacccgggggaaacugugucccacaugcuuuaacuguaccgaucucgacguugcccugggacgcccuaugugcgugggcauuacacccucugccaaggcuagcauccuucacgaagucagaccugugaccuccggguguuuccccaucaugcaugaucggacgaagauucgccaacugccuaaucuccugagaggauacgagaaaauccggcugucuacacagaacguuauugacgccgaaaaggcuccgggcggccccuaucgccucgggaccagcggauccugcccuaaugccacaagcaaaucuggcuuuuucgcgaccauggccugggcugugcccagagauaacaauaagaccgccacaaacccucugacggucgaggugccccacaucuguaccaaagaagaggaccagauuacaguguggggguuucauuccgauaauaagacccagaugaagaaccuuuacggagacagcaauccgcaaaaauucacaucuuccgcuaacggcaucaccacgcacuaugucagccagauugggggauuuccugaucagacagaggacggcggccugccccagucugggcggaucguuguggauuacauggugcaaaagccuggaaaaaccggcaccaucgucuaucagcgcgggauucuccugccccagaagguguggugcgccuccggaagaagcaaaguuaucaagggcucccuuccccugauuggggaagcggacugucuccacgagaaauacggaggccugaauaagucuaagccuuauuacacaggcgaacaugccaaagcuaucgggaacugcccgauuugggugaagacaccccugaaacucgccaacggaaccaaguaccggccucccgcuaaacugcuuaaggagcgcggcuucuuuggggccaucgccggauuccuggagggcgggugggaaggcaugaucgcuggauggcacggcuauacgagccauggggcgcacggagucgccguggcugccgaucucaaguccacccaggaggccauuaauaaaaucacaaagaaccugaauagccuuucugaacuggagguuaaaaaccuccaaagacuguccggcgcuauggacgaacugcacaaugagauucucgagcuggacgaaaagguggaugaccuucgggccgauaccaucagcucucagauugagcuggcgguccuccugagcaacgaagggaucaucaauuccgaggacgaacaucuucuggcucucgagcgcaaacugaagaagaugcugggaccuucugccguggauauuggcaacggguguuuugagacaaaacacaagugcaaucagaccugccucgacagaaucgccgcuggcacguucaacgccggagaauuuagccugcccaccuucgauucccuuaauauuacagcugccagccugaacgacgauggccucgacaaucauaccauccugcuguacuauucuacagcggccuccagccuugcugucacccucaugauugccaucuucauuguguacaugaucucucgggauaacguuuccuguagcaucugccuguga

SEQ ID NO: 218584 - RNA, 1755 nt, Artificial Sequence; identical to SEQ ID NO: 218477
  derived and/or modified CDS sequence (opt5) from hemagglutinin__InfluenzaB__ABR15973

SEQ ID NO: 218585 - RNA, 1752 nt, Artificial Sequence
  derived and/or modified CDS sequence (opt5) from hemagglutinin__InfluenzaB__ABR15995
augaaggccaucauugugcugcucauggucguuaccagcaacgcugacagaaucugcacaggcauuacguccucuaauagcccccacguggugaaaaccgccacacagggggaggucaacgugaccggaguuaucccucugacaaccacaccgaccaagucccauuucgcgaaucuuaaaggcacgaagacccgggggaaacugugucccaacugccucaauuguacagaucuggacguggcucuuggacgcccuaugugcauuggcaucacccccucugccaaggccagcauccugcacgaagucagaccugugacauccggguguuuucccauuaugcaugaucggaccaagauccgccaacucccuaaccugcugagaggauacgagcacauucggcucucuacgcauaauguuaucaacgcugaacgcgccccgggcggccccuauagacuggggacaagcggauccugcccuaaugugaccagccggucuggcuucuuugcuacaauggccugggcggucccccgcgacaacaaaaccgccaccaauccucuuacaguggaggugcccuacauuuguacgaagggggaagaucagaucaccgucuggggauuccacuccgacuauaaaacacagaugaagaaccuguacggcgauagcaauccgcagaaauuuaccucuuccgcuaacgggauuacaacccacuauguuagccaaaucggaggcuucccuaaucagacggaggacggcgggcucccccagucuggaagaaucgugguggauuacaugguccagaagccuggcaagacagggaccauuguguaucaacggggaguucugcuuccccagaaaguguggugcgccuccggccgcagcaaggucaucaaagggucccugccccucauuggagaggcugacugucugcaugaaaaguacggcggccugaacaaaucuaagccuuacuauaccggggagcacgccaaagcgaucggaaacugcccgauuugggugaagacaccccucaagcuggccaauggcaccaaauacagaccucccgcuaagcugcugaaagaacggggguuuuucggagccaucgcuggcuuucucgaagggggcugggagggaaugaucgccggcuggcauggguauacaagccacggagcccacggcguugcuguggcggccgaucugaaguccacgcaggaggcuauuaacaaaaucaccaagaaucuuaacagccugucugagcucgaagucaagaaucugcagcgccuguccggggccauggacgagcuccauaacgaaauucuggagcuugaugagaaaguggacgaccugagagccgauacaaucagcucucaaauugaacucgcuguccugcuuagcaaugagggaaucaucaacuccgaagacgagcaccuucucgcccuggaacggaagcugaaaaagaugcucggcccuucugcgguggauauugggaauggcuguuucgagaccaaacauaagugcaaccagacaugccuggacagaaucgcugccggaaccuuuaaugccggcgaguucagccuucccacguuugauucccugaacauuaccgcugccagccucaaugacgaugggcuggacaaccacacaauccugcuuuacuauucuaccgcugccuccagccucgcgguuacacugaugauugccaucuucauuguguacauggucucucgcgauaauguguccuguagcaucugccuguga

SEQ ID NO: 218586 - RNA, 1758 nt, Artificial Sequence
  derived and/or modified CDS sequence (opt5) from hemagglutinin__InfluenzaB__ABR16017
augaaggccaucauugugcugcucauggucguuaccagcaacgcugacagaaucugcacaggcauuacguccucuaauagcccccacguggugaaaaccgccacacagggggaggucaacgugaccggaguuaucccucugacaaccacaccgaccaagucccauuucgcgaaucuuaaaggcacggaaacccgggggaagcugugucccaaaugccucaacuguacagaucuggacguggcucuuggacgcccuaagugcaccggcaauauucccucugccagagucagcauccugcacgaggugcggccuguuacauccggguguuuucccaucaugcaugaucgcaccaagauuagacaacucccuaaccugcugcggggauacgaacacauccgccucucuacgcauaaugugauuaacgccgagaaugcuccgggcggccccuauaaaaucgggacaagcggauccugcccuaacgucaccaauggcaacggguucuuugccacaauggcuugggccgugcccaagaaugacaacaauaaaaccgcgaccaacagccugacaauugaagugccuuacaucuguacggagggagaggaucagauuaccgucuggggcuuccacucugacaacgaaacacagauggccaaacuuuauggggauuccaagccccagaaguuuaccagcucugcuaauggaguuacaacccacuacgugucccaaaucggcggcuucccgaaccagacggaggacgggggacugccucagagcggcagaaucguggucgauuauauggugcagaagucugggaaaacaggaaccauuaccuaccaacggggcauccuccugccccagaagguuuggugcgccuccgggcgcagcaaagugauuaagggaucccuuccucugaucggcgaagcugacugucuccaugagaaauauggcgggcugaauaagucuaaacccuacuacacaggagagcacgccaaggcgauuggcaacugccccaucugggucaagaccccucugaaacucgccaaugggacaaaguauagaccgcccgcuaaacugcuuaaggaacggggauuuuucggcgccaucgcuggguuucuggagggcggaugggaaggcaugauugccggguggcauggauacacgagccacggcgcccacgggguggcuguugcggccgaucucaaauccacccaggaggcuaucaacaagauuacaaagaaucugaacagccuuucugaacuggaggugaaaaaucuccagcgccuguccggagccauggacgagcugcauaacgaaauccucgagcuggaugaaaaggucgacgaccuuagagccgauaccauuagcucucaaaucgagcuggcugugcuccugagcaaugaaggcaucauuaacuccgaggacgagcaccuucuggcccucgaacggaaacugaagaaaaugcuggggccuucugcggucgagaucggcaauggauguuucgaaacaaagcauaagugcaaccagaccugccucgaucgcauugcugccggcacguuugacgccggggaguucagccugcccaccuuugauucccuuaauaucacagcugccagccugaacgacgauggacucgacaaccacaccauucugcuguauuacucuacagcugccuccagccuugcggugacccucaugaucgccauuuucguuguguauauggucucuagagauaauguguccuguagcaucugccuguga

SEQ ID NO: 218587 - RNA, 1758 nt, Artificial Sequence; identical to SEQ ID NO: 218586
  derived and/or modified CDS sequence (opt5) from hemagglutinin__InfluenzaB__ACA64899

SEQ ID NO: 218588 - RNA, 1758 nt, Artificial Sequence
  derived and/or modified CDS sequence (opt5) from hemagglutinin__InfluenzaB__ACA64932
augaaggccaucauugugcugcucauggucguuaccagcaacgcugacagaaucugcacaggcauuacguccucuaauagcccccacguggugaaaaccgccacacagggggaggucaacgugaccggaguuaucccucugacaaccacaccgaccaagucccauuucucuaaucuuaaaggcacggaaacccgggggaagcugugucccaaaugccucaacuguacagaucuggacguggcgcuuggacgcccuaagugcaccggcaauauucccagcgcuagagucuccauccugcacgaggugcggccuguuacaucuggguguuuucccaucaugcaugaucgcaccaagauuagacaacucccuaaccugcugcggggauacgaacacauccgccucagcacgcauaaugugauuaacgccgagaaugccccgggcggccccuauaaaaucgggacauccggaagcugcccuaacgucaccaauggcaacggguucuuugcuacaauggccugggcugugcccaagaaugacauuaacaaaaccgccaccaauucucugacaaucgaagugccuuacauuuguacggagggagaggaucagaucaccgucuggggcuuccacuccgacaacgaaacacagauggcgaagcuguauggggauagcaaaccccagaaguuuaccucuuccgccaacggaguuacaacccacuacgugagccaaaucggcggcuucccgaaucagacggaggacgggggacugccucagucuggcagaauuguggucgauuauauggugcagaaguccgggaaaacaggaaccaucaccuaccaacggggcauucuccugccccagaagguuuggugcgcuagcgggcgcuccaaagugaucaagggaucucuuccucugauuggcgaagccgacugucuccaugagaaauauggcgggcugaacaagagcaaacccuacuacacaggagagcacgcuaaggccaucggcaauugccccaucugggucaagaccccucugaaacucgcgaacgggacaaaguauagaccgcccgccaaacugcuuaaggaacggggauuuuucggcgcuauugccggguuucuggagggcggaugggaaggcaugaucgcuggguggcauggauacacgucccacggcgcccacgggguggccguugcugcggaucucaaaagcacccaggaggccauuaauaagaucacaaagaaccuuaauucucuuuccgaacuggaggugaaaaaccuccagcgccugagcggagcuauggacgagcugcauaaugaaauucucgagcuggaugaaaaggucgacgaccuuagagccgauaccaucucuagccaaaucgagcuggccgugcuccuguccaacgaaggcauuaucaauucugaggacgagcaccuucuggcucucgaacggaaacugaagaaaaugcuggggccuagcgccgucgagauuggcaacggauguuucgaaacaaagcauaagugcaaucagaccugccucgauaaaaucgcggcuggcacguuugacgccggggaguucucccugcccaccuuugauagccuuaacauuacagccgcuucucugaaugacgauggacucgacaaccacaccauccugcuguauuacuccacagccgcuagcucucuugccgugacccucaugauugcgaucuucguuguguauauggucucccgcgauaacgugagcuguuccaucugccuguga

SEQ ID NO: 218589 - RNA, 1758 nt, Artificial Sequence; identical to SEQ ID NO: 218586
  derived and/or modified CDS sequence (opt5) from hemagglutinin__InfluenzaB__ACA64943

SEQ ID NO: 218590 - RNA, 1758 nt, Artificial Sequence
  derived and/or modified CDS sequence (opt5) from hemagglutinin__InfluenzaB__ACA64954
augaaggccaucauugugcugcucauggucguuaccagcaacgcugacagaaucugcacaggcauuacguccucuaauagcccccacguggugaaaaccgccacacagggggaggucaacgugaccggaguuaucccucugacaaccacaccgaccaagucccauuucgcgaaucuuaaaggcacggaaacccgggggaagcugugucccaaaugccucaacuguacagaucuggacguggcucuuggacgcccuaagugcaccggcaauauucccucugccagagucagcauccugcacgaggugcggccuguuacauccggguguuuucccaucaugcaugaucgcaccaagauuagacaacucccuaaccugcugcggggauacgaacacauccgccucucuacgcauaaugugauuaacgccgagaaugcuccgggcggccccuauaaaaucgggacaagcggauccugcccuaacgucaccaauggcaacggguucuuugccacaauggcuugggccgugcccaagaaugacaacaauaaaaccgcgaccagcucucugacaauugaagugccuuacaucuguacggagggagaggaucagauuaccgucuggggcuuccacuccgacaacgaaacacagauggccaagcuguauggggauagcaaaccccagaaguuuaccucuuccgcuaacggaguuacaacccacuacgugagccaaaucggcggcuucccgaaucagacggaggacgggggacugccucagucuggcagaaucguggucgauuauauggugcagaaguccgggaaaacaggaaccauuaccuaccaacggggcauccuccugccccagaagguuuggugcgccagcgggcgcuccaaagugauuaagggaucucuuccucugaucggcgaagcugacugucuccaugagaaauauggcgggcugaacaagagcaaacccuacuacacaggagagcacgccaaggcgauuggcaauugccccaucugggucaagaccccucugaaacucgccaacgggacaaaguauagaccgcccgcuaaacugcuuaaggaacggggauuuuucggcgccaucgcuggguuucuggagggcggaugggaaggcaugauugccggguggcauggauacacgucccacggcgcccacgggguggcuguugcggccgaucucaaaagcacccaggaggcuaucaauaagauuacaaagaaccuuaauucucuuuccgaacuggaggugaaaaaccuccagcgccugagcggagccauggacgagcugcauaaugaaauccucgagcuggaugaaaaggucgacgaccuuagagccgauaccauuucuagccaaaucgagcuggcugugcuccuguccaacgaaggcaucauuaauucugaggacgagcaccuucuggcccucgaacggaaacugaagaaaaugcuggggccuagcgcggucgagaucggcaacggauguuucgaaacaaagcauaagugcaaucagaccugccucgaucgcauugcugccggcacguuugacgccggggaguucucccugcccaccuuugauagccuuaacaucacagcugccucucugaaugacgauggacucgacaaccacaccauucugcuguauuacuccacagcugccagcucucuugcggugacccucaugaucgccauuuucguuguguauauggucuccagagauaacgugagcuguuccaucugccuguga

SEQ ID NO: 218591 - RNA, 1758 nt, Artificial Sequence; identical to SEQ ID NO: 218586
  derived and/or modified CDS sequence (opt5) from hemagglutinin__InfluenzaB__ACA64965

SEQ ID NO: 218592 - RNA, 1758 nt, Artificial Sequence
  derived and/or modified CDS sequence (opt5) from hemagglutinin__InfluenzaB__ACA64998
augaaggccaucauugugcugcucauggucguuaccagcaacgcugacagaaucugcacaggcauuacguccucuaauagcccccacguggugaaaaccgccacacagggggaggucaacgugaccggaguuaucccucugacaaccacaccgaccaagucccauuucgcgaaucuuaaaggcacggaaacccgggggaagcugugucccaaaugcuuuaacuguacagaucucgacguggcucugggacgcccuaagugcaccggcaauauucccucugccagagucagcauccuucacgaggugcggccuguuacauccggguguuuccccaucaugcaugaucgcaccaagauuagacaacugccuaaccuccugcggggauacgaacacauccgccugucuacgcauaaugugauuaacgccgagaaugcuccgggcggccccuauaaaaucgggacaagcggauccugcccuaacgucaccaauggcaacggguuuuucgccacaauggcuugggccgugcccaagaaugacaacaauaaaaccgcgaccaacagccucacaauugaagugccuuacaucuguacggagggagaggaucagauuaccgucuggggcuuucacucugacaacgaaacacagauggccaagcuguauggggauuccaaaccccagaaguucaccagcucugcuaauggaguuacaacccacuacgugucccaaaucggcggcuuuccgaaccagacggaggacgggggacuuccucagagcggcagaaucguggucgauuauauggugcagaagucugggaaaacaggaaccauuaccuaccaacggggcauccugcucccccagaagguuuggugcgccuccgggcgcagcaaagugauuaagggaucccugccucuuaucggcgaagcugacugucugcaugagaaauauggcgggcucaauaagucuaaacccuacuacacaggagagcacgccaaggcgauuggcaacugccccaucugggucaagaccccucugaaacuggccaaugggacaaaguauagaccgcccgcuaaacuccugaaggaacggggauucuuuggcgccaucgcuggguuccuugagggcggaugggaaggcaugauugccggguggcauggauacacgagccacggcgcccacgggguggcuguugcggccgaucugaaauccacccaggaggcuaucaacaagauuacaaagaaucucaacagccugucugaacuugaggugaaaaaucugcagcgccucuccggagccauggacgagcugcauaacgaaauccuggagcucgaugaaaaggucgacgaccugagagccgauaccauuagcucucaaaucgagcuugcugugcugcucagcaaugaaggcaucauuaacuccgaggacgagcaucugcuugcccuggaacggaaacucaagaaaaugcuggggccuucugcggucgagaucggcaauggauguuuugaaacaaagcacaagugcaaccagaccugccuggaucgcauugcugccggcacguucgacgccggggaguuuagccuccccaccuucgauucccugaauaucacagcugccagccuuaacgacgauggacuggacaaccacaccauucuccuguauuacucuacagcugccuccagccuggcggugacccuuaugaucgccauuuucguuguguauauggucucuagagauaauguguccuguagcaucugccucuga

SEQ ID NO: 218593 - RNA, 1758 nt, Artificial Sequence
  derived and/or modified CDS sequence (opt5) from hemagglutinin__InfluenzaB__ACA65020
augaaggccaucauugugcugcucauggucguuaccagcaacgcugacagaaucugcacaggcauuacguccucuaauagcccccacguggugaaaaccgccacacagggggaggucaacgugaccggaguuaucccucugacaaccacaccgaccaagucccauuucucuaaucuuaaaggcacggaaacccgggggaagcugugucccaaaugccucaacuguacagaucuggacguggcgcuuggacgcccuaagugcaccggcaauauucccagcgcuagagucuccauccugcacgaggugcggccuguuacaucuggguguuuucccaucaugcaugaucgcaccaagauuagacaacucccuaaccugcugcggggauacgaacacauccgccucagcacgcauaaugugauuaacgccgagaaugccccgggcggccccuauaaaaucgggacauccggaagcugcccuaacgucaccaauggcaacggguucuuugcuacaauggccugggcugugcccaagaaugacaacaauaaaaccgccaccaacucucugacaauugaagugccuuacaucuguacggagggagaggaucagauuaccaucuggggcuuccacuccgacaacgaaacacagauggcgaaacuuuauggggauagcaagccccagaaguuuaccucuuccgccaauggagucacaacccacuacguuagccaaaucggcggcuucccgaaccagacggaggacgggggacugccucagucuggcagaauugugguggauuauaugguccagaaguccgggaaaacaggaaccaucaccuaccaacggggcauucuccugccccagaagguguggugcgcuagcgggcgcuccaaaguuaucaagggaucucuuccucugauuggcgaagccgacugucuccaugagaaauauggcgggcugaauaagagcaaacccuacuacacaggagagcacgcuaaggccaucggcaacugccccaucugggugaagaccccucugaaacucgcgaaugggacaaaguauagaccgcccgccaaacugcuuaaggaacggggauuuuucggcgcuauugccggguuucuggagggcggaugggaaggcaugaucgcuggguggcauggauacacgucccacggcgcccacggggucgccguggcugcggaucucaaaagcacccaggaggccauuaacaagaucacaaagaaucugaacucucuuuccgaacuggagguuaaaaaucuccagcgccugagcggagcuauggacgagcugcauaacgaaauucucgagcuggaugaaaagguggacgaccuuagagccgauaccaucucuagccaaaucgagcuggccguccuccuguccaaugaaggcauuaucaacucugaggacgagcaccuucuggcucucgaacggaaacugaagaaaaugcuggggccuagcgccguggaggucggcaauggauguuucgaaacaaagcauaagugcaaccagaccugccucgaucgcauugcggcuggcacguuugacgccggggaguucucccugcccaccuuugauagccuuaauaucacagccgcuucucugaacgacgauggacucgacaaccacaccauucugcuguauuacuccacagccgcuagcucucuugccgugacccucaugaucgcgauuuucguuguguauauggucuccagagauaaugugagcuguuccaucugccuguga

SEQ ID NO: 218594 - RNA, 1758 nt, Artificial Sequence; identical to SEQ ID NO: 218592
  derived and/or modified CDS sequence (opt5) from hemagglutinin__InfluenzaB__ACA65031

SEQ ID NO: 218595 - RNA, 1758 nt, Artificial Sequence
  derived and/or modified CDS sequence (opt5) from hemagglutinin__InfluenzaB__ACA65042
augaaggccaucauugugcugcucauggucguuaccagcaacgcugacagaaucugcacaggcauuacguccucuaauagcccccacguggugaaaaccgccacacagggggaggucaacgugaccggaguuaucccucugacaaccacaccgaccaagucccauuucucuaaucuuaaaggcacggaaacccgggggaagcugugucccaaaugccucaacuguacagaucuggacguggcgcuuggacgcccuaagugcaccggcaauauucccagcgcuagagucuccauccugcacgaggugcggccuguuacaucuggguguuuucccaucaugcaugaucgcaccaagauuagacaacucccuaaccugcugcggggauacgaacacauccgccucagcacgcauaaugugauuaacgccgagaaugccccgggcggccccuauaaaaucgggacauccggaagcugcccuaacgucaccaauggcaacggguucuuugcuacaauggccugggcugugcccaagaaugacaacaauaaaaccgccaccaacucucugacaauugaagugccuuacaucuguacggagggagaggaucagauuaccgucuggggcuuccacuccgacaacgaaacacagauggcgaaacuuuauggggauagcaagccccagaaguuuaccucuuccgccaauggaguuacaacccacuacgugagccaaaucggcggcuucccgaaccagacggaggacgggggacugccucagucuggcagaaucauuguggauuauaugguccagaaguccgggaaaacaggaaccaucaccuaccaacggggcauucuccugccccagaagguguggugcgcuagcgggcgcuccaaaguuaucaagggaucucuuccucugauuggcgaagccgacugucuccaugagaaauauggcgggcugaauaagagcaaacccuacuacacaggagagcacgcuaaggccaucggcaacugccccaucugggugaagaccccucugaaacucgcgaaugggacaaaguauagaccgcccgccaaacugcuuaaggaacggggauuuuucggcgcuauugccggguuucuggagggcggaugggaaggcaugaucgcuggguggcauggauacacgucccacggcgcccacggggucgccguggcugcggaucucaaaagcacccaggaggccauuaacaagaucacaaagaaucugaacucucuuuccgaacuggagguuaaaaaucuccagcgccugagcggagcuauggacgagcugcauaacgaaauucucgagcuggaugaaaagguggacgaccuuagagccgauaccaucucuagccaaaucgagcuggccguccuccuguccaaugaaggcauuaucaacucugaggacgagcaccuucuggcucucgaacggaaacugaagaaaaugcuggggccuagcgccguggagauuggcaauggauguuucgaaacaaagcauaagugcaaccagaccugccucgaucgcaucgcggcuggcacguuugacgccggggaguucucccugcccaccuuugauagccuuaauauuacagccgcuucucugaacgacgauggacucgacaaccacaccauccugcuguauuacuccacagccgcuagcucucuugccgucacccucaugauugcgaucuucgugguuuauaugguguccagagauaaugucagcuguuccaucugccuguga

SEQ ID NO: 218596 - RNA, 1758 nt, Artificial Sequence
  derived and/or modified CDS sequence (opt5) from hemagglutinin__InfluenzaB__ACA65053
augaaggccaucauugugcugcucauggucguuaccagcaacgcugacagaaucugcacaggcauuacguccucuaauagcccccacguggugaaaaccgccacacagggggaggucaacgugaccggaguuaucccucugacaaccacaccgaccaagucccauuucgcgaaucuuaaaggcacggaaacccgggggaagcugugucccaaaugccucaacuguacagaucuggacguggcucuuggacgcccuaagugcaccggcaauauucccucugccagagucagcauccugcacgaggugcggccuguuacauccggguguuuucccaucaugcaugaucgcaccaagauuagacaacucccuaaccugcugcggggauacgaacacauccgccucucuacgagaaaugugauuaacgccgagaaugcuccgggcggccccuauaaaaucgggacaagcggauccugcccuaacgucaccaauggcaacggguucuuugccacaauggcuugggccgugcccaagaaugacaacaauaaaaccgcgaccaacagccugacaauugaagugccuuacaucuguacggagggagaggaucagauuaccgucuggggcuuccauucugacaacgaaacacagauggccaaacuuuauggggauuccaagccccagaaguuuaccagcucugcuaauggaguuacaacccacuacgugucccaaaucggcggcuucccgaaccagacggaggacgggggacugccucagagcggccggaucguggucgauuauauggugcagaagucugggaaaacaggaaccauuaccuaccaacgcggcauccuccugccccagaagguuuggugcgccuccgggagaagcaaagugauuaagggaucccuuccucugaucggcgaagcugacugucuccacgagaaauauggcgggcugaauaagucuaaacccuacuacacaggagagcaugccaaggcgauuggcaacugccccaucugggucaagaccccucugaaacucgccaaugggacaaaguaucggccgcccgcuaaacugcuuaaggaacgcggauuuuucggcgccaucgcuggguuucuggagggcggaugggaaggcaugauugccggguggcacggauacacgagccauggcgcccacgggguggcuguugcggccgaucucaaauccacccaggaggcuaucaacaagauuacaaagaaucugaacagccuuucugaacuggaggugaaaaaucuccagagacuguccggagccauggacgagcugcacaacgaaauccucgagcuggaugaaaaggucgacgaccuucgggccgauaccauuagcucucaaaucgagcuggcugugcuccugagcaaugaaggcaucauuaacuccgaggacgagcaucuucuggcccucgaacgcaaacugaagaaaaugcuggggccuucugcggucgagaucggcaauggauguuucgaaacaaagcacaagugcaaccagaccugccucgauagaauugcugccggcacguuugacgccggggaguucagccugcccaccuuugauucccuuaauaucacagcugccagccugaacgacgauggacucgacaaccauaccauucugcuguauuacucuacagcugccuccagccuugcggugacccucaugaucgccauuuucguuguguauauggucucucgggauaauguguccuguagcaucugccuguga

SEQ ID NO: 218597 - RNA, 1758 nt, Artificial Sequence
  derived and/or modified CDS sequence (opt5) from hemagglutinin__InfluenzaB__ACA65075
augaaggccaucauugugcugcucauggucguuaccagcaacgcugacagaaucugcacaggcauuacguccucuaauagcccccacguggugaaaaccgccacacagggggaggucaacgugaccggaguuaucccucugacaaccacaccgaccaagucccauuucgcgaaucuuaaaggcacggaaacccgggggaagcugugucccaaaugccucaacuguacagaucuggacguggcucuuggacgcccuaagugcaccggcaauauucccucugccagagucagcauccugcacgaggugcggccuguuacauccggguguuuucccaucaugcaugaucgcaccaagauuagacaacucccuaaccugcugcggggauacgaacacauccgccucucuacgcauaaugugauuaacgccgagaaugcuccgggcggccccuauaaaaucgggacaagcggauccugcccuaacauuaccaauggcaacggguucuuugccacaauggcuugggccguccccaagaaugacaacaauaaaaccgcgaccaacagccugacaaucgaagugccuuacauuuguacggagggagaggaucagaucaccguguggggcuuccacucugacaacgaaacacagauggccaaacuuuauggggauuccaagccccagaaguuuaccagcucugcuaauggagucacaacccacuacguuucccaaaucggcggcuucccgaaccagacggaggacgggggacugccucagagcggcagaauugugguggauuauaugguccagaagucugggaaaacaggaaccaucaccuaccaacggggcauucuccugccccagaagguguggugcgccuccgggcgcagcaaaguuaucaagggaucccuuccucugauuggcgaagcugacugucuccaugagaaauauggcgggcugaauaagucuaaacccuacuacacaggagagcacgccaaggcgaucggcaacugccccaucugggugaagaccccucugacacucgccaaugggacgaaauauagaccgcccgcuaagcugcuuaaagaacggggauuuuucggcgccauugcuggguuucuggagggcggaugggaaggcaugaucgccggguggcauggauacaccagccacggcgcccacggggucgcuguggcggccgaucucaaguccacacaggaggcuauuaacaaaaucaccaagaaucugaacagccuuucugaacuggagguuaagaaucuccagcgccuguccggagccauggacgagcugcauaacgaaauucucgagcuggaugaaaaaguggacgaccuuagagccgauacaaucagcucucaaaucgagcuggcuguccuccugagcaaugaaggcauuaucaacuccgaggacgagcaccuucuggcccucgaacggaagcugaaaaagaugcuggggccuucugcgguggagauuggcaauggauguuucgaaaccaaacauaagugcaaccagacgugccucgaucgcaucgcugccggcaccuuugacgccggggaguucagccugcccacauuugauucccuuaauauuaccgcugccagccugaacgacgauggacucgacaaccacacaauccugcuguauuacucuaccgcugccuccagccuugcggucacgcucaugauugccaucuucgugguuuauauggugucuagagauaaugucuccuguagcaucugccuguga

SEQ ID NO: 218598 - RNA, 1758 nt, Artificial Sequence; identical to SEQ ID NO: 218586
  derived and/or modified CDS sequence (opt5) from hemagglutinin__InfluenzaB__ACA65086

SEQ ID NO: 218599 - RNA, 1758 nt, Artificial Sequence; identical to SEQ ID NO: 218586
  derived and/or modified CDS sequence (opt5) from hemagglutinin__InfluenzaB__ACA65097

SEQ ID NO: 218600 - RNA, 1758 nt, Artificial Sequence; identical to SEQ ID NO: 218586
  derived and/or modified CDS sequence (opt5) from hemagglutinin__InfluenzaB__ACA96552

SEQ ID NO: 218601 - RNA, 1758 nt, Artificial Sequence; identical to SEQ ID NO: 218586
  derived and/or modified CDS sequence (opt5) from hemagglutinin__InfluenzaB__ACA96563

SEQ ID NO: 218602 - RNA, 1758 nt, Artificial Sequence; identical to SEQ ID NO: 218586
  derived and/or modified CDS sequence (opt5) from hemagglutinin__InfluenzaB__ACA96574

SEQ ID NO: 218603 - RNA, 1758 nt, Artificial Sequence; identical to SEQ ID NO: 218586
  derived and/or modified CDS sequence (opt5) from hemagglutinin__InfluenzaB__ACA96585

SEQ ID NO: 218604 - RNA, 1758 nt, Artificial Sequence
  derived and/or modified CDS sequence (opt5) from hemagglutinin__InfluenzaB__ACA96596
augaaggccaucauugugcugcucauggucguuaccagcaacgcugacagaaucugcacaggcauuacguccucuaauagcccccacguggugaaaaccgccacacagggggaggucaacgugaccggaguuaucccucugacaaccacaccgaccaagucccauuucgcgaaucuuaaaggcacggaaacccgggggaagcugugucccaaaugccucaacuguacagaucuggacguggcucuuggacgcccuaagugcaccggcaauauucccucugccagagucagcauccugcacgaggugcggccuguuacauccggguguuuucccaucaugcaugaucgcaccaagauuagacaacucccuaaccugcugcggggauacgaacacauccgccucucuacgcauaaugugauuaacgccgagaaugcuccgggcggccccuauaaaaucgggacaagcggauccugcccuaacgucaccaauggcaacggguucuuugccacaauggcuugggccgugcccaagaaugacaacaauaaaaccgcgaccaacagccugacaauugaagugccuuacaucuguacggagggagaggaucagauuaccgucuggggcuuccacucugacaacgaaacacagauggccaaacuuuauggggauuccaagccccagaaguuuaccagcucugcuaauggaguuacaacccacuacgugucccaaaucggcggcuucccgaaccagacggaggacgggggacugccucagagcggcagaaucguggucgauuauauggugcagaagucugggaaaacaggaaccauuaccuaccaacggggcauccuccugccccagaagguuuggugcgccuccgggcgcagcaaagugauuaagggaucccuuccucugaucggcgaagcugacugucuccaugagaaauauggcgggcugaauaagucuaaacccuacuacacaggagagcacgccaaggcgauuggcaacugccccaucugggucaagaccccucugaaacucgccaaugggacaaaguauagaccgcccgcuaaacugcuuaaggaacggggauuuuucggcgccaucgcuggguuucuggagggcggaugggaaggcaugauugccggguggcauggauacacgagccacggcgcccacgggguggcuguugcggccgaucucaaauccacccaggaggcuaucgacaagauuacaaagaaccugaauagccuuucugaacuggaggugaaaaaccuccagcgccuguccggagccauggaugagcugcauaaugaaauccucgagcuggacgaaaaggucgacgaucuuagagccgacaccauuagcucucaaaucgagcuggcugugcuccugagcaacgaaggcaucauuaauuccgaggaugagcaccuucuggcccucgaacggaaacugaagaaaaugcuggggccuucugcggucgagaucggcaacggauguuucgaaacaaagcauaagugcaaucagaccugccucgaccgcauugcugccggcacguuugaugccggggaguucagccugcccaccuuugacucccuuaacaucacagcugccagccugaaugaugacggacucgauaaccacaccauucugcuguauuacucuacagcugccuccagccuugcggugacccucaugaucgccauuuucguuguguauauggucucuagagacaacguguccuguagcaucugccuguga

SEQ ID NO: 218605 - RNA, 1758 nt, Artificial Sequence; identical to SEQ ID NO: 218586
  derived and/or modified CDS sequence (opt5) from hemagglutinin__InfluenzaB__ACA96607

SEQ ID NO: 218606 - RNA, 1758 nt, Artificial Sequence
  derived and/or modified CDS sequence (opt5) from hemagglutinin__InfluenzaB__ACA96618
augaaggccaucauugugcugcucauggucguuaccagcaacgcugacagaaucugcacaggcauuacguccucuaauagcccccacguggugaaaaccgccacacagggggaggucaacgugaccggaguuaucccucugacaaccacaccgaccaagucccauuucgcgaaucuuaaaggcacggaaacccgggggaagcugugucccaaaugccucaacuguacagaucuggacguggcucuuggacgcccuaagugcaccggcaauauucccucugccagagucagcauccugcacgaggugcggccuguuacauccggguguuuucccaucaugcaugaucgcaccaagauuagacaacucccuaaccugcugcggggauacgaacacauccgccucucuacgcauaaugugauuaacgccgagaaugcuccgggcggccccuauaaaaucgggacaagcggauccugcccuaacgucaccaauggcaacggguucuuugccacaauggcuugggccgugcccaagaaugacaacaauaaaaccgcgaccaacagccugacaauugaagugccuuacaucuguacggagggagaggaucagauuaccgucuggggcuuccacucugacaacgaaacacagauggccaaacuuuauggggauuccaagccccagaaguuuaccagcucugcuaauggaguuacaacccacuacgugucccaaaucggcggcuucccgaaccagacggaggacgggggacugccucagagcggcagaaucguggucgauuauauggugcagaagucugggaaaacaggaaccauuaccuaccaacggggcauccuccugccccagaagguuuggugcgccuccgggcgcagcaaagugauuaagggaucccuuccucugaucggcgaagcugacugucuccaugagaaauauggcgggcugaauaagucuaaacccuacuacacaggagagcacgccaaggcgauuggcaacugccccaucugggucaagaccccucugaaacucgccaaugggacaaaguauagaccgcccgcuaaacugcuuaaggaacggggauuuuucggcgccaucgcuggguuucuggagggcggaugggaaggcaugauugccggguggcauggauacacgagccacggcgcccacgggguggcuguugcggccgaucucaaauccacccaggaggcuaucaacaagauuacaaagaaucugaacagccuuucugaacuggaggugaaaaaucuccagcgccuguccggagccauggacgagcugcauaacgaaauccucgagcuggaugaaaaggucgacgaccuuagagccgauaccauuagcucucaaaucgagcuggcugugcuccugagcaaugaaggcaucauuaacuccgaggacgagcaccuucuggcccucgaacggaaacugaagaaaaugcuggggccuucugcggucgagaucggcaauggauguuucgaaacaaagcauaagugcaaccagaccugccucgaucgcauugcugccggcacguuugacgccggggaguucuuucugcccaccuucgauagccuuaauaucacagcugccucccugaacgacgauggacucgacaaccacaccauucugcuguauuacagcacagcugccucuucccuugcggugacccucaugaucgccauuuucguuguguauauggucagcagagauaaugugucuuguuccaucugccuguga

SEQ ID NO: 218607 - RNA, 1758 nt, Artificial Sequence; identical to SEQ ID NO: 218586
  derived and/or modified CDS sequence (opt5) from hemagglutinin__InfluenzaB__ACA96629

SEQ ID NO: 218608 - RNA, 1758 nt, Artificial Sequence; identical to SEQ ID NO: 218592
  derived and/or modified CDS sequence (opt5) from hemagglutinin__InfluenzaB__ACA96640

SEQ ID NO: 218609 - RNA, 1755 nt, Artificial Sequence
  derived and/or modified CDS sequence (opt5) from hemagglutinin__InfluenzaB__ACD56566
augaaggccaucauugugcugcucauggucguuaccagcaacgcugacagaaucugcacaggcauuacguccucuaauagcccccacguggugaaaaccgccacacagggggaagucaacgugaccggaguuaucccucugacaaccacaccgaccaaguccuacuucgcgaaucuuaaaggcacgcggacccgcgggaagcugugucccgauugccucaacuguacagaccuggauguggcucuuggaagaccuaugugcgucggcaccacacccucugccaaagccagcauucugcaugaagugcggccuguuaccuccggguguuuucccaucaugcacgaccgcacgaagaucagacaacucccuaaucugcugcggggauaugagaacauucgccucucuacacagaauguggucgaugcugaaaacgccccgggcggccccuacagacuggggaccagcggauccugcccuaaugcuacaagcaagucuggcuucuuugccaccauggcgugggccgugcccaaagacaacaauaagaacgcuaccaauccucuuacaguggagguccccuauguuuguacggaaggggaggaucagaucaccguguggggauuccauuccgacaacaaaacacagaugaagaaucuguacggcgauagcaacccgcaaaaauuuaccucuuccgccaacggggugacaacccacuaugucagccagauuggaggcuucccugcucagacggaggacggcgggcucccccagucuggacggaucgugguugauuacauggugcaaaagccucgcaagacaggcaccauugucuaucagagaggggugcugcuuccccagaaaguuuggugcgccuccggacggagcaaggugaucaaaggcucccugccccucauuggggaagcggacugucugcaugagaaguacggaggccugaauaaaucuaagccuuacuauaccggcgaacacgccaaagcuaucgggaacugcccgaucugggucaagacaccccucaagcuggccaauggaaccaaauaccgcccucccgcuaagcugcugaaagagagaggcuuuuucggggccauugccggauuucucgagggcgggugggaaggcaugaucgcuggauggcacggcuauacaagccauggggcgcacggaguggccgucgcugccgaucugaaguccacgcaggaggccauuaacaaaaucaccaagaaucuuaacagccugucugaacucgaggugaagaaucugcaacggcuguccggcgcuauggacgaacuccauaacgagauucuggagcuugacgaaaaaguugaugaccugcgcgccgauacaaucagcucucagaucgagcucgcggugcugcuuagcaaugaagggauuaucaacuccgaggacgaacaccuucucgcucuggagagaaagcugaaaaagaugcucggaccuucugccgucgauauuggcaauggguguuucgagaccaaacacaagugcaaccagacaugccuggacaagaucgccgcuggcaccuuuaaugccggagaguucagccuucccacguuugauucccugaacauuaccgcugccagccucaaugacgauggccuggacaaccauacaauccugcuuuacuauucuaccgcggccuccagccucgcugugacacugaugcuggccaucuucauuguuuacauggugucucgggauaacgucuccuguagcaucugccucuga

SEQ ID NO: 218610 - RNA, 1755 nt, Artificial Sequence
  derived and/or modified CDS sequence (opt5) from hemagglutinin__InfluenzaB__ACD56577
augaaggccaucauugugcugcucauggucguuaccagcaacgcugacagaaucugcacaggcauuacguccucuaauagcccccacguggugaaaaccgccacacagggggaagucaacgugaccggaguuaucccucugacaaccacaccgaccaaguccuacuucgcgaaucuuaaaggcacgcggacccgcgggaagcugugucccgauugccucaacuguacagaccuggauguggcucuuggaagaccuaugugcgucggcaccacacccucugccaaagccagcauucugcaugaagugcggccuguuaccuccggguguuuucccaucaugcacgaccgcacgaagaucagacaacucccuaaucugcugcggggauaugagaacauucgccucucuacacagaaugugaucgaugcugaaaacgccccgggcggccccuacagacuggggaccagcggauccugcccuaaugcuacaagcaagucuggcuucuuugccaccauggcgugggccguccccaaagacaacaauaagaacgcuaccaauccucuuacaguggaggugcccuauauuuguacggaaggggaggaucagaucaccgucuggggauuccauuccgacaacaaagcccagaugaagaaucuguacggcgauagcaacccgcaaaaauuuacaucuuccgcuaacgggguuaccacacacuaugugagccagauuggaggcuucccugcccagaccgaggacggcgggcucccccagucuggacggaucguggucgauuacauggugcaaaagccucgcaagacgggcacaauuguuuaucagagaggggugcugcuuccccagaaagucuggugcgcguccggacggagcaaggugaucaaaggcucccugccccucaucggggaagccgacugucugcaugagaaguacggaggccugaauaaaucuaagccuuacuauaccggcgaacacgcuaaagccauugggaacugcccgaucuggguuaagacaccccucaagcuggcuaauggaaccaaauaccgcccucccgccaagcugcugaaagagagaggcuuuuucggggccauugcuggauuucucgagggcgggugggaaggcaugaucgcgggauggcacggcuauaccagccauggggcccacggaguggcugucgccgccgaucugaaguccacacaggaggcuauuaacaaaaucacgaagaaucuuaacagccugucugaacucgaggugaagaaucugcaacggcuguccggcgccauggacgaacuccauaacgagauccuggagcuugacgaaaaagucgaugaccugcgcgcggauaccauuagcucucagaucgagcucgcugugcugcuuagcaaugaagggauuaucaacuccgaggacgaacaccuucucgcccuggagagaaagcugaaaaagaugcucggaccuucugccguugauauuggcaauggguguuucgagacaaaacacaagugcaaccagaccugccuggaccggaucgcugccggcacauuuaaugcuggagaguucagccuucccaccuuugauucccugaacaucacggccgcgagccucaaugacgauggccuggacaaccauaccauucugcuuuacuauucuacagccgcuuccagccucgccgugacccugaugcuggcuaucuucauugucuacauggugucuagagauaacguuuccuguagcaucugccucuga

SEQ ID NO: 218611 - RNA, 1758 nt, Artificial Sequence; identical to SEQ ID NO: 218592
  derived and/or modified CDS sequence (opt5) from hemagglutinin__InfluenzaB__ACF41658

SEQ ID NO: 218612 - RNA, 1758 nt, Artificial Sequence
  derived and/or modified CDS sequence (opt5) from hemagglutinin__InfluenzaB__ACF54136
augaaggccaucauugugcugcucauggucguuaccagcaacgcugacagaaucugcacaggcauuacguccucuaauagcccccacguggugaaaaccgccacacagggggaagucaacgugaccggaguuaucccucugacaaccacaccgaccaagucccauuucgcgaaucuuaaaggcacggaaacccgggggaagcugugucccaaaugccucaacuguacagaucuggacguggcucuuggacgcccuaagugcaccggcaauauucccucugccagagucagcauccugcacgaggugcggccuguuacauccggguguuuucccaucaugcaugaucgcaccaagauuagacaacucccuaaccugcugcggggauacgaacacauccgccucucuacgcauaaugugauuaacgccgagaaugcuccgggcggccccuauaaaaucgggacaagcggauccugcccuaacgucaccaauggcaacggguucuuugccacaauggcuugggccgugcccaagaaugacaacaauaaaaccgcgaccaacagccugacaauugaagugccuuacaucuguacggagggagaggaucagauuaccgucuggggcuuccacucugacaacaagacacagauggccaaacuuuauggggauuccaagccccagaaguuuaccagcucugcuaauggaguuacaacccacuacgugucccaaaucggcggcuucccgaaccagacggaagacgggggacugccucagagcggcagaaucguggucgauuauauggugcagaaaucugggaagacaggaaccauuaccuaccaacggggcauccuccugccccagaaaguuuggugcgccuccgggcgcagcaaggugauuaaaggaucccuuccucugaucggcgaggcugacugucuccaugaaaaguauggcgggcugaauaaaucuaagcccuacuacacaggagagcacgccaaggcgauuggcaacugccccaucugggucaaaaccccucugaagcucgccaaugggacaaaauauagaccgcccgcuaagcugcuuaaagagcggggauuuuucggcgccaucgcuggguuucuggaaggcggaugggagggcaugauugccggguggcauggauacacgagccacggcgcccacgggguggcuguugcggccgaucucaaguccacccaggaagcuaucaacaagauuaccaaaaaucugaacagccuuucugagcuggaagugaagaaucuccagcgccuguccggagccauggacgagcugcauaacgagauccucgaacuggaugagaaagucgacgaccuuagagccgauacaauuagcucucaaaucgaacuggcugugcuccugagcaaugagggcaucauuaacuccgaagacgagcaccuucuggcccucgagcggaagcugaaaaagaugcuggggccuucugcggucgaaaucggcaauggauguuucgagacaaagcauaaaugcaaccagaccugccucgaucgcauugcugccggcacguuugacgccggggaguucagccugcccaccuuugauucccuuaauaucacagcugccagccugaacgacgauggacucgacaaccacaccauucugcuguauuacucuacagcugccuccagccuugcggugacccucaugaucgccauuuucguuguguauauggucucuagagauaauaucuccuguagcaucugccuguga

SEQ ID NO: 218613 - RNA, 1758 nt, Artificial Sequence; identical to SEQ ID NO: 218586
  derived and/or modified CDS sequence (opt5) from hemagglutinin__InfluenzaB__ACF54147

SEQ ID NO: 218614 - RNA, 1755 nt, Artificial Sequence
  derived and/or modified CDS sequence (opt5) from hemagglutinin__InfluenzaB__ACF54158
augaaggccaucauugugcugcucauggucguuaccagcaacgcugacagaaucugcacaggcauuacguccucuaauagcccccacguggugaaaaccgccacacagggggaggucaacgugaccggaguuaucccucugacaaccacaccgaccaaguccuacuucgcgaaucuuaaaggcacgcggacccgcgggaagcugugucccgauugccucaacuguacagaccuggauguggcucuuggaagaccuaugugcgucggcaccacacccucugccaaagccagcauucugcaugaagugcggccuguuaccuccggguguuuucccaucaugcacgaccgcacgaagaucagacaacucgcuaaucugcugcggggauaugagaacauucgccucucuacacagaaugugaucgaugccgaaaaggcuccuggcggcccguacagacuggggaccagcggauccugccccaacgccacaagcaaaucuggcuucuuugcgaccauggccugggcugucccuaaggacaauaacaaaaaugccaccaacccccuuacaguggaggugccuuauauuuguacggaaggggaggaucagaucaccgucuggggauuccauuccgacaauaagacacagaugaaaaaccuguacggcgauagcaauccccaaaaguuuaccucuuccgcuaacgggguuacaacccacuaugugagccagauuggaggcuucccggaccagacggaggauggcgggcucccucagucuggacggaucguggucgacuacaugaugcaaaagcccggcaaaacagggaccauuguguaucagcgcggaguucugcuuccucagaagguguggugcgccuccggcagaagcaaagucaucaaggggucccugccccucaucggagaagcggauugucugcaugagaaauacggcggccugaacaagucucggcccuacuauaccggggaacacgccaaagcuauuggaaauugcccuaucugggugaagacaccgcucaagcuggccaacggcaccaaauacagacccccugcuaagcugcugaaagagcgcggguuuuucggagccauugccggcuuucucgaagggggcugggaaggaaugaucgcuggcuggcacggguauacaagccauggagcgcacggcguugccguggcugccgaccugaaguccacgcaggaggccauuaauaaaaucaccaagaaccuuaauagccugucugaacucgaggucaagaaccugcaacggcuguccggggcuauggacgaacuccauaaugagauccuggagcuugaugaaaaaguggacgaucugcgcgccgacacaauuagcucucagaucgagcucgcgguccugcuuagcaacgaaggaauuaucaauuccgaggaugaacaccuucucgcucuggagagaaagcugaaaaagaugcucggccccucugccguggacauugggaacggcuguuucgagaccaaacacaagugcaaucagacaugccuggaucggaucgccgcuggaaccuuuaacgccggcgaguucagccuuccuacguuugacucccugaauaucaccgcugccagccucaacgaugacgggcuggauaaucauacaauucugcuuuacuauucuaccgcggccuccagccucgcuguuacacugaugcuggccaucuucauuguguacauggucucuagagacaacguguccuguagcaucugccucuga

SEQ ID NO: 218615 - RNA, 1755 nt, Artificial Sequence
  derived and/or modified CDS sequence (opt5) from hemagglutinin__InfluenzaB__ACF54169
augaaggccaucauugugcugcucauggucguuaccagcaacgcugacagaaucugcacaggcauuacguccucuaauagcccccacguggugaaaaccgccacacagggggaggucaacgugaccggaguuaucccucugacaaccacaccgaccaaguccuacuucgcgaaucuuaaaggcacgcggacccgcgggaagcugugucccgauugccucaacuguacagaccuggauguggcucuuggaagaccuaugugcgucggcaccacacccucugccaaagccagcauucugcaugaagugcggccuguuaccuccggguguuuucccaucaugcacgaccgcacgaagaucagacaacucccuaaucugcugcggggauaugagaacauucgccucucuacacagaaugugaucgaugcugaaaacgccccgggcggccccuacagacuggggaccagcggauccugcccuaaugcuacaagcaagucuggcuucuuugccaccauggcgugggccguccccaaagacaacaauaagaacgcuaccaauccucuuacaguggaggugcccuaugucuguacggaaggggaggaucagauuaccguuuggggauuccauuccgacaacaaaacaccgaugaagaaucuguacggcgauagcaacccucagaaauuuaccucuuccgccaacggggugacaacccacuaugugagccaaaucggaggcuuccccgcucagacggaggacgaaggcauuccucagucugggcggaucgucguggauuacaugguucagaagccccgcaagacaggaaccauuguguaucaaagaggcguccuccugccccagaaaguguggugcgccuccgggcggagcaagguuaucaaaggaucccuuccucugaucggcgaggcggacugucuccaugaaaaguacgggggacugaauaaaucuaagccguacuauaccggcgagcacgccaaagcuauuggcaacugccccaucugggugaagacaccucugaagcucgccaaugggaccaaauacagacccccugcuaagcugcuuaaagagcgcggauuuuucggcgccauugccggguuucuggaaggaggcugggaggggaugaucgcuggcuggcacggauauacaagccauggcgcgcacggggucgccguggcugccgaucucaaguccacgcaggaagccauuagcaaaaucaccaagaaccuuaauucucuguccgagcuggaagucaagaaccuccagcggcugagcggagcuauggacgagcugcauaaugagauccucgaacuggacgagaaaguggaugaccuucgcgccgauacaauuucuagccaaaucgaacuggcgguucuccuguccaacgagggcauuaucaauucugaagacgagcaccuucuggcucucgagagaaagcugaaaaagaugcuggggcccagcgccguggauauuggaaacggcuguuucgaaaccaaacacaagugcaaucagacaugccucgaccggaucgccgcugggaccuuuaacgccggcgaguucucccugccgacguuugauagccuuaauaucaccgcugccucucugaacgacgauggacucgacaaucauacaauucugcuguacuauuccaccgcggccagcucucuugcugucacacucaugcuggccaucuucauuguguacaugguuuccagagauaacgugagcuguuccaucugccuguga

SEQ ID NO: 218616 - RNA, 1755 nt, Artificial Sequence
  derived and/or modified CDS sequence (opt5) from hemagglutinin__InfluenzaB__ACF54180
augaaggccaucauugugcugcucauggucguuaccagcaacgcugacagaaucugcacaggcauuacguccucuaauagcccccacguggugaaaaccgccacacagggggaagucaacgugaccggaguuaucccucugacaaccacaccgaccaaguccuacuucgcgaaucuuaaaggcacgcggacccgcgggaagcugugucccgauugccucaacuguacagaccuggauguggcucuuggaagaccuaugugcgucggcaccacacccucugccaaagccagcauucugcaugaagugcggccuguuaccuccggguguuuucccaucaugcacgaccgcacgaagaucagacaacucccuaaucugcugcggggauaugagaacauucgccucucuacacagaaugugaucgaugcugaaaacgccccgggcggccccuacagacuggggaccagcggauccugcccuaaugcuacaagcaagucuggcuucuuugccaccauggcgugggccguccccaaagacaacaauaagaacgcuaccaauccucuuacaguggaggugcccuaugucuguacggaaggggaggaucagauuaccguuuggggauuccauuccgacaacaaaacaccgaugaagaaucuguacggcgauagcaacccucagaaauuuaccucuuccgccaacggggugacaacccacuaugugagccaaaucggaggcuuccccgcucagacggaggacggcgggcucccucagucuggacggauugucguggauuacaugguucagaagccccgcaagacaggcaccaucguguaucaaagagggguccugcuuccccagaaaguguggugcgccuccggacggagcaagguuauuaaaggcucccugccucucaucggggaagcggacugucugcaugagaaguacggaggccugaauaaaucuaagccguacuauaccggcgaacacgccaaagcuaucgggaacugccccauuugggugaagacaccucucaagcuggccaauggaaccaaauacagacccccugcuaagcugcugaaagagcgcggcuuuuucggggccaucgccggauuucucgagggcgggugggaaggcaugauugcuggauggcacggcuauacaagccauggggcgcacggagucgccguggcugccgaucugaaguccacgcaggaggccaucaacaaaauuaccaagaaucuuaacagccugucugaacucgaggucaagaaucugcagcggcuguccggcgcuauggacgaacuccauaacgagauccuggagcuugacgaaaaaguggaugaccugcgcgccgauacaaucagcucucaaauugagcucgcgguucugcuuagcaaugaagggaucauuaacuccgaggacgaacaccuucucgcucuggagagaaagcugaaaaagaugcucggacccucugccguggauaucggcaauggguguuucgagaccaaacacaagugcaaccagacaugccuggaccggauugccgcuggcaccuuuaaugccggagaguucagccuuccgacguuugauucccugaacaucaccgcugccagccucaaugacgauggccuggacaaccauacaauccugcuuuacuauucuaccgcggccuccagccucgcugucacacugaugcuggccauuuucaucguguacaugguuucuagagauaacguguccuguagcauuugccucuga

SEQ ID NO: 218617 - RNA, 1755 nt, Artificial Sequence
  derived and/or modified CDS sequence (opt5) from hemagglutinin__InfluenzaB__ACF54202
augaaggccaucauugugcugcucauggucguuaccagcaacgcugacagaaucugcacaggcauuacguccucuaauagcccccacguggugaaaaccgccacacagggggaggucaacgugaccggaguuaucccucugacaaccacaccgaccaaguccuacuucgcgaaucuuaaaggcacgcggacccgcgggaagcugugucccgauugccucaacuguacagaccuggauguggcucuuggaagaccuaugugcgucggcaccacacccucugccaaagccagcauucugcaugaagugcggccuguuaccuccggguguuuucccaucaugcacgaccgcacgaagaucagacaacucccuaaucugcugcggggauaugagaacauucgccucucuacacagaaugugaucgaugcugaaaacgccccgggcggccccuacagacuggggaccagccgguccugcccuaaugcuacaagcaagucuggauucuuugccaccauggcgugggccguccccaaagacaacaauaagaacgcuaccaauccucuuacaguggaggugcccuaugucuguacggaaggcgaggaucagauuaccguuuggggguuccauuccgacaacaaaacacagaugaagaaucuguacggagauagcaacccgcaaaaauuuaccucuuccgccaacggcgugacaacccacuaugugagccagaucgggggauucccugcucagacggaggacgaaggccucccccagucuggccgcauugucguggauuacaugguucaaaagccuagaaagacagggaccaucguguaucagcggggaguccugcuuccccagaaaguguggugcgccuccggccgcagcaagguuauuaaagggucccugccccucaucggagaggcggacugucugcaugaaaaguacggcgggcugaauaaaucuaagccuuacuauaccggagagcacgccaaagcuaucggcaacugcccgauuugggugaagacaccccucaagcuggccaauggcaccaaauacagaccucccgcuaagcugcugaaagagcggggguuuuucggagccaucgccggcuuucucgaagggggaugggagggcaugauugcuggguggcacggcuauacaagccauggagcgcacggcgucgccguggcugccgaucugaaguccacgcaggaagccaucaacaaaauuaccaagaaucuuaacagccugucugagcucgaagucaagaaucugcaacgccuguccggggcuauggacgagcuccauaacgagauccuggaacuugacgagaaaguggaugaccugagagccgauacaaucagcucucagauugaacucgcgguucugcuuagcaaugagggaaucauuaacuccgaagacgagcaccuucucgcucuggagcggaagcugaaaaagaugcucggcccuucugccguggauaucgggaauggauguuucgaaaccaaacacaagugcaaccagacaugccuggacagaauugccgcuggcaccuuuaaugccggggaguucagccuucccacguuugauucccugaacaucaccgcugccagccucaaugacgauggccuggacaaccauacaauccugcuuuacuauucuaccgcggccuccagccucgcugucacacugaugcuggccauuuucaucguguacaugguuucucgcgauaacguguccuguagcauuugccucuga

SEQ ID NO: 218618 - RNA, 1755 nt, Artificial Sequence
  derived and/or modified CDS sequence (opt5) from hemagglutinin__InfluenzaB__ACF54213
augaaggccaucauugugcugcucauggucguuaccagcaacgcugacagaaucugcacaggcauuacguccucuaauagcccccacguggugaaaaccgccacacagggggaggucaacgugaccggaguuaucccucugacaaccacaccgaccaaguccuacuucgcgaaucuuaaaggcacgcggacccgcgggaagcugugucccgauugccucaacuguacagaccuggauguggcucuuggaagaccuaugugcgucggcaccacacccucugccaaagccagcauucugcaugaagugcggccuguuaccuccggguguuuucccaucaugcacgaccgcacgaagaucagacaacucccuaaucugcugcggggauaugagaacauucgccucucuacacagaaugugaucgaugcugaaaaggccccgggcggccccuacagacuggggaccagcggauccugcccuaacgcuacaagcaaaucuggcuucuuugccaccauggcgugggccguccccaaggacaauaacaaaaaugcuaccaacccucuuacaguggaggugcccuauauuuguacggaaggggaggaucagaucaccgucuggggauuccauuccgacgauaagacacagaugaaaaaucuguacggcgacagcaacccgcaaaaguuuaccucuuccgccaaugggguuacaacccacuaugugagccagauuggaggcuucccugaucagacggaggacggcgggcucccccagucuggacggaucguggucgauuacaugaugcaaaagccuggcaaaacagggaccauuguguaucagcgcggaguucugcuuccccagaagguguggugcgcuuccggcagaagcaaagucaucaaggggucccugccccucaucggagaagccgacugucugcaugagaaauacggcggccugaacaagucuaaaccuuacuauaccggggaacacgcgaaggccauuggaaacugcccgaucugggugaagacaccccucaaacuggcuaauggcaccaaguaccggccucccgccaaacuucugaaggagcgcggguuuuucggagcuauugccggcuuucucgaagggggcugggaaggaaugaucgccggcuggcacggguauacaagccauggagcucacggcguugcgguggccgcugaccugaaauccacgcaggaggccauuaacaagaucaccaagaaucuuaacagccugucugaacucgaggucaaaaaucugcaaagacuguccggggccauggaugaacuccauaacgagauccuggagcuugacgaaaagguggaugaccugcgggcugauacaauuagcucucagaucgagcucgccguccugcuuagcaaugaaggaauuaucaacuccgagaaugaacaucugcucgcgcuggagcgcaaacugaagaaaaugcucggcccuucugcuguggacauugggaacggcuguuucgagaccaagcacaagugcaaucagacaugccuggauagaaucgccgccggaaccuuuaacgcuggcgaguucagccuucccacguuugacucccugaauaucaccgccgcuagccucaacgaugacgggcuggauaaucacacaauucugcuuuacuauucuaccgccgcguccagccucgccguuacacugaugcuggcuaucuucauuguguacauggucucucgggacaacguguccuguagcaucugccucuga

SEQ ID NO: 218619 - RNA, 1758 nt, Artificial Sequence
  derived and/or modified CDS sequence (opt5) from hemagglutinin__InfluenzaB__ACF54224
augaaggccaucauugugcugcucauggucguuaccagcaacgcugacagaaucugcacaggcauuacguccucuaauagcccccacguggugaaaaccgccacacagggggaggucaacgugaccggaguuaucccucugacaaccacaccgaccaagucccauuucgcgaaucuuaaaggcacgaagacccgggggaaacugugucccaagugccucaacuguacagaucuggacguggcucuuggacgcccuaagugcaccggcaauauucccucugccgaagucagcauccugcacgaggugagaccuguuacauccggguguuuucccaucaugcaugaucggaccaaaauucgccaacucccuaaccugcugagaggauacgaacacauccggcucucuacgcauaaugugauuaacgccgagaaggcuccgggcggccccuauaaaaucgggacaagcggauccugcccuaaugucaccaacggcaauggguucuuugccacaauggcuugggccgugcccaagaacgacaauaacaaaaccgcgaccaauagccugacaauugaagugccuuacaucuguacggagggagaggaucagauuaccgucuggggcuuccacucugacaacgaaacacagauggccaaacuuuauggggauuccaagccccagaaauuuaccucuucuuccaacggaguuacaacccacuacgugagccaaaucggcggcuucccgaaucagacggaggacgggggacugccucagucuggccgcaucguggucgauuauauggugcagaaguccgggaaaacaggaaccauuaccuaccaaagaggcauccuccugccccagaagguuuggugcgcuagcgggcgguccaaagugauuaagggaucucuuccucugaucggcgaagccgacugucuccaugagcgcuauggcgggcugaacaaaagcaagcccuacuacacaggagagcacgcuaaggccauuggcaauugccccaucugggucaaaaccccucugaagcucgcgaacgggacaaaauauagaccgcccgccaagcugcuuaaagaacggggauuuuucggcgcuaucgccggguuucuggagggcggaugggaaggcaugauugcuggguggcauggauacacgucccacggcgcccacgggguggccguugcugcggaucucaagagcacccaggaggccaucaauaagauuacaaagaaccugaauagccuuuccgaacuggaggugaagaaccuccagcgccugagcggagcuauggacgagcugcauaaugaaauccucgagcuggaugaaaaagucgacgaccuuagagccgauaccauuucuagccaaaucgagcuggccgugcuccuguccaacgaaggcaucauuaauucugaggacgagcaccuucuggcucucgaacggaagcugaaaaagaugcuggggccuagcgccgucgagaucggcaacggauguuucgaaacaaagcauaaaugcaaucagaccugccucgaucgcauugcggcuggcacguuugacgccggggaguucucccugcccaccuuugauagccuuaacaucacagccgcuucucugaaugacgauggacucgacaaccacaccauucugcuguauuacuccacagccgcuagcucucuugccgugacccucaugaucgcgauuuucguuguguauauggucuccagagauaacgugagcuguuccaucugccuguga

SEQ ID NO: 218620 - RNA, 1755 nt, Artificial Sequence
  derived and/or modified CDS sequence (opt5) from hemagglutinin__InfluenzaB__ACF54257
augaaggccaucauugugcugcucauggucguuaccagcaacgcugacagaaucugcacaggcauuacguccucuaauagcccccacguggugaaaaccgccacacagggggaggucaacgugaccggagcgaucccucugacaaccacaccgaccaagucccauuucgcuaaucuuaaaggcacgaagacccgggggaaacugugucccacaugccucaacuguaccgaucuggacguugcccuuggacgcccuaugugcgugggcauuacacccucugccaaggcuagcauccugcacgaagucagaccugugaccuccggguguuuucccaucaugcaugaucggacgaagauucgccaacucccuaaucugcugagaggauacgagaaaauccggcucucuacacagaacguuauugacgccgaaaaggcuccgggcggccccuaucgccuggggaccagcggauccugcccuaaugccacaagcaaaucuggcuucuuugcgaccauggccugggcugugcccagagagaacaauaagaccgccacaaacccucuuacggucgaagugccccacaucuguaccaaagaggaggaucagauuacaguguggggguuccauuccgacaauaagccgcagaugaagaaccuguacggagauagcaauccucaaaaauuuaccucuuccgcuaacggcaucacaacccacuaugucagccagauugggggauuccccgaccagacggaagauggcggccucccucagucugggcggaucguuguggacuacauggugcaaaagcccggaaaaacaggcaccaucgucuaucagcgcgggauucugcuuccccagaagguguggugcgccuccggaagaagcaaaguuaucaagggcucccugccucucauuggggaggcggauugucugcacgaaaaauacggaggccugaauaagucuaagccguauuacaccggcgagcaugccaaagcuaucgggaacugccccauuugggugaagacaccucucaaacuggccaacggaaccaaguaccggcccccugcuaaacuucugaaggagcgcggcuuuuucggggccaucgccggauuucucgaaggcgggugggagggcaugaucgcuggauggcacggcuauacaagccauggggcgcacggagucgccguggcugccgaccugaaguccacgcaggaagccauuaauaaaaucaccaagaaccuuaauagccugucugagcucgaaguuaaaaaccugcaaagacuguccggcgcuauggaugagcuccacaaugagauucuggaacuugacgagaagguggacgaucugcgggccgacacaaucagcucucagauugaacucgcgguccugcuuagcaacgaggggaucaucaauuccgaagaugagcaucugcucgcucuggagcgcaaacugaagaagaugcucggacccucugccguggacauuggcaacggguguuucgaaaccaaacacaagugcaaucagacaugccuggauagaaucgccgcuggcaccuuuaacgccggagaguucagccuuccgacguuugacucccugaauauuaccgcugccagccucaacgaugacggccuggauaaucauacaauccugcuuuacuauucuaccgcggccuccagccucgcugucacacugaugauugccaucuucauuguguacaugaucucucgggacaacguuuccuguagcaucugccuguga

SEQ ID NO: 218621 - RNA, 1755 nt, Artificial Sequence
  derived and/or modified CDS sequence (opt5) from hemagglutinin__InfluenzaB__ACF54268
augaaggccaucauugugcugcucauggucguuaccagcaacgcugacagaaucugcacaggcauuacguccucuaauagcccccacguggugaaaaccgccacacagggggaggucaacgugaccggagcgaucccucugacaaccacaccgaccaagucccauuucgcuaaucuuaaaggcacgaagacccgggggaaacugugucccacaugccucaacuguaccgaucuggacguugcccuuggacgcccuaugugcgugggcauuacacccucugccaaggcuagcauccugcacgaagucagaccugugaccuccggguguuuucccaucaugcaugaucggacgaagauucgccaacucccuaaucugcugagaggauacgagaaaauccggcucucuacacagaacguuauugacgccgaaaaggcuccgggcggccccuaucgccuggggaccagcggauccugcccuaaugccacaagcaaaucuggcuucuuugcgaccauggccugggcugugcccagagagaacaauaagaccgccacaaacccucuuacggucgaagugccccacaucuguaccaaagaggaggaucagauuacaguguggggguuccauuccgacaauaagauccagaugaagaaccuguacggagauagcaauccgcaaaaauuuaccucuuccgcuaacggcauuacaacccacuaugucagccagaucgggggauucccugaccagacggaagauggcggccucccccagucugggcggaucguuguggacuacauggugcaaaagccuggaaaaacaggcaccauugucuaucagcgcgggauccugcuuccccagaagguguggugcgccuccggaagaagcaaaguuauuaagggcucccugccccucaucggggaggcggauugucugcacgaaaaauacggaggccugaauaagucuaagccuuauuacaccggcgagcaugccaaagcuauugggaacugcccgaucugggugaagacaccccucaaacuggccaacggaaccaaguaccggccucccgcuaaacuucugaaggagcgcggcuuuuucggggccaucgccggauuucucgaaggcgggugggagggcaugauugcuggauggcacggcuauacaagccauggggcgcacggagucgccguggcugccgaccugaaguccacgcaggaagccaucaauaaaauuaccaagaaccuuaauagccugucugagcucgaaguuaaaaaccugcaaagacuguccggcgcuauggaugagcuccacaaugagauccuggaacuugacgagaagguggacgaucugcgggccgacacaauuagcucucagaucgaacucgcgguccugcuuagcaacgaggggaucauuaauuccgaagaugagcaucugcucgcucuggagcgcaaacugaagaagaugcucggaccuucugccaucgacauuggcaacggguguuucgaaaccaaacacaagugcaaucagacaugccuggauagaaucgccgcuggcaccuuuaacgccggagaguucagccuucccacguuugacucccugaauauuaccgcugccagccucaacgaugacggccuggauaaucauacaauccugcuuuacuauucuaccgcggccuccagccucgcugugacacugaugauugccaucuucaucgucuacaugauuucucgggacaacguguccuguagcaucugccuguga

SEQ ID NO: 218622 - RNA, 1755 nt, Artificial Sequence
  derived and/or modified CDS sequence (opt5) from hemagglutinin__InfluenzaB__ACF54279
augaaggccaucauugugcugcucauggucguuaccagcaacgcugacagaaucugcacaggcauuacguccucuaauagcccccacguggugaaaaccgccacacagggggaggucaacgugaccggagcgaucccucugacaaccacaccgaccaagucccauuucgcuaaucuuaaaggcacgaagacccgggggaaacugugucccacaugccucaacuguaccgaucuggacguugcccuuggacgcccuaugugcgugggcauuacacccucugccaaggcuagcauccugcacgaagucagaccugugaccuccggguguuuucccaucaugcaugaucggacgaagauucgccaacucccuaaucugcugagaggauacgagaaaauccggcucucuacacagaacguuauugacgccgaaaaggcuccgggcggccccuaucgccuggggaccagcggauccugcccuaaugccacaagcaaaucuggcuucuuugcgaccauggccugggcugugcccagagagaacaauaagaccgccacaaacccucuuacggucgaagugccccacaucuguaccaaagaggaggaucagauuacaguguggggguuccauuccgacaauaagacccagaugaagaaccuguacggagauagcaauccgcaaaaauuuacaucuuccgcuaacggcaucaccacgcacuaugucagccagauugggggauucccugaccagacagaagauggcggccucccccagucugggcggaucguuguggacuacauggugcaaaagccuggaaaaaccggcaccaucgucuaucagcgcgggauucugcuuccccagaagguguggugcgccuccggaagaagcaaaguuaucaagggcucccugccccucauuggggaggcggauugucugcacgaaaaauacggaggccugaauaagucuaagccuuauuacacaggcgagcaugccaaagcuaucgggaacugcccgauuugggugaagacaccccucaaacuggccaacggaaccaaguaccggccucccgcuaaacuucugaaggagcgcggcuuuuucggggccaucgccggauuucucgaaggcgggugggagggcaugaucgcuggauggcacggcuauacgagccauggggcgcacggagucgccguggcugccgaccugaaguccacccaggaagccauuaauaaaaucacaaagaaccuuaauagccugucugagcucgaaguuaaaaaccugcaaagacuguccggcgcuauggaugagcuccacaaugagauucuggaacuugacgagaagguggacgaucugcgggccgacaccaucagcucucagauugaacucgcgguccugcuuagcaacgaggggaucaucaauuccgaagaugagcaucugcucgcucuggagcgcaaacugaagaagaugcucggaccuucugccguggacauuggcaacggguguuucgaaacaaaacacaagugcaaucagaccugccuggauagaaucgccgcuggcacguuuaacgccggagaguucagccuucccaccuuugacucccugaauauuacagcugccagccucaacgaugacggccuggauaaucauaccauccugcuuuacuauucuacagcggccuccagccucgcugucacccugaugauugccaucuucauuguguacaugaucucucgggacaacguuuccuguagcaucugccuguga

SEQ ID NO: 218623 - RNA, 1755 nt, Artificial Sequence
  derived and/or modified CDS sequence (opt5) from hemagglutinin__InfluenzaB__ACF54290
augaaggccaucauugugcugcucauggucguuaccagcaacgcugacagaaucugcacaggcauuacguccucuaauagcccccacguggugaaaaccgccacacagggggaagucaacgugaccggaguuaucccucugacaaccacaccgaccaaguccuacuucgcgaaucuuaaaggcacgcggacccgcgggaagcugugucccgauugccucaacuguacagaccuggauguggcucuuggaagaccuaugugcgucggcaccacacccucugccaaagccagcauucugcaugaagugcggccuguuaccuccggguguuuucccaucaugcacgaccgcacgaagaucagacaacucccuaaucugcugcggggauaugagaacauucgccucucuacacagaauguggucgaugcugaaaacgccccgggcggccccuacagacuggggaccagcggauccugcccuaaugcuacaagcaagucuggcuucuuugccaccauggcgugggccgugcccaaagacaacaauaagaacgcuaccaauccucuuacaguggagguccccuauguuuguacggaaggggaggaucagaucaccguguggggauuccauuccgacaaaaagacacagaugaaaaaccuguacggcgauagcaauccgcaaaaguuuaccucuuccgccaacggggugacaacccacuaugucagccagauuggaggcuucccugcucagacggaggacggcgggcucccccagucuggacggaucgugguugauuacauggugcaaaagccucgcaaaacaggcaccauugucuaucagagaggggugcugcuuccccagaagguuuggugcgccuccggacggagcaaagugaucaagggcucccugccccucauuggggaagcggacugucugcaugagaaauacggaggccugaacaagucuaaaccuuacuauaccggcgaacacgccaaggcuaucgggaauugcccgaucugggucaagacaccccucaaacuggccaacggaaccaaguaccgcccucccgcuaaacuucugaaggagagaggcuuuuucggggccauugccggauuucucgagggcgggugggaaggcaugaucgcuggauggcacggcuauacaagccauggggcgcacggaguggccgucgcugccgaucugaaauccacgcaggaggccauuaauaagaucaccaagaaccuuaauagccugucugaacucgaggugaaaaaccugcaacggcuguccggcgcuauggacgaacuccauaaugagauucuggagcuugacgaaaagguugaugaccugcgcgccgauacaaucagcucucagaucgagcucgcggugcugcuuagcaacgaagggauuaucaauuccgaggacgaacaucugcucgcucuggagagaaaacugaagaaaaugcucggaccuucugccgucgauauuggcaacggguguuucgagaccaagcacaagugcaaucagacaugccuggacaaaaucgccgcuggcaccuuuaacgccggagaguucagccuucccacguuugauucccugaauauuaccgcugccagccucaacgacgauggccuggacaaucacacaauccugcuuuacuauucuaccgcggccuccagccucgcugugacacugaugcuggccaucuucauuguuuacauggugucucgggauaacgucuccuguagcaucugccucuga

SEQ ID NO: 218624 - RNA, 1758 nt, Artificial Sequence
  derived and/or modified CDS sequence (opt5) from hemagglutinin__InfluenzaB__ACF54312
augaaggccaucauugugcugcucauggucguuaccagcaacgcugacagaaucugcacaggcauuacguccucuaauagcccccacguggugaaaaccgccacacagggggaggucaacgugaccggaguuaucccucugacaaccacaccgaccaagucccauuucgcgaaucuuaaaggcacgaagacccgggggaaacugugucccaagugccucaacuguacagaucuggacguggcucuuggacgcccuaagugcaccggcaauauucccucugccgaagucagcauccugcacgaggugagaccuguuacauccggguguuuucccaucaugcaugaucggaccaaaauucgccaacucccuaaccugcugagaggauacgaacacauccggcucucuacgcauaaugugauuaacgccgagaaggcuccgggcggccccuauaaaaucgggacaagcggauccugcccuaaugucaccaacggcaauggguucuuugccacaauggcuugggccgugcccaagaacgacaauaacaaaaccgcgaccaauagccugacaauugaagugccuuacaucuguacggagggagaggaucagauuaccgucuggggcuuccacucugacuccgaaacacagauggccaaacuuuauggggauagcaagccccagaaguuuaccucuuccagcaacggaguuacaacccacuacaucucucaaaucggcggcuucccgaaccagacggaggacgggggacugccucaguccggccgcauugugguggauuauaugguccaaaagagcgggaaaacaggaaccaucaccuaccagagaggcauucuccugccccagaagguguggugcgcuuccgggcggucuaaaguuaucaagggaagccuuccucugauuggcgaagccgacugucuccaugagaaauauggcgggcugaauaaguccaagcccuacuacacaggagagcacgcuaaagccaucggcaacugccccaucugggugaagaccccucugaaacucgcgaaugggacaaaguaucgcccgcccgccaaacugcuuaaggaaagaggauuuuucggcgcuauugccggguuucuggagggcggaugggaaggcaugaucgcuggguggcauggauacacgagccacggcgcccacggggucgccguggcugcggaucucaagucuacccaggaggccauuaacaaaaucacaaagaaucugaacucccuuagcgaacuggagguuaaaaaucuccagcggcugucuggagcuauggacgagcugcauaacgaaauucucgagcuggaugaaaagguggacgaccuucgcgccgauaccaucagcucccaaaucgagcuggccguccuccugucuaaugaaggcauuaucaacagcgaggacgagcaccuucuggcucucgaaagaaaacugaagaagaugcuggggccuuccgccauugagaucggcaauggauguuucgaaacaaaacauaagugcaaccagaccugccucgaucggauugcggcuggcacguuugacgccggggaguucagccugcccaccuuugauucucuuaauaucacagccgcuucccugaacgacgauggacucgacaaucacaccauucugcuguauuacagcacagccgcuucuucccuugccgugacccucaugaucgcgaucuucgucguguauaugguuagccgcgauaacguguccuguucuauuugccuguga

SEQ ID NO: 218625 - RNA, 1758 nt, Artificial Sequence
  derived and/or modified CDS sequence (opt5) from hemagglutinin__InfluenzaB__ACF54323
augaaggccaucauugugcugcucauggucguuaccagcaacgcugacagaaucugcacaggcauuacguccucuaauagcccccacguggugaaaaccgccacacagggggaggucaacgugaccggaguuaucccucugacaaccacaccgaccaagucccauuucgcgaaucuuaaaggcacggaaacccgggggaagcugugucccaaaugccucaacuguacagaucuggacguggcucuuggacgcccuaagugcaccggcaauauucccucugccagagucagcauccugcacgaggugcggccuguuacauccggguguuuucccaucaugcaugaucgcaccaagauuagacaacucccuaaccugcugcggggauacgaacacauccgccucucuacgagaaaugugauuaacgccgagaaugcuccgggcggccccuauaaaaucgggacaagcggauccugcccuaacgucaccaauggcaacggguucuuugccacaauggcuugggccgugcccaagaaugacaacaauaaaaccgcgaccaacagccugacaauugaagugccuuacaucuguacggagggagaggaucagauuaccgucuggggcuuccauucugacaacgaagcccagauggcuaaacuuuauggggauuccaagccccagaaguuuacaagcucugccaauggaguuaccacacacuacgugucccaaaucggcggcuucccgaaccagaccgaggacgggggacugccucagagcggccggaucguggucgauuauauggugcagaagucugggaaaacgggaacaauuaccuaccaacgcggcauccuccugccccagaagguuuggugcgcuuccgggagaagcaaagugauuaagggaucccuuccucugaucggcgaagccgacugucuccacgagaaauauggcgggcugaauaagucuaaacccuacuacaccggagagcaugcgaaggccauuggcaacugccccaucugggucaagacaccucugaaacucgcuaaugggaccaaguaucggccgcccgccaaacugcuuaaggaacgcggauuuuucggcgcuaucgccggguuucuggagggcggaugggaaggcaugauugccggguggcacggauacacaagccauggcgcucacgggguggcgguugccgcugaucucaaauccacgcaggaggccaucaacaagauuaccaagaaucugaacagccuuucugaacuggaggugaaaaaucuccagagacuguccggagccauggacgagcugcacaacgaaauccucgagcuggaugaaaaggucgacgaccuucgggcugauacaauuagcucucaaaucgagcuggccgugcuccugagcaaugaaggcaucauuaacuccgaggacgagcaucuucuggcgcucgaacgcaaacugaagaaaaugcuggggccuucugcugucgagaucggcaauggauguuucgaaaccaagcacaagugcaaccagacaugccucgauagaauugccgccggcaccuuugacgcuggggaguucagccugcccacguuugauucccuuaauaucaccgccgcuagccugaacgacgauggacucgacaaccauacaauucugcuguauuacucuaccgccgcguccagccuugccgugacacucaugaucgcuauuuucguuguguauauggucucucgggauaauguguccuguagcaucugccuguga

SEQ ID NO: 218626 - RNA, 1755 nt, Artificial Sequence
  derived and/or modified CDS sequence (opt5) from hemagglutinin__InfluenzaB__ACF54345
augaaggccaucauugugcugcucauggucguuaccagcaacgcugacagaaucugcacaggcauuacguccucuaauagcccccacguggugaaaaccgccacacagggggaggucaacgugaccggaguuaucccucugacaaccacaccgaccaaguccuacuucgcgaaucuuaaaggcacgcggacccgcgggaagcugugucccgauugccucaacuguacagaccuggauguggcucuuggaagaccuaugugcgucggcaccacacccucugccaaagccagcauucugcaugaagugcggccuguuaccuccggguguuuucccaucaugcacgaccgcacgaagaucagacaacucgcuaaucugcugcggggauaugagaacauucgccucucuacacagaaugugaucgaugccgaaaaggcuccuggcggcccguacagacuggggaccagcggauccugccccaacgccacaagcaaaucuggcuucuuugcgaccauggccugggcugucccuaaggacaauaacaaaaaugccaccaacccccuuacaguggaggugccuuauauuuguacggaaggggaggaucagaucaccgucuggggauuccauuccgacaauaaggcucagaugaaaaaccuguacggcgauagcaauccccaaaaguuuacaucuuccgccaacgggguuaccacacacuaugugagccagauuggaggcuucccggaccagaccgaggauggcgggcucccucagucuggacggaucguggucgacuacaugauucaaaagcccggcaaaacggggacaaucguguaucagcgcggaguucugcuuccucagaagguguggugcgcguccggcagaagcaaagucaucaaggggucccugccccucauuggagaagccgauugucugcaugagaaauacggcggccugaacaagucuaaacccuacuauaccggggaacacgcuaaggccaucggaaauugcccuauuugggugaagaccccgcucaaacuggcuaacggcacaaaguaccggcccccugccaaacuucugcgcgagagaggguuuuucggagccaucgcuggcuuucucgaagggggcugggaaggaaugauugcgggcuggcacggguauaccagccauggagcccacggcguugcuguggccgccgaccugaaguccacacaggaggcuaucaauaaaaucacgaagaaccuuaauagccugucugaacucgaggucaagaaccugcaacggcuguccggggccauggacgaacuccauaaugagauucuggagcuugaugaaaaaguggacgaucugcgcgcggacaccaucagcucucagauugagcucgcuguccugcuuagcaacgaaggaaucauuaauuccgaggaugaacaucugcucgcccuggagagaaagcugaaaaagaugcucggccccucugccguggacaucgggaacggcuguuucgagacaaaacacaagugcaaucagaccugccuggaucggaucgcugccggaacauuuaacgcuggcgaguucagccuuccuaccuuugacucccugaauauuacggccgcgagccucaacgaugacgggcuggauaaucacaccauccugcuuuacuauucuacagccgcuuccagccucgccguuacccugaugcuggcuauuuucaucguguacauggucucuagagacaacguguccuguagcauuugccucuga

SEQ ID NO: 218627 - RNA, 1755 nt, Artificial Sequence
  derived and/or modified CDS sequence (opt5) from hemagglutinin__InfluenzaB__ACF54367
augaaggccaucauugugcugcucauggucguuaccagcaacgcugacagaaucugcacaggcauuacguccucuaauagcccccacguggugaaaaccgccacacagggggaggucaacgugaccggaguuaucccucugacaaccgcgccgacaaaguccuacuucgcuaaucuuaaaggcacccggacgcgcgggaagcugugucccgauugccucaacuguaccgaccuggauguggcccuuggaagaccuaugugcgucggcacaacccccucugccaaagcuagcauucugcaugaagugcggccuguuacauccggguguuuucccaucaugcacgaccgcaccaagaucagacaacucgccaaucugcugcggggauaugagaacauucgccucucuacgcagaaugugaucgaugcugaaaaggccccuggcggcccguacagacuggggacaagcggauccugccccaacgcgaccagcaaaucuggcuucuuugccacaauggcuugggccgucccuaaggacaauaacaaaaaugcuaccaacccccuuaccguggaggugccuuauauuuguacagaaggggaggaucagaucacggucuggggauuccauuccgacagcaagacccagaugaaaaaucuguacggcgauucuaacccccaaaaguuuacauccagcgccaaugggguuaccacacacuaugugucucagauuggaggcuucccggaccagaccgaggauggcgggcucccucaguccggacggaucguggucgacuacaugaugcaaaagcccggcaaaacggggacaauuguguaucagcgcggaguucugcuuccucagaagguguggugcgcgagcggcagauccaaagucaucaaggggucucugccccucaucggagaagccgauugucugcaugagaaauacggcggccugaacaagagcaaacccuacuauaccggggaacacgcuaaggccauuggaaacugcccuaucugggugaagaccccgcucaaacuggcuaauggcacaaaguaccggcccccugccaaacuucugaaggagcgcggguuuuucggagccauugcuggcuuucucgaagggggcugggaaggaaugaucgcgggcuggcacggguauaccucccauggagcccacggcguugcuguggccgccgaccugaaaagcacacaggaggcuauuaacaagaucacgaagaaucuuaacucucuguccgaacucgaggucaaaaaucugcaaagacugagcggggccauggacgaacuccauaacgagauccuggagcuugaugaaaagguggacgaucugcgggcggacaccauuucuagccagaucgagcucgcuguccugcuuuccaaugaaggaauuaucaacucugaggaugaacaucugcucgcccuggagcgcaaacugaagaaaaugcucggccccagcgccguggacauugggaauggcuguuucgagacaaagcacaagugcaaccagaccugccuggauagaaucgcugccggaacauuuaaugcuggcgaguucucccuuccuaccuuugacagccugaacaucacggccgcgucucucaaugaugacgggcuggauaaccacaccauucugcuuuacuauuccacagccgcuagcucucucgccguuacccugaugcuggcuaucuucauuguguacauggucucccgggacaaugugagcuguuccaucugccucuga

SEQ ID NO: 218628 - RNA, 1755 nt, Artificial Sequence
  derived and/or modified CDS sequence (opt5) from hemagglutinin__InfluenzaB__ACN32556
augaaggccaucauugugcugcucauggucguuaccagcaacgcugacagaaucugcacaggcauuacguccucuaauagcccccacguggugaaaaccgccacacagggggaggucaacgugaccggagcgaucccucugacaaccacaccgaccaagucccauuucgcuaaucuuaaaggcacgaagacccgggggaaacugugucccacaugccucaacuguaccgaucuggacguugcccuuggacgcccuaugugcgugggcauuacacccucugccaaggcuagcauccugcacgaagucagaccugugaccuccggguguuuucccaucaugcaugaucggacgaagauucgccaacucccuaaucugcugagaggauacgagaaaauccggcucucuacacagaacguuauuaaugccgaaaaggcuccgggcggccccuaucgccuggggaccagcggauccugcccuaacgccacaagcaaaucuggcuucuuugcgaccauggccugggcugugcccagagacaauaacaagaccgccacaaauccucuuacggucgaggugccccacaucuguaccaaagaagaggaucagauuacaguguggggguuccauuccgacaacaagacccagaugaagaaucuguacggagauagcaacccgcaaaaauuuacaucuuucgcuaauggcaucaccacgcacuaugucucccagauugggggauuuccugaccagacagaggauggcggccucccccagagcgggcggaucguuguggacuacauggugcaaaagccuggaaaaaccggcaccaucgucuaucagcgcgggauucugcuuccccagaagguguggugcgccucuggaagauccaaaguuaucaagggcagccugccccucauuggggaagcggauugucugcacgagaaauacggaggccugaacaaguccaagccuuauuacacaggcgaacaugccaaagcuaucgggaacugcccgauuugggugaagacaccccucaaacuggccaauggaaccaaguaccggccucccgcuaaacuucugaaggagcgcggcuucuuuggggccaucgccggauuccucgagggcgggugggaaggcaugaucgcuggauggcacggcuauacgucucauggggcgcacggagucgccguggcugccgaccuuaagagcacccaggaggccauuaacaaaaucacaaagaaucugaacucccugagcgaacucgagguuaaaaaucugcaaagacugucuggcgcuauggaugaacuccacaacgagauucuggagcuugacgaaaagguggacgaucugcgggccgacaccaucuccagccagauugagcucgcgguccugcuuucuaaugaagggaucaucaacagcgaggaugaacaucugcucgcucuggagcgcaaacugaagaagaugcucggaccuuccgccguggacauuggcaauggguguuuugagacaaaacacaagugcaaccagaccugccuggauagaaucgccgcuggcacguucaaugccggagaauuuucucuucccaccuucgacagccugaacauuacagcugccucccucaaugaugacggccuggauaaccauaccauccugcuuuacuauagcacagcggccucuucccucgcugucacccugaugauugccaucuucauuguguacaugaucagccgggacaauguuucuuguuccaucugccuguga

SEQ ID NO: 218629 - RNA, 1758 nt, Artificial Sequence
  derived and/or modified CDS sequence (opt5) from hemagglutinin__InfluenzaB__ACN32567
auggaagccaucauugugcugcucauggucguuaccagcaacgcugacagaaucugcacaggcauuacguccucuaauagcccccacguggugaagaccgccacacagggggaagucaacgugaccggaguuaucccucugacaaccacaccgaccaaaucccauuucgcgaaucuuaagggcacggagacccgggggaaacugugucccaagugccucaacuguacagaucuggacguggcucuuggacgcccuaaaugcaccggcaauauucccucugccagagucagcauccugcacgaagugcggccuguuacauccggguguuuucccaucaugcaugaucgcaccaagauuagacaacucccuaaccugcugcggggauacgagcacauccgccucucuacgcauaaugugauuaacgccgaaaaugcuccgggcggccccuauaagaucgggacaagcggauccugcccuaacgucaccaauggcaacggguucuuugccacaauggcuugggccgugcccaaaaaugacaacaauaagaccgcgaccaacagccugacaauugaggugccuuacaucuguacggagggagaagaucagauuaccgucuggggcuuccacucugacaacgagacacagauggccaaacuuuauggggauuccaagccccagaaauuuaccagcucugcuaauggaguuacaacccacuacgugucccaaaucggcggcuucccgaaccagacggaagacgggggacugccucagagcggcagaaucguggucgauuauauggugcagaagucugggaagacaggaaccauuaccuaccaacggggcauccuccugccccagaaaguuuggugcgccuccgggcgcagcaaggugauuaaaggaucccuuccucugaucggcgaggcugacugucuccaugagaaguauggcgggcugaauaaaucuaagcccuacuacacaggagaacacgccaaagcgauuggcaacugccccaucugggucaagaccccucugaagcucgccaaugggacaaaauauagaccgcccgcuaagcugcuuaaagagcggggauuuuucggcgccaucgcuggguuucuggaaggcggaugggagggcaugauugccggguggcauggauacacgagccacggcgcccacgggguggcuguugcggccgaucucaaguccacccaggaagcuaucaacaaaauuacaaagaaucugaacagccuuucugagcuggaggugaagaaucuccagcgccuguccggagccauggacgaacugcauaacgagauccucgaacuggaugagaaagucgacgaccuuagagccgauaccauuagcucucaaaucgaacuggcugugcuccugagcaaugagggcaucauuaacuccgaggacgaacaccuucuggcccucgagcggaagcugaaaaagaugcuggggccuucugcggucgaaaucggcaauggauguuucgagacaaaacauaagugcaaccagaccugccucgaucgcauugcugccggcacguuugacgccggggaguucagccugcccaccuuugauucccuuaauaucacagcugccagccugaacgacgauggacucgacaaccacaccauucugcuguauuacucuacagcugccuccagccuugcggugacccucaugaucgccauuuucguuguguauauggucucuagagauaauguguccuguagcaucugccuguga

SEQ ID NO: 218630 - RNA, 1758 nt, Artificial Sequence; identical to SEQ ID NO: 218586
  derived and/or modified CDS sequence (opt5) from hemagglutinin__InfluenzaB__ACN32578

SEQ ID NO: 218631 - RNA, 1758 nt, Artificial Sequence
  derived and/or modified CDS sequence (opt5) from hemagglutinin__InfluenzaB__ACN32589
augaaggccaucauugugcugcucauggucguuaccagcaacgcugacagaaucugcacaggcauuacguccucuaauagcccccacguggugaaaaccgccacacagggggaggucaacgugaccggaguuaucccucugacaaccacaccgaccaagucccauuucucuaaucuuaaaggcacggaaacccgggggaagcugugucccaaaugccucaacuguacagaucuggacguggcgcuuggacgcccuaagugcaccggcaauauucccagcgcuagagucuccauccugcacgaggugcggccuguuacaucuggguguuuucccaucaugcaugaucgcaccaagauuagacaacucccuaaccugcugcggggauacgaacacauccgccucagcacgcauaaugugauuaacgccgagaaugccccgggcggccccuauaaaaucgggacauccggaagcugcccuaacgucaccaauggcaacggguucuuugcuacaauggccugggcugugcccaagaaugacaacaauaaaaccgccaccaacucucugacaauugaagugccuuacaucuguacggagggagaggaucagauuaccaucuggggcuuccacuccgacaacgaaacacagauggcgaaacuuuauggggauagcaagccccagaaguuuaccucuuccgccaauggagucacaacccacuacguuagccaaaucggcggcuucccgaaccagacggaggacgggggacugccucagucuggcagaauugugguggauuauaugguccagaaguccgggaaaacaggaaccaucaccuaccaacggggcauucuccugccccagaagguguggugcgcuagcgggcgcuccaaaguuaucaagggaucucuuccucugauuggcgaagccgacugucuccaugagaaauauggcgggcugaauaagagcaaacccuacuacacaggagagcacgcuaaggccaucggcaacugccccaucugggugaagaccccucugaaacucgcgaaugggacaaaguauagaccgcccgccaaacugcuuaaggaacggggauuuuucggcgcuauugccggguuucuggagggcggaugggaaggcaugaucgcuggguggcauggauacacgucccacggcgcccacggggucgccguggcugcggaucucaaaagcacccaggaggccauuaacaagaucacaaagaaucugaacucucuuuccgaacuggagguuaaaaaucuccagcgccugagcggagcuauggacgagcugcauaacgaaauucucgagcuggaugaaaagguggacgaccuuagagccgauaccaucucuagccaaaucgagcuggccguccuccuguccaaugaaggcauuaucaacucugaggacgagcaccuucuggcucucgaacggaaacugaagaaaaugcuggggccuagcgccguggagauuggcaauggauguuucgaaacaaagcauaagugcaaccagaccugccucgaucgcaucgcggcuggcacguuugacgccggggaguucucccugcccaccuuugauagccuuaauauuacagccgcuucucugaacgacgauggacucgacaaccacaccauccugcuguauuacuccacagccgcuagcucucuugccgucacccucaugauugcgaucuucgugguuuauaugguguccagagauaaugucagcuguuccaucugccuguga

SEQ ID NO: 218632 - RNA, 1758 nt, Artificial Sequence
  derived and/or modified CDS sequence (opt5) from hemagglutinin__InfluenzaB__ACN32600
augaaggccaucauugugcugcucauggucguuaccagcaacgcugacagaaucugcacaggcauuacguccucuaauagcccccacguggugaaaaccgccacacagggggaggucaacgugaccggaguuaucccucugacaaccacaccgaccaagucccauuucucuaaucuuaaaggcacggaaacccgggggaagcugugucccaaaugccucaacuguacagaucuggacguggcgcuuggacgcccuaagugcaccggcaauauucccagcgcuagagucuccauccugcacgaggugcggccuguuacaucuggguguuuucccaucaugcaugaucgcaccaagauuagacaacucccuaaccugcugcggggauacgaacacauccgccucagcacgcauaaugugauuaacgccgagaaugccccgggcggccccuauaaaaucgggacauccggaagcugcccuaacgucaccaauggcaacggguucuuugcuacaauggccugggcugugcccaagaaugacaacaauaaaaccgccaccaacucucugacaauugaagugccuuacaucuguacggagggagaggaucagauuaccgucuggggcuuccacuccgacaacgaaacacagauggcgaaacuuuauggggauagcaagccccagaaguuuaccucuuccgccaauggaguuacaacccacuacgugagccaaaucggcggcuucccgaaccagacggaggacgggggacugccucagucuggcagaaucguggucgauuauauggugcagaaguccgggaaaacaggaaccauuaccuaccaacggggcauccuccugccccagaagguuuggugcgcuagcgggcgcuccaaagugauuaagggaucucuuccucugaucggcgaagccgacugucuccaugagaaauauggcgggcugaauaagagcaaacccuacuacacaggagagcacgcuaaggccauuggcaacugccccaucugggucaagaccccucugaaacucgcgaaugggacaaaguauagaccgcccgcccggcugcuuaaagaacgcggauuuuucggcgcuaucgccggguuucuggagggcggaugggaaggcaugauugcuggguggcauggauacacgucccacggcgcccacgggguggccguugcugcggaucucaagagcacccaggaggccaucaacaaaauuacaaagaaucugaacucucuuuccgaacuggaggugaagaaucuccagagacugagcggagcuauggacgagcugcauaacgaaauccucgagcuggaugaaaaagucgacgaccuucgggccgauaccauuucuagccaaaucgagcuggccgugcuccuguccaaugaaggcaucauuaacucugaggacgagcaccuucuggcucucgaacgcaagcugaaaaagaugcuggggccuagcgccgucgagaucggcaauggauguuucgaaacaaaacauaagugcaaccagaccugccucgauagaauugcggcuggcacguuugacgccggggaguucucccugcccaccuuugauagccuuaauaucacagccgcuucucugaacgacgauggacucgacaaccacaccauucugcuguauuacuccacagccgcuagcucucuugccgugacccucaugaucgcgauuuucguuguguauauggucucccgggauaaugugagcuguuccaucugccuguga

SEQ ID NO: 218633 - RNA, 1758 nt, Artificial Sequence; identical to SEQ ID NO: 218597
  derived and/or modified CDS sequence (opt5) from hemagglutinin__InfluenzaB__ACN32611

SEQ ID NO: 218634 - RNA, 1755 nt, Artificial Sequence; identical to SEQ ID NO: 218498
  derived and/or modified CDS sequence (opt5) from hemagglutinin__InfluenzaB__ACN32716

SEQ ID NO: 218635 - RNA, 1758 nt, Artificial Sequence; identical to SEQ ID NO: 218586
  derived and/or modified CDS sequence (opt5) from hemagglutinin__InfluenzaB__ACN32771

SEQ ID NO: 218636 - RNA, 1758 nt, Artificial Sequence; identical to SEQ ID NO: 218592
  derived and/or modified CDS sequence (opt5) from hemagglutinin__InfluenzaB__ACN32782

SEQ ID NO: 218637 - RNA, 1758 nt, Artificial Sequence
  derived and/or modified CDS sequence (opt5) from hemagglutinin__InfluenzaB__ACO05957
augaaggccaucauugugcugcucauggucguuaccagcaacgcugacagaaucugcacaggcauuacguccucuaauagcccccacguggugaaaaccgccacacagggggaggucaacgugaccggaguuaucccucugacaaccacaccgaccaagucccauuucgcgaaucuuaaaggcacggaaacccgggggaagcugugucccaaaugccucaacuguacagaucuggacguggcucuuggacgcccuaagugcaccggcaauauucccucugccagagucagcauccugcacgaggugcggccuguuacauccggguguuuucccaucaugcaugaucgcaccaagauuagacaacucccuaaccugcugcggggauacgaacacauccgccucucuacgcauaaugugauuaacgccgagaaugcuccgggcggccccuauaaaaucgggacaagcggauccugcccuaacgucaccaauggcaacggguucuuugccacaauggcuugggccgugcccaagaaugacaacaauaaaaccgcgaccaacagccugacaauugaagugccuuacaucuguacggagggagaggaucagauuaccgucuggggcuuccacucugacaacgaaauccagauggccaaacuuuauggggauuccaagccccagaaguuuacaagcucugcuaauggaguuaccacacacuacgugucccaaaucggcggcuucccgaaccagaccgaggacgggggacugccucagagcggcagaauuguggucgauuauauggugcagaagucugggaaaacgggaacaaucaccuaccaacggggcauucuccugccccagaagguuuggugcgccuccgggcgcagcaaagugaucaagggaucccuuccucugauuggcgaagcugacugucuccaugagaaauauggcgggcugaauaagucuaaacccuacuacaccggagagcacgccaaggcgaucggcaacugccccaucugggucaagacaccucugaaacucgccaaugggaccaaguauagaccgcccgcuaaacugcuuaaggaacggggauuuuucggcgccauugcuggguuucuggagggcggaugggaaggcaugaucgccggguggcauggauacacaagccacggcgcccacgggguggcuguugcggccgaucucaaauccacgcaggaggcuauuaacaagaucaccaagaaucugaacagccuuucugaacuggaggugaaaaaucuccagcgccuguccggagccauggacgagcugcauaacgaaauucucgagcuggaugaaaaggucgacgaccuuagagccgauacaaucagcucucaaaucgagcuggcugugcuccugagcaaugaaggcauuaucaacuccgaggacgagcaccuucuggcccucgaacggaaacugaagaaaaugcuggggccuucugcggucgagauuggcaauggauguuucgaaaccaagcauaagugcaaccagacaugccucgaucgcaucgcugccggcaccuuugacgccggggaguucagccugcccacguuugauucccuuaauauuaccgcugccagccugaacgacgauggacucgacaaccacacaauccugcuguauuacucuaccgcugccuccagccuugcggugacacucaugauugccaucuucguuguguauauggucucuagagauaauguguccuguagcaucugccuguga

SEQ ID NO: 218638 - RNA, 1755 nt, Artificial Sequence
  derived and/or modified CDS sequence (opt5) from hemagglutinin__InfluenzaB__ACO05968
augaaggccaucauugugcugcucauggucguuaccagcaacgcugacagaaucugcacaggcauuacguccucuaauagcccccacguggugaaaaccgccacacagggggaggucaacgugaccggaguuaucccucugacaaccacaccgaccaaguccuacuucgcgaaucuuaaaggcacgcggacccgcgggaagcugugucccgauugccucaacuguacagaccuggauguggcucuuggaagaccuaugugcgucggcaccacacccucugccaaagccagcauucugcaugaagugcggccuguuaccuccggguguuuucccaucaugcacgaccgcacgaagaucagacaacucccuaaucugcugcggggauaugagaacauucgccucucuacacagaaugugaucgaugcugaaaaggccccgggcggccccuacagacuggggaccagcggauccugcccuaacgcuacaagcaaaucuggcuucuuugccaccauggcgugggccguccccaaggacaauaacaaaaaugcuaccaacccucuuacaguggaggugcccuauauuuguacggaacgggaggaucagaucaccgucuggggguuccauuccgacaauaagacacagaugaaaaaccuguacggagauagcaauccgcaaaaguuuaccucuuccgccaacggcguuacaacccacuaugugagccagauugggucuuucccugaccagacggaggauggaggccucccccaguccggccgcaucguggucgacuacaugaugcaaaagccugggaaaacaggaaccauuguguaucagagaggcguucugcuuccccagaagguguggugcgcuagcgggcgguccaaagucaucaagggaucucugccccucaucggcgaagccgauugucugcaugagaaauacgggggacugaacaagagcaaaccuuacuauaccggcgaacacgcgaaggccauuggcaauugcccgaucugggugaagacaccccucaaacuggcuaacgggaccaaguaccgcccucccgccaaacuucugaaggagagaggauuuuucggcgcuauugccggguuucucgagggaggcugggaagggaugaucgccggcuggcacggauauacaucccauggcgcucacgggguugcgguggccgcugaccugaaaagcacgcaggaggccauuaauaagaucaccaagaaccuuaauucucuguccgaacucgaggucaaaaaccugcaacggcugagcggagccauggacgaacuccauaaugagauccuggagcuugaugaaaagguggacgaucugcgcgcugacacaauuucuagccagaucgagcucgccguccugcuuuccaacgaaggcauuaucaauucugaggaugaacaucugcucgcgcuggagagaaaacugaagaaaaugcucgggccuagcgcuguggagauuggaaacggcuguuucgaaaccaagcacaagugcaaucagacaugccuggaccggaucgccgccgggaccuuuaacgcuggcgaguucucccuucccacguuugauagccugaauaucaccgccgcuucucucaacgacgauggacuggacaaucacacaauucugcuuuacuauuccaccgccgcgagcucucucgccguuacacugaugcuggcuaucuucauuguguacauggucuccagagauaacgugagcuguuccaucugccucuga

SEQ ID NO: 218639 - RNA, 1755 nt, Artificial Sequence
  derived and/or modified CDS sequence (opt5) from hemagglutinin__InfluenzaB__ACO05979
augaaggccaucauugugcugcucauggucguuaccagcaacgcugacagaaucugcacaggcauuacguccucuaauagcccccacguggugaaaaccgccacacagggggaggucaacgugaccggaguuaucccucugacaaccacaccgaccaaguccuacuucgcgaaucuuaaaggcacgcggacccgcgggaagcugugucccgauugccucaacuguacagaccuggauguggcucuuggaagaccuaugugcgucggcaccacacccucugccaaagccagcauucugcaugaagugcggccuguuaccuccggguguuuucccaucaugcacgaccgcacgaagaucagacaacucccuaaucugcugcggggauaugagaacauucgccucucuacacagaaugugaucgaugcugaaaaggccccgggcggccccuacagacuggggaccagcggauccugcccuaacgcuacaagcaaaucuggcuucuuugccaccauggcgugggccguccccaaggacaauaacaaaaaugcuaccaacccucuuacaguggaggugcccuauauuuguacggaaggggaggaucagaucaccgucuggggauuccauuccgacaauaagacacagaugaaaaaccuguacggcgauagcaauccgcaaaaguuuaccucuuccgccaacgggguuacaacccacuaugugagccagauuggaucuuucccugaccagacggaggauggcggccucccccaguccgggcggaucguggucgacuacaugaugcaaaagccuggaaaaacaggcaccauuguguaucagcgcgggguucugcuuccccagaagguguggugcgcuagcggaagauccaaagucaucaagggcucucugccccucaucggggaagccgauugucugcaugagaaauacggaggccugaacaagagcaaaccuuacuauaccggcgaacacgcgaaggccauugggaauugcccgaucugggugaagacaccccucaaacuggcuaacggaaccaaguaccggccucccgccaaacuucugaaggagcgcggcuuuuucggggcuauugccggauuucucgagggcgggugggaaggcaugaucgccggauggcacggcuauacaucccauggggcucacggaguugcgguggccgcugaccugaaaagcacgcaggaggccauuaauaagaucaccaagaaccuuaauucucuguccgaacucgaggucaaaaaccugcaaagacugagcggcgccauggacgaacuccauaaugagauccuggagcuugaugaaaagguggacgaucugcgggcugacacaauuucuagccagaucgagcucgccguccugcuuuccaacgaagggauuaucaauucugaggaugaacaucugcucgcgcuggagcgcaaacugaagaaaaugcucggaccuagcgcuguggagauuggcaacggguguuucgaaaccaagcacaagugcaaucagacaugccuggacagaaucgccgccggcaccuuuaacgcuggagaguucucccuucccacguuugauagccugaauaucaccgccgcuucucucaacgacgauggccuggacaaucacacaauucugcuuuacuauuccaccgccgcgagcucucucgccguuacacugaugcuggcuaucuucauuguguacauggucucccgggauaacgugagcuguuccaucugccucuga

SEQ ID NO: 218640 - RNA, 1755 nt, Artificial Sequence; identical to SEQ ID NO: 218639
  derived and/or modified CDS sequence (opt5) from hemagglutinin__InfluenzaB__ACO05990

SEQ ID NO: 218641 - RNA, 1758 nt, Artificial Sequence
  derived and/or modified CDS sequence (opt5) from hemagglutinin__InfluenzaB__ACO06001
augaaggccaucauugugcugcucauggucguuaccagcaacgcugacagaaucugcacaggcauuacguccucuaauagcccccacguggugaaaaccgccacacagggggaggucaacgugaccggaguuaucccucugacaaccacaccgaccaagucccauuucgcgaaucuuaaaggcacggaaacccgggggaagcugugucccaaaugccucaacuguacagaucuggacguggcucuuggacgcccuaagugcaccggcaauauucccucugccagagucagcauccugcacgaggugcggccuguuacauccggguguuuucccaucaugcaugaucgcaccaagauuagacaacucccuaaccugcugcggggauacgaacacauccgccucucuacgcauaaugugauuaacgccgagaaugcuccgggcggccccuauaaaaucgggacaagcggauccugcccuaacgucaccaauggcaacggguucuuugccacaauggcuugggccgugcccaagaaugacaacaauaaaaccgcgaccaacagccugacaauugaagugccuuacaucuguacggagggagaggaucagauuaccgucuggggcuuccacucugacaacgaaaaucagauggccaagcuguauggggauuccaaaccccagaaguuuaccagcuucgcuaacggaguuacaacacacuacgugucucaaaucggcggcuuuccgaaucagaccgaggacgggggacugccucaguccggcagaaucguggucgauuauauggugcaaaagagcgggaaaacgggaacaauuaccuaccagcggggcauccuccugccccagaagguuuggugcgccucugggcgcuccaaagugauuaagggaagccuuccucugaucggcgaagcugacugucuccaugagaaauauggcgggcugaacaaguccaaacccuacuacaccggagagcacgccaaggcgauuggcaauugccccaucugggucaagacaccucugaaacucgccaacgggaccaaguauagaccgcccgcuaaacugcuuaaggaacggggauucuuuggcgccaucgcuggguuccuggagggcggaugggaaggcaugauugccggguggcauggauacacaucucacggcgcccacgggguggcuguugcggccgaucucaaaagcacgcaggaggcuaucaauaagauuaccaagaaccuuaauucccuuagcgaacuggaggugaaaaaccuccagcgccugucuggagccauggacgagcugcauaaugaaauccucgagcuggaugaaaaggucgacgaccuuagagccgauacaauuuccagccaaaucgagcuggcugugcuccugucuaacgaaggcaucauuaauagcgaggacgagcaccuucuggcccucgaacggaaacugaagaaaaugcuggggccuuccgcggucgagaucggcaacggauguuuugaaaccaagcauaagugcaaucagacaugccucgaucgcauugcugccggcaccuucgacgccggggaguuuucucugcccacguucgauagccuuaacaucaccgcugccucccugaacgacgauggacucgacaaucacacaauucugcuguauuacagcaccgcugccucuucccuugcggugacacucaugaucgccauuuucguuguguauauggucagcagagauaacgugucuuguuccaucugccuguga

SEQ ID NO: 218642 - RNA, 1755 nt, Artificial Sequence; identical to SEQ ID NO: 218639
  derived and/or modified CDS sequence (opt5) from hemagglutinin__InfluenzaB__ACO06012

SEQ ID NO: 218643 - RNA, 1755 nt, Artificial Sequence; identical to SEQ ID NO: 218639
  derived and/or modified CDS sequence (opt5) from hemagglutinin__InfluenzaB__ACO06023

SEQ ID NO: 218644 - RNA, 1755 nt, Artificial Sequence
  derived and/or modified CDS sequence (opt5) from hemagglutinin__InfluenzaB__ACO06062
augaaggccaucauugugcugcucauggucguuaccagcaacgcugacagaaucugcacaggcauuacguccucuaauagcccccacguggugaaaaccgccacacagggggaggucaacgugaccggaguuaucccucugacaaccacaccgaccaaguccuacuucgcgaaucuuaaaggcacgcggacccgcgggaagcugugucccgauugccucaacuguacagaccuggauguggcucuuggaagaccuaugugcgucggcaccacacccucugccaaagccagcauucugcaugaagugcggccuguuaccuccggguguuuucccaucaugcacgaccgcacgaagaucagacaacucccuaaucugcugcggggauaugagaacauucgccucucuacacagaaugugaucgaugcugaaaaggccccgggcggccccuacagacuggggaccagcggauccugcccuaacgcuacaagcaaaucuggcuucuuugccaccauggcgugggccguccccaaggacaauaacaaaaaugcuaccaacccucuuacaguggaggugcccuauauuuguacggaaggggaggaucagaucaccgucuggggauuccauuccgacaauaagacacagaugaaaaaccuguacggcgauagcaauccgcaaaaguuuaccucuuccgccaacgggguuacaacccacuaugugagccagauugacucuuucccugaucagacggaggacggaggccucccccaguccggccggaucguggucgauuacaugaugcaaaagccugggaaaacaggaaccauuguguaucagcgcggcguucugcuuccccagaagguguggugcgcuagcgggagauccaaagucaucaagggaucucugccccucaucggcgaagccgacugucugcaugagaaauacgggggacugaacaagagcaaaccuuacuauaccggcgaacacgcgaaggccauuggcaauugcccgaucugggugaagacaccccucaaacuggcuaacgggaccaaguaccggccucccgccaaacuucugaaggagcgcggauuuuucggcgcuauugccggguuucucgagggaggcugggaagggaugaucgccggcuggcacggauauacaucccauggcgcucacgggguugcgguggccgcugaccugaaaagcacgcaggaggccauuaauaagaucaccaagaaccuuaauucucuguccgaacucgaggucaaaaaccugcaaagacugagcggagccauggaugaacuccauaaugagauccuggagcuugacgaaaagguggaugaccugcgggcugauacaauuucuagccagaucgagcucgccguccugcuuuccaacgaaggcauuaucaauucugaggacgaacaucugcucgcgcuggagcgcaaacugaagaaaaugcucgggccuagcgcuguggagauuggaaacggcuguuucgaaaccaagcacaagugcaaucagacaugccuggauagaaucgccgccgggaccuuuaacgcuggcgaguucucccuucccacguuugacagccugaauaucaccgccgcuucucucaacgaugacggacuggauaaucacacaauucugcuuuacuauuccaccgccgcgagcucucucgccguuacacugaugcuggcuaucuucauuguguacauggucucccgggacaacgugagcuguuccaucugccucuga

SEQ ID NO: 218645 - RNA, 1758 nt, Artificial Sequence
  derived and/or modified CDS sequence (opt5) from hemagglutinin__InfluenzaB__ACO94661
augaaggccaucauugugcugcucauggucguuaccagcaacgcugacagaaucugcacaggcauuacguccucuaauagcccccacguggugaaaaccgccacacagggggaggucaacgugaccggaguuaucccucugacaaccacaccgaccaagucccauuucgcgaaucuuaaaggcacggaaacccgggggaagcugugucccaaaugccucaacuguacagaucuggacguggcucuuggacgcccuaagugcaccggcaauauucccucugccagagucagcauccugcacgaggugcggccuguuacauccggguguuuucccaucaugcaugaucgcaccaagauuagacaacucccuaaccugcugcggggauacgaacacauccgccucucuacgcauaaugugauuaacgccgagaaugcuccgggcggccccuauaaaaucgggacaagcggauccugcccuaacgucaccaauggcaacggguucuuuacaaccauggccugggcugugcccaagaaugacaacaauaaaaccgccacaaacagccugacgauugaagugccuuacaucuguaccgagggagaggaucagauuacagucuggggcuuccacucugacaacgaaacccagauggcgaaacuuuauggggauuccaagccccagaaguuuacaagcucugccaauggaguuaccacgcacuacgugucccaaaucggcggcuucccgaaccagacagaggacgggggacugccucagagcggcagaaucguggucgauuauauggugcagaagucugggaaaaccggaaccauuacauaccaacggggcauccuccugccccagaagguuuggugcgcuuccgggcgcagcaaagugauuaagggaucccuuccucugaucggcgaagccgacugucuccaugagaaauauggcgggcugaauaagucuaaacccuacuacaccggagagcacgcuaaggccauuggcaacugccccaucugggucaagacaccucugaaacucgcgaaugggacgaaguauagaccgcccgccaaacugcuuaaggaacggggauuuuucggcgcuaucgccggguuucuggagggcggaugggaaggcaugauugcuggguggcauggauacaccagccacggcgcccacgggguggccguugcugcggaucucaaauccacacaggaggccaucaacaagauuaccaagaaucugaacagccuuucugaacuggaggugaaaaaucuccagcgccuguccggagcuauggacgagcugcauaacgaaauccucgagcuggaugaaaaggucgacgaccuuagagccgauacaauuagcucucaaaucgagcuggccgugcuccugagcaaugaaggcaucauuaacuccgaggacgagcaccuucuggcucucgaacggaaacugaagaaaaugcuggggccuucugccgucgagaucggcaauggauguuucgaaaccaagcauaagugcaaccagacgugccucgaucgcauugcggcuggcaccuuugacgccggggaguucagccugcccacauuugauucccuuaauaucaccgccgcuagccugaacgacgauggacucgacaaccacacaauucugcuguauuacucuaccgccgcuuccagccuugccgugacgcucaugaucgcgauuuucguuguguauauggucucuagagauaauguguccuguagcaucugccuguga

SEQ ID NO: 218646 - RNA, 1758 nt, Artificial Sequence; identical to SEQ ID NO: 218586
  derived and/or modified CDS sequence (opt5) from hemagglutinin__InfluenzaB__ACR15622

SEQ ID NO: 218647 - RNA, 1758 nt, Artificial Sequence
  derived and/or modified CDS sequence (opt5) from hemagglutinin__InfluenzaB__ACR15633
augaaggccaucauugugcugcucauggucguuaccagcaacgcugacagaaucugcacaggcauuacguccucuaauagcccccacguggugaaaaccgccacacagggggaggucaacgugaccggaguuaucccucugacaaccacaccgaccaagucccauuucgcgaaucuuaaaggcacggaaacccgggggaagcugugucccaaaugccucaacuguacagaucuggacguggcucuuggacgcccuaagugcaccggcaauauucccucugccagagucagcauccugcacgaggugcggccuguuacauccggguguuuucccaucaugcaugaucgcaccaagauuagacaacucccuaaccugcugcggggauacgaacacauccgccucucuacgcauaaugugauuaacgccgagaaugcuccgggcggccccuauaaaaucgggacaagcggauccugcccuaacgucaccaauggcaacggguucuuugccacaauggcuugggccgugcccaagaaugacaacaauaaaaccgcgaccaacagccugacaauugaagugccuuacaucuguacggagggagaggaucagauuaccgucuggggcuuccacucugacuccgaaacacagauggccaagcuguauggggauagcaaaccccagaaguuuaccucuuccgcuaacggaguuacaacccacuacgugagccaaaucggcggcuucccgaaucagacggaggacgggggacugccucagucuggcagaaucguggucgauuauauggugcagaaguccgggaaaacaggaaccauuaccuaccaacggggcauccuccugccccagaagguuuggugcgccagcgggcgcuccaaagugauuaagggaucucuuccucugaucggcgaagcugacugucuccaugagaaauauggcgggcugaacaagagcaaacccuacuacacaggagagcacgccaaggcgauuggcaauugccccaucugggucaagaccccucugaaacucgccaacgggacaaaguauagaccgcccgcuaaacugcuuaaggaacggggauuuuucggcgccaucgcuggguuucuggagggcggaugggaaggcaugauugccggguggcauggauacacgucccacggcgcccacgggguggcuguugcggccgaucucaaaagcacccaggaggcuaucaauaagauuacaaagaaccuuaauucucuuuccgaacuggaggugaaaaaccuccagcgccugagcggagccauggacgagcugcauaaugaaauccucgagcuggaugaaaaggucgacgaccuuagagccgauaccauuucuagccaaaucgagcuggcugugcuccuguccaacgaaggcaucauuaauucugaggacgagcaccuucuggcccucgaacggaaacugaagaaaaugcuggggccuagcgcggucgagaucggcaacggauguuucgaaacaaagcauaagugcaaucagaccugccucgaucgcauugcugccggcacguuugacgccggggaguucucccugcccaccuuugauagccuuaacaucacagcugccucucugaaugacgauggacucgacaaccacaccauucugcuguauuacuccacagcugccagcucucuugcggugacccucaugaucgccauuuucguuguguauauggucuccagagauaacgugagcuguuccaucugccuguga

SEQ ID NO: 218648 - RNA, 1755 nt, Artificial Sequence
  derived and/or modified CDS sequence (opt5) from hemagglutinin__InfluenzaB__ACR15644
augaaggccaucauugugcugcucauggucguuaccagcaacgcugacagaaucugcacaggcauuacguccucuaauagcccccacguggugaaaaccgccacacagggggaagucaacgugaccggaguuaucccucugacaaccacaccgaccaaguccuacuucgcgaaucuuaaaggcacgcggacccgcgggaagcugugucccgauugccucaacuguacagaccuggauguggcucuuggaagaccuaugugcgucggcaccacacccucugccaaagccagcauucugcaugaagugcggccuguuaccuccggguguuuucccaucaugcacgaccgcacgaagaucagacaacucccuaaucugcugcggggauaugagaacauucgccucucuacacagaaugugaucgaugcugaaaacgccccgggcggccccuacagacuggggaccagcggauccugcccuaaugcuacaagcaagucuggcuucuuugccaccauggcgugggccguccccaaagacaacaauaagaacgcuaccaauccucuuacaguggaggugcccuaugucuguacggaaggggaggaucagauuaccguuuggggauuccauuccgacaacaaaauccagaugaagaaucuguacggcgauagcaacccgcaaaaauuuacaucuuccgccaacggggugaccacacacuaugugagccagauuggaggcuucccugcucagaccgaggacggcgggcucccccagucuggacggaucgucguggauuacaugguucaaaagccucgcaagacgggcacaauuguguaucagagagggguccugcuuccccagaaaguguggugcgccuccggacggagcaagguuaucaaaggcucccugccccucaucggggaagcggacugucugcaugagaaguacggaggccugaauaaaucuaagccuuacuauaccggcgaacacgccaaagcuauugggaacugcccgaucugggugaagacaccccucaagcuggccaauggaaccaaauaccgcccucccgcuaagcugcugaaagagagaggcuuuuucggggccauugccggauuucucgagggcgggugggaaggcaugaucgcuggauggcacggcuauaccagccauggggcgcacggagucgccguggcugccgaucugaaguccacacaggaggccauuaacaaaaucacgaagaaucuuaacagccugucugaacucgaggucaagaaucugcaacggcuguccggcgcuauggacgaacuccauaacgagauccuggagcuugacgaaaaaguggaugaccugcgcgccgauaccauuagcucucagaucgagcucgcgguucugcuuagcaaugaagggauuaucaacuccgaggacgaacaccuucucgcucuggagagaaagcugaaaaagaugcucggaccuucugccguggauauuggcaauggguguuucgagacaaaacacaagugcaaccagaccugccuggaccggaucgccgcuggcacauuuaaugccggagaguucagccuucccaccuuugauucccugaacaucacggcugccagccucaaugacgauggccuggacaaccauaccauucugcuuuacuauucuacagcggccuccagccucgcugucacccugaugcuggccaucuucauuguguacaugguuucuagagauaacguguccuguagcaucugccucuga

SEQ ID NO: 218649 - RNA, 1758 nt, Artificial Sequence
  derived and/or modified CDS sequence (opt5) from hemagglutinin__InfluenzaB__ACR15655
augaaggccaucauugugcugcucauggucguuaccagcaacgcugacagaaucugcacaggcauuacguccucuaauagcccccacguggugaaaaccgccacacagggggaggucaacgugaccggaguuaucccucugacaaccacaccgaccaagucccauuucgcgaaucuuaaaggcacggaaacccgggggaagcugugucccaaaugccucaacuguacagaucuggacguggcucuuggacgcccuaagugcaccggcaauauucccucugccagagucagcauccugcacgaggugcggccuguuacauccggguguuuucccaucaugcaugaucgcaccaagauuagacaacucccuaaccugcugcggggauacgaacacauccgccucucuacgcauaaugugauuaacgccgagaaugcuccgggcggccccuauaaaaucgggacaagcggauccugcccuaacgucaccaauggcaacggguucuuugccacaauggcuugggccgugcccaagaaugacaacaauaaaaccgcgaccaacagccugacaauugaagugccuuacaucuguacggagggagaggaucagauuaccgucuggggcuuccacucugacuccgaaacacagauggccaagcuguauggggauagcaaaccccagaaguuuaccucuuccgcuaacggaguuacaacccacuacgugagccaaaucggcggcuucccgaaucagacggaggacgggggacugccucagucuggcagaaucguggucgauuauauggugcagaaguccgggaaaacaggaaccauuaccuaccaacggggcauccuccugccccagaagguuuggugcgccagcgggcgcuccaaagugauuaagggaucucuuccucugaucggcgaagcugacugucuccaugagaaauauggcgggcugaacaagagcaaacccuacuacacaggagagcacgccaaggcgauuggcaauugccccaucugggucaagaccccucugaaacucgccaacgggacaaaguauagaccgcccgcuaaacugcuuaaggaacggggauuuuucggcgccaucgcuggguuucuggagggcggaugggaaggcaugauugccggguggcauggauacacgucccacggcgcccacgggguggcuguugcggccgaucucaaaagcacccaggaggcuaucaauaagauuacaaagaaccuuaauucucuuuccgaacuggaggugaaaaaccuccagcgccugagcggagccauggacgagcugcauaaugaaauccucgagcuggaugaaaaggucgacgaccuuagagccgauaccauuucuagccaaaucgagcuggcugugcuccuguccaacgaaggcaucauuaauucugaggacgagcaccuucuggcccucgaacggaaacugaagaaaaugcuggggccuagcgcggucgagaucggcaacggauguuucgaaacaaagcauaagugcaaucagaccugccucgaucgcauugcugccggcacguuugacgccggggaguucucccugcccaccuuugauagccuuaacaucacagcugccucucugaaugacgauggacucgacaaccacaccauucugcuguauuacuccacagcugccagcucucuugcggugacccucaugaucgccauuuucguuguguauauggucuccagagauaacaucagcuguuccaucugccuguga

SEQ ID NO: 218650 - RNA, 1758 nt, Artificial Sequence
  derived and/or modified CDS sequence (opt5) from hemagglutinin__InfluenzaB__ACR15666
augaaggccaucauugugcugcucauggucguuaccagcaacgcugacagaaucugcacaggcauuacguccucuaauagcccccacguggugaaaaccgccacacagggggaggucaacgugaccggaguuaucccucugacaaccacaccgaccaagucccauuucgcgaaucuuaaaggcacggaaacccgggggaagcugugucccaaaugccucaacuguacagaucuggacguggcucuuggacgcccuaagugcaccggcaauauucccucugccagagucagcauccugcacgaggugcggccuguuacauccggguguuuucccaucaugcauaaccgcaccaagauuagacaacucccuaaucugcugcggggauacgaacacauccgccucucuacgcauaacgugauuaaugccgagaacgcuccgggcggccccuauaaaaucgggacaagcggauccugcccuaaugucaccaacggcaauggguucuuugccacaauggcuugggccgugcccaagaacgauaauaacaaaaccgcgaccaacagccugacaauugaagugccuuacaucuguacggagggagaggaccagauuaccgucuggggcuuccacucugaugacgaaacacagauggccaaacuuuauggggauuccaagccccagaaguuuaccagcucugcuaauggaguuacaacccacuacgugucccaaaucggcggcuucccgaaccagacggaggacgggggacugccucagagcggcagaaucguggucgauuauauggugcagaagucugggaaaacaggaaccauuaccuaccaacggggcauccuccugccccagaagguuuggugcgccuccgggcgcagcaaagugauuaagggaucccuuccucugaucggcgaagcugacugucuccaugagaaauauggcgggcugaauaagucuaaacccuacuacacaggagagcacgccaaggcgauuggcaacugccccaucugggucaagaccccucugaaacucgccaaugggacaaaguauagaccgcccgcuaaacugcuuaaggaacggggauuuuucggcgccaucgcuggguuucuggagggcggaugggaaggcaugauugccggguggcauggauacacgagccacggcgcccacgggguggcuguugcggccgaucucaaauccacccaggaggcuaucaacaagauuacaaagaaucugaacagccuuucugaacuggaggugaaaaaucuccagcgccuguccggagccauggacgagcugcauaacgaaauccucgagcuggaugaaaaggucgacgaccuuagagccgauaccauuagcucucaaaucgagcuggcugugcuccugagcaaugaaggcaucauuaacuccgaggacgagcaccuucuggcccucgaacggaaacugaagaaaaugcuggggccuucugcggucgagaucggcaauggauguuucgaaacaaagcauaagugcaaccagaccugccucgaucgcauugcugccggcacguuugacgccggggaguucagccugcccaccuuugauucccuuaauaucacagcugccagccugaacgacgauggacucgacaaccacaccauucugcuguauuacucuacagcugccuccagccuugcggugacccucaugaucgccauuuucguuguguauauggucucuagagauaauguguccuguagcaucugccuguga

SEQ ID NO: 218651 - RNA, 1758 nt, Artificial Sequence
  derived and/or modified CDS sequence (opt5) from hemagglutinin__InfluenzaB__ACR15677
augaaggccaucauugugcugcucauggucguuaccagcaacgcugacagaaucugcacaggcauuacguccucuaauagcccccacguggugaaaaccgccacacagggggaagucaacgugaccggaguuaucccucugacaaccacaccgaccaagucccauuucgcgaaucuuaaaggcacgaagacccgggggaaacugugucccaagugccucaacuguacagaucuggacguggcucuuggacgcccuaagugcaccggcaauauucccucugccaaagucagcauccugcacgaagugagaccuguuacauccggguguuuucccaucaugcaugaucggaccaagauucgccaacucccuaaccugcugagaggauacgagcacauccggcucucuacgcauaaugugauuaacgccgaaaaagcuccgggcggccccuauaagaucgggacaagcggauccugcccuaauauuaccaacggcaauggguucuuugccacaauggcuugggccguccccaaaaacgacaauaacaagaccgcgaccaauagccugacaaucgaggugccuuacauuuguacggaaggagaggaucagaucaccguguggggcuuccacucugacaacgaggcccagauggcuaaacuuuauggggauuccaagccccagaaguuuacaagcucugccaacggagucaccacacacuacguuucccaaaucggcggcuucccgaaucagaccgaagacgggggacugccucagagcggccgcauugugguggauuauaugguccagaaaucugggaagacgggaacaaucaccuaccaaagaggcauucuccugccccagaaaguguggugcgcuuccgggcggagcaagguuaucaaaggaucccuuccucugauuggcgaggccgacugucuccaugaaaaguauggcgggcugaacaagucuaaacccuacuacaccggagagcacgcgaaggccaucggcaauugccccaucugggugaaaacaccucugaagcucgcuaacgggaccaaauaucgcccgcccgccaagcugcuuaaggagagaggauuuuucggcgcuauugccggguuucuggaaggcggaugggagggcaugaucgccggguggcauggauacacaagccacggcgcucacggggucgcgguggccgcugaucucaaauccacgcaggaagccauuaauaagaucaccaaaaaccugaauagccuuucugagcuggaaguuaagaaccuccagcggcuguccggagccauggacgagcugcauaaugagauucucgaacuggaugagaaaguggacgaccuucgcgcugauacaaucagcucucaaaucgaacuggccguccuccugagcaacgagggcauuaucaauuccgaagacgagcaccuucuggcgcucgagagaaagcugaagaaaaugcuggggccuucugcuguggaaauuggcaacggauguuucgagaccaagcauaaaugcaaucagacaugccucgaucggaucgccgccggcaccuuugacgcuggggaguucagccugcccacguuugauucccuuaacauuaccgccgcuagccugaaugacgauggacucgacaaccacacaauccugcuguauuacucuaccgccgcguccagccuugccgucacacucaugauugcuaucuucgugguuuauauggugucucgcgauaacgucuccuguagcaucugccuguga

SEQ ID NO: 218652 - RNA, 1755 nt, Artificial Sequence; identical to SEQ ID NO: 218639
  derived and/or modified CDS sequence (opt5) from hemagglutinin__InfluenzaB__ACR15710

SEQ ID NO: 218653 - RNA, 1755 nt, Artificial Sequence
  derived and/or modified CDS sequence (opt5) from hemagglutinin__InfluenzaB__ACR15721
augaaggccaucauugugcugcucauggucguuaccagcaacgcugacagaaucugcacaggcauuacguccucuaauagcccccacguggugaaaaccgccacacagggggaggucaacgugaccggaguuaucccucugacaaccacaccgaccaagucccauuucgcgaaucuuaaaggcacgaagacccgggggaaacugugucccaacugccucaauuguacagaucuggacguggcucuuggacgcccuaugugcgucggcaccacacccucugccaaggccagcauucugcacgaagugagaccuguuaccuccggguguuuucccaucaugcaugaucggacgaagauccgccaacucccuaaccugcugagaggauacgagaauauucggcucucuacacagaacgugaucaaugcugaaaaagccccgggcggccccuaucgccuggggaccagcggauccugcccuaacgcuacaagcagaucuggcuucuuugccaccauggcgugggccgucccccgggacgauaauaagaccgcuacaaacccucuuacgguggaggugcccuacgucuguaccgaaggggaggaccagauuacaguuuggggauuccacuccgauaauaaagcccagaugaagaaccuguauggcgacagcaauccgcaaaaauuuaccucuuccgcuaacggggugacaacccauuacgugagccagaucggaggcuucccugaucagacggaggacggcgggcucccccagucuggacgcauugucguggauuauaugguucaaaagccuggcaagacagggaccaucguguaccagagaggaguccugcuuccccagaaaguguggugcgccuccggccggagcaagguuauuaaagggucccugccccucaucggagaagcggacugucugcacgagaaguauggcggccugaacaaaucuaagccuuacuacaccggggaacacgccaaagcuaucggaaauugcccgauuugggugaagacaccccucaagcuggccaacggcaccaaauaucgcccucccgcuaagcugcugaaagagagaggguuuuucggagccaucgccggcuuucucgaagggggcugggaaggaaugauugcuggcuggcauggguacacaagccacggagcgcauggcgucgccguggcugccgaucugaaguccacgcaggaggccaucaauaaaauuaccaagaaccuuaauagccugucugaacucgaggucaagaaccugcaacggcuguccggggcuauggacgaacuccacaaugagauccuggagcuugacgaaaaaguggaugaccugcgcgccgauacaaucagcucucagauugagcucgcgguucugcuuagcaacgaaggaaucauuaauuccgaggacgaacaccuucucgcucuggagagaaagcugaaaaagaugcucggcccuucugccguggauaucgggaacggcuguuucgagaccaaacauaagugcaaucagacaugccuggaccggauugccgcuggaaccuuuaacgccggcgaguucagccuucccacguuugauucccugaauaucaccgcugccagccucaacgacgaugggcuggacaaucacacaauccugcuuuauuacucuaccgcggccuccagccucgcugucacacugaugauugccaucuucauuguguauaugguuucuagagauaacguguccuguagcaucugccuguga

SEQ ID NO: 218654 - RNA, 1758 nt, Artificial Sequence
  derived and/or modified CDS sequence (opt5) from hemagglutinin__InfluenzaB__ACR39336
augaaggccaucauugugcugcucauggucguuaccagcaacgcugacagaaucugcacaggcauuacguccucuaauagcccccacguggugaaaaccgccacacagggggaggucaacgugaccggaguuaucccucugacaaccacaccgaccaagucccauuucgcgaaucuuaaaggcacggaaacccgggggaagcugugucccaaaugccucaacuguacagaucuggacguggcucuuggacgcccuaagugcaccggcaauauucccucugccagagucagcauccugcacgaggugcggccuguuacauccggguguuuucccaucaugcaugaucgcaccaagauuagacaacucccuaaccugcugcggggauacgaacacauccgccucucuacgcauaaugugauuaacgccgagaaugcuccgggcggccccuauaaaaucgggacaagcggauccugcccuaacgucaccaauggcaacggguucuuugccacaauggcuugggccgugcccaagaaugacaacaauaaaaccgcgaccaacagccugacaauugaagugccuuacaucuguacggagggagaggaucagauuaccgucuggggcuuccacucugacaacgaagcccagauggcuaaacuuuauggggauuccaagccccagaaguuuacaagcucugccaauggaguuaccacacacuacgugucccaaaucggcggcuucccgaaccagaccgaggacgggggacugccucagagcggcagaaucguggucgauuauauggugcagaagucugggaaaacgggaacaauuaccuaccaacggggcauccuccugccccagaagguuuggugcgcuuccgggcgcagcaaagugauuaagggaucccuuccucugaucggcgaagccgacugucuccaugagaaauauggcgggcugaauaagucuaaacccuacuacaccggagagcacgcgaaggccauuggcaacugccccaucugggucaagacaccucugaaacucgcuaaugggaccaaguauagaccgcccgccaaacugcuuaaggaacggggauuuuucggcgcuaucgccggguuucuggagggcggaugggaaggcaugauugccggguggcauggauacacaagccacggcgcucacgggguggcgguugccgcugaucucaaauccacgcaggaggccaucaacaagauuaccaagaaucugaacagccuuucugaacuggaggugaaaaaucuccagcgccuguccggagccauggacgagcugcauaacgaaauccucgagcuggaugaaaaggucgacgaccuuagagcugauacaauuagcucucaaaucgagcuggccgugcuccugagcaaugaaggcaucauuaacuccgaggacgagcaccuucuggcgcucgaacggaaacugaagaaaaugcuggggccuucugcugucgagaucggcaauggauguuucgaaaccaagcauaagugcaaccagacaugccucgaucgcauugccgccggcaccuuugacgcuggggaguucagccugcccacguuugauucccuuaauaucaccgccgcuagccugaacgacgauggacucgacaaccacacaauucugcuguauuacucuaccgccgcguccagccuugccgugacacucaugaucgcuauuuucguuguguauauggucucuagagauaauguguccuguagcaucugccuguga

SEQ ID NO: 218655 - RNA, 1755 nt, Artificial Sequence
  derived and/or modified CDS sequence (opt5) from hemagglutinin__InfluenzaB__AEA51386
augaaggccaucauugugcugcucauggucguuaccagcaacgcugacagaaucugcacaggcauuacguccucuaauagcccccacguggugaaaaccgccacacagggggaggucaacgugaccggaguuaucccucugacaaccacaccgaccaaguccuacuucgcgaaucuuaaaggcacgcggacccgcgggaagcugugucccgauugccucaacuguacagaccuggauguggcucuuggaagaccuaugugcgucggcaccacacccucugccaaagccagcauucugcaugaagugcggccuguuaccuccggguguuuucccaucaugcacgaccgcacgaagaucagacaacucccuaaucugcugcggggauaugagaacauucgccucucuacacagaaugugaucgaugcugaaaaggccccgggcggccccuacagacuggggaccagcggauccugcccuaacgcuacaagcaaaucuggcuucuuugccaccauggcgugggccguccccaaggacaauuauaaaaacgcuaccaauccucuuacaguggaggugcccuacauuuguacggaaggggagggacagaucaccgucuggggcuuccauuccgauaacaagccgcagaugaaaaaucuguauggggacagcaacccucaaaaguuuacaucuuccgccagcggaguuaccacacacuacgugucucagauuggcgauuuccccgaccagaccgaggauggcgggcucccucaguccggacggaucguggucgacuauaugaugcaaaagcccggcaaaacggggacaauuguguaccagcgcggaguucugcuuccccagaagguguggugcgcuagcggcagauccaaagucaucaaggggucucugccucucaucggagaagccgauugucugcaugagaaauacggcggccugaauaagagcaaaccguauuacaccggggaacacgcgaaggccauuggaaacugccccaucugggugauuaccccucagaagcucgcuaacggcacaaccuuuuccccucccgccaaacugcuuaaggagcggggguucuuuggagcuaucgccggcuuccuggaagggggcugggagggaaugauugccggcuggcacggguauacaagccauggagcucacggcguugcgguggccgcugaccucaaaucuacgcaagaggccaucaauaagaucaccaaaaaccuuaauucccugagcgaacuggaggucaagaaccuccagcgccugucuggggccauggacgaacugcauaaugagauucucgagcuggaugaaaagguggacgaucuuagagcugacacaaucagcucccagauugagcuggccguccuccugucuaacgaaggaaucauuaauagcgaggaugaacaccuucuggcgcucgagcggaaacugaagaaaaugcugggccccuccgcuguggacaucgggaacggcuguuuugagaccaagcacaaaugcaaucaaacaugccucgaucgcaucgccgccggaaccuucaacgcuggcgaauuuagccugccgacguucgacucucuuaauauuaccgccgcuucccugaacgaugacgggcucgauaaucauacaauccugcuguacuauagcaccgccgcgucuucccuugccguuacacucaugcuggcuauuuucaucguguacauggucagcagagacaacguguccuguucuauuugccuguga

SEQ ID NO: 218656 - RNA, 1755 nt, Artificial Sequence
  derived and/or modified CDS sequence (opt5) from hemagglutinin__InfluenzaB__AEA51387
augaaggccaucauugugcugcucauggucguuaccagcaacgcugacagaaucugcacagaaauuacguccucuaauagcccccugguggugaaaaccgccacacagggcgaagucaacgugaccgggguuaucccucuuacaaccacaccgaccaaguccuacuucgcgaaucugaaaggaacgcggacccgcggcaagcucugucccgauugccugaacuguacagaccuugauguggcucuggggagaccuaugugcgucggaaccacacccucugccaaagccagcauucuccacgaggugcggccuguuaccuccggcuguuuucccaucaugcaugaccgcacgaagaucagacaacugccuaaucugcuccggggguaugaaaacauucgccugucuacacagaaugugaucgaugcugagaaggccccgggaggccccuacagacuuggcaccagcggguccugcccuaacgcuacaagcaaaauuggauucuuugccaccauggcgugggccguccccaaggacaauuauaaaaacgcuaccaauccucugacaguggaagugcccuacaucuguacggagggcgaggaucagauuaccgucuggggguuccacucugacaacaagacacagaugaaaaaucucuauggagauuccaacccgcaaaaguuuaccagcucugccaauggcguuacaacccauuacgugucccagaucggggacuucccugaucagacggaagacggaggccugccccagagcggccggauuguggucgauuauaugaugcaaaagccugggaaaacaggacccaucguguaccagcgcggcguucuucugccccagaagguguggugcgcuucugggagauccaaagucaucaagggaagccucccucugauuggcgaggccgacugucugcacgaaaaauacgggggacucaacaaguccaaauauucucauaccggcgaccacgcgaagacccugggcaacugcccgaucugggugaagacaccccuuaaacuggccaaugggaccaaguaccggccucccgcuaaacuccugaaggagcgcggauuuuucggcgccauugcuggguuucuugagggaggcugggaagggaugaucgccggcuggcacggauauacaagccauggcgcccacgggguugcuguggcggccgaucugaaauccacgcaggaggcuauuaacaagaucaccaagaaucucaacagccugucugaacuggaggucaaaaaucuccaaagacuguccggagccauggacgaacuucauaacgagauccuggagcucgaugaaaagguggacgaucugcgggccgacacaauuagcucucagaucgagcuugcuguccugcucagcaaugaaggcauuaucaacuccgaggaugaacaucugcuggcccucgagcgcaaacugaagaaaaugcuugggccuucugcgguggacauuggaaauggcuguuucgagaccaagcacaagugcaaccagacaugccuggauagaaucgcugccgggaccuuuaaugccggcgaguucagccuccccacguuugacucccugaacaucaccgcugccagccugaaugaugacggacuugacaaccacacaauucuccuguacuauucuaccgcugccuccagccuggcgguuacacucaugcuggccaucuucauuguguacauggucucucgggauaauguguccuguagcaucugccuuuga

SEQ ID NO: 218657 - RNA, 1755 nt, Artificial Sequence
  derived and/or modified CDS sequence (opt5) from hemagglutinin__InfluenzaB__AEA51388
augaaggccaucauugugcugcucauggucguuaccagcaacgcugacagaaucugcacaggcauuacguccucuaauagcccccacguggugaaaaccgccacacagggggaggucaacgugaccggaguuaucccucugacaaccacaccgaccaaguccuacuucgcgaaucuuaaaggcacgcggacccgcgggaagcugugucccgauugccucaacuguacagaccuggauguggcucuuggaagaccuaugugcgucggcaccacacccucugccaaagccagcauucugcaugaagugcggccuguuaccuccggguguuuucccaucaugcacgaccgcacgaagaucagacaacucccuaaucugcugcggggauaugagaacauucgccucucuacacagaaugugaucgaugcugaaaaggccccgggcggccccuacagacuggggaccagcggauccugcccuaacgcuacaagcaaaauuggcuucuuugccaccauggcgugggccguccccaaggacaauuauaaaaacgcuaccaauccucuuacaguggaggugcccuacaucuguacggaaggggaggaucagauuaccgucuggggauuccauucugacaacaagacacagaugaaaaaucuguauggcgauuccaacccgcaaaaguuuaccagcucugccaaugggguuacaacccacuacgugucccagaucggagacuucccugaucagacggaggacggcggccucccccagagcgggcggauuguggucgauuauaugaugcaaaagccuggaaaaacaggcaccaucguguaccagcgcgggguucugcuuccccagaagguguggugcgcuucuggaagauccaaagucaucaagggcagccugccccucauuggggaagccgacugucugcaugagaaauacggaggccugaacaaguccaaaccuucuuauaccggcgaacacgcgaaggccaaggggaacugcccgaucugggugaauacaccccucaaacuggcuaacggaaccaaguaccggccucccgccaaacuuuuuaaggagcgcggcuucuuuggggcuauugccggauuccuggagggcgggugggaaggcaugaucgccggauggcacggcuauacaagccauggggcucacggaguugcgguggccgcugaccucaaauccacgcaggaggccauuaauaagaucaccaagaaccugaauagccuuucugaacuggaggucaaaaaccuccaaagacuguccggcgccauggaugaacugcauaaugagauccucgagcuggacgaaaagguggaugaccuucgggcugauacaauuagcucucagaucgagcuggccguccuccugagcaacgaagggauuaucaauuccgaggacgaacaccuucuggcgcucgagcgcaaacugaagaaaaugcugggaccuucugcuguggauaagggcaacggguguuuugagaccaagcacaaaugcaaucagacaugccucgacagaauugccgccggcaccuucaacgcuggagaauuuagccugcccacguucgauucccuuaauaucaccgccgcuagccugaacgacgauggccucgacaaucauacaauccugcuguacuauucuaccgccgcguccagccuugccguuacacucaugcuggcuauuuucaucguguacauggucucucgggacaacguguccuguagcauuugccuguga

SEQ ID NO: 218658 - RNA, 1755 nt, Artificial Sequence
  derived and/or modified CDS sequence (opt5) from hemagglutinin__InfluenzaB__AEA51389
augaaggccaucauugugcugcucauggucguuaccagcaacgcugacagaaucugcacaggcauuacguccucuaucagcccccugguggauaaaaccgccacacagggggaggugaaugucaccggagugauuccucuuacaaccacaccgaccaaguccuacuucgcgaacguuaaaggcacgcggacccgcgggaagcugugucccgacugccucaauuguacagaucuggacguggcucuuggaagaccuaugugcgucggcaccacacccucugccaaagccagcauccugcacgaagugcggccuguuaccuccggguguuuucccaucaugcaugaucgcacgaagauuagacaacucccuaaccugcugcggggauaugagaauauccgccucucuacacagaacgugauugacgcucagaaggccccgggcggccccuacagacuggggaccagcggauccugcccuaaugcuacaagcaaaaucggcuucuuugccaccauggcgugugccguccccaaggauaacuauaaaaaugcuaccaacccucuuacaguggaagugcccuacauucggacggagggggaagaccagaucaccgucuggggauuccacucugauaauaagacacaaaugaaaaaccuguauggcgacuccaauccgccuaaguuuaccagcucugccaacgggguuacaacccauuacgugucccagacgggagauuuccccgaccagacagaggauggcggccucccucccagcgggcgcauuguggucgacuauaugaugcagaagcccggaaaaaccggcaccaucgcuuaccaaagaggggugcugcuuccucagaagguuuggugcgccucuggacgguccaaagugaucaagggcagccugccgcucauuggggaggcggacugucugcacgaaaaauacggaggccugaauaaguccaaacccccucauacaggcgagcacaccaaggccaucgggaacugccccauuugggucaagacaccucucaaacuggcuaacggaacgaaguaucgccccucugccaaacuucugaaggaaagaggcuuuuucggggcuaucgccggauuucucgagggcgggugggagggcaugauugccggauggcacggcuacaccagccauggggcucacggaguggcgguugccgcugaucugaaauccacacaggaagccaucaauaagaucaccaagaaccuuaauagccugucugagcucgaagugaaaaaccugcagcggcuguccggcgccauggacgagcuccauaaugaaauucuggagcuugaugagaaggucgacgaucugcgcgcugacacaaucagcucucaaauugaacucgccgugcugcuuagcaacgaggggaucauuaauuccgaagaugagcaucugcucgcgcuggaaagaaaacugaagaaaaugcucggaccgucugcugucgacaucggcaacggguguuucgagaccaagcacaagugcaaucagacgugccuggaucggaucgccgccggcaccuuuaacgcuggagaguucuuucuuccuacauucgacagccugaauauuaccgccgcuucccucaacgaugacggccuggacaaucacacaauccugcuuuauuacagcaccgccgcgucuucccucgccgugacgcugaugcuggcuauuuucaucguuuauauggugagcagagauaacgucucuuguuccauuugccucuga

SEQ ID NO: 218659 - RNA, 1755 nt, Artificial Sequence
  derived and/or modified CDS sequence (opt5) from hemagglutinin__InfluenzaB__AEA51390
augaaggccaucauugugcugcucauggucguuaccagcaacgcugacagaaucugcacaggcauuacguccucuaauagcccccacguggugaaaaccgccacacagggggaggucaacgugaccggaguuaucccucugacaaccacaccgaccaaguccuacuucgcgaaucuuaaaggcacgcggacccgcgggaagcugugucccgauugccucaacuguacagaccuggauguggcucuuggaagaccuaugugcgucggcaccacacccucugccaaagccagcauucugcaugaagugcggccuguuaccuccggguguuuucccaucaugcacgaccgcacgaagaucagacaacucccuaaucugcugcggggauaugagaacauucgccucucuacacagaaugugaucgaugcugaaaaggccccgggcggccccuacagacuggggaccagcggauccugcccuaacgcuacaagcaaaauuggcuucuuugccaccauggcgugggccguccccaaggacaauuauaaaaacgcuaccaauccucuuacaguggaggugcccuacaucuguacggaaggggaggaucagauuaccgucuggggauuccauucugacaacaagacacagaugaaaaaucuguauggcgauuccaacccgcaaaaguuuaccagcucugccaaugggguuacaacccacuacgugucccagaucggagacuucccugaucagacggaggacggcggccugcccccuagcgggcggauuguggucgauuauaugaugcagaagcccggaaaaacaggcaccaucguguaccaacgcgggggacugcuuccccagaagguuuggugcgcuucuggcagauccaaagugaucaaggggagccugccucucauuggagaagccgacugucugcaugagaaauacggcggccugaacaaguccaaaccguauuacaccggggaacacgcgaaggccaucggaaacugccccauuugggucaagccuccccucaaacuggcuaauggcacaaaguaucggccucccgccaaacuuuuuaaggagcgcggguucuuuggagcucuggccggcuuccucgaagggggcugggagggaaugaucgccggcuggcacggguacaccucucauggagcucacggcguggcgguugccgcugaccugaaaagcacacaggaggccauuaacaagaucacgaagaaucuuaacucccugagcgaacucgaggugaaaaaucugcagagacugucuggggccauggaugaacuccauaacgagauccuggagcuugacgaaaaggucgaugaccugcgggcugauaccauuuccagccaaaucgagcucgccgugcugcuuucuaaugaaggaauuaucaacagcgaggacgaacaccuccucgcgcuggagcgcaaacugaagaaaaugcucggcccguccgcugucgauauugggaauggcuguuuugagacaaagcacaagugcaaccagaccugccuggacagaaucgccgccggaacauucaaugcuggcgaauuuucucuuccuaccuucgauagccugaacaucacggccgcuucccucaaugacgaugggcuggacaaccauaccauucugcuuuauuacagcacagccgcgucuucccucgccgugacccugaugcuggcuaucuucauuguuuauauggugagccgggacaaugucucuuguuccaucugccucuga

SEQ ID NO: 218660 - RNA, 1758 nt, Artificial Sequence
  derived and/or modified CDS sequence (opt5) from hemagglutinin__InfluenzaB__AEA51391
augaaggccaucauugugcugcucauggucguuaccagcaacgcugacagaaucugcacaggcauuacguccucuaauagcccccacguggugaaaaccgccacacagggggaggucaacgugaccggaguuaucccucugacaaccacaccgaccaagucccauuucgcgaaucuuaaaggcacggaaacccgggggaagcugugucccaaaugccucaacuguacagaucuggacguggcucuuggacgcccuaagugcaccggcaagauucccucugccagagucagcauccugcacgaggugcggccuguuacauccggguguuuucccaucaugcaugaucgcaccaaaauuagacaacucccuaaucugcugcggggauacgaacacauccgccucucuacgcauaacgugauuaaugccgagaacgcuccgggcggccccuauaagaucgggacaagcggauccugcccuaauauuaccaacggcaauggguucuuugccacaauggcuugggccguccccaaaaacgacaagaauaaaaccgcgaccaacccucugacaaucgaagugcccuacauuuguacggagggagaggaucagaucaccguguggggcuuccacagcgucaaugaaacacagauggccaaacuuuauggggacucuaagccgcagaaguuuaccuccagcgcuaacggaguuacaacccacuacaucucucaaauuggcggcuucccuaaccagacggaggaugggggacugccccaguccggcagaaucgugguggacuauaugguccaaaagagcgggaaaacaggaaccauuaccuaccagcggggcauccuccugccucagaagguguggugcgccucugggcgcuccaaaguuauuaagggaagccuuccccugaucggcgaagcugauugucuccaugagaaauauggcgggcugaauaaguccaagcccuacuacacaggagagcacgccaaagcgaucggcaacugcccuauuugggugaagaccccgcugaaacucgccaaugggacaaaguauagacccccugcuaaacugcuuaaggaacggggauuuuucggcgccaucgcuggguuucuggagggcggaugggaaggcaugauugccggguggcauggauacacgucucacggcgcccacgggguccccguggcugcggaccucaagagcacccaggaggccaucaacaaaauuacaaagaaucugaacucccuuagcgaacuggagguuaaaaaucuccagcgccugucuggagcuauggaugagcugcauaacgaaauccucgagcuggacgaaaagguggaugaccuuagagccgacaccaucuccagccaaauugagcuggccguccuccugucuaaugaaggcaucauuaacagcgaggaugagcaccuucuggcucucgaacggaaacugaagaagaugcuggggccuuccgccguggagaucggcaauggauguuucgaaacaaaacauaagugcaaccagaccugccucgaccgcauugcggcuggcacguuugaugccggggaguucucucugcccaccuuugacagccuuaauaucacagccgcuucccugaacgaugacggacucgauaaucacaccauucugcuguauuacagcacagccgcuucuucccuugccgucacccucaugaucgcgaucuucgugguuuauauggugagcagagacaacgucucuuguuccauuugccuguga

SEQ ID NO: 218661 - RNA, 1758 nt, Artificial Sequence
  derived and/or modified CDS sequence (opt5) from hemagglutinin__InfluenzaB__AEA51392
augaaggccaucauugugcugcucauggucguuaccagcaacgcugacagaaucugcacaggcauuacguccucuaauagcccccacguggugaaaaccgccacacagggggaggucaacgugaccggaguuaucccucugacaaccacaccgaccaagucccauuucgcgaaucuuaaaggcacggaaacccgggggaagcugugucccaaaugcccuaacuguacagaucucgacguggcucugggacgccccaagugcaccggcaagauuccuucugccagagucagcauccuucacgaggugcggcccguuacauccggguguuuuccuaucaugcaugaucgcaccaaaauuagacaacugccgaaucuccugcggggauacgaacacauccgccugucuacgcauaacgugauuaaugccgagaacgcucccggcggcccuuauaagaucgggacaagcggauccugccccaaugucaccaacggcaauggguucuuugccacaauggcuugggccgugccuaaaaacgacaagaauaaaaccgcgaccaacccccucacaauugaagugccguacaucuguacggagggagaggaucagauuaccgucuggggcuuccacagcgacaaugaaacacagauggccaagcuguauggggauucuaagccucagaaauuuaccuccagcgcuaacggaggcacaacccacuacguuucucaaaucggcggguuccccaaccagacggaggacggaggccuuccucaguccgggagaaucgugguggauuauaugguccaaaagagcggaaaaacaggcaccauuaccuaccagcgggggauccugcucccccagaagguguggugcgccucuggacgcuccaaaguuauuaagggcagccugccccuuaucggcgaagcugacugucugcaugagaaauaugggggacucaauaaguccaagccuuacuacacaggcgagcacgccaaagcgauugggaacugcccgaucugggugaagacaccccugaaacuggccaauggaaccaagaacaucgcuccugccaaacuccugaaggaaagaggcuuuuucggggcuauugccggcuuucuugagggaggcugggaagggaugaucgccggauggcauggcuauacgucucacggggcucacggagucgcgguggccgcugaucugaaaagcacccaggaggccauuaauaagaucacaaagaaccucaauucccugagcgaacuugagguuaaaaaccugcagcggcucucuggcgccauggacgagcugcauaaugaaauucuggagcucgaugaaaagguggacgaccugcgcgcugauaccaucuccagccaaaucgagcuugccguccugcucucuaacgaagggauuaucaauagcgaggacgagcaucugcuugcgcuggaaagaaaacucaagaagaugcugggccccuccgcuguggagauuggaaacggcuguuucgaaacaaaacacaagugcaaucagaccugccuggaucggaucgccgccgggacguuugacgcuggagaguucucucucccuaccuuugauagccugaacauuacagccgcuucccuuaaugacgauggccuggacaaccacaccauccuccuguacuauagcacagccgcgucuucccuggccgucacccuuaugauugcuaucuucgugguuuacauggugagccgcgauaacgucucuuguuccaucugccucuga

SEQ ID NO: 218662 - RNA, 1755 nt, Artificial Sequence
  derived and/or modified CDS sequence (opt5) from hemagglutinin__InfluenzaB__AEA51395
augaaggccaucauugugcugcucauggucguuaccagcaacgcugacagaaucugcacaggcauuacguccucuaauagcccccacguggugaaaaccgccacacugggggaagucaacgugaccggaguuaucccucuuacaaccacaccgaccaaguccuacuucgcgaaucugaaaggcacgcggacccgcgggaagcucugucccgauugccugaacuguacagaccuugauguggcucugggaagaccuaugugcgucggcaccacacccucugccaaagccagcauucuccaugaagugcggccuguuaccuccggguguuuucccaucaugcacgaccgcacgaagaucagacagcugccuaaucugcuccggggauaugagaacauucgccugucuacacaaaaugugaucgaugcugaaaaggccccgggcggccccuacagacuugggaccagcggauccugcccuaacgcuacaagcaaaauuggcuucuuugccaccauggcgugggccguccccaaggacaauuauaaaaacgcuaccaauccucugacaguggaggugcccuacaucuguacggaaggggaggaucaguucaccgucuggggauuucauucugacaacauuacacagcucaagaaucuguucggcgauuccaacccgcagcgguuuaccagcucugccaaugggguuacaacccacuaugugucccaaaucggagacuucccugaucagacggaggacggcggccuuccccagagcgggcgcauuguggucgauuacgugaugcagaaaccuggaaagacaggcaccaucguuuaucaaagaggggugcugcucccucccaaggucugguuugcucggggacgcucuaaagugaucaagggcucccugccccugauuggggaagccgacugcauccaugagaaauacggaggccucaacaagagcaaaccguacuauaccggcgaacacgcgaaggccauugggaacugucccaucuggguuaaaacaccucugaaacuugcuaauggaaccaaguacagacccccugccaagcugcucaaggagcggggcuucuuuggggcuauugccggauuccuggagggcgggugggaaggcaugaucgccggauggcacggcuauacaucccauggggcucacggaguggcggucgccgcugaccuuaaaucuacgcaggaggccaucaacaagauuaccaaaaaucugaacagccucuccgaacuggaggugaagaaucugcagcgccucagcggcgccauggaugaacugcauaacgagauccuugagcuggacgaaaaggucgaugaccucagagcugauacaauuucuucccagaucgagcuggccgugcuucugagcaaugaagggauuaucaacucugaggacgaacaccuccuggcgcuggagcggaaacucaagaaaaugcugggacccagcgcuguugauaucggcaaugggugcuuugagaccaagcacaaauguaaccaaacaugccuugacagaauugccgccggcaccuucaaugcuggagaguucucccugccgacguuugauucucucaacaucaccgccgcuagccugaaugacgauggccuggacaaccauacaauucuucucuacuauuccaccgccgcgagcucucuggccgugacacugaugcucgcuaucuucauugucuacauggugucccgcgacaauguuagcugcucuaucugucuguga

SEQ ID NO: 218663 - RNA, 1758 nt, Artificial Sequence
  derived and/or modified CDS sequence (opt5) from hemagglutinin__InfluenzaB__AEA51398
augaaggccaucauugugcugcucauggucguuaccagcaacgcugacagaaucugcacaggcauuacguccucuaauagcccccacguggugaaaaccgccacacagggggaggucaacgugaccggaguuaucccucugacaaccacaccgaccaagucccauuucgcgaaucuuaaaggcacggaaacccgggggaagcugugucccaaaugcccuaacuguacagaucucgacguggcucugggacgccccaagugcaccggcaagauuccuucugccagagucagcauccuucacgaggugcggcccguuacauccggguguuuuccuaucaugcaugaucgcaccaaaauuagacaacugccgaaucuccugcggggauacgaacacauccgccugucuacgcauaacgugauuaaugccgagaacgcucccggcggcccuuauaagaucgggacaagcggauccugccccaaugucaccaacggcauuggguucuuugccacaauggcuugggccgugccuaaaaaugacaagaacaaaaccgcgaccaauccccucacaaucgaagugccguacauuuguacggagggagaggaucagaucaccgucuggggcuuccacagcgacaacgaaacacagauggccaagcuguauggggauucuaagccucagaaauuuaccuccagcgcuaauggaguuacaacccacuacgugucucaaaucggcggcuuccccaaccagacggaggacgggggacuuccucaguccggcagaauuguggucgauuauauggugcaaaagagcgggaaaacaggaaccaucaccuaccagcggggcauucugcucccccagaagguuuggugcgccucugggcgcuccaaagugaucaagggaagccugccccuuauuggcgaagcugacugucugcaugagaaauauggcgggcucaacaaguccaagucuuacuacacaggagagcacgccaaagcgaucggcaauugcccuaucugggucaagaccccgcugaaacuggccaacgggacaaaguauagacccccugcucaucucagcuacuuuuguggauucuuuggcgccauugcuggguuccuggaaggcggaugggagggcaugaucgccggguggaauggauauacgucccacggcgcccacgggguggcuguuguggcggaucuuaaaagcacccaggaagccauuaacaagaucacaaagaaucugaacucucucuccgagcuggaagucaaaaaucuucagcggcugagcggagcuauggacgagcuccauaacgagauucuggaacuggaugagaagguggacgaccuccgcgccgauaccaucucuagccaaaucgaacuggccguccuucuguccaaugagggcauuaucaacucugaagacgagcaccuccuggcucuugagagaaaacugaagaaaaugcucgggcccagcgccguggaaauuggcaauggaugcuuugagacaaagcauaagugcaaccagaccugucuggaucggaucgcggcuggcacguucgacgccggggaauuuucccugccuaccuucgauagccucaauauuacagccgcuucucugaacgacgauggacuugacaaucacaccauccugcucuacuauuccacagccgcuagcucucuggccguuacccugaugauugcgaucuucguggucuacauggugucccgcgauaacguuagcugcuccaucugucuuuga

SEQ ID NO: 218664 - RNA, 1758 nt, Artificial Sequence
  derived and/or modified CDS sequence (opt5) from hemagglutinin__InfluenzaB__AEA51399
augaaggccaucauugugcugcucauggucguuaccagcaacgcugacagaaucugcacaggcauuacggccucccagucucccaauaucgauaaaagcuccacccaaggggaggugaacgugacaggagucauuccucugaccacaaccccgacaaagucucacuucgcgaaucuuaaaggcaccgaaacgcgggggaagcugugucccaaaugcccuaacuguaccgaccucgauguggcucugggacgccccaagugcacaggcaagaucccuagcgccagaguuuccauccuucaugaggugcggcccgucaccucuggguguuuuccuauuaugcacgaccgcacaaaaaucagacagcugccgaaucuccugcggggauacgaacauauucgccugagcacccacaacgugaucaaugccgagaacgcucccggcggcccuuauaagauugggacguccggaagcugccccaauguuacaaacggcaucggguucuuugccaccauggcuugggccgugccuaaaaaugauaagaacaaaacagcgaccaauccccucaccauugaagucccguacaucuguacagagggagaggaccagaucacgguguggggcuuccauucugauaacgaaacccagauggccaagcuguauggggacuccaagccucaaaaauuuacaagcucugcuaauggagugaccacacacuacgucucccagauuggcggcuuccccaaccagaccgaggaugggggacuuccucagagcggcagaaucguuguggacuauauggugcaaaagucugggaaaacgggaacaauuaccuaccagcggggcauccugcucccccagaaggucuggugcgccuccgggcgcagcaaagugauuaagggaucccugccccuuaucggcgaagcugauugucugcacgagaaauauggcgggcucaacaagucuaagagcuacuacaccggagagcaugccaaagcgaucggcaauugcccuauuuggguuaagacaccgcugaaacuggccaacgggaccaaguauagacccccugcucaccucuccuacuuuuguggauucuuuggcgccaucgcuggguuccuggaaggcggaugggagggcaugauugccggguggaauggauauacaagccauggcgcccacgggguggcugucguggcggaccuuaaaucuacgcaggaagccaucaacaagauuaccaagaaucugaacucccucagcgagcuggaaguuaaaaaucuucaacggcugucuggagcuauggaugagcuccacaacgagauccuggaacuggacgagaagguggacgaucuccgcgccgacacaaucagcucccagauugaacuggccguccuucugucuaaugagggcaucauuaacagcgaagaugagcaucuccuggcucuugagagaaaacugaagaaaaugcucgggcccuccgccguggaaaucggcaauggaugcuuugagaccaagcacaagugcaaccagacaugucuggaccggauugcggcuggcaccuucgaugccggggaauuuagccugccuacguucgacucucucaauaucaccgccgcuucccugaacgaugacggacuugauaaucauacaauucugcucuacuauagcaccgccgcuucuucccuggccgucacacugaugaucgcgaucuucgugguuuacauggugagccgcgacaacgucuccugcucuauuugucuuuga

SEQ ID NO: 218665 - RNA, 1758 nt, Artificial Sequence
  derived and/or modified CDS sequence (opt5) from hemagglutinin__InfluenzaB__AEG21014
augaaggccaucauugugcugcucauggucguuaccagcaacgcugacagaaucugcacaggcauuacguccucuaauagcccccacguggugaaaaccgccacacagggggaggucaacgugaccggaguuaucccucugacaaccacaccgaccaagucccauuucgcgaaucuuaaaggcacggaaacccgggggaagcugugucccaaaugccuccacuguacagaucuggacguggcucuuggacgcccuaagugcaccggcaagauucccucugccagagucagcauccugcaugaggugcggccuguuacauccggguguuuucccaucaugcacgaucgcaccaaaauuagacaacucccuaaccugcugcggggauacgaacauauccgccucucuacgcacaaugugauuaacgccgagaaugcuccgggcggccccuauaagaucgggacaagcggauccugcccuaacgucaccaauggcaacggguucuuugccacaauggcuugggccgugcccaaaaaugacaacaauaagaccgcgaccaacagccugacaauugaagugccuuacaucuguacggagggagaggaucagauuaccgucuggggcuuccacucugacaaugaaacacagauggccaaacuuuauggggauuccaagccccagaaguuuaccagcucugcuaacggaguuacaacccauuacgugucccaaaugggcggcuucccgaaccagacggaggacgggggacugccucagagcggcagaaucguggucgauuauauggugcagaaaucugggaagacaggaaccaucaccuaccaacggggcauucuccugccccagaaaguuuggugcgccuccgggcgcagcaaggugaucaaaggaucccuuccucugauuggcgaagcugacugucuccacgagaaguauggcgggcugaauaaaucuaagcccuacuacacaggagagcaugccaaggcgaucggcaacugccccauuugggucaaaaccccucugaagcucgccaaugggacaaaauauagaccgcccgcuaagcugcuuauggaacggggauuuuucggcgccaucgcuggguuucuggagggcggaugggaaggcaugaucgccggguggcacggauacacgagccacggcgcccaugggguggcuguugcggccgaucucaaauccacccaggaggcuauuaacaagaucacaaagaaucugaacagccuuucugaacuggaggugaaaaaucuccagcgccuguccggagccauggacgagcugcacaacgaaauucucgagcuggaugaaaaggucgacgaccuuagagccgauaccaucagcucucaaauugagcuggcugugcuccugagcaaugaaggcaucaucaacuccgaggacgagcaucuucuggcccucgaacggaaacugaagaaaaugcuggggccuucugcggucgagauuggcaauggauguuucgaaacaaagcacaagugcaaccagaccugccucgaucgcaucgcugccggcacguuugacgccggggaguucagccugcccaccuuugauucccuuaauauuacagcugccagccugaacgacgauggacucgacaaucauaccauccugcuguauuacucuacagcugccuccagccuugcggugacccucaugauugccaucuucguuguguauauggucucuagagauaacguguccuguagcauuugccuguga

SEQ ID NO: 218666 - RNA, 1755 nt, Artificial Sequence
  derived and/or modified CDS sequence (opt5) from hemagglutinin__InfluenzaB__AEG21015
augaaggccaucauugugcugcucauggucguuaccagcaacgcugacagaaucugcacaggcauuacguccucuaauagcccccacguggugaaaaccgccacacagggggaggucaacgugaccggaguuaucccucugacaaccacaccgaccaaguccuacuucgcgaaucuuaaaggcacgcggacccgcgggaagcugugucccgauugccucaacuguacagaccuggauguggcucuuggaagaccuaugugcgucggcaccacacccucugccaaagccagcauucugcaugaagugcggccuguuaccuccggguguuuucccaucaugcacgaccgcacgaagaucagacaacucccuaaucugcugcggggauaugagaacauucgccucucuacacagaaugugaucgaugcugaaaaggccccgggcggccccuacagacuggggaccagcggauccugcccuaacgcuacaagcaaaaauggcuucuuugccaccauggcgugggccguccccaaggacaacuauaaaggggcuaccaauccuaagacaguggaggugcccuacauuuguacggaaggagagggccagaucaccgucuggggguuccauucugauaacaaaccgcagaugaagaaucuuuauggagacuccaacccucaaaaguuuacaagcucugccuccggcguuaccacacacuacgugagccagauuggcgauuuccccgaccagaccgaggaugggggacugccucagucuggccggaucguggucgacuauaugaugcaaaaacccgggaagacgggaacaauuguguaccagcgcggcguucuccugccccagaaaguguggugcgcuuccgggagaagcaaggucaucaaaggaucccuuccucugaucggcgaagccgauugucuccaugagaaguacggcgggcugaauaaaucuaagccguauuacaccggagaacacgcgaaggccauuggcaacugccccaucugggugauuaccccucagaaacuggcuaacgggacaaccuuuagcccucccgccaagcuccugaaagagcggggauucuuuggcgcuaucgccggguuccuugagggcggaugggaaggcaugauugccggguggcacggauauacaucccauggcgcucacgggguugcgguggccgcugaccugaaaagcacgcaagaggccaucaauaagaucaccaagaaccucaauucucuguccgaacuugaggucaagaaccugcagcgccucagcggagccauggacgaacugcauaaugagauucuggagcucgaugaaaaaguggacgaucugagagcugacacaaucucuagccagauugagcuugccguccugcucuccaacgaaggcaucauuaauucugaggaugaacaucugcuugcgcuggagcggaagcucaaaaagaugcuggggcccagcgcuguggacaucggcaacggauguuuugagaccaaacacaagugcaaucaaacaugccuggaucgcaucgccgccggcaccuucaacgcuggggaauuuucccucccgacguucgacagccugaauauuaccgccgcuucucuuaacgaugacggacuggauaaucacacaauccuccuguacuauuccaccgccgcgagcucucuggccguuacacuuaugcucgcuauuuucaucguguacauggucuccagagacaacgugagcuguuccauuugccuguga

SEQ ID NO: 218667 - RNA, 1755 nt, Artificial Sequence
  derived and/or modified CDS sequence (opt5) from hemagglutinin__InfluenzaB__AEG21016
augaaggccaucauugugcugcucauggucguuaccagcaacgcugacagaaucugcacaggcauuacguccucuaauagcccccacguggugaaaaccgccacacagggggaagucaacgugaccggaguuaucccucugacaaccacaccgaccaaguccuacuucgcgaaucuuaaaggcacgcggacccgcgggaagcugugucccgauugccucaacuguacagaccuggauguggcucuuggaagaccuaugugcgucggcaccacacccucugccaaagccagcauucugcaugaagugcggccuguuaccuccggguguuuucccaucaugcacgaccgcacgaagaucagacaacucccuaaucugcugcggggauaugagaacauucgccucucuacacagaaugugaucgaugcugaaaaggccccgggcggccccuacagacuggggaccagcggauccugcccuaacgcuacaagcaaaauuggcuucuuugccaccauggcgugggccguccccaaggacaauuauaaacgggcuaccaacccuaagacaguggaggugcccuacaucuguacggaaggggaggaucagauuaccgucuggggauuccauucugacaauaaaccgcagaugaagaacccuuauggcgauuccaauccccaaaaguuuacaagcucugccuccgggguuaccacacacuacgugagccagaucggagacuucccugaucagaccgaggacggcggccuuccccagucugggcgcauuguggucgauuauaugaugcaaaaacccggaaagacgggcacaaucguguaccagagagggguucugcucccucagaaaguguggugcgcuuccggacggagcaaggucaucaaaggcucccugccgcuuauuggggaagccgacugucugcaugagaaguacggaggccucaacaaaucuaagcccuauuacaccggcgaacacgcgaaggccaucgggaauugcccuauuugggugaaaacaccccugaagcuggcuaacggaaccaaauaucgcccucccgccaagcuccugaaagagagaggcuuuuucggggcuaucgccggauuucuugagggcgggugggaaggcaugauugccggauggcacggcuacaccagccauggggcucacggaguugcgguggccgcugaccugaaguccacacaggaggccaucaacaagaucacgaaaaaucucaacagccugucugaacuugaggucaagaaucugcaacggcucuccggcgccauggaugaacugcauaacgagauucuggagcucgacgaaaaaguggaugaccugcgcgcugauaccaucagcucucagauugagcuugccguccugcucagcaaugaagggaucauuaacuccgaggacgaacaucugcuugcgcuggagagaaagcucaaaaagaugcugggaccgucugcuguggauaucggcaauggguguuucgagacaaagcacaaaugcaaccagaccugccuggaccggaucgccgccggcacauuuaaugcuggagaguucagccucccuaccuuugauucccugaacauuacggccgcuagccuuaaugacgauggccuggacaaccacaccauccuccuguauuacucuacagccgcguccagccuggccguuacccuuaugcucgcuauuuucaucguguauauggucucuagagacaauguguccuguagcauuugccuguga

SEQ ID NO: 218668 - RNA, 1755 nt, Artificial Sequence
  derived and/or modified CDS sequence (opt5) from hemagglutinin__InfluenzaB__AEG21017
augaaggccaucauugugcugcucauggucguuaccagcaacgcugacagaaucugcacaggcauuacguccucuaauagcccccacguggugaaaaccgccacacagggggaagucaacgugaccggaguuaucccucugacaaccacaccgaccaaguccuacuucgcgaaucuuaaaggcacgcggacccgcgggaagcugugucccgauugccucaacuguacagaccuggauguggcucuuggaagaccuaugugcgucggcaccacacccucugccaaagccagcauucugcaugaagugcggccuguuaccuccggguguuuucccaucaugcacgaccgcacgaagaucagacaacucccuaaucugcugcggggauaugagaacauucgccucucuacacagaaugugaucgaugcugaaaaggccccgggcggccccuacagacuggggaccagcggauccugcccuaacgcuacaagcaaaauuggcuucuuugccaccauggcgugggccguccccaaggacaauuauaaaaacgcuaccaauccucuuacaguggaggugcccuacaucuguacggaaggggaggaucagauuaccgucuggggauuccauucugacaacaagacacagaugaaaaaucuguauggcgauuccaacccgcaaaaguuuaccagcucugccaaugggguuacaacccacuacgugucccagaucggagacuucccugaucagacggaggacggcggccucccccagagcgggcggauuguggucgauuauaugaugcaaaagccuggaaaaacaggcaccaucguguaccagcgcgggguucugcuuccccagaagguguggugcgcuucuggaagauccaaagucaucaagggcagccugccccucauuggggaagccgacugucugcaugagaaauacggaggccugaacaaguccaaaccuucuuauaccggcgaacacgcgaaggccaucgggaacugcccgauuugggugaagacaccccucaaacuggcuaauggaaccaaguaccggccucccgccaaacuucugaaggagcgcggcuuuuucggggcuaucgccggauuucucgagggcgggugggaaggcaugauugccggauggcacggcuauacaagccauggggcucacggaguugcgguggccgcugaccugaaauccacgcaggaggccaucaacaagaucaccaagaaucuuaacagccugucugaacucgaggucaaaaaucugcaaagacuguccggcgccauggaugaacuccauaacgagauucuggagcuugacgaaaagguggaugaccugcgggcugauacaaucagcucucagauugagcucgccguccugcuuagcaaugaagggaucauuaacuccgaggacgaacaucugcucgcgcuggagcgcaaacugaagaaaaugcucggaccuucugcuguggauaucggcaauggguguuucgagaccaagcacaagugcaaccagacaugccuggacagaaucgccgccggcaccuuuaaugcuggagaguucagccuucccacguuugauucccugaacauuaccgccgcuagccucaaugacgauggccuggacaaccacacaauccugcuuuacuauucuaccgccgcguccagccucgccguuacacugaugcuggcuauuuucaucguguacauggucucucgggacaauguguccuguagcauuugccucuga

SEQ ID NO: 218669 - RNA, 1755 nt, Artificial Sequence
  derived and/or modified CDS sequence (opt5) from hemagglutinin__InfluenzaB__AEG21018
augaaggccaucauugugcugcucauggucguuaccagcaacgcugacagaaucugcacaggcauuacguccucuaucagcccccugguggauaaaaccgccacacagggggaggugaaugucaccggagugauuccucuuacaaccacaccgaccaaguccuacuucgcgaacguuaaaggcacgcggacccgcgggaagcugugucccgacugccucaauuguacagaucuggacguggcucuuggaagaccuaugugcgucggcaccacacccucugccaaagccagcauccugcacgaagugcggccuguuaccuccggguguuuucccaucaugcaugaucgcacgaagauuagacaacucccuaaccugcugcggggauaugagaauauccgccucucuacacagaacgugauugacgcucagaaggccccgggcggccccuacagacuggggaccagcggauccugcccuaaugcuacaagcaaaaucggcuucuuugccaccauggcgugugccguccccaaggauaacuauaaaaaugcuaccaacccucuuacaguggaagugcccuacauucggacggagggggaagaccagaucaccgucuggggauuccacucugauaauaagacacaaaugaaaaaccuguauggcgacuccaauccgccuaaguuuaccagcucugccaacgggguuacaacccauuacgugucccagacgggagauuuccccgaccagacagaggauggcggccucccucccagcgggcgcauuguggucgacuauaugaugcagaagcccggaaaaaccggcccuaucgcuuaccaaagaggggugcugcuuccgcagaagguuuggugcgccucuggacgguccaaagugaucaagggcagccugccccucauuggggaggcggacugucugcacgaaaaauacggaggccugaauaaguccaaauauucucauaccggcgaucacgccaagacacucgggaacugcccuaucugggucaagacaccccugaaacuugcuaacggaaccaaguaccgcccuagcgccaaacugcucaaggagagaggcuuuuucggggcuauugccggauuucuggaaggcgggugggagggcaugaucgccggauggcacggcuauacgucccauggggcucacggaguggcgguugccgcugaccuuaaaagcacccaggaggccauuaauaagaucacaaagaaccucaauucucuguccgaacuggaggugaaaaaccugcagcggcucagcggcgccauggaugaacugcauaaugagauccuugaacuggacgagaaggucgaugaccuccgcgcugauaccauuucuagccaaaucgagcuggccgugcuucuguccaacgaagggauuaucaauucugaggacgaacaccuccuggcgcuggagagaaaacucaagaaaaugcugggacccagcgcugucgauauuggcaacggguguuucgaaacaaagcacaagugcaaucagaccugccuugaccggaucgccgccggcacguuuaacgcuggagaguucucccugccgaccuuugauagccucaauaucacagccgcuucucugaacgacgacggccuggauaaucauaccauucuucucuacuauuccacagccgcgagcucucuggccgugacccugaugcucgcuaucuucauuguuuacaugguguccagagacaacgucagcuguuccaucugccuguga

SEQ ID NO: 218670 - RNA, 1755 nt, Artificial Sequence
  derived and/or modified CDS sequence (opt5) from hemagglutinin__InfluenzaB__AEG21019
augaaggccaucauugugcugcucauggucguuaccagcaacgcugacagaaucugcacaggcauuacguccucuaauagcccccacguggugaaaaccgccacacagggggaagucaacgugaccggaguuaucccucugacaaccacaccgaccaaguccuacuucgcgaaucuuaaaggcacgcggacccgcgggaagcugugucccgauugccucaacuguacagaccuggauguggcucuuggaagaccuaugugcgucggcaccacacccucugccaaagccagcauucugcaugaagugcggccuguuaccuccggguguuuucccaucaugcacgaccgcacgaagaucagacaacucccuaaucugcugcggggauaugagaacauucgccucucuacacagaaugugaucgaugcugaaaaggccccgggcggccccuacagacuggggaccagcggauccugcccuaacgcuacaagcaaaauuggcuucuuugccaccauggcgugggccguccccaaggacaauuauaaaaacgcuaccaauccucuuacaguggaggugcccuacaucuguacggaaggggaggaucagauuaccgucuggggauuccauucugacaacaagacacagaugaaaaaucuguauggcgauuccaacccgcaaaaguuuaccagcucugccaaugggguuacaacccacuacgugucccagacgggagacuucccugaucagacagaggacggcggccugcccccuagcgggcggaucguggucgauuauaugaugcagaagcccggaaaaaccggcaccauuguguaccaacgcgggguucugcuuccccagaagguguggugcgcuucuggaagauccaaagucaucaagggcagccugccucucaucggggaagccgacugucugcaugagaaauacggaggccugaacaaguccaaaccgucuuauacaggcgaacacgcgaaggccauugggaacugccccaucugggugaagaccccucucaaacuggcuaauggaacaaaguaccggcccagcgccaaacuucugaaggagcgcggcuuuuucggggcuauugccggauuucucgagggcgggugggaaggcaugaucgccggauggcacggcuauacgucccauggggcucacggaguugcgguggccgcugaccugaaaagcacccaggaggccauuaacaagaucacaaagaaucuuaacucucuguccgaacucgaggucaaaaaucugcagagacugagcggcgccauggaugaacuccauaacgagauccuggagcuugacgaaaagguggaugaccugcgggcugauaccauuucuagccaaaucgagcucgccguccugcuuuccaaugaagggauuaucaacucugaggacgaacaccuccucgcgcuggagcgcaaacugaagaaaaugcucggaccuagcgcuguggauauuggcaauggguguuucgagacaaagcacaagugcaaccagaccugccuggacagaaucgccgccggcacguuuaaugcuggagaguucucccuucccaccuuugauagccugaacaucacagccgcuucucucaaugacgauggccuggacaaccauaccauucugcuuuacuauuccacagccgcgagcucucucgccguuacccugaugcuggcuaucuucauuguguacauggucucccgggacaaugugagcuguuccaucugccucuga

SEQ ID NO: 218671 - RNA, 1758 nt, Artificial Sequence
  derived and/or modified CDS sequence (opt5) from hemagglutinin__InfluenzaB__AEG21021
augaaggccaucauugugcugcucauggucguuaccagcaacgcugacagaaucugcacaggcauuacguccucuaauagcccccacguggugaaaaccgccacacagggggaggucaacgugaccggaguuaucccucugacaaccacaccgaccaagucccauuucgcgaaucuuaaaggcacggaaacccgggggaagcugugucccaaaugccucaacuguacagaucuggacguggcucuuggacgcccuaagugcaccggcaagauucccucugccagagucagcauccugcacgaggugcggccuguuacauccggguguuuucccauccuccaugaucgcaccaaaauuagacaacugccuaaucugcuccggggauacgaacacauccgccugucuacgcauaacgugauuaaugccgagaacgcuccgggcggccccuauaagaucgggacaagcggauccugcccuaauauuaccaacggcaauggguucuuugccacaauggcuugggccguccccaaaaacgacaagaauaaaaccgcgaccaacccucuuagcaucgaagugcccuacauuuguacagagggagaggaucagaucacgguguggggcuuccacucugacaaugaaacccagauggccaagcuguauggggauuccaagccgcagaaauuuacaagcucugcuaacggagucgccacccacuacguuucccaaaucggcggcuucccuaaccagacagaggacgggggacucccccagagcggcagaauugugguggauuauaugguccagaagucugggaaaaccggaacgaucacauaccaacggggcauucugcuuccucagaagguguggugcgcuuccgggcgcagcaaaguuaucaagggaucccugccccucuuuggcgaagccgacugucugcaugagaaauauggcggguucaauaagucuaagcccuacuacaccggagagcacgcgaaagccauuggcaacugcccuaucugggugaagaccccgcugaaacucgcuaaugggacaaaguauagacccccugccaaacuguuuaaggaacggggauucuuuggcgcuaucgccggguuccuugagggcggaugggaaggcaugauugccggguggcauggauacaccagccacggcgcucacggggucgcgguggccgcugaucugaaguccacacaggaggccaucaacaaaauuacgaagaaucucaacagccugucugaacuugagguuaaaaaucugcagcgccucuccggagccauggacgagcugcauaacgaaauccuggagcucgaugaaaagguggacgaccugagagcugauaccauuagcucucaaaucgagcuugccguccugcucagcaaugaaggcaucauuaacuccgaggacgagcaucugcuugcgcuggaacggaaacucaagaagaugcuggggcccucugcuguggagaucggcaauggauguuuugaaacaaaacacaagugcaaccagaccugccuggaucgcauugccgccggcacauucgacgcuggggaguucagccucccuaccuuugauucccugaauaucacggccgcuagccuuaacgacgauggacuggacaaucacaccauucuccuguauuacucuacagccgcguccagccuggccgucacccuuaugaucgcuauuuucgugguuuauauggugucuagagauaacgucuccuguagcaucugccucuga

SEQ ID NO: 218672 - RNA, 1758 nt, Artificial Sequence
  derived and/or modified CDS sequence (opt5) from hemagglutinin__InfluenzaB__AEG21022
augaaggccaucauugugcugcucauggucguuaccagcaacgcugacagaaucugcacaggcauuacguccucuaauagcccccacguggugaaaaccgccacacagggggaggucaacgugaccggaguuaucccucugacaaccacaccgaccaagucccauuucgcgaaucuuaaaggcacggaaacccgggggaagcugugucccaaaugccucaacuguacagaucuggacguggcucuuggacgcccuaagugcaccggcacaacccccucugccagagccagcauucugcacgagguccggccugugacguccggguguuuucccauccuccaugaucgcacaaagaucagacaacugccuaaucugcuccggggauacgaacacauucgccugucuacccauaacguuaucaaugcugagaacgccccgggcggccccuauaaaauugggacaagcggauccugcccuaauaucaccaacggcaauggguucuuugcuaccauggccugggcggugcccaagaacgacaaaaauaagacagccacgaacccucuuagcgucgaagugcccuacauuuguaccgagggagaggaucagaucacaguguggggcuuccacucugacaaugaaacccagauggcuaaacuguauggggauuccaagccgcagaaguuuacaagcucugccaacggagucgcuacccacuacguuucccaaauuggcggcuucccuaaccagacggaggacgggggacucccccagagcggcagaaucgugguggauuauaugguccagaaaucugggaagacaggaaccaucaccuaccaacggggcauucugcuuccucagcgcggguggugcgccuccggaagaagcaaagugaucaagggcucccugccccucuuuggcgaagcggacugucugcaugagaaauaugggggacugaauaagucuaaacccuacuacacaggcgagcacgccaaggcuauugggaacugcccuaucuggguuaagaccccgcucaaacuggccaauggaacaaaguaucggcccccugcuaaacuuuucaaggaacgcggcuuuuucggggccauugccggcuuucuggagggaggcugggaagggaugaucgcuggauggcauggcuacacgagccacggggcgcacggagugcccgucgccgcugaucucaaauccacccaggaggccaucaacaagauuacaaagaaucugaacagccuuucugaacuggaggugaaaaaucuccagagacuguccggcgccauggacgagcugcauaacgaaauccucgagcuggaugaaaagguugacgaccuucgggcugauaccauuagcucucaaaucgagcuggccgugcuccugagcaaugaagggauuaucaacuccgaggacgagcaccuucuggcgcucgaacgcaaacugaagaaaaugcugggcccuucugcugucgagaucggaaauggcuguuucgaaacaaagcauaagugcaaccagaccugccucgauagaauugccgccgggacguuugacgcuggagaguucagccugcccaccuucgauucccuuaauaucacagccgcuagccugaacgacgauggccucgacaaucacaccauucugcuguauuacucuacagccgcguccagccuugccgugacccucaugaucgcuauuuuugucguguauaugguuucucgggauaacguguccuguagcaucugccuguga

SEQ ID NO: 218673 - RNA, 1755 nt, Artificial Sequence
  derived and/or modified CDS sequence (opt5) from hemagglutinin__InfluenzaB__AEG21023
augaaggccaucauugugcugcucauggucguuaccagcaacgcugacagaaucugcacaggcauuacguccucuaauagcccccacguggugaaaaccgccacacugggggaagucaacgaaaccggagugaucccucuuacaaccacaccgaccaaguccuacuucgcgaaucugaaaggcacgcggacccgcgggaagcucugucccgauugccugaacuguacagaccuugauguugcucugggaagaccuaugugcgugggcaccacacccucugccaaagccagcauucuccaugagguccggccugugaccuccggguguuuucccaucaugcacgaccgcacgaagaucagacagcugccuaaucugcuccggggauaugaaaacauucgccugucuacacaaaauguuaucgaugcugagaaggccccgggcggccccuacagacuugggaccagcggauccugcccuaacgcuacaagcaaaauuggcuucuuugccaccauggcgugggccgugcccaaggacaauuauaaaaacgcuaccaauccucugacagucgaagugcccuacaucuguacggagggggaggaucagauuaccguguggggauuccauucugacaacaagacacagaugaaaaaucucuauggcgauuccaacccgcagaaguuuaccagcucugccaauggggucccuacacacuacguuucccaaaucggagacuuccccgauccuaccgaagacggcggccugccccagagcgggcggauuggaguggauuauaugaugcagaagcccggcaaaacggggacaaucguguaccagcgcggaguccuucugccucaaaagguguggugcgcuucuggcagauccaaaguuaucaaggggagccucccgcugauuggagaggccgacugucugcaugaaaaauacggcggccucaacaaguccaaacccuauuacaccggggagcacgcgaaggccaucggaaacugcccuauuugggugaagacaccccugaaacuugcuaauggcaccaaguaucggccucccgccaaacugcucaaggagcgcggguuuuucggagcuaucucuggcuuucuggaagggggcugggagggaaugauugccggcuggcacggguacaccagccauggagcccacggcgucgcuguggcggccgaccuuaaauccacacaggaagcuaucaacaagaucacgaagaaucugaacagccucucugagcuggaaguuaaaaaucugcagagacucuccggggccauggaugagcugcauaacgagauucuugaacuggacgagaagguggaugaccuccgggccgauaccaucagcucucagauugaacuggcuguccuucugagcaaugagggaaucauuaacuccgaagacgagcaccuccuggcccuggagcgcaaacucaagaaaaugcugggcccgucugcgguggaaaucgggaauggcuguuucgagacaaagcacaagugcaaccaaaccugcagcgauagaaucgcugccggaacauuugacgccggcgaguucucccuuccuaccuuugauagccugaauauuacggcugccucucucaacgacgaugggcuggacaaucauaccauccugcuuuauuacuccacagcugccagcucucucgcggucacccugaugauugccaucuucgugguuuauauggugucccgggacaacgucagcuguuccauuugccuguga

SEQ ID NO: 218674 - RNA, 1758 nt, Artificial Sequence
  derived and/or modified CDS sequence (opt5) from hemagglutinin__InfluenzaB__AEG21024
augaaggccaucauugugcugcucauggucguuaccagcaacgcugacagaaucugcacaggcauuacguccucuagcagcccccacguggugaaaaccgccacacagggggaggucaaugugaccggaguuaucccucugacaaccacaccgaccaagucuuacuucgcgaaccuuaaaggcacggaaacccgggggaagcugugucccgauugcccuaauuguacagaccucgauguggcucugggacgccccaacugcuggggcaauauuccuagcgccagagucuccauccuucaugaggugcggcccguuaccucuggguguuuuccuaucaugcacgaccgcacaaaaauuagacaacugccgaaccuccugcggggauaugaacauauccgccugagcacccacaaugugauuaacgccgagaaugcucccggcggcccuuacaagaucgggacguccggaagcugccccaacgucacaaauggcaacggguucuuugccaccauggcuugggccgugccuaaggaugacaaaaauaacgcggccacacaucuccugaccauugaagugcccuucuuuuguaccggaggcgagcaccacaucgcugucuggggguucccgucugauaaugacacacuuauggccaagcuguuuggagauuccaacccucagauguucuccucuuccgcuaacggcacgaccacacauuauguuagccagauuggcggguuucccaaucagaccgaggacggaggccucccucaaucugggagaaucgugguggauuacaugguccagaaauccggaaagacaggcaccaucgccuaucagcgcggggugcugcuuccccagaaaguuuggugcgcgagcggacgguccaaggugauuaagggcucucugccccucaucggcgaagccgacugucugcacgagaaauacgggggacugaacaagagcaaaccuuauuacacgggcgaacaugcuaaggccauugggaauugcccgaucugggucaaaacaccccucaagcuggcuaacggaaccaaauacagaccucccgccaagcugcuuaaggagcggggcuucuuuggggccauugcuggcuuccucgagggaggcugggaagggaugaucgcgggauggcacggcuauaccucccacggggcccauggaguggcuguugccgccgaucugaaaagcacacaagaggcuaucaauaagauuaccaaaaaccuuaauucucuguccgaacucgaggugaagaaccugcagcgccugagcggcgccauggacgaacuccacaaugagauccuggagcuugacgaaaaagucgaugaccugagagcggauacaauuucuagccagaucgagcucgcugugcugcuuuccaacgaagggauuaucaauucugaggacgaacaucugcucgcccuggagcggaagcugaagaaaaugcucggcccuagcgccgucgagaucggaaacggcuguuuugaaacgaagcacaaaugcaaucagaccugccuggaucgcauugcugccgggacauucgacgcuggagaguucucccuucccaccuuugauagccugaacaucacagccgcgucucucaaugacgauggccuggacaaccauaccauucugcuuuacuauuccacggccgcuagcucucucgccgugacccugaugaucgcuauuuucguuguguacauggucuccagagauaacgugagcuguuccaucugccuguga

SEQ ID NO: 218675 - RNA, 1755 nt, Artificial Sequence
  derived and/or modified CDS sequence (opt5) from hemagglutinin__InfluenzaB__AEG21025
augaaggccaucauugugcugcucauggucguuaccagcaacgcugacagaaucugcacaggcauuacguccucuaauagcccccacguggugaaaaccgccacacugggggaagucaacgaaaccggagugaucccucuuacaaccacaccgaccaaguccuacuucgcgaaucugaaaggcacgcggacccgcgggaagcucugucccgauugccugaacuguacagaccuugauguugcucugggaagaccuaugugcgugggcaccacacccucugccaaagccagcauucuccaugagguccggccugugaccuccggguguuuucccaucaugcacgaccgcacgaagaucagacagcugccuaaucugcuccggggauaugaaaacauucgccugucuacacaaaauguuaucgaugcugagaaggccccgggcggccccuacagacuugggaccagcggauccugcccuaacgcuacaagcaaaauuggcuucuuugccaccauggcgugggccgugcccaaggacaauuauaaaaacgcuaccaauccucugacagucgaagugcccuacaucuguacggagggggaggaucagauuaccguguggggauuccauucugacaucaagacacagaugaaaaaccucuauggcgauuccaauccgcagaaguuuaccagcucugccaacggggucccuacacacuacguuucccaaauuggagacuuccccgauccuaccgaagacggcggccugccccagagcgggcggaucggaguggauuauaugaugcagaagcccggcaaaacggggacaaucguguaccagcgcggaguccuucugccucaaaagguguggugcgcuucuggcagauccaaaguuauuaaggggagccucccgcugaucggagaggccgacugucugcaugaaaaauacggcggccucaauaaguccaaacccuauuacaccggggagcacgcgaaggccauuggaaacugcccuaucugggugaagacaccccugaaacuugcuaacggcaccaaguaucggccucccgccaaacugcucaaggagcgcggguuuuucggagcuauuucuggcuuucuggaagggggcugggagggaaugaucgccggcuggcacggguacaccagccauggagcccacggcgucgcuguggcggccgaccuuaaauccacacaggaagcuaucaauaagauuacgaagaaccugaauagccucucugagcuggaaguuaaaaaccugcagagacucuccggggccauggaugagcugcauaaugagauccuugaacuggacgagaagguggaugaccuccgggccgauaccauuagcucucagaucgaacuggcuguccuucugagcaacgagggaauuaucaauuccgaagacgagcaccuccuggcccuggagcgcaaacucaagaaaaugcugggcccgucugcgguggaaaucgggaacggcuguuucgagacaaagcacaagugcaaucaaaccugcagcgauagaauugcugccggaacauuugacgccggcgaguucucccuuccuaccuuugauagccugaacaucacggcugccucucucaaugacgaugggcuggacaaccauaccauucugcuuuauuacuccacagcugccagcucucucgcggucacccugaugaucgccauuuucgugguuuauauggugucccgggacaaugucagcuguuccaucugccuguga

SEQ ID NO: 218676 - RNA, 1758 nt, Artificial Sequence
  derived and/or modified CDS sequence (opt5) from hemagglutinin__InfluenzaB__AEG21026
augaaggccaugauggugcugcucauggucguuaccagcaacgcugacagaaucugcacaggcauuacguccucuaauagcccccacguggugaaaaccgccacacagggggaggucaacgugaccggaguuaucccucugacaauuaccccgacaaagucccauuucgcgaaucuuaaagugaaggaaacccggggcaaacugugucccaagugcccuaacuguacggaucucgacgucgcucuggggcgccccaagugcaccggaaaaaucccuucugccagagugagcauucuucacgaggauacacccguuaccuccggcuguaucccuaucaugcaugaccggacaaagauucgccaacugccgaaucuccugagaggguacgaacacauccggcugucuacccauaacgugauuaaugccgagagcgcucccggaggcccuuauaaaaucggcacguccgggagcugccccaacgucacaaauggaauuggcuuuuucgccaccauggcuugggccgugccuaagaacgauaaaaauaagacagcgaccaacccccucaccaucgaagugccguacauuuguacagagggggaggaccagaucacggucuggggauuucacuucgauaaugaaacccagauggccaagcuguauggcgacucuaaaccucagguuuuuacauccagcgcuaacggggugaaugccgauuucgugucucaaauccgcggauuucccaaccagaccgaggacggcggccuuccucaguccgggagaauugucguggauuacaugguucaaaagagcggaaaaacaggcaccaucacguaucagcgggggauucugcucccccagaagguguggugcgcuucuggacgcuccaaagucaucaaggaaagccugccccuuauuggcgaggccuacuuccagcaggaggaauaugggggacugaacaaauccaagucuuacuacacagaggaacacgcgaaggccaucggcaucuguccuauuugggugaaaaccccgcucaagcuggcuaauaaaaccaaguauagacccccugcccaucugagcuacuuuugcggcuucuuuggggcuaucgccggauuccucgagggcgggugggaaggaaugauugccggcuggaacggguauacaucccacggcgcucauggaguugcgguggucgccgaccugaaaagcacccaagaggcuaucaauaagauuacaaagaaccuuaauucucuguccgagcucgaaguggagacgcugcagcggcuuagcggcgccauggaugaacugcacaacgagauccucgaacuggacgagaaagucgacgaucaccgcgccgacaccaucucuagccagauugagcugcccgaucaacucuccaaugacgggucuaucaacagcgaagaugagcaucugcuugcucuggaaagaaagcucaaaaagaugcugggaccuuccaauggcgacaaagggagcggaggcauugagacaaagcacaaguguaaccagaccugccuugaucggaucgccgcggggacauuugacgcuggcggauucucucaucccaccuucgauuccaaaaaugugacggccgccagccugaacgacgauggccucgacucugggaccauucugcuguacuauuccacagacguuagcaaucucgcugugaccgucaugaugggaaucuuugugaaguacaugguuucccgcgauaacgugucuugcagcauuugucuguga

SEQ ID NO: 218677 - RNA, 1758 nt, Artificial Sequence
  derived and/or modified CDS sequence (opt5) from hemagglutinin__InfluenzaB__AEG21027
augaaggccaucauugugcugcucauggucguuaccagcaacgcugacagaaucugcacaggcauuacguccucuaauagcccccacguggugaaaaccgccacacagggggaagucaacgugaccggaguuaucccucugacaauuaccccgacaaagucccauuucgcgaaucuuaaaggcaccgaaacgcgggggaagcugugucccaaaugcccuaacuguaccgaucucgacguggcucugggacgccccaagugcacaggcaagaucccuucugccagagucagcauccuucacgaggugcggcccguuaccuccggguguuuuccuauuaugcaugaucgcacaaaaaucagacaacugccgaaucuccugcggggauacgaacacauucgccugucuacccauaacgugaucaaugccgagaacgcucccggcggcccuuauaagauugggacgagcggauccugccccaaugucacaaacggcaucggguucuuugccaccauggcuugggccgugccuaaaaaugacaagaacaaaacagcgaccaauccccucaccauugaagugccguacaucuguacagagggagaggaucagaucacggucuggggcuuccacuuugacaacgaaacccagauggccaagcuguauggggauagcaagccucagaaauucacaucuuccgcuaauggaguuaacgccgacuuugugagccaaauuggcggcuuccccaaccagaccgaggaugggggacuuccucagucuggcagaaucguggucgacuacauggugcagaaguccgggaaaacaggaaccauuacguaucaacggggcauccugcucccccagaagguuuggugcgcuagcgggcgcucuaaagugauuaaggaaucccugccccuuaucggagaggccuacuuucagcaggaggaauauggcggccugaauaaaagcaaguccuacuacacaggggagcacgcgaaggccaucggaaacuguccuauuugggucaaaaccccgcucaagcuggcuaauggcaccaaauauagacccccugcccaucugucuuacuucugcggguuuuucggagcuaucgccggcuuucucgaagggggcugggagggaaugauugccggcuggaacggguauacaagccacggagcucauggcguggcgguuguggccgaucugaaguccacccaagaagcuaucaauaaaauuacaaagaaccuuaauagccugucugagcucgaggucgaaacgcugcagcggcuuuccggggccauggacgagcugcacaacgaaauccucgagaucgaugaaaagguggacgaccaccgcgccgauaccauuagcucucagaucgagcuggcuguccugcucagcaaugagggaauuaucaacuccgaagacgagcaucugcuugcccuggaaagaaaacucaagaaaaugcugggccccucuaauggggauaagggcagcggaggcauugagacaaaacacaaguguaaccaaaccugccuugaccggaucgcggcugggacauucgaugccggagaguucucccugccuaccuuugacagccucaauauuacggccgcuucucugaacgaugacggccuggauuccgggaccauccuccuguacuauagcacagacgugucuaaucuugccguuaccgugaugaugggaaucuucgucaaguacauggugucccgcgauaacguuagcugcuccauuugucuguga

SEQ ID NO: 218678 - RNA, 1758 nt, Artificial Sequence
  derived and/or modified CDS sequence (opt5) from hemagglutinin__InfluenzaB__AEG21028
augaaggccaucauugugcugcucauggucguuaccagcaacgcugacagaaucugcacaggcauuacggccucccagucucccaauaucgauaaaagcuccacccaaggggaggugaacgugucuugugucauuccucugacaaccacaccgaccaagagccacuucgcgaaucuuaaagugaaggaaacacggggaaaacugugccccaaguguccuaacugcaccgaccucgauguuucccugggccgccccaaguguacggggaaaaucccuucugcuagagugagcauccuucaugagguccggcccguggccuccggaggcuuuccuauuaugcacgaccgcaccaagaucagacagcugccgaaucuccugcggggguacgaacauauucgccugagcacacacaacguuaucaaugccgagaacgcucccggaggcccuuauaaaauuggcaccucuggguccugccccaaugugacaaacggaaucggcuucuuugccaccauggcuugggccgucccuaagaaugauaaaaacaagacggcgacaaauccccucaccauugaagugccguacaucuguacagagggggaggaccagaucaccguguggggauuccauagcgauaacgaaacccagauggccaagcuguauggcgacucuaaaccucaaaaguuuacauccagcgcuaauggggucacgacccacuacgccgcuaaaagacccugcuucccuaaccagacagaggauggaggccuuccccagucuggccggauuguuguggacuauauggugcagaaguccgggaaaaccggaacaaucaccuaccaacgcggcauucugcucccccagaaggucuggugugccagcgggagauccaaagugaucaagggaucucugccucuuauuggcgaagcggauugccugcacgagaaguaugggggacucaacaaaagcaaguccuacuacacgggcgagcaugccaaagcuaucggcaauuguccgaucuggguuaagacaccccugaaacuggccagccggaccaugucuaagaccccugcucaccucuccuauuuuugcggguucuuuggagccauugccggcuuccuggaagggggaugggagggcaugaucgcuggguggaacggcuacacaagccauggagcgcacggcguggccgucguggcugaccuuaagucuacccaggaagccauuaauaaaaucacaaagaaccugaauagccucuccgagcuggaaguuaaaaaccuucagcgccugucuggggccauggaugagcuccacaaugagauucuggaacuggacgagaagguggacgaucucagagcugacacgaucagcucccaaaucgaacuggccguccuucugagcaacgagggaauuaucaauucugaagaugagcaucuccuggcgcuugagcggaaacugaagaagaugcucggccccuccgcuguggaaauugggaacggaugcuuugagaccaaacacaaguguaaucagacaugccuggaccgcaucgccgccggcaccuucgaugcuggggaauuuagccugccuacauucgacucucucaacauuaccgccgcuucccugaaugaugacggccuugauaaccauacgauccugcucuauuacagcaccgccgcguccucucuggccgucacacugaugauugcuaucuucgugguuuauauggugagcagagacaaugucuccuguucuaucugccuuuga

SEQ ID NO: 218679 - RNA, 1758 nt, Artificial Sequence
  derived and/or modified CDS sequence (opt5) from hemagglutinin__InfluenzaB__AEG21029
augaaggccaucauugugcugcucauggucguuaccagcaacgcugacagaaucugcacaggcauuacguccucuaauagcccccacguggugaaaaccgccacacagggggaggucaacgugaccggaguuaucccucugacaaccacaccgaccaagucccauuucgcgaaucuuaaaggcacggaaacccgggggaagcugugucccaaaugcccuaacuguacagaucucgacguggcucugggacgccccaagugcaccggcaagauuccuucugccagagucagcauccuucacgaggugcggcccguuacauccggguguuuuccuaucaugcaugaucgcaccaaaauuagacaacugccgaaucuccugcggggauacgaacacauccgccugucuacgcauaacgugauuaaugccgagaacgcucccggcggcccuuauaagaucgggacaagcggauccugccccaaugucaccaacggcauuggguucuuugccacaauggcuugggccgugccuaaaaaugacaagaacaaaaccgcgaccaauccccucacaaucgaagugccguacauuuguacggagggagaggaucagaucaccgucuggggcuuccacagcgacucugaaacacagauggccaagcuguauggggauuccaagccucagaaauuuaccagcucugcuaacggaguuacaacccacuacgugucccaaaucggcggcuuccccaaucagacggaggacgggggacuuccucagagcggcagaauuguggucgauuauauggugcagaagucugggaaaacaggaaccaucaccuaccaacggggcauucugcucccccagaagguuuggugcgccuccgggcgcagcaaagugaucaagggaucccugccccuuauuggcgaagcugacugucugcaugagaaauauggcgggcucaacaagucuaagccuuacuacacaggagagcacgccaaagcgaucggcaacugcccgaucugggucaagacaccccugaaacuggccaaugggaccaaguauagaccucccgcuaaacuccugaaggaacggggauuuuucggcgccauugcuggguuucuugagggcggaugggaaggcaugaucgccggguggcauggauacacgagccacggcgcccacgggguggcuguugcggccgaucugaaguccacccaggaggcuauuaacaaaaucacaaagaaucucaacagccugucugaacuugaggugaaaaaucugcagcgccucuccggagccauggacgagcugcauaacgaaauucuggagcucgaugaaaaggucgacgaccugagagccgauaccaucagcucucaaaucgagcuugcugugcugcucagcaaugaaggcauuaucaacuccgaggacgagcaucugcuugcccuggaacggaaacucaagaagaugcuggggccuucugcggucgagauuggcaauggauguuucgaaacaaaacacaagugcaaccagaccugccuggaucgcaucgcugccggcacguuugacgccggggaguucagccuccccaccuuugauucccugaauauuacagcugccagccuuaacgacgauggacuggacaaucacaccauccuccuguauuacucuacagcugccuccagccuggcggugacccuuaugauugccaucuucguuguguauauggucucuagagauaacguguccuguagcaucugccucuga

SEQ ID NO: 218680 - RNA, 1758 nt, Artificial Sequence
  derived and/or modified CDS sequence (opt5) from hemagglutinin__InfluenzaB__AEO80052
augaaggccaucauugugcugcucauggucguuaccagcaacgcugacagaaucugcacaggcauuacguccucuaauagcccccacguggugaaaaccgccacacagggggaggucaacgugaccggaguuaucccucugacaaccacaccgaccaagucccauuucgcgaaucuuaaaggcacggaaacccgggggaagcugugucccaaaugcccuaacuguacagaucucgacguggcucugggacgccccaagugcaccggcaagauuccuucugccagagucagcauccuucacgaggugcggcccguuacauccggguguuuuccuaucaugcaugaucgcaccaaaauuagacaacugccgaaucuccugcggggauacgaacacauccgccugucuacgcauaacgugauuaaugccgagaacgcucccggcggcccuuauaagaucgggacaagcggauccugccccaaugucaccaacggcaauggguucuuugccacaauggcuugggccgugccuaaaaacgacaagaauaaaaccgcgaccaacccccucacaauugaagugccguacaucuguacggagggagaggaucagauuaccgucuggggcuuccacagcgacaaugaaacacagauggccaagcuguauggggauucuaagccucagaaauuuaccuccagcgcuaacggaguuacaacccacuacgugucucaaaucggcggcuuccccaaccagacggaggacgggggacuuccucaguccggcagaaucguggucgauuauauggugcaaaagagcgggaaaacaggaaccauuaccuaccagcggggcauccugcucccccagaagguuuggugcgccucugggcgcuccaaagugauuaagggaagccugccccuuaucggcgaagcugacugucugcaugagaaauauggcgggcucaauaaguccaagccuuacuacacaggagagcacgccaaagcgauuggcaacugcccgaucugggucaagacaccccugaaacuggccaaugggaccaaguauagaccucccgcuaaacuccugaaggaacggggauuuuucggcgccaucgcuggguuucuugagggcggaugggaaggcaugauugccggguggcauggauacacgucucacggcgcccacgggguggcuguugcggccgaucucaagagcacccaggaggcuaucaacaaaauuacaaagaaucugaacucccugagcgaacuugaggugaaaaaucugcagcgccucucuggagccauggacgagcugcauaacgaaauccuggagcucgaugaaaaggucgacgaccugagagccgauaccauuuccagccaaaucgagcuugcugugcugcucucuaaugaaggcaucauuaacagcgaggacgagcaucugcuugcccuggaacggaaacucaagaagaugcuggggccuuccgcggucgagaucggcaauggauguuucgaaacaaaacacaagugcaaccagaccugccuggaucgcauugcugccggcacguuugacgccggggaguucucucuccccaccuuugauagccugaauaucacagcugccucccuuaacgacgauggacuggacaaucacaccauucuccuguauuacagcacagcugccucuucccuggcggugacccuuaugaucgccauuuucguuguguauauggucagcagagauaacgugucuuguuccaucugccucuga

SEQ ID NO: 218681 - RNA, 1758 nt, Artificial Sequence; identical to SEQ ID NO: 218586
  derived and/or modified CDS sequence (opt5) from hemagglutinin__InfluenzaB__AEO80067

SEQ ID NO: 218682 - RNA, 1755 nt, Artificial Sequence
  derived and/or modified CDS sequence (opt5) from hemagglutinin__InfluenzaB__AEO80078
augaaggagaucauugugcugcucauggucguuaccagcaacgccgacagaaucugcacaggcauuacguccucuaauagcccccacguggugaaaaccgcuacacagggggaagucaacgugaccggaguuaucccucugacaaccacaccgaccaaguccuacuucgccaaucuuaaaggcacgcggacccgcgggaagcugugucccgauugccucaacuguacagaccuggauguggcgcuuggaagaccuaugugcgucggcaccacacccucugcuaaagccagcauucugcaugaggugcggccuguuaccuccggguguuuucccaucaugcacgaccgcacgaagaucagacaacucgccaaucugcugcggggauaugaaaacauucgccucucuacacagaaugugaucgaugcugagaaggccccuggcggcccguacagacuggggaccagcggauccugccccaacgcuacaagcaaaucuggcuucuuugccaccauggcgugggccgucccuaaggacaauaacaaaaaugcuaccaacccccuuacaguggaagugccuuauauuuguacggagggggaggaucagaucaccgucuggggauuccauuccgacaauaagacacagaugaaaaaccuguacggcgauagcaauccccaaaaguuuaccucuuccgccaacgggguuacaacccacuaugugagccagauuggaggcuucccggaccagacggaagauggcgggcucccucagucuggacggaucguggucgacuacaugaugcaaaagcccggcaaaacagggaccauuguguaucagcgcggaguucugcuuccucagaagguguggugcgcuuccggcagaagcaaagucaucaaggggucccugccccucaucggagaggccgauugucugcaugaaaaauacggcggccugaacaagucuaaacccuacuauaccggggagcacgcgaaggccauuggaaauugcccuaucugggugaagacaccgcucaaacuggcuaacggcaccaaguaccggcccccugccaaacuucugaaggagcgcggguuuuucggagcuauugccggcuuucucgaagggggcugggagggaaugaucgccggcuggcacggguauacaagccauggagcucacggcguugcgguggccgcugaccugaaauccacgcaggaagccauuaauaagaucaccaagaaccuuaauagccugucugagcucgaagucaaaaaccugcaaagacuguccggggccauggacgagcuccauaaugagauccuggaacuugaugagaagguggacgaucugcgggcugacacaauuagcucucagaucgaacucgccguccugcuuagcaacgagggaauuaucaauuccgaagaugagcaucugcucgcgcuggagcgcaaacugaagaaaaugcucggccccucugcuguggacauugggaacggcuguuucgaaaccaagcacaagugcaaucagacaugccuggauagaaucgccgccggaaccuuuaacgcuggcgaguucagccuuccuacguuugacucccugaauaucaccgccgcuagccucaacgaugacgggcuggauaaucacacaauucugcuuuacuauucuaccgccgcguccagccucgccguuacacugaugcuggcuaucuucauuguguacauggucucucgggacaacguguccuguagcaucugccucuga

SEQ ID NO: 218683 - RNA, 1758 nt, Artificial Sequence
  derived and/or modified CDS sequence (opt5) from hemagglutinin__InfluenzaB__AEO80086
augaaggccaucauugugcugcucauggucguuaccagcaacgcugacagaaucugcacaggcauuacguccucuaauagcccccacguggugaaaaccgccacacagggggaagucaacgugaccggaguuaucccucugacaaccacaccgaccaagucccauuucgcgaaucuuaaaggcacgaagacccgggggaaacugugucccaagugccucaacuguacagaucuggacguggcucuuggacgcccuaagugcaccggcaauauucccucugccaaagucagcauccugcacgaagugagaccuguuacauccggguguuuucccaucaugcaugaucggaccaagauucgccaacucccuaaccugcugagaggauacgagcacauccggcucucuacgcauaaugugauuaacgccgaaaaagcuccgggcggccccuauaagaucgggacaagcggauccugcccuaaugucaccaacggcaauggguucuuugccacaauggcuugggccgugcccaaaaacgacaauaacaagaccgcgaccaauagccugacaauugaggugccuuacaucuguacggaaggagaggaucagauuaccaucuggggcuuccacucugacaacgagacacagauggccaaacuuuauggggauuccaaaccccagaaguuuaccagcucugcuaacggagucacaacccacuacguuucccaaaucggcggcuucccgaaucagacggaagacgggggacugccucagagcggccgcauugugguggauuauaugguccagaaaucugggaagacaggaaccaucaccuaccaaagaggcauucuccugccccagaaaguguggugcgccuccgggcggagcaagguuaucaaaggaucccuuccucugauuggcgaggcugacugucuccaugaaaaguauggcgggcugaacaagucuaaacccuacuacacaggagagcacgccaaggcgaucggcaauugccccaucugggugaaaaccccucugaagcucgccaacgggacaaaauaucgcccgcccgcuaagcugcuuaaggagagaggauuuuucggcgccauugcuggguuucuggaaggcggaugggagggcaugaucgccggguggcauggauacacgagccacggcgcccacggggucgcuguggcggccgaucucaaauccacccaggaagcuauuaauaagaucacaaagaaccugaauagccuuucugagcuggaaguuaagaaccuccagcggcuguccggagccauggacgagcugcauaaugagauucucgaacuggaugagaaaguggacgaccuucgcgccgauaccaucagcucucaaaucgaacuggcuguccuccugagcaacgagggcauuaucaauuccgaagacgagcaccuucuggcccucgagagaaagcugaagaaaaugcuggggccuucugcgguggaaauuggcaacggauguuucgagacaaagcauaaaugcaaucagaccugccucgaucggaucgcugccggcacguuugacgccggggaguucagccugcccaccuuugauucccuuaacauuacagcugccagccugaaugacgauggacucgacaaccacaccauccugcuguauuacucuacagcugccuccagccuugcggucacccucaugauugccaucuucgugguuuauauggugucucgcgauaacgucuccuguagcaucugccuguga

SEQ ID NO: 218684 - RNA, 1755 nt, Artificial Sequence
  derived and/or modified CDS sequence (opt5) from hemagglutinin__InfluenzaB__AEO80097
augaaggccaucauugugcugcucauggucguuaccagcaacgcugacagaaucugcacaggcauuacguccucuaauagcccccacguggugaaaaccgccacacagggggaggucaacgugaccggaguuaucccucugacaaccacaccgaccaagucccauuucgcgaaucuuaaaggcacgcggacccgcgggaagcugugucccgauugccucaacuguacagaccuggauguggcucuuggaagaccuaugugcgucggcaccacacccucugccaaagccagcauucugcacgaagugcggccuguuaccuccggguguuuucccaucaugcaugaccgcacgaagaucagacaacucgcuaaucugcugcggggauacgagaacauucgccucucuacacagaaugugaucgaugccgaaaaggcuccuggcggcccguauagacuggggaccagcggauccugccccaacgccacaagcaaaucuggcuucuuugcgaccauggccugggcugucccuaaggacaauaacaaaaaugccaccaacccccuuacaguggaggugccuuacauuuguacggaaggggaggaucagaucaccgucuggggauuccacuccgacaauaagacacagaugaaaaaccuguauggcgauagcaauccccaaaaguuuaccucuuccgcuaacgggguuacaacccauuacgugagccagauuggaggcuucccggaccagacggaggauggcgggcucccucagucuggacggaucguggucgacuauaugaugcaaaagcccggcaaaacagggaccauuguguaccagcgcggaguucugcuuccucagaagguguggugcgccuccggcagaagcaaagucaucaaggggucccugccccucaucggagaagcggauugucugcacgagaaauauggcggccugaacaagucuaaacccuacuacaccggggaacacgccaaggcuauuggaaauugcccuaucugggugaagacaccgcucaaacuggccaacggcaccaaguaucggcccccugcuaaacuucugaaggagcgcggguuuuucggagccauugccggcuuucucgaagggggcugggaaggaaugaucgcuggcuggcauggguacacaagccacggagcgcauggcguugccguggcugccgaccugaaauccacgcaggaggccauuaauaagaucaccaagaaccuuaauagccugucugaacucgaggucaaaaaccugcaaagacuguccggggcuauggacgaacuccacaaugagauccuggagcuugaugaaaagguggacgaucugcgggccgacacaauuagcucucagaucgagcucgcgguccugcuuagcaacgaaggaauuaucaauuccgaggaugaacaucugcucgcucuggagcgcaaacugaagaaaaugcucggccccucugccguggacauugggaacggcuguuucgagaccaagcacaagugcaaucagacaugccuggauagaaucgccgcuggaaccuuuaacgccggcgaguucagccuuccuacguuugacucccugaauaucaccgcugccagccucaacgaugacgggcuggauaaucacacaauucugcuuuauuacucuaccgcggccuccagccucgcuguuacacugaugcuggccaucuucauuguguauauggucucucgggacaacguguccuguagcaucugccucuga

SEQ ID NO: 218685 - RNA, 1755 nt, Artificial Sequence; identical to SEQ ID NO: 218498
  derived and/or modified CDS sequence (opt5) from hemagglutinin__InfluenzaB__AEO80108

SEQ ID NO: 218686 - RNA, 1758 nt, Artificial Sequence; identical to SEQ ID NO: 218586
  derived and/or modified CDS sequence (opt5) from hemagglutinin__InfluenzaB__AEO80145

SEQ ID NO: 218687 - RNA, 1758 nt, Artificial Sequence; identical to SEQ ID NO: 218645
  derived and/or modified CDS sequence (opt5) from hemagglutinin__InfluenzaB__AEO80154

SEQ ID NO: 218688 - RNA, 1758 nt, Artificial Sequence
  derived and/or modified CDS sequence (opt5) from hemagglutinin__InfluenzaB__AEO80183
augaaggccaucauugugcugcucauggucguuaccagcaacgcugacagaaucugcacaggcauuacguccucuaauagcccccacguggugaaaaccgccacacagggggaggucaacgugaccggaguuaucccucugacaaccacaccgaccaagucccauuucgcgaaucuuaaaggcacggaaacccgggggaagcugugucccaaaugccucaacuguacagaucuggacguggcucuuggacgcccuaagugcaccggcaauauucccucugccagagucagcauccugcacgaggugcggccuguuacauccggguguuuucccaucaugcaugaucgcaccaagauuagacaacucccuaaccugcugcggggauacgaacacauccgccucucuacgcauaaugugauuaacgccgagaaugcuccgggcggccccuauaaaaucgggacaagcggauccugcccuaacgucaccaauggcaacggguucuuugccacaauggcuugggccgugcccaagaaugacaacaauaaaaccgcgaccaacagccugacaauugaagugccuuacaucuguacggagggagaggaucagauuaccgucuggggcuuccacucugacaucgaaacacagauggccaaacuuuauggggauuccaagccccagaaguuuaccagcucugcuaacggaguuacaacccacuacgugucccaaaucggcggcuucccgaaucagacggaggacgggggacugccucagagcggcagaauuguggucgauuauauggugcagaagucugggaaaacaggaaccaucaccuaccaacggggcauucuccugccccagaagguuuggugcgccuccgggcgcagcaaagugaucaagggaucccuuccucugauuggcgaagcugacugucuccaugagaaauauggcgggcugaacaagucuaaacccuacuacacaggagagcacgccaaggcgaucggcaauugccccaucugggucaagaccccucugaaacucgccaacgggacaaaguauagaccgcccgcuaaacugcuuaaggaacggggauuuuucggcgccauugcuggguuucuggagggcggaugggaaggcaugaucgccggguggcauggauacacgagccacggcgcccacgggguggcuguugcggccgaucucaaauccacccaggaggcuauuaauaagaucacaaagaaccugaauagccuuucugaacuggaggugaaaaaccuccagcgccuguccggagccauggacgagcugcauaaugaaauucucgagcuggaugaaaaggucgacgaccuuagagccgauaccaucagcucucaaaucgagcuggcugugcuccugagcaacgaaggcauuaucaauuccgaggacgagcaccuucuggcccucgaacggaaacugaagaaaaugcuggggccuucugcggucgagauuggcaacggauguuucgaaacaaagcauaagugcaaucagaccugccucgaucgcaucgcugccggcacguuugacgccggggaguucagccugcccaccuuugauucccuuaacauuacagcugccagccugaaugacgauggacucgacaaccacaccauccugcuguauuacucuacagcugccuccagccuugcggugacccucaugauugccaucuucguuguguauauggucucuagagauaacguguccuguagcaucugccuguga

SEQ ID NO: 218689 - RNA, 1758 nt, Artificial Sequence
  derived and/or modified CDS sequence (opt5) from hemagglutinin__InfluenzaB__AEO80194
augaaggccaucauugugcugcucauggucguuaccagcaacgcugacagaaucugcacaggcauuacguccucuaauagcccccacguggugaaaaccgccacacagggggaggucaacgugaccggaguuaucccucugacaaccacaccgaccaagucccauuucgcgaaucuuaaaggcacggaaacccgggggaagcugugucccaaaugccucaacuguacagaucuggacguggcucuuggacgcccuaagugcaccggcaauauucccucugccagagucagcauccugcacgaggugcggccuguuacauccggguguuuucccaucaugcaugaucgcaccaagauuagacaacucccuaaccugcugcggggauacgaacacauccgccucucuacgcauaaugugauuaacgccgagaaugcuccgggcggccccuauaaaaucgggacaagcggauccugcccuaacgucaccaauggcaacggguucuuugccacaauggcuugggccgugcccaagaaugacaacaauaaaaccgcgaccaacagccugacaauugaagugccuuacaucuguacggagggagaggaucagauuaccgucuggggcuuccacucugacaacgaagcccagauggcuaaacuuuauggggauuccaagccccagaaguuuacaagcucugccaauggaguuaccacacacuacgugucccaaaucggcggcuucccgaaccagaccgaggacgggggacugccucagagcggcagaaucguggucgauuauauggugcagaagucugggaaaacgggaacaauuaccuaccaacggggcauccuccugccccagaagguuuggugcgcucgcgggagauccaaagugauuaagggaagccuuccucugaucggcgaagccgacugucuccaugagaaauauggcgggcugaauaaguccaaacccuacuacaccggagagcacgcgaaggccauuggcaacugccccaucugggucaagacaccucugaaacucgcuaaugggaccaaguaucggccgcccgccaaacugcuuaaggaacgcggauuuuucggcgcuaucgccggguuucuggagggcggaugggaaggcaugauugccggguggcauggauacacaucucacggcgcucacgggguggcgguugccgcugaucucaaaagcacgcaggaggccaucaacaagauuaccaagaaucugaacucccuuagcgaacuggaggugaaaaaucuccagagacugucuggagccauggacgagcugcauaacgaaauccucgagcuggaugaaaaggucgacgaccuucgggcugauacaauuuccagccaaaucgagcuggccgugcuccugucuaaugaaggcaucauuaacagcgaggacgagcaccuucuggcgcucgaacgcaaacugaagaaaaugcuggggccuuccgcugucgagaucggcaauggauguuucgaaaccaagcauaagugcaaccagacaugccucgauagaauugccgccggcaccuuugacgcuggggaguucucucugcccacguuugauagccuuaauaucaccgccgcuucccugaacgacgauggacucgacaaccacacaauucugcuguauuacagcaccgccgcgucuucccuugccgugacacucaugaucgcuauuuucguuguguauaugaucagccgggauaaugucucuuguuccaucugccuguga

SEQ ID NO: 218690 - RNA, 1758 nt, Artificial Sequence; identical to SEQ ID NO: 218637
  derived and/or modified CDS sequence (opt5) from hemagglutinin__InfluenzaB__AEO80205

SEQ ID NO: 218691 - RNA, 1758 nt, Artificial Sequence; identical to SEQ ID NO: 218637
  derived and/or modified CDS sequence (opt5) from hemagglutinin__InfluenzaB__AEO80216

SEQ ID NO: 218692 - RNA, 1755 nt, Artificial Sequence
  derived and/or modified CDS sequence (opt5) from hemagglutinin__InfluenzaB__AEO80227
augaaggccaucauugugcugcucauggucguuaccagcaacgcugacagaaucugcacaggcauuacguccucuaauagcccccacguggugaaaaccgccacacagggggaggucaacgugaccggaguuaucccucugacaaccacaccgaccaaguccuacuucgcgaaucuuaaaggcacgcggacccgcgggaagcugugucccgauugccucaacuguacagaccuggauguggcucuuggaagaccuaugugcgucggcaccacacccucugccaaagccagcauucugcaugaagugcggccuguuaccuccggguguuuucccaucaugcacgaccgcacgaagaucagacaacucgcuaaucugcugcggggauaugagaacauucgccucucuacacagaaugugaucgaugccgaaaaggcuccuggcggcccguacagacuggggaccagcggauccugccccaacgccacaagcaaaucuggcuucuuugcgaccauggccugggcugucccuaaggacaauaacaaaaaugccaccaacccccuuacaguggaggugccuuauauuuguacggaaggggaggaucagaucaccgucuggggauuccauuccgacaauaagauucagaugaaaaaccuguacggcgauagcaauccccaaaaguuuacaucuuccgcuaacgggguuaccacacacuaugugagccagaucggaggcuucccggaccagaccgaggauggcgggcucccucagucuggacggauuguggucgacuacaugaugcaaaagcccggcaaaacggggacaaucguguaucagcgcggaguucugcuuccucagaagguguggugcgccuccggcagaagcaaagucaucaaggggucccugccccucauuggagaagcggauugucugcaugagaaauacggcggccugaacaagucuaaacccuacuauaccggggaacacgccaaggcuaucggaaauugcccuauuugggugaagaccccgcucaaacuggccaacggcacaaaguaccggcccccugcuaaacuucugaaggagcgcggguuuuucggagccaucgccggcuuucucgaagggggcugggaaggaaugauugcuggcuggcacggguauaccagccauggagcgcacggcguugccguggcugccgaccugaaauccacacaggaggccaucaauaagaucacgaagaaccuuaauagccugucugaacucgaggucaaaaaccugcaaagacuguccggggcuauggacgaacuccauaaugagauucuggagcuugaugaaaagguggacgaucugcgggccgacaccaucagcucucagauugagcucgcgguccugcuuagcaacgaaggaaucauuaauuccgaggaugaacaucugcucgcucuggagcgcaaacugaagaaaaugcucggccccucugccguggacaucgggaacggcuguuucgagacaaagcacaagugcaaucagaccugccuggauagaaucgccgcuggaacauuuaacgccggcgaguucagccuuccuaccuuugacucccugaauauuacggcugccagccucaacgaugacgggcuggauaaucacaccauccugcuuuacuauucuacagcggccuccagccucgcuguuacccugaugcuggccauuuucaucguguacauggucucucgggacaacguguccuguagcauuugccucuga

SEQ ID NO: 218693 - RNA, 1758 nt, Artificial Sequence; identical to SEQ ID NO: 218654
  derived and/or modified CDS sequence (opt5) from hemagglutinin__InfluenzaB__AEO80238

SEQ ID NO: 218694 - RNA, 1758 nt, Artificial Sequence
  derived and/or modified CDS sequence (opt5) from hemagglutinin__InfluenzaB__AEP20178
augaaggccaucauugugcugcucauggucguuaccagcaacgcugacagaaucugcacaggcauuacguccucuaauagcccccacguggugaaaaccgccacacagggggaggucaacgugaccggaguuaucccucugacaaccacaccgaccaagucccauuucucuaaucuuaaaggcacggaaacccgggggaagcugugucccaaaugccucaacuguacagaucuggacguggcgcuuggacgcccuaagugcaccggcaauauucccagcgcuagagucuccauccugcacgaggugcggccuguuacaucuggguguuuucccaucaugcaugaucgcaccaagauuagacaacucccuaaccugcugcggggauacgaacacauccgccucagcacgcauaaugugauuaacgccgagaaugccccgggcggccccuauaaaaucgggacauccggaagcugcccuaacgucaccaauggcaacggguucuuugcuacaauggccugggcugugcccaagaaugacaacaauaaaaccgccaccaacucucugacaauugaagugccuuacaucuguacggagggagaggaucagauuaccgucuggggcuuccacuccgacaacgaaacacagauggcgaaacuuuauggggauagcaagccccagaaguuuaccucuuccgccaauggaguuacaacccacuacgugagccaaaucggcggcuucccgaaccagacggaggacgggggacugccucagucuggcagaaucguggucgauuauauggugcagaaguccgggaaaacaggaaccauuaccuaccaacggggcauccuccugccccagaagguuuggugcgcuagcgggcgcuccaaagugauuaagggaucucuuccucugaucggcgaagccgacugucuccaugagaaauauggcgggcugaauaagagcaaacccuacuacacaggagagcacgcuaaggccauuggcaacugccccaucugggucaagaccccucugaaacucgcgaaugggacaaaguauagaccgcccgccaaacugcuuaaggaacggggauuuuucggcgcuaucgccggguuucuggagggcggaugggaaggcaugauugcuggguggcauggauacacgucccacggcgcccacgggguggccguugcugcggaucucaaaagcacccaggaggccaucaacaagauuacaaagaaucugaacucucuuuccgaacuggaggugaaaaaucuccagcgccugagcggagcuauggacgagcugcauaacgaaauccucgagcuggaugaaaaggucgacgaccuuagagccgauaccauuucuagccaaaucgagcuggccgugcuccuguccaaugaaggcaucauuaacucugaggacgagcaccuucuggcucucgaacggaaacugaagaaaaugcuggggccuagcgccgucgagaucggcaauggauguuucgaaacaaagcauaagugcaaccagaccugccucgaucgcauugcggcuggcacguuugacgccggggaguucucccugcccaccuuugauagccuuaauaucacagccgcuucucugaacgacgauggacucgacaaccacaccauucugcuguauuacuccacagccgcuagcucucuugccgugacccucaugaucgcgauuuucguuguguauauggucuccagagauaaugugagcuguuccaucugccuguga

SEQ ID NO: 218695 - RNA, 1758 nt, Artificial Sequence
  derived and/or modified CDS sequence (opt5) from hemagglutinin__InfluenzaB__AEP20189
augaaggccaucauugugcugcucauggucguuaccagcaacgcugacagaaucugcacaggcauuacguccucuaauagcccccacguggugaaaaccgccacacagggggaggucaacgugaccggaguuaucccucugacaaccacaccgaccaagucccauuucgcgaaucuuaaaggcacggaaacccgggggaagcugugucccaaaugccucaacuguacagaucuggacguggcucuuggacgcccuaagugcaccggcaauauucccucugccagagucagcauccugcacgaggugcggccuguuacauccggguguuuucccaucaugcaugaucgcaccaagauuagacaacucccuaaccugcugcggggauacgaacacauccgccucucuacgcauaaugugauuaacgccgagaaugcuccgggcggccccuauaaaaucgggacaagcggauccugcccuaacgucaccaauggcaacggguucuuugccacaauggcuugggccgugcccaagaaugacaacaauaaaaccgcgaccaacagccugacaauugaagugccuuacaucuguacggagggagaggaucagauuaccgucuggggcuuccacucugacaacgaaacacagauggccaaacuuuauggggauuccaagccccagaaguuuaccagcucugcuaauggaguuacaacccacuacgugucccaaaucggcggcuucccgaaccagacggaggacgggggacugccucagagcggcagaaucguggucgauuauauggugcagaagucugggaaaacaggaaccauuaccuaccaacggggcauccuccugccccagaagguuuggugcgccuccgggcgcagcaaagugauuaagggaucccuuccucugaucggcgaagcugacugucuccaugagaaauauggcgggcugaauaagucuaaacccuacuacacaggagagcacgccaaggcgauuggcaacugccccaucugggucaagaccccucugaaacucgccaaugggacaaaguauagaccgcccgcuaaacugcuuaaggaacggggauuuuucggcgccaucgcuggguuucuggagggcggaugggaaggcaugauugccggguggcauggauacacgagccacggcgcccacgggguggcuguugcggccgaucucaaauccacccaggaggcuaucaacaagauuacaaagaaucugaacagccuuucugaacuggaggugaaaaaucuccagcgccuguccggagccauggacgagcugcauaacgaaauccucgagcuggaugaaaaggucgacgaccuuagagccgauaccauuagcucucaaaucgagcuggcugugcuccugagcaaugaaggcaucauuaacuccgaggacgagcaccuucuggcccucgaacggaaacugaagaaaaugcuggggccuucugcggucgagaucggcaauggauguuucgaaacaaagcauaagugcaaccagaccugccucgaucgcauugcugccggcacguuugacgccggggaguucagccugcccaccuuugauucccuuaauaucacagcugccagccugaacgacgauggacucgacaaccacaccgugcugcuguauuacucuacagcugccuccagccuugcgguuacccucaugauugccaucuucguggucuauauggugucuagagauaauguuuccuguagcauuugccuguga

SEQ ID NO: 218696 - RNA, 1758 nt, Artificial Sequence; identical to SEQ ID NO: 218586
  derived and/or modified CDS sequence (opt5) from hemagglutinin__InfluenzaB__AEP20200

SEQ ID NO: 218697 - RNA, 1755 nt, Artificial Sequence; identical to SEQ ID NO: 218477
  derived and/or modified CDS sequence (opt5) from hemagglutinin__InfluenzaB__AEP20211

SEQ ID NO: 218698 - RNA, 1755 nt, Artificial Sequence
  derived and/or modified CDS sequence (opt5) from hemagglutinin__InfluenzaB__AEP20222
augaaggccaucauugugcugcucauggucguuaccagcaacgcugacagaaucugcacaggcauuacguccucuaauagcccccacguggugaaaaccgccacacagggggaggucaacgugaccggagcgaucccucugacaaccacaccgaccaagucccauuucgcuaaucuuaaaggcacgaagacccgggggaaacugugucccacaugcuuuaacuguaccgaucucgacguugcccugggacgcccuaugugcgugggcauuacacccucugccaaggcuagcauccuucacgaagucagaccugugaccuccggguguuuccccaucaugcaugaucggacgaagauucgccaacugccuaaucuccugagaggauacgagaaaauccggcugucuacacagaacguuauugacgccgaaaaggcuccgggcggccccuaucgccucgggaccagcggauccugcccuaaugccacaagcaaaucuggcuuuuucgcgaccauggccugggcugugcccagagauaacaauaagaccgccacaaacccucugacggucgaggugcccaauaucuguaccaaagaagaggaccagauuacaguguggggguuucacuccgauaacaagacccagaugaagaaucuuuacggagacccgaacccucaaaaauucacaagcucugcuaauggcaucaccacgcauuaugucucccagauugggggauuucccgaucagacagaggacggcggccugccucagagcgggcggaucguuguggauuacauggugcaaaagcccggaaaaaccggcaccaucgucuaucagcgcgggauucuccugccccagaagguguggugcgccucuggaagauccaaaguuaucaagggcagccuuccucugauuggggaagcggacugucuccacgagaaauacggaggccugaacaaguccaagccguauuacacaggcgaacacgccaaagcuaucgggaacugccccauuugggugaagaccccucugaaacucgccaauggaacaaaguaccggcccccugcuaaacugcuuaaggagcgcggcuucuuuggggccaucgccggauuccuggagggcgggugggaaggcaugaucgcuggauggcauggcuauacgucucacggggcgcauggagucgccguggcugccgaucucaagagcacccaggaggccauuaacaaaaucacaaagaaucugaacucccuuagcgaacuggagguuaaaaaucuccaaagacugucuggcgcuauggacgaacugcacaacgagauucucgagcuggacgaaaagguggaugaccuucgggccgauaccaucuccagccagauugagcuggcgguccuccugucuaaugaagggaucaucaacagcgaggacgaacaccuucuggcucucgagcgcaaacugaagaagaugcugggacccuccgccguggauauuggcaauggguguuuugagacaaaacauaagugcaaccagaccugccucgacagaaucgccgcuggcacguucaaugccggagaauuuucucugccgaccuucgauagccuuaacauuacagcugccucccugaaugacgauggccucgacaaccacaccauccugcuguacuauagcacagcggccucuucccuugcugucacccucaugauugccaucuucauuguguacaugaucagccgggauaauguuucuuguuccaucugccuguga

SEQ ID NO: 218699 - RNA, 1755 nt, Artificial Sequence; identical to SEQ ID NO: 218583
  derived and/or modified CDS sequence (opt5) from hemagglutinin__InfluenzaB__AEP20233

SEQ ID NO: 218700 - RNA, 1755 nt, Artificial Sequence
  derived and/or modified CDS sequence (opt5) from hemagglutinin__InfluenzaB__AEP20244
augaaggccaucauugugcugcucauggucguuaccagcaacgcugacagaaucugcacaggcauuacguccucuaauagcccccacguggugaaaaccgccacacagggggaggucaacgugaccggagcgaucccucugacaaccacaccgaccaagucccauuucgcuaaucuuaaaggcacgaagacccgggggaaacugugucccacaugcuuuaacuguaccgaucucgacguugcccugggacgcccuaugugcaugggcauuacacccucugccaaggcuagcauccuucacgaagugagaccugucaccuccggguguuuccccaucaugcaugaucggacgaagauucgccaacugccuaaucuccugagaggauacgagaaaauccggcugucuacacagaacgugauugacgccgaaaaggcuccgggcggccccuaucgccucgggaccagcggauccugcccuaaugccacaagcaaaucuggcuuuuucgcgaccauggccugggcuguucccagagggaacaauaagaccgccacaaacccucugacgguggaggucccccacaucuguaccaaagaagaggaucagauuacaguguggggauuucauuccgacaauaagacccagaugaagaaccuuuacggcgauagcaauccgcaaaaauucacaucuuccgcuaacgggaucaccacgcacuaugugagccagauuggaggcuuuccugaccagacagaggauggcgggcugccccagucuggacggaucgucguugacuacauggugcaaaagccuggcaaaaccgggaccaucguguaucagcgcgggauucuccugccccagaaggucuggugcgccuccggcagaagcaaagugaucaaggggucccuuccccugauuggagaagcggauugucuccacgagaaauacggcggccugaauaagucuaagccuuauuacacaggggaacaugccaaagcuaucggaaacugcccgauuuggguuaagacaccccugaaacucgccaacggcaccaaguaccggccucccgcuaaacugcuuaaggagcgcggguucuuuggagccaucgccggcuuccuggagggaggcugggaaggaaugaucgcuggcuggcacggguauacgagccauggagcgcacggcguggccgucgcugccgaccucaaguccacccaggaggccauuaauaaaaucacaaagaaccugaauagccuuucugaacuggaggugaaaaaccuccaaagacuguccggggcuauggaugaacugcacaaugagauucucgagcuggacgaaaagguugacgaucuucgggccgacaccaucagcucucagauugagcuggcggugcuccugagcaacgaaggaaucaucaauuccgaggaugaacaucuucuggcucucgagcgcaaacugaagaagaugcugggcccuucugccgucgacauugggaacggcuguuuugagacaaaacacaagugcaaucagaccugccucgauagaaucgccgcuggaacguucaacgccggcgaauuuagccugcccaccuucgacucccuuaauauuacagcugccagccugaacgaugacgggcucgauaaucauaccauccugcuguacuauucuacagcggccuccagccuugcugugacccucaugauugccaucuucauugucuacaugaucucucgggacaacguguccuguagcaucugccuguga

SEQ ID NO: 218701 - RNA, 1758 nt, Artificial Sequence; identical to SEQ ID NO: 218491
  derived and/or modified CDS sequence (opt5) from hemagglutinin__InfluenzaB__AEP20255

SEQ ID NO: 218702 - RNA, 1758 nt, Artificial Sequence
  derived and/or modified CDS sequence (opt5) from hemagglutinin__InfluenzaB__AEP20277
augaaggccaucauugugcugcucauggucguuaccagcaacgcugacagaaucugcacaggcauuacguccucuaauagcccccacguggugaaaaccgccacacagggggaggucaacgugaccggaguuaucccucugacaaccacaccgaccaagucccauuucgcgaaucuuaaaggcacgaagacccgggggaaacugugucccaagugccucaacuguacagaucuggacguggcucuuggacgcccuaagugcaccggcaauauucccucugccgaagucagcauccugcacgaggugagaccuguuacauccggguguuuucccaucaugcaugaucggaccaaaauucgccaacucccuaaccugcugagaggauacgaacacauccggcucucuacgcauaaugugauuaacgccgagaaggcuccgggcggccccuauaaaaucgggacaagcggauccugcccuaaugucaccaacggcaauggguucuuugccacaauggcuugggccgugcccaagaacgacaauaacaaaaccgcgaccaauagccugacaauugaagugccuuacaucuguacggagggagaggaucagauuaccgucuggggcuuccacucugacaacgaaacacagauggccaaacuuuauggggauuccaagccccagaaguuuaccagcucugcuaacggaguuacaacccacuacgugucccaaaucggcggcuucccgaaucagacggaggacgggggacugccucagagcggccgcaucguggucgauuauauggugcagaagucugggaaaacaggaaccauuaccuaccaaagaggcauccuccugccccagaagguuuggugcgccuccgggcggagcaaagugauuaagggaucccuuccucugaucggcgaagcugacugucuccaugagaaauauggcgggcugaacaagucuaagcccuacuacacaggagagcacgccaaagcgauuggcaauugccccaucugggucaagaccccucugaaacucgccaacgggacaaaguaucgcccgcccgcuaaacugcuuaaggaaagaggauuuuucggcgccaucgcuggguuucuggagggcggaugggaaggcaugauugccggguggcauggauacacgagccacggcgcccacgggguggcuguugcggccgaucucaaguccacccaggaggcuaucaauaaaauuacaaagaaccugaauagccuuucugaacuggaggugaaaaaccuccagcggcuguccggagccauggacgagcugcauaaugaaauccucgagcuggaugaaaaggucgacgaccuucgcgccgauaccauuagcucucaaaucgagcuggcugugcuccugagcaacgaaggcaucauuaauuccgaggacgagcaccuucuggcccucgaaagaaaacugaagaagaugcuggggccuucugcggucgagaucggcaacggauguuucgaaacaaaacauaagugcaaucagaccugccucgauaaaauugcugccggcacguuugacgccggggaguucagccugcccaccuuugauucccuuaacaucacagcugccagccugaaugacgauggacucgacaaccacaccauucugcuguauuacucuacagcugccuccagccuugcggugacccucaugaucgccauuuucguuguguauauggucucucgggauaacguguccuguagcaucugccuguga

SEQ ID NO: 218703 - RNA, 1755 nt, Artificial Sequence
  derived and/or modified CDS sequence (opt5) from hemagglutinin__InfluenzaB__AEP20299
augaaggccaucauugugcugcucauggucguuaccagcaacgcugacagaaucugcacaggcauuacguccucuaauagcccccacguggugaaaaccgccacacagggggaggucaacgugaccggaguuaucccucugacaaccacaccgaccaaguccuacuucgcgaaucuuaaaggcacgcggacccgcgggaagcugugucccgauugccucaacuguacagaccuggauguggcucuuggaagaccuaugugcgucggcaccacacccucugccaaagccagcauucugcaugaagugcggccuguuaccuccggguguuuucccaucaugcacgaccgcacgaagaucagacaacucgcuaaucugcugcggggauaugagaacauucgccucucuacacagaaugugaucgaugccgaaaaggcuccuggcggcccguacagacuggggaccagcggauccugccccaacgccacaagcaaaucuggcuucuuugcgaccauggccugggcugucccuaagaauaacaauaaaaacgccaccaauccccuuacaguggaggugccuuauauuuguacggaaggggaggaccagaucaccgucuggggauuccauuccgauaacaagacacagaugaaaaaucuguacggcgacagcaacccccaaaaguuuaccucuuccgcuaacgggguuacaacccacuaugugagccagauuggaggcuucccggaucagacggaggacggcgggcucccucagucuggacggaucguggucgauuacaugaugcaaaagcccggcaaaacagggaccauuguguaucagcgcggaguucugcuuccucagaagguguggugcgccuccggcagaagcaaagucaucaaggggucccugccccucaucggagaagcggacugucugcaugagaaauacggcggccugaauaagucuaaacccuacuauaccggggaacacgccaaggcuauuggaaacugcccuaucugggugaagacaccgcucaaacuggccaauggcaccaaguaccggcccccugcuaaacuucugaaggagcgcggguuuuucggagccauugccggcuuucucgaagggggcugggaaggaaugaucgcuggcuggcacggguauacaagccauggagcgcacggcguugccguggcugccgaucugaaauccacgcaggaggccauuaacaagaucaccaagaaucuuaacagccugucugaacucgaggucaaaaaucugcaaagacuguccggggcuauggacgaacuccauaacgagauccuggagcuugacgaaaagguggaugaccugcgggccgauacaauuagcucucagaucgagcucgcgguccugcuuagcaaugaaggaauuaucaacuccgaggacgaacaucugcucgcucuggagcgcaaacugaagaaaaugcucggccccucugccguggauauugggaauggcuguuucgagaccaagcacaagugcaaccagacaugccuggacagaaucgccgcuggaaccuuuaaugccggcgaguucagccuuccuacguuugauucccugaacaucaccgcugccagccucaaugacgaugggcuggacaaccacacaauucugcuuuacuauucuaccgcggccuccagccucgcuguuacacugaugcuggccaucuucauuguguacauggucucucgggauaacguguccuguagcaucugccucuga

SEQ ID NO: 218704 - RNA, 1755 nt, Artificial Sequence
  derived and/or modified CDS sequence (opt5) from hemagglutinin__InfluenzaB__AEP20310
augaaggccaucauugugcugcucauggucguuaccagcaacgcugacagaaucugcacaggcauuacguccucuaauagcccccacguggugaaaaccgccacacagggggaggucaacgugaccggaguuaucccucugacaaccacaccgaccaaguccuacuucgcgaaucuuaaaggcacgcggacccgcgggaagcugugucccgauugccucaacuguacagaccuggauguggcucuuggaagaccuaugugcgucggcaccacacccucugccaaagccagcauucugcaugaagugcggccuguuaccuccggguguuuucccaucaugcacgaccgcacgaagaucagacaacucccuaaucugcugcggggauaugagaacauucgccucucuacacagaaugugaucgaugcugaaaaggccccgggcggccccuacagacuggggaccagcggauccugcccuaacgcuacaagcaaaucuggcuucuuugccaccauggcgugggccguccccaaggacaauaacaaaaaugcuaccaacccucuuacaguggaggugcccuauauuuguacggaaggggaggaucagaucaccgucuggggauuccauuccgacaauaagacacagaugaaaaaccuguacggcgauagcaauccgcaaaaguuuaccucuuccgccaacgggguuacagcucacuaugugagccagauuggaggcuucccugaccagaccgaggauggcgggcucccccagucuggacggaucguggucgacuacaugaugcaaaagccuggcaaaacggggacaauuguguaucagcgcggaguucugcuuccccagaagguguggugcgccuccggcagaagcaaagucaucaaggggucccugccccucaucggagaagcggauugucugcaugagaaauacggcggccugaacaagucuaaaccuuacuauaccggggaacacgccaaggcuauuggaaauugcccgaucugggugaagacaccccucaaacuggccaacggcaccaaguaccggccucccgcuaaacuucugaaggagcgcggguuuuucggagccauugccggcuuucucgaagggggcugggaaggaaugaucgcuggcuggcacggguauaccagccauggagcgcacggcguugccguggcugccgaccugaaauccacacaggaggccauuaauaagaucacgaagaaccuuaauagccugucugaacucgaggucaaaaaccugcaaagacuguccggggcuauggacgaacuccauaaugagauccuggagcuugaugaaaagguggacgaucugcgggccgacaccauuagcucucagaucgagcucgcgguccugcuuagcaacgaaggaauuaucaauuccgaggaugaacaucugcucgcucuggagcgcaaacugaagaaaaugcucggcccuucugccguggacauugggaacggcuguuucgagacaaagcacaagugcaaucagaccugccuggauagaaucgccgcuggaacauuuaacgccggcgaguucagccuucccaccuuugacucccugaauaucacggcugccagccucaacgaugacgggcuggauaaucacaccauucugcuuuacuauucuacagcggccuccagccucgcuguuacccugaugcuggccaucuucauuguguacauggucucucgggacaacguguccuguagcaucugccucuga

SEQ ID NO: 218705 - RNA, 1758 nt, Artificial Sequence
  derived and/or modified CDS sequence (opt5) from hemagglutinin__InfluenzaB__AEP20332
augaaggccaucauugugcugcucauggucguuaccagcaacgcugacagaaucugcacaggcauuacguccucuaauagcccccacguggugaaaaccgccacacagggggaggucaacgugaccggaguuaucccucugacaaccacaccgaccaagucccauuucgcgaaucuuaaaggcacgaagacccgggggaaacugugucccaagugccucaacuguacagaucuggacguggcucuuggacgcccuaagugcaccggcaauauucccucugccgaagucagcauccugcacgaggugagaccuguuacauccggguguuuucccaucaugcaugaucggaccaaaauucgccaacucccuaaccugcugagaggauacgaacacauccggcucucuacgcauaaugugauuaacgccgagaaggcuccgggcggccccuauaaaaucgggacaagcggauccugcccuaaugucaccaacggcaauggguucuuugccacaauggcuugggccgugcccaagaacgacaauaacaaaaccgcgaccaauccucugacaauugaagugcccuacaucuguacggagggagaggaucagauuaccgucuggggcuuccacagcgacaacgaaacacagauggccaagcuguauggggauucuaagccgcagaaauuuaccuccagcgcuaacggaguuacaacccacuacgugucucaaaucggcggcuucccuaaucagacggaggacgggggacugccccaguccggccgcaucguggucgauuauauggugcaaaagagcgggaaaacaggaaccauuaccuaccagagaggcauccuccugccucagaagguuuggugcgccucugggcgguccaaagugauuaagggaagccuuccccugaucggcgaagcugacugucuccaugagaaauauggcgggcugaacaaguccaagcccuacuacacaggagagcacgccaaagcgauuggcaauugcccuaucugggucaagaccccgcugaaacucgccaacgggacaaaguauagacccccugcuaaacugcuuaaggaacgcggauuuuucggcgccaucgcuggguuucuggagggcggaugggaaggcaugauugccggguggcauggauacacgucucacggcgcccacgggguggcuguugcggccgaucucaagagcacccaggaggcuaucaauaaaauuacaaagaaccuuaauucccuuagcgaacuggaggugaaaaaccuccagcggcugucuggagccauggacgagcugcauaaugaaauccucgagcuggaugaaaaggucgacgaccuucgcgccgauaccauuuccagccaaaucgagcuggcugugcuccugucuaacgaaggcaucauuaauagcgaggacgagcaccuucuggcccucgaaagaaaacugaagaagaugcuggggcccuccgcggucgagaucggcaacggauguuucgaaacaaaacauaagugcaaucagaccugccucgaucggauugcugccggcacguuugacgccggggaguucucucugccuaccuuugauagccuuaacaucacagcugccucccugaaugacgauggacucgacaaccacaccauucugcuguauuacagcacagcugccucuucccuugcggugacccucaugaucgccauuuucguuguguauauggucagccgcgauaacgugucuuguuccaucugccuguga

SEQ ID NO: 218706 - RNA, 1755 nt, Artificial Sequence; identical to SEQ ID NO: 218498
  derived and/or modified CDS sequence (opt5) from hemagglutinin__InfluenzaB__AEP20343

SEQ ID NO: 218707 - RNA, 1755 nt, Artificial Sequence; identical to SEQ ID NO: 218498
  derived and/or modified CDS sequence (opt5) from hemagglutinin__InfluenzaB__AEP20354

SEQ ID NO: 218708 - RNA, 1755 nt, Artificial Sequence; identical to SEQ ID NO: 218498
  derived and/or modified CDS sequence (opt5) from hemagglutinin__InfluenzaB__AEP20365

SEQ ID NO: 218709 - RNA, 1755 nt, Artificial Sequence; identical to SEQ ID NO: 218498
  derived and/or modified CDS sequence (opt5) from hemagglutinin__InfluenzaB__AEP20376

SEQ ID NO: 218710 - RNA, 1758 nt, Artificial Sequence
  derived and/or modified CDS sequence (opt5) from hemagglutinin__InfluenzaB__AEP20398
augaaggccaucauugugcugcucauggucguuaccagcaacgcugacagaaucugcacaggcauuacguccucuaauagcccccacguggugaaaaccgccacacagggggaggucaacgugaccggaguuaucccucugacaaccacaccgaccaagucccauuucgcgaaucuuaaaggcacgaagacccgggggaaacugugucccaagugccucaacuguacagaucuggacguggcucuuggacgcccuaagugcaccggcaauauucccucugccgaagucagcauccugcacgaggugagaccuguuacauccggguguuuucccaucaugcaugaucggaccaaaauucgccaacucccuaaccugcugagaggauacgaacacauccggcucucuacgcauaaugugauuaacgccgagaaggcuccgggcggccccuauaaaaucgggacaagcggauccugcccuaaugucaccaacggcaauggguucuuugccacaauggcuugggccgugcccaagaacgacaauaacaaaaccgcgaccaauagccugacaauugaagugccuuacaucuguacggagggagaggaucagauuaccaucuggggcuuccacucugacaacgaaacacagauggccaaacuuuauggggauuccaagccccagaaguuuaccagcucugcuaacggagucacaacccacuacguuucccaaaucggcggcuucccgaaucagacggaggacgggggacugccucagagcggccgcauugugguggauuauaugguccagaagucugggaaaacaggaaccaucaccuaccaaagaggcauucuccugccccagaagguguggugcgccuccgggcggagcaaaguuaucaagggaucccuuccucugauuggcgaagcugacugucuccaugagaaauauggcgggcugaacaagucuaagcccuacuacacaggagagcacgccaaagcgaucggcaauugccccaucugggugaagaccccucugaaacucgccaacgggacaaaguaucgcccgcccgcuaaacugcuuaaggaaagaggauuuuucggcgccauugcuggguuucuggagggcggaugggaaggcaugaucgccggguggcauggauacacgagccacggcgcccacggggucgcuguggcggccgaucucaaguccacccaggaggcuauuaauaaaaucacaaagaaccugaauagccuuucugaacuggagguuaaaaaccuccagcggcuguccggagccauggacgagcugcauaaugaaauucucgagcuggaugaaaagguggacgaccuucgcgccgauaccaucagcucucaaaucgagcuggcuguccuccugagcaacgaaggcauuaucaauuccgaggacgagcaccuucuggcccucgaaagaaaacugaagaagaugcuggggccuucugcgguggagauuggcaacggauguuucgaaacaaaacauaagugcaaucagaccugccucgaucggaucgcugccggcacguuugacgccggggaguucagccugcccaccuuugauucccuuaacauuacagcugccagccugaaugacgauggacucgacaaccacaccauccugcuguauuacucuacagcugccuccagccuugcggucacccucaugauugccaucuucgugguuuauauggugucucgcgauaacgucuccuguagcaucugccuguga

SEQ ID NO: 218711 - RNA, 1758 nt, Artificial Sequence; identical to SEQ ID NO: 218680
  derived and/or modified CDS sequence (opt5) from hemagglutinin__InfluenzaB__AEP20409

SEQ ID NO: 218712 - RNA, 1758 nt, Artificial Sequence; identical to SEQ ID NO: 218680
  derived and/or modified CDS sequence (opt5) from hemagglutinin__InfluenzaB__AEP20420

SEQ ID NO: 218713 - RNA, 1758 nt, Artificial Sequence; identical to SEQ ID NO: 218680
  derived and/or modified CDS sequence (opt5) from hemagglutinin__InfluenzaB__AEP20431

SEQ ID NO: 218714 - RNA, 1758 nt, Artificial Sequence; identical to SEQ ID NO: 218680
  derived and/or modified CDS sequence (opt5) from hemagglutinin__InfluenzaB__AEP20442

SEQ ID NO: 218715 - RNA, 1758 nt, Artificial Sequence; identical to SEQ ID NO: 218680
  derived and/or modified CDS sequence (opt5) from hemagglutinin__InfluenzaB__AEP20453

SEQ ID NO: 218716 - RNA, 1755 nt, Artificial Sequence; identical to SEQ ID NO: 218498
  derived and/or modified CDS sequence (opt5) from hemagglutinin__InfluenzaB__AEQ39027

SEQ ID NO: 218717 - RNA, 1758 nt, Artificial Sequence
  derived and/or modified CDS sequence (opt5) from hemagglutinin__InfluenzaB__AEQ39260
augaaggccaucauugugcugcucauggucguuaccagcaacgcugacagaaucugcacaggcauuacguccucuaauagcccccacguggugaaaaccgccacacagggggaggucaacgugaccggaguuaucccucugacaaccacaccgaccaagucccauuucgcgaaucuuaaaggcacggaaacccgggggaagcugugucccaaaugccucaacuguacagaucuggacguggcucuuggacgcccuaagugcaccggcaagauucccucugccagagucagcauccugcacgaggugcggccuguuacauccggguguuuucccaucaugcaugaucgcaccaaaauuagacaacucccuaaucugcugcggggauacgaacacauccgccucucuacgcauaacgugauuaaugccgagaacgcuccgggcggccccuauaagaucgggacaagcggauccugcccuaaugucaccaacggcaauggguucuuugccacaauggcuugggccgugcccaaaaacgacaagaauaaaaccgcgaccaacccucugacaauugaagugcccuacaucuguacggagggagaggaucagauuaccgucuggggcuuccacagcgacaaugaaacacagauggccaaacuuuauggggauucuaagccgcagaaguuuaccuccagcgcuaacggaguuacaacccacuacgugucucaaaucggcggcuucccuaaccagacggaggacgggggacugccccaguccggcagaaucguggucgauuauauggugcaaaagagcgggaaaacaggaaccauuaccuaccagcggggcauccuccugccucagaagguuuggugcgccucugggcgcuccaaagugauuaagggaagccuuccccugaucggcgaagcugacugucuccaugagaaauauggcgggcugaauaaguccaagcccuacuacacaggagagcacgccaaagcgauuggcaacugcccuaucugggucaagaccccgcugaaacucgccaaugggacaaaguauagacccccugcuaaacugcuuaaggaacggggauuuuucggcgccaucgcuggguuucuggagggcggaugggaaggcaugauugccggguggcauggauacacgucucacggcgcccacgggguggcuguugcggccgaucucaagagcacccaggaggcuaucaacaaaauuacaaagaaucugaacucccuuagcgaacuggaggugaaaaaucuccagcgccugucuggagccauggacgagcugcauaacgaaauccucgagcuggaugaaaaggucgacgaccuuagagccgauaccauuuccagccaaaucgagcuggcugugcuccugucuaaugaaggcaucauuaacagcgaggacgagcaccuucuggcccucgaacggaaacugaagaagaugcuggggcccuccgcggucgagaucggcaauggauguuucgaaacaaaacauaagugcaaccagaccugccucgaucgcauugcugccggcacguuugacgccggggaguucucucugccuaccuuugauagccuuaauaucacagcugccucccugaacgacgauggacucgacaaucacaccauucugcuguauuacagcacagcugccucuucccuugcggugacccucaugaucgccauuuucguuguguauauggucagcagagauaacgugucuuguuccaucugccuguga

SEQ ID NO: 218718 - RNA, 1758 nt, Artificial Sequence; identical to SEQ ID NO: 218717
  derived and/or modified CDS sequence (opt5) from hemagglutinin__InfluenzaB__AEQ39271

SEQ ID NO: 218719 - RNA, 1758 nt, Artificial Sequence
  derived and/or modified CDS sequence (opt5) from hemagglutinin__InfluenzaB__AEQ39282
augaaggccaucauugugcugcucauggucguuaccagcaacgcugacagaaucugcacaggcauuacguccucuaauagcccccacguggugaaaaccgccacacagggggaggucaacgugaccggaguuaucccucugacaaccacaccgaccaagucccauuucgcgaaucuuaaaggcacggaaacccgggggaagcugugucccaaaugccucaacuguacagaucuggacguggcucuuggacgcccuaagugcaccggcaagauucccucugccagagucagcauccugcacgaggugcggccuguuacauccggguguuuucccaucaugcaugaucgcaccaaaauuagacaacucccuaaucugcugcggggauacgaacacauccgccucucuacgcauaacgugauuaaugccgagaacgcuccgggcggccccuauaagaucgggacaagcggauccugcccuaaugucaccaacggcaauggguucuuugccacaauggcuugggccgugcccaaaaacgacaagaauaaaaccgcgaccaacccucugacaauugaagugcccuacaucuguacggagggagaggaucagauuaccgucuggggcuuccacagcgacaaugaaacacagauggccaaacuuuauggggauucuaagccgcagaaguuuaccuccagcgcuaacggaguuacaacccacuacgugucucaaaucggcggcuucccuaaccagacggaggacgggggacugccccaguccggcagaaucguggucgauuauauggugcaaaagagcgggaaaacaggaaccauuaccuaccagcggggcauccuccugccucagaagguuuggugcgccucugggcgcuccaaagugauuaagggaagccuuccccugaucggcgaagcugacugucuccaugagaaauauggcgggcugaauaaguccaagcccuacuacacaggagagcacgccaaagcgauuggcaacugcccuaucugggucaagaccccgcugaaacucgccaaugggacaaaguauagacccccugcuaaacugcuuaaggaacggggauuuuucggcgccaucgcuggguuucuggagggcggaugggaaggcaugauugccggguggcauggauacacgucucacggcgcccacgggguggcuguugcggccgaucucaagagcacccaggaggcuaucaacaaaauuacaaagaaucugaacucccuuagcgaacuggaggugaaaaaucuccagcgccugucuggagccauggacgagcugcauaacgaaauccucgagcuggaugaaaaggucgacgaccuuagagccgauaccauuuccagccaaaucgagcuggcugugcuccugucuaaugaaggcaucauuaacagcgaggacgagcaccuucuggcccucgaacggaaacugaagaagaugcuggggcccuccgcggucgagaucggcaauggauguuucgaaacaaaacauaagugcaaccagaccugccucgaucgcauugcugccggcacguuugacgccggggaguucucucugccuaccuuugauagccuuaauaucacagcugccucccugaacggagacgaacucgauaaucacaccauucugcuguauuacagcacagcugccucuucccuugcggugacccucaugaucgccauuuucguuguguauauggucagcagagacaacgugucuuguuccaucugccuguga

SEQ ID NO: 218720 - RNA, 1758 nt, Artificial Sequence
  derived and/or modified CDS sequence (opt5) from hemagglutinin__InfluenzaB__AEQ39315
augaaggccaucauugugcugcucauggucguuaccagcaacgcugacagaaucugcacaggcauuacguccucuaauagcccccacguggugaaaaccgccacacagggggaggucaacgugaccggaguuaucccucugacaaccacaccgaccaagucccauuucgcgaaucuuaaaggcacggaaacccgggggaagcugugucccaaaugccucaacuguacagaucuggacguggcucuuggacgcccuaagugcaccggcaagauucccucugccagagucagcauccugcacgaggugcggccuguuacauccggguguuuucccaucaugcaugaucgcaccaaaauuagacaacucccuaaucugcugcggggauacgaacacauccgccucucuacgcauaacgugauuaaugccgagaacgcuccgggcggccccuauaagaucgggacaagcggauccugcccuaaugucaccaacggcaauggguucuuugccacaauggcuugggccgugcccaaaaacgacaagaauaaaaccgcgaccaacccucugacaauugaagugcccuacaucuguacggagggagaggaucagauuaccgucuggggcuuccacagcgacaaugaaacacagauggccaaacuuuauggggauucuaagccgcagaaguuuaccuccagcgcuaacggaguuacaacccacuacgugucucaaaucggcggcuucccuaaccagacggaggacgggggacugccccaguccggcagaaucguggucgauuauauggugcaaaagagcgggaaaacaggaaccauuaccuaccagcggggcauccuccugccucagaagguuuggugcgccucugggcgcuccaaagugauuaagggaagccuuccccugaucggcgaagcugacugucuccaugagaaauauggcgggcugaauaaguccaagcccuacuacacaggagagcacgccaaagcgauuggcaacugcccuaucugggucaagaccccgcugaaacucgccaaugggacaaaguauagacccccugcuaaacugcuuaaggaacggggauuuuucggcgccaucgcuggguuucuggagggcggaugggaaggcaugauugccggguggcauggauacacgucucacggcgcccacgggguggcuguugcggccgaucucaagagcacccaggaggcuaucaacaaaauuacaaagaaucugaacucccuuagcgaacuggaggugaaaaaucuccagcgccugucuggagccauggacgagcugcauaacgaaauccucgagcuggaugaaaaggucgacgaccuuagagccgauaccauuuccagccaaaucgagcuggcugugcuccugucuaaugaaggcaucauuaacagcgaggacgagcaccuucuggcccucgaacggaaacugaagaagaugcuggggcccuccgcggucgagaucggcaauggauguuucgaaacaaaacauaagugcaaccagaccugccucgaucgcauugcugccggcacguuugacgccggggaguucucucugccuaccuuugauagccuuaauaucacagcugccucccugaacggagacggccucgauaaucacaccauucugcuguauuacagcacagcugccucuucccuugcggugacccucaugaucgccauuuucguuguguauauggucagcagagacaacgugucuuguuccaucugccuguga

SEQ ID NO: 218721 - RNA, 1758 nt, Artificial Sequence; identical to SEQ ID NO: 218720
  derived and/or modified CDS sequence (opt5) from hemagglutinin__InfluenzaB__AEQ39326

SEQ ID NO: 218722 - RNA, 1758 nt, Artificial Sequence
  derived and/or modified CDS sequence (opt5) from hemagglutinin__InfluenzaB__AEQ39337
augaaggccaucauugugcugcucauggucguuaccagcaacgcugacagaaucugcacaggcauuacguccucuaauagcccccacguggugaaaaccgccacacagggggaagucaacgugaccggaguuaucccucugacaaccacaccgaccaagucccauuucgcgaaucuuaaaggcacggaaacccgggggaagcugugucccaaaugccucaacuguacagaucuggacguggcucuuggacgcccuaagugcaccggcaagauucccucugccagagucagcauccugcacgaggugcggccuguuacauccggguguuuucccaucaugcaugaucgcaccaaaauuagacaacucccuaaucugcugcggggauacgaacacauccgccucucuacgcauaacgugauuaaugccggcaacgcuccgggcgggcccuauaagaucggaacaagcggcuccugcccuaaugucaccaacgggaauggauucuuugccacaauggcuugggccgugcccaaaaacgacaagaauaaaaccgcgaccaacccucugacaauugaggugcccuacaucuguacggaaggcgaggaucagauuaccgucuggggguuccacagcgacaaugagacacagauggccaaacuuuauggagauucuaagccgcagaaguuuaccuccagcgcuaacggcguuacaacccacuacgugucucaaaucggcggguucccuaaccagacggaagacggaggccugccccaguccgggagaaucguggucgauuauauggugcaaaagagcggaaaaacaggcaccauuaccuaccagcgggggauccuccugccucagaagguuuggugcgccucuggacgcuccaaagugauuaagggcagccuuccccugaucggcgaggcugacugucuccaugaaaaauaugggggacugaauaaguccaagcccuacuacacaggcgagcacgccaaagcgauugggaacugcccuaucugggucaagaaaccgcugaagcucgccaauggaaccaaauauagacccccugcuaagcugcuuaaggagcggggcuuuuucggggccaucgcuggcuuucuggaaggaggcugggaggggaugauugccggauggcauggcuacacaucucacggggcccacggaguggcuguugcggccgaucucaaaagcacgcaggaagcuaucaacaagauuaccaaaaaucugaacucccuuagcgagcuggaagugaagaaucuccagcgccugucuggcgccauggacgagcugcauaacgagauccucgaacuggaugagaaagucgacgaccuuagagccgauacaauuuccagccaaaucgaacuggcugugcuccugucuaaugaggggaucauuaacagcgaagacgagcaccuucuggcccucgagcggaagcugaagaaaaugcugggccccuccgcggucgaaaucggaaauggcuguuucgagaccaagcauaaaugcaaccagacaugccucgaucgcauugcugccgggaccuuugacgccggagaguucucucugccuacguuugauagccuuaauaucaccgcugccucccugaacgacgauggccucgacaaucacacaauucugcuguauuacagcaccgcugccucuucccuugcggugacacucaugaucgccauuuucguuguguauauggucagcagagauaacgugucuuguuccaucugccuguga

SEQ ID NO: 218723 - RNA, 1758 nt, Artificial Sequence
  derived and/or modified CDS sequence (opt5) from hemagglutinin__InfluenzaB__AEQ39348
augaaggccaucauugugcugcucauggucguuaccagcaacgcugacagaaucugcacaggcauuacguccucuaauagcccccacguggugaaaaccgccacacagggggaggucaacgugaccggaguuaucccucugacaaccacaccgaccaagucccauuucgcgaaucuuaaaggcacggaaacccgggggaagcugugucccaaaugccucaacuguacagaucuggacguggcucuuggacgcccuaagugcaccggcaagauucccucugccagagucagcauccugcacgaggugcggccuguuacauccggguguuuucccaucaugcaugaucgcaccaaaauuagacaacucccuaaucugcugcggggauacgaacacauccgccucucuacgcauaacgugauuaaugccgagaacgcuccgggcggccccuauaagaucgggacaagcggauccugcccuaaugucaccaacggcaauggguucuuugccacaauggcuugggccgugcccaaaaacgacaagaauaaaaccgcgaccaacccucugacaauugaagugcccuacaucuguacggagggagaggaucagauuaccgucuggggcuuccacagcgacaaugaaacacagauggccaaacuuuauggggauucuaagccgcagaaguuuaccuccagcgcuaacggaguuacaacccacuacgugucucaaaucggcggcuucccuaaccagacggaggacgggggacugccccaguccggcagaaucguggucgauuauauggugcaaaagagcgggaaaacaggaaccauuaccuaccagcggggcauccuccugccucagaagguuuggugcgccucugggcgcuccaaagugauuaagggaagccuuccccugaucggcgaagcugacugucuccaugagaaauauggcgggcugaauaaguccaagcccuacuacacaggagagcacgccaaagcgauuggcaacugcccuaucugggucaagaccccgcugaaacucgccaaugggacaaaguauagacccccugcuaaacugcuuaaggaacggggauuuuucggcgccaucgcuggguuucuggagggcggaugggaaggcaugauugccggguggcauggauacacgucucacggcgcccacgggguggcuguugcggccgaucucaagagcacccaggaggcuaucaacaaaauuacaaagaaucugaacucccuuagcgaacuggaggugaaaaaucuccagcgccugucuggagccauggacgagcugcauaacgaaauccucgagcuggaugaaaaggucgacgaccuuagagccgauaccauuuccagccaaaucgagcuggcugugcuccugucuaaugaaggcaucauuaacagcgaggacgagcaccuucuggcccucgaacggaaacugaagaagaugcuggggcccuccgcggucgagaucggcaauggauguuucgaaacaaaacauaagugcaaccagaccugccucgaucgcauugcugccggcacguuugacgccggggaguucucucugccuaccuuugauagccuuaauaucacagcugccucccugaacgacgauggacucgacaaucacauuauccugcuguauuacagcaccgcugccucuucccuugcggugacacucaugauugccaucuucguuguguauauggucagcagagauaacgugucuuguuccaucugccuguga

SEQ ID NO: 218724 - RNA, 1758 nt, Artificial Sequence; identical to SEQ ID NO: 218720
  derived and/or modified CDS sequence (opt5) from hemagglutinin__InfluenzaB__AEQ39359

SEQ ID NO: 218725 - RNA, 1758 nt, Artificial Sequence
  derived and/or modified CDS sequence (opt5) from hemagglutinin__InfluenzaB__AEQ39370
augaaggccaucauugugcugcucauggucguuaccagcaacgcugacagaaucugcacaggcauuacguccucuaauagcccccacguggugaaaaccgccacacagggggaggucaacgugaccggaguuaucccucugacaaccacaccgaccaagucccauuucgcgaaucuuaaaggcacggaaacccgggggaagcugugucccaaaugccucaacuguacagaucuggacguggcucuuggacgcccuaagugcaccggcaauauucccucugccagagucagcauccugcacgaggugcggccuguuacauccggguguuuucccaucaugcaugaucgcaccaagauuagacaacucccuaaccugcugcggggauacgaacacauccgccucucuacgcauaauguggucaacgccgagaaugcuccgggcggccccuauaaaauugggacaagcggauccugcccuaacgugaccaauggcaacggguucuuugccacaauggcuugggccgugcccaagaaugacaacaauaaaaccgcgaccaacagccugacaaucgaagucccuuacauuuguacggagggagaggaucagaucaccguuuggggcuuccacucugacaacgaaacacagauggccaaacuuuauggggauuccaagccccagaaguuuaccagcucugcuaauggagugacaacccacuacgugucccaaauuggcggcuucccgaaccagacggaggacgggggacugccucagagcggcagaaucgucguggauuauaugguucagaagucugggaaaacaggaaccaucaccuaccaacggggcauucuccugccccagaagguguggugcgccuccgggcgcagcaaagucaucaagggaucccuuccucugauuggcgaagcugacugucuccaugagaaauauggcgggcugaauaagucuaaacccuacuacacaggagagcacgccaaggcgaucggcaacugccccauuugggugaagaccccucugaaacucgccaaugggacaaaguauagaccgcccgcuaaacugcuuaaggaacggggauuuuucggcgccaucgcuggguuucuggagggcggaugggaaggcaugaucgccggguggcauggauacacgagccacggcgcccacgggguugcuguggcggccgaucucaaauccacccaggaggcuauuaacaagaucacaaagaaucugaacagccuuucugaacuggaggucaaaaaucuccagcgccuguccggagccauggacgagcugcauaacgaaauucucgagcuggaugaaaagguggacgaccuuagagccgauaccaucagcucucaaauugagcuggcuguccuccugagcaaugaaggcaucaucaacuccgaggacgagcaccuucuggcccucgaacggaaacugaagaaaaugcuggggccuucugcgguggagauuggcaauggauguuucgaaacaaagcauaagugcaaccagaccugccucgaucgcaucgcugccggcacguuugacgccggggaguucagccugcccaccuuugauucccuuaauauuacagcugccagccugaacgacgauggacucgacaaccacaccauccugcuguauuacucuacagcugccuccagccuugcgguuacccucaugauugccaucuucguggucuauauggugucuagagauaauguuuccuguagcauuugccuguga

SEQ ID NO: 218726 - RNA, 1755 nt, Artificial Sequence; identical to SEQ ID NO: 218498
  derived and/or modified CDS sequence (opt5) from hemagglutinin__InfluenzaB__AEQ39392

SEQ ID NO: 218727 - RNA, 1755 nt, Artificial Sequence; identical to SEQ ID NO: 218498
  derived and/or modified CDS sequence (opt5) from hemagglutinin__InfluenzaB__AEQ39429

SEQ ID NO: 218728 - RNA, 1755 nt, Artificial Sequence; identical to SEQ ID NO: 218498
  derived and/or modified CDS sequence (opt5) from hemagglutinin__InfluenzaB__AEQ39440

SEQ ID NO: 218729 - RNA, 1755 nt, Artificial Sequence; identical to SEQ ID NO: 218498
  derived and/or modified CDS sequence (opt5) from hemagglutinin__InfluenzaB__AEQ39451

SEQ ID NO: 218730 - RNA, 1758 nt, Artificial Sequence; identical to SEQ ID NO: 218710
  derived and/or modified CDS sequence (opt5) from hemagglutinin__InfluenzaB__AEQ39462

SEQ ID NO: 218731 - RNA, 1758 nt, Artificial Sequence; identical to SEQ ID NO: 218717
  derived and/or modified CDS sequence (opt5) from hemagglutinin__InfluenzaB__AEQ39484

SEQ ID NO: 218732 - RNA, 1755 nt, Artificial Sequence; identical to SEQ ID NO: 218477
  derived and/or modified CDS sequence (opt5) from hemagglutinin__InfluenzaB__AEQ39506

SEQ ID NO: 218733 - RNA, 1758 nt, Artificial Sequence
  derived and/or modified CDS sequence (opt5) from hemagglutinin__InfluenzaB__AEQ39517
augaaggccaucauugugcugcucauggucguuaccagcaacgcugacagaaucugcacaggcauuacguccucuaauagcccccacguggugaaaaccgccacacagggggaggucaacgugaccggaguuaucccucugacaaccacaccgaccaagucccauuucgcgaaucuuaaaggcacgaagacccgggggaaacugugucccaagugccucaacuguacagaucuggacguggcucuuggacgcccuaagugcaccggcaauauucccucugccgaagucagcauccugcacgaggugagaccuguuacauccggguguuuucccaucaugcaugaucggaccaaaauucgccaacucccuaaccugcugagaggauacgaacacauccggcucucuacgcauaaugugauuaacgccgagaaggcuccgggcggccccuauaaaaucgggacaagcggauccugcccuaaugucaccaacggcaauggguucuuugccacaauggcuugggccgugcccaagaacgacaauaacaaaaccgcgaccaauagccugacaauugaagugccuuacaucuguacggagggagaggaucagauuaccaucuggggcuuccacucugacaacgaaacacagauggccaaacuuuauggggauuccaagccccagaaguuuaccagcucugcuaacggagucacaacccacuacguuucccaaaucggcggcuucccgaaucagacggaggacgggggacugccucagagcggccgcauugugguggauuauaugguccagaagucugggaaaacaggaaccaucaccuaccaaagaggcauucuccugccccagaagguguggugcgccuccgggcggagcaaaguuaucaagggaucccuuccucugauuggcgaagcugacugucuccaugagaaauauggcgggcugaacaagucuaagcccuacuacacaggagagcacgccaaagcgaucggcaauugccccaucugggugaagaccccucugaaacucgccaacgggacaaaguaucgcccgcccgcuaaacugcuuaaggaaagaggauuuuucggcgccauugcuggguuucuggagggcggaugggaaggcaugaucgccggguggcauggauacacgagccacggcgcccacggggucgcuguggcggccgaucucaaguccacccaggaggcuauuaauaaaaucacaaagaaccugaauagccuuucugaacuggagguuaaaaaccuccagcggcuguccggagccauggacgagcugcauaaugaaauucucgagcuggaugaaaagguggacgaccuucgcgccgauaccaucagcucucaaaucgagcuggcuguccuccugagcaacgaaggcauuaucaauuccgaggacgagcaccuucuggcccucgaaagaaaacugaagaagaugcuggggccuucugcgguggagauuggcaacggauguuucgaaacaaaacauaagugcaaucagaccugccucgaucggaucgcugccggcacguuugacgccggggaguucagccugcccaccuuugauucccuuaacauuacagcugccagccugaaugacaacggacucgauaaccacaccauccugcuguauuacucuacagcugccuccagccuugcggucacccucaugauugccaucuucgugguuuauauggugucucgcgacaaugucuccuguagcaucugccuguga

SEQ ID NO: 218734 - RNA, 1758 nt, Artificial Sequence
  derived and/or modified CDS sequence (opt5) from hemagglutinin__InfluenzaB__AER27038
augaaggccaucauugugcugcucauggucguuaccagcaacgcugacagaaucugcacaggcauuacguccucuaauagcccccacguggugaaaaccgccacacagggggaagucaacgugaccggaguuaucccucugacaaccacaccgaccaagucccauuucgcgaaucuuaaaggcacggaaacccgggggaagcugugucccaaaugcccuaacuguacagaucucgacguggcucugggacgccccaagugcaccggcaagauuccuucugccagagucagcauccuucacgaggugcggcccguuacauccggguguuuuccuaucaugcaugaucgcaccaaaauuagacaacugccgaaucuccugcggggauacgaacacauccgccugucuacgcauaacgugauuaaugccgagaacgcucccggcggcccuuauaagaucgggacaagcggauccugccccaaugucaccaacggcaauggguucuuugccacaauggcuugggccgugccuaaaaacgacaagaauaaaaccgcgaccaacccccucacaauugaagugccguacaucuguacgaagggagaggaucagauuaccgucuggggcuuccacagcgacaaugagacacagauggccaagcuguauggggauucuaaaccucagaaguuuaccuccagcgcuaacggaguuacaacccacuacgugucucaaaucggcggcuuccccaaccagacggaagacgggggacuuccucaguccggcagaaucguggucgauuauauggugcagaaaagcgggaagacaggaaccauuaccuaccaacggggcauccugcucccccagaaaguuuggugcgccucugggcgcuccaaggugauuaaaggaagccugccccuuaucggcgaggcugacugucugcaugaaaaguauggcgggcucaauaaguccaaaccuuacuacacaggagagcacgccaaggcgauuggcaacugcccgaucugggucaaaacaccccugaagcuggccaaugggacaaaauauagaccucccgcuaagcuccugaaggagcggggauuuuucggcgccaucgcuggguuucuugaaggcggaugggagggcaugauugccggguggcauggauacacgucucacggcgcccacgggaucgcuguggcggccgaucugaaaagcacccaggaagcuauuaacaagaucaccaaaaaucucaacucccugagcgagcuugaaguuaagaaucugcagcgccucucuggagccauggacgagcugcauaacgagauucuggaacucgaugagaaaguggacgaccugagagccgauaccaucuccagccaaaucgaacuugcuguccugcucucuaaugagggcauuaucaacagcgaagacgagcaucugcuugcccuggagcggaagcucaagaaaaugcuggggccuuccgcgguggaaauuggcaauggauguuucgagacaaagcacaaaugcaaccagaccugccuggaucgcaucgcugccggcacguuugacgccggggaguucucucuccccaccuuugauagccugaauauuacagcugccucccuuaacgacgauggacuggacaaucacaccauccuccuguauuacagcacagcugccucuucccuggcggucacccuuaugauugccaucuucgugguuuauauggugagcagagauaacgucucuuguuccaucugccucuga

SEQ ID NO: 218735 - RNA, 1758 nt, Artificial Sequence; identical to SEQ ID NO: 218680
  derived and/or modified CDS sequence (opt5) from hemagglutinin__InfluenzaB__AER27060

SEQ ID NO: 218736 - RNA, 1758 nt, Artificial Sequence
  derived and/or modified CDS sequence (opt5) from hemagglutinin__InfluenzaB__AET10061
augaaggccaucauugugcugcucauggucguuaccagcaacgcugacagaaucugcacaggcauuacguccucuaauagcccccacguggugaaaaccgccacacagggggaagucaacgugaccggaguuaucccucugacaaccacaccgaccaagucccauuucgcgaaucuuaaaggcacggaaacccgggggaagcugugucccaaaugccucaacuguacagaucuggacguggcucuuggacgcccuaagugcaccggcaauauucccucugccagagucagcauccugcacgaggugcggccuguuacauccggguguuuucccaucaugcaugaucgcaccaagauuagacaacucccuaaccugcugcggggauacgaacacauccgccucucuacgcauaaugugauuaacgccaaaaaugcuccgggcggccccuauaagaucgggacaagcggauccugcccuaacgucaccaauggcaacggguucuuugccacaauggcuugggccgugcccaaaaaugacaagaacagaaccgcgaccaauagccugacaauugaggugccuuacaucuguaaagaaggagaggaucagauuacggucuggggcuuccacucugacaacgagacccagauggccaaacuuuauggggauuccaagccccagaaguuuacaagcucugcuaacggaguuaccacacacuacgugucccaaaucggcggcuucccgaaucagaccgaagacgggggacugccucagagcggccggaucguggucgauuauauggugcagaagucugggaaaacgggaacaauuaccuaccaacgcggcauccuccugccccagaagguuuggugcgccuccgggagaagcaaagugauuaagggaucccuuccucugaucggcgaggcugacugucuccaugaaaaauauggcgggcugaacaagucuaagcccuacuacaccggagagcacgccaaagcgauuggcaauugccccaucugggucaagacaccucugaaacucgccaacgggaccaaguaucggccgcccgcuaaacugcuuaaggagcgcggauuuuucggcgccaucgcuggguuucuggaaggcggaugggagggcaugauugccggguggcauggauacacaagccacggcgcccacgggguggcuguugcggccgaucucaaguccacgcaggaagcuaucaauaaaauuaccaagaaccugaauagccuuucugagcuggaagugaaaaaccuccagagacuguccggagccauggacgagcugcauaaugagauccucgaacuggaugagaaggucgacgaccuucgggccgauacaauuagcucucaaaucgaacuggcugugcuccugagcaacgagggcaucauuaauuccgaagacgagcaccuucuggcccucgagcgcaaacugaagaagaugcuggggccuucugcggucgaaaucggcaacggauguuucgagaccaaacauaagugcaaucagacaugccucgauagaauugcugccggcaccuuugacgccggggaguucagccugcccacguuugauucccuuaacaucaccgcugccagccugaaugacgauggacucgacaaccacacaauucugcuguauuacucuaccgcugccuccagccuugcggugacacucaugaucgccauuuucguuguguauauggucucucgggauaacguguccuguagcaucugccuguga

SEQ ID NO: 218737 - RNA, 1755 nt, Artificial Sequence
  derived and/or modified CDS sequence (opt5) from hemagglutinin__InfluenzaB__AET10062
augaaggccaucauugugcugcucauggucguuaccagcaacgcugacagaaucugcacaggcauuacguccucuaauagcccccacguggugaaaaccgccacacagggggaagucaacgugaccggaguuaucccucugacaauuaccccgacaaaguccuacuucgcgaaucuuaaaggcacccggacgcgcgggaagcugugucccgauugccucaacuguaccgaccuggauguggcucuuggaagaccuaugugcgucggcacaacccccucugccaaagccagcauccugcaugaagugcggccuguuacauccggguguuuucccaucaugcacgaccgcaccaagauuagacaacucccuaaucugcugcggggauaugagaacauccgccucucuacgcagaaugugauugaugcugaaaaggccccgggcggccccuacagacuggggacaagcggauccugcccuaacgcuaccagcaaaaucggcuucuuugccacaauggcgugggccguccccaaggacaauuauaaaaacgcuaccaauccucuuaccguggaggugcccuacauuuguaaggaaggggaggaucagaucacagucuggggauuccauucugacaacaaaacgcagaugaagaaucuguauggcgauuccaacccgcaaaaguuuaccagcucugccaaugggguuacaacccacuacgugucccagauuggagacuucccugaucagacagaggacggcggccucccccagagcgggcggaucguggucgauuauaugaugcaaaaaccuggaaagaccggcacgaucguguaccagcgcgggguucugcuuccccagaaaguguggugcgcuucuggaagauccaaggucauuaaaggcagccugccccucaucggggaagccgacugucugcaugagaaguacggaggccugaacaaauccaagccuuauuacacaggcgaacacgcgaaggccauugggaacugcccgaucugggugaaaacaccccucaagcuggcuaauggaaccaaauaucggccucccgccaagcugcugaaagagcgcggcuuuuucggggcuauugccggauuucucgagggcgggugggaaggcaugaucgccggauggcacggcuacacaucucauggggcucacggaguugcgguggccgcugaccuuaagagcacccaggaggccaucaacaagauuaccaaaaaucuuaacucccugagcgaacucgaggucaagaaucugcaaagacugucuggcgccauggaugaacuccauaacgagauccuggagcuugacgaaaaaguggaugaccugcgggcugauacgauuuccagccagaucgagcucgccguccugcuuucuaaugaagggauuaucaacagcgaggacgaacaucugcucgcgcuggagcgcaagcugaaaaagaugcucggaccuuccgcuguggauaucggcaauggguguuucgagaccaagcacaaaugcaaccagacaugccuggacagaauugccgccggcaccuuuaaugcuggagaguucucucuucccacauuugauagccugaacaucaccgccgcuucccucaaugacgauggccuggacaaccacacgauucugcuuuauuacagcaccgccgcgucuucccucgccguuacacugaugcuggcuaucuucauuguguauauggucagccgggacaaugugucuuguuccaucugccucuga

SEQ ID NO: 218738 - RNA, 1755 nt, Artificial Sequence
  derived and/or modified CDS sequence (opt5) from hemagglutinin__InfluenzaB__AET10064
augaaggccaucauugugcugcucauggucguuaccagcaacgcugacagaaucugcacaggcauuacguccucuaauagcccccacguggugaaaaccgccacacagggggaagucaacgugaccggaguuaucccucugacaaccacaccgaccaaguccuacuucgcgaaucuuaaaggcacgcggacccgcgggaagcugugucccgauugccucaacuguacagaccuggauguggcucuuggaagaccuaugugcgucggcaccacacccucugccaaagccagcauucugcaugaagugcggccuguuaccuccggguguuuucccaucaugcacgaccgcacgaagaucagacaacucccuaaucugcugcggggauaugagaacauucgccucucuacacagaaugugaucgaugcugaaaaggccccgggcggccccuacagacuggggaccagcggauccugcccuaacgcuacaagcaaaauuggcuucuuugccaccauggcgugggccguccccaaggacaauuauaaaaacgcuaccaauccucuuacaguggaggugcccuacaucuguacggaaggggaggaucagauuaccaucuggggauuccauucugacaacaagacacagaugaaaaaucuguauggcgauuccaacccgcaaaaguuuaccagcucugccaauggggucacaacccacuacguuucccagauuggagacuucccugaucagacggaggacggcggccucccccagagcgggcggaucgugguggauuauaugaugcaaaagccuggaaaaacaggcaccaucgucuaccagcgcggggugcugcuuccccagaagguuuggugcgcuucuggaagauccaaagugauuaagggcagccugccccucaucggggaagccgacugucugcaugagaaauacggaggccugaacaaguccaaaccuuauuacaccggcgaacacgcgaaggccauugggaacugcccgaucugggucaagacaccccucaaacuggcuaauggaaccaaguaucggccucccgccaaacuucugaaggagcgcggcuuuuucggggcuauugccggauuucucgagggcgggugggaaggcaugaucgccggauggcacggcuacacaucucauggggcucacggaguggcgguugccgcugaccugaaaagcacgcaggaggccaucaacaagauuaccaagaaucuuaacucccugagcgaacucgaggugaaaaaucugcaaagacugucuggcgccauggaugaacuccauaacgagauccuggagcuugacgaaaaggucgaugaccugcgggcugauacaauuuccagccagaucgagcucgccgugcugcuuucuaaugaagggauuaucaacagcgaggacgaacaucugcucgcgcuggagcgcaaacugaagaaaaugcucggaccuuccgcugucgauaucggcaauggguguuucgagaccaagcacaagugcaaccagacaugccuggacagaauugccgccggcaccuuuaaugcuggagaguucucucuucccacguuugauagccugaacaucaccgccgcuucccucaaugacgauggccuggacaaccacacaauucugcuuuauuacagcaccgccgcgucuucccucgccgugacacugaugcuggcuaucuucauuguuuauauggugagccgggacaaugucucuuguuccaucugccucuga

SEQ ID NO: 218739 - RNA, 1755 nt, Artificial Sequence
  derived and/or modified CDS sequence (opt5) from hemagglutinin__InfluenzaB__AET10065
augaaggccaucauugugcugcucauggucguuaccagcaacgcugacagaaucugcacaggcauuacguccucuaauagcccccacguggugaaaaccgccacacagggggaagucaacgugaccggaguuaucccucugacaaccacaccgaccaaguccuacuucgcgaaucuuaaaggcacgcggacccgcgggaagcugugucccgauugccucaacuguacagaccuggauguggcucuuggaagaccuaugugcgucggcaccacacccucugccaaagccagcauucugcaugaagugcggccuguuaccuccggguguuuucccaucaugcacgaccgcacgaagaucagacaacucccuaaucugcugcggggauaugagaacauucgccucucuacacagaaugugaucgaugcugaaaaggccccgggcggccccuacagacuggggaccagcggauccugcccuaacgcuacaagcaaaauuggcuucuuugccaccauggcgugggccguccccaaggacaauuauaaaaacgcuaccaauccucuuacaguggaggugcccuacaucuguaaggaaggggaggaucagauuacggucuggggauuccauucugacaacaaaacccagaugaagaaucuguauggcgauuccaacccgcaaaaguuuacaagcucugccaaugggguuaccacacacuacgugucccagaucggagacuucccugaucagaccgaggacggcggccucccccagagcgggcggauuguggucgauuauaugaugcaaaaaccuggaaagacgggcacaaucguguaccagcgcgggguucugcuuccccagaaaguguggugcgcuucuggaagauccaaggucaucaaaggcagccugccccucauuggggaagccgacugucugcaugagaaguacggaggccugaacaaauccaagccuuauuacaccggcgaacacgcgaaggccaucgggaacugcccgauuugggugaaaacaccccucaagcuggcuaauggaaccaaauaucggccucccgccaagcugcugaaagagcgcggcuuuuucggggcuaucgccggauuucucgagggcgggugggaaggcaugauugccggauggcacggcuacaccucucauggggcucacggaguugcgguggccgcugaccuuaagagcacacaggaggccaucaacaagaucacgaaaaaucuuaacucccugagcgaacucgaggucaagaaucugcaaagacugucuggcgccauggaugaacuccauaacgagauucuggagcuugacgaaaaaguggaugaccugcgggcugauaccaucuccagccagauugagcucgccguccugcuuucuaaugaagggaucauuaacagcgaggacgaacaucugcucgcgcuggagcgcaagcugaaaaagaugcucggaccuuccgcuguggauaucggcaauggguguuucgagacaaagcacaaaugcaaccagaccugccuggacagaaucgccgccggcacauuuaaugcuggagaguucucucuucccaccuuugauagccugaacauuacggccgcuucccucaaugacgauggccuggacaaccacaccauccugcuuuauuacagcacagccgcgucuucccucgccguuacccugaugcuggcuauuuucaucguguauauggucagccgggacaaugugucuuguuccauuugccucuga

SEQ ID NO: 218740 - RNA, 1755 nt, Artificial Sequence; identical to SEQ ID NO: 218739
  derived and/or modified CDS sequence (opt5) from hemagglutinin__InfluenzaB__AET10066

SEQ ID NO: 218741 - RNA, 1755 nt, Artificial Sequence
  derived and/or modified CDS sequence (opt5) from hemagglutinin__InfluenzaB__AET10067
augaaggccaucauugugcugcucauggucguuaccagcaacgcugacagaaucugcacaggcauuacguccucuaauagcccccacguggugaaaaccgccacacagggggaagucaacgugaccggaguuaucccucugacagcgaccccgacaaaguccuacuucgcuaaucuuaaaggcacccggacgcgcgggaagcugugucccgauugccucaacuguaccgaccuggauguggcccuuggaagaccuaugugcgucggcacaacccccucugccaaagcuagcauucugcaugaagugcggccuguuacauccggguguuuucccaucaugcacgaccgcaccaagaucagacaacucccuaaucugcugcggggauaugagaacauucgccucucuacgcagaaugugaucgaugccgaaaaggcuccgggcggccccuacagacuggggacaagcggauccugcccuaacgccaccagcaaaauuggcuucuuugcgacaauggccugggcuguccccaaggacaauuauaaaaacgccaccaauccucuuaccguggaggugcccuacaucuguaaggaaggggaggaucagauuacagucuggggauuccauucugacaacaaaacgcagaugaagaaucuguauggcgauuccaacccgcaaaaguuuaccagcucugcuaaugggguuacaacccacuacgugucccagaucggagacuucccugaucagacagaggacggcggccucccccagagcgggcggauuguggucgauuauaugaugcaaaaaccuggaaagaccggcacgaucguguaccagcgcgggguucugcuuccccagaaaguguggugcgccucuggaagauccaaggucaucaaaggcagccugccccucauuggggaagcggacugucugcaugagaaguacggaggccugaacaaauccaagccuuauuacacaggcgaacacgccaaggcuaucgggaacugcccgauuugggugaaaacaccccucaagcuggccaauggaaccaaauaucggccucccgcuaagcugcugaaagagcgcggcuuuuucggggccaucgccggauuucucgagggcgggugggaaggcaugauugcuggauggcacggcuacacaucucauggggcgcacggaguugccguggcugccgaccuuaagagcacccaggaggccaucaacaagaucaccaaaaaucuuaacucccugagcgaacucgaggucaagaaucugcaaagacugucuggcgcuauggaugaacuccauaacgagauucuggagcuugacgaaaaaguggaugaccugcgggccgauacgaucuccagccagauugagcucgcgguccugcuuucuaaugaagggaucauuaacagcgaggacgaacaucugcucgcucuggagcgcaagcugaaaaagaugcucggaccuuccgccguggauaucggcaauggguguuucgagaccaagcacaaaugcaaccagacaugccuggacagaaucgccgcuggcaccuuuaaugccggagaguucucucuucccacauuugauagccugaacauuaccgcugccucccucaaugacgauggccuggacaaccacacgauccugcuuuauuacagcaccgcggccucuucccucgcuguuacacugaugcuggccauuuucaucguguauauggucagccgggacaaugugucuuguuccauuugccucuga

SEQ ID NO: 218742 - RNA, 1755 nt, Artificial Sequence
  derived and/or modified CDS sequence (opt5) from hemagglutinin__InfluenzaB__AET10068
augaaggccaucauugugcugcucauggucguuaccagcaacgcugacagaaucugcacaggcauuacguccucuaauagcccccacguggugaaaaccgccacacagggggaagucaacgugaccggaguuaucccucugacaaccgcgccgacaaaguccuacuucgcuaaucuuaaaggcacccggacgcgcgggaagcugugucccgauugccucaacuguaccgaccuggauguggcccuuggaagaccuaugugcgccggcacaacccccucugcuaaagccagcauucugcaugaaguccggccugugacauccggguguuuucccaucaugcacgaccgcaccaagaucagacaacucccuaaucugcugcggggauaugagaacauucgccucucuacgcagaauguuaucgaugcugaaaaggccccgggcggccccuacagacuggggacaagcggauccugcccuaacgcgaccagcaaaauuggcuucuuugccacaauggcuugggccgugcccaaggacaauuauaaaaacgcuaccaauccucuuaccgucgaggugcccuacaucuguaaggaaggggaggaucagauuacaguguggggauuccauucugacaacaaaacgcagaugaagaaucuguauggcgauuccaacccgcaaaaguuuaccagcucugccaauggggucacaacccacuacguuucccagaucggagacuucccugaucagacagaggacggcggccucccccagagcgggcggauugugguggauuauaugaugcaaaaaccuggaaagaccggcacgaucgucuaccagcgcggggugcugcuuccccagaaaguuuggugcgcgucuggaagauccaaggugaucaaaggcagccugccccucauuggggaagccgacugucugcaugagaaguacggaggccugaacaaauccaagccuuauuacacaggcgaacacgcuaaggccaucgggaacugcccgauuugggucaaaacaccccucaagcuggcuaauggaaccaaauaucggccucccgccaagcugcugaaagagcgcggcuuuuucggggccaucgcuggauuucucgagggcgggugggaaggcaugauugcgggauggcacggcuacacaucucauggggcccacggaguggcuguugccgccgaccuuaagagcacccaggaggcuaucaacaagaucaccaaaaaucuuaacucccugagcgaacucgaggugaagaaucugcaaagacugucuggcgccauggaugaacuccauaacgagauucuggagcuugacgaaaaagucgaugaccugcgggcggauacgaucuccagccagauugagcucgcugugcugcuuucuaaugaagggaucauuaacagcgaggacgaacaucugcucgcccuggagcgcaagcugaaaaagaugcucggaccuuccgccgucgauaucggcaauggguguuucgagaccaagcacaaaugcaaccagacaugccuggacagaaucgcugccggcaccuuuaaugcuggagaguucucucuucccacauuugauagccugaacauuaccgccgcgucccucaaugacgauggccuggacaaccacacgauccugcuuuauuacagcaccgccgcuucuucccucgccgugacacugaugcuggcuauuuucaucguuuauauggugagccgggacaaugucucuuguuccauuugccucuga

SEQ ID NO: 218743 - RNA, 1755 nt, Artificial Sequence; identical to SEQ ID NO: 218739
  derived and/or modified CDS sequence (opt5) from hemagglutinin__InfluenzaB__AET10069

SEQ ID NO: 218744 - RNA, 1758 nt, Artificial Sequence
  derived and/or modified CDS sequence (opt5) from hemagglutinin__InfluenzaB__AET10070
augaaggccaucauugugcugcucauggucguuaccagcaacgcugacagaaucugcacaggcauuacguccucuaauagcccccacguggugaaaaccgccacacagggggaggucaaggugaccggaguuaucccucugacaaccacaccgaccaaaucccauuucgcgaaccuuaagggcacggaaacccgggggaaacugugucccaagugcccuaauuguacagaucucgacguggcucugggacgccccaagugcaccggcaaaauuccuucugccagagucagcauccuucacgaggugcggcccguuacauccggguguuuuccuaucaugcaugaucgcaccaagauuagacaacugccgaaccuccugcggggauacgaacacauccgccugucuacgcauaaugugauuaacgccgagaaugcucccggcggcccuuauaaaaucgggacaagcggauccugccccaacgucaccaauggcaacggguucuuugccacaauggcuugggccgugccuaagaaugacaaaaacaagaccgcgaccaauccccucacaauugaagugccguacaucuguacggagggagaggaucagauuaccgucuggggcuuccacagcgacaacgaaacacagauggccaagcuguauggggauucuaaaccucagaaguuuaccuccagcgcuaauggaguuacaacccacuacgugucucaaaucggcggcuuccccaaccagacggaggacgggggacuuccucaguccggcagaaucguggucgauuauauggugcagaaaagcgggaagacaggaaccauuaccuaccaacggggcauccugcucccccagaaaguuuggugcgccucugggcgcuccaaggugauuaaaggaagccugccccuuaucggcgaagcugacugucugcaugagaaguauggcgggcucaacaaguccaaaccuuacuacacaggagagcacgccaaggcgauuggcaauugcccgaucugggucaaaacaccccugaagcuggccaacgggacaaaauauagaccucccgcuaagcuccugaaggaacggggauuuuucggcgccaucgcuggguuucuugagggcggaugggaaggcaugauugccggguggcauggauacacgucucacggcgcccacgggguggcuguugcggccgaucugaaaagcacccaggaggcuaucaauaagauuaccaaaaaccucaauucccugagcgaacuugaggugaagaaccugcagcgccucucuggagccauggacgagcugcauaaugaaauccuggagcucgaugaaaaagucgacgaccugagagccgauaccauuuccagccaaaucgagcuugcugugcugcucucuaacgaaggcaucauuaauagcgaggacgagcaucugcuugcccuggaacggaagcucaagaaaaugcuggggccuuccgcggucgagaucggcaacggauguuucgaaacaaagcacaaaugcaaucagaccugccuggaucgcauugcugccggcacguuugacgccggggaguucucucuccccaccuuugauagccugaacaucacagcugccucccuuaaugacgauggacuggacaaccacaccauucuccuguauuacagcacagcugccucuucccuggcggugacccuuaugaucgccauuuucguuguguauauggucagcagagauaaugugucuuguuccaucugccucuga

SEQ ID NO: 218745 - RNA, 1758 nt, Artificial Sequence; identical to SEQ ID NO: 218680
  derived and/or modified CDS sequence (opt5) from hemagglutinin__InfluenzaB__AET10071

SEQ ID NO: 218746 - RNA, 1758 nt, Artificial Sequence; identical to SEQ ID NO: 218680
  derived and/or modified CDS sequence (opt5) from hemagglutinin__InfluenzaB__AET10072

SEQ ID NO: 218747 - RNA, 1755 nt, Artificial Sequence
  derived and/or modified CDS sequence (opt5) from hemagglutinin__InfluenzaB__AET10073
augaaggccaucauugugcugcucauggucguuaccagcaacgcugacagaaucugcacaggcauuacguccucuaauagcccccacguggugaaaaccgccacacagggggaagucaacgugaccggaguuaucccucugacaaccacaccgaccaaguccuacuucgcgaaucuuaaaggcacgcggacccgcgggaagcugugucccgauugccucaacuguacagaccuggauguggcucuuggaagaccuaugugcgucggcaccacacccucugccaaagccagcauucugcaugaagugcggccuguuaccuccggguguuuucccaucaugcacgaccgcacgaagaucagacaacucccuaaucugcugcggggaugcgagaacauucgccucucuacacagaaugugaucgaugcugaaaaggccccgggcggccccuauagacuggggaccagcggauccuguccuaacgcuacaagcaaaauuggcuucuuugccaccauggcgugggccguccccaaggacaauuacaaaaacgcuaccaauccucuuacaguggaggugcccuauaucugcaaggaaggggaggaucagauuacggucuggggauuccauucugacaacaaaacccagaugaagaaucuguacggcgauuccaacccgcaaaaguuuacaagcucugccaaugggguuaccacacacuaugugucccagaucggagacuucccugaucagaccgaggacggcggccucccccagagcgggcggauuguggucgauuacaugaugcaaaaaccuggaaagacgggcacaaucguguaucagcgcgggguucugcuuccccagaaaguguggugugcuucuggaagauccaaggucaucaaaggcagccugccccucauuggggaagccgacugccugcaugagaaguacggaggccugaacaaauccaagccuuacuauaccggcgaacacgcgaaggccaucgggaacuguccgauuugggugaaaacaccccucaagcuggcuaauggaaccaaauaccggccucccgccaagcugcugaaagagcgcggcuuuuucggggcuaucgccggauuucucgagggcgggugggaaggcaugauugccggauggcacggcuauaccucucauggggcucacggaguugcgguggccgcugaccuuaagagcacacaggaggccaucaacaagaucacgaaaaaucuuaacucccugagcgaacucgaggucaagaaucugcaaagacugucuggcgccauggaugaacuccauaacgagauucuggagcuugacgaaaaaguggaugaccugcgggcugauaccaucuccagccagauugagcucgccguccugcuuucuaaugaagggaucauuaacagcgaggacgaacaucugcucgcgcuggagcgcaagcugaaaaagaugcucggaccuuccgcuguggauaucggcaaugggugcuucgagacaaagcacaaaugcaaccagaccugucuggacagaaucgccgccggcacauuuaaugcuggagaguucucucuucccaccuuugauagccugaacauuacggccgcuucccucaaugacgauggccuggacaaccacaccauccugcuuuacuauagcacagccgcgucuucccucgccguuacccugaugcuggcuauuuucaucguguacauggucagccgggacaaugugucuugcuccauuugucucuga

SEQ ID NO: 218748 - RNA, 1758 nt, Artificial Sequence
  derived and/or modified CDS sequence (opt5) from hemagglutinin__InfluenzaB__AET10074
augaaggccaucauugugcugcucauggucguuaccagcaacgcugacagaaucugcacaggcauuacguccucuaauagcccccacguggugaaaaccgccacacagggggaggucaacgugaccggaguuaucccucugacaaccacaccgacccggucccauuucgcgaaucuuaagggcacggaaacccgcgggaaacugugucccaagugcccuaacuguacagaucucgacguggcucugggaagacccaaaugcaccggcaagauuccuucugcccgggucagcauccuucacgaggugcgccccguuacauccggguguuuuccuaucaugcaugauagaaccaagauucggcaacugccgaaucuccugcgcggauacgaacacaucagacugucuacgcauaacgugauuaaugccgagaacgcucccggcggcccuuauaaaaucgggacaagcggauccugccccaaugucaccaacggcaauggguucuuugccacaauggcuugggccgugccuaagaacgacaaaaauaagaccgcgaccaacccccucacaauugaagugccguacaucuguacggagggagaggaucagauuaccgucuggggcuuccacagcgacaaugaaacacagauggccaaacuguauggggauucuaagccucagaaguuuaccuccagcgcuaacggaguuacaacccacuacgugucucaaaucggcggcuuccccaaccagacggaggacgggggacuuccucaguccggccggaucguggucgauuauauggugcagaaaagcgggcgcacaggaaccauuaccuaccaaagaggcauccugcucccccagaagguuuggugcgccucugggcgguccaaagugauuaagggaagccugccccuuaucggcgaagcugacugucugcaugagaaauauggcgggcucaauaaguccaaaccuuacuacacaggagagcacgccaaggcgauuggcaacugcccgaucugggucaagacaccccugaaacuggccaaugggaccaaguaucgcccucccgcuaaacuccugaaggaaagaggauuuuucggcgccaucgcuggguuucuugagggcggaugggaaggcaugauugccggguggcauggauacacgucucacggcgcccacgggguggcuguugcggccgaucugaaaagcacccaggaggcuaucaacaagauuacaaagaaucucaacucccugagcgaacuugaggugaaaaaucugcagcggcucucuggagccauggacgagcugcauaacgaaauccuggagcucgaugaaaaggucgacgaccugcgcgccgauaccauuuccagccaaaucgagcuugcugugcugcucucuaaugaaggcaucauuaacagcgaggacgagcaucugcuugcccuggaaagaaaacucaagaaaaugcuggggccuuccgcggucgagaucggcaauggauguuucgaaacaaagcacaagugcaaccagaccugccuggaucggauugcugccggcacguuugacgccggggaguucucucuccccaccuuugauagccugaauaucacagcugccucccuugacgaugacggacuggauaaccacaccauucuccuguauuacagcacagcugccucuucccuggcggugacccuuaugaucgccauuuucguuguguauauggucagcagagacaaugugucuuguuccaucugccucuga

SEQ ID NO: 218749 - RNA, 1758 nt, Artificial Sequence; identical to SEQ ID NO: 218680
  derived and/or modified CDS sequence (opt5) from hemagglutinin__InfluenzaB__AET10076

SEQ ID NO: 218750 - RNA, 1758 nt, Artificial Sequence; identical to SEQ ID NO: 218680
  derived and/or modified CDS sequence (opt5) from hemagglutinin__InfluenzaB__AET10077

SEQ ID NO: 218751 - RNA, 1758 nt, Artificial Sequence
  derived and/or modified CDS sequence (opt5) from hemagglutinin__InfluenzaB__AET10078
augaaggccaucauugugcugcucauggucguuaccagcaacgcugacagaaucugcacaggcauuacguccucuaauagcccccacguggugaaaaccgccacacagggggaggucaacgugaccggaguuaucccucugacaaccacaccgaccaagucccauuucgcgaaucuuaaaggcacggaaacccgggggaagcugugucccaaaugccucaacuguacagaucuggacguggcucuuggacgcccuaagugcaccggcaagauucccucugccagagucagcgugcugcacgagguucggccugugacauccggguguuuucccaucaugcaugaucgcaccaaaaucagacaacucccuaaucugcugcggggauacgaacacauucgccucucuacgcauaacgucaucaaugccgagaacgcuccgggcggccccuauaagauugggacaagcggauccugcccuaaugugaccaacggcaauggguucuuugccacaauggcuugggccgugcccaaaaacgacaagaauaaaaccgcgaccaacccucugacaaucgaaguccccuacauuuguacggagggagaggaucagaucaccguuuggggcuuccacagcgacaaugaaacacagauggccaaacuuuauggggauucuaagccgcagaaguuuaccuccagcgcuaacggagugacaacccacuacgugucucaaauuggcggcuucccuaaccagacggaggacgggggacugccccaguccggcagaaucgucguggauuauaugguucaaaagagcgggaaaacaggaaccaucaccuaccagcggggcauucuccugccucagaagguguggugcgccucugggcgcuccaaagucaucaagggaagccuuccccugauuggcgaagcugacugucuccaugagaaauauggcgggcugaauaaguccaagcccuacuacacaggagagcacgccaaagcgaucggcaacugcccuauuugggugaagaccccgcugaaacucgccaaugggacaaaguauagacccccugcuaaacugcuuaaggaacggggauuuuucggcgccaucgcuggguuucuggagggcggaugggaaggcaugaucgccggguggcauggauacacgucucacggcgcccacgggguugcuguggcggccgaucucaagagcacccaggaggcuauuaacaaaaucacaaagaaucugaacucccuuagcgaacuggaggucaaaaaucuccagcgccugucuggagccauggacgagcugcauaacgaaauucucgagcuggaugaaaagguggacgaccuuagagccgauaccaucuccagccaaauugagcuggcuguccuccugucuaaugaaggcaucaucaacagcgaggacgagcaccuucuggcccucgaacggaaacugaagaagaugcuggggcccuccgcgguggagauuggcaauggauguuucgaaacaaaacauaagugcaaccagaccugccucgaucgcaucgcugccggcacguuuaaugccggggaguucucucugccuaccuuugacagccuuaacauuacagcugccucccugaaugaagauggacucgacaaccacgcuauccugcuguauuacagcaccgccgcgucuucccuugccguuacacucaugauugcuaucuucguggucuauauggugagcagagauaacguuucuuguuccauuugccuguga

SEQ ID NO: 218752 - RNA, 1758 nt, Artificial Sequence
  derived and/or modified CDS sequence (opt5) from hemagglutinin__InfluenzaB__AET10079
augaaggccaucauugugcugcucauggucguuaccagcaacgcugacggcaucugcacagggauuacguccucuaauagcccccacguggugaaaaccgccacacagggagaagucaacgugaccggcguuaucccucugacaaccacaccgaccaagucccauuucgcgaaucuuaaagggacggaaaccagaggaaagcugugucccaaaugcccuaacuguacagaucucgacguggcucugggccggcccaagugcaccgggaagauuccuucugcccgcgucagcauccuucacgaggugagacccguuacauccggauguuuuccuaucaugcaugaucggaccaaaauucgccaacugccgaaucuccugagaggcuacgaacacauccggcugucuacgcauaacgugauuaaugccgagaacgcucccggcgggccuuauaagaucggaacaagcggcuccugccccaaugucaccaacgggaauggauucuuuacaaccauggccugggcugugccuaaaaacgacaagaauaaaaccgccacaaacccccucacgauugaagugccguacaucuguaccgagggcgaggaucagauuacagucuggggguuccacagcgacaaugaaacccagauggcgaagcuguauggagauucuaagccucagaaauuuacauccagcgccaacggcguuaccacgcacuacgugucucaaaucggcggguuccccaaccagacagaggacggaggccuuccucaguccgggcgcaucguggucgauuauauggugcaaaagagcggaaaaaccggcaccauuacauaccagagagggauccugcucccccagaagguuuggugcgcuucuggacgguccaaagugauuaagggcagccugccccuuaucggcgaagccgacugucugcaugagaaauaugggggacucaauaaguccaagccuuacuacaccggcgagcacgcuaaagccauugggaacugcccgaucugggucaagacaccccugaaacuggcgaauggaacgaaguaucgcccucccgccaaacuccugaaggaaagaggcuuuuucggggcuaucgccggcuuucuugagggaggcugggaagggaugauugcuggauggcauggcuacaccucucacggggcccacggaguggccguugcugcggaucucaagagcacacaggaggccaucaacaaaauuaccaagaaucugaacucccugagcgaacuugagguggagaaucugcagcggcucucuggcgcuauggacgaacugcauaacgagauccuggaacucgaugagaaagucgacgaccugcgcgccgauacaauuuccagccaaaucgaacuugccgugcugcucucuaaugaggggaucauuaacagcgaggacgaacaucugcuugcucuggagagaaagcucaaaaagaugcugggcccuuccgccgucgaaaucggaaauggcuguuucgagaccaagcacaaaugcaaccagacgugccuggaucggauugcggcugggaccuuugacgccggagaguucucucuccccacauuugauagccugaauaucaccgccgcuucccuuaacgacgauggccuggacaaucacacaauucuccuguauuacagcaccgccgcuucuucccuggccgugacgcuuaugaucgcgauuuucguuguguauauggucagccgcgauaacgugucuuguuccaucugccucuga

SEQ ID NO: 218753 - RNA, 1758 nt, Artificial Sequence; identical to SEQ ID NO: 218680
  derived and/or modified CDS sequence (opt5) from hemagglutinin__InfluenzaB__AET10080

SEQ ID NO: 218754 - RNA, 1758 nt, Artificial Sequence; identical to SEQ ID NO: 218680
  derived and/or modified CDS sequence (opt5) from hemagglutinin__InfluenzaB__AET10081

SEQ ID NO: 218755 - RNA, 1758 nt, Artificial Sequence
  derived and/or modified CDS sequence (opt5) from hemagglutinin__InfluenzaB__AET10082
augaaggccaucauugugcugcucauggucguuaccagcaacgcugacagaaucugcacaggcauuacguccucuaauagcccccacaucgugaaaaccgccacacagggggaggugaacgucaccggagugauuccucugacaaccacaccgaccaagucccauuucgcgaaucuuaaaggcacggaaacccgggggaagcugugucccaaaugccucaacuguacagaucuggacguugcucuuggacgcccuaagugcaccggcaagauccccucugccagagugagcauccugcacgagguccggccugugacauccggguguuuucccauuaugcaugaucgcaccaaaaucagacaacucccuaaucugcugcggggauacgaacacauucgccucucuacgcauaacguuaucaaugccgagaacgcuccgggcggccccuauaagauugggacaagcggauccugcccuaauaucaccaacggcaauggguucuuugccacaauggcuugggccgugcccaaaaacgacaagaauaaaaccgcgaccaacccucugacaauugaaguccccuacaucuguacggagggagaggaucagaucaccguguggggcuuccacagcgacaaugaaacacagauggccaaacuuuauggggauucuaagccgcagaaguuuaccuccagcgcuaacggagugacaacccacuacgucucucaaauuggcggcuucccuaaccagacggaggacgggggacugccccaguccggcagaaucguuguggauuauauggugcaaaagagcgggaaaacaggaaccauuaccuaccagcggggcauccuccugccucagaaggucuggugcgccucugggcgcuccaaagugauuaagggaagccuuccccugaucggcgaagcugacugucuccaugagaaauauggcgggcugaauaaguccaagcccuacuacacaggagagcacgccaaagcgaucggcaacugcccuauuuggguuaagaccccgcugaaacucgccaaugggacaaaguauagacccccugcuaaacugcuuaaggaacggggauuuuucggcgccaucgcuggguuucuggagggcggaugggaaggcaugauugccggguggcauggauacacgucucacggcgcccacgggguggcugucgcggccgaucucaagagcacccaggaggcuaucaacaaaauuacaaagaaucugaacucccuuagcgaacuggaggugaaaaaucuccagcgccugucuggagccauggacgagcugcauaacgaaauccucgagcuggaugaaaagguugacgaccuuagagccgauaccaucuccagccaaauugagcuggcugugcuccugucuaaugaaggcaucauuaacagcgaggacgagcaccuucuggcccucgaacggaaacugaagaagaugcuggggcccuccgcggucgagaucggcaauggauguuucgaaacaaaacauaagugcaaccagaccugccucgaucgcauugcugccggcacguuugacgccggggaguucucucugccuaccuuugauagccuuaauaucacagcugccucccugaacgacgauggacucgacaaucacaccauucugcuguauuacagcacagcugccucuucccuugcggugacccucaugaucgccaucuucgucguguauaugguuagcagagauaacgugucuuguuccauuugccuguga

SEQ ID NO: 218756 - RNA, 1758 nt, Artificial Sequence
  derived and/or modified CDS sequence (opt5) from hemagglutinin__InfluenzaB__AET10083
augaaggccaucauugugcugcucauggucguuaccagcaacgcugacagaaucugcacaggcauuacguccucuaauagcccccacguggugaaaaccgccacacagggggaggucaacgugaccggaguuaucccucugacaaccacaccgaccaagucccauuucgcgaaucuuaaaggcacggaaacccgggggaagcugugucccaaaugccucaacuguacagaucuggacguggcucuuggacgcccuaagugcaccggcaagguccccucugccagagugagcauucugcacgagguucggccugugacauccggguguuuucccaucaugcaugaucgcaccaaaaucagacaacucccuaaucugcugcggggauacgaacacauucgccucucuacgcauaacgucaucaaugccgagaacgcuccgggcggccccuauaagauugggacaagcggauccugcccuaauaucaccaacggcaauggguucuuugccacaauggcuugggccgugcccaaaaacgacaagaauaaaaccgcgaccaacccucugacaauugaagugcccuacaucuguacggagggagaggaucagauuaccgucuggggcuuccacagcgacaaugaaacacagauggccaaacuuuauggggauucuaagccgcagaaguuuaccuccagcgcuaacggaguuacaacccacuacgugucucaaaucggcggcuucccuaaccagacggaggacgggggacugccccaguccggcagaaucguggucgauuauauggugcaaaagagcgggaaaacaggaaccauuaccuaccagcggggcauccuccugccucagaagguuuggugcgccucugggcgcuccaaagugauuaagggaagccuuccccugaucggcgaagcugacugucuccaugagaaauauggcgggcugaauaaguccaagcccuacuacacaggagagcacgccaaagcgauuggcaacugcccuaucugggucaagaccccgcugaaacucgccaaugggacaaaguauagacccccugcuaaacugcuuaaggaacggggauuuuucggcgccaucgcuggguuucuggagggcggaugggaaggcaugauugccggguggcauggauacacgucucacggcgcccacgggguggcuguugcggccgaucucaagagcacccaggaggcuaucaacaaaauuacaaagaaucugaacucccuuagcgaacuggaggugaaaaaucuccagcgccugucuggagccauggacgagcugcauaacgaaauccucgagcuggaugaaaaggucgacgaccuuagagccgauaccauuuccagccaaaucgagcuggcugugcuccugucuaaugaaggcaucauuaacagcgaggacgagcaccuucuggcccucgaacggaaacugaagaagaugcuggggcccuccgcggucgagaucggcaauggauguuucgaaacaaaacauaagugcaaccagaccugccucgaucgcauugcugccggcacguuugacgccggggaguucucucugccuaccuuugauagccuuaauaucacagcugccucccugaacgacgauggacucgacaaucacaccauucugcuguauuacagcacagcugccucuucccuugcggugacccucaugaucgccauuuucguuguguauauggucagcagagauaacgugucuuguuccaucugccuguga

SEQ ID NO: 218757 - RNA, 1758 nt, Artificial Sequence; identical to SEQ ID NO: 218717
  derived and/or modified CDS sequence (opt5) from hemagglutinin__InfluenzaB__AET10084

SEQ ID NO: 218758 - RNA, 1758 nt, Artificial Sequence; identical to SEQ ID NO: 218680
  derived and/or modified CDS sequence (opt5) from hemagglutinin__InfluenzaB__AET10085

SEQ ID NO: 218759 - RNA, 1758 nt, Artificial Sequence; identical to SEQ ID NO: 218720
  derived and/or modified CDS sequence (opt5) from hemagglutinin__InfluenzaB__AET43124

SEQ ID NO: 218760 - RNA, 1758 nt, Artificial Sequence; identical to SEQ ID NO: 218720
  derived and/or modified CDS sequence (opt5) from hemagglutinin__InfluenzaB__AET43135

SEQ ID NO: 218761 - RNA, 1758 nt, Artificial Sequence; identical to SEQ ID NO: 218720
  derived and/or modified CDS sequence (opt5) from hemagglutinin__InfluenzaB__AET43146

SEQ ID NO: 218762 - RNA, 1758 nt, Artificial Sequence; identical to SEQ ID NO: 218720
  derived and/or modified CDS sequence (opt5) from hemagglutinin__InfluenzaB__AET43157

SEQ ID NO: 218763 - RNA, 1758 nt, Artificial Sequence
  derived and/or modified CDS sequence (opt5) from hemagglutinin__InfluenzaB__AET43168
augaaggccaucauugugcugcucauggucguuaccagcaacgcugacagaaucugcacaggcauuacguccucuaauagcccccacguggugaaaaccgccacacagggggaggucaacgugaccggaguuaucccucugacaaccacaccgaccaagucccauuucgcgaaucuuaaaggcacggaaacccgggggaagcugugucccaaaugccucaacuguacagaucuggacgugacccuuggacgcccuaagugcacaggcaagauucccucugcuagagucagcauccugcacgaggugcggccuguuaccuccggguguuuucccaucaugcaugaucgcacgaaaauuagacaacucccuaaucugcugcggggauacgaacacauccgccucucuacacauaacgugauuaaugccgagaacgccccgggcggccccuauaagaucgggaccagcggauccugcccuaaugucacaaacggcaauggguucuuugcuaccauggccugggcugugcccaaaaacgacaagaauaaaaccgccacaaacccucugacgauugaagugcccuacaucuguaccgagggagaggaucagauuacagucuggggcuuccacagcgacaaugaaacccagauggcgaaacuuuauggggauucuaagccgcagaaguuuacauccagcgccaacggaguuaccacgcacuacgugucucaaaucggcggcuucccuaaccagacagaggacgggggacugccccaguccggcagaaucguggucgauuauauggugcaaaagagcgggaaaaccggaaccauuacauaccagcggggcauccuccugccucagaagguuuggugcgcuucugggcgcuccaaagugauuaagggaagccuuccccugaucggcgaagccgacugucuccaugagaaauauggcgggcugaauaaguccaagcccuacuacaccggagagcacgcuaaagccauuggcaacugcccuaucugggucaagacaccgcugaaacucgcgaaugggacgaaguauagacccccugccaaacugcuuaaggaacggggauuuuucggcgcuaucgccggguuucuggagggcggaugggaaggcaugauugcuggguggcauggauacaccucucacggcgcccacgggguggccguugcugcggaucucaagagcacacaggaggccaucaacaaaauuaccaagaaucugaacucccuuagcgaacuggaggugaaaaaucuccagcgccugucuggagcuauggacgagcugcauaacgaaauccucgagcuggaugaaaaggucgacgaccuuagagccgauacaauuuccagccaaaucgagcuggccgugcuccugucuaaugaaggcaucauuaacagcgaggacgagcaccuucuggcucucgaacggaaacugaagaagaugcuggggcccuccgccgucgagaucggcaauggauguuucgaaaccaaacauaagugcaaccagacgugccucgaucgcauugcggcuggcaccuuugacgccggggaguucucucugccuacauuugauagccuuaauaucaccgccgcuucccugaacgacgauggacucgacaaucacacaauucugcuguauuacagcaccgccgcuucuucccuugccgugacgcucaugaucgcgauuuucguuguguauauggucagcagagauaacgugucuuguuccaucugccuguga

SEQ ID NO: 218764 - RNA, 1758 nt, Artificial Sequence; identical to SEQ ID NO: 218720
  derived and/or modified CDS sequence (opt5) from hemagglutinin__InfluenzaB__AET43179

SEQ ID NO: 218765 - RNA, 1758 nt, Artificial Sequence; identical to SEQ ID NO: 218720
  derived and/or modified CDS sequence (opt5) from hemagglutinin__InfluenzaB__AET43190

SEQ ID NO: 218766 - RNA, 1758 nt, Artificial Sequence
  derived and/or modified CDS sequence (opt5) from hemagglutinin__InfluenzaB__AET43201
augaaggccaucauugugcugcucauggucguuaccagcaacgcugacagaaucugcacaggcauuacguccucuaauagcccccacguggugaaaaccgccacacagggggaagucaacgugaccggaguuaucccucugacaaccacaccgaccaagucccauuucgcgaaucuuaaaggcacggaaacccgggggaagcugugucccaaaugccucaacuguacagaucuggacguggcucuuggacgcccuaagugcaccggcaagauucccucugccagagucagcauccugcacgaggugcggccuguuacauccggguguuuucccaucaugcaugaucgcaccaaaauuagacaacucccuaaucugcugcggggauacgaacacauccgccucucuacgcauaacgugauuaaugccggcaacgcuccgggcgggcccuauaagaucggaacaagcggcuccugcccuaaugucaccaacgggaauggauucuuugccacaauggcuugggccgugcccaaaaacgacaagaauaaaaccgcgaccaacccucugacaauugaggugcccuacaucuguacggaaggcgaggaucagauuaccgucuggggguuccacagcgacaaugagacacagauggccaaacuuuauggagauucuaagccgcagaaguuuaccuccagcgcuaacggcguuacaacccacuacgugucucaaaucggcggguucccuaaccagacggaagacggaggccugccccaguccgggagaaucguggucgauuauauggugcaaaagagcggaaaaacaggcaccauuaccuaccagcgggggauccuccugccucagaagguuuggugcgccucuggacgcuccaaagugauuaagggcagccuuccccugaucggcgaggcugacugucuccaugaaaaauaugggggacugaauaaguccaagcccuacuacacaggcgagcacgccaaagcgauugggaacugcccuaucugggucaagaccccgcugaaacucgccaauggaacaaaguauagacccccugcuaaacugcuuaaggagcggggcuuuuucggggccaucgcuggcuuucuggaaggaggcugggaggggaugauugccggauggcauggcuacacgucucacggggcccacggaguggcuguugcggccgaucucaagagcacccaggaagcuaucaacaaaauuacaaagaaucugaacucccuuagcgagcuggaagugaaaaaucuccagcgccugucuggcgccauggacgagcugcauaacgagauccucgaacuggaugagaaggucgacgaccuuagagccgauaccauuuccagccaaaucgaacuggcugugcuccugucuaaugaggggaucauuaacagcgaagacgagcaccuucuggcccucgagcggaaacugaagaagaugcugggccccuccgcggucgaaaucggaaauggcuguuucgagacaaaacauaagugcaaccagaccugccucgaucgcauugcugccgggacguuugacgccggagaguucucucugccuaccuuugauagccuuaauaucacagcugccucccugaacgacgauggccucgacaaucacaccauucugcuguauuacagcacagcugccucuucccuugcggugacccucaugaucgccauuuucguuguguauauggucagcagagauaacgugucuuguuccaucugccuguga

SEQ ID NO: 218767 - RNA, 1758 nt, Artificial Sequence; identical to SEQ ID NO: 218720
  derived and/or modified CDS sequence (opt5) from hemagglutinin__InfluenzaB__AET43212

SEQ ID NO: 218768 - RNA, 1758 nt, Artificial Sequence; identical to SEQ ID NO: 218720
  derived and/or modified CDS sequence (opt5) from hemagglutinin__InfluenzaB__AET43223

SEQ ID NO: 218769 - RNA, 1758 nt, Artificial Sequence; identical to SEQ ID NO: 218766
  derived and/or modified CDS sequence (opt5) from hemagglutinin__InfluenzaB__AET50943

SEQ ID NO: 218770 - RNA, 1758 nt, Artificial Sequence; identical to SEQ ID NO: 218720
  derived and/or modified CDS sequence (opt5) from hemagglutinin__InfluenzaB__AET50954

SEQ ID NO: 218771 - RNA, 1758 nt, Artificial Sequence; identical to SEQ ID NO: 218720
  derived and/or modified CDS sequence (opt5) from hemagglutinin__InfluenzaB__AET50965

SEQ ID NO: 218772 - RNA, 1758 nt, Artificial Sequence; identical to SEQ ID NO: 218720
  derived and/or modified CDS sequence (opt5) from hemagglutinin__InfluenzaB__AET50976

SEQ ID NO: 218773 - RNA, 1758 nt, Artificial Sequence; identical to SEQ ID NO: 218720
  derived and/or modified CDS sequence (opt5) from hemagglutinin__InfluenzaB__AET74255

SEQ ID NO: 218774 - RNA, 1758 nt, Artificial Sequence; identical to SEQ ID NO: 218766
  derived and/or modified CDS sequence (opt5) from hemagglutinin__InfluenzaB__AET74277

SEQ ID NO: 218775 - RNA, 1758 nt, Artificial Sequence; identical to SEQ ID NO: 218720
  derived and/or modified CDS sequence (opt5) from hemagglutinin__InfluenzaB__AET74288

SEQ ID NO: 218776 - RNA, 1758 nt, Artificial Sequence
  derived and/or modified CDS sequence (opt5) from hemagglutinin__InfluenzaB__AET74299
augaaggccaucauugugcugcucauggucguuaccagcaacgcugacagaaucugcacaggcauuacguccucuaauagcccccacguggugaaaaccgccacacagggggaggucaacgugaccggaguuaucccucugacaaccacaccgaccaagucccauuucgcgaaucuuaaaggcacggaaacccgggggaagcugugucccaaaugccucaacuguacagaucuggacgugacccuuggacgcccuaagugcacaggcaagauucccucugcuagagucagcauccugcacgaggugcggccuguuaccuccggguguuuucccaucaugcaugaucgcacgaaaauuagacaacucccuaaucugcugcggggauacgaacacauccgccucucuacacauaacgugauuaaugccgagaacgccccgggcggccccuauaagaucgggaccagcggauccugcccuaaugucacaaacggcaauggguucuuugcuaccauggccugggcugugcccaaaaacgacaagaauaaaaccgccacaaacccucugacgauugaagugcccuacaucuguaccgagggagaggaucagauuacagucuggggcuuccacagcgacaaugaaacccagauggcgaagcuguauggggauucuaagccgcagaaauuuacauccagcgccaacggaguuaccacgcacuacgugucucaaaucggcggcuucccuaaccagacagaggacgggggacugccccaguccggcagaaucguggucgauuauauggugcaaaagagcgggaaaaccggaaccauuacauaccagcggggcauccuccugccucagaagguuuggugcgcuucugggcgcuccaaagugauuaagggaagccuuccccugaucggcgaagccgacugucuccaugagaaauauggcgggcugaauaaguccaagcccuacuacaccggagagcacgcuaaagccauuggcaacugcccuaucugggucaagacaccgcugaaacucgcgaaugggacgaaguauagacccccugccaaacugcuuaaggaacggggauuuuucggcgcuaucgccggguuucuggagggcggaugggaaggcaugauugcuggguggcauggauacaccucucacggcgcccacgggguggccguugcugcggaucucaagagcacacaggaggccaucaacaaaauuaccaauaaccuuaauucccuuagcgaacuggaggugaagaaccuccagcgccugucuggagcuauggacgagcugcauaaugaaauccucgagcuggaugaaaaagucgacgaccuuagagccgauacaauuuccagccaaaucgagcuggccgugcuccugucuaacgaaggcaucauuaauagcgaggacgagcaccuucuggcucucgaacggaagcugaaaaagaugcuggggcccuccgccgucgagaucggcaacggauguuucgaaaccaagcauaaaugcaaucagacgugccucgaucgcauugcggcuggcaccuuugacgccggggaguucucucugccuacauuugauagccuuaacaucaccgccgcuucccugaaugacgauggacucgacaaccacacaauucugcuguauuacagcaccgccgcuucuucccuugccgugacgcucaugaucgcgauuuucguuguguauauggucagcagagauaacgugucuuguuccaucugccuguga

SEQ ID NO: 218777 - RNA, 1758 nt, Artificial Sequence; identical to SEQ ID NO: 218720
  derived and/or modified CDS sequence (opt5) from hemagglutinin__InfluenzaB__AET74329

SEQ ID NO: 218778 - RNA, 1758 nt, Artificial Sequence; identical to SEQ ID NO: 218720
  derived and/or modified CDS sequence (opt5) from hemagglutinin__InfluenzaB__AET74340

SEQ ID NO: 218779 - RNA, 1758 nt, Artificial Sequence; identical to SEQ ID NO: 218720
  derived and/or modified CDS sequence (opt5) from hemagglutinin__InfluenzaB__AET74351

SEQ ID NO: 218780 - RNA, 1758 nt, Artificial Sequence; identical to SEQ ID NO: 218717
  derived and/or modified CDS sequence (opt5) from hemagglutinin__InfluenzaB__AEY69077

SEQ ID NO: 218781 - RNA, 1758 nt, Artificial Sequence; identical to SEQ ID NO: 218717
  derived and/or modified CDS sequence (opt5) from hemagglutinin__InfluenzaB__AFB77676

SEQ ID NO: 218782 - RNA, 1758 nt, Artificial Sequence
  derived and/or modified CDS sequence (opt5) from hemagglutinin__InfluenzaB__AFB77677
augaaggccaucauugugcugcucauggucguuaccagcaacgcugacagaaucugcacaggcauuacguccucuaauagcccccacguggugaaaaccgccacacagggggaggucaacgugaccggaguuaucccucugacaaccacaccgaccaagucccauuucgcgaaucuuaaaggcacggaaacccgggggaagcugugucccaaaugcuuuaacuguacagaucucgacguggcucugggacgcccuaagugcaccggcaagauucccucugccagagucagcauccuucacgaggugcggccuguuacauccggguguuuccccaucaugcaugaucgcaccaaaauuagacaacugccuaaucuccugcggggauacgaacacauccgccugucuacgcauaacgugauuaaugccgagaacgcuccgggcggccccuauaagaucgggacaagcggauccugcccuaaugucaccaacggcaauggguuuuucgccacaauggcuugggccgugcccaaaaacgacaagaauaaaaccgcgaccaacccucucacaauugaagugcccuacaucuguacggagggagaggaucagauuaccgucuggggcuuucacagcgacaaugaaacacagauggccaagcuguauggggauucuaagccgcagaaauucaccuccagcgcuaacggaguuacaacccacuacgugucucaaaucggcggcuuuccuaaccagacggaggacgggggacuuccccaguccggcagaaucguggucgauuauauggugcaaaagagcgggaaaacaggaaccauuaccuaccagcggggcauccugcucccucagaagguuuggugcgccucugggcgcuccaaagugauuaagggaagccugccccuuaucggcgaagcugacugucugcaugagaaauauggcgggcucaauaaguccaagcccuacuacacaggagagcacgccaaagcgauuggcaacugcccuaucugggucaagaccccgcugaaacuggccaaugggacaaaguauagacccccugcuaaacuccugaaggaacggggauucuuuggcgccaucgcuggguuccuugagggcggaugggaaggcaugauugccggguggcauggauacacgucucacggcgcccacgggguggcuguugcggccgaucucaagagcacccaggaggcuaucaacaaaauuacaaagaaucugaacucccugagcgaacuugaggugaaaaaucugcagcgccucucuggagccauggacgagcugcauaacgaaauccuggagcucgaugaaaaggucgacgaccugagagccgauaccauuuccagccaaaucgagcuugcugugcugcucucuaaugaaggcaucauuaacagcgaggacgagcaucugcuugcccuggaacggaaacucaagaagaugcuggggcccuccgcggucgagaucggcaauggauguuuugaaacaaaacacaagugcaaccagaccugccuggaucgcauugcugccggcacguucgacgccggggaguuuucucucccuaccuucgauagccugaauaucacagcugccucccuuaacgacgauggacuggacaaucacaccauucuccuguauuacagcacagcugccucuucccuggcggugacccuuaugaucgccauuuucguuguguauauggucagcagagauaacgugucuuguuccaucugccucuga

SEQ ID NO: 218783 - RNA, 1758 nt, Artificial Sequence; identical to SEQ ID NO: 218717
  derived and/or modified CDS sequence (opt5) from hemagglutinin__InfluenzaB__AFB77678

SEQ ID NO: 218784 - RNA, 1758 nt, Artificial Sequence; identical to SEQ ID NO: 218717
  derived and/or modified CDS sequence (opt5) from hemagglutinin__InfluenzaB__AFB77679

SEQ ID NO: 218785 - RNA, 1758 nt, Artificial Sequence
  derived and/or modified CDS sequence (opt5) from hemagglutinin__InfluenzaB__AFB77680
augaaggccaucauugugcugcucauggucguuaccagcaacgcugacagaaucugcacaggcauuacguccucuaauagcccccacguggugaaaaccgccacacagggggaggucaacgugaccggaguuaucccucugacaaccacaccgaccaagucccauuucgcgaaucuuaaaggcacggaaacccgggggaagcugugucccaaaugccucaacuguacagaucuggacguggcucuuggacgcccuaagugcaccggcaagauucccucugccagagucagcauccugcacgaggugcggccuaucacauccggguguuuucccauuaugcaugaucgcaccaaaaucagacaacucccuaaucugcugcggggauacgaacacauucgccucucuacgcauaacguuaucaaugccgagaacgcuccgggcggccccuauaagauugggacaagcggauccugcccuaaugugaccaacggcaauggguucuuugccacaauggcuugggccguccccaaaaacgacaagaauaaaaccgcgaccaacccucugacaaucgaagugcccuacauuuguacggagggagaggaucagaucaccguguggggcuuccacagcgacaaugaaacacagauggccaaacuuuauggggauucuaagccgcagaaguuuaccuccagcgcuaacggagucacaacccacuacguuucucaaaucggcggcuucccuaaccagacggaggacgggggacugccccaguccggcagaauugugguggauuauaugguccaaaagagcgggaaaacaggaaccaucaccuaccagcggggcauucuccugccucagaagguguggugcgccucugggcgcuccaaaguuaucaagggaagccuuccccugauuggcgaagcugacugucuccaugagaaauauggcgggcugaauaaguccaagcccuacuacacaggagagcacgccaaagcgaucggcaacugcccuaucugggugaagaccccgcugaaacucgccaaugggacaaaguauagacccccugcuaaacugcuuaaggaacggggauuuuucggcgccauugcuggguuucuggagggcggaugggaaggcaugaucgccggguggcauggauacacgucucacggcgcccacggggucgcuguggcggccgaucucaagagcacccaggaggcuauuaacaaaaucacaaagaaucugaacucccuuagcgaacuggagguuaaaaaucuccagcgccugucuggagccauggacgagcugcauaacgaaauucucgagcuggaugaaaagguggacgaccuuagagccgauaccaucuccagccaaaucgagcuggcuguccuccugucuaaugaaggcauuaucaacagcgaggacgagcaccuucuggcccucgaacggaaacugaagaagaugcuggggcccuccgcgguggagauuggcaauggauguuucgaaacaaaacauaagugcaaccagaccugccucgaucgcaucgcugccggcacguuugacgccggggaguucucucugccuaccuuugauagccuuaauauuacagcugccucccugaacgacgauggacucgacaaucacaccauccugcuguauuacagcacagcugccucuucccuugcggucacccucaugauugccaucuucgugguuuauauggugagcagagauaacgucucuuguuccaucugccuguga

SEQ ID NO: 218786 - RNA, 1758 nt, Artificial Sequence; identical to SEQ ID NO: 218717
  derived and/or modified CDS sequence (opt5) from hemagglutinin__InfluenzaB__AFB77681

SEQ ID NO: 218787 - RNA, 1758 nt, Artificial Sequence
  derived and/or modified CDS sequence (opt5) from hemagglutinin__InfluenzaB__AFB77682
augaaggccaucauugugcugcucauggucguuaccagcaacgcugacagaaucugcacaggcauuacguccucuaauagcccccacguggugaaaaccgccacacagggggaggucaacgugaccggaguuaucccucugacaaccacaccgaccaagucccauuucgcgaaucuuaaaggcacggaaacccgggggaagcugugucccaaaugccucaacuguacagaucuggacguggcucuuggacgcccuaagugcaccggcaagauucccucugccagagucagcauccugcacgaggugcggccuguuacauccggguguuuucccaucaugcaugaucgcaccaaaauuagacaacucccuaaucugcugcggggauacgaacacauccgccucucuacgcauaacgugauuaaugccgagaacgcuccgggcggccccuauaagaucgggacaagcggauccugcccuaauauuaccaacggcaauggguucuuugccacaauggcuugggccguccccaaaaacgacaagaauaaaaccgcgaccaacccucugacaaucgaagugcccuacauuuguacggagggagaggaucagaucaccguguggggcuuccacagcgacaaugaaacacagauggccaaacuuuauggggauucuaagccgcagaaguuuaccuccagcgcuaacggagucacaacccacuacguuucucaaaucggcggcuucccuaaccagacggaggacgggggacugccccaguccggcagaauugugguggauuauaugguccaaaagagcgggaaaacaggaaccaucaccuaccagcggggcauucuccugccucagaagguguggugcgccucugggcgcuccaaaguuaucaagggaagccuuccccugauuggcgaagcugacugucuccaugagaaauauggcgggcugaauaaguccaagcccuacuacacaggagagcacgccaaagcgaucggcaacugcccuaucugggugaagaccccgcugaaacucgccaaugggacaaaguauagacccccugcuaaacugcuuaaggaacggggauuuuucggcgccauugcuggguuucuggagggcggaugggaaggcaugaucgccggguggcauggauacacgucucacggcgcccacggggucgcuguggcggccgaucucaagagcacccaggaggcuauuaacaaaaucacacagaaucugaacucccuuagcgaacuggagguuaagaaucuccaacgccugucuggagccauggacgagcugcauaacgaaauucucgagcuggaugaaaaaguggacgaccuuagagccgauaccaucuccagccagaucgagcuggcuguccuccugucuaaugaaggcauuaucaacagcgaggacgagcaccuucuggcccucgaacggaagcugaaaaagaugcuggggcccuccgcgguggagauuggcaauggauguuucgaaacaaagcauaaaugcaaccagaccugccucgaucgcaucgcugccggcacguuugacgccggggaguucucucugccuaccuuugauagccuuaauauuacagcugccucccugaacgacgauggacucgacaaucacaccauccugcuguauuacagcacagcugccucuucccuugcggucacccucaugauugccaucuucgugguuuauauggugagcagagauaacgucucuuguuccaucugccuguga

SEQ ID NO: 218788 - RNA, 1758 nt, Artificial Sequence; identical to SEQ ID NO: 218717
  derived and/or modified CDS sequence (opt5) from hemagglutinin__InfluenzaB__AFB77683

SEQ ID NO: 218789 - RNA, 1758 nt, Artificial Sequence; identical to SEQ ID NO: 218717
  derived and/or modified CDS sequence (opt5) from hemagglutinin__InfluenzaB__AFB77684

SEQ ID NO: 218790 - RNA, 1758 nt, Artificial Sequence
  derived and/or modified CDS sequence (opt5) from hemagglutinin__InfluenzaB__AFB77685
augaaggccaucauugugcugcucauggucguuaccagcaacgcugacagaaucugcacaggcauuacguccucuaauagcccccacguggugaaaaccgccacacagggggaagucaacgugaccggaguuaucccucugacaaccacaccgaccaagucccauuucgcgaaucuuaaaggcacggaaacccgggggaagcugugucccaaaugccucaacuguacagaucuggacguggcucuuggacgcccuaagugcaccggcaagacacccucugccagagucagcauucugcacgaggugcggccuguuaccuccggguguuuucccaucaugcaugaucgcacgaaaaucagacaacucccuaaucugcugcggggauacgaacacauucgccucucuacacauaacgugaucaaugccgagaacgcuccgggcggccccuauaagauugggaccagcggauccugcccuaauaucacaaacggcaauggguucuuugccaccauggcuugggccguccccaaaaacgacaagaauaaaaccgcgacaaacccucugacgauugaagugcccuacaucuguaccgagggagaggaucagauuacaguguggggcuuccacagcgacaaugaaacccagauggccaaacuuuauggggauucuaagccgcagaaauuuacauccagcgcuaacggagucaccacgcacuacaucucucaaaucggcggcuucccuaaccagacagaggacgggggacugccccaguccggcagaauuguuguggauuauauggugcaaaagagcgaaaagaccgggaccaucacauaccagcggggcauucuccugccucagaaggucuggugcgccucuggacgcuccaaagugaucaaggggagccuuccccugauuggagaggcugacugucuccaugagaaauauggcggccugaauaaguccaagcccuacuacaccggggaacacgccaaagcgaucggaaacugcccuaucuggguuaagacaccgcugaaacucgccaauggcacgaaguauagacccccugcuaaacugcuuaaggagcggggguuuuucggagccauugcuggcuuucuggaagggggcugggagggaaugaucgccggcuggcauggguacaccucucacggagcccacggcguggcugucgcggccgaucucaagagcacacaggaagcuauuaacaaaaucaccaagaaucugaacucccuuagcgagcuggaggugaaaaaucuccagcgccugucuggggccauggacgaacugcauaacgagauucucgaacuggaugagaagguugacgaccuuagagccgauacaaucuccagccaaaucgaacuggcugugcuccugucuaaugagggaauuaucaacagcgaggacgaacaccuucuggcccucgagcggaaacugaagaagaugcugggccccuccgcggucgaaauugggaauggcuguuucgagaccaaacauaagugcaaccagacgugccucgaucgcaucgcugccggaaccuuugacgccggcgaguucucucugccuacauuugauagccuuaauauuaccgcugccucccugaacgacgaugggcucgacaaucacacaauccugcuguauuacagcaccgcugccucuucccuugcggugacgcucaugauugccaucuucgucguguauaugguuagcagagauaacgugucuuguuccaucugccuguga

SEQ ID NO: 218791 - RNA, 1758 nt, Artificial Sequence
  derived and/or modified CDS sequence (opt5) from hemagglutinin__InfluenzaB__AFB77686
augaaggccaucauugugcugcucauggucguuaccagcaacgcugacagaaucugcacaggcauuacguccucuaauagcccccacguggugaaaaccgccacacagggggaggucaacgugaccggaguuaucccucugacaaccacaccgaccaagucccauuucgcgaaucuuaaaggcacggaaacccgggggaagcugugucccaaaugccucaacuguacagaucuggacguggcucuuggacgcccuaagugcaccggcaagauucccucugccagagucagcauccugcacgaggugcggccuguuacauccggguguuuucccaucaugcaugaucgcaccaaaauuagacaacucccuaaucugcugcggggauacgaacacauccgccucucuacgcauaacgugauuaaugccgagaacgcuccgggcggccccuauaagaucgggacaagcggauccugcccuaauauuaccaacggcaauggguucuuugccacaauggcuugggccguccccaaaaacgacaagaauaaaaccgcgaccaacccucugacaaucgaagugcccuacauuuguacggagggagaggaucagaucaccguguggggcuuccacagcgacaaugaaacacagauggccaaacuuuauggggauucuaagccgcagaaguuuaccuccagcgcuaacggagucacaacccacuacguuucucaaaucuccggcuucccuaaccagacggaggacggcgggcugccccagagcggaagaauugugguggauuauaugguccagaagucuggcaaaacagggaccaucaccuaccaacgggggauucuccugccucagaagguguggugcgccuccggccgcagcaaaguuaucaaggggucccuuccccugauuggagaagcugacugucuccaugagaaauauggcggccugaauaagucuaagcccuacuacacaggggagcacgccaaagcgaucggaaacugcccuaucugggugaagaccccgcugaaacucgccaauggcacaaaguauagacccccugcuaaacugcuuaaggaacggggguuuuucggagccauugcuggcuuucuggagggaggcugggaaggaaugaucgccggcuggcauggguacacgagccacggagcccacggcgucgcuguggcggccgaucucaaguccacccaggaggcuauuaacaaaaucacacagaaucugaacagccuuucugaacuggagguuaagaaucuccaacgccuguccggggccauggacgagcugcauaacgaaauucucgagcuggaugaaaaaguggacgaccuuagagccgauaccaucagcucucagaucgagcuggcuguccuccugagcaaugaaggaauuaucaacuccgaggacgagcaccuucuggcccucgaacggaagcugaaaaagaugcugggccccucugcgguggagauugggaauggcuguuucgaaacaaagcauaaaugcaaccagaccugccucgaucgcaucgcugccggaacguuugacgccggcgaguucagccugccuaccuuugauucccuuaauauuacagcugccagccugaacgacgaugggcucgacaaucacaccauccugcuguauuacucuacagcugccuccagccuugcggucacccucaugauugccaucuucgugguuuauauggugucuagagauaacgucuccuguagcaucugccuguga

SEQ ID NO: 218792 - RNA, 1758 nt, Artificial Sequence
  derived and/or modified CDS sequence (opt5) from hemagglutinin__InfluenzaB__AFB77687
augaaggccaucauugugcugcucauggucguuaccagcaacgcugacagaaucugcacaggcauuacguccucuaauagcccccacguggugaaaaccgccacacagggggaggucaacgugaccggaguuaucccucugacaaccacaccgaccaagucccauuucgcgaaucuuaaaggcacggaaacccgggggaagcugugucccaaaugccucaacuguacagaucuggacguggcucuuggacgcccuaagugcaccggcaagauucccucugccagagucagcauccugcacgaggugcggccuguuacauccggguguuuucccaucaugcaugaucgcaccaaaauuagacaacucccuaaucugcugcggggauacgaacacaucaagcucucuacgcauaacgugauuaaugccgagaacgcuccgggcggccccuauaaaaucgggacaagcggauccugcccuaaugucaccaacggcaauggguucuuugccacaauggcuugggccgugcccaagaacgacaaaaauaagaccgcgaccaacccucugacaauugaagugcccuacaucuguacggagggagaggaucagauuaccgucuggggcuuccacagcgacaaugaaacacagauggccaaacuuuauggggauucuaaaccgcagaaguuuaccuccagcgcuaacggaguuacaacccacuacgugucucaaaucggcggcuucccuaaccagacggaggacgggggacugccccaguccggccgcaucguggucgauuauauggugcagaaaagcgggaagacaggaaccauuaccuaccaaagaggcauccuccugccucagaaaguuuggugcgccucugggcgguccaaggugauuaaaggaagccuuccccugaucggcgaagcugacugucuccaugagaaguauggcgggcugaauaaguccaaacccuacuacacaggagagcacgccaaggcgauuggcaacugcccuaucugggucaaaaccccgcugaagcucgccaaugggacaaaauauagacccccugcuaagcugcuuaaggaacgcggauuuuucggcgccaucgcuggguuucuggagggcggaugggaaggcaugauugccggguggcauggauacacgucucacggcgcccacgggguggcuguugcggccgaucucaaaagcacccaggaggcuaucaacaagauuacaaagaaucugaacucccuuagcgaacuggaggugaagaaucuccagcggcugucuggagccauggacgagcugcauaacgaaauccucgagcuggaugaaaaagucgacgaccuucgcgccgauaccauuuccagccaaaucgagcuggcugugcuccugucuaaugaaggcaucauuaacagcgaggacgagcaccuucuggcccucgaaagaaagcugaagaaaaugcuggggcccuccgcggucgagaucggcaauggauguuucgaaacaaagcauaaaugcaaccagaccugccucgaucggauugcugccggcacguuugacgccggggaguucucucugccuaccuuugauagccuuaauaucacagcugccucccugaacgacgauggacucgacaaucacaccauucugcuguauuacagcacagcugccucuucccuugcggugacccucaugaucgccauuuucguuguguauauggucagccgcgauaacgugucuuguuccaucugccuguga

SEQ ID NO: 218793 - RNA, 1758 nt, Artificial Sequence
  derived and/or modified CDS sequence (opt5) from hemagglutinin__InfluenzaB__AFB77688
augaaggccaucauugugcugcucauggucguuaccagcaacgcugacagaaucugcacaggcauuacguccucuaauagcccccacguggugaaaaccgccacacagggggaggucaacgugaccggaguuaucccucugacaaccacaccgaccaagucccauuucgcgaaucuuaaaggcacggaaacccgggggaagcugugucccaaaugccucaacuguacagaucuggacguggcucuuggacgcccuaagugcaccggcaagauucccucugccagagucagcauccugcacgaggugcggccuguuacauccggguguuuucccaucaugcaugaucgcaccaaaauuagacaacucccuaaucugcugcggggauacgaacacauccgccucucuacgcauaacgugauuaaugccgagaacgcuccgggcggccccuauaagaucgggacaagcggauccugcccuaaugucaccaacggcaauggguucuuugccacaauggcuugggccgugcccaaaaacgacaagaauaaaaccgcgaccaacccucugacaauugaagugcccuacaucuguacggagggagaggaucagauuaccgucuggggcuuccacagcgacaaugaaacacagauggccaaacuuuauggggauucuaagccgcagaaguuuaccuccagcgcuaacggaguuacaacccacuacgugucucaaaucggcggcuucccuaaccagacggaggacgggggacugccccaguccggcagaaucguggucgauuauauggugcaaaagagcgggaaaacaggaaccauuaccuaccagcggggcauccuccugccucagaagguuuggugcgccucugggcgcuccaaagugauuaagggaagccuuccccugaucggcgaagcugacugucuccaugagaaauauggcgggcugaauaaguccaagcccuacuacacaggagagcacgccaaagcgauuggcaacugcccuaucugggucaaggccccgcugaaacucgcuaaugggaccaaguauagacccccugccaaacugcuuaaggaacggggauuuuucggcgcuaucgccggguuucuggagggcggaugggaaggcaugauugccggguggcauggauacacaucucacggcgcucacgggguggcgguugccgcugaucucaagagcacgcaggaggccaucaacaaaauuaccaagaaucugaacucccuuagcgaacuggaggugaaaaaucuccagcgccugucuggagccauggacgagcugcauaacgaaauccucgagcuggaugaaaaggucgacgaccuuagagcugauacaauuuccagccaaaucgagcuggccgugcuccugucuaaugaaggcaucauuaacagcgaggacgagcaccuucuggcgcucgaacggaaacugaagaagaugcuggggcccuccgcugucgagaucggcaauggauguuucgaaaccaaacauaagugcaaccagacaugccucgaucgcauugccgccggcaccuuugacgcuggggaguucucucugccuacguuugauagccuuaauaucaccgccgcuucccugaacgacgauggacucgacaaucacacaauucugcuguauuacagcaccgccgcgucuucccuugccgugacacucaugaucgcuauuuucguuguguauauggucagcagagauaacgugucuuguuccaucugccuguga

SEQ ID NO: 218794 - RNA, 1758 nt, Artificial Sequence; identical to SEQ ID NO: 218717
  derived and/or modified CDS sequence (opt5) from hemagglutinin__InfluenzaB__AFB77689

SEQ ID NO: 218795 - RNA, 1758 nt, Artificial Sequence; identical to SEQ ID NO: 218717
  derived and/or modified CDS sequence (opt5) from hemagglutinin__InfluenzaB__AFB77690

SEQ ID NO: 218796 - RNA, 1758 nt, Artificial Sequence; identical to SEQ ID NO: 218755
  derived and/or modified CDS sequence (opt5) from hemagglutinin__InfluenzaB__AFE00360

SEQ ID NO: 218797 - RNA, 1758 nt, Artificial Sequence; identical to SEQ ID NO: 218755
  derived and/or modified CDS sequence (opt5) from hemagglutinin__InfluenzaB__AFF18534

SEQ ID NO: 218798 - RNA, 1758 nt, Artificial Sequence; identical to SEQ ID NO: 218755
  derived and/or modified CDS sequence (opt5) from hemagglutinin__InfluenzaB__AFF18543

SEQ ID NO: 218799 - RNA, 1758 nt, Artificial Sequence; identical to SEQ ID NO: 218717
  derived and/or modified CDS sequence (opt5) from hemagglutinin__InfluenzaB__AFG48978

SEQ ID NO: 218800 - RNA, 1758 nt, Artificial Sequence; identical to SEQ ID NO: 218717
  derived and/or modified CDS sequence (opt5) from hemagglutinin__InfluenzaB__AFG48997

SEQ ID NO: 218801 - RNA, 1758 nt, Artificial Sequence
  derived and/or modified CDS sequence (opt5) from hemagglutinin__InfluenzaB__AFG48998
augaaggccaucauugugcugcucauggucguuaccagcaacgcugacagaaucugcacaggcauuacguccucuaauagcccccacguggugaaaaccgccacacagggggaagucaacgugaccggaguuaucccucugacaaccacaccgaccaagucccauuucgcgaaucuuaaaggcacggaaacccgggggaagcugugucccaaaugcccuaacuguacagaucucgacguggcucugggacgccccaagugcaccggcaagauuccuucugccagagucagcauccuucacgaggugcggcccguuacauccggguguuuuccuaucaugcaugaucgcaccaaaauuagacaacugccgaaucuccugcggggauacgaacacauccgccugucuacgcauaacgugauuaaugccgagaacgcucccggcggcccuuauaagaucgggacaagcggauccugccccaaugucaccaacggcaauggguucuuugaaacaauggccugggcugugccuaaaaacgacaagaauaaaaccgccaccaacccccucacaauugaggugccguacaucuguacggagggagaagaucagauuaccgucuggggcuuccacagcgacaaugagacacagauggcgaagcuguauggggauucuaagccucagaaauuuaccuccagcgccaacggaguuacaacccacuacgugucucaaaucggcggcuuccccaaccagacggaagacgggggacuuccucaguccggcagaaucguggucgauuauauggugcaaaagagcgggaaaacaggaaccauuaccuaccagcggggcauccugcucccccagaagguuuggugcgcuucugggcgcuccaaagugauuaagggaagccugccccuuaucggcgaggccgacugucugcaugagaaauauggcgggcucaauaaguccaagccuuacuacacaggagaacacgcuaaagccauuggcaacugcccgaucugggucaagacaccccugaaacuggcgaaugggaccaaguauagaccucccgccaaacuccugaaggagcggggauuuuucggcgcuaucgccggguuucuugaaggcggaugggagggcaugauugcuggguggcauggauacacgucucacggcgcccacgggguggccguugcugcggaucucaagagcacccaggaagccaucaacaaaauuacaaagaaucugaacucccugagcgagcuugaggugaaaaaucugcagcgccucucuggagcuauggacgaacugcauaacgagauccuggaacucgaugagaaggucgacgaccugagagccgauaccauuuccagccaaaucgaacuugccgugcugcucucuaaugagggcaucauuaacagcgaggacgaacaucugcuugcucuggagcggaaacucaagaagaugcuggggccuuccgccgucgaaaucggcaauggauguuucgagacaaaacacaagugcaaccagaccugccuggaucgcauugcggcuggcacguuugacgccggggaguucucucuccccaccuuugauagccugaauaucacagccgcuucccuuaacgacgauggacuggacaaucacaccauucuccuguauuacagcacagccgcuucuucccuggccgugacccuuaugaucgcgauuuucguuguguauauggucagcagagauaacgugucuuguuccaucugccucuga

SEQ ID NO: 218802 - RNA, 1755 nt, Artificial Sequence
  derived and/or modified CDS sequence (opt5) from hemagglutinin__InfluenzaB__AFG49012
augaaggccaucauugugcugcucauggucguuaccagcaacgcugacagaaucugcacaggcauuacguccucuaauagcccccacguggugaaaaccgccacacagggggaagucaacgugaccggaguuaucccucugacaaccacaccgaccaaguccuacuucgcgaaucuuaaaggcacgaagacccgggggaaacugugucccgauugccucaacuguacagaccuggauguggcucuuggacgcccuaugugcgucggcaccacacccucugccaaggccagcauucugcaugaagugagaccuguuaccuccggguguuuucccaucaugcacgaccggacgaagauccgccaacucccuaaucugcugagaggauaugagaacauucggcucucuacacagaaugugaucgaugcugaaaaagccccgggcggccccuaccgccuggggaccagcggauccugcccuaacgcuacaagcaagauuggcuucuuugccaccauggcgugggccguccccaaagacaauuauaagaacgcuaccaauccucuuacaguggaggugcccuacaucuguacggaaggggaggaucagauuaccgucuggggauuccauucugacaacaaaacacagaugaagaaucuguauggcgauuccaacccgcaaaaguuuaccagcucugccaaugggguuacaacccacuacgugucccagaucggagacuucccugaucagacggaggacggcggccucccccagagcgggagaauuguggucgauuauaugaugcaaaaaccuggaaagacaggcaccaucguguaccagcgcgggguucugcuuccccagaaaguguggugcgcuucuggacgguccaaggucaucaaaggcagccugccccucauuggggaagccgacugucugcaugagaaguacggaggccugaacaaauccaagccuuauuacaccggcgaacacgcgaaggccaucgggaacugcccgauuugggugaaaacaccccucaagcuggcuaauggaaccaaauauagaccucccgccaagcugcugaaagagcggggcuuuuucggggcuaucgccucuuuucucgagggaggcugggaagggaugauugccggcuggcacggauacacaagccauggcgcucacgggguugcgguggccgcugaccugaaguccacgcaggaggccaucaacaagaucaccaaaaaucuuaacagccugucugaacucgaggucaagaaucugcaacgccuguccggagccauggaugaacuccauaacgagauucuggagcuugacgaaaaaguggaugaccugagagcugauacaaucagcucucagauugagcucgccguccugcuuagcaaugaaggcaucauuaacuccgaggacgaacaccuucucgcgcuggagcggaagcugaaaaagaugcucgggccuucugcuguggauaucggaaauggcuguuucgagaccaagcacaaaugcaaccagacaugccuggaccgcaucgccgccgggaccuuuaaugcuggcgaguucagccuucccacguuugauucccugaacauuaccgccgcuagccucaaugacgauggacuggacaaccauacaauccugcuuuauuacucuaccgccgcguccagccucgccguuacacugaugcuggcuauuuucaucguguauauggucucuagagacaauguguccuguagcauuugccucuga

SEQ ID NO: 218803 - RNA, 1755 nt, Artificial Sequence
  derived and/or modified CDS sequence (opt5) from hemagglutinin__InfluenzaB__AFG49013
augaaggccaucauugugcugcucauggucguuaccagcaacgcugacagaaucugcacaggcauuacguccucuaauagcccccacguggugaaaaccgccacacagggggaggucaacgugaccggaguuaucccucugacaaccacaccgaccaaguccuacuucgcgaaucuuaaaggcacgaagacccgggggaaacugugucccgauugccucaacuguacagaccuggauguggcucuuggacgcccuaugugcgucggcaccacacccucugccaaggccagcauucugcaugaagugagaccuguuaccuccggguguuuucccaucaugcacgaccggacgaagauccgccaacucgcuaaucugcugagaggauaugagaacauucggcucucuacacagaaugugaucgaugccgaaaaagcuccuggcggcccguaccgccuggggaccagcggauccugccccaacgccacaagcaagucuggcuucuuugcgaccauggccugggcugucccuaaagacaauaacaagaaugccaccaacccccuuacaguggaggugccuuauauuuguacggaaggggaggaucagaucaccgucuggggauuccauuccgacaauaaaacacagaugaagaaccuguacggcgauagcaauccccaaaaguuuaccucuuccgcuaacgggguuacaacccacuaugugagccagauuggaggcuucccggaccagacggaggauggcgggcucccucagucuggaagaaucguggucgacuacaugaugcaaaaacccggcaagacagggaccauuguguaucagcggggaguucugcuuccucagaaaguguggugcgccuccggccgcagcaaggucaucaaagggucccugccccucaucggagaagcggauugucugcaugagaaguacggcggccugaacaaaucuaagcccuacuauaccggggaacacgccaaggcuauuggaaauugcccuaucugggugaaaacaccgcucaagcuggccaacggcaccaaauacagacccccugcuaagcugcugaaagagcggggguuuuucggagccauugccggcuuucucgaagggggcugggaaggaaugaucgcuggcuggcacggguauacaagccauggagcgcacggcguugccguggcugccgaccugaaguccacgcaggaggccauuaauaagaucaccaaaaaccuuaauagccugucugaacucgaggucaagaaccugcaacgccuguccggggcuauggacgaacuccauaaugagauccuggagcuugaugaaaaaguggacgaucugagagccgacacaauuagcucucagaucgagcucgcgguccugcuuagcaacgaaggaauuaucaauuccgaggaugaacaccuucucgcucuggagcggaagcugaaaaagaugcucggccccucugccguggacauugggaacggcuguuucgagaccaagcacaaaugcaaucagacaugccuggaucgcaucgccgcuggaaccuuuaacgccggcgaguucagccuuccuacguuugacucccugaauaucaccgcugccagccucaacgaugacgggcuggauaaucauacaauucugcuuuacuauucuaccgcggccuccagccucgcuguuacacugaugcuggccaucuucauuguguacauggucucuagagacaacguguccuguagcaucugccucuga

SEQ ID NO: 218804 - RNA, 1755 nt, Artificial Sequence
  derived and/or modified CDS sequence (opt5) from hemagglutinin__InfluenzaB__AFH57865
augaaggccaucauugugcugcucauggucguuaccagcaacgcugacagaaucugcacaggcauuacguccucuaauagcccccacguggugaaaaccgccacacagggggaggucaacgugaccggaguuaucccucugacaaccacaccgaccaaguccuacuucgcgaaucuuaaaggcacgcggacccgcgggaagcugugucccgauugccucaacuguacagaccuggauguggcucuuggaagaccuaugugcgucggcaccacacccucugccaaagccagcauucugcaugaagugcggccuguuaccuccggguguuuucccaucaugcacgaccgcacgaagaucagacaacucccuaaucugcugcggggauaugagaacauucgccucucuacacagaaugugaucgaugcugaaaaggccccgggcggccccuacagacuggggaccagcggauccugcccuaacgcuacaagcaaaucuggcuucuuugccaccauggcgugggccguccccaaggacaauaacaaaaaugcuaccaacccucuuacaguggaggugcccuauauuuguacggaaggggaggaucagaucaccgucuggggauuccauuccgacaauaagacaccgaugaaaaaccuguacggcgauagcaauccucagaaguuuaccucuuccgccaacgggguuacaacccacuaugugagccaaauuggaggcuuccccgaccagacggaggauggcgggcucccucagucuggacggaucguggucgacuacaugaugcagaagcccggcaaaacagggaccauuguguaucaacgcggaguucugcuuccccagaagguguggugcgcuuccggcagaagcaaagucaucaaggggucccugccucucaucggagaagccgauugucugcaugagaaauacggcggccugaacaagucuaaaccguacuauaccggggaacacgcgaaggccauuggaaauugccccaucugggugaagacaccucucaaacuggcuaacggcaccaaguaccggcccccugccaaacuucugaaggagcgcggguuuuucggagcuauugccggcuuucucgaagggggcugggaaggaaugaucgccggcuggcacggguauacaagccauggagcucacggcguugcgguggccgcugaccugaaauccacgcaggaggccauuaauaagaucaccaagaaccuuaauagccugucugaacucgaggucaaaaaccugcagagacuguccggggccauggacgaacuccauaaugagauccuggagcuugaugaaaagguggacgaucugcgggcugacacaauuagcucucaaaucgagcucgccguccugcuuagcaacgaaggaauuaucaauuccgaggaugaacaucugcucgcgcuggagcgcaaacugaagaaaaugcucggccccucugcuguggacauugggaacggcuguuucgagaccaagcacaagugcaaucagacaugccuggauagaaucgccgccggaaccuuuaacgcuggcgaguucagccuuccgacguuugacucccugaauaucaccgccgcuagccucaacgaugacgggcuggauaaucacacaauucugcuuuacuauucuaccgccgcguccagccucgccguuacacugaugcuggcuaucuucauuguguacauggucucucgggacaacguguccuguagcaucugccucuga

SEQ ID NO: 218805 - RNA, 1755 nt, Artificial Sequence
  derived and/or modified CDS sequence (opt5) from hemagglutinin__InfluenzaB__AFH57876
augaaggccaucauugugcugcucauggucguuaccagcaacgcugacagaaucugcacaggcauuacguccucuaauagcccccacguggugaaaaccgccacacagggggaggucaacgugaccggaguuaucccucugacaaccacaccgaccaaguccuacuucgcgaaucuuaaaggcacgcggacccgcgggaagcugugucccgauugccucaacuguacagaccuggauguggcucuuggaagaccuaugugcgucggcaccacacccucugccaaagccagcauucugcaugaagugcggccuguuaccuccggguguuuucccaucaugcacgaccgcacgaagaucagacaacucccuaaucugcugcggggauaugagaacauucgccucucuacacagaaugugaucgaugcugaaaaggccccgggcggccccuacagacuggggaccagcggauccugcccuaacgcuacaagcaaaucuggcuucuuugccaccauggcgugggccguccccaaggacaauaacaaaaaugcuaccaacccucuuacaguggaggugcccuauauuuguacggaaggggaggaucagaucaccgucuggggauuccauuccgacaauaagaaccagaugaaaaaucuguacggcgauagcaacccgcaaaaguuuacaucuuccgccaacgggguuaccacacacuaugugagccagauuggaucuuucccugaccagaccgaggauggcggccucccccaguccgggcggaucguggucgacuacaugaugcaaaagccuggaaaaacgggcacaauuguguaucagcgcgggauccugcuuccccagaagguuuggugcgcuagcggaagauccaaagugaucaagggcucucugccccucauuggggaagccgauugucugcaugagaaauacggaggccugaauaagagcaaaccuuacuauaccggcgaacacgcgaaggccaucgggaacugcccgauuugggucaagacaccccucaaacuggcuaauggaaccaaguaccggccucccgccaaacuucugaaggagcgcggcuuuuucggggcuaucgccggauuucucgagggcgggugggaaggcaugauugccggauggcacggcuauaccucccauggggcucacggaguggcgguugccgcugaccugaaaagcacacaggaggccaucaacaagaucacgaagaaucuuaacucucuguccgaacucgaggugaaaaaucugcaaagacugagcggcgccauggacgaacuccauaacgagauucuggagcuugaugaaaaggucgacgaucugcgggcugacaccaucucuagccagauugagcucgccgugcugcuuuccaaugaagggaucauuaacucugaggaugaacaucugcucgcgcuggagcgcaaacugaagaaaaugcucggaccuagcgcugucgagaucggcaauggguguuucgaaacaaagcacaagugcaaccagaccugccuggacagaaucgccgccggcacauuuaaugcuggagaguucucccuucccaccuuugauagccugaacauuacggccgcuucucucaaugacgauggccuggacaaccacaccauccugcuuuacuauuccacagccgcgagcucucucgccgugacccugaugcuggcuauuuucaucguuuacauggugucccgggauaacgucagcuguuccauuugccucuga

SEQ ID NO: 218806 - RNA, 1755 nt, Artificial Sequence
  derived and/or modified CDS sequence (opt5) from hemagglutinin__InfluenzaB__AFH57942
augaaggccaucauugugcugcucauggucguuaccagcaacgcugacagaaucugcacaggcauuacguccucuaauagcccccacguggugaaaaccgccacacagggggaagucaacgugaccggaguuaucccucugacaaccacaccgaccaaguccuacuucgcgaaucuuaaaggcacgcggacccgcgggaagcugugucccgauugccucaacuguacagaccuggauguggcucuuggaagaccuaugugcgucggcaccacacccucugccaaagccagcauucugcaugaagugcggccuguuaccuccggguguuuucccaucaugcacgaccgcacgaagaucagacaacucccuaaucugcugcggggauaugagaacauucgccucucuacacagaaugugaucgaugcugaaaaggccccgggcggccccuacagacuggggaccagcggauccugcccuaacgcuacaagcaaaauuggcuucuuugccaccauggcgugggccguccccaaggacaauuauaaaaacgcuaccaauccucuuacaguggaggugcccuacaucuguacggaaggggaggaucagauuaccgucuggggauuccauucugacaacaagaaucagaugaaaucccuguauggcgauagcaacccgcaaaaguuuacaucuuccgccaaugggguuaccacacacuacgugagccagaucggagacuucccugaucagaccgaggacggcggccucccccagucugggcggauuguggucgauuauaugaugcaaaagccuggaaaaacgggcacaaucguguaccagcgcgggguucugcuuccccagaagguguggugcgcuuccggaagaagcaaagucaucaagggcucccugccccucauuggggaagccgacugucugcaugagaaauacggaggccugaacaagucuaaaccuuauuacaccggcgaacacgcgaaggccaucgggaacugcccgauuugggugaagacaccccucaaacuggcuaauggaaccaaguaucggccucccgccaaacuucugaaggagcgcggcuuuuucggggcuaucgccggauuucucgagggcgggugggaaggcaugauugccggauggcacggcuacaccagccauggggcucacggaguugcgguggccgcugaccugaaauccacacaggaggccaucaacaagaucacgaagaaucuuaacagccugucugaacucgaggucaaaaaucugcaaagacuguccggcgccauggaugaacuccauaacgagauucuggagcuugacgaaaagguggaugaccugcgggcugauaccaucagcucucagauugagcucgccguccugcuuagcaaugaagggaucauuaacuccgaggacgaacaucugcucgcgcuggagcgcaaacugaagaaaaugcucggaccuucugcuguggauaucggcaauggguguuucgagacaaagcacaagugcaaccagaccugccuggacagaaucgccgccggcacauuuaaugcuggagaguucagccuucccaccuuugauucccugaacauuacggccgcuagccucaaugacgauggccuggacaaccacaccauccugcuuuauuacucuacagccgcguccagccucgccguuacccugaugcuggcuauuuucaucguguauauggucucucgggacaauguguccuguagcauuugccucuga

SEQ ID NO: 218807 - RNA, 1752 nt, Artificial Sequence
  derived and/or modified CDS sequence (opt5) from hemagglutinin__InfluenzaB__AFH57986
augaaggccaucauugugcugcucauggucguuaccagcaacgcugacagaaucugcacaggcauuacguccucuaauagcccccacguggugaaaaccgccacacagggggaggucaacgugaccggaguuaucccucugacaaccacaccgaccaagucccauuucgcgaaucuuaaaggcacgaagacccgggggaaacugugucccaacugccucaauuguacagaucuggacguggcucuuggacgcccuaugugcgucggcaccacacccucugccaaggccagcauucugcacgaagugagaccuguuaccuccggguguuuucccaucaugcaugaucggacgaagauccgccaacucccuaaccugcugagaggauacgagaauauucggcucucuacacagaacgugaucaaugcugaacgcgccccgggcggccccuauagacuggggaccagcggauccugcccuaacgucacaagccgggacggcuucuuugcuaccauggccugggcggugccccgcgauaauaaaaccgccacaaacccucuuacgguggagguccccuacauuuguaccaagggggaagaccagaucacaguuuggggauuccacucugaugacaaaacccagaugaagaaucuguauggcgauuccaacccgcaaaaauuuacaagcucugcuaauggggugaccacgcauuacgugucccagauuggaggcuucccuaaccagacagaggacggcgggcucccccagagcggaagaaucgucguggauuauaugguucaaaagccuggcaagaccgggaccauuguguaccagcggggaguccugcuuccccagaaaguguggugcgccucuggccgcuccaagguuaucaaagggagccugccccucaucggagaggcugacugucugcacgaaaaguauggcggccugaacaaauccaagccuuacuacacaggggagcacgccaaagcgauuggaaauugcccgaucugggugaagacaccccucaagcuggccaacggcaccaaauauagaccucccgcuaagcugcugaaagaacggggguuuuucggagccauugcuggcuuucucgaagggggcugggagggaaugaucgccggcuggcauggguacacgucucacggagcccauggcgucgcuguggcggccgaucuuaagagcacccaggaggcuauuaauaaaaucacaaagaaccuuaauucccugagcgagcucgaagucaagaaccugcaacgccugucuggggccauggacgagcuccacaaugaaauccuggagcuugacgagaaaguggaugaccugagagccgauaccauuuccagccagaucgaacucgcuguucugcuuucuaacgagggaauuaucaauagcgaagacgagcaucugcucgcccuggaacggaagcugaaaaagaugcucggcccuuccgcgguggauauugggaacggcuguuucgagacaaaacacaagugcaaucagaccugccuggacagaaucgcugccggaacguuuaacgccggcgaguucucucuucccaccuuugauagccugaauaucacagcugccucccucaacgacgaugggcuggacaaucacaccauucugcuuuauuacagcacagcugccucuucccucgcggucacccugaugaucgccauuuucaucguguauaugguuagccgcgauaacgugucuuguuccauuugccuguga

SEQ ID NO: 218808 - RNA, 1758 nt, Artificial Sequence
  derived and/or modified CDS sequence (opt5) from hemagglutinin__InfluenzaB__AFH58249
augaaggccaucauugugcugcucauggucguuaccagcaacgcugacagaaucugcacaggcauuacguccucuaauagcccccacguggugaaaaccgccacacagggggaagucaacgugaccggaguuaucccucugacaaccacaccgaccaagucccauuucgcgaaucuuaaaggcacgaagacccgggggaaacugugucccaagugccucaacuguacagaucuggacguggcucuuggacgcccuaagugcaccggcaauauucccccugccaaagucucuauccugcacgaagugagacccguuacaagcggguguuuuccuaucaugcaugaucggaccaagauucgccaacucccgaaccugcugagaggauacgagcggauccgccucuccaaucacaacgugauuaaugccgaagaggcucccggcggcccuuauaaaaucgggacgucuggaagcugccccaacgucacaaauggcaacggguucuuugccaccauggcuugggccgugccuaagaaugaaaacaauaaaacagcgaccaacucccugaccauugaggugcccuacaucuguacagagggagaagaccagauuacggucuggggcuuccauagcgauucugagacccagauggccaaacuuuauggggacuccaagccgcagaaauuuacaagcucugcuaacggaguuaccacacacuacgugucccaaaucggcggcuucccuaaucagaccgaagaugggggacugccccagagcggcagaaucguggucgacuauauggugcagaagucugggaaaacgggaacaauuaccuaccaacggggcauccuccugccucagaagguuuggugcgccuccgggcgcagcaaagugauuaagggaucccuuccccugaucggcgaggcugauugucuccacgagaaauauggcgggcugaacaagucuaagcccuacuacaccggagaacaugccaaagcgauuggcaauugcccuaucugggucaagacaccgcugaaacucgccaacgggaccaaguauagacccccugcuacacugcuuaaagagcggggauuuuucggcgccaucgcuggguuucuggaaggcggaugggagggcaugauugccggguggcacggauacacgagccauggcgcccacgggguggcuguugcggccgaccucaaguccacccaggaagcuaucaauaagauuacaaagaaccugaauagccuuucugagcuggaggugaagaaccuccagcgccuguccggagccauggaugaacugcacaaugagauccucgaacuggacgagaaagucgaugaccuuagagccgacaccauuagcucucaaaucgaacuggcugugcuccugagcaacgagggcaucauuaauuccgaggaugaacaucuucuggcccucgagcggaagcugaaaaagaugcuggggcccucugcggucgaaaucggcaacggauguuucgagacaaagcacaaaugcaaucagaccugccucgaccgcauugcugccggcacguuuaacgccggggaguucagccugccuaccuuugauucccuuaauaucacagcugccagccugaacgacgauggacucgacaaccauaccauucugcuguauuacucuacagcugccuccagccuugcggugacccucaugaucgccauuuucguuguguauauggucucuagagauaauguguccuguagcaucugccuguga

SEQ ID NO: 218809 - RNA, 1758 nt, Artificial Sequence
  derived and/or modified CDS sequence (opt5) from hemagglutinin__InfluenzaB__AFH58260
augaaggccaucauugugcugcucauggucguuaccagcaacgcugacagaaucugcacaggcauuacguccucuaauagcccccacguggugaaaaccgccacacagggggaggucaacgugaccggaguuaucccucugacaaccacaccgaccaagucccauuucgcgaaucuuaaaggcacgaagacccgggggaaacugugucccaagugccucaacuguacagaucuggacguggcucuuggacgcccuaagugcaccggcaauauucccucugccgaagucagcauccugcacgaggugagaccuguuacauccggguguuuucccaucaugcaugaucggaccaaaauucgccaacucccuaaccugcugagaggauacgaacacauccggcucucuacgcauaaugugauuaacgccgagaaggcuccgggcggccccuauaaaaucgggacaagcggauccugcccuaaugucaccaacggcaauggguucuuugccacaauggcuugggccgugcccaagaacgacaauaacaaaaccgcgaccaauagccugacaauugaagugccuuacaucuguacggagggagaggaucagauuaccgucuggggcuuccacucugacaacgaaauccagauggccaagcuguauggggauuccaagccccagaaauuuacaucuagcuccaacggaguuaccacacacuacgugagccaaaucggcggcuucccgaaucagaccgaggacgggggacugccucagucuggccgcauuguggucgauuauauggugcagaaguccgggaaaacgggaacaaucaccuaccaaagaggcauucuccugccccagaagguuuggugcgcuagcgggcgguccaaagugaucaagggaucucuuccucugauuggcgaagccgacugucuccaugagcgcuauggcgggcugaacaaaagcaagcccuacuacaccggagagcacgcuaaggccaucggcaauugccccaucugggucaaaacaccucugaagcucgcgaacgggaccaaauauagaccgcccgccaagcugcuuaaagaacggggauuuuucggcgcuauugccggguuucuggagggcggaugggaaggcaugaucgcuggguggcauggauacacaucccacggcgcccacgggguggccguugcugcggaucucaagagcacgcaggaggccauuaauaagaucaccaaaaaccuuaauucucuuuccgaacuggaggugaagaaccuccagcgccugagcggagcuauggacgagcugcauaaugaaauucucgagcuggaugaaaaagucgacgaccuuagagccgauacaaucucuagccaaaucgagcuggccgugcuccuguccaacgaaggcauuaucaauucugaggacgagcaccuucuggcucucgaacggaagcugaaaaagaugcuggggccuagcgccgucgagauuggcaacggauguuucgaaaccaagcauaaaugcaaucagacaugccucgaucgcaucgcggcuggcaccuuugacgccggggaguucucccugcccacguuugauagccuuaacauuaccgccgcuucucugaaugacgauggacucgacaaccacacaauccugcuguauuacuccaccgccgcuagcucucuugccgugacacucaugauugcgaucuucguuguguauauggucuccagagauaacgugagcuguuccaucugccuguga

SEQ ID NO: 218810 - RNA, 1755 nt, Artificial Sequence
  derived and/or modified CDS sequence (opt5) from hemagglutinin__InfluenzaB__AFH58271
augaaggccaucauugugcugcucauggucguuaccagcaacgcugacagaaucugcacaggcauuacguccucuaauagcccccacguggugaaaaccgccacacagggggaggucaacgugaccggaguuaucccucugacaaccacaccgaccaaguccuacuucgcgaaucuuaaaggcacgcggacccgcgggaagcugugucccgauugccucaacuguacagaccuggauguggcucuuggaagaccuaugugcgucggcaccacacccucugccaaagccagcauucugcaugaagugaagccuguuaccuccggguguuuucccaucaugcacgaccggacgaagauccgccaacucccuaaucugcugagaggauaugagaacauucggcucucuacacagaaugugaucgaugcugaaaaagccccgggcggccccuaccgccuggggaccagcggauccugcccuaacgcuacaagcaagucuggcuucuuugccaccauggcgugggccguccccaaagacaauaacaagaaugcuaccaacccucuuacaguggaggugcccuauauuuguacggaaggggaggaucagaucaccgucuggggauuccauuccgacgauaaaacacagaugaagaaucuguacggcgacagcaacccgcaaaaguuuaccucuuccgccaaugggguuacaacccacuaugugagccagauuggaucuuucccugaucagacggaggacggcggccucccccaguccgggagaaucguggucgauuacaugaugcaaaaaccuggaaagacaggcaccauuguguaucagcgcgggguucugcuuccccagaaaguguggugcgcuagcggacgguccaaggucaucaaaggcucucugccccucaucggggaagccgacugucugcaugagaaguacggaggccugaacaaaagcaagccuuacuauaccggcgaacacgcgaaggccauugggaacugcccgaucugggugaaaacaccccucaagcuggcuaauggaaccaaauacagaccucccgccaagcugcugaaagagcggggcuuuuucggggcuauugccggauuucucgagggcgggugggaaggcaugaucgccggauggcacggcuauacaucccauggggcucacggaguugcgguggccgcugaccuuaagagcacgcaggaggccauuaacaagaucaccaaaaaucuuaacucucuguccgaacucgaggucaagaaucugcaacgccugagcggcgccauggaugaacuccauaacgagauccuggagcuugacgaaaaaguggaugaccugagagcugauacaauuucuagccagaucgagcucgccguccugcuuuccaaugaagggauuaucaacucugaggacgaacaucugcucgcgcuggagcggaagcugaaaaagaugcucggaccuagcgcuguggagauuggcaauggguguuucgaaaccaagcacaaaugcaaccagacaugccuggaucgcaucgccgccggcaccuuuaaugcuggagaguucucccuucccacguuugacagccugaacaucaccgccgcuucucucaaugaugacggccuggauaaccacacaauucugcuuuacuauuccaccgccgcgagcucucucgccguuacacugaugcuggcuaucuucauuguguacauggucuccagagacaaugugagcuguuccaucugccucuga

SEQ ID NO: 218811 - RNA, 1755 nt, Artificial Sequence; identical to SEQ ID NO: 218810
  derived and/or modified CDS sequence (opt5) from hemagglutinin__InfluenzaB__AFH58282

SEQ ID NO: 218812 - RNA, 1758 nt, Artificial Sequence
  derived and/or modified CDS sequence (opt5) from hemagglutinin__InfluenzaB__AFH58293
augaaggccaucauugugcugcucauggucguuaccagcaacgcugacagaaucugcacaggcauuacguccucuaauagcccccacguggugaaaaccgccacacagggggaggucaacgugaccggaguuaucccucugacaaccacaccgaccaagucccauuucgcgaaucuuaaaggcacggaaacccgggggaagcugugucccaaaugccucaacuguacagaucuggacguggcucuuggacgcccuaagugcaccggcaagauucccucugccagagucagcauccugcacgaggugcggccuguuacauccggguguuuucccaucaugcaugaucgcaccaaaauuagacaacucccuaaucugcugcggggauacgaacacauccgccucucuacgcauaacgugauuaaugccgagaacgcuccgggcggccccuauaagaucgggacaagcggauccugcccuaauauuaccaacggcaauggguucuuugccacaauggcuugggccguccccaaaaacgacaagaauaaaaccgcgaccaacccucugacaaucgaagugcccuacauuuguacggagggagaggaucagaucaccguguggggcuuccacagcgacgaugaaacacagauggccaagcuguauggggacucuaagccgcagaaauuuaccuccagcgcuaauggagucacaacccacuacguuucucaaaucggcggcuucccuaaccagacggaggaugggggacugccccaguccggcagaauugugguggacuauaugguccaaaagagcgggaaaacaggaaccaucaccuaccagcggggcauucuccugccucagaagguguggugcgccucugggcgcuccaaaguuaucaagggaagccuuccccugauuggcgaagcugauugucuccaugagaaauauggcgggcugaacaaguccaagcccuacuacacaggagagcacgccaaagcgaucggcaauugcccuaucugggugaagaccccgcugaaacucgccaacgggacaaaguauagacccccugcuaaacugcuuaaggaacggggauuuuucggcgccauugcuggguuucuggagggcggaugggaaggcaugaucgccggguggcauggauacacgucucacggcgcccacggggucgcuguggcggccgaccucaagagcacccaggaggcuauuaauaaaaucacaaagaaccuuaauucccuuagcgaacuggagguuaaaaaccuccagcgccugucuggagccauggaugagcugcauaaugaaauucucgagcuggacgaaaagguggacgaucuuagagccgacaccaucuccagccaaaucgagcuggcuguccuccugucuaacgaaggcauuaucaauagcgaggaugagcaccuucuggcccucgaacggaaacugaagaagaugcuggggcccuccgcgguggagauuggcaacggauguuucgaaacaaaacauaagugcaaucagaccugccucgaccgcaucgcugccggcacguuugaugccggggaguucucucugccuaccuuugacagccuuaacauuacagcugccucccugaaugaugacggacucgauaaccacaccauccugcuguauuacagcacagcugccucuucccuugcggucacccucaugauugccaucuucgugguuuauauggugagcagagacaaugucucuuguuccaucugccuguga

SEQ ID NO: 218813 - RNA, 1755 nt, Artificial Sequence
  derived and/or modified CDS sequence (opt5) from hemagglutinin__InfluenzaB__AFH58304
augaaggccaucauugugcugcucauggucguuaccagcaacgcugacagaaucugcacaggcauuacguccucuaauagcccccacguggugaaaaccgccacacagggggaagucaacgugaccggaguuaucccucugacaaccacaccgaccaaguccuacuucgcgaaucuuaaaggcacgcggacccgcgggaagcugugucccgauugccucaacuguacagaccuggauguggcucuuggaagaccuaugugcgucggcaccacacccucugccaaagccagcauucugcaugaagugcggccuguuaccuccggguguuuucccaucaugcacgaccgcacgaagaucagacaacucccuaaucugcugcggggauaugagaacauucgccucucuacacagaaugugaucgaugcugaaaaggccccgggcggccccuacagacuggggaccagcggauccugcccuaacgcuacaagcaaaauuggcuucuuugccaccauggcgugggccguccccaaggacaauuauaaaaacgcuaccaauccucuuacaguggaggugcccuacaucuguacggaaggggaggaucagauuaccgucuggggauuccauucugacgauaagacacagaugaaaaaccuguauggcgacuccaauccgcaaaaguuuaccagcucugccaacgggguuacaacccacuacgugucccagaucggagauuucccugaccagacggaggauggcggccucccccagagcgggcggauuguggucgacuauaugaugcaaaagccuggaaaaacaggcaccaucguguaccagcgcgggguucugcuuccccagaagguguggugcgcuucuggaagauccaaagucaucaagggcagccugccccucauuggggaagccgacugucugcaugagaaauacggaggccugaauaaguccaaaccuuauuacaccggcgaacacgcgaaggccaucgggaacugcccgauuugggugaagacaccccucaaacuggcuaacggaaccaaguaucggccucccgccaaacuucugaaggagcgcggcuuuuucggggcuaucgccggauuucucgagggcgggugggaaggcaugauugccggauggcacggcuacacaucucauggggcucacggaguugcgguggccgcugaucugaaaagcacgcaggaggccaucaauaagaucaccaagaaccuuaauucccugagcgaacucgaggucaaaaaccugcaaagacugucuggcgccauggacgaacuccauaaugagauucuggagcuugaugaaaagguggacgaucugcgggcugacacaaucuccagccagauugagcucgccguccugcuuucuaacgaagggaucauuaauagcgaggaugaacaucugcucgcgcuggagcgcaaacugaagaaaaugcucggaccuuccgcuguggacaucggcaacggguguuucgagaccaagcacaagugcaaucagacaugccuggauagaaucgccgccggcaccuuuaacgcuggagaguucucucuucccacguuugacagccugaauauuaccgccgcuucccucaacgaugacggccuggacaaucacacaauccugcuuuauuacagcaccgccgcgucuucccucgccguuacacugaugcuggcuauuuucaucguguauauggucagccgggauaacgugucuuguuccauuugccucuga

SEQ ID NO: 218814 - RNA, 1755 nt, Artificial Sequence; identical to SEQ ID NO: 218813
  derived and/or modified CDS sequence (opt5) from hemagglutinin__InfluenzaB__AFH58315

SEQ ID NO: 218815 - RNA, 1755 nt, Artificial Sequence
  derived and/or modified CDS sequence (opt5) from hemagglutinin__InfluenzaB__AFH58326
augaaggccaucauugugcugcucauggucguuaccagcaacgcugacagaaucugcacaggcauuacguccucuaauagcccccacguggugaaaaccgccacacagggggaagucaacgugaccggaguuaucccucugacaaccacaccgaccaaguccuacuucgcgaaucuuaaaggcacgcggacccgcgggaagcugugucccgauugccucaacuguacagaccuggauguggcucuuggaagaccuaugugcgucggcaccacacccucugccaaagccagcauucugcaugaagugcggccuguuaccuccggguguuuucccaucaugcacgaccgcacgaagaucagacaacucccuaaucugcugcggggauaugagaacauucgccucucuacacagaaugugaucgaugcugaaaaggccccgggcggccccuacagacuggggaccagcggauccugcccuaacgcuacaagcaaaauuggcuucuuugccaccauggcgugggccguccccaaggacaauuauaaaaacgcuaccaauccucuuacaguggaggugcccuacaucuguacggaaggggaggaucagauuaccgucuggggauuccauucugacaacaaggcccagaugaaaaaucuguauggcgauuccaacccgcaaaaguuuacaagcucugcuaaugggguuaccacacacuacgugucccagaucggagacuucccugaucagaccgaggacggcgggcccccucagagcggccggauuguggucgauuauaugaugcaaaagcccggaaaaacgggcacaaucguguaccagcgcgggguucuccugccccagaagguguggugcgccucuggaagauccaaagucaucaagggcagccuuccucugauuggggaagcggacugucuccaugagaaauacggaggccugaacaaguccaaaccguauuacaccggcgaacacgccaaggcuaucgggaacugccccauuugggugaagaccccucugaaacucgccaauggaacaaaguaucggcccccugcuaaacugcuuaaggagcgcggcuuuuucggggccaucgccggauuucuggagggcgggugggaaggcaugauugcuggauggcacggcuacaccucucauggggcgcacggaguugccguggcugccgaccucaaaagcacacaggaggccaucaacaagaucacgaagaaucugaacucccuuagcgaacuggaggucaaaaaucuccaaagacugucuggcgcuauggaugaacugcauaacgagauucucgagcuggacgaaaagguggaugaccuucgggccgauaccaucuccagccagauugagcuggcgguccuccugucuaaugaagggaucauuaacagcgaggacgaacaccuucuggcucucgagcgcaaacugaagaaaaugcugggacccuccgccguggauaucggcaauggguguuucgagacaaagcacaagugcaaccagaccugccucgacagaaucgccgcuggcacauuuaaugccggagaguucucucugccgaccuuugauagccuuaacauuacggcugccucccugaaugacgauggccucgacaaccauaccauccugcuguauuacagcacagcggccucuucccuugcuguuacccucaugcuggccauuuucaucguguauauggucagccgggacaaugugucuuguuccauuugccuguga

SEQ ID NO: 218816 - RNA, 1755 nt, Artificial Sequence
  derived and/or modified CDS sequence (opt5) from hemagglutinin__InfluenzaB__AFH58337
augaaggccaucauugugcugcucauggucguuaccagcaacgcugacagaaucugcacaggcauuacguccucuaauagcccccacguggugaaaaccgccacacagggggaagucaacgugaccggaguuaucccucugacaaccacaccgaccaaguccuacuucgcgaaucuuaaaggcacgcggacccgcgggaagcugugucccgauugccucaacuguacagaccuggauguggcucuuggaagaccuaugugcgucggcaccacacccucugccaaagccagcauucugcaugaagugcggccuguuaccuccggguguuuucccaucaugcacgaccgcacgaagaucagacaacucccuaaucugcugcggggauaugagaacauucgccucucuacacagaaugugaucgaugcugaaaaggccccgggcggccccuacagacuggggaccagcggauccugcccuaacgcuacaagcaaaauuggcuucuuugccaccauggcgugggccguccccaaggacaauuauaaaaacgcuaccaauccucuuacaguggaggugcccuacaucuguacggaaggggaggaucagauuaccgucuggggauuccauucugacaacaaggcccagaugaaaaaucuguauggcgauuccaacccgcaaaaguuuacaagcucugcuaaugggguuaccacacacuacgugucccagaucggagacuucccugaucagaccgaggacggcggccucccccagagcgggcggauuguggucgauuauaugaugcaaaagccuggaaaaacgggcacaaucguguaccagcgcgggguucugcuuccccagaagguguggugcgccucuggaagauccaaagucaucaagggcagccugccccucauuggggaagcggacugucugcaugagaaauacggaggccugaacaaguccaaaccuuauuacaccggcgaacacgccaaggcuaucgggaacugcccgauuugggugaagacaccccucaaacuggccaauggaaccaaguaucggccucccgcuaaacuucugaaggagcgcggcuuuuucggggccaucgccggauuucucgagggcgggugggaaggcaugauugcuggauggcacggcuacaccucucauggggcgcacggaguugccguggcugccgaccugaaaagcacacaggaggccaucaacaagaucacgaagaaucuuaacucccugagcgaacucgaggucaaaaaucugcaaagacugucuggcgcuauggaugaacuccauaacgagauucuggagcuugacgaaaagguggaugaccugcgggccgauaccaucuccagccagauugagcucgcgguccugcuuucuaaugaagggaucauuaacagcgaggacgaacaucugcucgcucuggagcgcaaacugaagaaaaugcucggaccuuccgccguggauaucggcaauggguguuucgagacaaagcacaagugcaaccagaccugccuggacagaaucgccgcuggcacauuuaaugccggagaguucucucuucccaccuuugauagccugaacauuacggcugccucccucaaugacgauggccuggacaaccacaccauccugcuuuauuacagcacagcggccucuucccucgcuguuacccugaugcuggccauuuucaucguguauauggucagccgggacaaugugucuuguuccauuugccucuga

SEQ ID NO: 218817 - RNA, 1758 nt, Artificial Sequence
  derived and/or modified CDS sequence (opt5) from hemagglutinin__InfluenzaB__AFH58348
augaaggccaucauugugcugcucauggucguuaccagcaacgcugacagaaucugcacaggcauuacguccucuaauagcccccacguggugaaaaccgccacacagggggaggucaacgugaccggaguuaucccucugacaaccacaccgaccaagucccauuucgcgaaucuuaaaggcacggaaacccgggggaagcugugucccaaaugccucaacuguacagaucuggacguggcucuuggacgcccuaagugcaccggcaauauucccucugccagagucagcauccugcacgaggugcggccuguuacauccggguguuuucccaucaugcaugaucgcaccaagauuagacaacucccuaaccugcugcggggauacgaacacauccgccucucugcccauaaugugauuaacgcugagaaugccccgggcggccccuauaaaaucgggacgagcggauccugcccuaacgucacaaauggcaacggguucuuugcuaccauggccugggcggugcccaagaaugacaacaauaaaacagccaccaacagccugaccauugaagugccuuacaucuguacagagggagaggaucagauuacggucuggggcuuccacucugacaaggaaacccagauggcuaaacuuuauggggauuccaagccccagaaguuuacaagcucugccaacggaguuaccacacacuacgugucccaaaucggcggcuucccgaaucagaccgaggacgggggacugccucagagcggcagaaucguggucgauuauauggugcagaaaucugggaagacgggaacaauuaccuaccaacggggcauccuccugccccagaaaguuuggugcgcuuccgggcgcagcaaggugauuaaaggaucccuuccucugaucggcgaagccgacugucuccaugagaaguauggcgggcugaacaaaucuaagcccuacuacaccggagagcacgcgaaggccauuggcaauugccccaucugggucaaaacaccucugaagcucgcuaacgggaccaaauauagaccgcccgccaagcugcuuaaagaacggggauuuuucggcgcuaucgccggguuucuggagggcggaugggaaggcaugauugccggguggcauggauacacaagccacggcgcucacgggguggcgguugccgcugaucucaaguccacgcaggaggccaucaauaagauuaccaaaaaccugaauagccuuucugaacuggaggugaagaaccuccagcgccuguccggagccauggacgagcugcauaaugaaauccucgagcuggaugaaaaagucgacgaccuuagagcugauacaauuagcucucaaaucgagcuggccgugcuccugagcaacgaaggcaucauuaauuccgaggacgagcaccuucuggcgcucgaacggaagcugaaaaagaugcuggggccuucugcugucgagaucggcaacggauguuucgaaaccaagcauaaaugcaaucagacaugccucgaucgcauugccgccggcaccuuuaacgcuggggaguucagccugcccacguuugacucccuuaauaucaccgccgcuagccugaacgaugacggacucgauaaccacacaauucugcuguauuacucuaccgccgcguccagccuugccgugacacucaugaucgcuauuuucguuguguauauggucucuagagacaauguguccuguagcaucugccuguga

SEQ ID NO: 218818 - RNA, 1758 nt, Artificial Sequence
  derived and/or modified CDS sequence (opt5) from hemagglutinin__InfluenzaB__AFH58370
augaaggccaucauugugcugcucauggucguuaccagcaacgcugacagaaucugcacaggcauuacguccucuaauagcccccacguggugaaaaccgccacacagggggaggucaacgugaccggaguuaucccucugacaaccacaccgaccaagucccauuucgcgaaucuuaaaggcacggaaacccgggggaagcugugucccaaaugccucaacuguacagaucuggacguggcucuuggacgcccuaagugcaccggcaauauucccucugccagagucagcauccugcacgaggugcggccuguuacauccggguguuuucccaucaugcaugaucgcaccaagauuagacaacucccuaaccugcugcggggauacgaacacauccgccucucugcccauaaugugauuaacgcugagaaugccccgggcggccccuauaaaaucgggacgagcggauccugcccuaacgucacaaauggcaacggguucuuugcuaccauggccugggcggugcccaagaaugacaacaauaaaacagccaccaacagccugaccauugaagugccuuacaucuguacagagggagaggaucagauuacggucuggggcuuccacucugacaacgaaauccagauggcuaaacuuuauggggauuccaagccccagaaguuuaccagcucugccaauggaguuacaacccacuacgugucccaaaucggcggcuucccgaaccagacagaggacgggggacugccucagagcggcagaauuguggucgauuauauggugcagaagucugggaaaaccggaacgaucacauaccaacggggcauucuccugccccagaagguuuggugcgcuuccgggcgcagcaaagugaucaagggaucccuuccucugauuggcgaagccgacugucuccaugagaaauauggcgggcugaauaagucuaaacccuacuacaccggagagcacgcgaaggccaucggcaacugccccaucugggucaagaccccucugaaacucgcuaaugggacaaaguauagaccgcccgccaaacugcuuaaggaacggggauuuuucggcgcuauugccggguuucuggagggcggaugggaaggcaugaucgccggguggcauggauacaccagccacggcgcucacgggguggcgguugccgcugaucucaaauccacacaggaggccauuaacaagaucacgaagaaucugaacagccuuucugaacuggaggugaaaaaucuccagcgccuguccggagccauggacgagcugcauaacgaaauucucgagcuggaugaaaaggucgacgaccuuagagcugauaccaucagcucucaaaucgagcuggccgugcuccugagcaaugaaggcauuaucaacuccgaggacgagcaccuucuggcgcucgaacggaaacugaagaaaaugcuggggccuucugcugucgagauuggcaauggauguuucgaaacaaagcauaagugcaaccagaccugccucgaucgcaucgccgccggcacauuuaaugcuggggaguucagccugcccaccuuugacucccuuaacauuacggccgcuagccugaacgaugacggacucgauaaucacaccauccugcuguauuacucuacagccgcguccagccuugccgugacccucaugauugcuaucuucguuguguauauggucucuagagacaacguguccuguagcaucugccuguga

SEQ ID NO: 218819 - RNA, 1758 nt, Artificial Sequence
  derived and/or modified CDS sequence (opt5) from hemagglutinin__InfluenzaB__AFH58392
augaaggccaucauugugcugcucauggucguuaccagcaacgcugacagaaucugcacaggcauuacguccucuaauagcccccacguggugaaaaccgccacacagggggaggucaacgugaccggaguuaucccucugacaaccacaccgaccaagucccauuucgcgaaucuuaaaggcacggaaacccgggggaagcugugucccaaaugccucaacuguacagaucuggacguggcucuuggacgcccuaagugcaccggcaagauucccucugccagagucagcauccugcacgaggugcggccuguuacauccggguguuuucccaucaugcaugaucgcaccaaaauuagacaacucccuaaucugcugcggggauacgaacacauccgccucucuacgcauaacgugauuaaugccgagaacgcuccgggcggccccuauaagaucgggacaagcggauccugcccuaauauuaccaacggcaauggguucuuugccacaauggcuugggccguccccaaaaacgacaagaauaaaaccgcgaccaacccucugacaaucgaagugcccuacauuuguacggagggagaggaucagaucaccguguggggcuuccacagcgacaaugaaauccagauggccaaacuuuauggggauucuaagccgcagaaguuuacauccagcgcuaacggagucaccacacacuacguuucucaaauuggcggcuucccuaaccagaccgaggacgggggacugccccaguccggcagaaucgugguggauuauaugguccaaaagagcgggaaaacgggaacaauuaccuaccagcggggcauccuccugccucagaagguguggugcgccucugggcgcuccaaaguuauuaagggaagccuuccccugaucggcgaagcugacugucuccaugagaaauauggcgggcugaauaaguccaagcccuacuacaccggagagcacgccaaagcgaucggcaacugcccuauuugggugaagacaccgcugaaacucgccaaugggaccaaguauagacccccugcuaaacugcuuaaggaacggggauuuuucggcgccaucgcuggguuucuggagggcggaugggaaggcaugauugccggguggcauggauacacaucucacggcgcccacggggucgcuguggcggccgaucucaagagcacgcaggaggcuaucaacaaaauuaccaagaaucugaacucccuuagcgaacuggagguuaaaaaucuccagcgccugucuggagccauggacgagcugcauaacgaaauccucgagcuggaugaaaagguggacgaccuuagagccgauacaaucuccagccaaauugagcuggcuguccuccugucuaaugaaggcaucauuaacagcgaggacgagcaccuucuggcccucgaacggaaacugaagaagaugcuggggcccuccgcgguggagaucggcaauggauguuucgaaaccaaacauaagugcaaccagacaugccucgaucgcauugcugccggcaccuuugacgccggggaguucucucugccuacguuugauagccuuaauaucaccgcugccucccugaacgacgauggacucgacaaucacacaauucugcuguauuacagcaccgcugccucuucccuugcggucacacucaugaucgccaucuucgugguuuauauggugagcagagauaacgucucuuguuccauuugccuguga

SEQ ID NO: 218820 - RNA, 1758 nt, Artificial Sequence; identical to SEQ ID NO: 218812
  derived and/or modified CDS sequence (opt5) from hemagglutinin__InfluenzaB__AFH58403

SEQ ID NO: 218821 - RNA, 1758 nt, Artificial Sequence; identical to SEQ ID NO: 218812
  derived and/or modified CDS sequence (opt5) from hemagglutinin__InfluenzaB__AFH58414

SEQ ID NO: 218822 - RNA, 1758 nt, Artificial Sequence; identical to SEQ ID NO: 218812
  derived and/or modified CDS sequence (opt5) from hemagglutinin__InfluenzaB__AFH58425

SEQ ID NO: 218823 - RNA, 1758 nt, Artificial Sequence; identical to SEQ ID NO: 218812
  derived and/or modified CDS sequence (opt5) from hemagglutinin__InfluenzaB__AFH58436

SEQ ID NO: 218824 - RNA, 1758 nt, Artificial Sequence
  derived and/or modified CDS sequence (opt5) from hemagglutinin__InfluenzaB__AFH58458
augaaggccaucauugugcugcucauggucguuaccagcaacgcugacagaaucugcacaggcauuacguccucuaauagcccccacguggugaaaaccgccacacagggggaggucaacgugaccggaguuaucccucugacaaccacaccgaccaagucccauuucgcgaaucuuaaaggcacggaaacccgggggaagcugugucccaaaugccucaacuguacagaucuggacguggcucuuggacgcccuaagugcaccggcaagauucccucugccagagucagcauccugcacgaggugcggccuguuacauccggguguuuucccaucaugcaugaucgcaccaaaauuagacaacucccuaaucugcugcggggauacgaacacauccgccucucuacgaacaaugugauuaacgccgagaaugcuccgggcggccccuauaagaucgggacaagcggauccugcccuaacgucaccaauggcaacggguucuuugccacaauggcuugggccgugcccaaaaaugacaagaacaaaaccgcgaccaauccucugacaauugaagugcccuacaucuguacggagggagaggaucagauuaccgucuggggcuuccauagcgacaacgaaauccagauggccaagcuguauggggauucuagaccgcagaaguuuacauccagcgcuaacggaguuaccacacacuacgugucucaaaucggcggcuucccuaaucagaccgaggacgggggacugccccaguccggccggauuguggucgauuauauggugcagaaaagcgggaagacgggaacaaucaccuaccaacgcggcauucuccugccucagaaaguuuggugcgccucugggagauccaaggugaucaaaggaagccuuccccugauuggcgaagcugacugucuccacgagaaguauggcgggcugaacaaauccaagcccuacuacaccggagagcaugccaaggcgaucggcaauugcccuaucugggucaaaacaccgcugaagcucgccaacgggaccaaauaucggcccccugcuaagcugcuuaaagaacgcggauuuuucggcgccauugcuggguuucuggagggcggaugggaaggcaugaucgccggguggcacggauacacaucucauggcgcccacgggguggcuguugcggccgaucucaagagcacgcaggaggcuauuaauaagaucaccaaaaaccuuaauucccuuagcgaacuggaggugaagaaccuccagagacugucuggagccauggacgagcugcacaaugaaauucucgagcuggaugaaaaagucgacgaccuucgggccgauacaaucuccagccaaaucgagcuggcugugcuccugucuaacgaaggcauuaucaauagcgaggacgagcaucuucuggcccucgaacgcaagcugaaaaagaugcuggggcccuccgcggucgagauuggcaacggauguuucgaaaccaagcacaaaugcaaucagacaugccucgauagaaucgcugccggcaccuuugacgccggggaguucucucugccuacguuugauagccuuaacauuaccgcugccucccugaaugacgauggacucgacaaccauacaauccugcuguauuacagcaccgcugccucuucccuugcggugacacucaugauugccaucuucguuguguauauggucagccgggauaacgugucuuguuccaucugccuguga

SEQ ID NO: 218825 - RNA, 1758 nt, Artificial Sequence; identical to SEQ ID NO: 218824
  derived and/or modified CDS sequence (opt5) from hemagglutinin__InfluenzaB__AFH58469

SEQ ID NO: 218826 - RNA, 1755 nt, Artificial Sequence; identical to SEQ ID NO: 218806
  derived and/or modified CDS sequence (opt5) from hemagglutinin__InfluenzaB__AFH58480

SEQ ID NO: 218827 - RNA, 1755 nt, Artificial Sequence
  derived and/or modified CDS sequence (opt5) from hemagglutinin__InfluenzaB__AFH58502
augaaggccaucauugugcugcucauggucguuaccagcaacgcugacagaaucugcacaggcauuacguccucuaauagcccccacguggugaaaaccgccacacagggggaagucaacgugaccggaguuaucccucugacaaccacaccgaccaaguccuacuucgcgaaucuuaaaggcacgcggacccgcgggaagcugugucccgauugccucaacuguacagaccuggauguggcucuuggaagaccuaugugcgucggcaccacacccucugccaaagccagcauucugcaugaagugcggccuguuaccuccggguguuuucccaucaugcacgaccgcacgaagaucagacaacucccuaaucugcugcggggauaugagaacauucgccucucuacacagaaugugaucgaugcugaaaaggccccgggcggccccuacagacuggggaccagcggauccugcccuaacgcuacaagcaaaauuggcuucuuugccaccauggcgugggccguccccaaggacaauuauaaaaacgcuaccaauccucuuacaguggaggugcccuacaucuguacggaaggggaggaucagauuaccgucuggggauuccauucugacgauaagacacagaugaaaucccuguauggcgacagcaacccgcaaaaguuuaccucuuccgccaaugggguuacaacccacuacgugagccagaucggagauuucccugaccagacggaggauggcggccucccccagucugggcggauuguggucgacuauaugaugcaaaagccuggaaaaacaggcaccaucguguaccagcgcgggguucugcuuccccagaagguguggugcgcuuccggaagaagcaaagucaucaagggcucccugccccucauuggggaagccgacugucugcaugagaaauacggaggccugaacaagucuaaaccuuauuacaccggcgaacacgcgaaggccaucgggaauugcccgauuugggugaagacaccccucaaacuggcuaacggaaccaaguaucggccucccgccaaacuucugaaggagcgcggcuuuuucggggcuaucgccggauuucucgagggcgggugggaaggcaugauugccggauggcacggcuacacaagccauggggcucacggaguugcgguggccgcugaucugaaauccacgcaggaggccaucaacaagaucaccaagaaucuuaacagccugucugaacucgaggucaaaaaucugcaaagacuguccggcgccauggacgaacuccauaacgagauucuggagcuugaugaaaagguggacgaucugcgggcugacacaaucagcucucagauugagcucgccguccugcuuagcaaugaagggaucauuaacuccgaggaugaacaucugcucgcgcuggagcgcaaacugaagaaaaugcucggaccuucugcuguggacaucggcaauggguguuucgagaccaagcacaagugcaaccagacaugccuggauagaaucgccgccggcaccuuuaaugcuggagaguucagccuucccacguuugacucccugaacauuaccgccgcuagccucaaugaugacggccuggacaaccacacaauccugcuuuauuacucuaccgccgcguccagccucgccguuacacugaugcuggcuauuuucaucguguauauggucucucgggauaauguguccuguagcauuugccucuga

SEQ ID NO: 218828 - RNA, 1758 nt, Artificial Sequence
  derived and/or modified CDS sequence (opt5) from hemagglutinin__InfluenzaB__AFH58513
augaaggccaucauugugcugcucauggucguuaccagcaacgcugacagaaucugcacaggcauuacguccucuaauagcccccacguggugaaaaccgccacacagggggaggucaacgugaccggaguuaucccucugacaaccacaccgaccaagucccauuucgcgaaucuuaaaggcacggaaacccgggggaagcugugucccaaaugcccuaacuguacagaucucgacguggcucugggacgccccaagugcaccggcaagauuccuucugccagagucagcauccuucacgaggugcggcccguuacauccggguguuuuccuaucaugcaugaucgcaccaaaauuagacaacugccgaaucuccugcggggauacgaacacauccgccugucuacgcauaacgugauuaaugccgagaacgcucccggcggcccuuauaagaucgggacaagcggauccugccccaaugucaccaacggcaauggguucuuugccacaauggcuugggccgugccuaaaaacgacaagaauaaaaccgcgaccaacccccucacaauugaagugccguacaucuguacggagggagaggaucagauuaccgucuggggcuuccacagcgacgaugaaacacagauggccaagcuguauggggacucuaagccucagaaauuuaccuccagcgcuaauggaguuacaacccacuacgugucucaaaucggcggcuuccccaaccagacggaggaugggggacuuccucaguccggcagaaucguggucgacuauauggugcaaaagagcgggaaaacaggaaccauuaccuaccagcggggcauccugcucccccagaagguuuggugcgccucugggcgcuccaaagugauuaagggaagccugccccuuaucggcgaagcugauugucugcaugagaaauauggcgggcucaacaaguccaagccuuacuacacaggagagcacgccaaagcgauuggcaauugcccgaucugggucaagacaccccugaaacuggccaacgggaccaaguauagaccucccgcuaaacuccugaaggaacggggauuuuucggcgccaucgcuggguuucuugagggcggaugggaaggcaugauugccggguggcauggauacacgucucacggcgcccacgggguggcuguugcggccgaccugaaaagcacccaggaggcuaucaauaagauuacaaagaaccucaauucccugagcgaacuugaggugaaaaaccugcagcgccucucuggagccauggaugagcugcauaaugaaauccuggagcucgacgaaaaggucgacgaucugagagccgacaccauuuccagccaaaucgagcuugcugugcugcucucuaacgaaggcaucauuaauagcgaggaugagcaucugcuugcccuggaacggaaacucaagaagaugcuggggccuuccgcggucgagaucggcaacggauguuucgaaacaaaacacaagugcaaucagaccugccuggaccgcauugcugccggcacguuugaugccggggaguucucucuccccaccuuugacagccugaacaucacagcugccucccuuaaugaugacggacuggauaaccacaccauucuccuguauuacagcacagcugccucuucccuggcggugacccuuaugaucgccauuuucguuguguauauggucagcagagacaaugugucuuguuccaucugccucuga

SEQ ID NO: 218829 - RNA, 1758 nt, Artificial Sequence; identical to SEQ ID NO: 218828
  derived and/or modified CDS sequence (opt5) from hemagglutinin__InfluenzaB__AFH58524

SEQ ID NO: 218830 - RNA, 1755 nt, Artificial Sequence
  derived and/or modified CDS sequence (opt5) from hemagglutinin__InfluenzaB__AFH58535
augaaggccaucauugugcugcucauggucguuaccagcaacgcugacagaaucugcacaggcauuacguccucuaauagcccccacguggugaaaaccgccacacagggggaggucaacgugaccggaguuaucccucugacaaccacaccgaccaagucccauuucgcgaaucuuaaaggcacgcaaacccgggggaagcugugucccaacugcuuuaauuguacagaucucgacguggcucugggacgcccuaaaugcaugggcaacacccccucugccaaggucagcauucuucacgaagugaagccugccacauccggguguuuccccaucaugcaugauagaaccaaaauccggcagcugccuaaucuccugcgcggauacgagaacauuagacugucuacgagcaauguuaucaacacagaaaccgcuccgggcggccccuauaagguggggacauccggaagcugcccuaaugucgccaacggcaauggguuuuucaacaccauggcuugggugauucccaaagacaauaacaagaccgccaucaacccugugacagucgagguucccuacauuuguucugaaggagaggaucagaucacgguguggggcuuucacuccgacgauaaaacccagauggagcggcucuauggggacagcaauccgcaaaaguucacaucuuccgcgaacggagugaccacacauuacgucagccagauuggcggcuuuccuaaucagaccgaagaugaggggcugaagcagucuggacgcaucgugguugacuauauggugcaaaaacccggcaagacggggacaaucgucuaccagagagggauucuucugccucagaaaguguggugcgccuccggccggagcaagguuaucaaagggucccucccccugauuggagaagcugauugucuucacgagaaguauggcggccugaacaaaucuaagcccuacuacaccggggagcacgccaaggcuaucggaaauugcccuauuugggugaaaaccccgcucaagcuggccaacggcacaaaauauagacccccugcgaagcugcucaaagaacgcggguucuuuggagccaucgcuggcuuccuggagggaggcugggaaggaaugaucgccggcuggcauggguacaccagccacggagcucauggcgucgccguggccgcugaccuuaaguccacacaggaggcgauuaauaagaucacgaaaaaccugaauuaucucagcgaacuggaggucaagaaccuucaacggcugucuggggccaugaaugagcuccacgaugaaauucuggagcuggacgaaaaaguggacgaucuccgcgcugacaccaucuccagccagauugagcuggccguucuucugucuaacgaaggaaucaucaauagcgaggaugagcaccuccuggcccuugaaagaaagcugaaaaagaugcucggccccuccgcuguggagauugggaacggcuguuuugaaacaaagcauaaaugcaaucagaccugccuggaccggaucgccgcgggaacauucaacgcuggcgauuuuucucugccuaccuucgacagccucaacauuacggccgccucccugaaugaugacgggcuugauaaccacaccauccugcucuacuauagcacagcugccucuucccuggcugucacccugaugauugccaucuucauuguguacaugguuagccgcgacaaugugucuuguuccaucugccuuuga

SEQ ID NO: 218831 - RNA, 1752 nt, Artificial Sequence
  derived and/or modified CDS sequence (opt5) from hemagglutinin__InfluenzaB__AFH58557
augaaggccaucauugugcugcucauggucguuaccagcaacgcugacagaaucugcacaggcauuacguccucuaauagcccccacguggugaaaaccgccacacagggggaggucaacgugaccggaguuaucccucugacaaccacaccgaccaagucccauuucgcgaaucuuaaaggcacgaagacccgggggaaacugugucccaacugccucaauuguacagaucuggacguggcucuuggacgcccuaugugcgucggcaccacacccucugccaaggccagcauucugcacgaagugagaccuguuaccuccggguguuuucccaucaugcaugaucggacgaagauccgccaacucccuaaccugcugagaggauacgagaauauucggcucucuacacagaacgugaucaaugcugaacgcgccccgggcggccccuauagacuggggaccagcggauccugcccuaacgucacaagccgggacggcuucuuugcuaccauggccugggcggugccccgcgauaauaaaaccgccacaaacccucuuacgguggagguccccuacauuuguaccaagggggaagaccagaucacaguuuggggauuccacucugaugacaaaacccagaugaagaaucuguauggcgauuccaacccgcaaaaauuuacaagcucugcuaauggggugaccacgcauuacgugucccagauuggaggcuucccuaaccagacagaggacggcgggcucccccagagcggaagaaucgucguggauuauaugguucaaaagccuggcaagaccgggaccauuguguaccagcggggaguccugcuuccccagaaaguguggugcgccucuggccgcuccaagguuaucaaagggagccugccccucaucggagaggcugacugucugcacgaaaaguauggcggccugaacaaauccaagccuuacuacacaggggagcacgccaaagcgauuggaaauugcccgaucugggugaagacaccccucaagcuggccaacggcaccaaauauagaccucccgcuaagcugcugaaagaacggggguuuuucggagccauugcuggcuuucucgaagggggcugggagggaaugaucgccggcuggcauggguacacgucucacggagcccauggcgucgcuguggcggccgaucuuaagagcacccaggaggcuauuaauaaaaucacaaagaaccuuaauucccugagcgagcucgaagucaagaaccugcaacgccugucuggggccauggacgagcuccacaaugaaauccuggagcuugacgagaaaguggaugaccugagagccgauaccauuuccagccagaucgaacucgcuguucugcuuucuaacgagggaauuaucaauagcgaagacgagcaucugcucgcccuggaacggaagcugaaaaagaugcucggcccuuccgcgguggauauugggaacggcuguuucgagacaaaacacaagugcaaucagaccugccuggacagaaucgcugccggaacguuuaacgccggcgaguucucuuuucccaccuucgauagccuuaauaucacagcugccucccugaacgacgaugggcucgacaaucacaccauucugcuguauuacagcacagcugccucuucccuugcggucacccucaugaucgccauuuucaucguguauaugguuagccgcgauaacgugucuuguuccauuugccuguga

SEQ ID NO: 218832 - RNA, 1755 nt, Artificial Sequence
  derived and/or modified CDS sequence (opt5) from hemagglutinin__InfluenzaB__AFJ76224
augaaggccaucauugugcugcucauggucguuaccagcaacgcugacagaaucugcacaggcauuacguccucuaauagcccccacguggugaaaaccgccacacagggggaagucaacgugaccggaguuaucccucugacaaccacaccgaccaagucccauuucgcgaaucuuaaaggcacgaagacccgggggaaacugugucccacaugccucaacuguaccgaucuggacguggcucuuggaucuccuaugugcgucggcauuacacccagcgccaaggccuccauccugcacgaagugcgcccuguuaccucuggguguuuucccaucaugcaugauagaacgaagauucggcaacucccuaaucugcugcgcggauacgagaaaaucagacucagcacacagaacgugauuaauaucgaaaaggcuccgggcggccccuaucggcuggggaccuccggaagcugcccuaacgccacaucucgcuccggcuucuuugcuaccauggccugggcgguccccagagacaauaacaaaaccgccacaaauccucuuacgguggaggugccccacauuuguaccaaggaagaggaucagaucacagucuggggguuccauagcgacaacaaaacccagaugaagaaucuguacggagauucuaacccgcaaaaguuuacauccagcgcuaauggcguuaccacgcacuaugugucucagauugggggauucccugaccagacagaggauggcggccucccccaguccgggcggaucguggucgacuacauggugcaaaaaccuggaaagaccggcaccaucguuuaucagcgcgggauucugcuuccccagaaaguguggugcgccagcggaagauccaaggucaucaaaggcucucugccccucauuggggaagcugauugucugcacgagaaguacggaggccugaacaaaagcaagccuuauuacacaggcgaacaugccaaggcgaucgggaacugcccgauuugggugaaaacaccccucaagcuggccaauggaacaaaauaccggccucccgcuaagcugcugaaagagcgcggcuuuuucggggccaucgcuggauuucucgagggcgggugggaaggcaugaucgccggauggcacggcuauacgucccauggggcccacggaguugcuguggcggccgaccuuaagagcacccaggaggcuauuaacaagaucaccaaaaaucuuaacucucuguccgaacucgaggucaagaaucugcaaagacugagcggcgccauggaugaacuccacaacgagauucuggagcuugacgaaaaaguggacgaucugcgggccgacaccaucucuagccagauugagcucgcuguccugcuuuccaaugaagggaucaucaacucugaggaugaacaucugcucgcccuggagcgcaagcugaaaaagaugcucggaccuagcgcgguggacauuggcaauggguguuucgagacaaagcacaaaugcaaccagaccugccuggauagaaucgcugccggcacguuuaaugccggagaguucucccuucccaccuuugacagccugaacauuacagcugccucucucaaugaugacggccuggauaaccauaccauccugcuuuacuauuccacagcugccagcucucucgcgguuacccugaugauugccaucuucauuguguacaugaucucccgggacaaugucagcuguuccaucugccuguga

SEQ ID NO: 218833 - RNA, 1755 nt, Artificial Sequence
  derived and/or modified CDS sequence (opt5) from hemagglutinin__InfluenzaB__AFJ76235
augaaggccaucauugugcugcucauggucguuaccagcaacgcugacagaaucugcacaggcauuacguccucuaauagcccccacguggugaaaaccgccacacagggggaagucaacgugaccggaguuaucccucugacaaccacaccgaccaagucccauuucgcgaaucuuaaaggcacgaagacccgggggaaacugugucccacaugccucaacuguaccgaucuggacguggcucuuggaucuccuaugugcgucggcauuacacccagcgccaaggccuccauccugcacgaagugcgcccuguuaccucuagauguuuucccaucaugcaugaucggacgaagauucgccaacucccuaaucugcugagaggguacgagaaaauccggcucagcacacagaacgugauuaauaucgaaaaggcuccgggaggccccuaucgccugggcaccuccgggagcugcccuaacgccacaucuagauccggauucuuugcuaccauggccugggcggucccccgggacaauaacaaaaccgccacaaauccucuuacgguggaggugccccacauuuguaccaaggaagaggaucagaucacagucuggggcuuccauagcgacaacaaaacccagaugaagaaucuguacggggauucuaacccgcaaaaguuuacauccagcgcuaauggaguuaccacgcacuaugugucucagauuggcggguucccugaccagacagaggauggaggccucccccaguccggccgcaucguggucgacuacauggugcaaaaaccugggaagaccggaaccaucguuuaucagagaggcauucugcuuccccagaaaguguggugcgccagcgggcgguccaaggucaucaaaggaucucugccccucauuggcgaagcugauugucugcacgagaaguacgggggacugaacaaaagcaagccuuauuacacaggcgaacaugccaaggcgaucggcaacugcccgauuugggugaaaacaccccucaagcuggccaaugggacaaaauaccgcccucccgcuaagcugcugaaagagagaggauuuuucggcgccaucgcuggguuucucgagggaggcugggaagggaugaucgccggcuggcacggauauacgucccauggcgcccacgggguugcuguggcggccgaccuuaagagcacccaggaggcuauuaacaagaucaccaaaaaucuuaacucucuguccgaacucgaggucaagaaucugcaacggcugagcggagccauggaugaacuccacaacgagauucuggagcuugacgaaaaaguggacgaucugcgcgccgacaccaucucuagccagauugagcucgcuguccugcuuuccaaugaaggcaucaucaacucugaggaugaacaucugcucgcccuggagagaaagcugaaaaagaugcucgggccuagcgcgguggacauuggaaauggcuguuucgagacaaagcacaaaugcaaccagaccugccuggaucggaucgcugccgggacguuuaaugccggcgaguucucccuucccaccuuugacagccugaacauuacagcugccucucucaaugaugacggacuggauaaccauaccauccugcuuuacuauuccacagcugccagcucucucgcgguuacccugaugauugccaucuucauuguguacaugaucuccagagacaaugucagcuguuccaucugccuguga

SEQ ID NO: 218834 - RNA, 1755 nt, Artificial Sequence; identical to SEQ ID NO: 218832
  derived and/or modified CDS sequence (opt5) from hemagglutinin__InfluenzaB__AFJ76246

SEQ ID NO: 218835 - RNA, 1758 nt, Artificial Sequence; identical to SEQ ID NO: 218586
  derived and/or modified CDS sequence (opt5) from hemagglutinin__InfluenzaB__AFJ76268

SEQ ID NO: 218836 - RNA, 1758 nt, Artificial Sequence; identical to SEQ ID NO: 218637
  derived and/or modified CDS sequence (opt5) from hemagglutinin__InfluenzaB__AFJ76301

SEQ ID NO: 218837 - RNA, 1755 nt, Artificial Sequence; identical to SEQ ID NO: 218498
  derived and/or modified CDS sequence (opt5) from hemagglutinin__InfluenzaB__AFJ76323

SEQ ID NO: 218838 - RNA, 1758 nt, Artificial Sequence
  derived and/or modified CDS sequence (opt5) from hemagglutinin__InfluenzaB__AFJ76334
augaaggccaucauugugcugcucauggucguuaccagcaacgcugacagaaucugcacaggcauuacguccucuaauagcccccacguggugaaaaccgccacacagggggaagucaacgugaccggaguuaucccucugacaaccacaccgaccaagucccauuucgcgaaucuuaaaggcacggaaacccgggggaagcugugucccaaaugccucaacuguacagaucuggacguggcucuuggacgcccuaagugcaccggcaauauucccucugccagagucagcauccugcacgaggugcggccuguuacauccggguguuuucccaucaugcaugaucgcaccaagauuagacaacucccuaaccugcugcggggauacgaacacauccgccucucuacgcauaaugugauuaacgccgagaaugcuccgggcggccccuauaaaaucgggacaagcggauccugcccuaacgucaccaauggcaacggguucuuugccacaauggcuugggccgugcccaagaaugacaacaauaaaaccgcgaccaacagccugacaauugaagugccuuacaucuguacggagggagaggaucagauuaccgucuggggcuuccacucugacuccgaaacacagauggccaaacuuuauggggauagcaaaccccagaaguuuaccucuuccgcuaacggaguuacaacccacuacgugagccaaaucggcggcuucccgaaucagacggaggacgggggacugccucagucuggcagaaucguggucgauuauauggugcagaaguccgggaaaacaggaaccauuaccuaccaacggggcauccuccugccccagaagguuuggugcgccagcgggcgcuccaaagugauuaagggaucucuuccucugaucggcgaagcugacugucuccaugagaaauauggcgggcugaacaagagcaaacccuacuacacaggagagcacgccaaggcgauuggcaauugccccaucugggucaagaccccucugaaacucgccaacgggacaaaguauagaccgcccgcuaaacugcuuaaggaacggggauuuuucggcgccaucgcuggguuucuggagggcggauggaaaggcaugauugccggguggcauggauacacgucccacggcgcccacgggguggcuguugcggccgaucucaagagcacccaggaagcuaucaauaagauuacaaagaaccuuaauucucuguccgagcuggaagugaagaaccuccagcgccugagcggagccauggacgagcugcauaaugagauccucgaacuggaugagaaagucgacgaccuuagagccgauaccauuucuagccaaaucgaacuggcugugcuccuguccaacgagggcaucauuaauucugaagacgagcaccuucuggcccucgagcggaagcugaaaaagaugcuggggccuagcgcggucgaaaucggcaacggauguuucgagacaaagcauaaaugcaaucagaccugccucgaucgcauugcugccggcacguuugacgccggggaguucucccugcccaccuuugauagccuuaacaucacagcugccucucugaaugacgauggacucgacaaccacaccauucugcuguauuacuccacagcugccagcucucuugcggugacccucaugaucgccguuuucguggucuauaugguguccagagauaacguuagcuguuccauuugccuguga

SEQ ID NO: 218839 - RNA, 1758 nt, Artificial Sequence; identical to SEQ ID NO: 218586
  derived and/or modified CDS sequence (opt5) from hemagglutinin__InfluenzaB__AFJ77327

SEQ ID NO: 218840 - RNA, 1755 nt, Artificial Sequence; identical to SEQ ID NO: 218498
  derived and/or modified CDS sequence (opt5) from hemagglutinin__InfluenzaB__AFJ77369

SEQ ID NO: 218841 - RNA, 1755 nt, Artificial Sequence; identical to SEQ ID NO: 218498
  derived and/or modified CDS sequence (opt5) from hemagglutinin__InfluenzaB__AFJ77380

SEQ ID NO: 218842 - RNA, 1755 nt, Artificial Sequence
  derived and/or modified CDS sequence (opt5) from hemagglutinin__InfluenzaB__AFJ80139
augaaggccaucauugugcugcucauggucguuaccagcaacgcugacagaaucugcacaggcauuacguccucuaauagcccccacguggugaaaaccgccacacagggggaggucaacgugaccggaguuaucccucugacaaccacaccgaccaagucccauuucgcgaaucuuaaaggcacgaagacccgggggaaacugugucccacaugccucaacuguaccgaucuggacguggcucuuggacgcccuaugugcgucggcauuacacccucugccaaggccagcauccugcacgaagugagaccuguuaccuccggguguuuucccaucaugcaugaucggacgaagauucgccaacucccuaaucugcugagaggauacgagaaaauccggcucucuacacagaacgugauuaaugcugaaaaggccccgggcggccccuaucgccuggggaccagcggauccugcccuaacgcuacaagcagaucuggcuucuuugccaccauggcgugggccgucccccgggacaauaacaaaaccgcuacaaauccucuuacgguggaggugcccuacaucuguaccaaggaagaggaucagauuacagucuggggguuccacuccgacaacaaaacccagaugaagaaucuguauggagauagcaacccgcaaaaguuuacaucuuccgccaauggcguuaccacgcauuacgugagccagaucgggggauucccugaccagacagaggauggcggccucccccagucugggcgcauuguggucgacuauauggugcaaaaaccuggaaagaccggcaccaucguuuaccagagagggauccugcuuccccagaaaguguggugcgcuuccggacggagcaaggucauuaaaggcuuucugccccucaucggggaagccgauugucugcacgagaaguauggaggccugaacaaauccaagccuuacuacacaggcgaacacgcgaaggccauugggaacugcccgaucugggugaaaacaccccucaagcuggcuaauggaacaaaauaucgcccucccgccaagcugcugaaagagagaggcuucuuuggggcuauugccggauuccucgagggcgggugggaaggcaugaucgccggauggcauggcuacacgucucacggggcucauggaguugcgguggccgcugaccuuaagagcacccaggaggccaucaacaagauuaccaaaaaucuuaacucccugagcgaacucgaggucaagaaucugcaacggcugucuggcgccauggaugaacuccacaacgagauccuggagcuugacgaaaaaguggacgaucugcgcgcugacaccauuuccagccagaucgagcucgccguccugcuuucuaaugaagggauuaucaacagcgaggaugaacaucugcucgcgcuggagagaaagcugaaaaagaugcucggaccuuccgcuguggacaucggcaauggguguuuugagacaaagcacaaaugcaaccagaccugccuggaucggauugccgccggcacguucaaugcuggagaauuuucucuucccaccuucgacagccugaacaucacagccgcuucccucaaugaugacggccuggauaaccacaccauucugcuuuauuacagcacagccgcgucuucccucgccguuacccugaugaucgcuauuuucaucguguauaugauuagcagagacaaugucucuuguuccaucugccuguga

SEQ ID NO: 218843 - RNA, 1755 nt, Artificial Sequence
  derived and/or modified CDS sequence (opt5) from hemagglutinin__InfluenzaB__AFJ80150
augaaggccaucauugugcugcucauggucguuaccagcaacgcugacagaaucugcacaggcauuacguccucuaauagcccccacguggugaaaaccgccacacagggggaagucaacgugaccggaguuaucccucugacaaccacaccgaccaagucccauuucgcgaaucuuaaaggcacgaagacccgggggaaacugugucccacaugccucaacuguaccgaucuggacguggcucuuggacgcccuaugugcgucggcauuacacccucugccaaggccagcauccugcacgaagugagaccuguuaccuccggguguuuucccaucaugcaugaucggacgaagauucgccaacucccuaaucugcugagaggauacgagaaaauccggcucucuacacagaacgugauuaaugcugaaaaggccccgggcggccccuaucgccuggggaccagcggauccugcccuaacgcuacaagcagaucuggcuucuuugccaccauggcgugggccgucccccgggacaauaacaaaaccgcuacaaauccucuuacgguggaggugcccuacaucuguaccaaggaagaggaucagauuacagucuggggguuccacuccgacaacaaaacccagaugaagaaucuguauggagauagcaacccgcaaaaguuuacaucuuccgccaauggcguuaccacgcauuacgugagccagaucgggggauucccugaccagacagaggauggcggccucccccagucugggcgcauuguggucgacuauauggugcaaaaaccuggaaagaccggcaccaucguuuaccagagagggauccugcuuccccagaaaguguggugcgcuuccggacggagcaaggucauuaaaggcucccugccccucaucggggaagccgauugucugcacgagaaguauggaggccugaacaaaucuaagccuuacuacacaggcgaacacgcgaaggccauugggaacugcccgaucugggugaaaacaccccucaagcuggcuaauggaacaaaauaucgcccucccgccaagcugcugaaagagagaggcuuuuucggggcuauugccggauuucucgagggcgggugggaaggcaugaucgccggauggcauggcuacacgagccacggggcucauggaguugcgguggccgcugaccugaaguccacccaggaggccaucaacaagauuaccaaaaaucuuaacagccugucugaacucgaggucaagaaucugcaacggcuguccggcgccauggaugaacuccacaacgagauccuggagcuugacgaaaaaguggacgaucugcgcgcugacaccauuagcucucagaucgagcucgccguccugcuuagcaaugaagggauuaucaacuccgaggaugaacaccuucucgcgcuggagagaaagcugaaaaagaugcucggaccuucugcuguggacaucggcaauggguguuucgagacaaagcauaaaugcaaccagaccugccuggaucggauugccgccggcacguuuaaugcuggagaguucagccuucccaccuuugacucccugaacaucacagccgcuagccucaaugaugacggccuggauaaccacaccauucugcuuuauuacucuacagccgcguccagccucgccguuacccugaugaucgcuauuuucaucguguauaugauuucuagagacaaugucuccuguagcaucugccuguga

SEQ ID NO: 218844 - RNA, 1755 nt, Artificial Sequence
  derived and/or modified CDS sequence (opt5) from hemagglutinin__InfluenzaB__AFJ80161
augaaggccaucauugugcugcucauggucguuaccagcaacgcugacagaaucugcacaggcauuacguccucuaauagcccccacguggugaaaaccgccacacagggggaagucaacgugaccggagcgaucccucugacaaccacaccgaccaagucccauuucgcuaaucuuaaaggcacgaagacccgggggaaacugugucccacaugccucaacuguaccgaucuggacguugcccuuggacgcccuaugugcgugggcauuacacccucugccaaggcuagcauccugcacgaagucagaccugugaccuccggguguuuucccaucaugcaugaucggacgaagauucgccaacucccuaaucugcugagaggauacgagaaaauccggcucucuacacagaacguuauuaaugccgaaaaggcuccgggcggccccuaucgccuggggaccagcggauccugcccuaacgccacaagcagaucuggcuucuuugcgaccauggccugggcugugccccgggacaauaacaaaaccgccacaaauccucuuacggucgaggugccccacaucuguaccaaggaagaggaucagauuacaguguggggguuccauuccgacaacaaaacccagaugaagaaucuguacggagauagcaacccgcaaaaguuuacaucuuccgcuaauggcaucaccacgcacuaugucagccagauugggggauucccugaccagacagaggauggcggccucccccagucugggcgcaucguuguggacuacauggugcaaaaaccuggaaagaccggcaccaucgucuaucagagagggauucugcuuccccagaaaguguggugcgccuccggacggagcaagguuaucaaaggcucccugccccucauuggggaagcggauugucugcacgagaaguacggaggccugaacaaaucuaagccuuauuacacaggcgaacaugccaaggcuaucgggaacugcccgauuugggugaaaacaccccucaagcuggccaauggaacaaaauaccgcccucccgcuaaacuucugaaggagagaggcuuuuucggggccaucgccggauuucucgagggcgggugggaaggcaugaucgcuggauggcacggcuauacgagccauggggcgcacggagucgccguggcugccgaccugaaguccacccaggaggccauuaacaagaucaccaaaaaucuuaacagccugucugaacucgagguuaagaaucugcaacggcuguccggcgcuauggaugaacuccacaacgagauucuggagcuugacgaaaaaguggacgaucugcgcgccgacaccaucagcucucagauugagcucgcgguccugcuuagcaaugaagggaucaucaacuccgaggaugaacaucugcucgcucuggagagaaagcugaaaaagaugcucggaccuucugccguggacauuggcaauggguguuucgagacaaagcacaaaugcaaccagaccugccuggaucggaucgccgcuggcacguuuaaugccggagaguucagccuucccaccuuugacucccugaacauuacagcugccagccucaaugaugacggccuggauaaccauaccauccugcuuuacuauucuacagcggccuccagccucgcugucacccugaugauugccaucuucauuguguacaugaucuucagagacaauguuucuuguuccaucugccuguga

SEQ ID NO: 218845 - RNA, 1755 nt, Artificial Sequence
  derived and/or modified CDS sequence (opt5) from hemagglutinin__InfluenzaB__AFJ80172
augaaggccaucauugugcugcucauggucguuaccagcaacgcugacagaaucugcacaggcauuacguccucuaauagcccccacguggugaaaaccgccacacagggggaagucaacgugaccggaguuaucccucugacaaccacaccgaccaagucccauuucgcgaaucuuaaaggcacgaagacccgggggaaacugugucccacaugccucaacuguaccgaucuggacguggcucuuggacgcccuaugugcgucggcauuacacccucugccaaggccagcauccugcacgaagugagaccuguuaccuccggguguuuucccaucaugcaugaucggacgaagauucgccaacucccuaaucugcugagaggauacgagaaaauccggcucucuacacagaacgugauuaaugcugaaaaggccccgggcggccccuaucgccuggggaccagcggauccugcccuaacgcuacaagcagaucuggcuucuuugccaccauggcgugggccgucccccgggacaauaacaaaaccgcuacaaauccucuuacgguggaggugcccuacaucuguaccaaggaagaggaucagauuacagucuggggguuccacuccgacaacaaaacccagaugaagaaucuguauggagauagcaacccgcaaaaguuuacaucuuccgccaauggcguuaccacgcauuacgugagccagaucggggacuucccugaucagacagaggacggaggccucccccagucuggccgcauuguggucgauuauauggugcaaaaaccugggaagaccggaaccaucguuuaccagagaggcauccugcuuccccagaaaguguggugcgcuuccgggcggagcaaggucauuaaaggaucccugccccucaucggcgaagccgacugucugcacgagaaguaugggggacugaacaaaucuaagccuuacuacacaggcgaacacgcgaaggccauuggcaacugcccgaucugggugaaaacaccccucaagcuggcuaaugggacaaaauaucgcccucccgccaagcugcugaaagagagaggauuuuucggcgcuauugccggguuucucgagggaggcugggaagggaugaucgccggcuggcauggauacacgagccacggcgcucaugggguugcgguggccgcugaucugaaguccacccaggaggccaucaacaagauuaccaaaaaucuuaacagccugucugaacucgaggucaagaaucugcaacggcuguccggagccauggacgaacuccacaacgagauccuggagcuugacgaaaaaguggaugaccugcgcgcugauaccauuagcucucagaucgagcucgccguccugcuuagcaaugaaggcauuaucaacuccgaggacgaacaccuucucgcgcuggagagaaagcugaaaaagaugcucgggccuucugcuguggauaucggaaauggcuguuucgagacaaagcauaaaugcaaccagaccugccuggaccggauugccgccgggacguuuaaugcuggcgaguucagccuucccaccuuugauucccugaacaucacagccgcuagccucaaugacgauggacuggacaaccacaccauucugcuuuauuacucuacagccgcguccagccucgccguuacccugaugaucgcuauuuucaucguguauaugauuucuagagauaaugucuccuguagcaucugccuguga

SEQ ID NO: 218846 - RNA, 1755 nt, Artificial Sequence; identical to SEQ ID NO: 218832
  derived and/or modified CDS sequence (opt5) from hemagglutinin__InfluenzaB__AFJ80183

SEQ ID NO: 218847 - RNA, 1755 nt, Artificial Sequence; identical to SEQ ID NO: 218843
  derived and/or modified CDS sequence (opt5) from hemagglutinin__InfluenzaB__AFJ80194

SEQ ID NO: 218848 - RNA, 1755 nt, Artificial Sequence; identical to SEQ ID NO: 218832
  derived and/or modified CDS sequence (opt5) from hemagglutinin__InfluenzaB__AFJ80205

SEQ ID NO: 218849 - RNA, 1755 nt, Artificial Sequence; identical to SEQ ID NO: 218477
  derived and/or modified CDS sequence (opt5) from hemagglutinin__InfluenzaB__AFJ80216

SEQ ID NO: 218850 - RNA, 1755 nt, Artificial Sequence; identical to SEQ ID NO: 218832
  derived and/or modified CDS sequence (opt5) from hemagglutinin__InfluenzaB__AFJ80227

SEQ ID NO: 218851 - RNA, 1758 nt, Artificial Sequence
  derived and/or modified CDS sequence (opt5) from hemagglutinin__InfluenzaB__AFJ80238
augaaggccaucauugugcugcucauggucguuaccagcaacgcugacagaaucugcacaggcauuacguccucuaauagcccccacguggugaaaaccgccacacagggggaagucaacgugaccggaguuaucccucugacaaccacaccgaccaagucccauuucgcgaaucuuaaaggcacgaagacccgggggaaacugugucccaagugccucaacuguacagaucuggacguggcucuuggacgcccuaagugcaccggcaauauucccucugccaaagucagcauccugcacgaagugagaccuguuacauccggguguuuucccaucaugcaugaucggaccaagauucgccaacucccuaaccugcugagaggauacgagcacauccggcucucuauucauaaugugaucaacgccgaaaaagcuccgggcggccccuauaagauugggacgagcggauccugcccuaaugucacaaacggcaauggguucuuugccaccauggcuugggccgugcccaaaaacgacaauaacaagacagcgaccaauagccugaccaucgaggugccuuacauuuguacagaaggagaggaucagaucacggucuggggcuuccacucugacaacgagacccagauggccaaacuuuauggggauuccaagccccagaaguuuacaagcucugcuaacggaguuaccacacacuacgugucccaaaucggcggcuucccgaaucagaccgaagacgggggacugccucagagcggccgcauuguggucgauuauauggugcagaaaucugggaagacgggaacaaucaccuaccaaagaggcauucuccugccccagaaaguuuggugcgccuccgggcggagcaaggugaucaaaggaucccuuccucugauuggcgaggcugacugucuccaugaaaaguauggcgggcugaacaagucuaaacccuacuacaccggagagcacgccaaggcgaucggcaauugccccaucugggucaaaacaccucugaagcucgccaacgggaccaaauaucgcccgcccgcuaagcugcuuaaggagagaggauuuuucggcgccauugcuggguuucuggaaggcggaugggagggcaugaucgccggguggcauggauacacaagccacggcgcccacgggguggcuguugcggccgaucucaaauccacgcaggaagcuauuaauaagaucaccaaaaaccugaauagccuuucugagcuggaagugaagaaccuccagcggcuguccggagccauggacgagcugcauaaugagauucucgaacuggaugagaaagucgacgaccuucgcgccgauacaaucagcucucaaaucgaacuggcugugcuccugagcaacgagggcauuaucaauuccgaagacgagcaccuucuggcccucgagagaaagcugaagaaaaugcuggggccuucugcggucgaaauuggcaacggauguuucgagaccaagcauaaaugcaaucagacaugccucgaucggaucgcugccggcaccuuugacgccggggaguucagccugcccacguuugauucccuuaacauuaccgcugccagccugaaugacgauggacucgacaaccacacaauccugcuguauuacucuaccgcugccuccagccuugcggugacacucaugauugccaucuucguuguguauauggucucucgcgauaacguguccuguagcaucugccuguga

SEQ ID NO: 218852 - RNA, 1755 nt, Artificial Sequence
  derived and/or modified CDS sequence (opt5) from hemagglutinin__InfluenzaB__AFJ80656
augaaggccaucauugugcugcucauggucguuaccagcaacgcugacagaaucugcacaggcauuacguccucuaauagcccccacguggugcggaccgccacacagggggaagucaacgugaccggaguuaucccucugacaaccacaccgaccaaaucccauuucgcgaaucuuaagggcacgaaaacccgcgggaagcugugucccacaugccucaacuguaccgaucuggacguggcucuuggaagaccuaugugcgucggcauuacacccucugccaaagccagcauccugcacgaagugcggccuguuaccuccggguguuuucccaucaugcaugaucgcacgaagauuagacaacucccuaaucugcugcggggauacgagaagauccgccucucuacacagaacgugauuaaugcugaaaaagccccgggcggccccuauagacuggggaccagcggauccugcccuaacgcuacaagccggucuggcuucuuugccaccauggcgugggccgucccccgcgacaauaacaagaccgcuacaaauccucuuacgguggaggugccccacaucuguaccaaagaagaggaucagauuacagucuggggguuccauuccgacaacaagacccagaugaaaaaucuguacggagauagcaacccgcaaaaguuuacaucuuccgccaauggcguuaccacgcacuaugugagccagaucgggggauucccugaccagacagaggauggcggccucccccagucugggagaauuguggucgacuacauggugcaaaagccuggaaaaaccggcaccaucguuuaucagcgggggauccugcuuccccagaagguguggugcgcuuccggacgcagcaaagucauuaagggcucccugccccucaucggggaagccgauugucugcacgagaaauacggaggccugaacaagucuaaaccuuauuacacaggcgaacaugcgaaggccauugggaacugcccgaucugggugaagacaccccucaaacuggcuaauggaaccaaguacagaccucccgccaaacuucugaaggagcggggcuuuuucggggcuauugccggauuucucgagggcgggugggaaggcaugaucgccggauggcacggcuauacgagccauggggcucacggaguugcgguggccgcugaccugaaauccacccaggaggccaucaacaagauuacaaagaaucuuaacagccugucugaacucgaggucaaaaaucugcaacgccuguccggcgccauggaugaacuccacaacgagauccuggagcuugacgaaaagguggacgaucugagagcugacaccauuagcucucagaucgagcucgccguccugcuuagcaaugaagggauuaucaacuccgaggaugaacaucugcucgcgcuggagcggaaacugaagaaaaugcucggaccuucugcuguggacaucggcaauggguguuucgagacaaagcacaagugcaaccagaccugccuggauagaauugccgccggcacguuuaaugcuggagaguucagccuucccaccuuugacucccugaacaucacagccgcuagccucaaugaugacggccuggauaaccauaccauucugcuuuacuauucuacagccgcguccagccucgccguuacccugaugaucgcuauuuucaucguguacaugauuucucgcgacaaugucuccuguagcaucugccuguga

SEQ ID NO: 218853 - RNA, 1755 nt, Artificial Sequence; identical to SEQ ID NO: 218832
  derived and/or modified CDS sequence (opt5) from hemagglutinin__InfluenzaB__AFJ80667

SEQ ID NO: 218854 - RNA, 1755 nt, Artificial Sequence; identical to SEQ ID NO: 218832
  derived and/or modified CDS sequence (opt5) from hemagglutinin__InfluenzaB__AFJ80678

SEQ ID NO: 218855 - RNA, 1755 nt, Artificial Sequence; identical to SEQ ID NO: 218832
  derived and/or modified CDS sequence (opt5) from hemagglutinin__InfluenzaB__AFJ80689

SEQ ID NO: 218856 - RNA, 1755 nt, Artificial Sequence
  derived and/or modified CDS sequence (opt5) from hemagglutinin__InfluenzaB__AFJ80711
augaaggccaucauugugcugcucauggucguuaccagcaacgcugacagaaucugcacaggcauuacguccucuaauagcccccacguggugaaaaccgccacacagggggaggucaacgugaccggaguuaucccucugacaaccacaccgauuaaguccuacuucgcgaaucuuaaaggcaccaagacgcgggggaaacugugucccgauugccucaacuguaccgaccuggauguggcucuuggacgcccuaugugcgucggcacaacccccucugccaaggccagcauccugcaugaagugagaccuguuacauccggguguuuucccaucaugcacgaccggaccaagauucgccaacucccuaaucugcugagaggauaugagaacauccggcucucuacgcagaaugugauugaugcugaaaaagccccgggcggccccuaccgccuggggacaagcggauccugcccuaacgcuaccagcaagucuggcuucuuugccacaauggcgugggccguccccaaagacaauaacaagaaugcuaccaacccucuuaccguggaggugcccuaugucuguacagaaggggaggaucagaucacgguuuggggauuccauuccgacaauaaaacccagaugaagaaccuguacggcgauagcaauccgcaaaaguuuacaucuuccgccaacggggugaccacacacuaugugagccagauuggaggcuucccugaccagaccgaggauggcgggcucccccagucuggaagaaucgucguggacuacaugguucaaaaaccuggcaagacggggacaauuguguaucagcggggaguccugcuuccccagaaaguguggugcgcuuccggccgcagcaagguuaucaaagggucccugccccucaucggagaagccgauugucugcaugagaaguacggcggccugaacaaaucuaagccuuacuauaccggggaacacgcgaaggccauuggaaauugcccgaucugggugaaaacaccccucaagcuggcuaacggcaccaaauacagaccucccgccaagcugcugaaagagcggggguuuuucggagcuauugccggcuuucucgaagggggcugggaaggaaugaucgccggcuggcacggguauaccagccauggagcucacggcgucgcgguggccgcugaccugaaguccacacaggaggccauuaauaagaucacgaaaaaccuuaauagccugucugaacucgaggucaagaaccugcaacgccuguccggggccauggacgaacuccauaaugagauccuggagcuugaugaaaaaguggacgaucugagagcugacaccauuagcucucagaucgagcucgccguucugcuuagcaacgaaggaauuaucaauuccgaggaugaacaccuucucgcgcuggagcggaagcugaaaaagaugcucggcccuucugcuguggacauugggaacggcuguuucgagacaaagcacaaaugcaaucagaccugccuggaucgcaucgccgccggaacauuuaacgcuggcgaguucagccuucccaccuuugacucccugaauaucacggccgcuagccucaacgaugacgggcuggauaaucauaccauucugcuuuacuauucuacagccgcguccagccucgccgucacccugaugcuggcuaucuucauuguguacaugguuucuagagacaacguguccuguagcaucugccucuga

SEQ ID NO: 218857 - RNA, 1755 nt, Artificial Sequence; identical to SEQ ID NO: 218856
  derived and/or modified CDS sequence (opt5) from hemagglutinin__InfluenzaB__AFJ80722

SEQ ID NO: 218858 - RNA, 1755 nt, Artificial Sequence
  derived and/or modified CDS sequence (opt5) from hemagglutinin__InfluenzaB__AFJ80733
augaaggccaucauugugcugcucauggucguuaccagcaacgcugacagaaucugcacaggcauuacguccucuaauagcccccacguggugaaaaccgccacacagggggaggucaacgugaccggaguuaucccucugacaaccacaccgaccaaguccuacuucgcgaaucuuaaaggcacgcggacccgcgggaagcugugucccgauugccucaacuguacagaccuggauguggcucuuggaagaccuaugugcaugggcaccacacccucugccaaagccagcauucugcaugaaguccggccugugaccuccggguguuuucccaucaugcacgaccgcacgaagaucagacaacucccuaaucugcugcggggauaugagaacauucgccucucuacacagaauguuaucgaugcugaaaaggccccgggcggccccuacagacuggggaccagcggauccugcccugacgcuacaaacaaaagcggcuucuuugccaccauggcgugggccgugcccaaggauaauaacaaaaaugcuaccaacccucuuacagucgaggugcccuauauuuguacggaaggggaggaccagaucaccguguggggauuccauucugauaauaagacacagaugaaaaaccuguacggcgacuccaauccgcaaaaguuuaccagcucugccaacggggucacaacccacuauguuucccagauuggaggcuucccugaucagacggaggacggcgggcucccccagagcggacggaucgugguggauuacaugaugcaaaagccuggcaaaacagggaccauugucuaucagcgcggagugcugcuuccccagaagguuuggugcgcuucuggcagauccaaagugaucaaggggagccugccccucaucggagaagccgacugucugcaugagaaauacggcggccugaacaaguccaaaccuuacuauaccggggaacacgcgaaggccauuggaaauugcccgaucugggucaagacaccccucaaacuggcuaacggcaccaaguaccggccucccgccaaacuucugaaggagcgcggguuuuucggagcuauugccggcuuucucgaagggggcugggaaggaaugaucgccggcuggcacggguauacaucucauggagcucacggcguggcgguugccgcugaccugaaaagcacgcaggaggccauuaauaagaucaccaagaaccuuaauucccugagcgaacucgaggugaaaaaccugcaaagacugucuggggccauggaugaacuccauaaugagauccuggagcuugacgaaaaggucgaugaccugcgggcugauacaauuuccagccagaucgagcucgccgugcugcuuucuaacgaaggaauuaucaauagcgaggacgaacaucugcucgcgcuggagcgcaaacugaagaaaaugcucggcccuuccgcugucgauauugggaacggcuguuucgagaccaagcacaagugcaaucagacaugccuggacagaaucgccgccggaaccuuuaacgcuggcgaguucucucuucccacguuugauagccugaauaucaccgccgcuucccucaacgacgaugggcuggacaaucacacaauucugcuuuacuauagcaccgccgcgucuucccucgccgugacacugaugcuggcuaucuucauuguuuacauggugagccgggacaacgucucuuguuccaucugccucuga

SEQ ID NO: 218859 - RNA, 1758 nt, Artificial Sequence; identical to SEQ ID NO: 218586
  derived and/or modified CDS sequence (opt5) from hemagglutinin__InfluenzaB__AFJ80744

SEQ ID NO: 218860 - RNA, 1758 nt, Artificial Sequence; identical to SEQ ID NO: 218586
  derived and/or modified CDS sequence (opt5) from hemagglutinin__InfluenzaB__AFJ80755

SEQ ID NO: 218861 - RNA, 1758 nt, Artificial Sequence; identical to SEQ ID NO: 218586
  derived and/or modified CDS sequence (opt5) from hemagglutinin__InfluenzaB__AFJ80781

SEQ ID NO: 218862 - RNA, 1758 nt, Artificial Sequence; identical to SEQ ID NO: 218586
  derived and/or modified CDS sequence (opt5) from hemagglutinin__InfluenzaB__AFJ80792

SEQ ID NO: 218863 - RNA, 1758 nt, Artificial Sequence; identical to SEQ ID NO: 218586
  derived and/or modified CDS sequence (opt5) from hemagglutinin__InfluenzaB__AFJ80803

SEQ ID NO: 218864 - RNA, 1758 nt, Artificial Sequence; identical to SEQ ID NO: 218586
  derived and/or modified CDS sequence (opt5) from hemagglutinin__InfluenzaB__AFJ80814

SEQ ID NO: 218865 - RNA, 1758 nt, Artificial Sequence
  derived and/or modified CDS sequence (opt5) from hemagglutinin__InfluenzaB__AFJ80825
augaaggccaucauugugcugcucauggucguuaccagcaacgcugacagaaucugcacaggcauuacguccucuaauagcccccacguggugaaaaccgccacacagggggaggucaacgugaccggaguuaucccucugacaaccacaccgaccaagucccauuucgcgaaucuuaaaggcacggaaacccgggggaagcugugucccaaaugccucaacuguacagaucuggacguggcucuuggacgcccuaagugcaccggcaauauucccucugccagagucagcauccugcacgaggugcggccuaucacauccggguguuuucccauuaugcaugaucgcaccaagaucagacaacucccuaaccugcugcggggauacgaacacauucgccucucuacgcauaauguuaucaacgccgagaaugcuccgggcggccccuauaaaauugggacaagcggauccugcccuaacgugaccaauggcaacggguucuuugccacaauggcuugggccguccccaagaaugacaacaauaaaaccgcgaccaacagccugacaaucgaagugccuuacauuuguacggagggagaggaucagaucaccguguggggcuuccacucugacaacgaaacacagauggccaaacuuuauggggauuccaagccccagaaguuuaccagcucugcuaauggagucacaacccacuacguuucccaaaucggcggcuucccgaaccagacggaggacgggggacugccucagagcggcagaauugugguggauuauaugguccagaagucugggaaaacaggaaccaucaccuaccaacggggcauucuccugccccagaagguguggugcgccuccgggcgcagcaaaguuaucaagggaucccuuccucugauuggcgaagcugacugucuccaugagaaauauggcgggcugaauaagucuaaacccuacuacacaggagagcacgccaaggcgaucggcaacugccccaucugggugaagaccccucugaaacucgccaaugggacaaaguauagaccgcccgcuaaacugcuuaaggaacggggauuuuucggcgccauugcuggguuucuggagggcggaugggaaggcaugaucgccggguggcauggauacacgagccacggcgcccacggggucgcuguggcggccgaucucaaauccacccaggaggcuauuaacaagaucacaaagaaucugaacagccuuucugaacuggagguuaaaaaucuccagcgccuguccggagccauggacgagcugcauaacgaaauucucgagcuggaugaaaagguggacgaccuuagagccgauaccaucagcucucaaaucgagcuggcuguccuccugagcaaugaaggcauuaucaacuccgaggacgagcaccuucuggcccucgaacggaaacugaagaaaaugcuggggccuucugcgguggagauuggcaauggauguuucgaaacaaagcauaagugcaaccagaccugccucgaucgcaucgcugccggcacguuugacgccggggaguucagccugcccaccuuugauucccuuaauauuacagcugccagccugaacgacgauggacucgacaaccacaccauccugcuguauuacucuacagcugccuccagccuugcggucacccucaugauugccaucuucgugguuuauauggugucuagagauaaugucuccuguagcaucugccuguga

SEQ ID NO: 218866 - RNA, 1758 nt, Artificial Sequence; identical to SEQ ID NO: 218586
  derived and/or modified CDS sequence (opt5) from hemagglutinin__InfluenzaB__AFJ80836

SEQ ID NO: 218867 - RNA, 1758 nt, Artificial Sequence; identical to SEQ ID NO: 218654
  derived and/or modified CDS sequence (opt5) from hemagglutinin__InfluenzaB__AFJ80847

SEQ ID NO: 218868 - RNA, 1758 nt, Artificial Sequence; identical to SEQ ID NO: 218586
  derived and/or modified CDS sequence (opt5) from hemagglutinin__InfluenzaB__AFJ80858

SEQ ID NO: 218869 - RNA, 1758 nt, Artificial Sequence; identical to SEQ ID NO: 218586
  derived and/or modified CDS sequence (opt5) from hemagglutinin__InfluenzaB__AFJ80869

SEQ ID NO: 218870 - RNA, 1758 nt, Artificial Sequence; identical to SEQ ID NO: 218586
  derived and/or modified CDS sequence (opt5) from hemagglutinin__InfluenzaB__AFJ80880

SEQ ID NO: 218871 - RNA, 1758 nt, Artificial Sequence; identical to SEQ ID NO: 218637
  derived and/or modified CDS sequence (opt5) from hemagglutinin__InfluenzaB__AFJ80891

SEQ ID NO: 218872 - RNA, 1758 nt, Artificial Sequence; identical to SEQ ID NO: 218637
  derived and/or modified CDS sequence (opt5) from hemagglutinin__InfluenzaB__AFJ80902

SEQ ID NO: 218873 - RNA, 1758 nt, Artificial Sequence; identical to SEQ ID NO: 218586
  derived and/or modified CDS sequence (opt5) from hemagglutinin__InfluenzaB__AFJ80913

SEQ ID NO: 218874 - RNA, 1758 nt, Artificial Sequence
  derived and/or modified CDS sequence (opt5) from hemagglutinin__InfluenzaB__AFJ80924
augaaggccaucauugugcugcucauggucguuaccagcaacgcugacagaaucugcacaggcauuacguccucuaauagcccccacguggugaaaaccgccacacagggggaggucaacgugaccggaguuaucccucugacaaccacaccgaccaagucccauuucgcgaaucuuaaaggcacggaaacccgggggaagcugugucccaaaugccucaacuguacagaucuggacguggcucuuggacgcccuaagugcaccggcaauauucccucugccagagucagcauccugcacgaggugcggccuguuacauccggguguuuucccaucaugcaugaucgcaccaagauuagacaacucccuaaccugcugcggggauacgaacacauccgccucucuacgcauaaugugauuaacgccgagaaugcuccgggcggccccuauaaaaucgggacaagcggauccugcccuaacgucaccaauggcaacggguucuuugccacaauggcuugggccgugcccaagaaugacaacaauaaaaccgcgaccaacagccugacaauugaagugccuuacaucugugccgagggagaggaucagauuacggucuggggcuuccacucugacaacgaaacccagauggcuaaacuuuauggggauuccaagccccagaaguuuacaagcucugccaauggaguuaccacacacuacgugucccaaaucggcggcuucccgaaccagaccgaggacgggggacugccucagagcggcagaaucguggucgauuauauggugcagaagucugggaaaacgggaacaauuaccuaccaacggggcauccuccugccccagaagguuuggugcgcuuccgggcgcagcaaagugauuaagggaucccuuccucugaucggcgaagccgacugucuccaugagaaauauggcgggcugaauaagucuaaacccuacuacaccggagagcacgcgaaggccauuggcaacugccccaucugggucaagacaccucugaaacucgcuaaugggaccaaguauagaccgcccgccaaacugcuuaaggaacggggauuuuucggcgcuaucgccggguuucuggagggcggaugggaaggcaugauugccggguggcauggauacacaagccacggcgcucacgggguggcgguugccgcugaucucaaauccacgcaggaggccaucaacaagauuaccaagaaucugaacagccuuucugaacuggaggugaaaaaucuccagcgccuguccggagccauggacgagcugcauaacgaaauccucgagcuggaugaaaaggucgacgaccuuagagcugauacaauuagcucucaaaucgagcuggccgugcuccugagcaaugaaggcaucauuaacuccgaggacgagcaccuucuggcgcucgaacggaaacugaagaaaaugcuggggccuucugcugucgagaucggcaauggauguuucgaaaccaagcauaagugcaaccagacaugccucgaucgcauugccgccggcaccuuugacgcuggggaguucagccugcccacguuugauucccuuaauaucaccgccgcuagccugaacgacgauggacucgacaaccacacaauucugcuguauuacucuaccgccgcguccagccuugccgugacacucaugaucgcuauuuucguuguguauauggucucuagagauaauguguccuguagcaucugccuguga

SEQ ID NO: 218875 - RNA, 1758 nt, Artificial Sequence; identical to SEQ ID NO: 218637
  derived and/or modified CDS sequence (opt5) from hemagglutinin__InfluenzaB__AFJ80935

SEQ ID NO: 218876 - RNA, 1755 nt, Artificial Sequence; identical to SEQ ID NO: 218498
  derived and/or modified CDS sequence (opt5) from hemagglutinin__InfluenzaB__AFJ80946

SEQ ID NO: 218877 - RNA, 1758 nt, Artificial Sequence
  derived and/or modified CDS sequence (opt5) from hemagglutinin__InfluenzaB__AFJ80957
augaaggccaucauugugcugcucauggucgcuaccagcaacgccgacagaaucugcacaggcauuacguccucuaauagcccccacguugugaaaaccgcgacacagggggaggugaacgucaccggagugaucccucugacaaccacaccgaccaagucccauuucgcuaaucuuaaaggcacggaaacccgggggaagcugugucccaaaugccucaacuguacagaucuggacguugcccuuggacgcccuaagugcaccggcaauauucccucugccagagugagcauccugcacgagguccggccugugacauccggguguuuucccaucaugcaugaucgcaccaagauuagacaacucccuaaccugcugcggggauacgaacacauccgccucucuacgcauaauguuauuaacgcugagaaugccccgggcggccccuauaaaaucgggacaagcggauccugcccuaacgugaccaauggcaacggguucuuugcuacaauggccugggcgguccccaagaaugacaacaauaaaaccgccaccaacagccugacaauugaagugccuuacaucuguacggagggagaggaucagauuaccguguggggcuuccacucugacaacgaaacacagauggcuaaacuuuauggggauuccaagccccagaaguuuaccagcucugccaauggagucacaacccacuacguuucccaaaucggcggcuucccgaaccagacggaggacgggggacugccucagagcggcagaaucgugguggauuauaugguccagaagucugggaaaacaggaaccauuaccuaccaacggggcauccuccugccccagaagguguggugcgcuuccgggcgcagcaaaguuauuaagggaucccuuccucugaucggcgaagccgacugucuccaugagaaauauggcgggcugaauaagucuaaacccuacuacacaggagagcacgcgaaggccauuggcaacugccccaucugggugaagaccccucugaaacucgcuaaugggacaaaguauagaccgcccgccaaacugcuuaaggaacggggauuuuucggcgcuaucgccggguuucuggagggcggaugggaaggcaugauugccggguggcauggauacacgagccacggcgcucacggggucgcgguggccgcugaucucaaauccacccaggaggccaucaacaagauuacaaagaaucugaacagccuuucugaacuggagguuaaaaaucuccagcgccuguccggagccauggacgagcugcauaacgaaauccucgagcuggaugaaaagguggacgaccuuagagcugauaccauuagcucucaaaucgagcuggccguccuccugagcaaugaaggcaucauuaacuccgaggacgagcaccuucuggcgcucgaacggaaacugaagaaaaugcuggggccuucugcuguggagaucggcaauggauguuucgaaacaaagcauaagugcaaccagaccugccucgaucgcauugccgccggcacguuuaaugcuggggaguucagccugcccaccuuugacucccuuaacaucacagccgcuagccugaacgaugacggacucgauaaucacaccauucugcuguauuacucuacagccgcguccagccuugccgucacccucaugaucgcuauuuucgugguuuauauggugucuagagacaacgucuccuguagcaucugccuguga

SEQ ID NO: 218878 - RNA, 1755 nt, Artificial Sequence; identical to SEQ ID NO: 218498
  derived and/or modified CDS sequence (opt5) from hemagglutinin__InfluenzaB__AFJ80968

SEQ ID NO: 218879 - RNA, 1755 nt, Artificial Sequence; identical to SEQ ID NO: 218498
  derived and/or modified CDS sequence (opt5) from hemagglutinin__InfluenzaB__AFJ80979

SEQ ID NO: 218880 - RNA, 1755 nt, Artificial Sequence
  derived and/or modified CDS sequence (opt5) from hemagglutinin__InfluenzaB__AFJ80990
augaaggccaucauugugcugcucauggucguuaccagcaacgcugacagaaucugcacaggcauuacguccucuaauagcccccacguggugaaaaccgccacacagggggaggucaacgugaccggaguuaucccucugacaaccacaccgaccaaguccuacuucgcgaaucuuaaaggcacgcggacccgcgggaagcugugucccgauugccucaacuguacagaccuggauguggcucuuggaagaccuaugugcgucggcaccacacccucugccgaagccagcauucugcaugaggugcggccuguuaccuccggguguuuucccaucaugcacgaccgcacgaaaaucagacaacucccuaaucugcugcggggauaugaaaacauucgccucucuacacagaaugugaucgaugcugagaaggccccgggcggccccuacagacuggggaccagcggauccugcccuaacgcuacaaauaagagcggcuucuuugccaccauggcgugggccguccccaaagacaacaauaagaacgcuaccaauccucuuacaguggaagugcccuauauuuguacggagggggaggaucagaucaccgucuggggauuccauucugacaacaaaacacagaugaagaaucuguacggcgauuccaacccgcaaaaauuuaccagcucugccaacgggguuacaacccacuaugugucccagauuggaggcuucccugaccagacggaagauggcgggcucccccagagcggacggaucguggucgacuacaugaugcaaaagccuggcaagacagggaccauuguguaucagcgcggaguucugcuuccccagaaaguguggugcgcuucuggcagauccaaggucaucaaagggagccugccccucaucggagaggccgauugucugcaugaaaaguacggcggccugaauaaauccaagccuuacuauaccggggagcacgcgaaagccauuggaaacugcccgaucugggugaagacaccccucaagcuggcuaauggcaccaaauaccggccucccgccaagcugcugaaagagcgcggguuuuucggagcuauugccggcuuucucgaagggggcugggagggaaugaucgccggcuggcacggguauacaucucauggagcucacggcguugcgguggccgcugaccuuaagagcacgcaggaagccauuaacaaaaucaccaagaaucuuaacucccugagcgagcucgaagucaagaaucugcaaagacugucuggggccauggacgagcuccauaacgagauccuggaacuugaugagaaaguggacgaucugcgggcugacacaauuuccagccagaucgaacucgccguccugcuuucuaaugagggaauuaucaacagcgaagaugagcaucugcucgcgcuggagcgcaagcugaaaaagaugcucggcccuuccgcuguggacauugggaauggcuguuucgaaaccaaacacaagugcaaccagacaugccuggauagaaucgccgccggaaccuuuaaugcuggcgaguucucucuucccacguuugacagccugaacaucaccgccgcuucccucaaugaugacgggcuggauaaccacacaauucugcuuuacuauagcaccgccgcgucuucccucgccguuacacugaugcuggcuaucuucauuguguacauggucagccgggacaacgugucuuguuccaucugccucuga

SEQ ID NO: 218881 - RNA, 1755 nt, Artificial Sequence; identical to SEQ ID NO: 218498
  derived and/or modified CDS sequence (opt5) from hemagglutinin__InfluenzaB__AFJ81001

SEQ ID NO: 218882 - RNA, 1755 nt, Artificial Sequence; identical to SEQ ID NO: 218498
  derived and/or modified CDS sequence (opt5) from hemagglutinin__InfluenzaB__AFJ84360

SEQ ID NO: 218883 - RNA, 1758 nt, Artificial Sequence; identical to SEQ ID NO: 218586
  derived and/or modified CDS sequence (opt5) from hemagglutinin__InfluenzaB__AFJ90395

SEQ ID NO: 218884 - RNA, 1755 nt, Artificial Sequence; identical to SEQ ID NO: 218498
  derived and/or modified CDS sequence (opt5) from hemagglutinin__InfluenzaB__AFJ90406

SEQ ID NO: 218885 - RNA, 1755 nt, Artificial Sequence; identical to SEQ ID NO: 218498
  derived and/or modified CDS sequence (opt5) from hemagglutinin__InfluenzaB__AFJ90417

SEQ ID NO: 218886 - RNA, 1755 nt, Artificial Sequence; identical to SEQ ID NO: 218498
  derived and/or modified CDS sequence (opt5) from hemagglutinin__InfluenzaB__AFJ90428

SEQ ID NO: 218887 - RNA, 1755 nt, Artificial Sequence; identical to SEQ ID NO: 218498
  derived and/or modified CDS sequence (opt5) from hemagglutinin__InfluenzaB__AFJ90450

SEQ ID NO: 218888 - RNA, 1755 nt, Artificial Sequence; identical to SEQ ID NO: 218498
  derived and/or modified CDS sequence (opt5) from hemagglutinin__InfluenzaB__AFJ91038

SEQ ID NO: 218889 - RNA, 1755 nt, Artificial Sequence
  derived and/or modified CDS sequence (opt5) from hemagglutinin__InfluenzaB__AFJ91049
augaaggccaucauugugcugcucauggucguuaccagcaacgcugacagaaucugcacaggcauuacguccucuaauagcccccacguggugaaaaccgccacacagggggaggucaacgugaccggaguuaucccucugacaauuaccccgacaaaguccuacuucgcgaaucuuaaaggcacccggacgcgcgggaagcugugucccgauugccucaacuguaccgaccuggauguggcucuuggaagaccuaugugcgucggcacaacccccucugccaaagccagcauccugcaugaagugcggccuguuacauccggguguuuucccaucaugcacgaccgcaccaagauuagacaacucgcuaaucugcugcggggauaugagaacauccgccucucuacgcagaaugugauugaugccgaaaaggcuccuggcggcccguacagacuggggacaagcggauccugccccaacgccaccagcaaaucuggcuucuuugcgacaauggccugggcugucccuaaggacaauaacaaaaaugccaccaacccccuuaccguggaggugccuuauaucuguacagaaggggaggaucagauuacggucuggggauuccauuccgacaauaagacccagaugaaaaaccuguacggcgauagcaauccccaaaaguuuacaucuuccgcuaacgggguuaccacacacuaugugagccagaucggaggcuucccggaccagaccgaggauggcgggcucccucagucuggacggauuguggucgacuacaugaugcaaaagcccggcaaaacggggacaaucguguaucagcgcggaguucugcuuccucagaagguguggugcgccuccggcagaagcaaagucaucaaggggucccugccccucauuggagaagcggauugucugcaugagaaauacggcggccugaacaagucuaaacccuacuauaccggggaacacgccaaggcuaucggaaauugcccuauuugggugaagaccccgcucaaacuggccaacggcacaaaguaccggcccccugcuaaacuucugaaggagcgcggguuuuucggagccaucgccggcuuucucgaagggggcugggaaggaaugauugcuggcuggcacggguauaccagccauggagcgcacggcguugccguggcugccgaccugaaauccacacaggaggccaucaauaagaucacgaagaaccuuaauagccugucugaacucgaggucaaaaaccugcaaagacuguccggggcuauggacgaacuccauaaugagauucuggagcuugaugaaaagguggacgaucugcgggccgacaccaucagcucucagauugagcucgcgguccugcuuagcaacgaaggaaucauuaauuccgaggaugaacaucugcucgcucuggagcgcaaacugaagaaaaugcucggccccucugccguggacaucgggaacggcuguuucgagacaaagcacaagugcaaucagaccugccuggauagaaucgccgcuggaacauuuaacgccggcgaguucagccuuccuaccuuugacucccugaauauuacggcugccagccucaacgaugacgggcuggauaaucacaccauccugcuuuacuauucuacagcggccuccagccucgcuguuacccugaugcuggccauuuucaucguguacauggucucucgggacaacguguccuguagcauuugccucuga

SEQ ID NO: 218890 - RNA, 1758 nt, Artificial Sequence
  derived and/or modified CDS sequence (opt5) from hemagglutinin__InfluenzaB__AFJ91060
augaaggccaucauugugcugcucauggucguuaccagcaacgcugacagaaucugcacaggcauuacguccucuaauagcccccacguggugaaaaccgccacacagggggaggucaacgugaccggaguuaucccucugacaaccacaccgaccaagucccauuucgcgaaucuuaaaggcacggaaacccgggggaagcuguguccccgcugccucaacuguacagaucuggacguggcucuuggaagaccuaaaugcaccggcaauauucccucugcccgggucagcauccugcacgaggugcgcccuguuacauccggguguuuucccaucaugcaugauagaaccaagauucggcaacucccuaaccugcugcgcggauacgaacacaucagacucucuacgcauaaugugauuaacgccgagaaugcuccgggcggccccuauaagaucgggacaagcggauccugcccuaacgucaccaauggcaacggguucuuugccacaauggcuugggccgugcccaaaaaugacaacaauaagaccgcgaccaacagccugacaauugaagugccuuacaucuguacggagggagaggaucagauuaccgucuggggcuuccacucugacaacgaagcccagauggcuaaacuuuauggggauuccaagccccagaaauuuacaagcucugccaauggaguuaccacacacuacgugucccaaaucggcggcuucccgaaccagaccgaggacgggggacugccucagagcggccggaucguggucgauuauauggugcagaagucugggaagacgggaacaauuaccuaccaacgcggcauccuccugccccagaaaguuuggugcgcuuccgggagaagcaaggugauuaaaggaucccuuccucugaucggcgaagccgacugucuccaugagaaguauggcgggcugaauaaaucuaagcccuacuacaccggagagcacgcgaaagccauuggcaacugccccaucugggucaagacaccucugaagcucgcuaaugggaccaaauaucggccgcccgccaagcugcuuaaagaacgcggauuuuucggcgcuaucgccggguuucuggagggcggaugggaaggcaugauugccggguggcauggauacacaagccacggcgcucacgggguggcgguugccgcugaucucaaguccacgcaggaggccaucaacaaaauuaccaagaaucugaacagccuuucugaacuggaggugaagaaucuccagagacuguccggagccauggacgagcugcauaacgaaauccucgagcuggaugaaaaagucgacgaccuucgggcugauacaauuagcucucaaaucgagcuggccgugcuccugagcaaugaaggcaucauuaacuccgaggacgagcaccuucuggcgcucgaacgcaagcugaaaaagaugcuggggccuucugcugucgagaucggcaauggauguuucgaaaccaaacauaagugcaaccagacaugccucgauagaauugccgccggcaccuuugacgcuggggaguucagccugcccacguuugauucccuuaauaucaccgccgcuagccugaacgacgauggacucgacaaccacacaauucugcuguauuacucuaccgccgcguccagccuugccgugacacucaugaucgcuauuuucguuguguauauggucucucgggauaauguguccuguagcaucugccuguga

SEQ ID NO: 218891 - RNA, 1755 nt, Artificial Sequence; identical to SEQ ID NO: 218498
  derived and/or modified CDS sequence (opt5) from hemagglutinin__InfluenzaB__AFJ91071

SEQ ID NO: 218892 - RNA, 1755 nt, Artificial Sequence
  derived and/or modified CDS sequence (opt5) from hemagglutinin__InfluenzaB__AFJ91082
augaaggccaucauugugcugcucauggucguuaccagcaacgcugacagaaucugcacaggcauuacguccucuaauagcccccacguggugaaaaccgccacacagggggaagucaacgugaccggaguuaucccucugacaaccacaccgaccaaguccuacuucgcgaaucuuaaaggcacgcggacccgcgggaagcugugucccgauugccucaacuguacagaccuggauguggcucuuggaagaccuaugugcgucggcaccacacccucugccaaagccagcauucugcaugaagugcggccuguuaccuccggguguuuucccaucaugcacgaccgcacgaagaucagacaacucccuaaucugcugcggggauaugagaacauucgccucucuacacagaaugugaucgaugcugaaaaggccccgggcggccccuacagacuggggaccagcggauccugcccuaacgcuacaagcaaaauuggcuucuuugccaccauggcgugggccguccccaaggacaauuauaaaaacgcuaccaauccucuuacaguggaggugcccuacaucuguacggaaggggaggaucagauuaccgucuggggauuccauucugacaacaagacacagaugaaaaaucuguauggcgauuccaacccgcaaaaguuuaccagcucugccaaugggguuacaacccacuacgugucccagaucggagacuucccugaucagacggaggacggcggccucccccagagcgggcggauuguggucgauuauaugaugcaaaagccuggaaaaacaggcaccaucguguaccagcgcgggguucugcuuccccagaagguguggugcgcuucuggaagauccaaagucaucaagggcagccugccccucauuggggaagccgacugucugcaugagaaauacggaggccugaacaaguccaaaccuuauuacaccggcgaacacgcgaaggccaucgggaacugcccgauuugggugaagacaccccucaaacuggcuaauggaaccaaguaucggccucccgccaaacuucugaaggagcgcggcuuuuucggggcuaucgccggauuucucgagggcgggugggaaggcaugauugccggauggcacggcuacacaucucauggggcucacggaguugcgguggccgcugaccugaaaagcacgcaggaggccaucaacaagaucaccaagaaucuuaacucccugagcgaacucgaggucaaaaaucugcaaagacugucuggcgccauggaugaacuccauaacgagauucuggagcuugacgaaaagguggaugaccugcgggcugauacaaucuccagccagauugagcucgccguccugcuuucuaaugaagggaucauuaacagcgaggacgaacaucugcucgcgcuggagcgcaaacugaagaaaaugcucggaccuuccgcuguggauaucggcaauggguguuucgagaccaagcacaagugcaaccagacaugccuggacagaaucgccgccggcaccuuuaaugcuggagaguucucucuucccacguuugauagccugaacauuaccgccgcuucccucaaugacgauggccuggacaaccacacaauccugcuuuauuacagcaccgccgcgucuucccucgccguuacacugaugcuggcuauuuucaucguguauauggucagccgggacaaugugucuuguuccauuugccucuga

SEQ ID NO: 218893 - RNA, 1755 nt, Artificial Sequence; identical to SEQ ID NO: 218892
  derived and/or modified CDS sequence (opt5) from hemagglutinin__InfluenzaB__AFJ91093

SEQ ID NO: 218894 - RNA, 1755 nt, Artificial Sequence; identical to SEQ ID NO: 218892
  derived and/or modified CDS sequence (opt5) from hemagglutinin__InfluenzaB__AFJ91104

SEQ ID NO: 218895 - RNA, 1755 nt, Artificial Sequence; identical to SEQ ID NO: 218892
  derived and/or modified CDS sequence (opt5) from hemagglutinin__InfluenzaB__AFJ91115

SEQ ID NO: 218896 - RNA, 1758 nt, Artificial Sequence
  derived and/or modified CDS sequence (opt5) from hemagglutinin__InfluenzaB__AFJ91704
augaaggccaucauugugcugcucauggucguuaccagcaacgcugacagaaucugcacaggcauuacguccucuaauagcccccacguggugaaaaccgccacacagggggaggucaacgugaccggaguuaucccucugacaaccacaccgaccaagucccauuucgcgaaucuuaaaggcacggaaacccgggggaagcugugucccaaaugccucaacuguacagaucuggacguggcucuuggacgcccuaagugcaccggcaauauucccucugccagagucagcauccugcacgaggugcggccuguuacauccggguguuuucccaucaugcaugaucgcaccaagauuagacaacucccuaaccugcugcggggauacgaacacauccgccucucuacgcauaaugugauuaacgccgagaaugcuccgggcggccccuauaaaaucgggacaagcggauccugcccuaacgucaccaauggcaagggguucuuugccacaauggcuugggccgugcccaaaaacgacaauaacaagaccgcgaccaauagccugacaauugaagugccuuacaucuguacggagggagaggaucagauuaccgucuggggcuuccacucugacaacgaaacacagauggccaaacuuuauggggauuccaagccccagaaguuuaccagcucugcuaacggaguuacaacccacuacgugucccaaaucggcggcuucccgaaucagacggaggacgggggacugccucagagcggcagaaucguggucgauuauauggugcagaaaucugggaagacaggaaccauuaccuaccaacggggcauccuccugccccagaaaguuuggugcgccuccgggcgcagcaaggugauuaaaggaucccuuccucugaucggcgaagcugacugucuccaugagaaguauggcgggcugaacaaaucuaagcccuacuacacaggagagcacgccaaggcgauuggcaauugccccaucugggucaaaaccccucugaagcucgccaacgggacaaaauauagaccgcccgcuaagcugcuuaaagaacggggauuuuucggcgccaucgcuggguuucuggagggcggaugggaaggcaugauugccggguggcauggauacacgagccacggcgcccacgggguggcuguugcggccgaucucaaguccacccaggaggcuaucaauaagauuaccaaaaaccugaauagccuuucugaacuggaggugaagaaccuccagcgccuguccggagccauggacgagcugcauaaugaaauccucgagcuggaugaaaaagucgacgaccuuagagccgauacaauuagcucucaaaucgagcuggcugugcuccugagcaacgaaggcaucauuaauuccgaggacgagcaccuucuggcccucgaacggaagcugaaaaagaugcuggggccuucugcggucgagaucggcaacggauguuucgaaacaaagcauaaaugcaaucagaccugccucgaucgcauugcugccggcacguuugacgccggggaguucagccugcccaccuuugauucccuuaacaucacagcugccagccugaaugacgauggacucgacaaccacaccauucugcuguauuacucuacagcugccuccagccuugcggugacccucaugaucgccauuuucguuguguauauggucucuagagauaacguguccuguagcaucugccuguga

SEQ ID NO: 218897 - RNA, 1755 nt, Artificial Sequence
  derived and/or modified CDS sequence (opt5) from hemagglutinin__InfluenzaB__AFK09797
augaaggccaucauugugcugcucauggucguuaccagcaacgcugacagaaucugcacaggcauuacguccucuaauagcccccacguggugaaaaccgccacacagggggaggucaacgugaccggaguuaucccucugacaaccacaccgauuaaguccuacuucgcgaaucuuaaaggcaccaagacgcgggggaaacugugucccgauugccucaacuguaccgaccuggauguggcucuuggacgcccuaugugcgucggcacaacccccucugccaaggccagcauccugcaugaagugagaccuguuacauccggguguuuucccaucaugcacgaccggaccaagauucgccaacucccuaaucugcugagaggauaugagaacauccggcucucuacgcagaaugugauugaugcugaaaaagccccgggcggccccuaccgccuggggacaagcggauccugcccuaacgcuaccagcaagucuggcuucuuugccacaauggcgugggccguccccaaagacaauaacaagaaugcuaccaacccucuuaccguggaggugcccuaugucuguacagaaggggaggaucagaucacgguuuggggauuccauuccgacaauaaaaaccagaugaagaaucuguacggcgauagcaacccgcaaaaguuuaccucuuccgccaacggggugacaacccacuaugugagccagauuggaggcuucccugaccagacagaggauggcgggcucccccagucuggaagaaucgucguggacuacaugguucaaaaaccuggcaagaccgggacgauuguguaucagcggggaguccugcuuccccagaaaguguggugcgcuuccggccgcagcaagguuaucaaagggucccugccccucaucggagaagccgauugucugcaugagaaguacggcggccugaauaaaucuaagccuuacuauacaggggaacacgcgaaggccauuggaaacugcccgaucugggugaaaacaccccucaagcuggcuaauggcaccaaauacagaccucccgccaagcugcugaaagagcggggguuuuucggagcuauugccggcuuucucgaagggggcugggaaggaaugaucgccggcuggcacggguauacaagccauggagcucacggcgucgcgguggccgcugaccugaaguccacccaggaggccauuaacaagaucaccaaaaaucuuaacagccugucugaacucgaggucaagaaucugcaacgccuguccggggccauggacgaacuccauaacgagauccuggagcuugaugaaaaaguggacgaucugagagcugacacgauuagcucucagaucgagcucgccguucugcuuagcaaugaaggaauuaucaacuccgaggaugaacaccuucucgcgcuggagcggaagcugaaaaagaugcucggcccuucugcuguggacauugggaauggcuguuucgagaccaagcacaaaugcaaccagacaugccuggaucgcaucgccgccggaaccuuuaaugcuggcgaguucagccuucccacauuugacucccugaacaucaccgccgcuagccucaaugaugacgggcuggauaaccauacgauucugcuuuacuauucuaccgccgcguccagccucgccgucacacugaugcuggcuaucuucauuguguacaugguuucuagagacaacguguccuguagcaucugccucuga

SEQ ID NO: 218898 - RNA, 1755 nt, Artificial Sequence; identical to SEQ ID NO: 218892
  derived and/or modified CDS sequence (opt5) from hemagglutinin__InfluenzaB__AFN54654

SEQ ID NO: 218899 - RNA, 1755 nt, Artificial Sequence; identical to SEQ ID NO: 218639
  derived and/or modified CDS sequence (opt5) from hemagglutinin__InfluenzaB__AFN54665

SEQ ID NO: 218900 - RNA, 1755 nt, Artificial Sequence; identical to SEQ ID NO: 218639
  derived and/or modified CDS sequence (opt5) from hemagglutinin__InfluenzaB__AFN54676

SEQ ID NO: 218901 - RNA, 1755 nt, Artificial Sequence; identical to SEQ ID NO: 218892
  derived and/or modified CDS sequence (opt5) from hemagglutinin__InfluenzaB__AFN54687

SEQ ID NO: 218902 - RNA, 1755 nt, Artificial Sequence
  derived and/or modified CDS sequence (opt5) from hemagglutinin__InfluenzaB__AFN54698
augaaggccaucauugugcugcucauggucguuaccagcaacgcugacagaaucugcacaggcauuacguccucuaauagcccccacguggugaaaaccgccacacagggggaggucaacgugaccggaguuaucccucugacaaccacaccgaccaaguccuacuucgcgaaucuuaaaggcacgcggacccgcgggaagcugugucccgauugccucaacuguacagaccuggauguggcucuuggaagaccuaugugcgucggcaccacacccucugccaaagccagcauucugcaugaagugcggccuguuaccuccggguguuuucccaucaugcacgaccgcacgaagaucagacaacucccuaaucugcugcggggauaugagaacauucgccucucuacacagaaugugaucgaugcugaaaaggccccgggcggccccuacagacuggggaccagcggauccugcccuaacgcuacaagcaaaauuggcuucuuugccaccauggcgugggccguccccaaggacaauuauaaaaacgcuaccaauccucuuacaguggaggugcccuacaucuguacggaaggggaggaucagauuaccgucuggggauuccauucugacaacaagacacagaugaaaaaucuguauggcgauuccaacccgcaaaaguuuaccagcuucgccaaugggguuacaacccacuacgugucucagaucggagacuuuccugaucagacggaggacggcggccucccccaguccgggcggauuguggucgauuauaugaugcaaaagccuggaaaaacaggcaccaucguguaccagcgcgggguucugcuuccccagaagguguggugcgcuagcggaagaucuaaagucaucaagggcucccugccccucauuggggaagccgacugucugcaugagaaauacggaggccugaacaagagcaaaccuuauuacaccggcgaacacgcgaaggccaucgggaacugcccgauuugggugaagacaccccucaaacuggcuaauggaaccaaguaucggccucccgccaaacuucugaaggagcgcggcuucuuuggggcuaucgccggauuccucgagggcgggugggaaggcaugauugccggauggcacggcuacacaucccauggggcucacggaguugcgguggccgcugaccugaaaucuacgcaggaggccaucaacaagaucaccaagaaucuuaacagccuguccgaacucgaggucaaaaaucugcaaagacugagcggcgccauggaugaacuccauaacgagauucuggagcuugacgaaaagguggaugaccugcgggcugauacaaucucuucccagauugagcucgccguccugcuuagcaaugaagggaucauuaacucugaggacgaacaucugcucgcgcuggagcgcaaacugaagaaaaugcucggaccuagcgcuguggauaucggcaauggguguuuugagaccaagcacaagugcaaccagacaugccuggacagaaucgccgccggcaccuucaaugcuggagaauuuucccuucccacguucgauucucugaacauuaccgccgcuagccucaaugacgauggccuggacaaccacacaauccugcuuuauuacuccaccgccgcgagcucucucgccguuacacugaugcuggcuauuuucaucguguauauggucucccgggacaaugugagcuguucuauuugccucuga

SEQ ID NO: 218903 - RNA, 1755 nt, Artificial Sequence; identical to SEQ ID NO: 218892
  derived and/or modified CDS sequence (opt5) from hemagglutinin__InfluenzaB__AFN54709

SEQ ID NO: 218904 - RNA, 1755 nt, Artificial Sequence; identical to SEQ ID NO: 218892
  derived and/or modified CDS sequence (opt5) from hemagglutinin__InfluenzaB__AFN54720

SEQ ID NO: 218905 - RNA, 1755 nt, Artificial Sequence; identical to SEQ ID NO: 218892
  derived and/or modified CDS sequence (opt5) from hemagglutinin__InfluenzaB__AFN54731

SEQ ID NO: 218906 - RNA, 1755 nt, Artificial Sequence; identical to SEQ ID NO: 218892
  derived and/or modified CDS sequence (opt5) from hemagglutinin__InfluenzaB__AFN54742

SEQ ID NO: 218907 - RNA, 1755 nt, Artificial Sequence; identical to SEQ ID NO: 218892
  derived and/or modified CDS sequence (opt5) from hemagglutinin__InfluenzaB__AFN54753

SEQ ID NO: 218908 - RNA, 1755 nt, Artificial Sequence; identical to SEQ ID NO: 218892
  derived and/or modified CDS sequence (opt5) from hemagglutinin__InfluenzaB__AFN54764

SEQ ID NO: 218909 - RNA, 1755 nt, Artificial Sequence; identical to SEQ ID NO: 218892
  derived and/or modified CDS sequence (opt5) from hemagglutinin__InfluenzaB__AFN54775

SEQ ID NO: 218910 - RNA, 1755 nt, Artificial Sequence; identical to SEQ ID NO: 218892
  derived and/or modified CDS sequence (opt5) from hemagglutinin__InfluenzaB__AFN54786

SEQ ID NO: 218911 - RNA, 1755 nt, Artificial Sequence; identical to SEQ ID NO: 218892
  derived and/or modified CDS sequence (opt5) from hemagglutinin__InfluenzaB__AFN54797

SEQ ID NO: 218912 - RNA, 1755 nt, Artificial Sequence; identical to SEQ ID NO: 218892
  derived and/or modified CDS sequence (opt5) from hemagglutinin__InfluenzaB__AFN54808

SEQ ID NO: 218913 - RNA, 1755 nt, Artificial Sequence; identical to SEQ ID NO: 218639
  derived and/or modified CDS sequence (opt5) from hemagglutinin__InfluenzaB__AFN54819

SEQ ID NO: 218914 - RNA, 1755 nt, Artificial Sequence; identical to SEQ ID NO: 218892
  derived and/or modified CDS sequence (opt5) from hemagglutinin__InfluenzaB__AFN54830

SEQ ID NO: 218915 - RNA, 1755 nt, Artificial Sequence; identical to SEQ ID NO: 218892
  derived and/or modified CDS sequence (opt5) from hemagglutinin__InfluenzaB__AFN54841

SEQ ID NO: 218916 - RNA, 1755 nt, Artificial Sequence; identical to SEQ ID NO: 218892
  derived and/or modified CDS sequence (opt5) from hemagglutinin__InfluenzaB__AFN54852

SEQ ID NO: 218917 - RNA, 1755 nt, Artificial Sequence; identical to SEQ ID NO: 218892
  derived and/or modified CDS sequence (opt5) from hemagglutinin__InfluenzaB__AFN54863

SEQ ID NO: 218918 - RNA, 1758 nt, Artificial Sequence
  derived and/or modified CDS sequence (opt5) from hemagglutinin__InfluenzaB__AFU34595
augaaggccaucauugugcugcucauggucguuaccagcaacgcugacagaaucugcacaggcauuacguccucuaauagcccccacguggugaaaaccgccacacagggggaggucaacgugaccggaguuaucccucugacaaccacaccgaccaagucccauuucgcgaaucuuaaaggcacggaaacccgggggaagcugugucccaaaugcccuaacuguacagaucucgacguggcucugggacgccccaagugcaccggcaagauuccuucugccagagucagcauccuucacgaggugcggcccguuacauccggguguuuuccuaucaugcaugaucgcaccaaaauuagacaacugccgaaucuccugcggggauacgaacacauccgccugucuacgcauaacgugauuaaugccgagaacgcucccggcggcccuuauaagaucgggacaagcggauccugccccaaugucaccaacggcaauggguucuuugccacaauggcuugggccgugccuaaaaacgacaagaauaaaaccgcgaccaacccccucacaauugaagugccguacaucuguacggagggagaggaucagauuaccgucuggggcuuccacagcgacaaugaaacacagauggccaagcuguauagagauucuaagccucagaaauuuaccuccagcgcuaacgggguuacaacccacuacgugucucaaaucggaggcuuccccaaccagacggaggacggcgggcuuccucaguccggacggaucguggucgauuauauggugcaaaagagcggcaaaacagggaccauuaccuaccagcgcggaauccugcucccccagaagguuuggugcgccucuggcagauccaaagugauuaaggggagccugccccuuaucggagaagcugacugucugcaugagaaauauggcggccucaauaaguccaagccuuacuacacaggggagcacgccaaagcgauuggaaacugcccgaucugggucaagacaccccugaaacuggccaauggcaccaaguaucggccucccacgaaacuccugaaggaacgcggguuuuucggagcuaucgccggcuuucuugaagggggcugggagggaaugauugcuggcuggcauggguacaccucucacggagcccacggcguggccguugcugcggaucucaagagcacacaggaggccaucaacaaaauuaccaagaaucugaacucccugagcgaacuugaggugaaaaaucugcagagacucucuggggcuauggacgagcugcauaacgaaauccuggagcucgaugaaaaggucgacgaccugcgggccgauacaauuuccagccaaaucgagcuugccgugcugcucucuaaugaaggaaucauuaacagcgaggacgagcaucugcuugcucuggaacgcaaacucaagaagaugcugggcccuuccgccgucgagaucgggaauggcuguuucgaaaccaaacacaagugcaaccagacgugccuggauagaauugcggcuggaaccuuugacgccggcgaguucucucuccccacauuugauagccugaauaucaccgccgcuucccuuaacgacgaugggcuggacaaucacacaauucuccuguauuacagcaccgccgcuucuucccuggccgugacgcuuaugaucgcgauuuucguuguguauauggucagccgggauaacgugucuuguuccaucugccucuga

SEQ ID NO: 218919 - RNA, 1758 nt, Artificial Sequence
  derived and/or modified CDS sequence (opt5) from hemagglutinin__InfluenzaB__AFU34606
augaaggccaucauugugcugcucauggucguuaccagcaacgcugacagaaucugcacaggcauuacguccucuaauagcccccacguggugaaaaccgccacacagggggaggucaacgugaccggaguuaucccucugacaaccacaccgaccaagucccauuucgcgaaucuuaaaggcacggaaacccgggggaagcugugucccaaaugcccuaacuguacagaucucgacguggcucuggaucgccccaagugcaccggaaagauuccuucugccagagucagcauccuucacgaggugcggcugguuacauccggcuguuuucccaucaugcaugaccgcaccaaaauuagacaacucccuaaucugcugcggggguacgaacacauccgccucucuacgcauaacgugauuaaugccgagaacgcuccgggaggccccuauaagaucggcacaagcggguccugcccuaaugucaccaacggaaauggcuucuuugccacaauggcuugggccgugcccaaaaacgauaagaauaaaaccgcgaccaacccucugacaauugaagugcccuacaucuguacggagggggaggaccagauuaccgucuggggauuccacagcgaugacgaaacacagauggccaagcuguauggcgauucuaagccgcagaaauuuaccuccagcgcuaaugggguuacaacccacuacgugucucaaaucggaggcuucccuaaccagacggaggacggcgggcugccccaguccggaagaaucguggucgauuauauggugcaaaagagcggcaaaacagggaccauuaccuaccagcggggaauccuccugccucagaagguuuggugcgccucuggccgcuccaaagugauuaaggggagccuuccccugaucggagaagcugacugucuccaugagaaauauggcggccugaacaaguccaagcccuacuacacaggggagcacgccaaagcgauuggaaauugcccuaucugggucaagaccccgcugaaacucgccaacggcacaaaguauagacccccugcuaaacugcuuaaggaacggggguuuuucggagccaucgcuggcuuucuggaagggggcugggagggaaugauugccggcuggcauggguacacgucucacggagcccacggcguggcuguugcggccgaucucaagagcacccaggaggcuaucaauaaaauuacaaagaaccuuaauucccuuagcgaacuggaggugaaaaaccuccagcgccugucuggggccauggacgagcugcauaaugaaauccucgagcuggacgaaaaggucgaugaccuuagagccgauaccauuuccagccaaaucgagcuggcugugcuccugucuaacgaaggaaucauuaauagcgaggacgagcaccuucuggcccucgaacggaaacugaagaagaugcugggccccuccgcggucgagaucgggaacggcuguuucgaaacaaaacauaagugcaaucagaccugccucgaucgcauugcugccggaacguuugacgccggcgaguucucucugccuaccuuugauagccuuaacaucacagcugccucccugaaugacgaugggcucgacaaccacaccauucugcuguauuacagcacagcugccucuucccuugcggugacccucaugaucgccauuuucguuguguauauggucagcagagauaaugugucuuguuccaucugccuguga

SEQ ID NO: 218920 - RNA, 1758 nt, Artificial Sequence; identical to SEQ ID NO: 218828
  derived and/or modified CDS sequence (opt5) from hemagglutinin__InfluenzaB__AFU34617

SEQ ID NO: 218921 - RNA, 1758 nt, Artificial Sequence
  derived and/or modified CDS sequence (opt5) from hemagglutinin__InfluenzaB__AFU34628
augaaggccaucauugugcugcucauggucguuaccagcaacgcugacagaaucugcacaggcauuacguccucuaauagcccccacguggugaaaaccgccacacagggggaggucaacgugaccggaguuaucccucugacaaccacaccgaccaagucccauuucgcgaaucuuaaaggcacggaaacccgggggaagcugugucccaaaugcccuaacuguacagaucucgacguggcucugggacgccccaagugcaccggcaagauuccuucugccagagucagcauccuucacgaggugcggcccguuacauccggguguuuuccuaucaugcaugaucgcaccaaaauuagacaacugccgaaucuccugcggggauacgaacacauccgccugucuacgcauaacgugauuaaugccgagaacgcucccggcggcccuuauaagaucgggacaagcggauccugccccaaugucaccaacggcaauggguucuuugccacaauggcuugggccgugccuaaaaacgacaagaauaaaaccgcgaccaacccccucacaauugaagugccguacaucuguacggagggagaggaucagauuaccgucuggggcuuccacagcgacgaugaaacacagauggccaagcuguauggggacucuaagccucagaaauuuaccuccagcgcuaauggaguuacaacccacuacgugucucaaaucggcggcuuccccaaccagacggaggaugggggacuuccucaguccggcagaaucguggucgacuauauggugcagaaguccgggaaaacaggaaccauuaccuaccaacggggcauccugcucccccagaagguuuggugcgccucugggcgcuccaaagugauuaagggaagccugccccuuaucggcgaagcugauugucugcaugagaaauauggcgggcucaacaaguccaagccuuacuacacaggagagcacgccaaagcgauuggcaauugcccgaucugggucaagacaccccugaaacuggccaacgggacaaaguauagaccucccgcuaaacuccugaaggaacggggauuucuuggcgccaucgcuggguuccuggagggcggauggaagggcaugauugccggguggcauggauacacgucucacggcgcccacgggguggcuguugcggccgaccucaaaagcacccaggaagcuaucaauaagauuaccaaaaaccugaauagccuuagcgagcuggaagugaagaaccuccagcgccugucuggagccauggaugagcugcauaaugagauccucgaacuggacgagaaagucgacgaucuuagagccgacaccauuuccagccaaaucgaacuggcugugcuccugucuaacgagggcaucauuaauagcgaagaugagcaccuucuggcccucgagcggaagcugaagaaaaugcuggggccuuccgcggucgaaaucggcaacggauguuuugagacaaagcauaaaugcaaucagaccugccucgaccgcauugcugccggcacguucgaugccggggaauuuucucugcccaccuucgacagccuuaacaucacagcugccucccugaaugaugacggacucgauaaccacaccauucugcuguauuacagcacagcugccucuucccuugcggugacccucaugaucgccauuuuuguuguguauauggucagcagagacaaugugucuuguuccaucugccuguga

SEQ ID NO: 218922 - RNA, 1758 nt, Artificial Sequence; identical to SEQ ID NO: 218680
  derived and/or modified CDS sequence (opt5) from hemagglutinin__InfluenzaB__AFU34639

SEQ ID NO: 218923 - RNA, 1758 nt, Artificial Sequence; identical to SEQ ID NO: 218717
  derived and/or modified CDS sequence (opt5) from hemagglutinin__InfluenzaB__AGB08299

SEQ ID NO: 218924 - RNA, 1758 nt, Artificial Sequence; identical to SEQ ID NO: 218717
  derived and/or modified CDS sequence (opt5) from hemagglutinin__InfluenzaB__AGB08300

SEQ ID NO: 218925 - RNA, 1755 nt, Artificial Sequence
  derived and/or modified CDS sequence (opt5) from hemagglutinin__InfluenzaB__AGB97259
augaaggccaucauugugcugcucauggucguuaccagcaacgcugacagaaucugcacaggcauuacguccucuaauagcccccacguggugaaaaccgccacacagggggaagucaacgugaccggaguuaucccucugacaaccacaccgaccaaguccuacuucgcgaaucuuaaaggcacgcggacccgcgggaagcugugucccgauugccucaacuguacagaccuggauguggcucuuggaagaccuaugugcgucggcaccacacccucugccaaagccagcauucugcaugaagugcggccuguuaccuccggguguuuucccaucaugcacgaccgcacgaagaucagacaacucccuaaucugcugcggggauaugagaagauucgccucucuacacagaacgugaucgaugcugaaaaagccccgggcggccccuacagacuggggaccagcggauccugcccuaaugcuacaagcaagauuggcuucuuugccaccauggcgugggccguccccaaagacaacuauaagaaugcuaccaacccucuuacaguggaggugcccuacaucuguacggaaggggaggaucagauuaccgucuggggauuccauucugacaauaaaacacagaugaagucccuguauggcgauagcaacccgcaaaaguuuaccucuuccgccaaugggguuacaacccacuacgugagccagaucggagacuucccugaucagacggaggacggcggccucccccagucugggcggauuguggucgauuauaugaugcaaaaaccuggaaagacaggcaccaucguguaccagcgcgggguucugcuuccccagaaaguguggugcgcuuccggaagaagcaaggucaucaaaggcucccugccccucauuggggaagccgacugucugcaugaggaauacggaggccugaacaagucuaaaccuuauuacaccggcaagcacgcgaaggccaucgggaauugcccgauuugggugaaaacaccccucaagcuggcuaacggaaccaaauaucggccucccgccaagcugcugaaagagcgcggcuuuuucggggcuaucgccggauuucucgagggcgggugggaaggcaugauugccggauggcacggcuacacaagccauggggcucacggaguugcgguggccgcugaccugaaguccacgcaggaggccaucaacaagaucaccaaaaaucuuaacagccugucugaacucgaggucaagaaucugcaaagacuguccggcgccauggaugaacuccauaacgagauucuggagcuugacgaaaaaguggaugaccugcgggcugauacaaucagcucucagauugagcucgccguccugcuuagcaaugaagggaucauuaacuccgaggacgaacaccuucucgcgcuggagcgcaagcugaaaaagaugcucggaccuucugcuguggauaucggcaauggguguuucgagaccaagcacaaaugcaaccagacaugccuggacagaaucgccgccggcaccuuuaaugcuggagaguucagccuucccacguuugauucccugaacauuaccgccgcuagccucaaugacgauggccuggacaaccauacaauccugcuuuauuacucuaccgccgcguccagccucgccguuacacugaugcuggcuauuuucaucguguauauugucucucgggacaauguguccuguagcaucugccucuga

SEQ ID NO: 218926 - RNA, 1755 nt, Artificial Sequence
  derived and/or modified CDS sequence (opt5) from hemagglutinin__InfluenzaB__AGB97265
augaaggccaucauugugcugcucauggucguuaccagcaacgcugacagaaucugcacaggcauuacguccucuaauagcccccacguggugaaaaccgccacacagggggaggucaacgugaccggaguuaucccucugacaaccacaccgaccaaguccuacuucgcgaaucuuaaaggcacgaagacccgggggaaacugugucccgauugccucaacuguacagaccuggauguggcucuuggacgcccuaugugcgucggcaccacacccucugccaaggccagcauucugcaugaagugagaccuguuaccuccggguguuuucccaucaugcacgaccggacgaagauccgccaacucgcuaaucugcugagaggauaugagaacauucggcucucuacacagaaugugaucgaugccgaaaaagcuccuggcggcccguaccgccuggggaccagcggauccugccccaacgccacaagcaagucuggcuucuuugcgaccauggccugggcugucccuaaagacaauaacaagaaugccaccaacccccuuacaguggaggugccuuauauuugugcugaaggggaggaucagaucacggucuggggauuccauuccgacaauaaaacccagaugaagaaccuguacggcgauagcaauccccaaaaguuuacaucuuccgccaacgggguuaccacacacuaugugagccagauuggaggcuucccggaccagaccgaggauggcgggcucccucagucuggaagaaucguggucgacuacaugaugcaaaaacccggcaagacggggacaauuguguaucagcggggaguucugcuuccucagaaaguguggugcgcguccggccgcagcaaggucaucaaagggucccugccccucaucggagaagccgauugucugcaugagaaguacggcggccugaacaaaucuaagcccuacuauaccggggaacacgcuaaggccauuggaaauugcccuaucugggugaaaaccccgcucaagcuggcuaacggcacaaaauacagacccccugccaagcugcugaaagagcggggguuuuucggagccauugcuggcuuucucgaagggggcugggaaggaaugaucgcgggcuggcacggguauaccagccauggagcccacggcguugcuguggccgccgaccugaaguccacacaggaggcuauuaauaagaucacgaaaaaccuuaauagccugucugaacucgaggucaagaaccugcaacgccuguccggggccauggacgaacuccauaaugagauccuggagcuugaugaaaaaguggacgaucugagagcggacaccauuagcucucagaucgagcucgcuguccugcuuagcaacgaaggaauuaucaauuccgaggaugaacaccuucucgcccuggagcggaagcugaaaaagaugcucggccccucugccguggacauugggaacggcuguuucgagacaaagcacaaaugcaaucagaccugccuggaucgcaucgcugccggaacauuuaacgcuggcgaguucagccuuccuaccuuugacucccugaauaucacggccgcgagccucaacgaugacgggcuggauaaucauaccauucugcuuuacuauucuacagccgcuuccagccucgccguuacccugaugcuggcuaucuucauuguguacauggucucuagagacaacguguccuguagcaucugccucuga

SEQ ID NO: 218927 - RNA, 1755 nt, Artificial Sequence; identical to SEQ ID NO: 218926
  derived and/or modified CDS sequence (opt5) from hemagglutinin__InfluenzaB__AGF44878

SEQ ID NO: 218928 - RNA, 1755 nt, Artificial Sequence; identical to SEQ ID NO: 218926
  derived and/or modified CDS sequence (opt5) from hemagglutinin__InfluenzaB__AGF44879

SEQ ID NO: 218929 - RNA, 1755 nt, Artificial Sequence
  derived and/or modified CDS sequence (opt5) from hemagglutinin__InfluenzaB__AGF44881
augaaggccaucauugugcugcucauggucguuaccagcaacgcugacagaaucugcacaggcauuacguccucuaauagcccccacguggugaaaaccgccacacagggggaggucaacgugaccggaguuaucccucugacaaccacaccgaccaaguccuacuucgcgaaucuuaaaggcacgaagacccgggggaaacugugucccgauugccucaacuguacagaccuggauguggcucuuggacgcccuaugugcgucggcaccacacccucugccaaggccagcauucugcaugaagugagaccuguuaccuccggguguuuucccaucaugcacgaccggacgaagauccgccaacucgcuaaucugcugagaggauaugagaacauucggcucucuacacagaaugugaucgaugccgaaaaagcuccuggcggcccguaccgccuggggaccagcggauccugccccaacgccacaagcaagucuggcuucuuugcgaccauggccugggcugucccuaaagacaauaacaagaaugccaccaacccccuuacaguggaggugccuuauauuugugcugaaggggaggaucagaucgccgucuggggauuccauuccgacaauaaaacgcagaugaagaaccuguacggcgauagcaauccccaaaaguuuaccucuuccgcgaacgggguuacaacccacuaugugagccagauuggaggcuucccggaccagacagaggauggcgggcucccucagucuggaagaaucguggucgacuacaugaugcaaaaacccggcaagaccgggacgauuguguaucagcggggaguucugcuuccucagaaaguguggugcgccuccggccgcagcaaggucaucaaagggucccugccccucaucggagaagcugauugucugcaugagaaguacggcggccugaacaaaucuaagcccuacuauacaggggaacacgccaaggcuauuggaaauugcccuaucugggugaaaaccccgcucaagcuggccaacggcaccaaauacagacccccugccaaacuucugaaagagcggggguuuuucggagcuauugcgggcuuucucgaagggggcugggaaggaaugaucgccggcuggcacggguauacaagccauggagcucacggcguugccguggccgcugaccugaaguccacccaggaggccauuaauaagaucacaaagaaccuuaauagccugucugaacucgaggucaagaaccugcaacgccuguccggggcgauggacgaacuccauaaugagauccuggagcuugaugaaaaaguggacgaucugagagcugacacgauuagcucucagaucgagcucgccguccugcuuagcaacgaaggaauuaucaauuccgaggaugaacaucugcucgcccuggagcggaagcugaaaaagaugcucggccccucugcuguggacauugggaacggcuguuucgagaccaagcacaaaugcaaucagacaugccuggaucgcaucgccgcuggaaccuuuaacgccggcgaguucagccuuccuacauuugacucccugaauaucaccgcggccagccucaacgaugacgggcuggauaaucacacgauucugcuuuacuauucuaccgcugccuccagccucgcuguuauccugaugcuggccauuuucaucguguacauggucucuagagacaacguguccuguagcauuugccucuga

SEQ ID NO: 218930 - RNA, 1755 nt, Artificial Sequence
  derived and/or modified CDS sequence (opt5) from hemagglutinin__InfluenzaB__AGF44882
augaaggccaucauugugcugcucauggucguuaccagcaacgcugacagaaucugcacaggcauuacguccucuaauagcccccacguggugaaaaccgccacacagggggaggucaacgugaccggaguuaucccucugacaaccacaccgaccaaguccuacuucgcgaaucuuaaaggcacgaagacccgggggaaacugugucccgauugccucaacuguacagaccuggauguggcucuuggacgcccuaugugcgucggcaccacacccucugccaaggccagcauucugcaugaagugagaccuguuaccuccggguguuuucccaucaugcacgaccggacgaagauccgccaacucgcuaaucugcugagaggauaugagaacauucggcucucuacacagaaugugaucgaugccgaaaaagcuccuggcggcccguaccgccuggggaccagcggauccugccccaacgccacaagcaagucuggcuucuuugcgaccauggccugggcugucccuaaagacaauaacaagaaugccaccaacccccuuacaguggaggugccuuauauuugugcugaaggggaggaucagaucacggucuggggauuccauuccgacaauaaaacccagaugaagaaccuguacggcgauagcaauccccaaaaguuuacaucuuccgccaacgggguuaccacacacuaugugagccagauuggaggcuucccggaccagaccgaggauggcgggcucccucagucuggaagaaucguggucgacuacaugaugcaaaaacccggcaagacggggacaauuguguaucagcggggaguucugcuuccucagaaaguguggugcgcguccggcaagagcaaagucaucaaggggucccugccccucaucggagaagccgauugucugcaugagaaauacggcggccugaacaagucuaagcccuacuauaccggggaacacgcuaaagccauuggaaauugcccuaucugggugaagaccccgcucaaacuggcuaacggcacaaaguacagacccccugccaaacuucugaaggagcgcggguuuuucggagccauugcuggcuuucucgaagggggcugggaaggaaugaucgcgggcuggcacggguauaccagccauggagcccacggcguugcuguggccgccgaccugaaguccacacaggaggcuauuaauaaaaucacgaagaaccuuaauagccugucugaacucgaggucaaaaaccugcaacggcuguccggggccauggacgaacuccauaaugagauccuggagcuugaugaaaagguggacgaucugcgcgcggacaccauuagcucucagaucgagcucgcuguccugcuuagcaacgaaggaauuaucaauuccgaggaugaacaucugcucgcccuggagagaaaacugaagaagaugcucggccccucugccguggacauugggaacggcuguuucgagacaaaacacaagugcaaucagaccugccuggaucggaucgcugccggaacauuuaacgcuggcgaguucagccuuccuaccuuugacucccugaauaucacggccgcgagccucaacgaugacgggcuggauaaucacaccauucugcuuuacuauucuacagccgcuuccagccucgccguuacccugaugcuggcuaucuucauuguguacauggucucucgcgacaacguguccuguagcaucugccucuga

SEQ ID NO: 218931 - RNA, 1755 nt, Artificial Sequence; identical to SEQ ID NO: 218926
  derived and/or modified CDS sequence (opt5) from hemagglutinin__InfluenzaB__AGF44883

SEQ ID NO: 218932 - RNA, 1755 nt, Artificial Sequence; identical to SEQ ID NO: 218926
  derived and/or modified CDS sequence (opt5) from hemagglutinin__InfluenzaB__AGF44884

SEQ ID NO: 218933 - RNA, 1755 nt, Artificial Sequence; identical to SEQ ID NO: 218926
  derived and/or modified CDS sequence (opt5) from hemagglutinin__InfluenzaB__AGF44886

SEQ ID NO: 218934 - RNA, 1755 nt, Artificial Sequence; identical to SEQ ID NO: 218926
  derived and/or modified CDS sequence (opt5) from hemagglutinin__InfluenzaB__AGF44887

SEQ ID NO: 218935 - RNA, 1755 nt, Artificial Sequence; identical to SEQ ID NO: 218926
  derived and/or modified CDS sequence (opt5) from hemagglutinin__InfluenzaB__AGF44888

SEQ ID NO: 218936 - RNA, 1755 nt, Artificial Sequence
  derived and/or modified CDS sequence (opt5) from hemagglutinin__InfluenzaB__AGL09834
augaaggccaucauugugcugcucauggucguuaccagcaacgcugacagaaucugcacaggcauuacguccucuaauagcccccacguggugaaaaccgccacacagggggaggucaacgugaccggaguuaucccucugacaaccacaccgaccaaguccuacuucgcgaaucuuaaaggcacgaagacccgggggaaacugugucccgauugccucaacuguacagaccuggauguggcucuuggacgcccuaugugcgucggcaccacacccucugccaaggccagcauucugcaugaagugagaccuguuaccuccggguguuuucccaucaugcacgaccggacgaagauccgccaacucgcuaaucugcugagaggauaugagaacauucggcucucuacacagaaugugaucgaugccgaaaaagcuccuggcggcccguaccgccuggggaccagcggauccugccccaacgccacaagcaagucuggcuucuuugcgaccauggccugggcugucccuaaagacaauaacaagaaugccaccaacccccuuacaguggaggugccuuauauuugugcugaaggggaggaucagaucgccgucuggggauuccauuccgacaauaaaacgcagaugaagaaccuguacggcgauagcaauccccaaaaguuuaccucuuccgcgaacgggguuacaacccacuaugugagccagauuggaggcuucccggaccagacagaggauggcgggcucccucagucuggaagaaucguggucgacuacaugaugcaaaaacccggcaagaccgggacgauuguguaucagcggggaguucugcuuccucagaaaguguggugcgccuccggccgcagcaaggucaucaaagggucccugccccucaucggagaagcugauugucugcaugagaaguacggcggccugaacaaaucuaagcccuacuauacaggggaacacgccaaggcuauuggaaauugcccuaucugggugaaaaccccgcucaagcuggccaacggcaccaaauacagacccccugccaaacuucugaaagagcggggguuuuucggagcuauugcgggcuuucucgaagggggcugggagggaaugaucgccggcuggcacggguauacaagccauggagcucacggcguugccguggccgcugaccugaaguccacccaggaggccauuaauaagaucacaaagaaccuuaauagccugucugaacucgaggucaagaaccugcaacgccuguccggggcgauggacgaacuccauaaugagauccuggagcuugaugaaaaaguggacgaucugagagcugacacgauuagcucucagaucgagcucgccguccugcuuagcaacgaaggaauuaucaauuccgaggaugaacaucugcucgcccuggagcggaagcugaaaaagaugcucggccccucugcuguggacauugggaacggcuguuucgagaccaagcacaaaugcaaucagacaugccuggaucgcaucgccgcuggaaccuuuaacgccggcgacuucagccuuccuacauuugauucccugaauaucaccgcggccagccucaacgacgaugggcuggacaaucacacgauucugcuuuacuauucuaccgcugccuccagccucgcuguuacacugaugcuggccaucuucauuguguacauggucucuagagacaacguguccuguagcaucugccucuga

SEQ ID NO: 218937 - RNA, 1755 nt, Artificial Sequence; identical to SEQ ID NO: 218926
  derived and/or modified CDS sequence (opt5) from hemagglutinin__InfluenzaB__AGL09835

SEQ ID NO: 218938 - RNA, 1755 nt, Artificial Sequence
  derived and/or modified CDS sequence (opt5) from hemagglutinin__InfluenzaB__AGL09836
augaaggccaucauugugcugcucauggucguuaccagcaacgcugacagaaucugcacaggcauuacguccucuaauagcccccacguggugaaaaccgccacacagggggaggucaacgugaccggaguuaucccucugacaaccacaccgaccaaguccuacuucgcgaaucuuaaaggcacgaagacccgggggaaacugugucccgauugccucaacuguacagaccuggauguggcucuuggacgcccuaugugcgucggcaccacacccucugccaaggccagcauucugcaugaagugagaccuguuaccuccggguguuuucccaucaugcacgaccggacgaagauccgccaacucgcuaaucugcugagaggauaugagaacauucggcucucuacacagaaugugaucgaugccaaaaaggcuccuggcggcccguaccgccuggggaccagcggauccugccccaacgccacaagcaaaucuggcuucuuugcgaccauggccugggcugucccugaagacaauaacaagaaugccaccaacccccuuacaguggaggugccuuauauuugugcugaaggggaggaucagaucacggucuggggauuccauuccgacaauaaaacccagaugaagaaccuguacggcgauagcaauccccaaaaguuuacaucuuccgccaacgggguuaccacacacuaugugagccagauuggaggcuucccggaccagaccgaggauggcgggcucccucagucuggaagaaucguggucgacuacaugaugcaaaaacccggcaagacggggacaauuguguaucagcggggaguucugcuuccucagaaaguguggugcgcguccggccgcagcaaggucaucaaagggucccugccccucaucggagaagccgauugucugcaugagaaguacggcggccugaacaaaucuaagcccuacuauaccggggaacacgcuaaggccauuggaaauugcccuaucugggugaaaaccccgcucaagcuggcuaacggcacaaaauacagacccccugccaagcugcugaaagagcggggguuuuucggagccauugcuggcuuucucgaagggggcugggaaggaaugaucgcgggcuggcacggguauaccagccauggagcccacggcguugcuguggccgccgaccugaaguccacacaggaggcuauuaauaagaucacgaaaaaccuuaauagccugucugaacucgaggucaagaaccugcaacgccuguccggggccauggacgaacuccauaaugagauccuggagcuugaugaaaaaguggacgaucugagagcggacaccauuagcucucagaucgagcucgcuguccugcuuagcaacgaaggaauuaucaauuccgaggaugaacaccuucucgcccuggagcggaagcugaaaaagaugcucggccccucugccguggacauugggaacggcuguuucgagacaaagcacaaaugcaaucagaccugccuggaucgcaucgcugccggaacauuuaacgcuggcgaguucagccuuccuaccuuugacucccugaauaucacggccgcgagccucaacgaugacgggcuggauaaucauaccauucugcuuuacuauucuacagccgcuuccagccucgccguuacccugaugcuggcuaucuucauuguguacauggucucuagagacaacguguccuguagcaucugccucuga

SEQ ID NO: 218939 - RNA, 1755 nt, Artificial Sequence; identical to SEQ ID NO: 218926
  derived and/or modified CDS sequence (opt5) from hemagglutinin__InfluenzaB__AGL09837

SEQ ID NO: 218940 - RNA, 1755 nt, Artificial Sequence; identical to SEQ ID NO: 218926
  derived and/or modified CDS sequence (opt5) from hemagglutinin__InfluenzaB__AGL09838

SEQ ID NO: 218941 - RNA, 1755 nt, Artificial Sequence; identical to SEQ ID NO: 218926
  derived and/or modified CDS sequence (opt5) from hemagglutinin__InfluenzaB__AGL09839

SEQ ID NO: 218942 - RNA, 1755 nt, Artificial Sequence; identical to SEQ ID NO: 218926
  derived and/or modified CDS sequence (opt5) from hemagglutinin__InfluenzaB__AGL09840

SEQ ID NO: 218943 - RNA, 1755 nt, Artificial Sequence; identical to SEQ ID NO: 218926
  derived and/or modified CDS sequence (opt5) from hemagglutinin__InfluenzaB__AGL09841

SEQ ID NO: 218944 - RNA, 1758 nt, Artificial Sequence
  derived and/or modified CDS sequence (opt5) from hemagglutinin__InfluenzaB__AGL09842
augaaggccaucauugugcugcucauggucguuaccagcaacgcugacagaaucugcacaggcauuacguccucuaauagcccccacguggugaaaaccgccacacagggggaagucaacgugaccggaguuaucccucugacaaccacaccgaccaagucccauuucgcgaaucuuaaaggcacggaaacccgggggaagcugugucccaaaugccucaacuguacagaucuggacguggcucuuggacgcccuaagugcaccggcaagauucccucugccagagucagcauccugcacgaggugcggccuguuacauccggguguuuucccaucaugcaugaucgcaccaaaauuagacaacucccuaaucugcugcggggauacgaacacauccgccucucuacgcauaacgugauuaaugccgagaacgcuccgggcggccccuauaagaucgggacaagcggauccugcccuaaugucaccaacggcaauggguucuuugccacaauggcuugggccgugcccaaaaacgacaagaauaaaaccgaaaccaacccucugacaauugaggugcccuacaucuguacggagggagaagaucagauuaccgucuggggcuuccacagcgacaaugagacacagauggcgaaacuuuauggggauucuaagccgcagaaguuuaccuccagcgccaacggaguuacaacccacuacgugucucaaaucggcggcuucccuaaccagacggaagacgggggacugccccaguccggcagaaucguggucgauuauauggugcaaaagagcgggaaaacaggaaccauuaccuaccagcggggcauccuccugccucagaagguuuggugcgcuucugggcgcuccaaagugauuaagggaagccuuccccugaucggcgaggccgacugucuccaugagaaauauggcgggcugaauaaguccaagcccuacuacacaggagaacacgcuaaagccauuggcaacugcccuaucugggucaagaccccgcugaaacucgcgaaugggacaaaguauagacccccugccaaacugcuuaaggagcggggauuuuucggcgcuaucgccggguuucuggaaggcggaugggagggcaugauugcuggguggcauggauacacgucucacggcgcccacgggguggccguugcugcggaucucaagagcacccaggaagccaucaacaaaauuacaaagaaucugaacucccuuagcgagcuggaggugaaaaaucuccagcgccugucuggagcuauggacgaacugcauaacgagauccucgaacuggaugagaaggucgacgaccuuagagccgauaccauuuccagccaaaucgaacuggccgugcuccugucuaaugagggcaucauuaacagcgaggacgaacaccuucuggcucucgagcggaaacugaagaagaugcuggggcccuccgccgucgaaaucggcaauggauguuucgagacaaaacauaagugcaaccagaccugccucgaucgcauugcggcuggcacguuugacgccggggaguucucucugccuaccuuugauagccuuaauaucacagccgcuucccugaacgacgauggacucgacaaucacaccauucugcuguauuacagcacagccgcuucuucccuugccgugacccucaugaucgcgauuuucguuguguauauggucagcagagauaacgugucuuguuccaucugccuguga

SEQ ID NO: 218945 - RNA, 1755 nt, Artificial Sequence; identical to SEQ ID NO: 218926
  derived and/or modified CDS sequence (opt5) from hemagglutinin__InfluenzaB__AGL09843

SEQ ID NO: 218946 - RNA, 1755 nt, Artificial Sequence
  derived and/or modified CDS sequence (opt5) from hemagglutinin__InfluenzaB__AGL09844
augaaggccaucauugugcugcucauggucguuaccagcaacgcugacagaaucugcacaggcauuacguccucuaauagcccccacguggugaaaaccgccacacagggggaggucaacgugaccggaguuaucccucugacaaccacaccgaccaaguccuacuucgcgaaucuuaaaggcacgaagacccgggggaaacugugucccgauugccucaacuguacagaccuggauguggcucuuggacgcccuaugugcgucggcaccacacccucugccaaggccagcauucugcaugaagugagaccuguuaccuccggguguuuucccaucaugcacgaccggacgaagauccgccaacucgcuaaucugcugagaggauaugagaacauucggcucucuacacagaaugugaucgaugccgaaaaagcuccuggcggcccguaccgccuggggaccagcggauccugccccaacgccacaagcaagucuggcuucuuugcgaccauggccugggcugucccuaaagacaauaacaagaaugccaccaacccccuuacaguggaggugccuuauauuugugcugaaggggaggaucagaucacggucuggggauuccauuccgacaauaaaacccagaugaagaaccuguacggcgauagcaauccccaaaaguuuacaucuuccgccaacgggguuaccacacacuaugugagccagauuggaggcuucccggaccagaaagaggauggcgggcucccucagucuggaagaaucguggucgacuacaugaugcaaaagcccggcaaaaccgggacgauuguguaucagcggggaguucugcuuccucagaagguguggugcgcguccggccgcagcaaagucaucaaggggucccugccccucaucggagaagccgauugucugcaugagaaauacggcggccugaacaagucuaagcccuacuauacaggggaacacgcuaaagccauuggaaauugcccuaucugggugaagaccccgcucaaacuggcuaacggcaccaaguacagacccccugccaaacuucugaaggagcggggguuuuucggagccauugcuggcuuucucgaagggggcugggaaggaaugaucgcgggcuggcacggguauacaagccauggagcccacggcguugcuguggccgccgaccugaaguccacccaggaggcuauuaauaaaaucacaaagaaccuuaauagccugucugaacucgaggucaaaaaccugcaacgccuguccggggccauggacgaacuccauaaugagauccuggagcuugaugaaaagguggacgaucugagagcggacacgauuagcucucagaucgagcucgcuguccugcuuagcaacgaaggaauuaucaauuccgaggaugaacaucugcucgcccuggagcggaaacugaagaagaugcucggccccucugccguggacauugggaacggcuguuucgagaccaaacacaagugcaaucagacaugccuggaucgcaucgcugccggaaccuuuaacgcuggcgaguucagccuuccuacauuugacucccugaauaucaccgccgcgagccucaacgaugacgggcuggauaaucacacgauucugcuuuacuauucuaccgccgcuuccagccucgccguuacacugaugcuggcuaucuucauuguguacauggucucuagagacaacguguccuguagcaucugccucuga

SEQ ID NO: 218947 - RNA, 1755 nt, Artificial Sequence; identical to SEQ ID NO: 218926
  derived and/or modified CDS sequence (opt5) from hemagglutinin__InfluenzaB__AGL09845

SEQ ID NO: 218948 - RNA, 1755 nt, Artificial Sequence; identical to SEQ ID NO: 218926
  derived and/or modified CDS sequence (opt5) from hemagglutinin__InfluenzaB__AGL09846

SEQ ID NO: 218949 - RNA, 1755 nt, Artificial Sequence
  derived and/or modified CDS sequence (opt5) from hemagglutinin__InfluenzaB__AGL09847
augaaggccaucauugugcugcucauggucguuaccagcaacgcugacagaaucugcacaggcauuacguccucuaauagcccccacguggugaaaaccgccacacagggggaggucaacgugaccggaguuaucccucugacaaccacaccgaccaaguccuacuucgcgaaucuuaaaggcacgaagacccgggggaaacugugucccgauugccucaacuguacagaccuggauguggcucuuggacgcccuaugugcgucggcaccacacccucugccaaggccagcauucugcaugaagugagaccuguuaccuccggguguuuucccaucaugcacgaccggacgaagauccgccaacucgcuaaucugcugagaggauaugagaacauucggcucucuacacagaaugugaucgaugccgaaaaagcuccuggcggcccguaccgccuggggaccagcggauccugccccaacgccacaagcaagucuggcuucuuugcgaccauggccugggcugucccuaaagacaauaacaagaaugccaccaacccccuuacaguggaggugccuuauauuugugcugaaggggaggaucagaucgccauuuggggauuccauuccgacaauaaaacgcagaugaagaaccuguacggcgauagcaauccccaaaaguuuaccucuuccgcgaacggggucacaacccacuauguuagccagaucggaggcuucccggaccagacagaggauggcgggcucccucagucuggaagaauugugguggacuacaugaugcaaaaacccggcaagaccgggacgaucgucuaucagcggggagugcugcuuccucagaaaguuuggugcgccuccggccgcagcaaggugaucaaagggucccugccccucauuggagaagcugauugucugcaugagaaguacggcggccugaacaaaucuaagcccuacuauacaggggaacacgccaaggcuaucggaaauugcccuauuugggucaaaaccccgcucaagcuggccaacggcaccaaauacagacccccugccaaacuucugaaagagcggggguuuuucggagcuaucgcgggcuuucucgaagggggcugggaaggaaugauugccggcuggcacggguauacaagccauggagcucacggcguggccguugccgcugaccugaaguccacccaggaggccaucaauaagaucacaaagaaccuuaauagccugucugaacucgaggugaagaaccugcaacgccuguccggggcgauggacgaacuccauaaugagauucuggagcuugaugaaaaagucgacgaucugagagcugacacgaucagcucucagauugagcucgccgugcugcuuagcaacgaaggaaucauuaauuccgaggaugaacaucugcucgcccuggagcggaagcugaaaaagaugcucggccccucugcugucgacaucgggaacggcuguuucgagaccaagcacaaaugcaaucagacaugccuggaucgcaucgccgcuggaaccuuuaacgccggcgaguucagccuuccuacauuugacucccugaauauuaccgcggccagccucaacgaugacgggcuggauaaucacacgauccugcuuuacuauucuaccgcugccuccagccucgcugugacacugaugcuggccauuuucaucguuuacauggugucuagagacaacgucuccuguagcauuugccucuga

SEQ ID NO: 218950 - RNA, 1755 nt, Artificial Sequence
  derived and/or modified CDS sequence (opt5) from hemagglutinin__InfluenzaB__AGL09849
augaaggccaucauugugcugcucauggucguuaccagcaacgcugacagaaucugcacaggcauuacguccucuaauagcccccacguggugaaaaccgccacacagggggaggucaacgugaccggaguuaucccucugacaaccacaccgaccaaguccuacuucgcgaaucuuaaaggcacgaagacccgggggaaacugugucccgauugccucaacuguacagaccuggauguggcucuuggacgcccuaugugcgucggcaccacacccucugccaaggccagcauucugcaugaagugagaccuguuaccuccggguguuuucccaucaugcacgaccggacgaagauccgccaacucgcuaaucugcugagaggauaugagaacauucggcucucuacacagaaugugaucaacgccgaaaaagcuccuggcggcccguaccgccuggggaccagcggauccugccccaaugccacaagcaagucuggcuucuuugcgaccauggccugggcugucccuaaagauaacaauaagaacgccaccaauccccuuacaguggaggugccuuauauuugugcugaaggggaggaccagaucacggucuggggauuccauuccgauaacaaaacccagaugaagaaucuguacggcgacagcaacccccaaaaguuuacaucuuccgccaacgggguuaccacacacuaugugagccagauuggaggcuucccggaucagaccgaggacggcgggcucccucagucuggaagaaucguggucgauuacaugaugcaaaaacccggcaagacggggacaauuguguaucagcggggaguucugcuuccucagaaaguguggugcgcguccggccgcagcaaggucaucaaagggucccugccccucaucggagaagccgacugucugcaugagaaguacggcggccugaauaaaucuaagcccuacuauaccggggaacacgcuaaggccauuggaaacugcccuaucugggugaaaaccccgcucaagcuggcuaauggcacaaaauacagacccccugccaagcugcugaaagagcggggguuuuucggagccauugcuggcuuucucgaagggggcugggaaggaaugaucgcgggcuggcacggguauaccagccauggagcccacggcguugcuguggccgccgaucugaaguccacacaggaggcuauuaacaagaucacgaaaaaucuuaacagccugucugaacucgaggucaagaaucugcaacgccuguccggggccauggacgaacuccauaacgagauccuggagcuugacgaaaaaguggaugaccugagagcggauaccauuagcucucagaucgagcucgcuguccugcuuagcaaugaaggaauuaucaacuccgaggacgaacaccuucucgcccuggagcggaagcugaaaaagaugcucggccccucugccguggauauugggaauggcuguuucgagacaaagcacaaaugcaaccagaccugccuggaccgcaucgcugccggaacauuuaaugcuggcgaguucagccuuccuaccuuugauucccugaacaucacggccgcgagccucaaugacgaugggcuggacaaccauaccauucugcuuuacuauucuacagccgcuuccagccucgccguuacccugaugcuggcuaucuucauuguguacauggucucuagagauaacguguccuguagcaucugccucuga

SEQ ID NO: 218951 - RNA, 1755 nt, Artificial Sequence; identical to SEQ ID NO: 218926
  derived and/or modified CDS sequence (opt5) from hemagglutinin__InfluenzaB__AGL09850

SEQ ID NO: 218952 - RNA, 1755 nt, Artificial Sequence; identical to SEQ ID NO: 218926
  derived and/or modified CDS sequence (opt5) from hemagglutinin__InfluenzaB__AGL09851

SEQ ID NO: 218953 - RNA, 1758 nt, Artificial Sequence; identical to SEQ ID NO: 218717
  derived and/or modified CDS sequence (opt5) from hemagglutinin__InfluenzaB__AGL09852

SEQ ID NO: 218954 - RNA, 1755 nt, Artificial Sequence; identical to SEQ ID NO: 218926
  derived and/or modified CDS sequence (opt5) from hemagglutinin__InfluenzaB__AGL09853

SEQ ID NO: 218955 - RNA, 1755 nt, Artificial Sequence; identical to SEQ ID NO: 218926
  derived and/or modified CDS sequence (opt5) from hemagglutinin__InfluenzaB__AGL09854

SEQ ID NO: 218956 - RNA, 1758 nt, Artificial Sequence
  derived and/or modified CDS sequence (opt5) from hemagglutinin__InfluenzaB__AGL09855
augaaggccaucauugugcugcucauggucguuaccagcaacgcugacagaaucugcacaggcauuacguccucuaauagcccccacguggugaaaaccgccacacagggggaggucaacgugaccggaguuaucccucugacaaccacaccgaccaagucccauuucgcgaaucuuaaaggcacggaaacccgggggaagcugugucccaaaugccucaacuguacagaucuggacguggcucuuggacgcccuaagugcaccggcaagauucccucugccagagucagcauccugcacgaggugcggccuguuacauccggguguuuucccaucaugcaugaucgcaccaaaauuagacaacucccuaaucugcugcggggauacgaacacauccgccucucuacgcauaacgugauuaaugccgagaacgcuccgggcggccccuauaagaucgggacaagcggauccugcccuaaugucaccaacggcaauggguucuuugccacaauggcuugggccgugcccaaaaacgacaagaauaaaaccgaaaccaacccucugacaauugaggugcccuacaucuguacggaggaagaggaucagauuaccgucuggggauuccacagcgacaaugaaacacagauggcgaaacuuuauggcgauucuaagccgcagaaguuuaccuccagcgccaacgggguuacaacccacuacgugucucaaaucggagacuucccuaaccagacggaggauggcggccugccccaguccgggagaaucguggucgacuauauggugcaaaagagcggaaaaacaggcaccauuaccuaccagcgggggauccuccugccucagaagguuuggugcgcuucuggacgcuccaaagugauuaagggcagccuuccccugaucggggaggccgauugucuccaugaaaaauauggaggccugaauaaguccaagcccuacuacacaggcgagcacgcuaaagccauugggaacugcccuaucugggucaagaccccgcugaaacucgcgaauggaacaaaguauagacccccugccaaacugcuuaaggaacggggcuuuuucggggcuaucgccggauuucuggagggcgggugggaaggcaugauugcuggauggcauggcuacacgucucacggggcccacggaguggccguugcugcggaccucaagagcacccaggaggccaucaacaaaauuacaaagaaucugaacucccuuagcgagcuggaagugaaaaaucuccagcgccugucuggcgcuauggaugagcugcauaacgaaauccucgagcuggacgaaaaggucgacgaucuuagagccgacaccauuuccagccaaaucgagcuggccgugcuccugucuaaugaggggaucauuaacagcgaagaugagcaccuucuggcucucgaacggaaacugaagaagaugcugggacccuccgccgucgagaucggcaauggguguuucgaaacaaaacauaagugcaaccagaccugccucgaccgcauugcggcuggcacguuugaugccggagaguucucucugccuaccuuugacagccuuaauaucacagccgcuucccugaacgaugacggccucgauaaucacaccauucugcuguauuacagcacagccgcuucuucccuugccgugacccucaugaucgcgauuuucguuguguauauggucagcagagacaacgugucuuguuccaucugccuguga

SEQ ID NO: 218957 - RNA, 1755 nt, Artificial Sequence; identical to SEQ ID NO: 218926
  derived and/or modified CDS sequence (opt5) from hemagglutinin__InfluenzaB__AGL09856

SEQ ID NO: 218958 - RNA, 1755 nt, Artificial Sequence
  derived and/or modified CDS sequence (opt5) from hemagglutinin__InfluenzaB__AGL09857
augaaggccaucauugugcugcucauggucguuaccagcaacgcugacagaaucugcacaggcauuacguccucuaauagcccccacguggugaaaaccgccacacagggggaggucaacgugaccggaguuaucccucugacaaccacaccgaccaaguccuacuucgcgaaucuuaaaggcacgaagacccgggggaaacugugucccgauugccucaacuguacagaccuggauguggcucuuggacgcccuaugugcgucggcaccacacccucugccaaggccagcauucugcaugaagugagaccuguuaccuccggguguuuucccaucaugcacgaccggacgaagauccgccaacucgcuaaucugcugagaggauaugagaacauucggcucucuacacagaaagugaucgaugccgaaaaggcuccuggcggcccguaccgccuggggaccagcggauccugccccaaugccacaagcaaaucuggcuucuuugcgaccauggccugggcugucccuaaggacaacaauaaaaacgccaccaauccccuuacaguggaggugccuuauauuugugcugaaggggaggaucagaucacggucuggggauuccauuccgacaacaagacccagaugaagaaucuguacggcgauagcaacccccaaaaauuuacaucuuccgccaaugggguuaccacacacuaugugagccagauuggaggcuucccggaccagaccgaggauggcgggcucccucagucuggaagaaucguggucgacuacaugauucaaaagcccggcaaaacggggacaaucguguaucagcggggaguucugcuuccucagaagguguggugcgcguccggccgcagcaaagucaucaaggggucccugccccucauuggagaagccgauugucugcaugagaaauacggcggccugaacaagucuaagcccuacuauaccggggaacacgcuaaagccaucggaaacugcccuauuugggugaagaccccgcucaaacuggcuaauggcacaaaguacagacccccugccaaacuucugaaggagcggggguuuuucggagccaucgcuggcuuucucgaagggggcugggaaggaaugauugcgggcuggcacggguauaccagccauggagcccacggcguugcuguggccgccgaccugaaguccacacaggaggcuaucaacaaaaucacgaagaaucuuaacagccugucugaacucgaggucaaaaaucugcaacgccuguccggggccauggacgaacuccauaacgagauucuggagcuugaugaaaagguggacgaucugagagcggacaccaucagcucucagauugagcucgcuguccugcuuagcaaugaaggaaucauuaacuccgaggaugaacaucugcucgcccuggagcggaaacugaagaagaugcucggccccucugccguggacaucgggaauggcuguuucgagacaaaacacaagugcaaccagaccugccuggaucgcaucgcugccggaacauuuaaugcuggcgaguucagccuuccuaccuuugacucccugaacauuacggccgcgagccucaaugaugacgggcuggauaaccacaccauccugcuuuacuauucuacagccgcuuccagccucgccguuacccugaugcuggcuauuuucaucguguacauggucucuagagacaauguguccuguagcauuugccucuga

SEQ ID NO: 218959 - RNA, 1758 nt, Artificial Sequence
  derived and/or modified CDS sequence (opt5) from hemagglutinin__InfluenzaB__AGL09859
augaaggccaucauugugcugcucauggucguuaccagcaacgcugacagaaucugcacaggcauuacguccucuaauagcccccacguggugaaaaccgccacacagggggaggucaacgugaccggaguuaucccucugacaaccacaccgaccaagucccauuucgcgaaucuuaaaggcacggaaacccgggggaagcugugucccaaaugccucaacuguacagaucuggacguggcucuuggacgcccuaagugcaccggcaagauucccucugccagagucagcauccugcacgaggugcggccuguuacauccggguguuuucccaucaugcaugaucgcaccaaaauuagacaacucccuaaucugcugcggggauacgaacacauccgccucucuacgcauaacgugauuaaugccgaggacgcuccgggcggccccuauaagaucgggacaagcggauccugcccuaacgucaccaauggcaacggguucuuugccacaauggcuugggccgugcccaaaaaugauaagaacaaaaccgcgaccaauccucugacaauugaagugcccuacaucuguacggagggagaggaccagauuaccgucuggggcuuccacagcgauaacgaaacacagauggccaagcuguauggggacucuaagccgcagaaauuuaccuccagcgcuaauggaguuacaacccacuacgugucucaaaucggcggcuucccuaaccagacggaggaugggggacugccccaguccggcagaaucguggucgacuauauggugcaaaagagcgggaaaacaggaaccauuaccuaccagcggggcauccuccugccucagaagguuuggugcgccucugggcgcuccaaagugauuaagggaagccuuccccugaucggcgaagcugauugucuccaugagaaauauggcgggcugaacaaguccaagcccuacuacacaggagagcacgccaaagcgauuggcaauugcccuaucugggucaagaccccgcugaaacucgccaacgggacaaaguauagacccccugcuaaacugcuuaaggaacggggauuuuucggcgccaucgcuggguuucuggagggcggaugggaaggcaugauugccggguggcauggauacacgucucacggcgcccacgggguggcuguugcggccgaccucaagagcacccaggaggcuaucaauaaaauuacaaagaaccuuaauucccuuagcgaacuggaggugaaaaaccuccagcgccugucuggagccauggaugagcugcauaaugaaauccucgagcuggacgaaaaggucgacgaucuuagagccgacaccauuuccagccaaaucgagcuggcugugcuccugucuaacgaaggcaucauuaauagcgaggaugagcaccuucuggcccucgaacggaaacugaagaagaugcuggggcccuccgcggucgagaucggcaacggauguuucgaaacaaaacauaagugcaaucagaccugccucgaccgcauugcugccggcacguuugaugccggggaguucucucugccuaccuuugacagccuuaacaucacagcugccucccugaaugaugacggacucgauaaccacaccauucugcuguauuacagcacagcugccucuucccuugcggugacccucaugaucgccauuuucguuguguauauggucagcagagacaaugugucuuguuccaucugccuguga

SEQ ID NO: 218960 - RNA, 1758 nt, Artificial Sequence; identical to SEQ ID NO: 218959
  derived and/or modified CDS sequence (opt5) from hemagglutinin__InfluenzaB__AGL09860

SEQ ID NO: 218961 - RNA, 1758 nt, Artificial Sequence; identical to SEQ ID NO: 218959
  derived and/or modified CDS sequence (opt5) from hemagglutinin__InfluenzaB__AGL09861

SEQ ID NO: 218962 - RNA, 1758 nt, Artificial Sequence; identical to SEQ ID NO: 218959
  derived and/or modified CDS sequence (opt5) from hemagglutinin__InfluenzaB__AGL09862

SEQ ID NO: 218963 - RNA, 1758 nt, Artificial Sequence; identical to SEQ ID NO: 218959
  derived and/or modified CDS sequence (opt5) from hemagglutinin__InfluenzaB__AGL09863

SEQ ID NO: 218964 - RNA, 1755 nt, Artificial Sequence; identical to SEQ ID NO: 218926
  derived and/or modified CDS sequence (opt5) from hemagglutinin__InfluenzaB__AGL09864

SEQ ID NO: 218965 - RNA, 1755 nt, Artificial Sequence; identical to SEQ ID NO: 218926
  derived and/or modified CDS sequence (opt5) from hemagglutinin__InfluenzaB__AGL09866

SEQ ID NO: 218966 - RNA, 1755 nt, Artificial Sequence; identical to SEQ ID NO: 218926
  derived and/or modified CDS sequence (opt5) from hemagglutinin__InfluenzaB__AGL09867

SEQ ID NO: 218967 - RNA, 1755 nt, Artificial Sequence; identical to SEQ ID NO: 218926
  derived and/or modified CDS sequence (opt5) from hemagglutinin__InfluenzaB__AGL09868

SEQ ID NO: 218968 - RNA, 1755 nt, Artificial Sequence
  derived and/or modified CDS sequence (opt5) from hemagglutinin__InfluenzaB__AGL09869
augaaggccaucauugugcugcucauggucguuaccagcaacgcugacagaaucugcacaggcauuacguccucuaauagcccccacguggugaaaaccgccacacagggggaggucaacgugaccggaguuaucccucugacaaccacaccgaccaaguccuacuucgcgaaucuuaaaggcacgaagacccgggggaaacugugucccgauugccucaacuguacagaccuggauguggcucuuggacgcccuaugugcgucggcaccacacccucugccaaggccagcauucugcaugaagugagaccuguuaccuccggguguuuucccaucaugcacgaccggacgaagauccgccaacucgcuaaucugcugagaggauaugagaacauucggcucucuacacagaaugugaucgaugccgaaaaagcuccuggcggcccguaccgccuggggaccagcggauccugccccaacacaaccagcaagucuggcuucuuugccaccauggcgugggccgucccuaaagacaauaacaagaaugcuacaaacccccuuacgguggaggugccuuauauuugugccgaaggggaggaucagaucaccgucuggggauuccauuccgacaauaaaacacagaugaagaaccuguacggcgauagcaauccccaaaaguuuaccucuuccgcuaacgggguuacaacccacuaugugagccagauuggaggcuucccggaccagacggaggauggcgggcucccucagucuggaagaaucguggucgacuacaugaugcaaaaacccggcaagacagggaccauuguguaucagcggggaguucugcuuccucagaaaguguggugcgccuccggccgcagcaaggucaucaaagggucccugccccucaucggagaagcggauugucugcaugagaaguacggcggccugaacaaaucuaagcccuacuauaccggggaacacgccaaggcuauuggaaauugcccuaucugggugaaaacaccgcucaagcuggccaacggcaccaaauacagacccccugcuaagcugcugaaagagcggggguuuuucggagccauugccggcuuucucgaagggggcugggaaggaaugaucgcuggcuggcacggguauacaagccauggagcgcacggcguugccguggcugccgaccugaaguccacgcaggaggccauuaauaagaucaccaaaaaccuuaauagccugucugaacucgaggucaagaaccugcaacgccuguccggggcuauggacgaacuccauaaugagauccuggagcuugaugaaaaaguggacgaucugagagccgacacaauuagcucucagaucgagcucgcgguccugcuuagcaacgaaggaauuaucaauuccgaggaugaacaccuucucgcucuggagcggaagcugaaaaagaugcucggccccucugccguggacauugggaacggcuguuucgagaccaagcacaaaugcaaucagacaugccuggaucgcaucgccgcuggaaccuuuaacgccggcgaguucagccuuccuacguuugacucccugaauaucaccgcugccagccucaacgaugacgggcuggauaaucauacaauucugcuuuacuauucuaccgcggccuccagccucgcuguuacacugaugcuggccaucuucauuguguacauggucucuagagacaacguguccuguagcaucugccucuga

SEQ ID NO: 218969 - RNA, 1755 nt, Artificial Sequence
  derived and/or modified CDS sequence (opt5) from hemagglutinin__InfluenzaB__AGL09870
augaaggccaucauugugcugcucauggucguuaccagcaacgcugacagaaucugcacaggcauuacguccucuaauagcccccacguggugaaaaccgccacacagggggaggucaacgugaccggaguuaucccucugacaaccacaccgaccaaguccuacuucgcgaaucuuaaaggcacgaagacccgggggaaacugugucccgauugccucaacuguacagaccuggauguggcucuuggacgcccuaugugcgucggcaccacacccucugccaaggccagcauucugcaugaagugagaccuguuaccuccggguguuuucccaucaugcacgaccggacgaagauccgccaacucgcuaaucugcugagaggauaugagaacauucggcucucuacacagaaugugaucgaugccgaaaaagcuccuggcggcccguaccgccuggggaccagcggauccugccccaacgccacaagcaagucuggcuucuuugcgaccauggccugggcugucccuaaagacaauaacaagaaugccaccaacccccuuacaguggaggugccuuauauuugugcugaaggggaggaucagaucacggucuggggauuccauuccgacaauaaaacccagaugaagaaccuguacggcgauagcaauccccaaagauuuacaucuuccgccaacgggguuaccacacacuaugugagccagauuggaggcuucccggaccagaccgaggauggcgggcucccucagucuggacggaucguggucgacuacaugaugcaaaagcccggcaaaacggggacaauuguguaucagcgcggaguucugcuuccucagaagguguggugcgcguccggcagaagcaaagucaucaaggggucccugccccucaucggagaagccgauugucugcaugagaaauacggcggccugaacaagucuaaacccuacuauaccggggaacacgcuaaggccauuggaaauugcccuaucugggugaagaccccgcucaaacuggcuaacggcacaaaguaccggcccccugccaaacuucugaaggagcgcggguuuuucggagccauugcuggcuuucucgaagggggcugggaaggaaugaucgcgggcuggcacggguauaccagccauggagcccacggcguugcuguggccgccgaccugaaauccacacaggaggcuauuaauaagaucacgaagaaccuuaauagccugucugaacucgaggucaaaaaccugcaaagacuguccggggccauggacgaacuccauaaugagauccuggagcuugaugaaaagguggacgaucugcgggcggacaccauuagcucucagaucgagcucgcuguccugcuuagcaacgaaggaauuaucaauuccgaggaugaacaucugcucgcccuggagcgcaaacugaagaaaaugcucggccccucugccguggacauugggaacggcuguuucgagacaaagcacaagugcaaucagaccugccuggauagaaucgcugccggaacauuuaacgcuggcgaguucagccuuccuaccuuugacucccugaauaucacggccgcgagccucaacgaugacgggcuggauaaucacaccauucugcuuuacuauucuacagccgcuuccagccucgccguuacccugaugcuggcuaucuucauuguguacauggucucucgggacaacguguccuguagcaucugccucuga

SEQ ID NO: 218970 - RNA, 1755 nt, Artificial Sequence; identical to SEQ ID NO: 218926
  derived and/or modified CDS sequence (opt5) from hemagglutinin__InfluenzaB__AGL09871

SEQ ID NO: 218971 - RNA, 1755 nt, Artificial Sequence
  derived and/or modified CDS sequence (opt5) from hemagglutinin__InfluenzaB__AGL09872
augaaggccaucauugugcugcucauggucguuaccagcaacgcugacagaaucugcacaggcauuacguccucuaauagcccccacguggugaaaaccgccacacagggggaggucaacgugaccggaguuaucccucugacaaccacaccgaccaaguccuacuucgcgaaucuuaaaggcacgaagacccgggggaaacugugucccgauugccucaacuguacagaccuggauguggcucuuggacgcccuaugugcgucggcaccacacccucugccaaggccagcauucugcaugaagugagaccuguuaccuccggguguuuucccaucaugcacgaccggacgaagauccgccaacucgcuaaucugcugagaggauaugagaacauucggcucucuacacagaaugugaucgaugccgaaaaagcuccuggcggcccguaccgccuggggaccagcggauccugccccaacgccacaagcaagucuggcuucuuugcgaccauggccugggcugucccuaaagacaauaacaagaaugccaccaacccccuuacaguggaggugccuuauauuugugcugaaggggaggaucagaucgccgucuggggauuccauuccgacaauaaaacgcagaugaagaaccuguacggcgauagcaauccccaaaaguuuaccucuuccgcgaacgggguuacaacccacuaugugagccagauuggaggcuucccggaccagacagaggauggcgggcucccucagucuggaagaaucguggucgacuacaugaugcaaaaacccggcaagaccgggacgauuguguaucagcggggaguucugcuuccucagaaaguguggugcgccuccggccgcagcaaggucaucaaagggucccugccccucaucggagaagcugauugucugcaugagaaguacggcggccugaacaaaucuaagcccuacuauacaggggaacacgccaaggcuauuggaaauugcccuaucugggugaaaaccccgcucaagcuggccaacggcaccaaauacagacccccugccaaacuucugaaagagcggggguuuuucggagcuauugcgggcuuucucgaagggggcugggaaggaaugaucgccggcuggcacggguauacaagccauggagcucacggcguugccguggccgcugaccugaaguccacccaggaggccauuaauaagaucacaaagaaccuuaauagccugucugaacucgaggucaagaaccugcaacgccuguccggggcgauggacgaacuccauaaugagauccuggagcuugaugaaaaaguggacgaucugagagcugacacgauuagcucucagaucgagcucgccguccugcuuagcaacgaaggaauuaucaauuccgaggaugaacaucugcucgcccuggagcggaagcugaaaaagaugcucggccccucugcuguggacauugggaacggcuguuucgagaccaagcacaaaugcaaucagacaugccuggaucgcaucgccgcuggaaccuuuaacgccggcgaguucagccuuccuacauuugacucccugaauaucaccgcggccagccucaacgaugacgggcuggauaaucacacgauucugcuuuacuauucuaccgcugccuccagccucgcuguuacacugaugcuggccaucuucauuguguacauggucucuagagacaacguguccuguagcaucugccucuga

SEQ ID NO: 218972 - RNA, 1755 nt, Artificial Sequence; identical to SEQ ID NO: 218926
  derived and/or modified CDS sequence (opt5) from hemagglutinin__InfluenzaB__AGL09873

SEQ ID NO: 218973 - RNA, 1758 nt, Artificial Sequence; identical to SEQ ID NO: 218959
  derived and/or modified CDS sequence (opt5) from hemagglutinin__InfluenzaB__AGL09874

SEQ ID NO: 218974 - RNA, 1758 nt, Artificial Sequence; identical to SEQ ID NO: 218944
  derived and/or modified CDS sequence (opt5) from hemagglutinin__InfluenzaB__AGO02695

SEQ ID NO: 218975 - RNA, 1755 nt, Artificial Sequence; identical to SEQ ID NO: 218926
  derived and/or modified CDS sequence (opt5) from hemagglutinin__InfluenzaB__AGQ16249

SEQ ID NO: 218976 - RNA, 1758 nt, Artificial Sequence; identical to SEQ ID NO: 218959
  derived and/or modified CDS sequence (opt5) from hemagglutinin__InfluenzaB__AGQ16250

SEQ ID NO: 218977 - RNA, 1758 nt, Artificial Sequence; identical to SEQ ID NO: 218959
  derived and/or modified CDS sequence (opt5) from hemagglutinin__InfluenzaB__AGQ16251

SEQ ID NO: 218978 - RNA, 1755 nt, Artificial Sequence
  derived and/or modified CDS sequence (opt5) from hemagglutinin__InfluenzaB__AGQ16252
augaaggccaucauugugcugcucauggucguuaccagcaacgcugacagaaucugcacaggcauuacguccucuaauagcccccacguggugaaaaccgccacacagggggaagucaacgugaccggaguuaucccucugacaaccacaccggcgaaguccuacuucgcuaaucuuaaaggcacccggacgcgcgggaagcugugucccgauugccucaacuguaccgaccuggauguggcccuuggaagaccuaugugcgucggcacaacccccucugccaaagcuagcauucugcaugaagugcggccuguuacauccggguguuuucccaucaugcacgaccgcaccaagaucagacaacucccuaaucugcugcggggauaugagaacauucgccucucuacgcagaaugugaucgaugccgaaaaggcuccgggcggccccuacagacuggggacaagcggauccugcccuaacgccaccagcaaaauuggcuucuuugcgacaauggccugggcuguccccaaggacaauuauaaaaacgccaccaauccucuuaccguggaggugcccuacaucuguaaggaaggggaggaucagauuacagucuggggauuccauucugacaacaaaacgcagaugaagaaucuguauggcgauuccaacccgcaaaaguuuaccagcucugcuaaugggguuacaacccacuacgugucccagaucggagacuucccugaucagacagaggacggcggccucccccagagcgggcggauuguggucgauuauaugaugcaaaaaccuggaaagaccggcacgaucguguaccagcgcgggguucugcuuccccagaaaguguggugcgccucuggaagauccaaggucaucaaaggcagccugccccucauuggggaagcggacugucugcaugaggaauacggaggccugaacaaguccaaaccuuauuacacaggcaagcacgccaaggcuaucgggaacugcccgauuugggugaaaacaccccucaagcuggccaauggaaccaaauaucggccucccgcuaagcugcugaaagagcgcggcuuuuucggggccaucgccggauuucucgagggcgggugggaaggcaugauugcuggauggcacggcuacacaucucauggggcgcacggaguugccguggcugccgaccuuaagagcacccaggaggccaucaacaagaucaccaaaaaucuuaacucccugagcgaacucgaggucaagaaucugcaaagacugucuggcgcuauggaugaacuccauaacgagauucuggagcuugacgaaaaaguggaugaccugcgggccgauacgaucuccagccagauugagcucgcgguccugcuuucuaaugaagggaucauuaacagcgaggacgaacaucugcucgcucuggagcgcaagcugaaaaagaugcucggaccuuccgccguggauaucggcaauggguguuucgagaccaagcacaaaugcaaccagacaugccuggacagaaucgccgcuggcaccuuuaaugccggagaguucucucuucccacauuugauagccugaacauuaccgcugccucccucaaugacgauggccuggacaaccacacgauccugcuuuauuacagcaccgcggccucuucccucgcuguuacacugaugcuggccauuuucaucguguauauggucagccgggacaaugugucuuguuccauuugccucuga

SEQ ID NO: 218979 - RNA, 1755 nt, Artificial Sequence; identical to SEQ ID NO: 218926
  derived and/or modified CDS sequence (opt5) from hemagglutinin__InfluenzaB__AGQ16253

SEQ ID NO: 218980 - RNA, 1755 nt, Artificial Sequence
  derived and/or modified CDS sequence (opt5) from hemagglutinin__InfluenzaB__AGQ16255
augaaggccaucauugugcugcucauggucguuaccagcaacgcugacagaaucugcacaggcauuacguccucuaauagcccccacguggugaaaaccgccacacagggggaggucaacgugaccggaguuaucccucugacaaccacaccgaccaaguccuacuucgcgaaucuuaaaggcacgaagacccgggggaaacugugucccgauugccucaacuguacagaccuggauguggcucuuggacgcccuaugugcgucggcaccacacccucugccaaggccagcauucugcaugaagugagaccuguuaccuccggguguuuucccaucaugcacgaccggacgaagauccgccaacucgcuaaucugcugagaggauaugagaacauucggcucucuacacagaaugugaucgaugccgaaaaagcuccuggcggcccguaccgccuggggaccagcggauccugccccaacgccacaagcaagucuggcuucuuugcgaccauggccugggcugucccuaaagacaauaacaagaaugccaccaacccccuuacaguggaggugccuuauauuugugcugaaggggaggaucagaucacggucuggggauuccauuccgacaauaaaacccagaugaagaaccuguacggcgauagcaauccccaaaaguuuacaucuuccgccaacgggauuaccacacacuauguuagccagaucggaggcuucccggaccagaccgaggauggcgggcucccucagucuggaagaauugugguggacuacaugaugcaaaaacccggcaagacggggacaaucgucuaucagcggggagugcugcuuccucagaaaguuuggugcgcguccggccgcagcaaggugaucaaagggucccugccccucauuggagaagccgauugucugcaugagaaguacggcggccugaacaaaucuaagcccuacuauaccggggaacacgcuaaggccaucggaaauugcccuauuugggucaaaaccccgcucaagcuggcuaacggcacaaaauacagacccccugccaagcugcugaaagagcggggguuuuucggagccaucgcuggcuuucucgaagggggcugggaaggaaugauugcgggcuggcacggguauaccagccauggagcccacggcguggcuguugccgccgaccugaaguccacacaggaggcuaucaauaagaucacgaaaaaccuuaauagccugucugaacucgaggugaagaaccugcaacgccuguccggggccauggacgaacuccauaaugagauucuggagcuugaugaaaaagucgacgaucugagagcggacaccaucagcucucagauugagcucgcugugcugcuuagcaacgaaggaaucauuaauuccgaggaugaacaccuucucgcccuggagcggaagcugaaaaagaugcucggccccucugccgucgacaucgggaacggcuguuucgagacaaagcacaaaugcaaucagaccugccuggaucgcaucgcugccggaacauuuaacgcuggcgaguucagccuuccuaccuuugacucccugaauauuacggccgcgagccucaacgaugacgggcuggauaaucauaucauucugcuuuacuauucuaccgccgcuuccagccucgccgugacacugaugcuggcuaucuucauuguuuacauggugucuagagacaacgucuccuguagcaucugccucuga

SEQ ID NO: 218981 - RNA, 1755 nt, Artificial Sequence
  derived and/or modified CDS sequence (opt5) from hemagglutinin__InfluenzaB__AGQ16256
augaaggccaucauugugcugcucauggucguuaccagcaacgcugacagaaucugcacaggcauuacguccucuaauagcccccacguggugaaaaccgucacacagggggaggugaacguuaccggagugaucccucugacaaccacaccgaccaaguccuacuucgccaaucuuaaaggcacgaagacccgggggaaacugugucccgauugccucaacuguacagaccuggaugucgcgcuuggacgcccuaugugcgugggcaccacacccucugcuaaggccagcauucugcaugaaguuagaccugugaccuccggguguuuucccaucaugcacgaccggacgaagauccgccaacucgccaaucugcugagaggauaugagaacauucggcucucuacacagaaugucaucgaugcugaaaaagccccuggcggcccguaccgccuggggaccagcggauccugccccaacgcuacaagcaagucuggcuucuuugccaccauggcgugggccgugccuaaagacuccaauaagaacgcuaccaauccccuuacaguggaggucccuuauauuugugccgaaggggaggaucagaucacgguuuggggauuccauagcgacaacaaaacccagaugaagaaucuguacggcgauucuaacccccaaaaguuuacauccagcgcuaauggggugaccacacacuaugugucucagauuggaggcuucccggaccagaccgaggauggcgggcucccucaguccggaagaaucgucguggacuacaugaugcaaaaacccggcaagacggggacaauuguuuaucagcggggagugcugcuuccucagaaagucuggugcgccagcggccgcuccaaggugaucaaagggucucugccccucaucggagaagcggauugucugcaugagaaguacggcggccugaacaaaagcaagcccuacuauaccggggaacacgccaaggcuauuggaaacugcccuaucuggguuaaaaccccgcucaagcuggccaauggcacaaaauacagacccccugcuaagcugcugaaagagcggggguuuuucggagccauugccggcuuucucgaagggggcugggaaggaaugaucgcuggcuggcacggguauaccucccauggagcgcacggcguggccgucgcugccgaccuuaagagcacacaggaggccauuaacaagaucacgaaaaaucuuaacucucuguccgaacucgaggugaagaaucugcaacgccugagcggggcuauggacgaacuccauaacgagauccuggagcuugaugaaaaagucgacgaucugagagccgacaccauuucuagccagaucgagcucgcggugcugcuuuccaaugaaggaauuaucaacucugaggaugaacaucugcucgcucuggagcggaagcugaaaaagaugcucggccccagcgccguugacauugggaauggcuguuucgagacaaagcacaaaugcaaccagaccugccuggaucgcaucgccgcuggaacauuuaaugccggcgaguucucccuuccuaccuuugacagccugaacaucacggcugccucucucaaugaugacgggcuggauaaccacaccauucugcuuuacuauuccacagcggccagcucucucgcugugacccugaugcuggccaucuucauugucuacaugguguccagagacaauguuagcuguuccaucugccucuga

SEQ ID NO: 218982 - RNA, 1755 nt, Artificial Sequence; identical to SEQ ID NO: 218926
  derived and/or modified CDS sequence (opt5) from hemagglutinin__InfluenzaB__AGQ16257

SEQ ID NO: 218983 - RNA, 1755 nt, Artificial Sequence; identical to SEQ ID NO: 218926
  derived and/or modified CDS sequence (opt5) from hemagglutinin__InfluenzaB__AGQ16258

SEQ ID NO: 218984 - RNA, 1755 nt, Artificial Sequence; identical to SEQ ID NO: 218926
  derived and/or modified CDS sequence (opt5) from hemagglutinin__InfluenzaB__AGQ16259

SEQ ID NO: 218985 - RNA, 1755 nt, Artificial Sequence
  derived and/or modified CDS sequence (opt5) from hemagglutinin__InfluenzaB__AGQ16260
augaagaccaucauugugcugcucauggucguuacaagcaacgccgacagaaucugcacgggcauuaccuccucuaauagcccccacguggugaaaacagcuacccagggggaggucaacgugacaggaguuaucccucugaccacaaccccgacgaaguccuacuucgccaaucuuaaaggcaccaagacacgggggaaacugugucccgauugccucaacuguaccgaccuggauguggcgcuuggacgcccuaugugcgucggcacaacccccucugcuaaggccagcauucugcaugaagugagaccuguuacguccggguguuuucccaucaugcacgaccggacaaagauccgccaacucgccaaucugcugagaggauaugagaacauucggcucucuagccagaaugugaucgaugcugaaaaagccccuggcggcccguaccgccuggggaccuccggaagcugccccaacgcuacaucuaaguccggcuucuuugccaccauggcgugggccgucccuaaagacaauaacaagaaugcuaccaacccccuuacaguggaggugccuuauauuugugccgaaggggaggaucagaucacggucuggggauuccauagcgacaauaaaacccagaugaagaaccuguacggcgauucuaauccccaaaaguuuacauccagcgcuaacgggguuaccacacacuaugugucucagauuggaggcuucccggaccagaccgaggauggcgggcucccucaguccggaagaaucguggucgacuacaugaugcaaaaacccggcaagacggggacaauuguguaucagcggggaguucugcuuccucagaaaguguggugcgccagcggccgcuccaaggucaucaaagggucucugccccucaucggagaagcggauugucugcaugagaaguacggcggccugaacaaaagcaagcccuacuauaccggggaacacgccaaggcuauuggaaauugcccuaucugggugaaaaccccgcucaagcuggccaacggcacaaaauacagacccccugcuaagcugcugaaagagcggggguuuuucggagccauugccggcuuucucgaagggggcugggaaggaaugaucgcuggcuggcacggguauaccucccauggagcgcacggcguugccguggcugccgaccuuaagagcacacaggaggccauuaauaagaucacgaaaaaccuuaauucucuguccgaacucgaggucaagaaccugcaacgccugagcggggcuauggacgaacuccauaaugagauccuggagcuugaugaaaaaguggacgaucugagagccgacaccauuucuagccagaucgagcucgcgguccugcuuuccaacgaaggaauuaucaauucugaggaugaacaucugcucgcucuggagcggaagcugaaaaagaugcucggccccagcgccguggacauugggaacggcuguuucgagacaaagcacaaaugcaaucagaccugccuggaucgcaucgccgcuggaacauuuaacgccggcgaguucucccuuccuaccuuugacagccugaauaucacggcugccucucucaacgaugacgggcuggauaaucacaccauucugcuuuacuauuccacagcggccagcucucucgcuguuacccugaugcuggccaucuucauuguguacauggucuccagagacaacgugagcuguuccaucugccucuga

SEQ ID NO: 218986 - RNA, 1755 nt, Artificial Sequence; identical to SEQ ID NO: 218926
  derived and/or modified CDS sequence (opt5) from hemagglutinin__InfluenzaB__AGQ16261

SEQ ID NO: 218987 - RNA, 1755 nt, Artificial Sequence; identical to SEQ ID NO: 218926
  derived and/or modified CDS sequence (opt5) from hemagglutinin__InfluenzaB__AGQ16262

SEQ ID NO: 218988 - RNA, 1758 nt, Artificial Sequence; identical to SEQ ID NO: 218959
  derived and/or modified CDS sequence (opt5) from hemagglutinin__InfluenzaB__AGQ16263

SEQ ID NO: 218989 - RNA, 1758 nt, Artificial Sequence; identical to SEQ ID NO: 218959
  derived and/or modified CDS sequence (opt5) from hemagglutinin__InfluenzaB__AGQ16264

SEQ ID NO: 218990 - RNA, 1755 nt, Artificial Sequence; identical to SEQ ID NO: 218971
  derived and/or modified CDS sequence (opt5) from hemagglutinin__InfluenzaB__AGQ16265

SEQ ID NO: 218991 - RNA, 1755 nt, Artificial Sequence
  derived and/or modified CDS sequence (opt5) from hemagglutinin__InfluenzaB__AGQ16266
augaaggccaucauugugcugcucauggucguuaccagcaacgcugacagaaucugcacaggcauuacguccucuaauagcccccacguggugaaaaccgccacacagggggaggucaacgugaccggaguuaucccucugacaaccacaccgaccaaguccuacuucgcgaaucuuaaaggcacgaagacccgggggaaacugugucccgauugccucaacuguacagaccuggauguggcucuuggacgcccuaugugcgucggcaccacacccucugccaaggccagcauucugcaugaagugagaccuguuaccuccggguguuuucccaucaugcacgaccggacgaagauccgccaacucgcuaaucugcugagaggauaugagaacauucggcucucuacacagaaugugaucgaugccgaaaaagcuccuggcggcccguaccgccuggggaccagcggauccugccccaacgccacaagcaagucuggcuucuuugcgaccauggccugggcugucccuaaagacaauaacaagaaugccaccaacccccuuacaguggaggugccuuauauuugugcugaaggggaggaucagaucacggucuggggauuccauuccgacaauaaaacccagaugaagaaccuguacggcgauagcaauccccaaaaguuuacaucuuccgccaacgggguuaccacacacuaugugagccaggugggaggcuucccggaccagaccgaggauggcgggcucccucagucuggaagaauugucguggacuacaugaugcaaaaacccggcaagacggggacaaucguuuaucagcggggagugcugcuuccucagaaagucuggugcgcguccggccgcagcaaggugauuaaagggucccugccccucaucggagaagccgauugucugcaugagaaguacggcggccugaacaaaucuaagcccuacuauaccggggaacacgcuaaggccaucggaaauugcccuauuuggguuaaaaccccgcucaagcuggcuaacggcacaaaauacagacccccugccaagcugcugaaagagcggggguuuuucggagccaucgcuggcuuucucgaagggggcugggaaggaaugauugcgggcuggcacggguauaccagccauggagcccacggcguggcugucgccgccgaccugaaguccacacaggaggcuaucaauaagauuacgaaaaaccuuaauagccugucugaacucgaggugaagaaccugcaacgccuguccggggccauggacgaacuccauaaugagauccuggagcuugaugaaaaagucgacgaucugagagcggacaccaucagcucucagauugagcucgcugugcugcuuagcaacgaaggaaucauuaauuccgaggaugaacaccuucucgcccuggagcggaagcugaaaaagaugcucggccccucugccguugacaucgggaacggcuguuucgagacaaagcacaaaugcaaucagaccugccuggaucgcauugcugccggaacauuuaacgcuggcgaguucagccuuccuaccuuugacucccugaauaucacggccgcgagccucaacgaugacgggcuggauaaucauaccauccugcuuuacuauucuacagccgcuuccagccucgccgugacccugaugcuggcuauuuucaucgucuacauggugucuagagacaacguuuccuguagcauuugccucuga

SEQ ID NO: 218992 - RNA, 1755 nt, Artificial Sequence; identical to SEQ ID NO: 218971
  derived and/or modified CDS sequence (opt5) from hemagglutinin__InfluenzaB__AGQ16267

SEQ ID NO: 218993 - RNA, 1755 nt, Artificial Sequence; identical to SEQ ID NO: 218971
  derived and/or modified CDS sequence (opt5) from hemagglutinin__InfluenzaB__AGQ16268

SEQ ID NO: 218994 - RNA, 1758 nt, Artificial Sequence; identical to SEQ ID NO: 218944
  derived and/or modified CDS sequence (opt5) from hemagglutinin__InfluenzaB__AGQ16269

SEQ ID NO: 218995 - RNA, 1755 nt, Artificial Sequence; identical to SEQ ID NO: 218971
  derived and/or modified CDS sequence (opt5) from hemagglutinin__InfluenzaB__AGQ16270

SEQ ID NO: 218996 - RNA, 1755 nt, Artificial Sequence
  derived and/or modified CDS sequence (opt5) from hemagglutinin__InfluenzaB__AGQ16272
augaaggccaucauugugcugcucauggucguuaccagcaacgcugacagaaucugcacaggcauuacguccucuaauagcccccacguggugaaaaccgccacacagggggaggucaacgugaccggaguuaucccucugacaaccacaccgaccaaguccuacuucgcgaaucuuaaaggcacgaagacccgggggaaacugugucccgauugccucaacuguacagaccuggauguggcucuuggacgcccuaugugcgucggcaccacacccucugccaaggccagcauucugcaugaagugagaccuguuaccuccggguguuuucccaucaugcacgaccggacgaagauccgccaacucgcuaaucugcugagaggauaugagaacauucggcucucuacacagaaugugaucgaugccgaaaaagcuccuggcggcccguaccgccuggggaccagcggauccugccccaacgccacaagcaagucuggcuucuuugcgaccauggccugggcugucccuagagacaauaacaaaaaugccaccaacccccuuacaguggaggugccuuauauuugugaagagggggaggaucagaucacggucuggggauuccauuccgacaauaagacccagaugaaaaaccuguacggcgauagcaauccccaaaaguuuacaucuuccgcuaacgggguuaccacacacuaugugagccagauuggaggcuucccggaccagaccgaagauggcgggcucccucagucuggacggaucguggucgacuacaugaugcaaaagcccggcaaaacggggacaauuguguaucagcgcggaguucugcuuccucagaagguguggugcgccuccggcagaagcaaagucaucaaggggucccugccccucaucggagaggcggauugucugcaugaaaaauacggcggccugaacaagucuaaacccuacuauaccggggagcacgccaaggcuauuggaaauugcccuaucugggugaagaccccgcucaaacuggccaacggcacaaaguaccggcccccugcuaaacuucugaaggagcgcggguuuuucggagccauugccggcuuucucgaagggggcugggagggaaugaucgcuggcuggcacggguauaccagccauggagcgcacggcguugccguggcugccgaccugaaauccacacaggaagccauuaauaagaucacgaagaaccuuaauagccugucugagcucgaagucaaaaaccugcaaagacuguccggggcuauggacgagcuccauaaugagauccuggaacuugaugagaagguggacgaucugcgggccgacaccauuagcucucagaucgaacucgcgguccugcuuagcaacgagggaauuaucaauuccgaagaugagcaucugcucgcucuggagcgcaaacugaagaaaaugcucggccccucugccguggacauugggaacggcuguuucgaaacaaagcacaagugcaaucagaccugccuggauagaaucgccgcuggaacauuuaacgccggcgaguucagccuuccuaccuuugacucccugaauaucacggcugccagccucaacgaugacgggcuggauaaucacaccauucugcuuuacuauucuacagcggccuccagccucgcuguuacccugaugcuggccaucuucauuguguacauggucucucgggacaacguguccuguagcaucugccucuga

SEQ ID NO: 218997 - RNA, 1755 nt, Artificial Sequence; identical to SEQ ID NO: 218926
  derived and/or modified CDS sequence (opt5) from hemagglutinin__InfluenzaB__AGQ16273

SEQ ID NO: 218998 - RNA, 1755 nt, Artificial Sequence; identical to SEQ ID NO: 218926
  derived and/or modified CDS sequence (opt5) from hemagglutinin__InfluenzaB__AGQ16274

SEQ ID NO: 218999 - RNA, 1755 nt, Artificial Sequence; identical to SEQ ID NO: 218926
  derived and/or modified CDS sequence (opt5) from hemagglutinin__InfluenzaB__AGQ16275

SEQ ID NO: 219000 - RNA, 1755 nt, Artificial Sequence; identical to SEQ ID NO: 218926
  derived and/or modified CDS sequence (opt5) from hemagglutinin__InfluenzaB__AGQ16276

SEQ ID NO: 219001 - RNA, 1755 nt, Artificial Sequence; identical to SEQ ID NO: 218971
  derived and/or modified CDS sequence (opt5) from hemagglutinin__InfluenzaB__AGQ16277

SEQ ID NO: 219002 - RNA, 1755 nt, Artificial Sequence; identical to SEQ ID NO: 218971
  derived and/or modified CDS sequence (opt5) from hemagglutinin__InfluenzaB__AGQ16278

SEQ ID NO: 219003 - RNA, 1755 nt, Artificial Sequence; identical to SEQ ID NO: 218971
  derived and/or modified CDS sequence (opt5) from hemagglutinin__InfluenzaB__AGQ16279

SEQ ID NO: 219004 - RNA, 1755 nt, Artificial Sequence; identical to SEQ ID NO: 218971
  derived and/or modified CDS sequence (opt5) from hemagglutinin__InfluenzaB__AGQ16280

SEQ ID NO: 219005 - RNA, 1755 nt, Artificial Sequence
  derived and/or modified CDS sequence (opt5) from hemagglutinin__InfluenzaB__AGQ16281
augaaggccaucauugugcugcucauggucguuaccagcaacgcugacagaaucugcacaggcauuacguccucuaauagcccccacguggugaaaaccgccacacagggggaagucaacgugaccggaguuaucccucugacaaccacaccgaccaaguccuacuucgcgaaucuuaaaggcacgaagacccgggggaaacugugucccgauugccucaacuguacagaccuggauguggcucuuggacgcccuaugugcgucggcaccacacccucugccaaggccagcauucugcaugaagugagaccuguuaccuccggguguuuucccaucaugcacgaccggacgaagauccgccaacucgcuaaucugcugagaggauaugagaacauucggcucucuacacagaaugugaucgaugccgaaaaagcuccuggcggcccguaccgccuggggaccagcggauccugccccaacgccacaagcaagucuggcuucuuugcgaccauggccugggcugucccuaaagacaauaacaagaaugccaccaacccccuuacaguggaggugccuuauauuugugcugaaggggaggaucagaucacggucuggggauuccauuccgacaauaaaacccagaugaagaaccuguacggcgauagcaauccccaaaaguuuacaucuuccgccaacgggguuaccacacacuaugugagccagauuggaucuuucccggaccagaccgaggauggcggccucccucaguccgggagaaucguggucgacuacaugaugcaaaaacccggaaagacgggcacaauuguguaucagcgcgggguucugcuuccucagaaaguguggugcgcgagcggacgguccaaggucaucaaaggcucucugccccucaucggggaagccgauugucugcaugagaaguacggaggccugaacaaaagcaagcccuacuauaccggcgaacacgcuaaggccauugggaauugcccuaucugggugaaaaccccgcucaagcuggcuaacggaacaaaauacagacccccugccaagcugcugaaagagcggggcuuuuucggggccauugcuggauuucucgagggcgggugggaaggcaugaucgcgggauggcacggcuauaccucccauggggcccacggaguugcuguggccgccgaccuuaagagcacacaggaggcuauuaauaagaucacgaaaaaccuuaauucucuguccgaacucgaggucaagaaccugcaacgccugagcggcgccauggacgaacuccauaaugagauccuggagcuugaugaaaaaguggacgaucugagagcggacaccauuucuagccagaucgagcucgcuguccugcuuuccaacgaagggauuaucaauucugaggaugaacaucugcucgcccuggagcggaagcugaaaaagaugcucggacccagcgccguggacauuggcaacggguguuucgagacaaagcacaaaugcaaucagaccugccuggaucgcaucgcugccggcacauuuaacgcuggagaguucucccuuccuaccuuugacagccugaauaucacggccgcgucucucaacgaugacggccuggauaaucacaccauucugcuuuacuauuccacagccgcuagcucucucgccguuacccugaugcuggcuaucuucauuguguacauggucuccagagacaacgugagcuguuccaucugccucuga

SEQ ID NO: 219006 - RNA, 1755 nt, Artificial Sequence
  derived and/or modified CDS sequence (opt5) from hemagglutinin__InfluenzaB__AGQ16282
augaaggccaucauugugcugcucauggucguuaccagcaacgcugacagaaucugcacaggcauuacguccucuaauagcccccacguggugaaaaccgccacacagggggaagucaacgugaccggaguuaucccucugacaaccacaccgaccaaguccuacuucgcgaaucuuaaaggcacgaagacccgggggaaacugugucccgauugccucaacuguacagaccuggauguggcucuuggacgcccuaugugcgucggcaccacacccucugccaaggccagcauucugcaugaagugagaccuguuaccuccggguguuuucccaucaugcacgaccggacgaagauccgccaacucgcuaaucugcugagaggauaugagaacauucggcucucuacacagaaugugaucgaugccgaaaaagcuccuggcggcccguaccgccuggggaccagcggauccugccccaacgccacaagcaagucuggcuucuuugcgaccauggccugggcugucccuaaagggaauaacaagaaugccaccaacccccuuacaguggaggugccuuauauuugugcugaaggagaggaccagaucacggucuggggcuuccauuccgauaauaaaacccagaugaagaaccuguacggggacagcaauccccaaagauuuacaucuuccgccaacggaguuaccacacacuaugugagccagauuggcggcuucccggaucagaccgaggacgggggacucccucagucuggccggaucguggucgauuacaugaugcaaaagcccgggaaaacgggaacaauuguguaucagcgcggcguucugcuuccucagaagguguggugcgcguccgggagaagcaaagucaucaagggaucccugccccucaucggcgaagccgacugucugcaugagaaauacggcgggcugaacaagucuaaacccuacuauaccggagaacacgcuaaggccauuggcaauugcccuaucugggugaagaccccgcucaaacuggcuaacgggacaaaguaccggcccccugccaaacuucugaaggagcgcggauuuuucggcgccauugcuggguuucucgagggcggaugggaaggcaugaucgcgggguggcacggauauaccagccauggcgcccacgggguugcuguggccgccgaucugaaauccacacaggaggcuauuaauaagaucacgaagaaccuuaauagccugucugaacucgaggucaaaaaccugcaaagacuguccggagccauggacgaacuccauaaugagauccuggagcuugacgaaaagguggaugaccugcgggcggauaccauuagcucucagaucgagcucgcuguccugcuuagcaacgaaggcauuaucaauuccgaggacgaacaucugcucgcccuggagcgcaaacugaagaaaaugcucgggcccucugccguggauauuggcaacggauguuucgagacaaagcacaagugcaaucagaccugccuggacagaaucgcugccggcacauuuaacgcuggggaguucagccuuccuaccuuugauucccugaauaucacggccgcgagccucaacgacgauggacuggacaaucacaccauucugcuuuacuauucuacagccgcuuccagccucgccguuacccugaugcuggcuaucuucauuguguacauggucucucgggauaacguguccuguagcaucugccucuga

SEQ ID NO: 219007 - RNA, 1755 nt, Artificial Sequence
  derived and/or modified CDS sequence (opt5) from hemagglutinin__InfluenzaB__AGQ16283
augaaggccaucauugugcugcucauggucguuaccagcaacgcugacagaaucugcacaggcauuacguccucuaauagcccccacguggugaaaaccgccacacauggggaggucaacgugaccggaguuaucccucugacaaccacaccgaccaaguccuacuucgcgaaucuuaaaggcacgaagacccgggggaaacugugucccgauugccucaacuguacagaccuggauguggcucuuggacgcccuaugugcgucggcaccacacccucugccaaggccagcauucugcacgaagugagaccuguuaccuccggguguuuucccaucaugcaugaccggacgaagauccgccagcucgcuaaucugcugagaggauaugagaacauucggcucucuacacaaaaugugaucgaugccgaaaaagcuccuggcggcccguaccgccuggggaccagcggauccugccccaacgccacaagcaagucuggcuucuuugcgaccauggccugggcugucccuaaagacaauaacaagaaugccaccaacccccuuacaguggaggugccuuauauuugugcugaaggggaggaucagaucgccgucuggggauuccacuccgacaauaaaacgcagaugaagaaccuguacggcgauagcaauccccagaaguuuaccucuuccgcgaacgggguuacaacccauuaugugagccaaauuggaggcuucccggaccagacagaggauggcgggcucccucagucuggaagaaucguggucgacuacaugaugcagaaacccggcaagaccgggacgauuguguaucaacggggaguucugcuuccucagaaaguguggugcgccuccggccgcagcaaggucaucaaagggucccugccccucaucggagaagcugauugucugcacgagaaguacggcggccugaacaaaucuaagcccuacuauacaggggaacacgccaaggcuauuggaaauugcccuaucugggugaaaaccccgcucaagcuggccaacggcaccaaauacagacccccugccaaacuucugaaagagcggggguuuuucggagcuauugcgggcuuucucgaagggggcugggaaggaaugaucgccggcuggcauggguauacaagccacggagcucauggcguugccguggccgcugaccugaaguccacccaggaggccauuaauaagaucacaaagaaccuuaauagccugucugaacucgaggucaagaaccugcagcgccuguccggggcgauggacgaacuccacaaugagauccuggagcuugaugaaaaaguggacgaucugagagcugacacgauuagcucucaaaucgagcucgccguccugcuuagcaacgaaggaauuaucaauuccgaggaugaacaucugcucgcccuggagcggaagcugaaaaagaugcucggccccucugcuguggacauugggaacggcuguuucgagaccaagcacaaaugcaaucagacaugccuggaucgcaucgccgcuggaaccuuuaacgccggcgaguucagccuuccuacauuugacucccugaauaucaccgcggccagccucaacgaugacgggcuggauaaucacacgauucugcuuuacuauucuaccgcugccuccagccucgcuguuacacugaugcuggccaucuucauuguguacauggucucuagagacaacguguccuguagcaucugccucuga

SEQ ID NO: 219008 - RNA, 1758 nt, Artificial Sequence
  derived and/or modified CDS sequence (opt5) from hemagglutinin__InfluenzaB__AGQ16284
augaaggccaucauugugcugcucauggucguuaccagcaacgcugacagaaucugcacaggcauuacguccucuaauagcccccacguggugaaaaccgccacacagggggaggucaacgugaccggaguuaucccucugacaaccacaccgaccaagucccauuucgcgaaucuuaaaggcacggaaacccgggggaagcugugucccaaaugccucaacuguacagaucuggacguggcucuuggacgcccuaagugcaccggcaagauucccucugccagagucagcauccugcacgaggcccggccugugacauccggguguuuucccaucaugcaugaucgcaccaaaauuagacaacucccuaaucugcugcggggauacgaacacaucaagcucucuacgcauaacguuauuaaugcugagaacgccccgggcggccccuauaaaaucgggacaagcggauccugcccuaaugugaccaacggcaauggguucuuugcuacaauggccugggcgguccccaagaacgacaaaaauaagaccgccaccaacccucugacaauugaagugcccuacaucuguacggagggagaggaucagauuaccguguggggcuuccacagcgacaaugaaacacagauggcuaaacuuuauggggauucuaaaccgcagaaguuuaccuccagcgccaacggagucacaacccacuacguuucucaaaucggcggcuucccuaaccagacggaggacgggggacugccccaguccggccgcaucgugguggauuauaugguccagaaaagcgggaagacaggaaccauuaccuaccaaagaggcauccuccugccucagaaaguguggugcgcuucugggcgguccaagguuauuaaaggaagccuuccccugaucggcgaagccgacugucuccaugagaaguauggcgggcugaauaaguccaaacccuacuacacaggagagcacgcgaaggccauuggcaacugcccuaucugggugaaaaccccgcugaagcucgcuaaugggacaaaauauagacccccugccaagcugcuuaaggaacgcggauuuuucggcgcuaucgccggguuucuggagggcggaugggaaggcaugauugccggguggcauggauacacgucucacggcgcucacggggucgcgguggccgcugaucucaaaagcacccaggaggccaucaacaagauuacaaagaaucugaacucccuuagcgaacuggagguuaagaaucuccagcggcugucuggagccauggacgagcugcauaacgaaauccucgagcuggaugaaaaaguggacgaccuucgcgcugauaccauuuccagccaaaucgagcuggccguccuccugucuaaugaaggcaucauuaacagcgaggacgagcaccuucuggcgcucgaaagaaagcugaagaaaaugcuggggcccuccgcuguggagaucggcaauggauguuucgaaacaaagcauaaaugcaaccagaccugccucgaucggauugccgccggcacguuugacgcuggggaguucucucugccuaccuuugauagccuuaauaucacagccgcuucccugaacgacgauggacucgacaaucacaccauucugcuguauuacagcacagccgcgucuucccuugccgucacccucaugaucgcuauuuucgugguuuauauggugagccgcgauaacgucucuuguuccaucugccuguga

SEQ ID NO: 219009 - RNA, 1755 nt, Artificial Sequence; identical to SEQ ID NO: 218971
  derived and/or modified CDS sequence (opt5) from hemagglutinin__InfluenzaB__AGQ16285

SEQ ID NO: 219010 - RNA, 1755 nt, Artificial Sequence; identical to SEQ ID NO: 218971
  derived and/or modified CDS sequence (opt5) from hemagglutinin__InfluenzaB__AGQ16286

SEQ ID NO: 219011 - RNA, 1755 nt, Artificial Sequence
  derived and/or modified CDS sequence (opt5) from hemagglutinin__InfluenzaB__AGQ16287
augaaggccaucauugugcugcucauggucguuaccagcaacgcugacagaaucugcacaggcauuacguccucuaauagcccccacguggugaaaaccgccacacagggggaggucaacgugaccggaguuaucccucugacaaccacaccgaccaaguccuacuucgcgaaucuuaaaggcacgaagacccgggggaaacugugucccgauugccucaacuguacagaccuggauguggcucuuggacgcccuaugugcgucggcaccacacccucugccaaggccagcauucugcaugaagugagaccuguuaccuccggguguuuucccaucaugcacgaccggacgaagauccgccaacucgcuaaucugcugagaggauaugagaacauucggcucucuacacagaaugugaucgaugccgaaaaagcuccuggcggcccguaccgccuggggaccagcggauccugccccaacgccacaagcaagucuggcuucuuugcgaccauggccugggcugucccuaaagacaauaacaagaaugccaccaacccccuuacaguggaggugccuuauauuugugaagagggggaggaucagaucacggucuggggauuccauuccgacaauaaaacccagaugaagaaccuguacggcgauagcaauccccaaaaguuuacaucuuccgcuaacgggguuaccacacacuaugugagccagauuggaggcuucccggaccagaccgaagauggcgggcucccucagucuggaagaaucguggucgacuacaugaugcaaaaacccggcaagacggggacaauuguguaucagcggggaguucugcuuccucagaaaguguggugcgccuccggccgcagcaaggucaucaaagggucccugccccucaucggagaggcggauugucugcaugaaaaguacggcggccugaacaaaucuaagcccuacuauaccggggagcacgccaaggcuauuggaaauugcccuaucugggugaaaaccccgcucaagcuggccaacggcacaaaauacagacccccugcuaagcugcugaaagagcggggguuuuucggagccauugccggcuuucucgaagggggcugggagggaaugaucgcuggcuggcacggguauaccagccauggagcgcacggcguugccguggcugccgaccugaaguccacacaggaagccauuaauaagaucacgaaaaaccuuaauagccugucugagcucgaagucaagaaccugcaacgccuguccggggcuauggacgagcuccauaaugagauccuggaacuugaugagaaaguggacgaucugagagccgacaccauuagcucucagaucgaacucgcgguccugcuuagcaacgagggaauuaucaauuccgaagaugagcaccuucucgcucuggagcggaagcugaaaaagaugcucggccccucugccguggacauugggaacggcuguuucgaaacaaagcacaaaugcaaucagaccugccuggaucgcaucgccgcuggaacauuuaacgccggcgaguucagccuuccuaccuuugacucccugaauaucacggcugccagccucaacgaugacgggcuggauaaucauaccauucugcuuuacuauucuacagcggccuccagccucgcuguuacccugaugcuggccaucuucauuguguacauggucucuagagacaacguguccuguagcaucugccucuga

SEQ ID NO: 219012 - RNA, 1755 nt, Artificial Sequence; identical to SEQ ID NO: 218926
  derived and/or modified CDS sequence (opt5) from hemagglutinin__InfluenzaB__AGQ16289

SEQ ID NO: 219013 - RNA, 1755 nt, Artificial Sequence; identical to SEQ ID NO: 218926
  derived and/or modified CDS sequence (opt5) from hemagglutinin__InfluenzaB__AGQ16290

SEQ ID NO: 219014 - RNA, 1755 nt, Artificial Sequence
  derived and/or modified CDS sequence (opt5) from hemagglutinin__InfluenzaB__AGQ16291
augaaggccaucauugugcugcucauggucguuaccagcaacgcugacagaaucugcacaggcauuacguccucuaauagcccccacguggugaaaaccgccacacagggggaggucaacgugaccggaguuaucccucugacaaccacaccgaccaaguccuacuucgcgaaucuuaaaggcacgaagacccgggggaaacugugucccgauugccucaacuguacagaccuggauguggcucuuggacgcccuaugugcgucggcaccacacccucugccaaggccagcauucugcaugaagugagaccuguuaccuccggguguuuucccaucaugcacgaccggacgaagauccgccaacucgcuaaucugcugagaggauaugagaacauucggcucucuacacagaaugugaucgaugccgaaaaagcuccuggcggcccguaccgccuggggaccagcggauccugccccaacacaaccagcaagucuggcuucuuugccaccauggcgugggccgucccuaaagacaauaacaagaaugcuacaaacccccuuacgguggaggugccuuauauuugugccgaaggggaggaucagaucgcugucuggggauuccauuccgacaauaaaacccagaugaagaaccuguacggcgauagcaauccccaaaaguuuacaucuuccgccaacgggguuaccacacacuaugugagccagauuggaggcuucccggaccagaccgaggauggcgggcucccucagucuggaagaaucguggucgacuacaugaugcaaaaacccggcaagacggggacaauuguguaucagcggggaguucugcuuccucagaaaguguggugcgcguccggccgcagcaaggucaucaaagggucccugccccucaucggagaagccgauugucugcaugagaaguacggcggccugaacaaaucuaagcccuacuauaccggggaacacgcuaaggccauuggaaauugcccuaucugggugaaaaccccgcucaagcuggcuaacggcacaaaauacagacccccugccaagcugcugaaagagcggggguuuuucggagccauugcuggcuuucucgaagggggcugggaaggaaugaucgcgggcuggcacggguauaccagccauggagcccacggcguugcuguggccgccgaccugaaguccacacaggaggcuauuaauaagaucacgaaaaaccuuaauagccugucugaacucgaggucaagaaccugcaacgccuguccggggccauggacgaacuccauaaugagauccuggagcuugaugaaaaaguggacgaucugagagcggacaccauuagcucucagaucgagcucgcuguccugcuuagcaacgaaggaauuaucaauuccgaggaugaacaccuucucgcccuggagcggaagcugaaaaagaugcucggccccucugccguggacauugggaacggcuguuucgagacaaagcacaaaugcaaucagaccugccuggaucgcaucgcugccggaacauuuaacgcuggcgaguucagccuuccuaccuuugacucccugaauaucacggccgcgagccucaacgaugacgggcuggauaaucauaccauucugcuuuacuauucuacagccgcuuccagccucgccguuacccugaugcuggcuaucuucauuguguacauggucucuagagacaacguguccuguagcaucugccucuga

SEQ ID NO: 219015 - RNA, 1755 nt, Artificial Sequence
  derived and/or modified CDS sequence (opt5) from hemagglutinin__InfluenzaB__AGQ16292
augaaggccaucauugugcugcucauggucguuaccagcaacgcugacagaaucugcacaggcauuacguccucuaauagcccccacguggugaaaaccgccacacagggggaggucaacgugaccggaguuaucccucugacaaccacaccgaccaaguccuacuucgcgaaucuuaaaggcacgaagacccgggggaaacugugucccgauugccucaacuguacagaccuggauguggcucuuggacgcccuaugugcgucggcaccacacccucugccaaggccagcauucugcaugaagugagaccuguuaccuccggguguuuucccaucaugcacgaccggacgaagauccgccaacucgcuaaucugcugagaggauaugagaacauucggcucucuacacagaaugugaucgaugccgaaaaagcuccuggcggcccguaccgccuggggaccagcggauccugccccaacgccacaagcaagucuggcuucuuugcgaccauggccugggcugucccuaaagacaauaacaagaaugccaccaacccccuuacaguggaggugccuuauauuugugcugaaggggaggaucagaucgccgucuggggauuccauuccgacaauaaaacgcagaugaagaaccuguacggcgauagcaauccccaaaaguuuaccucuuccgcgaacgggguuacaacccacuaugugagccagauuggaggcuucccggaccagacagaggauggcgggcucccucagucuggaagaaucguggucgacuacaugaugcaaaaacccggcaagaccgggacgauuguguaucagcggggaguucugcuuccucagaaaguguggugcgccuccggccgcagcaaggucaucaaagggucccugccccucaucggagaagcugauugucugcaugagaaguacggcggccugaacaaaucuaagcccuacuauacaggggaacacgccaaggcuauuggaaauugcccuaucugggugaaaaccccgcucaagcuggccaacggcaccaaauacagacccccugccaaacuucugaaagagcggggguuuuucggagcuauugcgggcuuucucgaagggggcugggaaggaaugaucgccggcuggcacggguauacaagccauggagcucacggcguugccguggccgcugaccugaaguccacccaggaggccauuaauaagaucacaaagaaccuuaauagccugucugaacucgagaucaagaaccugcaacgccuguccggggcgauggacgaacuccauaaugagauucuggagcuugaugaaaaagucgacgaucugagagcugacacgaucagcucucagauugagcucgccgugcugcuuagcaacgaaggaaucauuaauuccgaggaugaacaucugcucgcccuggagcggaagcugaaaaagaugcucggccccucugcugucgacaucgggaacggcuguuucgagaccaagcacaaaugcaaucagacaugccuggaucgcaucgccgcuggaaccuuuaacgccggcgaguucagccuuccuacauuugacucccugaauauuaccgcggccagccucaacgaugacgggcuggauaaucacacgauccugcuuuacuauucuaccgcugccuccagccucgcugugacacugaugcuggccauuuucaucguuuacauggugucuagagacaacgucuccuguagcauuugccucuga

SEQ ID NO: 219016 - RNA, 1755 nt, Artificial Sequence; identical to SEQ ID NO: 219015
  derived and/or modified CDS sequence (opt5) from hemagglutinin__InfluenzaB__AGQ16293

SEQ ID NO: 219017 - RNA, 1755 nt, Artificial Sequence; identical to SEQ ID NO: 219015
  derived and/or modified CDS sequence (opt5) from hemagglutinin__InfluenzaB__AGQ16294

SEQ ID NO: 219018 - RNA, 1758 nt, Artificial Sequence
  derived and/or modified CDS sequence (opt5) from hemagglutinin__InfluenzaB__AGQ16295
augaaggccaucauugugcugcucauggucguuaccagcaacgcugacagaaucugcacaggcauuacguccucuaauagcccccacguggugaaaaccgccacacagggggaggucaacgugaccggagcgaucccucugacaaccacaccgaccaagucccauuucgcuaaucuuaaaggcacggaaacccgggggaagcugugucccaaaugccucaacuguacagaucuggacguugcccuuggacgcccuaagugcaccggcaagauucccucugccagagugagcauccugcacgagguccggccugugacauccggguguuuucccaucaugcaugaucgcaccaaaauuagacaacucccuaaucugcugcggggauacgaacacauccgccucucuacgcauaacguuauuaaugcugagaacgccccgggcggccccuauaagaucgggacaagcggauccugcccuaaugugaccaacggcaauggguucuuugcuacaauggccugggcgguccccaaaaacgacaagaauaaaaccgaaaccaacccucugacaauugaggugcccuacaucuguacggaggaagaggaucagauuaccguguggggauuccacagcgacaaugaaacacagauggccaaacuuuauggcgauucuaagccgcagaaguuuaccuccagcgcuaacggggucacaacccacuacguuucucaaaucggaggcuucccuaaccagacggaggacggcgggcugccccaguccggaagaaucgugguggauuauaugguccaaaagagcggcaaaacagggaccauuaccuaccagcggggaauccuccugccucagaagguguggugcgccucuggccgcuccaaaguuauuaaggggagccuuccccugaucggagaggcugacugucuccaugaaaaauauggcggccugaauaaguccaagcccuacuacacaggggagcacgccaaagcgauuggaaacugcccuaucugggugaagaccccgcugaaacucgccaauggcacaaaguauagacccccugcuaaacugcuuaaggaacggggguuuuucggagccaucgcuggcuuucuggaagggggcugggagggaaugauugccggcuggcauggguacacgucucacggagcccacggcgucgcuguggcggccgaucucaagagcacccaggaggcuaucaacaaaauuacaaagaaucugaacucccuuagcgagcuggaaguuaaaaaucuccagcgccugucuggggccauggacgagcugcauaacgaaauccucgagcuggaugaaaagguggacgaccuuagagccgauaccauuuccagccaaaucgagcuggcuguccuccugucuaaugagggaaucauuaacagcgaagacgagcaccuucuggcccucgaacggaaacugaagaagaugcugggccccuccgcgguggagaucgggaauggcuguuucgaaacaaaacauaagugcaaccagaccugccucgaucgcauugcugccggaacguuugacgccggcgaguucucucugccuaccuuugauagccuuaauaucacagcugccucccugaacgacgaugggcucgacaaucacaccauucugcuguauuacagcacagcugccucuucccuugcggucacccucaugaucgccauuuucgugguuuauauggugagcagagauaacgucucuuguuccaucugccuguga

SEQ ID NO: 219019 - RNA, 1758 nt, Artificial Sequence; identical to SEQ ID NO: 218959
  derived and/or modified CDS sequence (opt5) from hemagglutinin__InfluenzaB__AGQ16296

SEQ ID NO: 219020 - RNA, 1755 nt, Artificial Sequence; identical to SEQ ID NO: 218926
  derived and/or modified CDS sequence (opt5) from hemagglutinin__InfluenzaB__AGQ16297

SEQ ID NO: 219021 - RNA, 1755 nt, Artificial Sequence
  derived and/or modified CDS sequence (opt5) from hemagglutinin__InfluenzaB__AGQ16298
augaaggccaucauugugcugcucauggucguuaccagcaacgcugacagaaucugcacaggcauuacguccucuaauagcccccacguggugaaaaccgccacacagggggaggucaacgugaccggaguuaucccucugacaaccacaccgaccaaguccuacuucgcgaaucuuaaaggcacgaagacccgggggaaacugugucccgauugccucaacuguacagaccuggauguggcucuuggacgcccuaugugcgucggcaccacacccucugccaaggccagcauucugcaugaagugagaccuguuaccuccggguguuuucccaucaugcacgaccggacgaagauccgccaacucgcuaaucugcugagaggauaugagaacauucggcucucuacacagaaugugaucgaugccgaaaaagcuccuggcggcccguaccgccuggggaccagcggauccugccccaacgccacaagcaagucuggcuucuuugcgaccauggccugggcugucccuaaagacaauaacaagaaugccaccaacccccuuacaguggaggugccuuauauuugugcugaaggggaggaucagaucacggucuggggauuccauuccgacaauaaaacccagaugaagaaccuguacggcgauagcaauccccaaaaguuuacaucuuccgccaacgggguuaccacacacuaugugagccagauuggaggcuucccggaccagaccgaggauggcgggcucccucagucuggaagaaucguggucgacuacaugaugcaaaaacccggcaagacggggacaauuguguaucagcggggaguucugcuuccucagaaaguguggugcgcguccggccgcagcaaggucaucaaagggucccugccccucaucggagaagccgauugucugcaugagaaguacggcggccugaacaaaucuaagcccuacuauaccggggaacacgcuaaggccauuggaaauugcccuaucugggugaaaaccccgcucaagcuggcuaacggcacaaaauacagacccccugccaagcugcugaaagagcggggguuuuucggagccauugcuggcuuucucgaagggggcugggaaggaaugaucgcgggcuggcacggguauaccagccauggagcccacggcguugcuauugccgccgaccugaaguccacacaggaggcuaucaauaagaucacgaaaaaccuuaauagccugucugaacucgaggugaagaaccugcaacgccuguccggggccauggacgaacuccauaaugagauucuggagcuugaugaaaaagucgacgaucugagagcggacaccaucagcucucagauugagcucgcugugcugcuuagcaacgaaggaaucauuaauuccgaggaugaacaccuucucgcccuggagcggaagcugaaaaagaugcucggccccucugccgucgacaucgggaacggcuguuucgagacaaagcacaaaugcaaucagaccugccuggaucgcaucgcugccggaacauuuaacgcuggcgaguucagccuuccuaccuuugacucccugaauauuacggccgcgagccucaacgaugacgggcuggauaaucauaccauccugcuuuacuauucuacagccgcuuccagccucgccgugacccugaugcuggcuauuuucaucguuuacauggugucuagagacaacgucuccuguagcauuugccucuga

SEQ ID NO: 219022 - RNA, 1755 nt, Artificial Sequence; identical to SEQ ID NO: 218971
  derived and/or modified CDS sequence (opt5) from hemagglutinin__InfluenzaB__AGQ16299

SEQ ID NO: 219023 - RNA, 1755 nt, Artificial Sequence; identical to SEQ ID NO: 218971
  derived and/or modified CDS sequence (opt5) from hemagglutinin__InfluenzaB__AGQ16300

SEQ ID NO: 219024 - RNA, 1755 nt, Artificial Sequence; identical to SEQ ID NO: 218926
  derived and/or modified CDS sequence (opt5) from hemagglutinin__InfluenzaB__AGQ16301

SEQ ID NO: 219025 - RNA, 1755 nt, Artificial Sequence; identical to SEQ ID NO: 218926
  derived and/or modified CDS sequence (opt5) from hemagglutinin__InfluenzaB__AGQ16302

SEQ ID NO: 219026 - RNA, 1755 nt, Artificial Sequence; identical to SEQ ID NO: 218926
  derived and/or modified CDS sequence (opt5) from hemagglutinin__InfluenzaB__AGQ16303

SEQ ID NO: 219027 - RNA, 1755 nt, Artificial Sequence; identical to SEQ ID NO: 218926
  derived and/or modified CDS sequence (opt5) from hemagglutinin__InfluenzaB__AGQ16305

SEQ ID NO: 219028 - RNA, 1758 nt, Artificial Sequence
  derived and/or modified CDS sequence (opt5) from hemagglutinin__InfluenzaB__AGQ16306
augaaggccaucauugugcugcucauggucguuaccagcaacgcugacagaaucugcacaggcauuacguccucuaauagcccccacguggugaaaaccgccacacagggggaagucaacgugaccggaguuaucccucugacaaccacaccgaccaagucccauuucgcgaaucuuaaaggcacggaaacccgggggaagcugugucccaaaugccucaacuguacagaucuggacguggcucuuggacgcccuaagugcaccggcaagauucccucugccagagucagcauccugcacgaggugcggccuguuacauccggguguuuucccaucaugcaugaucgcaccaaaauuagacaacucccuaaucugcugcggggauacgaacacauccgccucucuacgcauaacgugauuaaugccgagaacgcuccgggcggccccuauaagaucgggacaagcggauccugcccuaaugucaccaacggcaauggguucuuugccacaauggcuugggccgugcccaaaaacgacaagaauaaaaccgaaaccaacccucugacaauugaggugcccuacaucuguaaggagggagaagaucagauuacggucuggggcuuccacagcgacaaugagacccagauggcgaaacuuuauggggauucuaagccgcagaaguuuacauccagcgccaacggaguuaccacacacuacgugucucaaaucggcggcuucccuaaccagaccgaagacgggggacugccccaguccggcagaaucguggucgauuauauggugcagaaaagcgggaagacgggaacaauuaccuaccaacggggcauccuccugccucagaaaguuuggugcgcuucugggcgcuccaaggugauuaaaggaagccuuccccugaucggcgaggccgacugucuccaugagaaguauggcgggcugaauaaguccaaacccuacuacaccggagaacacgcuaaggccauuggcaacugcccuaucugggucaaaacaccgcugaagcucgcgaaugggaccaaauauagacccccugccaagcugcuuaaggagcggggauuuuucggcgcuaucgccggguuucuggaaggcggaugggagggcaugauugcuggguggcauggauacacaucucacggcgcccacgggguggccguugcugcggaucucaaaagcacgcaggaagccaucaacaagauuaccaaaaaucugaacucccuuagcgagcuggaggugaagaaucuccagcgccugucuggagcuauggacgaacugcauaacgagauccucgaacuggaugagaaagucgacgaccuuagagccgauacaauuuccagccaaaucgaacuggccgugcuccugucuaaugagggcaucauuaacagcgaggacgaacaccuucuggcucucgagcggaagcugaagaaaaugcuggggcccuccgccgucgaaaucggcaauggauguuucgagaccaagcauaaaugcaaccagacaugccucgaucgcauugcggcuggcaccuuugacgccggggaguucucucugccuacguuugauagccuuaauaucaccgccgcuucccugaacgacgauggacucgacaaucacacaauucugcuguauuacagcaccgccgcuucuucccuugccgugacacucaugaucgcgauuuucguuguguauauggucagcagagauaacgugucuuguuccaucugccuguga

SEQ ID NO: 219029 - RNA, 1755 nt, Artificial Sequence; identical to SEQ ID NO: 218926
  derived and/or modified CDS sequence (opt5) from hemagglutinin__InfluenzaB__AGQ16307

SEQ ID NO: 219030 - RNA, 1758 nt, Artificial Sequence; identical to SEQ ID NO: 218959
  derived and/or modified CDS sequence (opt5) from hemagglutinin__InfluenzaB__AGQ16308

SEQ ID NO: 219031 - RNA, 1755 nt, Artificial Sequence
  derived and/or modified CDS sequence (opt5) from hemagglutinin__InfluenzaB__AGQ16309
augaaggccaucauugugcugcucauggucguuaccagcaacgcugacagaaucugcacaggcauuacguccucuaauagcccccacguggugaaaaccgccacacagggggaggucaacgugaccggaguuaucccucugacaaccacaccgaccaaguccuacuucgcgaaucuuaaaggcacgaagacccgggggaaacugugucccgauugccucaacuguacagaccuggauguggcucuuggacgcccuaugugcgucggcaccacacccucugccaaggccagcauucugcaugaagugagaccuguuaccuccggguguuuucccaucaugcacgaccggacgaagauccgccaacucgcuaaucugcugagaggauaugagaacauucggcucucuacacagaaugugaucgaugccgaaaaagcuccuggcggcccguaccgccuggggaccagcggauccugccccaacgccacaagcaagucuggcuucuuugcgaccauggccugggcugucccuaaagacaauaacaagaaugccaccaacccccuuacaguggaggugccuuauauuugugcugaaggggaggaucagaucacggucuggggauuccauuccgacaauaaaacccagaugaagaaccuguacggcgauagcaauccccaaaaguuuacaucuuccgccaacgggguuaccacacacuaugugagccagauuggaggcuucccggaccagaccgaggauggcgggcucccucagucuggaagaaucguggcggacuacaugaugcaaaaacccggcaagacggggacaauugucuaucagcggggagugcugcuuccucagaaaguuuggugcgccuccggccgcagcaaggugaucaaagggucccugccccucaucggagaagcugauugucugcaugagaaguacggcggccugaacaaaucuaagcccuacuauaccggggaacacgccaaggcuauuggaaauugcccuaucugggucaaaaccccgcucaagcuggccaacggcacaaaauacagacccccugccaagcugcugaaagagcggggguuuuucggagcuauugcgggcuuucucgaagggggcugggaaggaaugaucgccggcuggcacggguauaccagccauggagcucacggcguggccguugccgcugaccugaaguccacacaggaggccauuaauaagaucacgaaaaaccuuaauagccugucugaacucgaggugaagaaccugcaacgccuguccggggcgauggacgaacuccauaaugagauccuggagcuugaugaaaaagucgacgaucugagagcugacaccauuagcucucagaucgagcucgccgugcugcuuagcaacgaaggaauuaucaauuccgaggaugaacaccuucucgcccuggagcggaagcugaaaaagaugcucggccccucugcugucgacauugggaacggcuguuucgagacaaagcacaaaugcaaucagaccugccuggaucgcaucgccgcuggaacauuuaacgccggcgaguucagccuuccuaccuuugacucccugaauaucacggcggccagccucaacgaugacgggcuggauaaucauaccauucugcuuuacuauucuacagcugccuccagccucgcugugacccugaugcuggccaucuucauuguuuacauggugucuagagacaacgucuccuguagcaucugccucuga

SEQ ID NO: 219032 - RNA, 1755 nt, Artificial Sequence
  derived and/or modified CDS sequence (opt5) from hemagglutinin__InfluenzaB__AGQ16310
augaaggccaucauugugcugcucauggucguuaccagcaacgcugacagaaucugcacaggcauuacguccucuaauagcccccacguggugaaaaccgccacacagggggaggucaacgugaccggaguuaucccucugacaaccacaccgaccaaguccuacuucgcgaaucuuaaaggcacgaagacccgggggaaacugugucccgauugccucaacuguacagaccuggauguggcucuuggacgcccuaugugcgucggcaccacacccucugccaaggccagcauucugcaugaagugagaccuguuaccuccggguguuuucccaucaugcacgaccggacgaagauccgccaacucgcuaaucugcugagaggauaugagaacauucggcucucuacacagaaugugaucgaugccgaaaaagcuccuggcggcccguaccgccuggggaccagcggauccugccccaacgccacaagcaagucuggcuucuuugcgaccauggccugggcugucccuaaagacaauaacaagaaugccaccaacccccuuacaguggaggugccuuauauuugugcugaaggggaggaucagaucacggucuggggauuccauuccgacaauaaaacccagaugaagaaccuguacggcgauagcaauccccaaaaguuuacaucuuccgccaacgggguuaccacacacuaugugagccagauuggaggcuucccggaccagaccgaggauggcgggcucccucagucuggaagaaucguggucgacuacaugaugcaaaaacccggcaagacggggacaauuguguaucagcggggaguucugcuuccucagaaaguguggugcgcguccggccgcagcaaggucaucaaagggucccugccccucaucggagaagccgauugucugcaugagaaguacggcggccugaacaaaucuaagcccuacuauaccggggaacacgcuaaggccauuggaaauugcccuaucugggugaaaaccccgcucaagcuggcuaacggcacaaaauacagacccccugccaagcugcugaaagagcggggguuuuucggagccauugcuggcuuucucgaagggggcugggaaggaaugguugcgggcuggcacggguauaccagccauggagcccacggcguggcugucgccgccgaccugaaguccacacaggaggcuaucaauaagauuacgaaaaaccuuaauagccugucugaacucgaggugaagaaccugcaacgccuguccggggccauggacgaacuccauaaugagauccuggagcuugaugaaaaagucgacgaucugagagcggacaccaucagcucucagauugagcucgcugugcugcuuagcaacgaaggaaucauuaauuccgaggaugaacaccuucucgcccuggagcggaagcugaaaaagaugcucggccccucugccguugacaucgggaacggcuguuucgagacaaagcacaaaugcaaucagaccugccuggaucgcauugcugccggaacauuuaacgcuggcgaguucagccuuccuaccuuugacucccugaauaucacggccgcgagccucaacgaugacgggcuggauaaucauaccauccugcuuuacuauucuacagccgcuuccagccucgccgugacccugaugcuggcuauuuucaucgucuacauggugucuagagacaacguuuccuguagcauuugccucuga

SEQ ID NO: 219033 - RNA, 1758 nt, Artificial Sequence; identical to SEQ ID NO: 218959
  derived and/or modified CDS sequence (opt5) from hemagglutinin__InfluenzaB__AGQ16311

SEQ ID NO: 219034 - RNA, 1755 nt, Artificial Sequence; identical to SEQ ID NO: 218926
  derived and/or modified CDS sequence (opt5) from hemagglutinin__InfluenzaB__AGQ16312

SEQ ID NO: 219035 - RNA, 1755 nt, Artificial Sequence
  derived and/or modified CDS sequence (opt5) from hemagglutinin__InfluenzaB__AGQ16313
augaaggccaucauugugcugcucauggucguuaccagcaacgcugacagaaucugcacaggcauuacguccucuaauagcccccacguggugaaaaccgccacacagggggaggucaacgugaccggaguuaucccucugacaaccacaccgaccaaguccuacuucgcgaaucuuaaaggcacgaagacccgggggaaacugugucccgauugccucaacuguacagaccuggauguggcucuuggacgcccuaugugcgucggcaccacacccucugccaaggccagcauucugcaugaagugagaccuguuaccuccggguguuuucccaucaugcacgaccggacgaagauccgccaacucgcuaaucugcugagaggauaugagaacauucggcucucuacacagaaugugaucgaugccgaaaaagcuccuggcggcccguaccgccuggggaccagcggauccugccccaacgccacaagcaagucuggcuucuuugcgaccauggccugggcugucccuaaagacaauaacaagaaugccaccaacccccuuacaguggaggugccuuauauuugugcugaaggggaggaucagaucgccgucuggggauuccauuccgacaauaaaacgcagaugaagaaccuguacggcgauagcaauccccaaaaguuuaccucuuccgcgaacgggguuacaacccacuaugugagccagauuggaggcuucccggaccagacagaggauggcgggcucccucagucuggaagaaucguggucgacuacaugaugcaaaaacccggcaagaccgggacgauuguguaucagcggggaguucugcuuccucagaaaguguggugcgccuccggccgcagcaaggucaucaaagggucccugccccucaucggagaagcugauugucugcaugagaaguacggcggccugaacaaaucuaagcccuacuauacaggggaacacgccaaggcuauuggaaauugcccuaucugggugaaaaccccgcucaagcuggccaacggcaccaaauacagacccccugccaagcugcugaaagagaagggguuuuucggagcuauugcgggcuuucucgaagggggcugggaaggaaugaucgccggcuggcacggguauacaagccauggagcucacggcguugccguggccgcugaccugaaguccacccaggaggccauuaauaaaaucacaaagaaccuuaauagccugucugaacucgaggucaaaaaccugcaacggcuguccggggcgauggacgaacuccauaaugagauccuggagcuugaugaaaagguggacgaucugcgcgcugacacgauuagcucucagaucgagcucgccguccugcuuagcaacgaaggaauuaucaauuccgaggaugaacaccuucucgcccuggagagaaaacugaagaagaugcucggccccucugcuguggacauugggaacggcuguuucgagaccaaacacaagugcaaucagacaugccuggaucggaucgccgcuggaaccuuuaacgccggcgaguucagccuuccuacauuugacucccugaauaucaccgcggccagccucaacgaugacgggcuggauaaucauacgauucugcuuuacuauucuaccgcugccuccagccucgcuguuacacugaugcuggccaucuucauuguguacauggucucucgcgacaacguguccuguagcaucugccucuga

SEQ ID NO: 219036 - RNA, 1758 nt, Artificial Sequence
  derived and/or modified CDS sequence (opt5) from hemagglutinin__InfluenzaB__AGQ16314
augaaggccaucauugugcugcucauggucguuaccagcaacgcugacagaaucugcacaggcauuacguccucuaauagcccccacguggugaaaaccgccacacagggggaggucaacgugaccggaguuaucccucugacaaccacaccgaccaagucccauuucgcgaaucuuaaaggcacggaaacccgggggaagcugugucccaaaugccucaacuguacagaucuggacguggcucuuggacgcccuaagugcaccggcaagauucccucugccagagucagcauccugcacgaggugcggccuguuacauccggguguuuucccaucaugcaugaucgcaccaaaauuagacaacucccuaaucugcugcggggauacgaacacauccgccucucuacgcauaacgugauuaaugccgagaacgcuccgggcggccccuauaagaucgggacaagcggauccugcccuaaugucaccaacggcaauggguucuuugccacaauggcuugggccgugcccaaaaacgacaagaauaaaaccgaaaccaacccucugacaauugaggugcccuacaucuguacggaggaagaggaucagauuaccgucuggggauuccacagcgacaaugaaacacagauggcgaaacuuuauggcgauucuaagccgcagaaguuuaccuccagcgccaacgggguuacaacccacuacgugucucaaaucggaggcuucccuaaccagacggaggacggcgggcugccccaguccggaagaaucguggucgauuauauggugcaaaagagcggcaaaacagggaccauuaccuaccagcggggaauccuccugccucagaagguuuggugcgcuucuggccgcuccaaagugauuaaggggagccuuccccugaucggagaggccgacugucuccaugaaaaauauggcggccugaauaaguccaagcccuacuacacaggggagcacgcuaaagccauuggaaacugcccuaucugggucaagaccccgcugaaacucgcgaauggcacaaaguauagacccccugccaaacugcuuaaggaacggggguuuuucggagcuaucgccggcuuucuggaagggggcugggagggaaugauugcuggcuggcauggguacacgucucacggagcccacggcguggccguugcugcggaucucaagagcacccaggaggccaucaacaaaauuacaaagaaucugaacucccuuagcgagcuggaagugaaaaaucuccagcgccugucuggggcuauggacgagcugcauaacgaaauccucgagcuggaugaaaaggucgacgaccuuagagccgauaccauuuccagccaaaucgagcuggccgugcuccugucuaaugagggaaucauuaacagcgaagacgagcaccuucuggcucucgaacggaaacugaagaagaugcugggccccuccgccgucgagaucgggaauggcuguuucgaaacaaaacauaagugcaaccagaccugccucgaucgcauugcggcuggaacguuugacgccggcgaguucucucugccuaccuuugauagccuuaauaucacagccgcuucccugaacgacgaugggcucgacaaucacaccauucugcuguauuacagcacagccgcuucuucccuugccgugacccucaugaucgcgauuuucguuguguauauggucagcagagauaacgugucuuguuccaucugccuguga

SEQ ID NO: 219037 - RNA, 1755 nt, Artificial Sequence
  derived and/or modified CDS sequence (opt5) from hemagglutinin__InfluenzaB__AGQ16315
augaaggccaucauugugcugcucauggucguuaccagcaacgcugacagaaucugcacaggcauuacguccucuaauagcccccacguggugaaaaccgccacacagggggaggucaacgugaccggaguuaucccucugacaaccacaccgaccaaguccuacuucgcgaaucuuaaaggcacgaagacccgggggaaacugugucccgauugccucaacuguacagaccuggauguggcucuuggacgcccuaugugcgucggcaccacacccucugccaaggccagcauucugcaugaagugagaccuguuaccuccggguguuuucccaucaugcacgaccggacgaagauccgccaacucgcuaaucugcugagaggauaugagaacauucggcucucuacacagaccgugaucgaugccgaaaaagcuccuggcggcccguaccgccuggggacaagcggauccugccccaaugccaccagcaagucuggcuucuuugcgaccauggccugggcugucccuaaagacaacaauaagaacgccacaaauccccuuacgguggaggugccuuauauuugugcugaaggggaggaucagaucaccgucuggggauuccauuccgacaacaaaacacagaugaagaaucuguacggcgauagcaacccccaaaaguuuaccucuuccgccaaugggauuacaacccacuauguuagccagaucggaggcuucccggaccagacggaggauggcgggcucccucagucuggaagaauugugguggacuacaugaugcaaaaacccggcaagacagggaccaucgucuaucagcggggagugcugcuuccucagaaaguuuggugcgcguccggccgcagcaaggugaucaaagggucccugccccucauuggagaagccgauugucugcaugagaaguacggcggccugaacaaaucuaagcccuacuauaccggggaacacgcuaaggccaucggaaacugcccuauuugggucaaaacaccgcucaagcuggcuaauggcaccaaauacagacccccugccaagcugcugaaagagcggggguuuuucggagccaucgcuggcuuucucgaagggggcugggaaggaaugauugcgggcuggcacggguauacaagccauggagcccacggcguggcuguugccgccgaccugaaguccacgcaggaggcuaucaacaagaucaccaaaaaucuuaacagccugucugaacucgaggugaagaaucugcaacgccuguccggggccauggacgaacuccauaacgagauucuggagcuugaugaaaaagucgacgaucugagagcggacacaaucagcucucagauugagcucgcugugcugcuuagcaaugaaggaaucauuaacuccgaggaugaacaccuucucgcccuggagcggaagcugaaaaagaugcucggccccucugccgucgacaucgggaauggcuguuucgagaccaagcacaaaugcaaccagacaugccuggaucgcaucgcugccggaaccuuuaaugcuggcgaguucagccuuccuacguuugacucccugaacauuaccgccgcgagccucaaugaugacgggcuggauaaccauaucauucugcuuuacuauucuacagccgcuuccagccucgccgugacccugaugcuggcuaucuucauuguuuacauggugucuagagacaaugucuccuguagcaucugccucuga

SEQ ID NO: 219038 - RNA, 1755 nt, Artificial Sequence; identical to SEQ ID NO: 218926
  derived and/or modified CDS sequence (opt5) from hemagglutinin__InfluenzaB__AGQ16316

SEQ ID NO: 219039 - RNA, 1755 nt, Artificial Sequence; identical to SEQ ID NO: 218926
  derived and/or modified CDS sequence (opt5) from hemagglutinin__InfluenzaB__AGQ16317

SEQ ID NO: 219040 - RNA, 1758 nt, Artificial Sequence; identical to SEQ ID NO: 218717
  derived and/or modified CDS sequence (opt5) from hemagglutinin__InfluenzaB__AGQ16318

SEQ ID NO: 219041 - RNA, 1755 nt, Artificial Sequence
  derived and/or modified CDS sequence (opt5) from hemagglutinin__InfluenzaB__AGQ16319
augaaggccaucauugugcugcucauggucguuaccagcaacgcugacagaaucugcacaggcauuacguccucuaauagcccccacguggugaaaaccgccacacagggggaagucaacgugaccggaguuaucccucugacaaccacaccgaccaaguccuacuucgcgaaucuuaaaggcacgaagacccgggggaaacugugucccggaugccucaacuguacagaucuggacguggcucuuggccgcccuaugugcgucgggaccacacccucugccaaggccagcauucugcaugaagugagaccuguuaccuccggauguuuucccaucaugcacgaucggacgaagauccgccaacucgcuaaucugcugagaggcuaugagaacauucggcucucuacacagaaugugaucgacgccgaaaaagcuccuggcgggccguaccgccugggaaccagcggcuccugccccaacgccacaagcaagucuggguucuuugcgaccauggccugggcugucccuaaagauaauaacaagaaugccaccaacccccuuacaguggaggugccuuauauuugugcugaaggagaggaccagaucgccgucuggggcuuccauuccgauaauaaaacgcagaugaagaaccuguacggggacagcaauccccaaaaguuuaccucuuccgcgaacggaguuacaacccacuaugugagccagauuggcggcuucccggaucagacagaggacgggggacucccucagucuggcagaaucguggucgauuacaugaugcaaaaacccgggaagaccggaacgauuguguaucagcggggcguucugcuuccucagaaaguguggugcgccuccgggcgcagcaaggucaucaaaggaucccugccccucaucggcgaagcugacugucugcaugagaaguacggcgggcugaacaaaucuaagcccuacuauacaggagaacacgccaaggcuauuggcaauugcccuaucugggugaaaaccccgcucaagcuggccaacgggaccaaauacagacccccugccaaacuucugaaagagcggggauuuuucggcgcuauugcgggguuucucgagggcggaugggaaggcaugaucgccggguggcacggauauacaagccauggcgcucacgggguugccguggccgcugaucugaaguccacccaggaggccauuaauaagaucacaaagaaccuuaauagccugucugaacucgaggucaagaaccugcaacgccuguccggagcgauggacgaacuccauaaugagauccuggagcuugacgaaaaaguggaugaccugagagcugauacgauuagcucucagaucgagcucgccguccugcuuagcaacgaaggcauuaucaauuccgaggacgaacaucugcucgcccuggagcggaagcugaaaaagaugcucgggcccucugcuguggauauuggcaacggauguuucgagaccaagcacaaaugcaaucagacaugccuggaccgcaucgccgcuggcaccuuuaacgccggggaguucagccuuccuacauuugauucccugaauaucaccgcggccagccucaacgacgauggacuggacaaucacacgauucugcuuuacuauucuaccgcugccuccagccucgcuguuacacugaugcuggccaucuucauuguguacauggucucuagagauaacguguccuguagcaucugccucuga

SEQ ID NO: 219042 - RNA, 1755 nt, Artificial Sequence; identical to SEQ ID NO: 218971
  derived and/or modified CDS sequence (opt5) from hemagglutinin__InfluenzaB__AGQ16320

SEQ ID NO: 219043 - RNA, 1755 nt, Artificial Sequence; identical to SEQ ID NO: 218926
  derived and/or modified CDS sequence (opt5) from hemagglutinin__InfluenzaB__AGQ16321

SEQ ID NO: 219044 - RNA, 1755 nt, Artificial Sequence; identical to SEQ ID NO: 218926
  derived and/or modified CDS sequence (opt5) from hemagglutinin__InfluenzaB__AGQ16322

SEQ ID NO: 219045 - RNA, 1758 nt, Artificial Sequence
  derived and/or modified CDS sequence (opt5) from hemagglutinin__InfluenzaB__AGQ16323
augaaggccaucauugugcugcucauggucguuaccagcaacgcugacagaaucugcacaggcauuacguccucuaauagcccccacguggugaaaaccgccacacagggggaggucaacgugaccggaguuaucccucugacaaccacaccgaccaagucccauuucgcgucucuuaaaggcacggaaacccgggggaagcugugucccaaaugccucaauuguacagaucuggacguggcucuuggacgcccuaagugcaccggcaagauucccagcgccagagucuccauccugcacgaggugcggccuguuacaucuggguguuuucccaucaugcaugaucgcaccaaaauuagacaacucccuaaccugcugcggggauacgaacacauccgccucagcacgcauaaugugauuaacgccgaggacgcuccgggcggccccuauaagaucgggacauccggaagcugcccuaaugucaccaacggcaauggguucuuugccacaauggcuugggccgugcccaaaaacgauaagaauaaaaccgcgaccaacccucugacaauugaagugcccuacaucuguacggagggagaggaccagauuaccgucuggggcuuccacucugauaaugaaacacagauggccaaacuuuauggggacuccaagccgcagaaguuuaccagcucugcuaacggaguuacaacccacuacgugucccaaaucggcggcuucccuaaucagacggaggaugggggacugccccagagcggcagaaucguggucgacuauauggugcagaagucugggaaaacaggaaccauuaccuaccaacggggcauccuccugccucagaagguuuggugcgccuccgggcgcagcaaagugauuaagggaucccuuccccugaucggcgaagcugauugucuccaugagaaauauggcgggcugaacaagucuaagcccuacuacacaggagagcacgccaaagcgauuggcaacugcccuaucugggucaagaccccgcugaaacucgccaaugggacaaaguauagacccccugcuaaacugcuuaaggaacggggauuuuucggcgccaucgcuggguuucuggagggcggaugggaaggcaugauugccggguggcauggauacacgagccacggcgcccacgggguggcuguugcggccgaccucaaguccacccaggaggcuaucaacaaaauuacaaagaaucugaacagccuuucugaacuggaggugaaaaaucuccagcgccuguccggagccauggaugagcugcauaacgaaauccucgagcuggacgaaaaggucgacgaucuuagagccgacaccauuagcucucaaaucgagcuggcugugcuccugagcaaugaaggcaucauuaacuccgaggaugagcaccuucuggcccucgaacggaaacugaagaagaugcuggggcccucugcggucgagaucggcaauggauguuucgaaacaaaacauaagugcaaccagaccugccucgaccgcauugcugccggcacguuugaugccggggaguucagccugccuaccuuugacucccuuaauaucacagcugccagccugaacgaugacggacucgauaaucacaccauucugcuguauuacucuacagcugccuccagccuugcggugacccucaugaucgccauuuucguuguguauauggucucuagagacaacguguccuguagcaucugccuguga

SEQ ID NO: 219046 - RNA, 1755 nt, Artificial Sequence; identical to SEQ ID NO: 218926
  derived and/or modified CDS sequence (opt5) from hemagglutinin__InfluenzaB__AGQ16324

SEQ ID NO: 219047 - RNA, 1755 nt, Artificial Sequence; identical to SEQ ID NO: 218926
  derived and/or modified CDS sequence (opt5) from hemagglutinin__InfluenzaB__AGQ16325

SEQ ID NO: 219048 - RNA, 1755 nt, Artificial Sequence; identical to SEQ ID NO: 218926
  derived and/or modified CDS sequence (opt5) from hemagglutinin__InfluenzaB__AGQ16326

SEQ ID NO: 219049 - RNA, 1755 nt, Artificial Sequence; identical to SEQ ID NO: 218926
  derived and/or modified CDS sequence (opt5) from hemagglutinin__InfluenzaB__AGQ16327

SEQ ID NO: 219050 - RNA, 1758 nt, Artificial Sequence
  derived and/or modified CDS sequence (opt5) from hemagglutinin__InfluenzaB__AGQ16328
augaaggccaucauugugcugcucauggucguuaccagcaacgcugacagaaucugcacaggcauuacguccucuaauagcccccacguggugaaaaccgccacacagggggaggucaacgugaccggaguuaucccucugacaaccacaccgaccaagucccauuucgcgaaucuuaaaggcacggaaacccgggggaagcugugucccaaaugccucaacuguacagaucuggacguggcucuuggacgcccuaagugcaccggcaagacacccucugccagagucagcauucugcacgaggugcggccuguuaccuccggguguuuucccaucaugcaugaucgcacgaaaaucagacaacucccuaaucugcugcggggauacgaacacauucgccucucuacacauaacgugaucaaugccgagaacgcuccgggcggccccuauaagauugggaccagcggauccugcccuaaugucacaaacggcaauggguucuuugccaccauggcuugggccgugcccaaaaacgacaagaauaaaaccgcgacaaacccucugacgaucgaagugcccuacauuuguaccgagggagaggaucagaucacagucuggggcuuccacagcgacaaugaaacccagauggccaagcuguauggggauucuaacccgcagaaguuuacauccagcgcuaacggaguuaccacgcacuacgugucucaaauuggcggcuucccuaaucagacagaggacgggggacugccccaguccggcagaaucguggucgauuauauggugcagaaaagcgggaagaccggaaccaucacauaccaacggggcauucuccugccucagaaaguuuggugcgccucugggcgcuccaaggugaucaaaggaagccuuccccugauuggcgaagcugacugucuccaugagaaguauggcgggcugaacaaauccaagcccuacuacaccggagagcacgccaaggcgaucggcaauugcccuauuugggucaaaacaccgcugaagcucgccaacgggacgaaauauagacccccugcuaagcugcuuaaagaacggggauuuuucggcgccaucgcuggguuucuggagggcggaugggaaggcaugaucgccggguggcauggauacaccucucacggcgcccacgggguggcuguugcggccgaucucaagagcacacaggaggcuauuaauaagaucaccaaaaaccuuaauucccuuagcgaacuggaggugaagaaccuccagcgccugucuggagccauggacgagcugcauaaugaaauucucgagcuggaugaaaaagucgacgaccuuagagccgauacaaucuccagccaaauugagcuggcugugcuccugucuaacgaaggcaucaucaauagcgaggacgagcaccuucuggcccucgaacggaagcugaaaaagaugcuggggcccuccgcggucgagauuggcaacggauguuucgaaaccaagcauaaaugcaaucagacgugccucgaucgcaucgcugccggcaccuuugacgccggggaguucucucugccuacauuugauagccuuaacauuaccgcugccucccugaaugacgauggacucgacaaccacacaauccugcuguauuacagcaccgcugccucuucccuugcggugacgcucaugauugccaucuucguuguguauauggucagcagagauaacgugucuuguuccauuugccuguga

SEQ ID NO: 219051 - RNA, 1758 nt, Artificial Sequence
  derived and/or modified CDS sequence (opt5) from hemagglutinin__InfluenzaB__AGX15487
augaaggccaucauugugcugcucauggucguuaccagcaacgcugacagaaucugcacaggcauuacguccucuaauagcccccacguggugaaaaccgccacacagggggaagucaacgugaccggaguuaucccucugacaaccacaccgaccaagucccauuucgcgaaucuuaaaggcacgaagacccgggggaaacugugucccaagugccucaacuguacagaucuggacguggcucuuggacgcccuaagugcaccggcaauauucccucugccaaagucagcauccugcacgaagugagaccuguuacauccggguguuuucccaucaugcaugaucggaccaagauucgccaacucccuaaccugcugagaggauacgagcacauccggcucucuacgcauaaugugauuaacgccgaaaaagcuccgggcggccccuauaagaucgggacaagcggauccugcccuaaugucaccaacggcaauggguucuuugccacaauggcuugggccgugcccaaaaacgacaauaacaagaccgcgaccaauagccugacaauugaggugccuuacaucuguacggaaggagaggaucagauuaccgucuggggcuuccacucugacaacgagacacagauggccaaacuuuauggggauuccaaaccccagaaguuuaccagcucugcuaacggaguuacaacccacuacgugucccaaaucggcggcuucccgaaucagacggaagacgggggacugccucagagcggccgcaucguggucgauuauauggugcagaaaucugggaagacaggaaccauuaccuaccaaagaggcauccuccugccccagaaaguuuggugcgccuccgggcggagcaaggugauuaaaggaucccuuccucugaucggcgaggcugacugucuccaugaaaaguauggcgggcugaacaagucuaaacccuacuacacaggagagcacgccaaggcgauuggcaauugccccaucugggucaaaaccccucugaagcucgccaacgggacaaaauaucgcccgcccgcuaagcugcuuaaggagagaggauuuuucggcgccaucgcuggguuucuggaaggcggaugggagggcaugauugccggguggcauggauacacgagccacggcgcccacgggguggcuguugcggccgaucucaaauccacccaggaagcuaucaauaagauuacaaagaaccugaauagccuuucugagcuggaagugaagaaccuccagcggcuguccggagccauggacgagcugcauaaugagauccucgaacuggaugagaaagucgacgaccuucgcgccgauaccauuagcucucaaaucgaacuggcugugcuccugagcaacgagggcaucauuaauuccgaagacgagcaccuucuggcccucgagagaaagcugaagaaaaugcuggggccuucugcggucgaaaucggcaacggauguuucgagacaaagcauaaaugcaaucagaccugccucgaucggauugcugccggcacguuugacgccggggaguucagccugcccaccuuugauucccuuaacaucacagcugccagccugaaugacgauggacucgacaaccacaccauucugcuguauuacucuacagcugccuccagccuugcggugacccucaugaucgccauuuucguuguguauauggucucucgcgauaacguguccuguagcaucugccuguga

SEQ ID NO: 219052 - RNA, 1758 nt, Artificial Sequence; identical to SEQ ID NO: 219051
  derived and/or modified CDS sequence (opt5) from hemagglutinin__InfluenzaB__AGX15496

SEQ ID NO: 219053 - RNA, 1758 nt, Artificial Sequence
  derived and/or modified CDS sequence (opt5) from hemagglutinin__InfluenzaB__AGX15518
augaaggccaucauugugcugcucauggucguuaccagcaacgcugacagaaucugcacaggcauuacguccucuaauagcccccacguggugaaaaccgccacacagggggaggucaacgugaccggaguuaucccucugacaaccgcgccgacaaagucccauuucgcuaaucuuaaaggcaccaagacgcgggggaaacugugucccaagugccucaacuguaccgaucuggacguggcccuuggacgcccuaagugcacaggcaauauucccucugccgaagucagcauccugcacgaggugagaccuguuaccuccggguguuuucccaucaugcaugaucggacaaaaauucgccaacucccuaaccugcugagaggauacgaacacauccggcucucuacccauaaugugauuaacgcugagaaggccccgggcggccccuauaaaaucgggacgagcggauccugcccuaaugucacaaacggcaauggguucuuugcuaccauggccugggcggugcccaagaacgacaauaacaaaacagccaccaauagccugaccauugaagugccuuacaucuguacagagggagaggaucagauuacgaucuggggcuuccacucugacaacgaaacccagauggcuaagcuguauggggauuccaagccccagaaauuuacaagcucugccaacggagucaccacacacuacguuucccaaaucggcggcuucccgaaucagaccgaggacgggggacugccucagagcggccgcauugugguggauuauaugguccagaagcccgggaaaacgggaacaaucaccuaccaaagaggcauucuccugccucagaagguguggugcgcuucugggcgguccaaaguuaucaagggaagccuuccccugauuggcgaagccgacugucuccaugagaaauauggcgggcugaacaaguccaagcccuacuacaccggagagcacgcgaaagccaucggcaauugcccuaucugggugaagacaccgcugaaacucgcuaacgggaccaaguauagacccccugccaaacugcuuaaggaacgcggauuuuucggcgcuauugccggguuucuggagggcggaugggaaggcaugaucgccggguggcauggauacacaucucacggcgcucacggggucgcgguggccgcugaucucaagagcacgcaggaggccauuaauaaaaucaccaagaaccuuaauucccuuagcgaacuggagguuaaaaaccuccagcggcugucuuccgccauggacgagcugcauaaugaaauucucgagcuggaugaaaagguggacgaccuucgcgcugauacaaucagcucucaaaucgagcuggccguccuccugagcaacgaaggaauuaucaauuccgaggacgagcaccuucuggcgcucgaaagaaaacugaagaagaugcugggccccucugcuguggagauugggaacggcuguuucgaaaccaaacauaagugcaaucagacaugccucgaucggaucgccgccggaaccuuugacgcuggcgaguucagccugccuacguuugauucccuuaacauuaccgccgcuagccugaaugacgaugggcucgacaaccacacaauccugcuguauuacucuaccgccgcguccagccuugccgucacacucaugauugcuaucuucgugguuuauauggugucucgcgauaacgucuccuguagcaucugccuguga

SEQ ID NO: 219054 - RNA, 1758 nt, Artificial Sequence
  derived and/or modified CDS sequence (opt5) from hemagglutinin__InfluenzaB__AGX15529
augaaggccaucauugugcugcucauggucguuaccagcaacgcugacagagugugcacaggcaucacguccucuaauagcccccacguggucaaaaccgccacacagggggaggugaacguuaccggagugauuccucugacaaccacaccgaccaagucccauuucgcgaaucuuaaaggcacgaagacccgggggaaacugugucccaagugccucaacuguacagaucuggacgucgcucuuggacgcccuaagugcaccggcaauauccccucugccgaagugagcauucuguacgagguuagaccugugacauccggguguuuucccaucaugcacgaucggaccaaaauccgccaacucccuaaccugcugagaggauaugaacauauucggcucucuacgcacaaugucaucaacgccgagaaggcuccgggcggccccuacaaaauugggacaagcggauccugcccuaaugugaccaacggcaauggguucuuugccacaauggcuugggccgugcccaagaacgacaauaacaaaaccgcgaccaauagccugacaaucgaagucccuuauauuuguacggagggagaggaucagaucaccauuuggggcuuccauucugacaacgaaacacagauggccaagcuguacggggauuccaagccccagaaauuuaccagcucugcuaacggaguuacaacccacuaugugucccaaaucggcggcuucccgaaucagacggaggacgggggacugccucagagcggccgcaucguggucgauuacauggugcagaagucugggaaaacaggaaccauuaccuaucaaagaggcauccuccugccccagaagguuuggugcgccuccgggcggagcaaagugauuaagggaacacuuccucugaucggcgaagcugacugucuccacgagaaauacggcgggcugaacaaguccaagcccuacuauaccggagagcaugccaaagcgauuggcaauugccccaucugggucaagacaccucugaaacucgccaacgggacgaaguaccgcccgcccgcuaaacugcuuaaggaaagaggauuuuucggcgccaucgcuggguuucuggagggcggaugggaaggcaugauugccggguggcacggauauaccucucauggcgcccacgggguggcuguugcggccgaucucaagagcacacaggaggcuaucaauaaaauuaccaagaaccuuaauucccuuagcgaacuggaggugaaaaaccuccagcggcugucuggagccauggacgagcugcacaaugaaauccucgagcuggaugaaaaggucgacgaccuucgcgccgauacaauuuccagccaaaucgagcuggcugugcuccugucuaacgaaggcaucauuaauagcgaggacgagcaucuucuggcccucgaaagaaaacugaagaagaugcuggggccuuccgcggucgagaucggcaacggauguuucgaaaccaaacacaagugcaaucagacgugccucgaucggauugcugccggcaccuuugacgccggggaguucucucugcccacauuugauagccuuaacaucaccgcugccucccugaaugacgauggacucgacaaccauacaauucugcuguacuauagcaccgcugccucuucccuugcggugacgcucaugaucgccauuuucguuguguacauggucagccgcgauaacgugucuuguuccaucugccuguga

SEQ ID NO: 219055 - RNA, 1758 nt, Artificial Sequence; identical to SEQ ID NO: 218645
  derived and/or modified CDS sequence (opt5) from hemagglutinin__InfluenzaB__AGX15541

SEQ ID NO: 219056 - RNA, 1758 nt, Artificial Sequence
  derived and/or modified CDS sequence (opt5) from hemagglutinin__InfluenzaB__AGX15552
augaaggccaucauugugcugcucauggucguuaccagcaacgcugacagaaucugcacaggcauuacguccucuaauagcccccacguggugaaaaccgccacacagggggaagucaacgugaccggaguuaucccucugacaaccacaccgaccaagucccauuucgcgaaucuuaaaggcacggaaacccgggggaagcugugucccaaaugccucaacuguacagaucuggacguggcucuuggacgcccuaagugcaccggcaauauucccucugccagagucagcauccugcacgaggugcggccuguuacauccggguguuuucccaucaugcaugaucgcaccaagauuagacaacucccuaaccugcugcggggauacgaacacauccgccucucuacgcauaaugugauuaacgccaaaaaugcuccgggcggccccuauaagaucgggacaagcggauccugcccuaacgucaccaauggcaacggguucuuugccacaauggcuugggccgugcccaaaaaugacaacaauaagaccgcgaccaacagccugacaauugaggugccuuacaucuguacggaaggagaggaucagauuaccgucuggggcuuccacucugacaacgagacacagauggccaaacuuuauggggauuccaagccccagaaguuuaccagcucugcuaauggaguuacaacccacuacgugucccaaaucggcggcuucccgaaccagacggaagacgggggacugccucagagcggcagaaucguggucgauuauauggugcagaaaucugggaagacaggaaccauuaccuaccaacggggcauccuccugccccagaaaguuuggugcgccuccgggcgcagcaaggugauuaaaggaucccuuccucugaucggcgaggcugacugucuccaugaaaaguauggcgggcugaauaaaucuaagcccuacuacacaggagagcacgccaaggcgauuggcaacugccccaucugggucaaaaccccucugaagcucgccaaugggacaaaauauagaccgcccgcuaagcugcuuaaagagcggggauuuuucggcgccaucgcuggguuucuggaaggcggaugggagggcaugauugccggguggcauggauacacgagccacggcgcccacgggguggcuguugcggccgaucucaaguccacccaggaagcuaucaacaagauuaccaaaaaucugaacagccuuucugagcuggaagugaagaaucuccagcgccuguccggagccauggacgagcugcauaacgagauccucgaacuggaugagaaagucgacgaccuuagagccgauacaauuagcucucaaaucgaacuggcugugcuccugagcaaugagggcaucauuaacuccgaagacgagcaccuucuggcccucgagcggaagcugaaaaagaugcuggggccuucugcggucgaaaucggcaauggauguuucgagacaaagcauaaaugcaaccagaccugccucgaucgcauugcugccggcacguuugacgccggggaguucagccugcccaccuuugauucccuuaauaucacagcugccagccugaacgacgauggacucgacaaccacaccauucugcuguauuacucuacagcugccuccagccuugcggugacccucaugaucgccauuuucguuguguauauggucucuagagauaauguguccuguagcaucugccuguga

SEQ ID NO: 219057 - RNA, 1758 nt, Artificial Sequence; identical to SEQ ID NO: 218654
  derived and/or modified CDS sequence (opt5) from hemagglutinin__InfluenzaB__AGX15563

SEQ ID NO: 219058 - RNA, 1758 nt, Artificial Sequence; identical to SEQ ID NO: 218654
  derived and/or modified CDS sequence (opt5) from hemagglutinin__InfluenzaB__AGX15574

SEQ ID NO: 219059 - RNA, 1758 nt, Artificial Sequence
  derived and/or modified CDS sequence (opt5) from hemagglutinin__InfluenzaB__AGX15607
augaaggccaucauugugcugcucauggucguuaccagcaacgcugacagaaucugcacaggcauuacguccucuaauagcccccacguggugaaaaccgccacacagggggaggucaacgugaccggaguuaucccucugacaaccacaccgaccaagucccauuucgcgaaucuuaaaggcacggaaacccgggggaagcugugucccaaaugccucaacuguacagaucuggacguggcucuuggacgcccuaagugcaccggcaauacacccucugccagagucagcauucugcacgaggugcggccuguuaccuccggguguuuucccaucaugcaugaucgcacgaagaucagacaacucccuaaccugcugcggggauacgaacacauucgccucucuacacauaaugugaucaacgccgagaaugcuccgggcggccccuauaaaauugggaccagcggauccugcccuaacgucacaaauggcaacggguucuuugccaccauggcuugggccgugcccaagaaugacaacaauaaaaccgcgacaaacagccugacgaucgaagugccuuacauuuguaccgagggagaggaucagaucacagucuggggcuuccacucugacaacgaaacccagauggccaaacuuuauggggauuccaagccccagaaguuuacaagcucugcuaauggaguuaccacgcacuacgugucccaaauuggcggcuucccgaaccagacagaggacgggggacugccucagagcggcagaaucguggucgauuauauggugcagaagucugggaaaaccggaaccaucacauaccaacggggcauucuccugccccagaagguuuggugcgccuccgggcgcagcaaagugaucaagggaucccuuccucugauuggcgaagcugacugucuccaugagaaauauggcgggcugaauaagucuaaacccuacuacaccggagagcacgccaaggcgaucggcaacugccccauuugggucaagacaccucugaaacucgccaaugggacgaaguauagaccgcccgcuaaacugcuuaaggaacggggauuuuucggcgccaucgcuggguuucuggagggcggaugggaaggcaugaucgccggguggcauggauacaccagccacggcgcccacgggguggcuguugcggccgaucucaaauccacacaggaggcuauuaacaagaucaccaagaaucugaacagccuuucugaacuggaggugaaaaaucuccagcgccuguccggagccauggacgagcugcauaacgaaauucucgagcuggaugaaaaggucgacgaccuuagagccgauacaaucagcucucaaauugagcuggcugugcuccugagcaaugaaggcaucaucaacuccgaggacgagcaccuucuggcccucgaacggaaacugaagaaaaugcuggggccuucugcggucgagauuggcaauggauguuucgaaaccaagcauaagugcaaccagacgugccucgaucgcaucgcugccggcaccuuugacgccggggaguucagccugcccacauuugauucccuuaauauuaccgcugccagccugaacgacgauggacucgacaaccacacaauccugcuguauuacucuaccgcugccuccagccuugcggugacgcucaugauugccaucuucguuguguauauggucucuagagauaauguguccuguagcauuugccuguga

SEQ ID NO: 219060 - RNA, 1758 nt, Artificial Sequence
  derived and/or modified CDS sequence (opt5) from hemagglutinin__InfluenzaB__AGX15629
augaaggccaucauugugcugcucauggucguuaccagcaacgcugacagaaucugcacaggcauuacguccucuaauagcccccacguggugaaaaccgccacacagggggaggucaacgugaccggaguuaucccucugacaaccacaccgaccaagucccauuucgcgaaucuuaaaggcacggaaacccgggggaagcugugucccaaaugccucaacuguacagaucuggacguggcucuuggacgcccuaagugcaccggcaauauucccucugccagagucagcauccugcacgaggugcggccuguuacauccggguguuuucccaucaugcaugaucgcaccaagauuagacaacucccuaaccugcugcggggauacgaacacauccgccucucuacgcauaaugugauuaacgccgagaaugcuccgggcggccccuauaaaaucgggacaagcggauccugcccuaacgucaccaauggcaacggguucuuugccacaauggcuugggccgugcccaagaaugacaacaauaaaaccgcgaccaacagccugacaauugaagugccuuacaucuguacggagggagaggaucagauuaccgucuggggcuuccacucugacaacgaaauccagauggccaaacuuuauggggauuccaagccccagaaguuuacaagcucugcuaauggaguuaccacacacuacgugucccaaaucggcggcuucccgaaccagaccgaggacgggggacugccucagagcggcagaauuguggucgauuauauggugcagaagucugggaaaacgggaacaaucaccuaccaacggggcauucuccugccccagaagguuuggugcaccuccgggcgcagcaaagugaucaagggaucccuuccucugauuggcgaagccgacugucuccaugagaaauauggcgggcugaauaagucuaaacccuacuacacaggagagcacgcuaaggccaucggcaacugccccaucugggucaagaccccucugaaacucgcgaaugggacaaaguauagaccgcccgccaaacugcuuaaggaacggggauuuuucggcgcuauugccggguuucuggagggcggaugggaaggcaugaucgcuggguggcauggauacacgagccacggcgcccacgggguggccguugcugcggaucucaaauccacccaggaggccauuaacaagaucacaaagaaucugaacagccuuucugaacuggaggugaaaaaucuccagcgccuguccggagcuauggacgagcugcauaacgaaauucucgagcuggaugaaaaggucgacgaccuuagagccgauaccaucagcucucaaaucgagcuggccgugcuccugagcaaugaaggcauuaucaacuccgaggacgagcaccuucuggcucucgaacggaaacugaagaaaaugcuggggccuucugccgucgagauuggcaauggauguuucgaaacaaagcauaagugcaaccagaccugccucgaucgcaucgcggcuggcacguuugacgccggggaguucagccugcccaccuuugauucccuuaauauuacagccgcuagccugaacgacgauggacucgacaaccacaccauccugcuguauuacucuacagccgcuuccagccuugccgugacccucaugauugcgaucuucguuguguauauggucucuagagauaauguguccuguagcaucugccuguga

SEQ ID NO: 219061 - RNA, 1758 nt, Artificial Sequence
  derived and/or modified CDS sequence (opt5) from hemagglutinin__InfluenzaB__AGX15651
augaaggccaucauugugcugcucauggucguuaccagcaacgcugacagaaucugcacaggcauuacguccucuaauagcccccacguggugaaaaccgccacacagggggaggucaacgugaccggaguuaucccucugacaaccacaccgaccaagucccauuucgcgaaucuuaaaggcacggaaacccgggggaagcugugucccaaaugccucaacuguacagaucuggacguggcucuuggacgcccuaagugcaccggcaagauucccucugccagagucagcauccugcacgaggugcggccuguuacauccggguguuuucccaucaugcaugaucgcaccaaaauuagacaacucccuaaucugcugcggggauacgaacacauccgccucucuacgcauaacgugauuaaugccgagaacgcuccgggcggccccuauaagaucgggacaagcggauccugcccuaauauuaccaacggcaauggguucuuugccacaauggcuugggccguccccaaaaacgacaagaauaaaaccgcgaccaacccucugacaaucgaagugcccuacauuuguacggagggagaggaucagaucaccguguggggcuuccacagcgacaaugaaacacagauggccaaacuuuauggggauucuaagccgcagaaguuuaccuccagcgcuaacggagucacaacccacuacguuucucaaaucggcggcuucccuaaccagacggaggacgggggacugccccaguccggcagaauugugguggauuauaugguccaaaagagcgggaaaacaggaaccaucaccuaccagcggggcauucuccugccucagaagguguggugcgccucugggcgcuccaaaguuaucaagggaagccuuccccugauuggcgaagcugacugucuccaugagaaauauggcgggcugaauaaguccaagcccuacuacacaggagagcacgccaaagcgaucggcaacugcccuaucugggugaagaccccgcugaaacucgccaaugggacaaaguauagacccccugcuaaacugcuuaaggaacggggauuuuucggcgccauugcuggguuucuggagggcggaugggaaggcaugaucgccggguggcauggauacacgucucacggcgcccacggggucgcuguggcggccgaucucaagagcacccaggaggcuauuaacaaaaucacaaagaaucugaacucccuuagcgaacuggagguuaaaaaucuccagcgccugucuggagccauggacgagcugcauaacgaaauucucgagcuggaugaaaagguggacgaccuuagagccgauaccaucuccagccaaaucgagcuggcuguccuccugucuaaugaaggcauuaucaacagcgaggacgagcaccuucuggcccucgaacggaaacugaagaagaugcuggggcccuccgcgguggagauuggcaauggauguuucgaaacaaaacauaagugcaaccagaccugccucgaucgcaucgcugccggcacguuugacgccggggaguucucucugccuaccuuugauagccuuaauauuacagcugccucccugaacgacgauggacucgacaaucacaccauccugcuguauuacagcacagcugccucuucccuugcggucacccucaugauugccaucuucgugguuuauauggugagcagagauaacgucucuuguuccaucugccuguga

SEQ ID NO: 219062 - RNA, 1758 nt, Artificial Sequence; identical to SEQ ID NO: 219061
  derived and/or modified CDS sequence (opt5) from hemagglutinin__InfluenzaB__AGX15675

SEQ ID NO: 219063 - RNA, 1758 nt, Artificial Sequence; identical to SEQ ID NO: 219061
  derived and/or modified CDS sequence (opt5) from hemagglutinin__InfluenzaB__AGX15686

SEQ ID NO: 219064 - RNA, 1758 nt, Artificial Sequence
  derived and/or modified CDS sequence (opt5) from hemagglutinin__InfluenzaB__AGX15697
augaaggccaucauugugcugcucauggucguuaccagcaacgcugacagaaucugcacaggcauuacguccucuaauagcccccacguggugaaaaccgccacacagggggaggucaacgugaccggaguuaucccucugacaaccacaccgaccaagucccauuucgcgaaucuuaaaggcacggaaacccgggggaagcugugucccaaaugccucaacuguacagaucuggacguggcucuuggacgcccuaagugcaccggcaagauucccucugccagagucagcauccugcacgaggugcggccuguuacauccggguguuuucccaucaugcaugaucgcaccaaaauuagacaacucccuaaucugcugcggggauacgaacacauccgccucucuacgcauaacgugauuaaugccgagaacgcuccgggcggccccuauaagaucgggacaagcggauccugcccuaauauuaccaacggcaauggguucuuugccacaauggcuugggccguccccaaaaacgacaagaauaaaaccgcgaccaacccucugacaaucgaagugcccuacauuuguacggagggagaggaucagaucaccguguggggcuuccacagcgacaaugaaaaccagauggccaagcuguauggggauucuaagccgcagaaauuuacauccagcgcuaacggagucaccacacacuacguuucucaaaucggcggcuucccuaaucagaccgaggacgggggacugccccaguccggcagaauugugguggauuauaugguccaaaagagcgggaaaacgggaacaaucaccuaccagcggggcauucuccugccucagaagguguggugcgccucugggcgcuccaaaguuaucaagggaagccuuccccugauuggcgaagcugacugucuccaugagaaauauggcgggcugaacaaguccaagcccuacuacaccggagagcacgccaaagcgaucggcaauugcccuaucugggugaagacaccgcugaaacucgccaacgggaccaaguauagacccccugcuaaacugcuuaaggaacggggauuuuucggcgccauugcuggguuucuggagggcggaugggaaggcaugaucgccggguggcauggauacacaucucacggcgcccacggggucgcuguggcggccgaucucaagagcacgcaggaggcuauuaauaaaaucaccaagaaccuuaauucccuuagcgaacuggagguuaaaaaccuccagcgccugucuggagccauggacgagcugcauaaugaaauucucgagcuggaugaaaagguggacgaccuuagagccgauacaaucuccagccaaaucgagcuggcuguccuccugucuaacgaaggcauuaucaauagcgaggacgagcaccuucuggcccucgaacggaaacugaagaagaugcuggggcccuccgcgguggagauuggcaacggauguuucgaaaccaaacauaagugcaaucagacaugccucgaucgcaucgcugccggcaccuuugacgccggggaguucucucugccuacguuugauagccuuaacauuaccgcugccucccugaaugacgauggacucgacaaccacacaauccugcuguauuacagcaccgcugccucuucccuugcggucacacucaugauugccaucuucgugguuuauauggugagcagagauaacgucucuuguuccaucugccuguga

SEQ ID NO: 219065 - RNA, 1758 nt, Artificial Sequence; identical to SEQ ID NO: 219061
  derived and/or modified CDS sequence (opt5) from hemagglutinin__InfluenzaB__AGX15708

SEQ ID NO: 219066 - RNA, 1758 nt, Artificial Sequence; identical to SEQ ID NO: 219061
  derived and/or modified CDS sequence (opt5) from hemagglutinin__InfluenzaB__AGX15719

SEQ ID NO: 219067 - RNA, 1758 nt, Artificial Sequence; identical to SEQ ID NO: 218586
  derived and/or modified CDS sequence (opt5) from hemagglutinin__InfluenzaB__AGX15730

SEQ ID NO: 219068 - RNA, 1758 nt, Artificial Sequence; identical to SEQ ID NO: 219061
  derived and/or modified CDS sequence (opt5) from hemagglutinin__InfluenzaB__AGX15741

SEQ ID NO: 219069 - RNA, 1758 nt, Artificial Sequence; identical to SEQ ID NO: 219061
  derived and/or modified CDS sequence (opt5) from hemagglutinin__InfluenzaB__AGX15753

SEQ ID NO: 219070 - RNA, 1758 nt, Artificial Sequence
  derived and/or modified CDS sequence (opt5) from hemagglutinin__InfluenzaB__AGX15764
augaaggccaucauugugcugcucauggucguuaccagcaacgcugacagaaucugcacaggcauuacguccucuaauagcccccacguggugaaaaccgccacacagggggaggucaacgugaccggaguuaucccucugacaaccacaccgaccaagucccauuucgcgaaucuuaaaggcacggaaacccgggggaagcugugucccaaaugccucaacuguacagaucuggacguggcucuuggacgcccuaagugcaccggcaagauucccucugccagagucagcauccugcacgaggugcggccuguuacauccggguguuuucccaucaugcaugaucgcaccaaaauuagacaacucccuaaucugcugcggggauacgaacacauccgccucucuacgcauaacgugauuaaugccgagaacgcuccgggcggccccuauaagaucgggacaagcggauccugcccuaauauuaccaacggcaauggguucuuugccacaauggcuugggccguccccaaaaacgacaagaauaaaaccgcgaccaacccucugacaaucgaagugcccuacauuuguacggagggagaggaucagaucaccguguggggcuuccacagcgacaaugaaacacagauggccaaacuuuauggggauucuaagccgcagaaguuuaccuccagcgcuaacggagucacaacccacuacguuucucaaaucggcggcuucccuaaccagacggaggacgggggacugccccaguccggcagaauugugguggauuauaugguccaaaagagcgggaaaacaggaaccaucaccuaccagcggggcauucuccugccucagaagguguggugcgccucugggcgcuccaaaguuaucaagggaagccuuccccugauuggcgaagcugacugucuccaugagaaauauggcgggcugaauaaguccaagcccuacuacacaggagagcacgccaaagcgaucggcaacugcccuaucugggugaagaccccgcugaaacucgccaaugggacaaaguauagacccccugcuaaacugcuuaaggaacggggauuuuucggcgccauugcuggguuucuggagggcggaugggaaggcaugaucgccggguggcauggauacacgucucacggcgcccacggggucgcuguggcggccgaucucaagagcacccaggaggcuauuaacaaaaucacaaagaaucugaacucccuuagcgaacuggagguuaaaaaucuccagcgccugucuggagccauggacgagcugcauaacgaaauucucgagcuggaugaaaagguggacgaccuuagagccgauaccaucuccagccaaaucgagcuggcuguccuccugucuaaugaaggcauuaucaacagcgaggacgagcaccuucuggcccucgaacggaaacugaagaagaugcuggggcccuccgcgguggagauuggcaauggauguuucgaaacaaaacauaagugcaaccagaccugccucgaucgcaucgcugccggcacguuugacgccggggaguucucucugccuaccuuugauagccuuaauauuacagcugccucccugaacgacgauggacucgacaaucacaccauccugcuguauuacagcacagcugccucuucccuugcgauuacccucaugaucgccaucuucgucguguauaugguuagcagagauaacgugucuuguuccauuugccuguga

SEQ ID NO: 219071 - RNA, 1755 nt, Artificial Sequence
  derived and/or modified CDS sequence (opt5) from hemagglutinin__InfluenzaB__AGX15775
augaaggccaucauugugcugcucauggucguuaccagcaacgcugacagaaucugcacaggcauuacguccucuaauagcccccacguggugaaaaccgccacacagggggaggucaacgugaccggaguuaucccucugacaaccacaccgaccaaguccuacuucgcgaaucuuaaaggcacgcggacccgcgggaagcugugucccgauugccucaacuguacagaccuggauguggcucuuggaagaccuaugugcgucggcaccacacccucugccaaagccagcauucugcaugaagugcggccuguuaccuccggguguuuucccaucaugcacgaccgcacgaagaucagacaacucccuaaucugcugcggggauaugagaacauucgccucucuacacagaaugugaucgaugcugaaaaggccccgggcggccccuacagacuggggaccagcggauccugcccuaacgcuacaagcaaaucuggcuucuuugccaccauggcgugggccguccccaaggacaauaacaaaaaugcuaccaacccucuuacaguggaggugcccuauauuuguacggaaggggaggaucagaucaccgucuggggauuccauuccgacaauaagauucagaugaaaaaccuguacggcgauagcaauccgcaaaaguuuacaucuuccgccaacgggguuaccacacacuaugugagccagaucggaucuuucccugaccagaccgaggauggcggccucccccaguccgggcggauuguggucgacuacaugaugcaaaagccuggaaaaacgggcacaaucguguaucagcgcgggguucugcuuccccagagaguguggugcgcuagcggacgguccaaggucaucaaaggcucucugccccucauuggggaagccgauugucugcaugagaaguacggaggccugaacaaaagcaagccuuacuauaccggcgaacacgcgaaagccaucgggaauugcccgauuugggugaagacaccccucaagcuggcuaacggaaccaaauaccgcccucccgccaagcugcugaaagagagaggcuuuuucggggcuaucgccggauuucucgagggcgggugggaaggcaugauugccggauggcacggcuauaccucccauggggcucacggaguugcgguggccgcugaccuuaagagcacacaggaggccaucaauaaaaucacgaagaaccuuaauucucuguccgaacucgaggucaagaaccugcaacggcugagcggcgccauggacgaacuccauaaugagauucuggagcuugaugaaaaaguggacgaucugcgcgcugacaccaucucuagccagauugagcucgccguccugcuuuccaacgaagggaucauuaauucugaggaugaacaucugcucgcgcuggagagaaagcugaaaaagaugcucggaccuagcgcuguggagaucggcaacggguguuucgaaacaaaacacaagugcaaucagaccugccuggaccggaucgccgccggcacauuuaacgcuggagaguucucccuucccaccuuugauagccugaauauuacggccgcuucucucaacgacgauggccuggacaaucacaccauccugcuuuacuauuccacagccgcgagcucucucgccguuacccugaugcuggcuauuuucaucguguacauggucuccagagauaacgugagcuguuccauuugccucuga

SEQ ID NO: 219072 - RNA, 1758 nt, Artificial Sequence
  derived and/or modified CDS sequence (opt5) from hemagglutinin__InfluenzaB__AGX15786
augaaggccaucauugugcugcucauggucguuaccagcaacgcugacagaaucugcacaggcauuacguccucuaauagcccccacguggugaaaaccgccacacagggggaggucaacgugaccggaguuaucccucugacaaccacaccgaccaagucccauuucgcgaaucuuaaaggcacggaaacccgggggaagcugugucccaaaugccucaacuguacagaucuggacguggcucuuggacgcccuaagugcaccggcaagauucccucugccagagucagcauccugcacgaggugcggccuguuacauccggguguuuucccaucaugcaugaucgcaccaaaauuagacaacucccuaaucugcugcggggauacgaacacauccgccucucuacgcauaacgugauuaaugccgagaacgcuccgggcggccccuauaagaucgggacaagcggauccugcccuaauauuaccaacggcaauggguucuuugccacaauggcuugggccguccccaaaaacgacaagaauaaaaccgcgaccaacccucugacaaucgaagugcccuacauuuguacggagggagaggaucagaucaccguguggggcuuccacagcgacaaugaaacacagauggccaaacuuuauggggauucuaagccgcagaaguuuaccuccagcgcuaacggagucacaacccacuacguuucucaaaucggcggcuucccuaaccagacggaggacgggggacugccccaguccggcagaauugugguggauuauaugguccaaaagagcgggaaaacaggaaccaucaccuaccagcggggcauucuccugccucagaagguguggugcgccucugggcgcuccaaaguuaucaagggaagccuuccccugauuggcgaagcugacugucuccaugagaaauauggcgggcugaauaaguccaagcccuacuacacaggagagcacgccaaagcgaucggcaacugcccuaucugggugaagaccccgcugaaacucgccaaugggacaaaguauagacccccugcuaaacugcuuaaggaacggggauuuuucggcgccauugcuggguuucuggagggcggaugggaaggcaugaucgccggguggcauggauacacgucucacggcgcccacggggucgcuguggcggccgaucucaagagcacccaggaggcuauuaacaaaaucacaaagaaucugaacucccuuagcgaacuggagguuaaaaaucuccagcgccugucuggagccauggacgagcugcauaacgaaauucucgagcuggaugaaaagguggacgaccuuagagccgauaccaucuccagccaaaucgagcuggcuguccuccugucuaaugaaggcauuaucaacagcgaggacgagcaccuucuggcccucgaacggaaacugaagaagaugcuggggcccuccgcgguggagauuggcaauggauguuucgaaacaaaacauaagugcaaccagaccugccucgaucgcaucgcugccggcacguuugacgccggggaguucuuucugccuaccuucgauucucuuaauauuacagcugccagccugaacgacgauggacucgacaaucacaccauccugcuguauuacuccacagcugccagcucucuugcggucacccucaugauugccaucuucgugguuuauaugguguccagagauaacgucagcuguucuaucugccuguga

SEQ ID NO: 219073 - RNA, 1758 nt, Artificial Sequence; identical to SEQ ID NO: 219061
  derived and/or modified CDS sequence (opt5) from hemagglutinin__InfluenzaB__AGX15797

SEQ ID NO: 219074 - RNA, 1758 nt, Artificial Sequence
  derived and/or modified CDS sequence (opt5) from hemagglutinin__InfluenzaB__AGX15808
augaaggccaucauugugcugcucauggucguuaccagcaacgcugacagaaucugcacaggcauuacguccucuaauagcccccacguggugaaaaccgccacacagggggaggucaacgugaccggaguuaucccucugacaaccacaccgaccaagucccauuucgcgaaucuuaaaggcacggaaacccgggggaagcugugucccaaaugccucaacuguacagaucuggacguggcucuuggacgcccuaagugcaccggcaagauucccucugccagagucagcauccugcacgaggugcggccuguuacauccggguguuuucccaucaugcaugaucgcaccaaaauuagacaacucccuaaucugcugcggggauacgaacacauccgccucucuacgcauaacgugauuaaugccgagaacgcuccgggcggccccuauaagaucgggacaagcggauccugcccuaaugucaccaacggcaauggguucuuugccacaauggcuugggccgugcccaaaaacgacaagaauaaaaccgcgaccaacccucugacaauugaagugcccuacaucuguacggagggagaggaucagauuaccgucuggggcuuccacagcgacaaugaaacacagauggccaaacuuuauggggauucuaagccgcagaaguuuaccuccagcgcuaacggaguuacaacccacuacgugucucaaaucggcggcuucccuaaccagacggaggacgggggacugccccaguccggcagaaucguggucgauuauauggugcaaaagagcgggaaaacaggaaccauuaccuaccagcggggcauccuccugccucagaagguuuggugcgccauugggcgcucuaaagugaucaagggaucccuuccccugauuggcgaagcugacugucuccaugagaaauauggcgggcugaauaagagcaagcccuacuacacaggagagcacgccaaagcgaucggcaacugcccuaucugggucaagaccccgcugaaacucgccaaugggacaaaguauagacccccugcuaaacugcuuaaggaacggggauuuuucggcgccauugcuggguuucuggagggcggaugggaaggcaugaucgccggguggcauggauacacgucccacggcgcccacgggguggcuguugcggccgaucucaagucuacccaggaggcuauuaacaaaaucacaaagaaucugaacagccuuuccgaacuggaggugaaaaaucuccagcgccugagcggagccauggacgagcugcauaacgaaauucucgagcuggaugaaaaggucgacgaccuuagagccgauaccaucucuucccaaaucgagcuggcugugcuccugagcaaugaaggcauuaucaacucugaggacgagcaccuucuggcccucgaacggaaacugaagaagaugcuggggcccagcgcggucgagauuggcaauggauguuucgaaacaaaacauaagugcaaccagaccugccucgaucgcaucgcugccggcacguuugacgccggggaguucucccugccuaccuuugauucucuuaauauuacagcugccagccugaacgacgauggacucgacaaucacaccauccugcuguauuacuccacagcugccagcucucuugcggugacccucaugauugccaucuucguuguguauauggucuccagagauaacgugagcuguucuaucugccuguga

SEQ ID NO: 219075 - RNA, 1758 nt, Artificial Sequence; identical to SEQ ID NO: 218680
  derived and/or modified CDS sequence (opt5) from hemagglutinin__InfluenzaB__AGX15830

SEQ ID NO: 219076 - RNA, 1758 nt, Artificial Sequence; identical to SEQ ID NO: 218680
  derived and/or modified CDS sequence (opt5) from hemagglutinin__InfluenzaB__AGX15841

SEQ ID NO: 219077 - RNA, 1758 nt, Artificial Sequence; identical to SEQ ID NO: 218680
  derived and/or modified CDS sequence (opt5) from hemagglutinin__InfluenzaB__AGX15852

SEQ ID NO: 219078 - RNA, 1758 nt, Artificial Sequence; identical to SEQ ID NO: 218680
  derived and/or modified CDS sequence (opt5) from hemagglutinin__InfluenzaB__AGX15863

SEQ ID NO: 219079 - RNA, 1758 nt, Artificial Sequence
  derived and/or modified CDS sequence (opt5) from hemagglutinin__InfluenzaB__AGX15874
augaaggccaucauugugcugcucauggucguuaccagcaacgcugacagaaucugcacaggcauuacguccucuaauagcccccacguggugaaaaccgccacacagggggaggucaacgugaccggaguuaucccucugacaaccacaccgaccaagucccauuucgcgaaucuuaaaggcacggaaacccgggggaagcugugucccaaaugcccuaacuguacagaucucgacguggcucugggacgccccaagugcaccggcaagauuccuucugccagagucagcauccuucacgaggugcggcccguuacauccggguguuuuccuaucaugcaugaucgcaccaaaauuagacaacugccgaaucuccugcggggauacgaacacauccgccugucuacgcauaacgugauuaaugccgagaacgcucccggcggcccuuauaagaucgggacaagcggauccugccccaaugucaccaacggcaauggguucuuugccacaauggcuugggccgugccuaaaaacgacaagaauaaaaccgcgaccaacccccucacaauugaagugccguacaucuguacggagggagaggaucagauuaccgucuggggcuuccacagcgacaaugaaacacagauggccaagcuguauggggauucuaagccucagaaauuuaccuccagcgcuaacggaguuacaacccacuacgugucucaaaucggcggcuuccccaaccagacggaggacgggggacuuccucaguccggcagaaucguggucgauuauauggugcaaaagagcgggaaaacaggaaccauuaccuaccagcggggcauccugcucccccagaagguuuggugcgccucugggcgcuccaaagugauuaagggaagccugccccuuaucggcgaagcugacugucugcaugagaaauauggcgggcucaauaaguccaagccuuacuacacaggagagcacgccaaagcgauuggcaacugcccgaucugggucaagacaccccugaaacuggccaaugggaccaaguauagaccucccgcuaaacuccugaaggaacggggauuuuucggcgccaucgcuggguuucuugagggcggaugggaaggcaugauugccggguggcauggauacacgucucacggcgcccacgggguggcuguugcggccgaucucaagagcacccaggaggcuaucaacaaaauuacaaagaaucugaacucccugagcgaacuugaggugaaaaaucugcagcgccucucuggagccauggacgagcugcauaacgaaauccuggagcucgaugaaaaggucgacgaccugagagccgauaccauuuccagccaaaucgagcuugcugugcugcucucuaaugaaggcaucauuaacagcgaggacgagcaucugcuugcccuggaacggaaacucaagaagaugcuggggccuuccgcggucgagaucggcaauggauguuucgaaacaaaacacaagugcaaccagaccugccuggaucgcauugcugccggcacguuugacgccggggaguucucucuccccaccuuugauagccugaauaucacagcugccucccuuaacgacgauggacugaauaaccacaccauucuccuguauuacagcacagcugccucuucccuggcggugacccuuaugaucgccauuuucguuguguauauggucagcagagacaacgugucuuguuccaucugccucuga

SEQ ID NO: 219080 - RNA, 1758 nt, Artificial Sequence; identical to SEQ ID NO: 218680
  derived and/or modified CDS sequence (opt5) from hemagglutinin__InfluenzaB__AGX15885

SEQ ID NO: 219081 - RNA, 1758 nt, Artificial Sequence
  derived and/or modified CDS sequence (opt5) from hemagglutinin__InfluenzaB__AGX15896
augaaggccaucauugugcugcucauggucguuaccagcaacgcugacagaaucugcacaggcauuacguccucuaauagcccccacguggugaaaaccgccacacagggggaggucaacgugaccggaguuaucccucugacaaccacaccgaccaagucccauuucgcgaaucuuaaaggcacggaaacccgggggaagcugugucccaaaugcccuaacuguacagaucucgacguggcucugggacgccccaagugcaccggcaagauuccuucugccagagucagcauccuucacgaggugcggcccguuacauccggguguuuuccuaucaugcaugaucgcaccaaaauuagacaacugccgaaucuccugcggggauacgaacacauccgccugucuacgcauaacgugauuaaugccgagaacgcucccggcggcccuuauaagaucgggacaagcggauccugccccaaugucaccaacggcaauggguucuuugccacaauggcuugggccgugccuaaaaacgacaagaauaaaaccgcgaccaacccccucacaauugaagugccguacaucuguacggagggagaggaucagauuaccgucuggggcuuccacagcgacaaugaaacacagauggccaagcuguauggggauucuaagccucagaaauuuaccuccagcgcuaacggaguuacagcccacuacgugucucaaaucggcggcuuccccaaccagaccgaggacgggggacuuccucaguccggcagaaucguggucgauuauauggugcaaaagagcgggaaaacgggaacaauuaccuaccagcggggcauccugcucccccagaagguuuggugcgcuucugggcgcuccaaagugauuaagggaagccugccccuuaucggcgaagccgacugucugcaugagaaauauggcgggcucaauaaguccaagccuuacuacaccggagagcacgcgaaagccauuggcaacugcccgaucugggucaagacaccccugaaacuggcuaaugggaccaaguauagaccucccgccaaacuccugaaggaacggggauuuuucggcgcuaucgccggguuucuugagggcggaugggaaggcaugauugccggguggcauggauacacaucucacggcgcucacgggguggcgguugccgcugaucucaagagcacgcaggaggccaucaacaaaauuaccaagaaucugaacucccugagcgaacuugaggugaaaaaucugcagcgccucucuggagccauggacgagcugcauggcgaaauccuggagcucgaugaaaaggucgacgaccugagagcugauacaauuuccagccaaaucgagcuugccgugcugcucucuaacgaagggaucauuaauagcgaggacgagcaucugcuugcgcuggaacggaaacucaagaagaugcugggcccuuccgcugucgagaucggaaacggcuguuucgaaaccaaacacaagugcaaucagacaugccuggaucgcauugccgccgggaccuuugacgcuggagaguucucucuccccacguuugauagccugaacaucaccgccgcuucccuuaaugacgauggccuggacaaccacacaauucuccuguauuacagcaccgccgcgucuucccuggccgugacacuuaugaucgcuauuuucguuguguauauggucagcagagauaaugugucuuguuccaucugccucuga

SEQ ID NO: 219082 - RNA, 1758 nt, Artificial Sequence; identical to SEQ ID NO: 218680
  derived and/or modified CDS sequence (opt5) from hemagglutinin__InfluenzaB__AGX15907

SEQ ID NO: 219083 - RNA, 1758 nt, Artificial Sequence; identical to SEQ ID NO: 218680
  derived and/or modified CDS sequence (opt5) from hemagglutinin__InfluenzaB__AGX15918

SEQ ID NO: 219084 - RNA, 1758 nt, Artificial Sequence
  derived and/or modified CDS sequence (opt5) from hemagglutinin__InfluenzaB__AGX15929
augaaggccaucauugugcugcucauggucguuaccagcaacgcugacagaaucugcacaggcauuacguccucuaauagcccccacguggugaaaaccgccacacagggggaagucaacgugaccggaguuaucccucugacaaccacaccgaccaagucccauuucgcgaaucuuaaaggcacggaaacccgggggaagcugugucccaaaugccucaacuguacagaucuggacguggcucuuggacgcccuaagugcaccggcaagauucccucugccagagucagcauccugcacgaggugcggccuguuacauccggguguuuucccaucaugcaugaucgcaccaaaauuagacaacucccuaaucugcugcggggauacgaacacauccgccucucuacgaacaaugugauuaacgccgagaaugcuccgggcggccccuauaagaucgggacaagcggauccugcccuaacgucaccaauggcaacggguucuuugccacaauggcuugggccgugcccaaaaaugacaagaacaaaaccgcgaccaauccucugacaauugaagugcccuacaucuguacggagggagaggaucagauuaccgucuggggcuuccauagcgacaacgaaacacagauggccaagcuguauggggauucuaagccgcagaaauuuaccuccagcgcuaacggaguuacaacccacuacgugucucaaaucggcggcuucccuaaucagacggaggacgggggacugccccaguccggcagaaucguggucgauuauauggugcagaaaagcgaaaagacagggaccauuaccuaccaacggggaauccuccugccucagaagguuuggugcgccucuggccgcuccaaagugauuaaggggagccuuccccugaucggagaggcugacugucuccacgagaaauauggcggccugaacaaguccaagcccuacuacacaggggaacaugccaaagcgauuggaaauugcccuaucugggucaagaccccgcugaaacucgccaacggcacaaaguauagacccccugcuaaacugcuuaaggagcggggguuuuucggagccaucgcuggcuuucuggaagggggcugggagggaaugauugccggcuggcacggguacacgucucauggagcccacggcguggcuguugcggccgaucucaagagcacccaggaagcuaucaauaaaauuacaaagaaccuuaauucccuuagcgagcuggaggugaaaaaccuccagcgccugucuggggccauggacgaacugcacaaugagauccucgaacuggaugagaaggucgacgaccuuagagccgauaccauuuccagccaaaucgaacuggcugugcuccugucuaacgagggaaucauuaauagcgaggacgaacaucuucuggcccucgagcggaaacugaagaagaugcugggccccuccgcggucgaaaucgggaacggcuguuucgagacaaaacacaagugcaaucagaccugccucgaucgcauugcugccggaacguuugacgccggcgaguucucucugccuaccuuugauagccuuaacaucacagcugccucccugaaugacgaugggcucgacaaccauaccauucugcuguauuacagcacagcugccucuucccuugcggugacccucaugaucgccauuuucguuguguauauggucagcagagauaacgugucuuguuccaucugccuguga

SEQ ID NO: 219085 - RNA, 1758 nt, Artificial Sequence; identical to SEQ ID NO: 218680
  derived and/or modified CDS sequence (opt5) from hemagglutinin__InfluenzaB__AGX15940

SEQ ID NO: 219086 - RNA, 1758 nt, Artificial Sequence
  derived and/or modified CDS sequence (opt5) from hemagglutinin__InfluenzaB__AGX15962
augaaggccaucauugugcugcucauggucguuaccagcaacgcugacagaaucugcacaggcauuacguccucuaauagcccccacaucgugaaaaccgccacacagggggaggugaacgucaccggagugauuccucugacaaccacaccgaccaagucccauuucgcgaaucuuaaaggcacggaaacccgggggaagcugugucccaaaugccucaacuguacagaucuggacguugcucuuggacgcccuaagugcaccggcaagauccccucugccagagugagcauccugcacgagguccggccugugacauccggguguuuucccauuaugcaugaucgcaccaaaaucagacaacucccuaaucugcugcggggauacgaacacauucgccucucuacgcauaacguuaucaaugccgagaacgcuccgggcggccccuauaagauugggacaagcggauccugcccuaauaucaccaacggcaauggguucuuugccacaauggcuugggccgugcccaaaaacgacaagaauaaaaccgcgaccaacccucugacaauugaaguccccuacaucuguacggagggagaggaucagaucaccguguggggcuuccacagcgacaaugaaacacagauggccaaacuuuauggggauucuaagccgcagaaguuuaccuccagcgcuaacggagugacaacccacuacgucucucaaauuggcggcuucccuaaccagacggaggacgggggacugccccaguccggcagaaucguuguggauuauaugaugcaaaagagcgggaaaacaggaaccauuaccuaccagcggggcauccuccugccucagaagguguggugcgccucugggcgcuccaaagucauuaagggaagccuuccccugaucggcgaagcugacugucuccaugagaaauauggcgggcugaauaaguccaagcccuacuacacaggagagcacgccaaagcgaucggcaacugcccuauuugggugaagaccccgcugaaacucgccaaugggacaaaguauagacccccugcuaaacugcuuaaggaacggggauuuuucggcgccaucgcuggguuucuggagggcggaugggaaggcaugauugccggguggcauggauacacgucucacggcgcccacgggguugcuguggcggccgaucucaagagcacccaggaggcuaucaacaaaauuacaaagaaucugaacucccuuagcgaacuggaggucaaaaaucuccagcgccugucuggagccauggacgagcugcauaacgaaauccucgagcuggaugaaaagguggacgaccuuagagccgauaccaucuccagccaaauugagcuggcuguucuccugucuaaugaaggcaucauuaacagcgaggacgagcaccuucuggcccucgaacggaaacugaagaagaugcuggggcccuccgcgguggagaucggcaauggauguuucgaaacaaaacauaagugcaaccagaccugccucgaucgcauugcugccggcacguuugacgccggggaguucucucugccuaccuuugauagccuuaauaucacagcugccucccugaacgacgauggacucgacaaucacaccauucugcuguauuacagcacagcugccucuucccuugcggucacccucaugaucgccaucuucguggucuauauggugagcagagauaacguuucuuguuccauuugccuguga

SEQ ID NO: 219087 - RNA, 1758 nt, Artificial Sequence; identical to SEQ ID NO: 218717
  derived and/or modified CDS sequence (opt5) from hemagglutinin__InfluenzaB__AGX15973

SEQ ID NO: 219088 - RNA, 1758 nt, Artificial Sequence; identical to SEQ ID NO: 218717
  derived and/or modified CDS sequence (opt5) from hemagglutinin__InfluenzaB__AGX15984

SEQ ID NO: 219089 - RNA, 1758 nt, Artificial Sequence; identical to SEQ ID NO: 218755
  derived and/or modified CDS sequence (opt5) from hemagglutinin__InfluenzaB__AGX15995

SEQ ID NO: 219090 - RNA, 1758 nt, Artificial Sequence; identical to SEQ ID NO: 218755
  derived and/or modified CDS sequence (opt5) from hemagglutinin__InfluenzaB__AGX16006

SEQ ID NO: 219091 - RNA, 1758 nt, Artificial Sequence
  derived and/or modified CDS sequence (opt5) from hemagglutinin__InfluenzaB__AGX16017
augaaggccaucauugugcugcucauggucguuaccagcaacgcugacagaaucugcacaggcauuacguccucuaauagcccccacaucgugaaaaccgccacacagggggaggugaacgucaccggagugauuccucugacaaccacaccgaccaagucccauuucgcgaaucuuaaaggcacggaaacccgggggaagcugugucccaaaugccucaacuguacagaucuggacguugcucuuggacgcccuaagugcaccggcaagauccccucugccagagugagcauccugcacgagguccggccugugacauccggguguuuucccauuaugcaugaucgcaccaaaaucagacaacucccuaaucugcugcggggauacgaacacauucgccucucuacgcauaacguuaucaaugccgagaacgcuccgggcggccccuauaagauugggacaagcggauccugcccuaauaucaccaacggcaauggguucuuugccacaauggcuugggccgugcccaaaaacgacaagaauaaaaccgcgaccaacccucugacaauugaaguccccuacaucuguacggagggagaggaucagaucaccguguggggcuuccacagcgacaaugaaauucagauggccaaacuuuauggggauucuaagccgcagaaguuuacauccagcgcuaacggagugaccacacacuacgucucucaaaucggcggcuucccuaaccagaccgaggacgggggacugccccaguccggcagaauuguuguggauuauauggugcaaaagagcgggaaaacgggaacaaucaccuaccagcggggcauucuccugccucagaaggucuggugcgccucugggcgcuccaaagugaucaagggaagccuuccccugaucggcgaagcugacugucuccaugagaaauauggcgggcugaauaaguccaagcccuacuacaccggagagcacgccaaagcgauuggcaacugcccuaucuggguuaagacaccgcugaaacucgccaaugggaccaaguauagacccccugcuaaacugcuuaaggaacggggauuuuucggcgccauugcuggguuucuggagggcggaugggaaggcaugaucgccggguggcauggauacacaucucacggcgcccacgggguggcugucgcggccgaucucaagagcacgcaggaggcuauuaacaaaaucaccaagaaucugaacucccuuagcgaacuggaggugaaaaaucuccagcgccugucuggagccauggacgagcugcauaacgaaauccucgagcuggaugaaaagguugacgaccuuagagccgauacaauuuccagccaaaucgagcuggcugugcuccugucuaaugaaggcauuaucaacagcgaggacgagcaccuucuggcccucgaacggaaacugaagaagaugcuggggcccuccgcggucgagauuggcaauggauguuucgaaaccaaacauaagugcaaccagacaugccucgaucgcaucgcugccggcaccuuugacgccggggaguucucucugccuacguuugauagccuuaauauuaccgcugccucccugaacgacgauggacucgacaaucacacaauccugcuguauuacagcaccgcugccucuucccuugcggugacacucaugaucgccauuuucgucguguauaugguuagcagagauaacgugucuuguuccaucugccuguga

SEQ ID NO: 219092 - RNA, 1755 nt, Artificial Sequence; identical to SEQ ID NO: 218498
  derived and/or modified CDS sequence (opt5) from hemagglutinin__InfluenzaB__AGX16028

SEQ ID NO: 219093 - RNA, 1755 nt, Artificial Sequence
  derived and/or modified CDS sequence (opt5) from hemagglutinin__InfluenzaB__AGX16039
augaaggccaucauugugcugcucauggucguuaccagcaacgcugacagaaucugcacaggcauuacguccucuaauagcccccacguggugaaaaccgccacacagggggaggucaacgugaccggaguuaucccucugacaaccacaccgaccaaguccuacuucgcgaaucuuaaaggcacgcggacccgcgggaagcugugucccgauugccucaacuguacagaccuggauguggcucuuggaagaccuaugugcgucggcaccacacccucugccaaagccagcauucugcaugaagugcggccuguuaccuccggguguuuucccaucaugcacgaccgcacgaagaucagacaacucccuaaucugcugcggggauaugagaacauucgccucucuacacagaaugugaucgaugcugaaaaggccccgggcggccccuacagacuggggaccagcggauccugcccuaacgcuacaagcaaaucuggcuucuuugccaccauggcgugggccguccccaaggacaauaacaaaaaugcuaccaacccucuuacaguggaggugcccuauauuuguacggaaggggaggaucagaucaccgucuggggauuccauuccgacaauaagacacagaugaaaaaccuguacggcgauagcaauccgcaaaaguuuaccucuuccgccaacgggguuacaacccacuaugugagccagauuggaggcuucccugaccagacggaggauggcgggcucccccagucuggacggaucguggucgacuacaugaugcaaaagccuggcaaaacagggaccauuguguaucagcgcggaguucugcuuccccagaagguguggugcgcuuccggcagaagcaaagucaucaaggggucccugccccucaucggagaagccgauugucugcaugagaaauacggcggccugaacaagucuaaaccuuacuauaccggggaacacgcgaaggccauuggaaauugcccgaucugggugaagacaccccucaaacuggcuaacggcaccaaguaccggccucccgccaaacuucugaaggagcgcggguuuuucggagcuauugccggcuuucucgaagggggcugggaaggaaugaucgccggcuggcacggguauacaagccauggagcucacggcguugcgguggccgcugaccugaaauccacgcaggaggccauuaauaagaucaccaagaaccuuaauagccugucugaacucgaggucaaaaaccugcaaagacuguccggggccguggacgaacuccauaaugagauccuggagcuugaugaaaaggucgacgaucugcgggcugacacaauuagcucucagaucgagcucgccgugcugcuuagcaacgaaggaauuaucaauuccgaggaugaacaucugcucgcgcuggagcgcaaacugaagaaaaugcucggcccuucugcuguugacauugggaacggcuguuucgagaccaagcacaagugcaaucagacaugccuggauagaaucgccgccggaaccuuuaacgcuggcgaguucagccuucccacguuugacucccugaauaucaccgccgcuagccucaacgaugacgggcuggauaaucacacaauucugcuuuacuauucuaccgccgcguccagccucgccgugacacugaugcuggcuaucuucauugucuacauggugucucgggacaacguuuccuguagcaucugccucuga

SEQ ID NO: 219094 - RNA, 1755 nt, Artificial Sequence
  derived and/or modified CDS sequence (opt5) from hemagglutinin__InfluenzaB__AGX16050
augaaggccaucauugugcugcucauggucguuaccagcaacgcugacagaaucugcacaggcauuacguccucuaauagcccccacguggugaaaaccgccacacagggggaagucaacgugaccggaguuaucccucugacaaccacaccgaccaaguccuacuucgcgaaucuuaaaggcacgcggacccgcgggaagcugugucccgauugccucaacuguacagaccuggauguggcucuuggaagaccuaugugcgucggcaccacacccucugccaaagccagcauucugcaugaagugcggccuguuaccuccggguguuuucccaucaugcacgaccgcacgaagaucagacaacucccuaaucugcugcggggauaugagaacauucgccucucuacacagaaugugaucgaugcugaaaacgccccgggcggccccuacagacuggggaccagcggauccugcccuaaugcuacaagcaagucuggcuucuuugccaccauggcgugggccguccccaaagacaacaauaagaacgcuaccaauccucuuacaguggaggugcccuauauuuguacggaaggggaggaucagaucaccgucuggggauuccauuccgacaacaaaacacagaugaagaaucuguacggcgauagcaacccgcaaaaauuuaccucuuccgccaacgggguuacaacccacuaugugagccagauuggaggcuucccugcucagacggaggacggcgggcucccccagucuggacggaucguggucgauuacauggugcaaaagccucgcaagacaggcaccauuguuuaucagagaggggugcugcuuccccagaaagucuggugcgccuccggacggagcaaggugaucaaaggcucccugccccucaucggggaagcggacugucugcaugagaaguacggaggccugaauaaaucuaagccuuacuauaccggcgaacacgccaaagcuauugggaacugcccgaucuggguuaagacaccccucaagcuggccaauggaaccaaauaccgcccucccgcuaagcugcugaaagagagaggcuuuuucggggccauugccggauuucucgagggcgggugggaaggcaugaucgcuggauggcacggcuauacaagccauggggcgcacggaguggccgucgcugccgaucugaaguccacgcaggaggccauuaacaaaaucaccaagaaucuuaacagccugucugaacucgaggugaagaaucugcaacggcuguccggcgcuauggacgaacuccauaacgagauccuggagcuugacgaaaaagucgaugaccugcgcgccgauacaauuagcucucagaucgagcucgcggugcugcuuagcaaugaagggauuaucaacuccgaggacgaacaccuucucgcucuggagagaaagcugaaaaagaugcucggaccuucugccguugauauuggcaauggguguuucgagaccaaacacaagugcaaccagacaugccuggaccggaucgccgcuggcaccuuuaaugccggagaguucagccuucccacguuugauucccugaacaucaccgcugccagccucaaugacgauggccuggacaaccauacaauucugcuuuacuauucuaccgcggccuccagccucgcugugacacugaugcuggccaucuucauugucuacauggugucuagagauaacguuuccuguagcaucugccucuga

SEQ ID NO: 219095 - RNA, 1755 nt, Artificial Sequence
  derived and/or modified CDS sequence (opt5) from hemagglutinin__InfluenzaB__AGX16061
augaaggccaucauugugcugcucauggucguuaccagcaacgcugacagaaucugcacaggcauuacguccucuaauagcccccacguggugaaaaccgccacacagggggaggucaacgugaccggaguuaucccucugacaaccacaccgaccaaguccuacuucgcgaaucuuaaaggcacgcggacccgcgggaagcugugucccgauugccucaacuguacagaccuggauguggcucuuggaagaccuaugugcgucggcaccacacccucugccaaagccagcauucugcaugaagugcggccuguuaccuccggguguuuucccaucaugcacgaccgcacgaagaucagacaacucccuaaucugcugcggggauaugagaacauucgccucucuacacagaaugugaucgaugcugaaaaggccccgggcggccccuacagacuggggaccagcggauccugcccuaacgcuacaagcaaaucuggcuucuuugccaccauggcgugggccguccccaaggacaauaacaaaaaugcuaccaacccucuuacaguggaggugcccuauauuuguacggaaggggaggaucagaucaccgucuggggauuccauuccgacaauaagacacagaugaaaaaccuguacggcgauagcaauccgcaaaaguuuaccucuuccgccaacgggguuacaacccacuaugugagccagauuggaggcuucccugaccagacggaggauggcgggcucccccagucuggacggaucguggucgacuacaugaugcaaaagccuggcaaaacagggaccauuguguaucagcgcggaguucugcuuccccagaagguguggugcgcuuccggcagaagcaaagucaucaaggggucccugccccucaucggagaagccgauugucugcaugagaaauacggcggccugaacaagucuaaaccuuacuauaccggggaacacgcgaaggccauuggaaauugcccgaucugggugaagacaccccucaaacuggcuaacggcaccaaguaccggccucccgccaaacuucugaaggagcgcggguuuuucggagcuauugccggcuuucucgaagggggcugggaaggaaugaucgccggcuggcacggguauacaagccauggagcucacggcguugcgguggccgcugaccugaaauccacgcaggaggccauuaauaagaucaccaagaaccuuaauagccugucugaacucgaggucaaaaaccugcaaagacuguccggggccauggacgaacuccauaaugagauccuggagcuugaugaaaagguggacgaucugcgggcugacacaauuagcucucagaucgagcucgccguccugcuuagcaacgaaggaauuaucaauuccgaggaugaacaucugcucgcgcuggagcgcaaacugaagaaaaugcucggcccuucugcuguggacauugggaacggcuguuucgagaccaagcacaagugcaaucagacaugccuggauagaaucgccgccggaaccuuuaacgcuggcgaguucagccuucccacguuugacucccugaauaucaccgccgcuagccucaacgaugacgggcuggauaaucacacaauucugcuuuacuauucuaccgccgcguccagccucgccguuacacugaugcuggcuaucuucauuguguacauggucucucgggacaacguguccuguagcaucugccucuga

SEQ ID NO: 219096 - RNA, 1755 nt, Artificial Sequence
  derived and/or modified CDS sequence (opt5) from hemagglutinin__InfluenzaB__AGX16083
augaaggccaucauugugcugcucauggucguuaccagcaacgcugacagaaucugcacaggcauuacguccucuaauagcccccacguggugaaaaccgccacacagggggaggucaacgugaccggaguuaucccucugacaaccacaccgaccaaguccuacuucgcgaaucuuaaaggcacgcggacccgcgggaagcugugucccgauugccucaacuguacagaccuggauguggcucuuggaagaccuaugugcgucggcaccacacccucugccaaagccagcauucugcaugaagugcggccuguuaccuccggguguuuucccaucaugcacgaccgcacgaagaucagacaacucccuaaucugcugcggggauaugagaacauucgccucucuacacagaaugugaucgaugcugaaaaggccccgggcggccccuacagacuggggaccagcggauccugcccuaacgcuacaagcaaaucuggcuucuuugccaccauggcgugggccguccccaaggacaauaacaaaaaugcuaccaacccucuuacaguggaggugcccuauauuuguacggaaggggaggaucagaucaccgucuggggauuccauuccgacaauaagacacagaugaaaaaccuguacggcgauagcaauccgcaaaaguuuaccucuuccgccaacgggguuacaacccacuaugugagccagauuggaggcuucccugaccagacggaggauggcgggcucccccagucuggacggaucguggucgacuacaugaugcaaaagccuggcaaaacagggaccauuguguaucagcgcggaguucugcuuccccagaagguguggugcgcuuccggcagaagcaaagucaucaaggggucccugccccucaucggagaagccgauugucugcaugagaaauacggcggccugaacaagucuaaaccuuacuauaccggggaacacgcgaaggccauuggaaauugcccgaucugggugaagacaccccucaaacuggcuaacggcaccaaguaccggccucccgccaaacuucugaaggagcgcggguuuuucggagcuauugccggcuuucucgaagggggcugggagggaaugaucgccggcuggcacggguauacaagccauggagcucacggcguugcgguggccgcugaccugaaauccacgcaggaggccauuaauaagaucaccaagaaccuuaauagccugucugaacucgaggucaaaaaccugcaaagacuguccggggccauggacgaacuccauaaugagauccuggagcuugaugaaaagguggacgaucugcgggcugacacaauuagcucucagaucgagcucgccguccugcuuagcaacgaaggaauuaucaauuccgaggaugaacaucugcucgcgcuggagcgcaaacugaagaaaaugcucggcccuucugcuguggagauugggaacggcuguuucgaaaccaagcacaagugcaaucagacaugccuggacagaaucgccgccggaaccuuuaacgcuggcgaguucagccuucccacguuugauucccugaauaucaccgccgcuagccucaacgacgaugggcuggacaaucacacaauucugcuuuacuauucuaccgccgcguccagccucgccguuacacugaugcuggcuaucuucauuguguacauggucucucgggauaacguguccuguagcaucugccucuga

SEQ ID NO: 219097 - RNA, 1755 nt, Artificial Sequence
  derived and/or modified CDS sequence (opt5) from hemagglutinin__InfluenzaB__AGX16105
augaaggccaucauugugcugcucauggucguuaccagcaacgcugacagaaucugcacaggcauuacguccucuagcucuccccacguggugaaaaccgccacacagggggaggucaaugugaccggaguuaucccucugacaaccacaccgaccaaguccuacuucgcgaaccuuaaaggcacgcggacccgcgggaagcugugucccgauugccucaauuguacagaccuggauguggcucuuggaagaccuaugugcgucggcaccacacccagcgccaaagccuccauucugcaugaagugcggccuguuaccucuggguguuuucccaucaugcacgaccgcacgaagaucagacaacucccuaaccugcugcggggauaugagaauauucgccucagcacacagaacgugaucgaugcugaaaaggccccgggcggccccuacagacuggggaccuccggaagcugcccuaaugcuacaucuaaauccggcuucuuugccaccauggcgugggccguccccaaggacaacaauaaaaacgcuaccaauccucuuacaguggaggugcccuauauuuguacggaaggggaggaucagaucaccgucuggggauuccauagcgacaacaagacacagaugaaaaaucuguacggcgauucuaacccgcaaaaguuuaccuccagcgccaaugggguuacaacccacuaugugucucagauuggaggcuucccugaccagacggaggauggcgggcucccccaguccggacggaucguggucgacuacaugaugcaaaagccuggcaaaacagggaccauuguguaucagcgcggaguucugcuuccccagaagguguggugcgcuagcggcagauccaaagucaucaaggggucucugccccucaucggagaagccgauugucugcaugagaaauacggcggccugaacaagagcaaaccuuacuauaccggggaacacgcgaaggccauuggaaacugcccgaucugggugaagacaccccucaaacuggcuaauggcaccaaguaccggccucccgccaaacuucugaaggagcgcggguuuuucggagcuauugccggcuuucucgaagggggcugggaaggaaugaucgccggcuggcacggguauacaucccauggagcucacggcguugcgguggccgcugaccugaaaagcacgcaggaggccauuaacaagaucaccaagaaucuuaacucucuguccgaacucgaggucaaaaaucugcaaagacugagcggggccauggacgaacuccauucugagauccuggagcuugaugaaaagguggacgaucugcgggcugacacaauuagcucccagaucgagcucgccguccugcuuucuaacgaaggaauuaucaauagcgaggaugaacaucugcucgcgcuggagcgcaaacugaagaaaaugcucggcccuuccgcuguggacauugggaacggcuguuucgagaccaagcacaagugcaaucagacaugccuggauagaaucgccgccggaaccuuuaacgcuggcgaguucagccuucccacguuugacucucugaauaucaccgccgcuucccucaacgaugacgggcuggauaaucacacaauucugcuuuacuauagcaccgccgcgucuucccucgccguuacacugaugcuggcuaucuucauuguguacauggucagccgggacaacguguccuguucuaucugccucuga

SEQ ID NO: 219098 - RNA, 1755 nt, Artificial Sequence
  derived and/or modified CDS sequence (opt5) from hemagglutinin__InfluenzaB__AGX16116
augaaggccaucauugugcugcucauggucguuaccagcaacgcugacagaaucugcacaggcauuacguccucuaauagcccccacguggugaaaaccgccacacagggggaagucaacgugaccggaguuaucccucugacaaccacaccgaccaaguccuacuucgcgaaucuuaaaggcacgcggacccgcgggaagcugugucccgauugccucaacuguacagaccuggauguggcucuuggaagaccuaugugcgucggcaccacacccucugccaaagccagcauucugcaugaagugcggccuguuaccuccggguguuuucccaucaugcacgaccgcacgaagaucagacaacucccuaaucugcugcggggauaugagaacauucgccucucuacacagaaugugaucgaugcugaaaacgccccgggcggccccuacagacuggggaccagcggauccugcccuaaugcuacaagcaagucuggcuucuuugccaccauggcgugggccguccccaaagacaacaauaagaacgcuaccaauccucuuacaguggaggugcccuaugucuguacggaaggggaggaucagauuaccguuuggggauuccauuccgacaacaaaacacagaugaagaaucuguacggcgauagcaacccgcaaaaauuuaccucuuccgccaacggggugacaacccacuaugugagccagaucggaggcuucccugcucagacggaggacggcgggcucccccagucuggacggauugucguggauuacaugguucaaaagccucgcaagacaggcaccaucguguaucagagagggguccugcuuccccagaaaguguggugcgccuccggacggagcaagguuauuaaaggcucccugccccucaucggggaagcggacugucugcaugagaaguacggaggccugaauaaaucuaagccuuacuauaccggcgaacacgccaaagcuaucgggaacugcccgauuugggugaagacaccccucaagcuggccaauggaaccaaauaccgcccucccgcuaagcugcugaaagagagaggcuuuuucggggccaucgccggauuucucgagggcgggugggaaggcaugauugcuggauggcacggcuauacaagccauggggcgcacggagucgccguggcugccgaucugaaguccacgcaggaggccaucaacaaaauuaccaagaaucuuaacagccugucugaacucgagaucaagaaucugcaacggcuguccggcgcuauggacgaacuccauaacgagauccuggagcuugacgaaaaagucgaugaccugcgcgccgauacaauuagcucucagaucgagcucgcggugcugcuuagcaaugaagggauuaucaacuccgaggacgaacaccuucucgcucuggagagaaagcugaaaaagaugcucggaccuucugccguugauauuggcaauggguguuucgagaccaaacacaagugcaaccagacaugccuggaccggaucgccgcuggcaccuuuaaugccggagaguucagccuucccacguuugauucccugaacaucaccgcugccagccucaaugacgauggccuggacaaccauacaauucugcuuuacuauucuaccgcggccuccagccucgcugugacacugaugcuggccaucuucauugucuacauggugucuagagauaacguuuccuguagcaucugccucuga

SEQ ID NO: 219099 - RNA, 1755 nt, Artificial Sequence
  derived and/or modified CDS sequence (opt5) from hemagglutinin__InfluenzaB__AGX16127
augaaggccaucauugugcugcucauggucguuaccagcaacgcugacagaaucugcacaggcauuacguccucuaauagcccccacguggugaaaaccgccacacagggggaagucaacgugaccggaguuaucccucugacaaccacaccgaccaaguccuacuucgcgaaucuuaaaggcacgcggacccgcgggaagcugugucccgauugccucaacuguacagaccuggauguggcucuuggaagaccuaugugcgucggcaccacacccucugccaaagccagcauucugcaugaagugcggccuguuaccuccggguguuuucccaucaugcacgaccgcacgaagaucagacaacucccuaaucugcugcggggauaugagaacauucgccucucuacacagaaugugaucgaugcugaaaacgccccgggcggccccuacagacuggggaccagcggauccugcccuaaugcuacaagcaagucuggcuucuuugccaccauggcgugggccguccccaaagacaacaauaagaacgcuaccaauccucuuacaguggaggugcccuaugucuguacggaaggggaggaucagauuaccguuuggggauuccauuccgacaacaaaauccagaugaagaaucuguacggcgauagcaacccgcaaaaauuuacaucuuccgccaacggggugaccacacacuaugugagccagauuggaggcuucccugcucagaccgaggacggcgggcucccccagucuggacggaucgucguggauuacaugguucaaaagccucgcaagacgggcacaauuguguaucagagagggguccugcuuccccagaaaguguggugcgccuccggacggagcaagguuaucaaaggcucccugccccucaucggggaagcggacugucugcaugagaaguacggaggccugaauaaaucuaagccuuacuauaccggcgaacacgccaaagcuauugggaacugcccgaucugggugaagacaccccucaagcuggccaauggaaccaaauaccgcccucccgcuaagcugcugaaagagagaggcuuuuucggggccauugccggauuucucgagggcgggugggaaggcaugaucgcuggauggcacggcuauaccagccauggggcgcacggagucgccguggcugccgaucugaaguccacacaggaggccauuaacaaaaucacgaagaaucuuaacagccugucugaacucgagaucaagaaucugcaacggcuguccggcgcuauggacgaacuccauaacgagauucuggagcuugacgaaaaagucgaugaccugcgcgccgauaccaucagcucucagauugagcucgcggugcugcuuagcaaugaagggaucauuaacuccgaggacgaacaccuucucgcucuggagagaaagcugaaaaagaugcucggaccuucugccguugauaucggcaauggguguuucgagacaaaacacaagugcaaccagaccugccuggaccggaucgccgcuggcacauuuaaugccggagaguucagccuucccaccuuugauucccugaacauuacggcugccagccucaaugacgauggccuggacaaccauaccauccugcuuuacuauucuacagcggccuccagccucgcugugacccugaugcuggccauuuucaucgucuacauggugucuagagauaacguuuccuguagcauuugccucuga

SEQ ID NO: 219100 - RNA, 1755 nt, Artificial Sequence; identical to SEQ ID NO: 219098
  derived and/or modified CDS sequence (opt5) from hemagglutinin__InfluenzaB__AGX16138

SEQ ID NO: 219101 - RNA, 1755 nt, Artificial Sequence; identical to SEQ ID NO: 219095
  derived and/or modified CDS sequence (opt5) from hemagglutinin__InfluenzaB__AGX16149

SEQ ID NO: 219102 - RNA, 1755 nt, Artificial Sequence; identical to SEQ ID NO: 219096
  derived and/or modified CDS sequence (opt5) from hemagglutinin__InfluenzaB__AGX16160

SEQ ID NO: 219103 - RNA, 1755 nt, Artificial Sequence; identical to SEQ ID NO: 219096
  derived and/or modified CDS sequence (opt5) from hemagglutinin__InfluenzaB__AGX16182

SEQ ID NO: 219104 - RNA, 1755 nt, Artificial Sequence; identical to SEQ ID NO: 218498
  derived and/or modified CDS sequence (opt5) from hemagglutinin__InfluenzaB__AGX16193

SEQ ID NO: 219105 - RNA, 1755 nt, Artificial Sequence; identical to SEQ ID NO: 218498
  derived and/or modified CDS sequence (opt5) from hemagglutinin__InfluenzaB__AGX16215

SEQ ID NO: 219106 - RNA, 1755 nt, Artificial Sequence; identical to SEQ ID NO: 218498
  derived and/or modified CDS sequence (opt5) from hemagglutinin__InfluenzaB__AGX16226

SEQ ID NO: 219107 - RNA, 1755 nt, Artificial Sequence
  derived and/or modified CDS sequence (opt5) from hemagglutinin__InfluenzaB__AGX16237
augaaggccaucauugugcugcucauggucguuaccagcaacgcugacagaaucugcacaggcauuacguccucuaauagcccccacguggugaaaaccgccacacagggggaggucaacgugaccggaguuaucccucugacaaccacaccgaccaaguccuacuucgcgaaucuuaaaggcacgcggacccgcgggaagcugugucccgauugccucaacuguacagaccuggauguggcucuuggaagaccuaugugcgucggcaccacacccucugccaaagccagcauucugcaugaagugcggccuguuaccuccggguguuuucccaucaugcacgaccgcacgaagaucagacaacucccuaaucugcugcggggauaugagaacauucgccucucuacacagaaugugaucgaugcugaaaaggccccgggcggccccuacagacuggggaccagcggauccugcccuaacgcuacaagcaaaucuggcuucuuugccaccauggcgugggccguccccaaggacaauaacaaaaaugcuaccaacccucuuacaguggaggugcccuauauuuguacggaaggggaggaucagaucaccgucuggggauuccauuccgacaauaagacacagaugaaaaaccuguacggcgauagcaauccgcaaaaguuuaccucuuccgccaacgggguuacaacccacuaugugagccagauuggaggcuucccugaccagacggaggauggcgggcucccccagucuggacggaucguggucgacuacaugaugcaaaagccuggcaaaacagggaccauuguguaucagcgcggaguucugcuuccccagaagguguggugcgcuuccggcagaagcaaagucaucaaggggucccugccccucaucggagaagccgauugucugcaugagaaauacggcggccugaacaagucuaaaccuuacuauaccggggaacacgcgaaggccauuggaaauugcccgaucugggugaagacaccccucaaacuggcuaacggcaccaaguaccggccucccgccaaacuucugaaggagcgcggguuuuucggagcuauugccggcuuucucgaagggggcugggaaggaaugaucgccggcuggcacggguauacaagccauggagcucacggcguugcgguggccgcugaccugaaauccacgcaggaggccauuaauaagaucaccaagaaccuuaauagccugucugaacucgaggucaaaaaccugcaaagacuguccggggccauggacgaacuccauaaugagauccuggagcuugaugaaaagguggacgaucugcgggcugacacaauuagcucucagaucgagcucgccguccugcuuagcaacgaaggaauuaucaauuccgaggaugaacaucugcucgcgcuggagcgcaaacugaagaaaaugcucggcccuucugcuguggacauugggaacggcuguuucgagaccaagcacaagugcaaucagacaugccuggauagaaucgccgccggaaccuuuaacgcuggcgaguucagccuucccacguuugacucccugaauaucaccgccgcuagccucaacgaugacgggcuggauaaucacacaauucugcuuuacuauucuaccgccgcguccagccucgccaucacacugaugcuggcuauuuucaucguuuacauggugucucgggacaacgucuccuguagcauuugccucuga

SEQ ID NO: 219108 - RNA, 1755 nt, Artificial Sequence; identical to SEQ ID NO: 218498
  derived and/or modified CDS sequence (opt5) from hemagglutinin__InfluenzaB__AGX16248

SEQ ID NO: 219109 - RNA, 1755 nt, Artificial Sequence; identical to SEQ ID NO: 218498
  derived and/or modified CDS sequence (opt5) from hemagglutinin__InfluenzaB__AGX16259

SEQ ID NO: 219110 - RNA, 1755 nt, Artificial Sequence
  derived and/or modified CDS sequence (opt5) from hemagglutinin__InfluenzaB__AGX16270
augaaggccaucauugugcugcucauggucguuaccagcaacgcugacagaaucugcacaggcauuacguccucuaauagcccccacguggugaaaaccgccacacagggggaggucaacgugaccggaguuaucccucugacaaccacaccgaccaaguccuacuucgcgaaucuuaaaggcacgcggacccgcgggaagcugugucccgauugccucaacuguacagaccuggauguggcucuuggaagaccuaugugcgucggcaccacacccucugccaaagccagcauucugcaugaagugcggccuguuaccuccggguguuuucccaucaugcacgaccgcacgaagaucagacaacucgcuaaucugcugcggggauaugagaacauucgccucucuacacagaaugugaucgaugccgaaaaggcuccuggcggcccguacagacuggggaccagcggauccugccccaacgccacaagcaaaucuggcuucuuugcgaccauggccugggcugucccuaaggacaauaacaaaaaugccaccaacccccuuacaguggaggugccuuauauuuguaaggaaggggaggaucagaucacggucuggggauuccauuccgacaauaaaacccagaugaagaaccuguacggcgauagcaauccccaaaaguuuacaucuuccgcuaacgggguuaccacacacuaugugagccagauuggaggcuucccggaccagaccgaggauggcgggcucccucagucuggacggaucguggucgacuacaugauucaaaaacccggcaagacggggacaaucguguaucagcgcggaguucugcuuccucagaaaguguggugcgccuccggcagaagcaaggucaucaaagggucccugccccucauuggagaagcggauugucugcaugagaaguacggcggccugaacaaaucuaagcccuacuauaccggggaacacgccaaggcuaucggaaauugcccuauuugggugaaaaccccgcucaagcuggccaacggcacaaaauaccggcccccugcuaagcugcugaaagagcgcggguuuuucggagccaucgccggcuuucucgaagggggcugggaaggaaugauugcuggcuggcacggguauaccagccauggagcgcacggcguugccguggcugccgaccugaaguccacacaggaggccaucaauaagaucacgaaaaaccuuaauagccugucugaacucgaggucaagaaccugcaaagacuguccggggcuauggacgaacuccauaaugagauucuggagcuugaugaaaaaguggacgaucugcgggccgacaccaucagcucucagauugagcucgcgguccugcuuagcaacgaaggaaucauuaauuccgaggaugaacaccuucucgcucuggagcgcaagcugaaaaagaugcucggccccucugccguggacaucgggaacggcuguuucgagacaaagcacaaaugcaaucagaccugccuggauagaaucgccgcuggaacauuuaacgccggcgaguucagccuuccuaccuuugacucccugaauauuacggcugccagccucaacgaugacgggcuggauaaucauaccauccugcuuuacuauucuacagcggccuccagccucgcuguuacccugaugcuggccauuuucaucguguacauggucucucgggacaacguguccuguagcauuugccucuga

SEQ ID NO: 219111 - RNA, 1755 nt, Artificial Sequence; identical to SEQ ID NO: 219110
  derived and/or modified CDS sequence (opt5) from hemagglutinin__InfluenzaB__AGX16281

SEQ ID NO: 219112 - RNA, 1755 nt, Artificial Sequence
  derived and/or modified CDS sequence (opt5) from hemagglutinin__InfluenzaB__AGX16292
augaaggccaucauugugcugcucauggucguuaccagcaacgcugacagaaucugcacaggcauuacguccucuaauagcccccacguggugaaaaccgccacacagggggaggucaacgugaccggaguuaucccucugacaaccacaccgaccaaguccuacuucgcgaaucuuaaaggcacgcggacccgcgggaagcugugucccgauugccucaacuguacagaccuggauguggcucuuggaagaccuaugugcgucggcaccacacccucugccaaagccagcauucugcaugaagugcggccuguuaccuccggguguuuucccaucaugcacgaccgcacgaagaucagacaacucgcuaaucugcugcggggauaugagaacauucgccucucuaaucagaacgugaucgaugccgaaaaggcuccuggcggcccguacagacuggggacaagcggauccugccccaaugccaccagcaaaucuggcuucuuugcgacaauggccugggcugucccuaaggacaacaauaaaaacgccaccaauccccuuaccguggaggugccuuauauuuguacagaaggggaggaucagaucacggucuggggauuccauuccgacaacaagacccagaugaaaaaucuguacggcgauagcaacccccaaaaguuuacaucuuccgcuaacgggguuaccacacacuaugugagccagauuggaggcuucccggaccagaccgaggauggcgggcucccucagucuggacggaucguggucgacuacaugaugcaaaagcccggcaaaacggggacaauuguguaucagcgcggaguucugcuuccucagaagguguggugcgccuccggcagaagcaaagucaucaagggggcgcugccccucaucggagaagccgauugucugcaugagaaauacggcggccugaauaaguccaaacccuacuauaccggggaacacgcuaaggccauuggaaacugcccuaucugggugaagaccccgcucaaacuggcuaauggcacaaaguaccggcccccugccaaacuucugaaggagcgcggguuuuucggagccauugcuggcuuucucgaagggggcugggaaggaaugaucgcgggcuggcacggguauaccucucauggagcccacggcguugcuguggccgccgaccugaaaagcacacaggaggcuauuaacaagaucacgaagaaucuuaacucccugagcgaacucgaggucaaaaaucugcaaagacugucuggggccauggacgaacuccauaacgagauccuggagcuugaugaaaagguggacgaucugcgggcggacaccauuuccagccagaucgagcucgcuguccugcuuucuaaugaaggaauuaucaacagcgaggaugaacaucugcucgcccuggagcgcaaacugaagaaaaugcucggccccuccgccguggacauugggaauggcuguuucgagacaaagcacaagugcaaccagaccugccuggauagaaucgcugccggaacauuuaaugcuggcgaguucucucuuccuaccuuugacagccugaacaucacggccgcgucccucaaugaugacgggcuggauaaccacaccauucugcuuuacuauagcacagccgcuucuucccucgccguuacccugaugcuggcuaucuucauuguguacauggucagccgggacaacgugucuuguuccaucugccucuga

SEQ ID NO: 219113 - RNA, 1758 nt, Artificial Sequence; identical to SEQ ID NO: 218586
  derived and/or modified CDS sequence (opt5) from hemagglutinin__InfluenzaB__AGX16303

SEQ ID NO: 219114 - RNA, 1755 nt, Artificial Sequence; identical to SEQ ID NO: 218498
  derived and/or modified CDS sequence (opt5) from hemagglutinin__InfluenzaB__AGX16314

SEQ ID NO: 219115 - RNA, 1755 nt, Artificial Sequence; identical to SEQ ID NO: 218498
  derived and/or modified CDS sequence (opt5) from hemagglutinin__InfluenzaB__AGX16325

SEQ ID NO: 219116 - RNA, 1755 nt, Artificial Sequence; identical to SEQ ID NO: 218803
  derived and/or modified CDS sequence (opt5) from hemagglutinin__InfluenzaB__AGX16336

SEQ ID NO: 219117 - RNA, 1755 nt, Artificial Sequence; identical to SEQ ID NO: 218803
  derived and/or modified CDS sequence (opt5) from hemagglutinin__InfluenzaB__AGX16347

SEQ ID NO: 219118 - RNA, 1755 nt, Artificial Sequence; identical to SEQ ID NO: 218803
  derived and/or modified CDS sequence (opt5) from hemagglutinin__InfluenzaB__AGX16358

SEQ ID NO: 219119 - RNA, 1755 nt, Artificial Sequence
  derived and/or modified CDS sequence (opt5) from hemagglutinin__InfluenzaB__AGX16369
augaaggccaucauugugcugcucauggucguuaccagcaacgcugacagaaucugcacaggcauuacguccucuaauagcccccacguggugaaaaccgccacacagggggaggucaacgugaccggaguuaucccucugacaaccacaccgaccaaguccuacuucgcgaaucuuaaaggcacgcggacccgcgggaagcugugucccgauugccucaacuguacagaccuggauguggcucuuggaagaccuaugugcgucggcaccacacccucugccaaagccagcauucugcaugaagugcggccuguuaccuccggguguuuucccaucaugcacgaccgcacgaagaucagacaacucccuaaucugcugcggggauaugagaacauucgccucucuacacagaaugugaucgaugcugaaaaggccccgggcggccccuacagacuggggaccagcggauccugcccuaacgcuacaagcaaaucuggcuucuuugccaccauggcgugggccguccccaaggacaauaacaaaaaugcuaccaacccucuuacaguggaggugcccuauauuuguacggaaggggaggaucagaucaccgucuggggauuccauuccgacaauaagacacagaugaaaaaccuguacggcgauagcaauccgcaaaaguuuaccucuuccgccaacgggguuacaacccacuaugugagccagauuggaucuuucccugaccagacggaggauggcggccucccccaguccgggcggaucguggucgacuacaugaugcaaaagccuggaaaaacaggcaccauuguguaucagcgcgggauccugcuuccccagaagguuuggugcgcuagcggaagauccaaagugaucaagggcucucugccccucauuggggaagccgauugucugcaugagaaauacggaggccugaacaagagcaaaccuuacuauaccggcgaacacgcgaaggccaucgggaauugcccgauuugggucaagacaccccucaaacuggcuaacggaaccaaguaccggccucccgccaaacuucugaaggagcgcggcuuuuucggggcuaucgccggauuucucgagggcgggugggaaggcaugauugccggauggcacggcuauacaucccauggggcucacggaguggcgguugccgcugaccugaaaagcacgcaggaggccaucaauaagaucaccaagaaccuuaauucucuguccgaacucgaggugaaaaaccugcaaagacugagcggcgccauggacgaacuccauaaugagauucuggagcuugaugaaaaggucgacgaucugcgggcugacacaaucucuagccagauugagcucgccgugcugcuuuccaacgaagggaucauuaauucugaggaugaacaucugcucgcgcuggagcgcaaacugaagaaaaugcucggaccuagcgcugucgagaucggcaacggguguuucgaaaccaagcacaagugcaaucagacaugccuggacagaaucgccgccggcaccuuuaacgcuggagaguucucccuucccacguuugauagccugaauauuaccgccgcuucucucaacgacgauggccuggacaaucacacaauccugcuuuacuauuccaccgccgcgagcucucucgccgugacacugaugcuggcuauuuucaucguuuacauggugucccgggauaacgucagcuguuccauuugccucuga

SEQ ID NO: 219120 - RNA, 1755 nt, Artificial Sequence
  derived and/or modified CDS sequence (opt5) from hemagglutinin__InfluenzaB__AGX16380
augaaggccaucgugguccugcucaugguugugaccagcaacgcugacagaauuugcacaggcaucacguccucuaauagcccccacguggucaaaaccgccacacagggggaggugaacguuaccggagugauuccucugacaaccacaccgaccaaguccuacuucgcgaaucuuaaaggcacgcggacccgcgggaagcugugucccgauugccucaacuguacagaccuggaugucgcucuuggaagaccuaugugcgugggcgccacccccucugccaaagcuagcauccugcaugaaguucggccugugacauccggguguuuucccaugaugcacgaccgcaccaagauuagacaacucccuaaucugcugcggggauaugagaacauccgccucucuacgcagaaugucaucgaugccgaaaaggcuccgggcggccccuacagacuggggacaagcggauccugcccuaacgccaccagcaaaucuggcuucuuugcgacaauggccugggcugugcccaaggacaauaacaaaaaugccaccaacccucuuaccguggagguccccuauauuuguacagaaggggaggaucagaucacgguuuggggauuccauuccgacaauaagacccagaugaaaaaccuguacggcgauagcaauccgcaaaaguuuacaucuuccgcuaacggggugaccacacacuaugugagccagauuggaucuuucccugaccagaccgaggauggcggccucccccaguccgggcggaucgucguggacuacaugaugcaaaagccuggaaaaacgggcacaauuguuuaucagcgcggggugcugcuuccccagaaggucuggugcgccagcggaagauccaaagugaucaagggcucucugccccucauuggggaagcggauugucugcaugagaaauacggaggccugaacaagagcaaaccuuacuauaccggcgaacacgccaaggcuaucgggaauugcccgaucuggguuaagacaccccucaaacuggccaacggaaccaaguaccggccucccgcuaaacuucugaaggagcgcggcuuuuucggggccauugccggauuucucgagggcgggugggaaggcaugaucgcuggauggcacggcuauaccucccauggggcgcacggaguggccgucgcugccgaccugaaaagcacacaggaggccauuaauaagaucacgaagaaccuuaauucucuguccgaacucgaggugaaaaaccugcaaagacugagcggcgcuauggacgaacuccauaaugagauucuggagcuugaugaaaaggucgacgaucugcgggccgacaccaucucuagccagaucgagcucgcggugcugcuuuccaacgaagggauuaucaauucugaggaugaacaucugcucgcucuggagcgcaaacugaagaaaaugcucggaccuagcgccguugagauuggcaacggguguuucgaaacaaagcacaagugcaaucagaccugccuggacagaaucgccgcuggcacauuuaacgccggagaguucucccuucccaccuuugauagccugaauauuacggcugccucucucaacgacgauggccuggacaaucacaccauccugcuuuacuauuccacagcggccagcucucucgcugugacccugaugcuggccaucuucauugucuacauggugucccgggauaacguuagcuguuccaucugccucuga

SEQ ID NO: 219121 - RNA, 1755 nt, Artificial Sequence; identical to SEQ ID NO: 218639
  derived and/or modified CDS sequence (opt5) from hemagglutinin__InfluenzaB__AGX16391

SEQ ID NO: 219122 - RNA, 1755 nt, Artificial Sequence
  derived and/or modified CDS sequence (opt5) from hemagglutinin__InfluenzaB__AGX16402
augaaggccaucauugugcugcucauggucguuaccagcaacgcugacagaaucugcacaggcauuacguccucuaauagcccccacguggugaaaaccgccacacagggggaagucaacgugaccggaguuaucccucugacaaccacaccgaccaaguccuacuucgcgaaucuuaaaggcacgcggacccgcgggaagcugugucccgauugccucaacuguacagaccuggauguggcucuuggaagaccuaugugcgucggcaccacacccucugccaaagccagcauucugcaugaagugcggccuguuaccuccggguguuuucccaucaugcacgaccgcacgaagaucagacaacucccuaaucugcugcggggauaugagaacauucgccucucuacacagaaugugaucgaugcugaaaaggccccgggcggccccuacagacuggggaccagcggauccugcccuaacgcuacaagcaaaauuggcuucuuugccaccauggcgugggccguccccaaggacaauuauaaaaacgcuaccaauccucuuacaguggaggugcccuacaucuguacggaaggggaggaucagauuaccgucuggggauuccauucugacaacaagccgcagaugaaaaaucuguauggcgauuccaacccucaaaaguuuacaagcucugccaaugggguuaccacacacuacgugucccagaucggagacuuccccgaucagaccgaggacggcggccucccucagagcgggcggauuguggucgauuauaugaugcaaaagcccggaaaaacgggcacaaucguguaccagcgcgggguucugcuuccccagaagguguggugcgcuucuggaagauccaaagucaucaagggcagccugccucucauuggggaagccgacugucugcaugagaaauacggaggccugaacaaguccaaaccguauuacaccggcgaacacgcgaaggccaucgggaacugccccauuugggugaagaccccucucaaacuggcuaauggaacaaaguaucggcccccugccaaacuucugaaggagcgcggcuuuuucggggcuaucgccggauuucucgagggcgggugggaaggcaugauugccggauggcacggcuacaccucucauggggcucacggaguugcgguggccgcugaccugaaaagcacacaggaggccaucaacaagaucacgaagaaucuuaacucccugagcgaacucgaggucaaaaaucugcaaagacugucuggcgccauggaugaacuccauaacgagauucuggagcuugacgaaaagguggaugaccugcgggcugauaccaucuccagccagauugagcucgccguccugcuuucuaaugaagggaucauuaacagcgaggacgaacaucugcucgcgcuggagcgcaaacugaagaaaaugcucggacccuccgcuguggauaucggcaauggguguuucgagacaaagcacaagugcaaccagaccugccuggacagaaucgccgccggcacauuuaaugcuggagaguucucucuuccgaccuuugauagccugaacauuacggccgcuucccucaaugacgauggccuggacaaccacaccauccugcuuuauuacagcacagccgcgucuucccucgccguuacccugaugcuggcuauuuucaucguguauauggucagccgggacaaugugucuuguuccauuugccucuga

SEQ ID NO: 219123 - RNA, 1755 nt, Artificial Sequence; identical to SEQ ID NO: 218892
  derived and/or modified CDS sequence (opt5) from hemagglutinin__InfluenzaB__AGX16413

SEQ ID NO: 219124 - RNA, 1755 nt, Artificial Sequence; identical to SEQ ID NO: 218892
  derived and/or modified CDS sequence (opt5) from hemagglutinin__InfluenzaB__AGX16423

SEQ ID NO: 219125 - RNA, 1755 nt, Artificial Sequence; identical to SEQ ID NO: 218892
  derived and/or modified CDS sequence (opt5) from hemagglutinin__InfluenzaB__AGX16434

SEQ ID NO: 219126 - RNA, 1755 nt, Artificial Sequence; identical to SEQ ID NO: 218892
  derived and/or modified CDS sequence (opt5) from hemagglutinin__InfluenzaB__AGX16445

SEQ ID NO: 219127 - RNA, 1755 nt, Artificial Sequence; identical to SEQ ID NO: 218892
  derived and/or modified CDS sequence (opt5) from hemagglutinin__InfluenzaB__AGX16456

SEQ ID NO: 219128 - RNA, 1755 nt, Artificial Sequence
  derived and/or modified CDS sequence (opt5) from hemagglutinin__InfluenzaB__AGX16467
augaaggccaucauugugcugcucauggucguuaccagcaacgcugacagaaucugcacaggcauuacguccucuaauagcccccacguggugaaaaccgccacacagggggaggucaacgugaccggaguuaucccucugacaaccacaccgaccaaguccuacuucgcgaaucuuaaaggcacgcggacccgcgggaagcugugucccgauugccucaacuguacagaccuggauguggcucuuggaagaccuaugugcgucggcaccacacccucugccaaagccagcauucugcaugaagugcggccuguuaccuccggguguuuucccaucaugcacgaccgcacgaagaucagacaacucccuaaucugcugcggggauaugagaacauucgccucucuacacagaaugugaucgaugcugaaaaggccccgggcggccccuacagacuggggaccagcggauccugcccuaacgcuacaagcaaaucuggcuucuuugccaccauggcgugggccguccccaaggacaauaacaaaaaugcuaccaacccucuuacaguggaggugcccuauauuuguacggaaggggaggaucagaucaccgucuggggauuccauuccgacaauaagacacagaugaaaaaccuguacggcgauagcaauccgcaaaaguuuaccucuuccgccaacgggguuacaacccacuaugugagccagauuggaucuuucccugaccagacggaggauggcggccucccccaguccgggcggaucguggucgacuacaugaugcaaaagccuggaaaaacaggcaccauuguguaucagcgcgggguucugcuuccccagagaguguggugcgcuagcggacgguccaaggucaucaaaggcucucugccccucaucggggaagccgauugucugcaugagaaguacggaggccugaacaaaagcaagccuuacuauaccggcgaacacgcgaaagccauugggaauugcccgaucugggugaagacaccccucaagcuggcuaacggaaccaaauaccgcccucccgccaagcugcugaaagagagaggcuuuuucggggcuauugccggauuucucgagggcgggugggaaggcaugaucgccggauggcacggcuauacaucccauggggcucacggaguugcgguggccgcugaccuuaagagcacgcaggaggccauuaauaaaaucaccaagaaccuuaauucucuguccgaacucgaggucaagaaccugcaacggcugagcggcgccauggacgaacuccauaaugagauccuggagcuugaugaaaaaguggacgaucugcgcgcugacacaauuucuagccagaucgagcucgccguccugcuuuccaacgaagggauuaucaauucugaggaugaacaucugcucgcgcuggagagaaagcugaaaaagaugcucggaccuagcgcuguggagauuggcaacggguguuucgaaaccaaacacaagugcaaucagacaugccuggaccggaucgccgccggcaccuuuaacgcuggagaguucucccuucccacguuugauagccugaauaucaccgccgcuucucucaacgacgauggccuggacaaucacacaauucugcuuuacuauuccaccgccgcgagcucucucgccguuacacugaugcuggcuaucuucauuguguacauggucuccagagauaacgugagcuguuccaucugccucuga

SEQ ID NO: 219129 - RNA, 1755 nt, Artificial Sequence; identical to SEQ ID NO: 218892
  derived and/or modified CDS sequence (opt5) from hemagglutinin__InfluenzaB__AGX16478

SEQ ID NO: 219130 - RNA, 1755 nt, Artificial Sequence; identical to SEQ ID NO: 218639
  derived and/or modified CDS sequence (opt5) from hemagglutinin__InfluenzaB__AGX16489

SEQ ID NO: 219131 - RNA, 1758 nt, Artificial Sequence; identical to SEQ ID NO: 219051
  derived and/or modified CDS sequence (opt5) from hemagglutinin__InfluenzaB__AGX16500

SEQ ID NO: 219132 - RNA, 1758 nt, Artificial Sequence; identical to SEQ ID NO: 219051
  derived and/or modified CDS sequence (opt5) from hemagglutinin__InfluenzaB__AGX16511

SEQ ID NO: 219133 - RNA, 1758 nt, Artificial Sequence; identical to SEQ ID NO: 219051
  derived and/or modified CDS sequence (opt5) from hemagglutinin__InfluenzaB__AGX16522

SEQ ID NO: 219134 - RNA, 1758 nt, Artificial Sequence
  derived and/or modified CDS sequence (opt5) from hemagglutinin__InfluenzaB__AGX16533
augaaggccaucauugugcugcucauggucguuaccagcaacgcugacagaaucugcacaggcauuacguccucuaauagcccccacguggugaaaaccgccacacagggggaagucaacgugaccggaguuaucccucugacaaccacaccgaccaagucccauuucgcgaaucuuaaaggcacgaagacccgggggaaacugugucccaagugccucaacuguacagaucuggacguggcucuuggacgcccuaagugcaccggcaauauucccucugccaaagucagcauccugcacgaagugagaccuguuacauccggguguuuucccaucaugcaugaucggaccaagauucgccaacucccuaaccugcugagaggauacgagcacauccggcucucuacgcauaaugugauuaacgccgaaaaagcuccgggcggccccuauaagaucgggacaagcggauccugcccuaaugucaccaacggcaauggguucuuugccacaauggcuugggccgugcccaaaaacgacaauaacaagaccgcgaccaauagccugacaauugaggugccuuacaucuguacggaaggagaggaucagauuaccgucuggggcuuccacucugacaaggagacacagauggccaaacuuuauggggauuccaagccccagaaauuuaccagcucugcuaacggaguuacaacccacuacgugucccaaaucggcggcuucccgaaccagacggaagacgggggacugccucagagcggccgcaucguggucgauuauauggugcagaagucugggaaaacaggaaccauuaccuaccaaagaggcauccuccugccccagaagguuuggugcgccuccgggcggagcaaagugauuaagggaucccuuccucugaucggcgaggcugacugucuccaugaaaaguauggcgggcugaauaaaucuaagcccuacuacacaggagagcacgccaaagcgauuggcaacugccccaucugggucaagaccccucugaaacucgccaaugggacaaaguaucgcccgcccgcuaagcugcuuaaagagagaggauuuuucggcgccaucgcuggguuucuggaaggcggaugggagggcaugauugccggguggcauggauacacgagccacggcgcccacgggguggcuguugcggccgaucucaaguccacccaggaagcuaucaacaaaauuacaaagaaucugaacagccuuucugagcuggaagugaaaaaucuccagcggcuguccggagccauggacgagcugcauaacgagauccucgaacuggaugagaaggucgacgaccuucgcgccgauaccauuagcucucaaaucgaacuggcugugcuccugagcaaugagggcaucauuaacuccgaagacgagcaccuucuggcccucgagagaaagcugaaaaagaugcuggggccuucugcggucgaaaucggcaauggauguuucgagacaaaacauaagugcaaccagaccugccucgaucggauugcugccggcacguuugacgccggggaguucagccugcccaccuuugauucccuuaauaucacagcugccagccugaacgacgauggacucgacaaucacaccauucugcuguauuacucuacagcugccuccagccuugcggugacccucaugaucgccauuuucguuguguauauggucucucgcgauaacguguccuguagcaucugccuguga

SEQ ID NO: 219135 - RNA, 1758 nt, Artificial Sequence
  derived and/or modified CDS sequence (opt5) from hemagglutinin__InfluenzaB__AGX16555
augaaggccaucauugugcugcucauggucguuaccagcaacgcugacagaaucugcacaggcauuacguccucuaauagcccccacguggugaaaaccgccacacagggggaagucaacgugaccggaguuaucccucugacaaccacaccgaccaagucccauuucgcgaaucuuaaaggcacgaagacccgggggaaacugugucccaagugccucaacuguacagaucuggacguggcucuuggacgcccuaagugcaccggcaauauucccucugccaaagucagcauccugcacgaagugagaccuguuacauccggguguuuucccaucaugcaugaucggaccaagauucgccaacucccuaaccugcugagaggauacgagcacauccggcucucuacgcauaaugugauuaacgccgaaaaagcuccgggcggccccuauaagaucgggacaagcggauccugcccuaaugucaccaacggcaauggguucuuugccacaauggcuugggccgugcccaaaaacgacaauaacaagaccgcgaccaauagccugacaauugaggugccuuacaucuguacggaaggagaggaucagauuaccgucuggggcuuccacucugacaacgaggcccagauggcuaaacuuuauggggauuccaagccccagaaguuuacaagcucugccaacggaguuaccacacacuacgugucccaaaucggcggcuucccgaaucagaccgaagacgggggacugccucagagcggccgcaucguggucgauuauauggugcagaaaucugggaagacgggaacaauuaccuaccaaagaggcauccuccugccccagaaaguuuggugcgcuuccgggcggagcaaggugauuaaaggaucccuuccucugaucggcgaggccgacugucuccaugaaaaguauggcgggcugaacaagucuaaacccuacuacaccggagagcacgcgaaggccauuggcaauugccccaucugggucaaaacaccucugaagcucgcuaacgggaccaaauaucgcccgcccgccaagcugcuuaaggagagaggauuuuucggcgcuaucgccggguuucuggaaggcggaugggagggcaugauugccggguggcauggauacacaagccacggcgcucacgggguggcgguugccgcugaucucaaauccacgcaggaagccaucaauaagauuaccaaaaaccugaauagccuuucugagcuggaagugaagaaccuccagcggcuguccggagccauggacgagcugcauaaugagauccucgaacuggaugagaaagucgacgaccuucgcgcugauacaauuagcucucaaaucgaacuggccgugcuccugagcaacgagggcaucauuaauuccgaagacgagcaccuucuggcgcucgagagaaagcugaagaaaaugcuggggccuucugcugucgaaaucggcaacggauguuucgagaccaagcauaaaugcaaucagacaugccucgaucggauugccgccggcaccuuugacgcuggggaguucagccugcccacguuugauucccuuaacaucaccgccgcuagccugaaugacgauggacucgacaaccacacaauucugcuguauuacucuaccgccgcguccagccuugccgugacacucaugaucgcuauuuucguuguguauauggucucucgcgauaacguguccuguagcaucugccuguga

SEQ ID NO: 219136 - RNA, 1758 nt, Artificial Sequence
  derived and/or modified CDS sequence (opt5) from hemagglutinin__InfluenzaB__AGX16566
augaaggccaucauugugcugcucauggucguuaccagcaacgcugacagaaucugcacaggcauuacguccucuaauagcccccacguggugaaaaccgccacacagggggaagucaacgugaccggaguuaucccucugacaaccacaccgaccaagucccauuucgcgaaucuuaaaggcacgaagacccgggggaaacugugucccaagugccucaacuguacagaucuggacguggcucuuggacgcccuaagugcaccggcaauauucccucugccaaagucagcauccugcacgaagugagaccuguuacauccggguguuuucccaucaugcaugaucggaccaagauucgccaacucccuaaccugcugagaggauacgagcacauccggcucucuacgcauaaugugauuaacgccgaaaaagcuccgggcggccccuauaagaucgggacaagcggauccugcccuaaugucaccaacggcaauggguucuuugccacaauggcuugggccgugcccaaaaacgacaauaacaagaccgcgaccaauagccugacaauugaggugccuuacaucuguacggaaggagaggaucagauuaccgucuggggcuuccacucugacaacgagauccagauggccaaacuuuauggggauuccaagccccagaaguuuacaagcucugcuaacggaguuaccacacacuacgugucccaaaucggcggcuucccgaaucagaccgaagacgggggacugccucagagcggccgcauuguggucgauuauauggugcagaaaucugggaagacgggaacaaucaccuaccaaagaggcauucuccugccccagaaaguuuggugcgccuccgggcggagcaaggugaucaaaggaucccuuccucugauuggcgaggcugacugucuccaugaaaaguauggcgggcugaacaagucuaaacccuacuacaccggagagcacgccaaggcgaucggcaauugccccaucugggucaaaacaccucugaagcucgccaacgggaccaaauaucgcccgcccgcuaagcugcuuaaggagagaggauuuuucggcgccauugcuggguuucuggaaggcggaugggagggcaugaucgccggguggcauggauacacaagccacggcgcccacgggguggcuguugcggccgaucucaaauccacgcaggaagcuauuaauaagaucaccaaaaaccugaauagccuuucugagcuggaagugaagaaccuccagcggcuguccggagccauggacgagcugcauaaugagauucucgaacuggaugagaaagucgacgaccuucgcgccgauacaaucagcucucaaaucgaacuggcugugcuccugagcaacgagggcauuaucaauuccgaagacgagcaccuucuggcccucgagagaaagcugaagaaaaugcuggggccuucugcggucgaaauuggcaacggauguuucgagaccaagcauaaaugcaaucagacaugccucgaucggaucgcugccggcaccuuugacgccggggaguucagccugcccacguuugauucccuuaacauuaccgcugccagccugaaugacgauggacucgacaaccacacaauccugcuguauuacucuaccgcugccuccagccuugcggugacacucaugauugccaucuucguuguguauauggucucucgcgauaacguguccuguagcaucugccuguga

SEQ ID NO: 219137 - RNA, 1758 nt, Artificial Sequence; identical to SEQ ID NO: 219051
  derived and/or modified CDS sequence (opt5) from hemagglutinin__InfluenzaB__AGX16577

SEQ ID NO: 219138 - RNA, 1758 nt, Artificial Sequence
  derived and/or modified CDS sequence (opt5) from hemagglutinin__InfluenzaB__AGX16588
augaaggccaucauugugcugcucauggucguuaccagcaacgcugacagaaucugcacaggcauuacguccucuaauagcccccacguggugaaaaccgccacacagggggaagucaacgugaccggaguuaucccucugacaaccacaccgaccaagucccauuucgcgaaucuuaaaggcacgaagacccgggggaaacugugucccaagugccucaacuguacagaucuggacguggcucuuggacgcccuaagugcaccggcaauauucccucugccaaagucagcauccugcacgaagugagaccuguuacauccggguguuuucccaucaugcaugaucggaccaagauucgccaacucccuaaccugcugagaggauacgagcacauccggcucucuacgcauaaugugauuaacgccgaaaaagcuccgggcggccccuauaagaucgggacaagcggauccugcccuaaugucaccaacggcaauggguucuuugccacaauggcuugggccgugcccaaaaacgacaauaacaagaccgcgaccaauagccugacaauugaggugccuuacaucuguacggaaggagaggaucagauuaccgucuggggcuuccacucugacaacgagauccagauggccaaacuuuauggggauuccaagccccagaaguuuacaagcucugcuaacggaguuaccacacacuacgugucccaaaucggcggcuucccgaaucagaccgaagacgggggacugccucagagcggccgcauuguggucgauuauauggugcagaaaucugggaagacgggaacaaucaccuaccaaagaggcauucuccugccccagaaaguuuggugcgccuccgggcggagcaaggugaucaaaggaucccuuccucugauuggcgaggcugacugucuccaugaaaaguauggcgggcugaacaagucuaaacccuacuacaccggagagcacgccaaggcgaucggcaauugccccaucugggucaaaacaccucugaagcucgccaacgggaccaaauaucgcccgcccgcuaagcugcuuaaggagagaggauuuuucggcgccauugcuggguuucuggaaggcggaugggagggcaugaucgccggguggcauggauacacaagccacggcgcccacgggguggcuguugcggccgaucucaaauccacgcaggaagcuauuaauaagaucaccaaaaaccugaauagccuuucugagcuggaagugaagaaccuccagcggcuguccggagccauggacgagcugcauaaugagauucucgaacuggaugagaaagucgacgaccuucgcgccgauacaaucagcucucaaaucgaacuggcugugcuccugagcaacgagggcauuaucaauuccgaagacgagcaccuucuggcccucgagagaaagcugaagaaaaugcuggggccuucugcgauugaaaucggcaacggauguuucgagaccaagcauaaaugcaaucagacaugccucgaucggauugcugccggcaccuuugacgccggggaguucagccugcccacguuugauucccuuaacaucaccgcugccagccugaaugacgauggacucgacaaccacacaauucugcuguauuacucuaccgcugccuccagccuugcggucacacucaugaucgccaucuucgugguuuauauggugucucgcgauaacgucuccuguagcauuugccuguga

SEQ ID NO: 219139 - RNA, 1758 nt, Artificial Sequence; identical to SEQ ID NO: 219051
  derived and/or modified CDS sequence (opt5) from hemagglutinin__InfluenzaB__AGX16599

SEQ ID NO: 219140 - RNA, 1758 nt, Artificial Sequence; identical to SEQ ID NO: 219134
  derived and/or modified CDS sequence (opt5) from hemagglutinin__InfluenzaB__AGX16610

SEQ ID NO: 219141 - RNA, 1758 nt, Artificial Sequence; identical to SEQ ID NO: 219051
  derived and/or modified CDS sequence (opt5) from hemagglutinin__InfluenzaB__AGX16621

SEQ ID NO: 219142 - RNA, 1758 nt, Artificial Sequence
  derived and/or modified CDS sequence (opt5) from hemagglutinin__InfluenzaB__AGX16654
augaaggccaucauugugcugcucauggucguuaccagcaacgcugacagaaucugcacaggcauuacguccucuaauagcccccacguggugaaaaccgccacacagggggaagucaacgugaccggaguuaucccucugacaaccacaccgaccaagucccauuucgcgaaucuuaaaggcacgaagacccgggggaaacugugucccaagugccucaacuguacagaucuggacguggcucuuggacgcccuaagugcaccggcaauauucccucugccaaagucagcauccugcacgaagugagaccuguuacauccggguguuuucccaucaugcaugaucggaccaagauucgccaacucccuaaccugcugagaggauacgagcacauccggcucucuacgcauaaugugauuaacgccgaaaaagcuccgggcggccccuauaagaucgggacaagcggauccugcccuaaugucaccaacggcaauggguucuuugccacaauggcuugggccgugcccaaaaacgacaauaacaagaccgcgauuaauagccugaccaucgaggugccuuacauuuguacagaaggagaggaucagaucacggucuggggcuuccacucugacaacgagacccagauggccaaacuuuauggggauuccaagccccagaaguuuacaagcucugcuaacggaguuaccacacacuacgugucccaaaucggcggcuucccgaaucagaccgaagacgggggacugccucagagcggccgcauuguggucgauuauauggugcagaaaucugggaagacgggaacaaucaccuaccaaagaggcauucuccugccccagaaaguuuggugcgccuccgggcggagcaaggugaucaaaggaucccuuccucugauuggcgaggcugacugucuccaugaaaaguauggcgggcugaacaagucuaaacccuacuacaccggagagcacgccaaggcgaucggcaauugccccaucugggucaaaacaccucugaagcucgccaacgggaccaaauaucgcccgcccgcuaagcugcuuaaggagagaggauuuuucggcgccauugcuggguuucuggaaggcggaugggagggcaugaucgccggguggcauggauacacaagccacggcgcccacgggguggcuguugcggccgaucucaaauccacgcaggaagcuauuaauaagaucaccaaaaaccugaauagccuuucugagcuggaagugaagaaccuccagcggcuguccggagccauggacgagcugcauaaugagauucucgaacuggaugagaaagucgacgaccuucgcgccgauacaaucagcucucaaaucgaacuggcugugcuccugagcaacgagggcauuaucaauuccgaagacgagcaccuucuggcccucgagagaaagcugaagaaaaugcuggggccuucugcgauugaaaucggcaacggauguuucgagaccaagcauaaaugcaaucagacaugccucgaucggauugcugccggcaccuuugacgccggggaguucagccugcccacguuugauucccuuaacaucaccgcugccagccugaaugacgauggacucgacaaccacacaauucugcuguauuacucuaccgcugccuccagccuugcggucacacucaugaucgccaucuucgugguuuauauggugucucgcgauaacgucuccuguagcauuugccuguga

SEQ ID NO: 219143 - RNA, 1758 nt, Artificial Sequence; identical to SEQ ID NO: 219051
  derived and/or modified CDS sequence (opt5) from hemagglutinin__InfluenzaB__AGX16665

SEQ ID NO: 219144 - RNA, 1758 nt, Artificial Sequence; identical to SEQ ID NO: 219051
  derived and/or modified CDS sequence (opt5) from hemagglutinin__InfluenzaB__AGX16676

SEQ ID NO: 219145 - RNA, 1758 nt, Artificial Sequence; identical to SEQ ID NO: 219051
  derived and/or modified CDS sequence (opt5) from hemagglutinin__InfluenzaB__AGX16687

SEQ ID NO: 219146 - RNA, 1758 nt, Artificial Sequence; identical to SEQ ID NO: 219051
  derived and/or modified CDS sequence (opt5) from hemagglutinin__InfluenzaB__AGX16698

SEQ ID NO: 219147 - RNA, 1758 nt, Artificial Sequence
  derived and/or modified CDS sequence (opt5) from hemagglutinin__InfluenzaB__AGX16709
augaaggccaucauugugcugcucauggucguuaccagcaacgcugacagaaucugcacaggcauuacguccucuaauagcccccacguggugaaaaccgccacacagggggaggucaacgugaccggaguuaucccucugacaaccacaccgaccaagucccauuucgcgaaucuuaaaggcacgaagacccgggggaaacugugucccaagugccucaacuguacagaucuggacguggcucuuggacgcccuaagugcaccgaaaauauucccucugccaaagucagcauccugcacgaggugagaccuguuacauccggcuguuuucccaucaugcaugaucggaccaagauucgccaacucccuaaccugcugagaggguacgaacacauccggcucucuacgcauaaugugauuaacgccgagaaagcuccgggaggccccuauaagaucggcacaagcggguccugcccuaaugucaccaacggaaauggcuucuuugccacaauggcuugggccgugcccaaaaacgacaauaacaagaccgcgaccaauagccugacaauugaagugccuuacaucuguacggagggggaggaucagauuaccgucuggggauuccacucugacaacgaaacacagauggccaaacuuuauggcgauuccaaaccccagaaguuuaccagcucugcuaacgggguuacaacccacuacgugucccaaaucggaggcuucccgaaucagacggaggacggcgggcugccucagagcggacgcaucguggucgauuauauggugcagaaaucuggcaagacagggaccauuaccuaccaaagaggaauccuccugccccagaaaguuuggugcgccuccggccggagcaaggugauuaaagggucccuuccucugaucggagaagcugacugucuccaugagaaguauggcggccugaacaagucuaaacccuacuacacaggggagcacgccaaggcgauuggaaauugccccaucugggucaaaaccccucugaagcucgccaacggcacaaaauaucgcccgcccgcuaagcugcuuaaggaaagaggguuuuucggagccaucgcuggcuuucuggaagggggcugggagggaaugauugccggcuggcauggguacacgagccacggagcccacggcguggcuguugcggccgaucucaaauccacccaggaggcuaucaauaagauuacaaagaaccugaauagccuuucugaacuggaggugaagaaccuccagcggcuguccggggccauggacgagcugcauaaugaaauccucgagcuggaugaaaaagucgacgaccuucgcgccgauaccauuagcucucaaaucgagcuggcugugcuccugagcaacgaaggaaucauuaauuccgaggacgagcaccuucuggcccucgaaagaaagcugaagaaaaugcugggcccuucugcggucgagaucgggaacggcuguuucgaaacaaagcauaaaugcaaucagaccugccucgaucggauugcugccggaacguuugacgccggcgaguucagccugcccaccuuugauucccuuaacaucacagcugccagccugaaugacgaugggcucgacaaccacaccauucugcuguauuacucuacagcugccuccagccuugcggugacccucaugaucgccauuuucguuguguauauggucucucgcgauaacguguccuguagcaucugccuguga

SEQ ID NO: 219148 - RNA, 1758 nt, Artificial Sequence; identical to SEQ ID NO: 219051
  derived and/or modified CDS sequence (opt5) from hemagglutinin__InfluenzaB__AGX16720

SEQ ID NO: 219149 - RNA, 1758 nt, Artificial Sequence; identical to SEQ ID NO: 219051
  derived and/or modified CDS sequence (opt5) from hemagglutinin__InfluenzaB__AGX16731

SEQ ID NO: 219150 - RNA, 1758 nt, Artificial Sequence
  derived and/or modified CDS sequence (opt5) from hemagglutinin__InfluenzaB__AGX16742
augaaggccaucauugugcugcucauggucguuaccagcaacgcugacagaaucugcacaggcauuacguccucuaauagcccccacguggugaaaaccgccacacagggggaagucaacgugaccggaguuaucccucugacaaccacaccgaccaagucccauuucgcgaaucuuaaaggcacgaagacccgggggaaacugugucccaagugccucaacuguacagaucuggacguggcucuuggacgcccuaagugcaccggcaauauucccucugccaaagucagcaucauccacgaagugagaccuguuacauccggguguuuucccauuaugcaugaucggaccaagauccgccaacugccuaaccuccugagaggauacgagcacauucggcugucuacgcauaaugugaucaacgccgaaaaagcuccgggcggccccuauaagauugggacaagcggauccugcccuaaugucaccaacggcaauggguucuuugccacaauggcuugggccgugcccaaaaacgacaauaacaagaccgcgaccaauagccucacaaucgaggugccuuacauuuguacggaaggagaggaucagaucaccgucuggggcuuccacucugacaacgagacacagauggccaagcuguauggggauuccaaaccccagaaguuuaccagcucugcuaacggaguuacaacccacuacgugucccaaaucggcggcuucccgaaucagacggaagacgggggacuuccucagagcggccgcauuguggucgauuauauggugcagaaaucugggaagacaggaaccaucaccuaccaaagaggcauucugcucccccagaaaguuuggugcgccuccgggcggagcaaggugaucaaaggaucccugccucuuauuggcgaggcugacugucugcaugaaaaguauggcgggcucaacaagucuaaacccuacuacacaggagagcacgccaaggcgaucggcaauugccccaucugggucaaaaccccucugaagcuggccaacgggacaaaauaucgcccgcccgcuaagcuccugaaggagagaggauuuuucggcgccauugcuggguuucuugaaggcggaugggagggcaugaucgccggguggcauggauacacgagccacggcgcccacgggguggcuguugcggccgaucugaaauccacccaggaagcuauuaauaagaucaccaaaaaccucaauagccugucugagcuugaagugaagaaccugcagcggcucuccggagccauggacgagcugcauaaugagauucuggaacucgaugagaaagucgacgaccugcgcgccgauacaaucagcucucaaaucgaacuugcugugcugcucagcaacgagggcauuaucaauuccgaagacgagcaucugcuugcccuggagagaaagcucaagaaaaugcuggggccuucugcggucgaaauuggcaacggauguuucgagacaaagcacaaaugcaaucagaccugccuggaucggaucgcugccggcacguuugacgccggggaguucagccuccccaccuuugauucccugaacauuacagcugccagccuuaaugacgauggacuggacaaccacaccauccuccuguauuacucuacagcugccuccagccuggcggugacccuuaugauugccaucuucguuguguauauggucucucgcgauaacguguccuguagcaucugccucuga

SEQ ID NO: 219151 - RNA, 1758 nt, Artificial Sequence; identical to SEQ ID NO: 219051
  derived and/or modified CDS sequence (opt5) from hemagglutinin__InfluenzaB__AGX16753

SEQ ID NO: 219152 - RNA, 1758 nt, Artificial Sequence; identical to SEQ ID NO: 219051
  derived and/or modified CDS sequence (opt5) from hemagglutinin__InfluenzaB__AGX16764

SEQ ID NO: 219153 - RNA, 1758 nt, Artificial Sequence; identical to SEQ ID NO: 219051
  derived and/or modified CDS sequence (opt5) from hemagglutinin__InfluenzaB__AGX16775

SEQ ID NO: 219154 - RNA, 1758 nt, Artificial Sequence
  derived and/or modified CDS sequence (opt5) from hemagglutinin__InfluenzaB__AGX16797
augaaggccaucauugugcugcucauggucguuaccagcaacgcugacagaaucugcacaggcauuacguccucuaauagcccccacguggugaaaaccgccacacagggggaagucaacgugaccggaguuaucccucugacaaccacaccgaccaagucccauuucgcgaaucuuaaaggcacgaagacccgggggaaacugugucccaagugccucaacuguacagaucuggacguggcucuuggacgcccuaagugcaccggcaauaugcccucugccaaagucagcauucugcacgaagugagaccuguuacauccggguguuuucccaucaugcaugaucggaccaagauccgccaacucccuaaccugcugagaggauacgagcacauucggcucucuacgcauaaugugaucaacgccgaaaaagcuccgggcggccccuauaagauugggacaagcggauccugcccuaaugucaccaacggcaauggguucuuugccacaauggcuugggccgugcccaaaaacgacaauaacaagaccgcgaccaauagccugacaaucgaggugccuuacauuuguacggaaggagaggaucagaucaccgucuggggcuuccacucugacaacgagacacagauggccaaacuuuauggggauuccaaaccccagaaguuuaccagcucugcuaacggaguuacaacccacuacgugucccaaauuggcggcuucccgaaucagacggaagacgggggacugccucagagcggccgcaucguggucgauuauauggugcagaaaucugggaagacaggaaccaucaccuaccaaagaggcauucuccugccccagaaaguuuggugcgccuccgggcggagcaaggugaucaaaggaucccuuccucugauuggcgaggcugacugucuccaugaaaaguauggcgggcugaacaagucuaaacccuacuacacaggagagcacgccaaggcgaucggcaauugccccauuugggucaaaaccccucugaagcucgccaacgggacaaaauaucgcccgcccgcuaagcugcuuaaggagagaggauuuuucggcgccaucgcuggguuucuggaaggcggaugggagggcaugaucgccggguggcauggauacacgagccacggcgcccacgggguggcuguugcggccgaucucaaauccacccaggaagcuauuaauaagaucacaaagaaccugaauagccuuucugagcuggaagugaagaaccuccagcggcuguccggagccauggacgagcugcauaaugagauucucgaacuggaugagaaagucgacgaccuucgcgccgauaccaucagcucucaaauugaacuggcugugcuccugagcaacgagggcaucaucaauuccgaagacgagcaccuucuggcccucgagagaaagcugaagaaaaugcuggggccuucugcggucgaaauuggcaacggauguuucgagacaaagcauaaaugcaaucagaccugccucgaucggaucgcugccggcacguuugacgccggggaguucagccugcccaccuuugauucccuuaacauuacagcugccagccugaaugacgauggacucgacaaccacaccauccugcuguauuacucuacagcugccuccagccuugcggugacccucaugauugccaucuucguuguguauauggucucucgcgauaacguguccuguagcauuugccuguga

SEQ ID NO: 219155 - RNA, 1758 nt, Artificial Sequence; identical to SEQ ID NO: 219051
  derived and/or modified CDS sequence (opt5) from hemagglutinin__InfluenzaB__AGX16808

SEQ ID NO: 219156 - RNA, 1758 nt, Artificial Sequence
  derived and/or modified CDS sequence (opt5) from hemagglutinin__InfluenzaB__AGX16819
augaaggccaucauugugcugcucauggucguuaccagcaacgcugacagaaucugcacaggcauuacguccucuaauagcccccacguggugaaaaccgccacacagggggaagucaacgugaccggaguuaucccucugacaaccacaccgaccaagucccauuucgcgaaucuuaaaggcacgaagacccgggggaaacugugucccaagugccucaacuguacagaucuggacguggcucuuggacgcccuaagugcaccggcaauauucccucugccaaagucagcauccugcacgaagugagaccuguuacauccggguguuuucccaucaugcaugaucggaccaagauucgccaacucccuaaccugcugagaggauacgagcacauccggcucucuacgcauaaugugauuaacgccgaaaaagcuccgggcggccccuauaagaucgggacaagcggauccugcccuaaugucaccaacggcaauggguucuuugccacaauggcuugggccgugcccaaaaacgacaauaacaagaccgcgaccaauagccugacaauugaggugccuuacaucuguacggaaggagaggaucagauuaccgucuggggcuuccacucugacuccgagacacagauggccaaacuuuauggggauagcaaaccccagaaguuuaccucuuccgcuaacggaguuacaacccacuacgugagccaaaucggcggcuucccgaaccagacggaagacgggggacugccucagucuggccgcaucguggucgauuauauggugcagaaauccgggaagacaggaaccauuaccuaccaaagaggcauccuccugccccagaaaguuuggugcgccagcgggcgguccaaggugauuaaaggaucucuuccucugaucggcgaggcugacugucuccaugaaaaguauggcgggcugaauaagagcaaacccuacuacacaggagagcacgccaaggcgauuggcaacugccccaucugggucaaaaccccucugaagcucgccaaugggacaaaauaucgcccgcccgcuaagcugcuuaaggagagaggauuuuucggcgccaucgcuggguuucuggaaggcggaugggagggcaugauugccggguggcauggauacacgucccacggcgcccacgggguggcuguugcggccgaucucaaaagcacccaggaagcuaucaacaagauuacaaagaaucugaacucucuuuccgagcuggaagugaagaaucuccagcggcugagcggagccauggacgagcugcauaacgagauccucgaacuggaugagaaagucgacgaccuucgcgccgauaccauuucuagccaaaucgaacuggcugugcuccuguccaaugagggcaucauuaacucugaagacgagcaccuucuggcccucgagagaaagcugaagaaaaugcuggggccuagcgcggucgaaaucggcaauggauguuucgagacaaagcauaaaugcaaccagaccugccucgaucggauugcugccggcacguuugacgccggggaguucucccugcccaccuuugauagccuuaauaucacagcugccucucugaacgacgauggacucgacaaucacaccauucugcuguauuacuccacagcugccagcucucuugcggugacccucaugaucgccauuuucaucguuuauauggugucccgcgauaacgucagcuguuccaucugccuguga

SEQ ID NO: 219157 - RNA, 1758 nt, Artificial Sequence; identical to SEQ ID NO: 219051
  derived and/or modified CDS sequence (opt5) from hemagglutinin__InfluenzaB__AGX16830

SEQ ID NO: 219158 - RNA, 1758 nt, Artificial Sequence
  derived and/or modified CDS sequence (opt5) from hemagglutinin__InfluenzaB__AGX16841
augaaggccaucauugugcugcucauggucguuaccagcaacgcugacagaaucugcacaggcauuacguccucuaauagcccccacguggugaaaaccgccacacagggggaagucaacgugaccggaguuaucccucugacaaccacaccgaccaagucccauuucgcgaaucuuaaaggcacgaagacccgggggaaacugugucccaagugccucaacuguacagaucuggacguggcucuuggacgcccuaagugcaccggcaauauucccucugccaaagucagcauccugcacgaagugagaccuguuacauccggguguuuucccaucaugcaugaucggaccaagauucgccaacucccuaaccugcugagaggauacgagcacauccggcucucuacgcauaaugugauuaacgccgaaaaagcuccgggcggccccuauaagaucgggacaagcggauccugcccuaaugucaccaacggcaauggguucuuugccacaauggcuugggccgugcccaaaaacgacaauaacaagaccgcgaccaauagccugacaauugaggugccuuacaucuguacggaaggagaggaucagauuaccgucuggggcuuccacucugacaacgagacacagauggccaaacuuuauggggauuccaaaccccagaaguuuaccagcucugcuaacggaaugacaacccacuacguuucccaaaucggcggcuucccgaaucagacggaagacgggggacugccucagagcggccgcaucgugguggauuauaugguccagaaaucugggaagacaggaaccauuaccuaccaaagaggcauccuccugccccagaaaguguggugcgccuccgggcggagcaagguuauuaaaggaucccuuccucugaucggcgaggcugacugucuccaugaaaaguauggcgggcugaacaagucuaaacccuacuacacaggagagcacgccaaggcgauuggcaauugccccaucugggugaaaaccccucugaagcucgccaacgggacaaaauaucgcccgcccgcuaagcugcuuaaggagagaggauuuuucggcgccaucgcuggguuucuggaaggcggaugggagggcaugauugccggguggcauggauacacgagccacggcgcccacggggucgcuguggcggccgaucucaaauccacccaggaagcuaucaauaagauuacaaagaaccugaauagccuuucugagcuggaaguuaagaaccuccagcggcuguccggagccauggacgagcugcauaaugagauccucgaacuggaugagaaaguggacgaccuucgcgccgauaccauuagcucucaaaucgaacuggcuguccuccugagcaacgagggcaucauuaauuccgaagacgagcaccuucuggcccucgagagaaagcugaagaaaaugcuggggccuucugcgguggaaaucggcaacggauguuucgagacaaagcauaaaugcaaucagaccugccucgaucggauugcugccggcacguuugacgccggggaguucagccugcccaccuuugauucccuuaacaucacagcugccagccugaauggagacggccucgauaaccacaccauucugcuguauuacucuacagcugccuccagccuugcggucacccucaugaucgccauuuucgugguuuauauggugucucgcgacaacgucuccuguagcaucugccuguga

SEQ ID NO: 219159 - RNA, 1758 nt, Artificial Sequence
  derived and/or modified CDS sequence (opt5) from hemagglutinin__InfluenzaB__AGX16852
augaaggccaucauugugcugcucauggucguuaccagcaacgcugacagaaucugcacaggcauuacguccucuaauagcccccacguggugaaaaccgccacacagggggaagucaacgugaccggaguuaucccucugacaaccacaccgaccaagucccauuucgcgaaucuuaaaggcacgaagacccgggggaaacugugucccaagugccucaacuguacagaucuggacguggcucuuggacgcccuaagugcaccggcaauauucccucugccaaagucagcauccugcacgaagugagaccuguuacauccggguguuuucccaucaugcaugaucggaccaagauucgccaacucccuaaccugcugagaggauacgagcacauccggcucucuacgcauaaugugauuaacgccgaaaaagcuccgggcggccccuauaagaucgggacaagcggauccugcccuaaugucaccaacggcaauggguucuuugccacaauggcuugggccgugcccaaaaacgacaauaacaagaccgcgaccaauagccugacaauugaggugccuuacaucuguacggaaggagaggaucagauuaccgucuggggcuuccacucugacaacgagacacagauggccaaacuuuauggggauuccaaaccccagaaguuuaccagcucugcuaacggaguuacaacccacuacgugucccaaaucggcggcuucccgaaucagacggaagacgggggacugccucagagcggccgcaucguggucgauuauauggugcagaaaucugggaagacaggaaccauuaccuaccaaagaggcauccuccugccccagaaaguuuggugcgccuccgggcggagcaaggugauuaaaggaucccuuccucugaucggcgaggcugacugucuccaugaaaaguauggcgggcugaacaagucuaaacccuacuacacaggagagcacgccaaggcgauuggcaauugccccaucugggucaaaaccccucugaagcucgccaacgggacaaaauaucgcccgcccgcuaagcugcuuaaggagagaggauuuuucggcgccaucgcuggguuucuggaaggcggaugggagggcaugauugccggguggcauggauacacgagccacggcgcccacgggguggcuguugcggccgaucucaaauccacccaggaagcuaucaauaagauuacaaagaaccugaauagccuuucugagcuggaagugaagaaccuccagcggaucuccggagccauggacgagcugcauaaugagauucuggaacucgaugagaaagucgacgaccugcgcgccgauaccaucagcucucaaaucgaacuugcugugcugcucagcaacgagggcauuaucaauuccgaagacgagcaucugcuugcccuggagagaaagcucaagaaaaugcuggggccuucugcggucgaaauuggcaacggauguuucgagacaaagcacaaaugcaaucagaccugccuggaucggaucgcugccggcacguuugacgccggggaguucagccuccccaccuuugauucccugaacauuacagcugccagccuuaaugacgauggacuggacaaccacaccauccuccuguauuacucuacagcugccuccagccuggcggugacccuuaugauugccaucuucguuguguauauggucucucgcgauaacguguccuguagcaucugccucuga

SEQ ID NO: 219160 - RNA, 1758 nt, Artificial Sequence; identical to SEQ ID NO: 219051
  derived and/or modified CDS sequence (opt5) from hemagglutinin__InfluenzaB__AGX16863

SEQ ID NO: 219161 - RNA, 1758 nt, Artificial Sequence; identical to SEQ ID NO: 219051
  derived and/or modified CDS sequence (opt5) from hemagglutinin__InfluenzaB__AGX16874

SEQ ID NO: 219162 - RNA, 1758 nt, Artificial Sequence
  derived and/or modified CDS sequence (opt5) from hemagglutinin__InfluenzaB__AGX16885
augaaggccaucauugugcugcucauggucguuaccagcaacgcugacagaaucugcacaggcauuacguccucuaauagcccccacguggugaaaaccgccacacagggggaagucaacgugaccggaguuaucccucugacaaccacaccgaccaagucccauuucgcgaaucuuaaaggcacgaagacccgggggaaacugugucccaagugccucaacuguacagaucuggacguggcucuuggacgcccuaagugcaccggcaauauucccucugccaaagucagcauccugcacgaagugagaccuguuacauccggguguuuucccaucaugcaugaucggaccaagauucgccaacucccuaaccugcugagaggauacgagcacauccggcucucuacgcauaaugugauuaacgccgaaaaagcuccgggcggccccuauaagaucgggacaagcggauccugcccuaaugucaccaacggcaauggguucuuugccacaauggcuugggccgugcccaaaaacgacaauaacaagaccgcgaccaauagccugacaauugaggugccuuacaucuguacggaaggagaggaucagauuaccgucuggggcuuccacucugacaacgagacacagauggccaaacuuuauggggauuccaaaccccagaaguuuaccagcucugcuaacggaguuacaacccacuacgugucccaaaucggcggcuucccgaaucagacggaagacgggggacugccucagagcggccgcaucguggucgauuauauggugcagaaaucugggaagacaggaaccauuaccuaccaaagaggcauccuccugccccagaaaguuuggugcgccuccgggcggagcaaggugauuaaaggaucccuuccucugaucggcgaggcugacugucuccaugaaaaguauggcgggcugaacaagucuaaacccuacuacacaggagagcacgccaaggcgauuggcaauugccccaucugggucaaaaccccucugaagcucgccaacgggacaaaauaucgcccgcccgcuaagcugcuuaaggagagaggauuuuucggcgccaucgcuggguuucuggaaggcggaugggagggcaugauugccggguggcauggauacacgagccacggcgcccacgggguggcuguugcggccgaucucaaauccacccaggaagcuaucaauaagauuacaaagaaccugaauagccuuucugagcuggaagugaagaaccuccagcggcuguccggagccauggacgagcugcauaaugagauccucgaacuggaugagaaagucgacgaccuucgcgccgauaccauuagcucucaaaucgaacuggcugugcuccugagcaacgagggcaucauuaauuccgaagacgagcaccuucuggcccucgagagaaagcugaagaaaaugcuggggccuucugcgaucgaaauuggcaacggauguuucgagacaaagcauaaaugcaaucagaccugccucgaucggaucgcugccggcacguuugacgccggggaguucagccugcccaccuuugauucccuuaacauuacagcugccagccugaaugacgauggacucgacaaccacaccauccugcuguauuacucuacagcugccuccagccuugcggucacccucaugauugccaucuucgugguuuauauggugucucgcgauaacgucuccuguagcaucugccuguga

SEQ ID NO: 219163 - RNA, 1758 nt, Artificial Sequence; identical to SEQ ID NO: 219162
  derived and/or modified CDS sequence (opt5) from hemagglutinin__InfluenzaB__AGX16896

SEQ ID NO: 219164 - RNA, 1758 nt, Artificial Sequence; identical to SEQ ID NO: 219051
  derived and/or modified CDS sequence (opt5) from hemagglutinin__InfluenzaB__AGX16907

SEQ ID NO: 219165 - RNA, 1758 nt, Artificial Sequence; identical to SEQ ID NO: 219136
  derived and/or modified CDS sequence (opt5) from hemagglutinin__InfluenzaB__AGX16918

SEQ ID NO: 219166 - RNA, 1758 nt, Artificial Sequence; identical to SEQ ID NO: 219051
  derived and/or modified CDS sequence (opt5) from hemagglutinin__InfluenzaB__AGX16940

SEQ ID NO: 219167 - RNA, 1758 nt, Artificial Sequence; identical to SEQ ID NO: 219162
  derived and/or modified CDS sequence (opt5) from hemagglutinin__InfluenzaB__AGX16951

SEQ ID NO: 219168 - RNA, 1758 nt, Artificial Sequence
  derived and/or modified CDS sequence (opt5) from hemagglutinin__InfluenzaB__AGX16962
augaaggccaucauugugcugcucauggucguuaccagcaacgcugacagaaucugcacaggcauuacguccucuaauagcccccacguggugaaaaccgccacacagggggaggucaacgugaccggaguuaucccucugacaaccacaccgaccgaaucccauuucgcgaaucuuaagggcacgaaaacccgggggaagcugugucccaaaugccucaacuguacagaucuggacguggcucuuggacgcccuaagugcaccggcaauauucccucugccaaggucagcauccugcacgaggugagaccuguuacauccggguguuuucccaucaugcaugaucggaccaaaauucgccaacucccuaaccugcugagaggauacgaacacauccggcucucuacgcauaaugugauuaacgccgagaaggcuccgggcggccccuauaaaaucgggacaagcggauccugcccuaaugucaccaacggcaauggguucuuugccacaauggcuugggccgugcccaagaacgacaauaacaaaaccgcgaccaauagccugacaauugaagugccuuacaucuguacggagggagaggaucagauuaccgucuggggcuuccacucugacaacgaaacacagauggccaaacuuuauggggauuccaagccccagaaguuuaccagcucugcuaacggaguuacaacccacuacgugucccaaaucggcggcuucccgaaucagaaggaggacgggggacugccucagagcggccgcaucguggucgauuauauggugcagaaaucugggaacacgggaacaauuaccuaccaaagaggcauccuccugccccagaagguuuggugcgccuccgggcggagcaaagugauuaagggaucccuuccucugaucggcgaagcugacugucuccaugagaaauauggcgggcugaauaagucuaagcccuacuacaccggagagcacgccaaagcgauuggcaacugccccaucugggucaagacaccucugaaacucgccaaugggaccaaguaucgcccgcccgcuaaacugcuuaaggaaagaggauuuuucggcgccaucgcuggguuucuggagggcggaugggaaggcaugauugccggguggcauggauacacaagccacggcgcccacgggguggcuguugcggccgaucucaaguccacgcaggaggcuaucaacaaaauuaccaagaaucugaacagccuuucugaacuggaggugaaaaaucuccagcggcuguccggagccauggacgagcugcauaacgaaauccucgagcuggaugaaaaggucgacgaccuucgcgccgauacaauuagcucucaaaucgagcuggcugugcuccugagcaaugaaggcaucauuaacuccgaggacgagcaccuucuggcccucgaaagaaaacugaagaagaugcuggggccuucugcggucgagaucggcaauggauguuucgaaaccaaacauaagugcaaccagacaugccucgaucggauugcugccggcaccuuugacgccggggaguucagccugcccacguuugauucccuuaauaucaccgcugccagccugaacgacgauggacucgacaaccacacaauucugcuguauuacucuaccgcugccuccagccuugcggugacacucaugaucgccauuuucguuguguauauggucucucgcgauaauguguccuguagcaucugccuguga

SEQ ID NO: 219169 - RNA, 1758 nt, Artificial Sequence; identical to SEQ ID NO: 219051
  derived and/or modified CDS sequence (opt5) from hemagglutinin__InfluenzaB__AGX16973

SEQ ID NO: 219170 - RNA, 1758 nt, Artificial Sequence
  derived and/or modified CDS sequence (opt5) from hemagglutinin__InfluenzaB__AGX16995
augaaggccaucauugugcugcucauggucguuaccagcaacgcugacagaaucugcacaggcauuacguccucuaauagcccccacguggugaaaaccgccacacagggggaagucaacgugaccggaguuaucccucugacaaccacaccgaccaagucccauuucgcgaaucuuaaaggcacgaagacccgggggaaacugugucccaagugccucaacuguacagaucuggacguggcucuuggacgcccuaagugcaccggcaauauucccucugccaaagucagcauccugcacgaagugagaccuguuacauccggguguuuucccaucaugcaugaucggaccaagauucgccaacucccuaaccugcugagaggauacgagcacauccggcucucuacgcauaaugugauuaacgccgaaaaagcuccgggcggccccuauaagaucgggacaagcggauccugcccuaaugucaccaacggcaauggguucuuugccacaauggcuugggccgugcccaaaaacgacaauaacaagaccgcgaccaauagccugacaguggaggucccuuacauuuguacggaaggagaggaucagaucaccguuuggggcuuccacucugacaacgagauucagauggccaaacuuuauggggauuccaagccccagaaguuuacaagcucugcuaacggagugaccacacacuacgugucccaaaucggcggcuucccgaaucagaccgaagacgggggacugccucagagcggccgcaucgucguggauuauaugguucagaaaucugggaagacgggaacaauuaccuaccaaagaggcauccuccugccccagaaaguguggugcgccuccgggcggagcaaggucauuaaaggaucccuuccucugaucggcgaggcugacugucuccaugaaaaguauggcgggcugaacaagucuaaacccuacuacaccggagagcacgccaaggcgauuggcaauugccccaucugggugaaaacaccucugaagcucgccaacgggaccaaauaucgcccgcccgcuaagcugcuuaaggagagaggauuuuucggcgccaucgcuggguuucuggaaggcggaugggagggcaugauugccggguggcauggauacacaagccacggcgcccacgggguugcuguggcggccgaucucaaauccacgcaggaagcuaucaauaagauuaccaaaaaccugaauagccuuucugagcuggaagucaagaaccuccagcggcuguccggagccauggacgagcugcauaaugagauccucgaacuggaugagaaaguggacgaccuucgcgccgauacaauuagcucucaaaucgaacuggcuguccuccugagcaacgagggcaucauuaauuccgaagacgagcaccuucuggcccucgagagaaagcugaagaaaaugcuggggccuucugcgguggaaaucggcaacggauguuucgagaccaagcauaaaugcaaucagacaugccucgaucggauugcugccggcaccuuugacgccggggaguucagccugcccacguuugauucccuuaacaucaccgcugccagccugaaugacgauggacucgacaaccacacaauucugcuguauuacucuaccgcugccuccagccuugcgguuacacucaugaucgccauuuucguggucuauauggugucucgcgauaacguuuccuguagcaucugccuguga

SEQ ID NO: 219171 - RNA, 1758 nt, Artificial Sequence
  derived and/or modified CDS sequence (opt5) from hemagglutinin__InfluenzaB__AGX17006
augaaggccaucauugugcugcucauggucguuaccagcaacgcugacagaaucugcacaggcauuacguccucuaauagcccccacguggugaaaaccgccacacagggggaagucaacgugaccggaguuaucccucugacaaccacaccgaccaagucccauuucgcgaaucuuaaaggcacgaagacccgggggaaacugugucccaagugccucaacuguacagaucuggacguggcucuuggacgcccuaagugcaccggcaauauucccucugccaaagucagcauccugcacgaagugagaccuguuacauccggguguuuucccaucaugcaugaucggaccaagauucgccaacucccuaaccugcugagaggauacgagcacauccggcucucuacgcauaaugugauuaacgccgaaaaagcuccgggcggccccuauaagaucgggacaagcggauccugcccuaaugucaccaacggcaauggguucuuugccacaauggcuugggccgugcccaaaaacgacaauaacaagaccgcgaccaauagccugacaauugaggugccuuacaucuguacggaaggagaggaucagauuaccgucuggggcuuccacucugacaacgagaaccagauggccaaacuuuauggggauuccaagccccagaaguuuacaagcucugcuaauggaguuaccacacacuacgugucccaaaucggcggcuucccgaaccagaccgaagacgggggacugccucagagcggccgcaucguggucgauuauauggugcagaaaucugggaagacgggaacaauuaccuaccaaagaggcauccuccugccccagaaaguuuggugcgccuccgggcggagcaaggugauuaaaggaucccuuccucugaucggcgaggcugacugucuccaugaaaaguauggcgggcugaauaagucuaaacccuacuacaccggagagcacgccaaggcgauuggcaacugccccaucugggucaaaacaccucugaagcucgccaaugggaccaaauaucgcccgcccgcuaagcugcuuaaggagagaggauuuuucggcgccaucgcuggguuucuggaaggcggaugggagggcaugauugccggguggcauggauacacaagccacggcgcccacgggguggcuguugcggccgaucucaaauccacgcaggaagcuaucaacaagauuaccaaaaaucugaacagccuuucugagcuggaagugaagaaucuccagcggcuguccggagccauggacgagcugcauaacgagauccucgaacuggaugagaaagucgacgaccuucgcgccgauacaauuagcucucaaaucgaacuggcugugcuccugagcaaugagggcaucauuaacuccgaagacgagcaccuucuggcccucgagagaaagcugaagaaaaugcuggggccuucugcggucgaaaucggcaauggauguuucgagaccaagcauaaaugcaaccagacaugccucgaucggauugcugccggcaccuuugacgccggggaguucagccugcccacguuugauucccuuaauaucaccgcugccagccugaacgacgauggacucgacaaccacacaauucugcuguauuacucuaccgcugccuccagccuugcggugacacucaugaucgccauuuucguuguguauauggucucucgcgauaauguguccuguagcaucugccuguga

SEQ ID NO: 219172 - RNA, 1758 nt, Artificial Sequence; identical to SEQ ID NO: 219051
  derived and/or modified CDS sequence (opt5) from hemagglutinin__InfluenzaB__AGX17017

SEQ ID NO: 219173 - RNA, 1758 nt, Artificial Sequence; identical to SEQ ID NO: 219051
  derived and/or modified CDS sequence (opt5) from hemagglutinin__InfluenzaB__AGX17028

SEQ ID NO: 219174 - RNA, 1758 nt, Artificial Sequence
  derived and/or modified CDS sequence (opt5) from hemagglutinin__InfluenzaB__AGX17039
augaaggccaucauugugcugcucauggucguuaccagcaacgcugacagaaucugcacaggcauuacguccucuaauagcccccacguggugaaaaccgccacacagggggaggucaacgugaccggaguuaucccucugacaaccacaccgaccgaaucccauuucgcgaaucuuaagggcacgaaaacccgggggaagcugugucccaaaugccucaacuguacagaucuggacguggcucuuggacgcccuaagugcaccggcaauauucccucugccaaggucagcauccugcacgaggugagaccuguuacauccggguguuuucccaucaugcaugaucggaccaaaauucgccaacucccuaaccugcugagaggauacgaacacauccggcucucuacgcauaaugugauuaacgccgagaaggcuccgggcggccccuauaaaaucgggacaagcggauccugcccuaaugucaccaacggcaauggguucuuugccacaauggcuugggccgugcccaagaacgacaauaacaaaaccgcgaccaauagccugacaauugaagugccuuacaucuguacggagggagaggaucagauuaccgucuggggcuuccacucugacaacgaaacacagauggccaaacuuuauggggauuccaagccccagaaauuuaccagcucugcuaacggaguuacaacccacuacgugucccaaaucggcggcuucccgaaucagacggaggacgggggacugccucagagcggccgcaucguggucgauuauauggugcagaagucugggaacacaggaaccauuaccuaccaaagaggcauccuccugccccagaaaguuuggugcgccuccgggcggagcaaggugauuaaaggaucccuuccucugaucggcgaagcugacugucuccaugagaaguauggcgggcugaauaaaucuaagcccuacuacacaggagagcacgccaaggcgauuggcaacugccccaucugggucaaaaccccucugaagcucgccaaugggacaaaauaucgcccgcccgcuaagcugcuuaaagaaagaggauuuuucggcgccaucgcuggguuucuggagggcggaugggaaggcaugauugccggguggcauggauacacgagccacggcgcccacgggguggcuguugcggccgaucucaaguccacccaggaggcuaucaacaagauuacaaagaaucugaacagccuuucugaacuggaggugaagaaucuccagcggcuguccggagccauggacgagcugcauaacgaaauccucgagcuggaugaaaaagucgacgaccuucgcgccgauaccauuagcucucaaaucgagcuggcugugcuccugagcaaugaaggcaucauuaacuccgaggacgagcaccuucuggcccucgaaagaaagcugaaaaagaugcuggggccuucugcggucgagaucggcaauggauguuucgaaacaaagcauaaaugcaaccagaccugccucgaucggauugcugccggcacguuugacgccggggaguucagccugcccaccuuugauucccuuaauaucacagcugccagccugaacgacgauggacucgacaaccacaccauuaugcuguauuacucuacagcugccuccagccuggcggugacccuuaugaucgccauuuucguuguguauauggucucucgcgauaauguguccuguagcaucugccucuga

SEQ ID NO: 219175 - RNA, 1758 nt, Artificial Sequence; identical to SEQ ID NO: 219051
  derived and/or modified CDS sequence (opt5) from hemagglutinin__InfluenzaB__AGX17050

SEQ ID NO: 219176 - RNA, 1758 nt, Artificial Sequence
  derived and/or modified CDS sequence (opt5) from hemagglutinin__InfluenzaB__AGX17061
augaaggccaucauugugcugcucauggucguuaccagcaacgcugacagaaucugcacaggcauuacguccucuaauagcccccacguggugaaaaccgccacacagggggaggucaacgugaccggaguuaucccucugacaaccacaccgaccaagucccauuucgcgaaucuuaaaggcacgaagacccgggggaaacugugucccaagugccucaacuguacagaucuggacguggcucuuggacgcccuaagugcaccggcaauauucccucugccaaagucagcauccugcacgaagugagaccuguuacauccggguguuuucccaucaugcaugaucggaccaagauucgccaacucccuaaccugcugagaggauacgagcggauccgccucucuaaucacaacgugauuaaugccgaaaaagcuccgggcggccccuauaagaucgggacgagcggauccugcccuaacgucacaaauggcaacggguucuuugccaccauggcuugggccgugcccaaaaaugagaacaauaagacagcgaccaacagccugaccauugaagugccuuacaucuguacagagggagaggaccagauuacggucuggggcuuccauucugauaacgaaacccagauggccaaacuuuauggggacuccaagccccagaaguuuacaagcucugcuaauggaguuaccacacacuacgugucccaaaucggcggcuucccgaaccagaccgaggaugggggacugccucagagcggcagaaucguggucgacuauauggugcagaaaucugggaagacgggaacaauuaccuaccaacggggcauccuccugccccagaaaguuuggugcgccuccgggcgcagcaaggugauuaaaggaucccuuccucugaucggcgaagcugauugucuccacgagaaguauggcgggcugaauaagucuaaacccuacuacaccggagagcaugccaaggcgauuggcaacugccccaucugggucaaaacaccucugaagcucgccaaugggaccaaauauagaccgcccgcuaagcugcuuaaggaacggggauuuuucggcgccaucgcuggguuucuggagggcggaugggaaggcaugauugccggguggcacggauacacaagccauggcgcccacgggguggcuguugcggccgaccucaaauccacgcaggaggcuaucaacaagauuaccaaaaaucugaacagccuuucugaacuggaggugaagaaucuccagcgccuguccggagccauggaugagcugcacaacgaaauccucgagcuggacgaaaaagucgaugaccuuagagccgacacaauuagcucucaaaucgagcuggcugugcuccugagcaaugaaggcaucauuaacuccgaggaugagcaucuucuggcccucgaacggaagcugaagaaaaugcuggggccuucugcggucgagaucggcaauggauguuucgaaaccaagcacaaaugcaaccagacaugccucgaccgcauugcugccggcaccuuuaaugccggggaguucagccugcccacguuugauucccuuaacaucaccgcugccagccugaacgacgauggacucgacaaucauacaauucugcuguauuacucuaccgcugccuccagccuugcggugacacucaugaucgccauuuucguuguguauauggucucuagagauaacguguccuguagcaucugccuguga

SEQ ID NO: 219177 - RNA, 1758 nt, Artificial Sequence
  derived and/or modified CDS sequence (opt5) from hemagglutinin__InfluenzaB__AGX17072
augaaggccaucauugugcugcucauggucguuaccagcaacgcugacagaaucugcacaggcauuacguccucuaauagcccccacguggugaaaaccgccacacagggggaggucaacgugaccggaguuaucccucugacaaccacaccgaccgaaucccauuucgcgaaucuuaagggcacgaaaacccgggggaagcugugucccaaaugccucaacuguacagaucuggacguggcucuuggacgcccuaagugcaccggcaauauucccucugccaaggucagcauccugcacgaggugagaccuguuacauccggguguuuucccaucaugcaugaucggaccaaaauucgccaacucccuaaccugcugagaggauacgaacacauccggcucucuacgcauaaugugauuaacgccgagaaggcuccgggcggccccuauaaaaucgggacaagcggauccugcccuaaugucaccaacggcaauggguucuuugccacaauggcuugggccgugcccaagaacgacaauaacaaaaccgcgaccaauagccugacaauugaagugccuuacaucuguacggagggagaggaucagauuaccgucuggggcuuccacucugacaacgaaacacagauggccaaacuuuauggggauuccaagccccagaaauuuaccagcucugcuaacggaguuacaacccacuacgugucccaaaucggcggcuucccgaaucagacggaggacgggggacugccucagagcggccgcaucguggucgauuauauggugcagaagucugggaacacaggaaccauuaccuaccaaagaggcauccuccugccccagaaaguuuggugcgccuccgggcggagcaaggugauuaaaggaucccuuccucugaucggcgaagcugacugucuccaugagaaguauggcgggcugaauaaaucuaagcccuacuacacaggagagcacgccaaggcgauuggcaacugccccaucugggucaaaaccccucugaagcucgccaaugggacaaaauaucgcccgcccgcuaagcugcuuaaagaaagaggauuuuucggcgccaucgcuggguuucuggagggcggaugggaaggcaugauugccggguggcauggauacacgagccacggcgcccacgggguggcuguugcggccgaucucaaguccacccaggaggcuaucaacaagauuacaaagaaucugaacagccuuucugaacuggaggugaagaaucuccagcggcuguccggagccauggacgagcugcauaacgaaauccucgagcuggaugaaaaagucgacgaccuucgcgccgauaccauuagcucucaaaucgagcuggcugugcuccugagcaaugaaggcaucauuaacuccgaggacgagcaccuucuggcccucgaaagaaagcugaaaaagaugcuggggccuucugcggucgagaucggcaauggauguuucgaaacaaagcauaaaugcaaccagaccugccucgaucggauugcugccggcacguuugacgccggggaguucagccugcccaccuuugauucccuuaauaucacagcugccagccugaacgacgauggacucgacaaccacaccauucugcuguauuacucuacagcugccuccagccuugcggugacccucaugaucgccauuuucguuguguauauggucucucgcgauaauguguccuguagcaucugccuguga

SEQ ID NO: 219178 - RNA, 1758 nt, Artificial Sequence; identical to SEQ ID NO: 219162
  derived and/or modified CDS sequence (opt5) from hemagglutinin__InfluenzaB__AGX17083

SEQ ID NO: 219179 - RNA, 1758 nt, Artificial Sequence
  derived and/or modified CDS sequence (opt5) from hemagglutinin__InfluenzaB__AGX17094
augaaggccaucauugugcugcucauggucguuaccagcaacgcugacagaaucugcacaggcauuacguccucuaauagcccccacguggugaaaaccgccacacagggggaagucaacgugaccggaguuaucccucugacaaccacaccgaccaagucccauuucgcgaaucuuaaaggcacgaagacccgggggaaacugugucccaagugccucaacuguacagaucuggacguggcucuuggacgcccuaagugcaccggcaauauucccucugccaaagucagcauccugcacgaagugagaccuguuacauccggguguuuucccaucaugcaugaucggaccaagauucgccaacucccuaaccugcugagaggauacgagcacauccggcucucuacgcauaaugugauuaacgccgaaaaagcuccgggcggccccuauaagaucgggacaagcggauccugcccuaaugucaccaacggcaauggguucuuugccacaauggcuugggccgugcccaaaaacgacaauaacaagaccgcgaccaauagccugacaauugaggugccuuacaucuguacggaaggagaggaucagauuaccgucuggggcuuccacucugacuccgagacacagauggccaaacuuuauggggauagcaaaccccagaaguuuaccucuuccgcuaacggaguuacaacccacuacgugagccaaaucggcggcuucccgaaccagacggaagacgggggacugccucagucuggccgcaucguggucgauuauauggugcagaaauccgggaagacaggaaccauuaccuaccaaagaggcauccuccugccccagaaaguuuggugcgccagcgggcgguccaaggugauuaaaggaucucuuccucugaucggcgaggcugacugucuccaugaaaaguauggcgggcugaauaagagcaaacccuacuacacaggagagcacgccaaggcgauuggcaacugccccaucugggucaaaaccccucugaagcucgccaaugggacaaaauaucgcccgcccgcuaagcugcuuaaggagagaggauuuuucggcgccaucgcuggguuucuggaaggcggaugggagggcaugauugccggguggcauggauacacgucccacggcgcccacgggguggcuguugcggccgaucucaaaagcacccaggaagcuaucaacaagauuacaaagaaucugaacucucuuuccgagcuggaagugaagaaucuccagcggcugagcggagccauggacgagcugcauaacgagauccucgaacuggaugagaaagucgacgaccuucgcgccgauaccauuucuagccaaaucgaacuggcugugcuccuguccaaugagggcaucauuaacucugaagacgagcaccuucuggcccucgagagaaagcugaagaaaaugcuggggccuagcgcggucgaaaucggcaauggauguuucgagacaaagcauaaaugcaaccagaccugccucgaucggauugcugccggcacguuugacgccggggaguucucccugcccaccuuugauagccuuaauaucacagcugccucucugaacgacgauggacucgacaaucacaccauucugcuguauuacuccacagcugccagcucucuugcggugacccucaugaucgccauuuucguuguguauauggucucccgcgauaacgugagcuguuccaucugccuguga

SEQ ID NO: 219180 - RNA, 1758 nt, Artificial Sequence
  derived and/or modified CDS sequence (opt5) from hemagglutinin__InfluenzaB__AGX17105
augaaggccaucauugugcugcucauggucguuaccagcaacgcugacagaaucugcacaggcauuacguccucuaauagcccccacguggugaaaaccgccacacagggggaaaucaacgucaccggagugauuccucugacaaccacaccgaccaagucccauuucgcgaaucuuaaaggcacgaagacccgggggaaacugugucccaagugccucaacuguacagaucuggacguugcucuuggacgcccuaagugcaccggcaauauccccucugccaaagugagcauccugcacgaagucagaccugugacauccggguguuuucccauuaugcaugaucggaccaagauccgccaacucccuaaccugcugagaggauacgagcacauucggcucucuacgcauaauguuaucaacgccgaaaaagcuccgggcggccccuauaagauugggacaagcggauccugcccuaaugugaccaacggcaauggguucuuugccacaauggcuugggccguccccaaaaacgacaauaacaagaccgcgaccaauagccugacaaucgaggugccucacauuuguacggaaggagaggaucagaucaccguguggggcuuccacucugacaacgagauccagauggccaaacuuuacggggauuccaagccccagaaguuuacaagcucugcuaacggagucaccacacauuauauuucccaaaucggcggcuucccgaaucagaccgaagacgggggacugccucagagcggccgcauuguuguggauuacauggugcagaaaucugggaagacgggaacaaucaccuaucaaagaggcauucuccugccccagaaagucuggugcgccuccgggcggagcaaggugaucaaaggaucccuuccucugaucggcgaggcugacugucuccacgaaaaguacggcgggcugaacaagucuaaacccuauuacaccggagagcaugccaaggcgauuggcaauugccccaucuggguuaaaacaccucugaagcucgccaacgggaccaaauaccgcccgcccgcuaagcugcuuaaggagagaggauuuuucggcgccauugcuggguuucuggaaggcggaugggagggcaugaucgccggguggcacggauauacaagccacggcgcccaugggguggcugucgcggccgaucucaaauccacgcaggaagcuauuaauaagaucaccaaaaaccugaauagccuuucugagcuggaagugaagaaccuccagcggcuguccggagccauggacgagcugcacaaugagauccucgaacuggaugagaaaguugacgaccuucgcgccgauacaauuagcucucaaaucgaacuggcugugcuccugagcaacgagggcauuaucaauuccgaagacgagcaucuucuggcccucgagagaaagcugaagaaaaugcuggggccuucugcgauugaaaucggcaacggauguuucgagaccaagcacaaaugcaaucagacaugccucgaucggauugcugccggcaccuuugacgccggggaguucagccugcccacguuugauucccuuaacaucaccgcugccagccugaaugacgauggacucgacaaccauacaauccugcuguacuauucuaccgcugccuccagccuugcggucacacucaugauugccaucuucguggucuacauggugucucgcgauaacguuuccuguagcauuugccuguga

SEQ ID NO: 219181 - RNA, 1758 nt, Artificial Sequence; identical to SEQ ID NO: 219162
  derived and/or modified CDS sequence (opt5) from hemagglutinin__InfluenzaB__AGX17116

SEQ ID NO: 219182 - RNA, 1758 nt, Artificial Sequence
  derived and/or modified CDS sequence (opt5) from hemagglutinin__InfluenzaB__AGX17127
augaaggccaucauugugcugcucauggucguuaccagcaacgcugacagaaucugcacaggcauuacguccucuaauagcccccacguggugaaaaccgccacacagggggaggucaacgugaccggaguuaucccucugacaaccacaccgaccgaaucccauuucgcgaaucuuaagggcacgaaaacccgggggaagcugugucccaaaugccucaacuguacagaucuggacguggcucuuggacgcccuaagugcaccggcaauauucccucugccaaggucagcauccugcacgaggugagaccuguuacauccggguguuuucccaucaugcaugaucggaccaaaauucgccaacucccuaaccugcugagaggauacgaacacauccggcucucuacgcauaaugugauuaacgccgagaaggcuccgggcggccccuauaaaaucgggacaagcggauccugcccuaaugucaccaacggcaauggguucuuugccacaauggcuugggccgugcccaagaacgacaauaacaaaaccgcgaccaauagccugacaauugaagugccuuacaucuguacggagggagaggaucagauuaccgucuggggcuuccacucugacaacgaaaaccagauggccaaacuuuauggggauuccaagccccagaaguuuacaagcucugcuaauggaguuaccacacacuacgugucccaaaucggcggcuucccgaaccagaccgaggacgggggacugccucagagcggccgcaucguggucgauuauauggugcagaagucugggaauacgggaacaauuaccuaccaaagaggcauccuccugccccagaaaguuuggugcgccuccgggcggagcaaggugauuaaaggaucccuuccucugaucggcgaagcugacugucuccaugagaaguauggcgggcugaacaaaucuaagcccuacuacaccggagagcacgccaaggcgauuggcaauugccccaucugggucaaaacaccucugaagcucgccaacgggaccaaauaucgcccgcccgcuaagcugcuuaaagaaagaggauuuuucggcgccaucgcuggguuucuggagggcggaugggaaggcaugauugccggguggcauggauacacaagccacggcgcccacgggguggcuguugcggccgaucucaaguccacgcaggaggcuaucaauaagauuaccaaaaaccugaauagccuuucugaacuggaggugaagaaccuccagcggcuguccggagccauggacgagcugcauaaugaaauccucgagcuggaugaaaaagucgacgaccuucgcgccgauacaauuagcucucaaaucgagcuggcugugcuccugagcaacgaaggcaucauuaauuccgaggacgagcaccuucuggcccucgaaagaaagcugaaaaagaugcuggggccuucugcggucgagaucggcaacggauguuucgaaaccaagcauaaaugcaaucagacaugccucgaucggauugcugccggcaccuuugacgccggggaguucagccugcccacguuugauucccuuaacaucaccgcugccagccugaacgacgauggacucgacaaucacacaauucugcuguauuacucuaccgcugccuccagccuugcggugacacucaugaucgccauuuucguuguguauauggucucucgcgauaacguguccuguagcaucugccuguga

SEQ ID NO: 219183 - RNA, 1758 nt, Artificial Sequence; identical to SEQ ID NO: 219171
  derived and/or modified CDS sequence (opt5) from hemagglutinin__InfluenzaB__AGX17138

SEQ ID NO: 219184 - RNA, 1758 nt, Artificial Sequence; identical to SEQ ID NO: 219171
  derived and/or modified CDS sequence (opt5) from hemagglutinin__InfluenzaB__AGX17149

SEQ ID NO: 219185 - RNA, 1758 nt, Artificial Sequence
  derived and/or modified CDS sequence (opt5) from hemagglutinin__InfluenzaB__AGX17160
augaaggccaucauugugcugcucauggucguuaccagcaacgcugacagaaucugcacaggcauuacguccucuaauagcccccacguggugaaaaccgccacacagggggaagucaacgugaccggaaugaucccucugacaaccacaccgaccaagucccauuucgcgaaucuuaaaggcacgaagacccgggggaaacugugucccaagugccucaacuguacagaucuggacguugcucuuggacgcccuaagugcaccggcaauauucccucugccaaagugagcauccugcacgaagucagaccugugacauccggguguuuucccaucaugcaugaucggaccaagauucgccaacucccuaaccugcugagaggauacgagcacauccggcucucuacgcauaauguuauuaacgccgaaaaagcuccgggcggccccuauaagaucgggacaagcggauccugcccuaaugugaccaacggcaauggguucuuugccacaauggcuugggccguccccaaaaacgacaauaacaagaccgcgaccaauagccugacaauugaggugccuuacaucuguacggaaggagaggaucagauuaccguguggggcuuccacucugacaacgagacacagauggccaaacuuuauggggauuccaaaccccagaaguuuaccagcucugcuaacggagucacaacccacuacguuucccaaaucggcggcuucccgaaucagacggaagacgggggacugccucagagcggccgcaucgugguggauuauaugguccagaaaucugggaagacaggaaccauuaccuaccaaagaggcauccuccugccccagaaaguguggugcgccuccgggcggagcaagguuauuaaaggaucccuuccucugaucggcgaggcugacugucuccaugaaaaguauggcgggcugaacaagucuaaacccuacuacacaggagagcacgccaaggcgauuggcaauugccccaucugggugaaaaccccucugaagcucgccaacgggacaaaauaucgcccgcccgcuaagcugcuuaaggagagaggauuuuucggcgccaucgcuggguuucuggaaggcggaugggagggcaugauugccggguggcauggauacacgagccacggcgcccacggggucgcuguggcggccgaucucaaauccacccaggaagcuaucaauaagauuacaaagaaccugaauagccuuucugagcuggaaguuaagaaccuccagcggcuguccggagccauggacgagcugcauaaugagauccucgaacuggaugagaaaguggacgaccuucgcgccgauaccauuagcucucaaaucgaacuggcuguccuccugagcaacgagggcaucauuaauuccgaagacgagcaccuucuggcccucgagagaaagcugaagaaaaugcuggggccuucugcgguggaaaucggcaacggauguuucgagacaaagcauaaaugcaaucagaccugccucgaucggauugcugccggcacguuugacgccggggaguucagccugcccaccuuugauucccuuaacaucacagcugccagccugaaugacgauggacucgacaaccacaccauucugcuguauuacucuacagcugccuccagccuugcggucacccucaugaucgccauuuucgugguuuauauggugucucgcgauaacgucuccuguagcaucugccuguga

SEQ ID NO: 219186 - RNA, 1758 nt, Artificial Sequence
  derived and/or modified CDS sequence (opt5) from hemagglutinin__InfluenzaB__AGX17171
augaaggccaucauugugcugcucauggucguuaccagcaacgcugacagaaucugcacaggcauuacguccucuaauagcccccacguggugaaaaccgccacacagggggaggucaacgugaccggaguuaucccucugacaaccacaccgaccgaaucccauuucgcgaaucuuaagggcacgaaaacccgggggaagcugugucccaaaugccucaacuguacagaucuggacguggcucuuggacgcccuaagugcaccggcaauauucccucugccaaggucagcauccugcacgaggugagaccuguuacauccggguguuuucccaucaugcauaaccggaccaaaauucgccaacucccuaaucugcugagaggauacgaacacauccggcucucuacgcauaacgugauuaaugccgagaaggcuccgggcggccccuauaaaaucgggacaagcggauccugcccuaacgucaccaauggcaacggguucuuugccacaauggcuugggccgugcccaagaaugauaacaauaaaaccgcgaccaacagccugacaauugaagugccuuacaucuguacggagggagaggaccagauuaccgucuggggcuuccacucugauaacgaagcccagauggcuaaacuuuauggggacuccaagccccagaaguuuacaagcucugccaauggaguuaccacacacuacgugucccaaaucggcggcuucccgaaccagaccgaggaugggggacugccucagagcggccgcaucguggucgacuauauggugcagaagucugggaauacgggaacaauuaccuaccaaagaggcauccuccugccccagaaaguuuggugcgcuuccgggcggagcaaggugauuaaaggaucccuuccucugaucggcgaagccgauugucuccaugagaaguauggcgggcugaacaaaucuaagcccuacuacaccggagagcacgcgaaggccauuggcaauugccccaucugggucaaaacaccucugaagcucgcuaacgggaccaaauaucgcccgcccgccaagcugcuuaaagaaagaggauuuuucggcgcuaucgccggguuucuggagggcggaugggaaggcaugauugccggguggcauggauacacaagccacggcgcucacgggguggcgguugccgcugaccucaaguccacgcaggaggccaucaauaagauuaccaaaaaccugaauagccuuucugaacuggaggugaagaaccuccagcggcuguccggagccauggaugagcugcauaaugaaauccucgagcuggacgaaaaagucgaugaccuucgcgcugacacaauuagcucucaaaucgagcuggccgugcuccugagcaacgaaggcaucauuaauuccgaggaugagcaccuucuggcgcucgaaagaaagcugaaaaagaugcuggggccuucugcugucgagaucggcaacggauguuucgaaaccaagcauaaaugcaaucagacaugccucgaccggauugccgccggcaccuuugaugcuggggaguucagccugcccacguuugacucccuuaacaucaccgccgcuagccugaacgaugacggacucgauaaucacacaauucugcuguauuacucuaccgccgcguccagccuugccgugacacucaugaucgcuauuuucguuguguauauggucucucgcgacaacguguccuguagcaucugccuguga

SEQ ID NO: 219187 - RNA, 1758 nt, Artificial Sequence; identical to SEQ ID NO: 219051
  derived and/or modified CDS sequence (opt5) from hemagglutinin__InfluenzaB__AGX17182

SEQ ID NO: 219188 - RNA, 1758 nt, Artificial Sequence; identical to SEQ ID NO: 219051
  derived and/or modified CDS sequence (opt5) from hemagglutinin__InfluenzaB__AGX17193

SEQ ID NO: 219189 - RNA, 1758 nt, Artificial Sequence; identical to SEQ ID NO: 219051
  derived and/or modified CDS sequence (opt5) from hemagglutinin__InfluenzaB__AGX17204

SEQ ID NO: 219190 - RNA, 1758 nt, Artificial Sequence
  derived and/or modified CDS sequence (opt5) from hemagglutinin__InfluenzaB__AGX17215
augaaggccaucauugugcugcucauggucguuaccagcaacgcugacagaaucugcacaggcauuacguccucuaauagcccccacguggugaaaaccgccacacagggggaagucaacgugaccggaguuaucccucugacaaccacaccgaccaagucccauuucgcgaaucuuaaaggcacgaagacccgggggaaacugugucccaagugccucaacuguacagaucuggacguggcucuuggacgcccuaagugcaccggcaauauucccucugccaaagucagcauccugcacgaagugagaccuguuacauccggguguuuucccaucaugcaugaucggaccaagauucgccaacucccuaaccugcugagaggauacgagcacauccggcucucuacgcauaaugugauuaacgccgaaaaagcuccgggcggccccuauaagaucgggacaagcggauccugcccuaaugucaccaacggcaauggguucuuugccacaauggcuugggccgugcccaaaaacgacaauaacaagaccgcgaccaauagccugacaauugaggugccuuacaucuguacggaaggagaggaucagauuaccgucuggggcuuccacucugacaacgaggcccagauggcuaaacuuuauggggauuccaagccccagaaguuuacaagcucugccaacggaguuaccacacacuacgugucccaaaucggcggcuucccgaaucagaccgaagacgggggacugccucagagcggccgcaucguggucgauuauauggugcagaaaucugggaagacgggaacaauuaccuaccaaagaggcauccuccugccccagaaaguuuggugcgcuuccgggcggagcaaggugauuaaaggaucccuuccucugaucggcgaggccgacugucuccaugaaaaguauggcgggcugaacaagucuaaacccuacuacaccggagagcacgcgaaggccauuggcaauugccccaucugggucaaaacaccucugaagcucgcuaacgggaccaaauaucgcccgcccgccaagcugcuuaaggagagaggauuuuucggcgcuaucgccggguuucuggaaggcggaugggagggcaugauugccggguggcauggauacacaagccacggcgcucacgggguggcgguugccgcugaucucaaauccacgcaggaagccaucaauaagauuaccaaaaaccugaauagccuuucugagcuggaagugaagaaccuccagcggcuguccggagccauggacgagcugcauaaugagauccucgaacuggaugagaaagucgacgaccuucgcgcugauacaauuagcucucaaaucgaacuggccgugcuccugagcaacgagggcaucauuaauuccgaagacgagcaccuucuggcgcucgagagaaagcugaagaaaaugcuggggccuucugcuaucgaaauuggcaacggauguuucgagaccaagcauaaaugcaaucagacaugccucgaucggaucgccgccggcaccuuugacgcuggggaguucagccugcccacguuugauucccuuaacauuaccgccgcuagccugaaugacgauggacucgacaaccacacaauccugcuguauuacucuaccgccgcguccagccuugccgucacacucaugauugcuaucuucgugguuuauauggugucucgcgauaacgucuccuguagcaucugccuguga

SEQ ID NO: 219191 - RNA, 1758 nt, Artificial Sequence; identical to SEQ ID NO: 219051
  derived and/or modified CDS sequence (opt5) from hemagglutinin__InfluenzaB__AGX17226

SEQ ID NO: 219192 - RNA, 1758 nt, Artificial Sequence
  derived and/or modified CDS sequence (opt5) from hemagglutinin__InfluenzaB__AGX17237
augaaggccaucauugugcugcucauggucguuaccagcaacgcugacagaaucugcacaggcauuacguccucuaauagcccccacguggugaaaaccgccacacagggggaagucaacgugaccggaguuaucccucugacaaccacaccgaccaagucccauuucgcgaaucuuaaaggcacgaagacccgggggaaacugugucccaagugccucaacuguacagaucuggacguggcucuuggacgcccuaagugcaccggcaauauucccucugccaaagucagcauccugcacgaagugagaccuguuacauccggguguuuucccaucaugcaugaucggaccaagauucgccaacucccuaaccugcugagaggauacgagcacauccggcucucuacgcauaaugugauuaacgccgaaaaagcuccgggcggccccuauaagaucgggacaagcggauccugcccuaauauuaccaacggcaauggguucuuugccacaauggcuugggccguccccaaaaacgacaauaacaagaccgcgaccaauagccugacaaucgaggugccuuacauuuguacggaaggagaggaucagaucaccguguggggcuuccacucugacaacgagauccagauggccaaacuuuauggggauuccaagccccagaaguuuacaagcucugcuaacggagucaccacacacuacguuucccaaauuggcggcuucccgaaucagaccgaagacgggggacugccucagagcggccgcaucgugguggauuauaugguccagaaaucugggaagacgggaacaauuaccuaccaaagaggcauccuccugccccagaaaguguggugcgccuccgggcggagcaagguuauuaaaggaucccuuccucugaucggcgaggcugacugucuccaugaaaaguauggcgggcugaacaagucuaaacccuacuacaccggagagcacgccaaggcgaucggcaauugccccauuugggugaaaacaccucugaagcucgccaacgggaccaaauaucgcccgcccgcuaagcugcuuaaggagagaggauuuuucggcgccaucgcuggguuucuggaaggcggaugggagggcaugauugccggguggcauggauacacaagccacggcgcccacggggucgcuguggcggccgaucucaaauccacgcaggaagcuaucaauaagauuaccaaaaaccugaauagccuuucugagcuggaaguuaagaaccuccagcggcuguccggagccauggacgagcugcauaaugagauccucgaacuggaugagaaaguggacgaccuucgcgccgauacaaucagcucucaaauugaacuggcuguccuccugagcaacgagggcaucauuaauuccgaagacgagcaccuucuggcccucgagagaaagcugaagaaaaugcuggggccuucugcgguggaaaucggcaacggauguuucgagaccaagcauaaaugcaaucagacaugccucgaucggauugcugccggcaccuuugacgccggggaguucagccugcccacguuugauucccuuaacaucaccgcugccagccugaaugacgauggacucgacaaccacacaauucugcuguauuacucuaccgcugccuccagccuugcggucacacucaugaucgccaucuucgugguuuauauggugucucgcgauaacgucuccuguagcauuugccuguga

SEQ ID NO: 219193 - RNA, 1758 nt, Artificial Sequence
  derived and/or modified CDS sequence (opt5) from hemagglutinin__InfluenzaB__AGX17248
augaaggccaucauugugcugcucauggucguuaccagcaacgcugacagaaucugcacaggcauuacguccucuaauagcccccacguggugaaaaccgccacacagggggaagucaacgugaccggaguuaucccucugacaaccacaccgaccaagucccauuucgcgaaucuuaaaggcacgaagacccgggggaaacugugucccaagugccucaacuguacagaucuggacguggcucuuggacgcccuaagugcaccggcaauauucccucugccaaagucagcauccugcacgaagugagaccuguuacauccggguguuuucccaucaugcaugaucggaccaagauucgccaacucccuaaccugcugagaggauacgagcacauccggcucucuacgcauaaugugauuaacgccgaaaaagcuccgggcggccccuauaagaucgggacaagcggauccugcccuaaugucaccaacggcaauggguucuuugccacaauggcuugggccgugcccaaaaacgacaauaacaagaccgcgaccaauagccugacaauugaggugccuuacaucuguacggaaggagaggaucagauuaccgucuggggcuuccacucugacaacgagacacagauggccaaacuuuauggggauuccaagccccagaaguuuaccagcucugcuaacggaguuacaacccacuacgugucccaaaucggcggcuucccgaaucagacggaagacgggggacugccucagagcggccgcaucguggucgauuauauggugcagaaaucugggaagacaggaaccauuaccuaccaaagaggcauccuccugccccagaaaguuuggugcacauccgggcggagcaaggugauuaaaggaucccuuccucugaucggcgaggccgacugucuccaugaaaaguauggcgggcugaacaagucuaaacccuacuacaccggagagcacgcuaaggccauuggcaauugccccaucugggucaaaacaccucugaagcucgcgaacgggacgaaauaucgcccgcccgccaagcugcuuaaggagagaggauuuuucggcgcuaucgccggguuucuggaaggcggaugggagggcaugauugcuggguggcauggauacaccagccacggcgcccacgggguggccguugcugcggaucucaaauccacacaggaagccaucaauaagauuaccaaaaaccugaauagccuuucugagcuggaagugaagaaccuccagcggcuguccggagcuauggacgagcugcauaaugagauccucgaacuggaugagaaagucgacgaccuucgcgccgauacaauuagcucucaaaucgaacuggccgugcuccugagcaacgagggcaucauuaauuccgaagacgagcaccuucuggcucucgagagaaagcugaagaaaaugcuggggccuucugccgucgaaaucggcaacggauguuucgagaccaagcauaaaugcaaucagacgugccucgaucggauugcggcuggcaccuuugacgccggggaguucagccugcccacauuugauucccuuaacaucaccgccgcuagccugaaugacgauggacucgacaaccacacaauucugcuguauuacucuaccgccgcuuccagccuugccgugacgcucaugaucgcgauuuucguuguguauauggucucucgcgauaacguguccuguagcaucugccuguga

SEQ ID NO: 219194 - RNA, 1758 nt, Artificial Sequence; identical to SEQ ID NO: 219135
  derived and/or modified CDS sequence (opt5) from hemagglutinin__InfluenzaB__AGX17270

SEQ ID NO: 219195 - RNA, 1758 nt, Artificial Sequence; identical to SEQ ID NO: 219051
  derived and/or modified CDS sequence (opt5) from hemagglutinin__InfluenzaB__AGX17281

SEQ ID NO: 219196 - RNA, 1758 nt, Artificial Sequence; identical to SEQ ID NO: 219051
  derived and/or modified CDS sequence (opt5) from hemagglutinin__InfluenzaB__AGX17292

SEQ ID NO: 219197 - RNA, 1758 nt, Artificial Sequence; identical to SEQ ID NO: 219051
  derived and/or modified CDS sequence (opt5) from hemagglutinin__InfluenzaB__AGX17303

SEQ ID NO: 219198 - RNA, 1758 nt, Artificial Sequence; identical to SEQ ID NO: 219177
  derived and/or modified CDS sequence (opt5) from hemagglutinin__InfluenzaB__AGX17314

SEQ ID NO: 219199 - RNA, 1758 nt, Artificial Sequence; identical to SEQ ID NO: 219051
  derived and/or modified CDS sequence (opt5) from hemagglutinin__InfluenzaB__AGX17325

SEQ ID NO: 219200 - RNA, 1758 nt, Artificial Sequence; identical to SEQ ID NO: 219162
  derived and/or modified CDS sequence (opt5) from hemagglutinin__InfluenzaB__AGX17336

SEQ ID NO: 219201 - RNA, 1758 nt, Artificial Sequence; identical to SEQ ID NO: 219051
  derived and/or modified CDS sequence (opt5) from hemagglutinin__InfluenzaB__AGX17347

SEQ ID NO: 219202 - RNA, 1758 nt, Artificial Sequence; identical to SEQ ID NO: 219051
  derived and/or modified CDS sequence (opt5) from hemagglutinin__InfluenzaB__AGX17358

SEQ ID NO: 219203 - RNA, 1758 nt, Artificial Sequence
  derived and/or modified CDS sequence (opt5) from hemagglutinin__InfluenzaB__AGX17369
augaaggccaucauugugcugcucauggucguuaccagcaacgcugacagaaucugcacaggcauuacguccucuaauagcccccacguggugaaaaccgccacacagggggaagucaacgugaccggaguuaucccucugacaaccacaccgaccaagucccauuucgcgaaucuuaaaggcacgaagacccgggggaaacugugucccaagugccucaacuguacagaucuggacguggcucuuggacgcccuaagugcaccggcaauauucccucugccaaagucagcauccugcacgaagugagaccuguuacauccggguguuuucccaucaugcaugaucggaccaagauucgccaacucccuaaccugcugagaggauacgagcacauccggcucucuacgcauaaugugauuaacgccgaaaaagcuccgggcggccccuauaagaucgggacaagcggauccugcccuaaugucaccaacggcaauggguucuuugccacaauggcuugggccgugcccaaaaacgacaauaacaagaccgcgaccaauagccugacaauugaggugccuuacaucuguacggaaggagaggaucagauuaccgucuggggcuuccacucugacaacgagacacagauggccaaacuuuauggggauuccaaaccccagaaguuuaccagcucugcuaacggaguuacaacccacuacgugucccaaaucggcggcuucccgaaucagacggaagacgggggacugccucagagcggccgcaucguggccgauuauaugguccagaaaucugggaagacaggaaccauuaccuaccaaagaggcauccuccugccccagaaaguguggugcgcuuccgggcggagcaagguuauuaaaggaucccuuccucugaucggcgaggccgacugucuccaugaaaaguauggcgggcugaacaagucuaaacccuacuacacaggagagcacgcgaaggccauuggcaauugccccaucugggugaaaaccccucugaagcucgcuaacgggacaaaauaucgcccgcccgccaagcugcuuaaggagagaggauuuuucggcgcuaucgccggguuucuggaaggcggaugggagggcaugauugccggguggcauggauacacgagccacggcgcucacggggucgcgguggccgcugaucucaaauccacccaggaagccaucaauaagauuacaaagaaccugaauagccuuucugagcuggaaguuaagaaccuccagcggcuguccggagccauggacgagcugcauaaugagauccucgaacuggaugagaaaguggacgaccuucgcgcugauaccauuagcucucaaaucgaacuggccguccuccugagcaacgagggcaucauuaauuccgaagacgagcaccuucuggcgcucgagagaaagcugaagaaaaugcuggggccuucugcuguggaaaucggcaacggauguuucgagacaaagcauaaaugcaaucagaccugccucgaucggauugccgccggcacguuugacgcuggggaguucagccugcccaccuuugauucccuuaacaucacagccgcuagccugaaugacgauggacucgacaaccacaccauucugcuguauuacucuacagccgcguccagccuugccgucacccucaugaucgcuauuuucgugguuuauauggugucucgcgauaacgucuccuguagcaucugccuguga

SEQ ID NO: 219204 - RNA, 1758 nt, Artificial Sequence; identical to SEQ ID NO: 219177
  derived and/or modified CDS sequence (opt5) from hemagglutinin__InfluenzaB__AGX17380

SEQ ID NO: 219205 - RNA, 1758 nt, Artificial Sequence; identical to SEQ ID NO: 219051
  derived and/or modified CDS sequence (opt5) from hemagglutinin__InfluenzaB__AGX17391

SEQ ID NO: 219206 - RNA, 1758 nt, Artificial Sequence
  derived and/or modified CDS sequence (opt5) from hemagglutinin__InfluenzaB__AGX17400
augaaggccaucauugugcugcucauggucguuaccagcaacgcugacagaaucugcacaggcauuacguccucuaauagcccccacauggugaaaaccgccacacagggggaagugaacgucaccggagugaucccucugacaaccacaccgaccaagucccauuucgcgaaucuuaaaggcacgaagacccgggggaaacugugucccaagugccucaacuguacagaucuggacguugcucuuggacgcccuaagugcaccggcaauauucccucugccaaagugagcauccugcacgaagucagaccugugacauccggguguuuucccaucaugcaugaucggaccaagauucgccaacucccuaaccugcugagaggauacgagcacauccggcucucuacgcauaauguuauuaacgccgaaaaagcuccgggcggccccuauaagaucgggacaagcggauccugcccuaaugugaccaacggcaauggguucuuugccacaauggcuugggccguccccaaaaacgacaauaacaagaccgcgaccaauagccugacaauugaggugccuuacaucuguacggaaggagaggaucagauuaccguguggggcuuccacucugacaacgagacacagauggccaaacuuuauggggauuccaaaccccagaaguuuaccagcucugcuaacggagucacaacccacuacguuucccaaaucggcggcuucccgaaucagacggaagacgggggacugccucagagcggccgcaucgugguggauuauaugguccagaaaucugggaagacaggaaccauuaccuaccaaagaggcauccuccugccccagaaaguguggugcgccuccgggcggagcaagguuauuaaaggaucccuuccucugaucggcgaggcugacugucuccaugaaaaguauggcgggcugaacaagucuaaacccuacuacacaggagagcacgccaaggcgauuggcaauugccccaucugggugaaaaccccucugaagcucgccaacgggacaaaauaucgcccgcccgcuaagcugcuuaaggagagaggauuuuucggcgccaucgcuggguuucuggaaggcggaugggagggcaugauugccggguggcauggauacacgagccacggcgcccacggggucgcuguggcggccgaucucaaauccacccaggaagcuaucaauaagauuacaaagaaccugaauagccuuucugagcuggaaguuaagaaccuccagcggcuguccggagccauggacgagcugcauaaugagauccucgaacuggaugagaaaguggacgaccuucgcgccgauaccauuagcucucaaaucgaacuggcuguccuccugagcaacgagggcaucauuaauuccgaagacgagcaccuucuggcccucgagagaaagcugaagaaaaugcuggggccuucugcgguggaaaucggcaacggauguuucgagacaaagcauaaaugcaaucagaccugccucgaucggauugcugccggcacguuugacgccggggaguucagccugcccaccuuugauucccuuaacaucacagcugccagccugaaugacgauggacucgacaaccacaccauucugcuguauuacucuacagcugccuccagccuugcggucacccucaugaucgccauuuucgugguuuauauggugucucgcgauaacgucuccuguagcaucugccuguga

SEQ ID NO: 219207 - RNA, 1758 nt, Artificial Sequence; identical to SEQ ID NO: 219051
  derived and/or modified CDS sequence (opt5) from hemagglutinin__InfluenzaB__AGX17411

SEQ ID NO: 219208 - RNA, 1758 nt, Artificial Sequence; identical to SEQ ID NO: 219051
  derived and/or modified CDS sequence (opt5) from hemagglutinin__InfluenzaB__AGX17422

SEQ ID NO: 219209 - RNA, 1758 nt, Artificial Sequence; identical to SEQ ID NO: 219134
  derived and/or modified CDS sequence (opt5) from hemagglutinin__InfluenzaB__AGX17433

SEQ ID NO: 219210 - RNA, 1758 nt, Artificial Sequence; identical to SEQ ID NO: 219051
  derived and/or modified CDS sequence (opt5) from hemagglutinin__InfluenzaB__AGX17444

SEQ ID NO: 219211 - RNA, 1758 nt, Artificial Sequence; identical to SEQ ID NO: 219134
  derived and/or modified CDS sequence (opt5) from hemagglutinin__InfluenzaB__AGX17455

SEQ ID NO: 219212 - RNA, 1758 nt, Artificial Sequence; identical to SEQ ID NO: 219177
  derived and/or modified CDS sequence (opt5) from hemagglutinin__InfluenzaB__AGX17466

SEQ ID NO: 219213 - RNA, 1758 nt, Artificial Sequence; identical to SEQ ID NO: 219051
  derived and/or modified CDS sequence (opt5) from hemagglutinin__InfluenzaB__AGX17477

SEQ ID NO: 219214 - RNA, 1758 nt, Artificial Sequence; identical to SEQ ID NO: 219136
  derived and/or modified CDS sequence (opt5) from hemagglutinin__InfluenzaB__AGX17488

SEQ ID NO: 219215 - RNA, 1758 nt, Artificial Sequence; identical to SEQ ID NO: 219051
  derived and/or modified CDS sequence (opt5) from hemagglutinin__InfluenzaB__AGX17499

SEQ ID NO: 219216 - RNA, 1758 nt, Artificial Sequence; identical to SEQ ID NO: 219177
  derived and/or modified CDS sequence (opt5) from hemagglutinin__InfluenzaB__AGX17510

SEQ ID NO: 219217 - RNA, 1758 nt, Artificial Sequence; identical to SEQ ID NO: 219177
  derived and/or modified CDS sequence (opt5) from hemagglutinin__InfluenzaB__AGX17521

SEQ ID NO: 219218 - RNA, 1758 nt, Artificial Sequence; identical to SEQ ID NO: 219179
  derived and/or modified CDS sequence (opt5) from hemagglutinin__InfluenzaB__AGX17532

SEQ ID NO: 219219 - RNA, 1758 nt, Artificial Sequence
  derived and/or modified CDS sequence (opt5) from hemagglutinin__InfluenzaB__AGX17543
augaaggccaucauugugcugcucauggucguuaccagcaacgcugacagaaucugcacaggcauuacguccucuaauagcccccacguggugaaaaccgccacacagggggaagucaacgugaccggaguuaucccucugacaaccacaccgaccaagucccauuucgcgucucuuaaaggcacgaagacccgggggaaacugugucccaagugccucaauuguacagaucuggacguggcucuuggacgcccuaagugcaccggcaacauucccagcgccaaagucuccauccugcacgaagugagaccuguuacaucuggguguuuucccaucaugcaugaucggaccaagauucgccaacucccuaaucugcugagaggauacgagcacauccggcucagcacgcauaacgugauuaaugccgaaaaagcuccgggcggccccuauaagaucgggacauccggaagcugcccuaacgucaccaauggcaacggguucuuugccacaauggcuugggccgugcccaaaaaugacaacaauaagaccgcgaccaacucucugacaauugaggugccuuacaucuguacggaaggagaggaucagauuaccgucuggggcuuccacuccgacaaugagacacagauggccaaacuuuauggggauagcaaaccccagaaguuuaccucuuccgcuaacggaguuacaacccacuacgugagccaaaucggcggcuucccgaaccagacggaagacgggggacugccucagucuggccgcaucguggucgauuauauggugcagaaauccgggaagacaggaaccauuaccuaccaaagaggcauccuccugccccagaaaguuuggugcgccagcgggcgguccaaggugauuaaaggaucucuuccucugaucggcgaggcugacugucuccaugaaaaguauggcgggcugaauaagagcaaacccuacuacacaggagagcacgccaaggcgauuggcaacugccccaucugggucaaaaccccucugaagcucgccaaugggacaaaauaucgcccgcccgcuaagcugcuuaaggagagaggauuuuucggcgccaucgcuggguuucuggaaggcggaugggagggcaugauugccggguggcauggauacacgucccacggcgcccacgggguggcuguugcggccgaucucaaaagcacccaggaagcuaucaacaagauuacaaagaaucugaacucucuuuccgagcuggaagugaagaaucuccagcggcugagcggagccaugaacgagcugcauaaugagauccucgaacuggacgagaaagucgaugaccuucgcgccgacaccauuucuagccaaaucgaacuggcugugcuccuguccaacgagggcaucauuaauucugaagaugagcaccuucuggcccucgagagaaagcugaagaaaaugcuggggccuagcgcggucgaaaucggcaacggauguuucgagacaaagcauaaaugcaaucagaccugccucgaccggauugcugccggcacguuugaugccggggaguucucccugcccaccuuugacagccuuaacaucacagcugccucucugaaugaugacggacucgauaaccacaccauucugcuguauuacuccacagcugccagcucucuugcggugacccucaugaucgccauuuucguuguguauauggucucccgcgacaacgugagcuguuccaucugccuguga

SEQ ID NO: 219220 - RNA, 1758 nt, Artificial Sequence
  derived and/or modified CDS sequence (opt5) from hemagglutinin__InfluenzaB__AGX17554
augaaggccaucauugugcugcuccuggucguuaccagcaacgcugacagaaucugcacaggcauuacguccucuaauagcccccacguggugaaaaccgccacacagggggaagucaacgugaccggaguuaucccucuuacaaccacaccgaccaagucccauuucgcgaaucugaaaggcacgaagacccgggggaaacucugucccaagugccugaacuguacagaucuugacguggcucugggacgcccuaagugcaccggcaauauucccucugccaaagucagcauccuccacgaagugagaccuguuacauccggguguuuucccaucaugcaugaucggaccaagauucgccaacugccuaaccugcucagaggauacgagcacauccggcugucuacgcauaaugugauuaacgccgaaaaagcuccgggcggccccuauaagaucgggacaagcggauccugcccuaaugucaccaacggcaauggguucuuugccacaauggcuugggccgugcccaaaaacgacaauaacaagaccgcgaccaauagccuuacaauugaggugccuuacaucuguacggaaggagaggaucagauuaccgucuggggcuuccacucugacaacgagacacagauggccaagcuguauggggauuccaaaccccagaaguuuaccagcucugcuaacggaguuacaacccacuacgugucccaaaucggcggcuucccgaaucagacggaagacgggggacucccucagagcggccgcaucguggucgauuauauggugcagaaaucugggaagacaggaaccauuaccuaccaaagaggcauccugcuuccccagaaaguuuggugcgccuccgggcggagcaaggugauuaaaggaucccugccucucaucggcgaggcugacugucugcaugaaaaguauggcgggcugaacaagucuaaacccuacuacacaggagagcacgccaaggcgauuggcaauugccccaucugggucaaaaccccucucaagcuggccaacgggacaaaauaucgcccgcccgcuaaacuucugaaggagagaggauuuuucggcgccaucgcuggguuucucgaaggcggaugggagggcaugauugccggguggcauggauacacgagccacggcgcccacgggguggcuguugcggccgaucugaaauccacccaggaagcuaucaauaagauuacaaagaaccuuaauagccugucugagcucgaagugaagaaccugcagcggcuguccggagccauggacgagcuccauaaugagauccuggaacuugaugagaaagucgacgaccugcgcgccgauaccauuagcucucaaaucgaacucgcugugcugcuuagcaacgagggcaucauuaauuccgaagacgagcaucugcucgcccuggagagaaagcugaagaaaaugcucgggccuucugcggucgaaaucggcaacggauguuucgagacaaagcacaaaugcaaucagaccugccuggaucggauugcugccggcacguuugacgccggggaguucagccuucccaccuuugauucccugaacaucacagcugccagccucaaugacgauggacuggacaaccacaccauucugcuuuauuacucuacagcugccuccagccucgcggugacccugaugaucgccauuuucguuguguauauggucucucgcgauaacguguccuguagcaucugccuguga

SEQ ID NO: 219221 - RNA, 1755 nt, Artificial Sequence; identical to SEQ ID NO: 219095
  derived and/or modified CDS sequence (opt5) from hemagglutinin__InfluenzaB__AGX17565

SEQ ID NO: 219222 - RNA, 1758 nt, Artificial Sequence
  derived and/or modified CDS sequence (opt5) from hemagglutinin__InfluenzaB__AGX17576
augaaggccaucauugugcugcucauggucguuaccagcaacgcugacagaaucugcacaggcauuacguccucuaauagcccccacguggugaaaaccgccacacagggggaggucaacgugaccggaguuaucccucugacaaccacaccgaccaagucccauuucgcgaaucuuaaaggcacgaagacccgggggaaacugugucccaagugccucaacuguacagaucuggacguggcucuuggacgcccuaagugcaccggcaauauucccucugccgaagucagcauccugcacgaggugagaccuguuacauccggguguuuucccaucaugcaugaucggaccaaaauucgccaacucccuaaccugcugagaggauacgaacacauccggcucucuacgcauaaugugauuaacgccgagaaggcuccgggcggccccuauaaaaucgggacaagcggauccugcccuaaugucaccaacggcaauggguucuuugccacaauggcuugggccgugcccaagaacgacaauaacaaaaccgcgaccaauagccugacaauugaagugccuuacaucuguacggagggagaggaucagauuaccaucuggggcuuccacucugacaacgaaacacagauggccaaacuuuauggggauuccaagccccagaaguuuaccagcucugcuaacggagucacaacccacuacguuucccaaaucggcggcuucccgaaucagacggaggacgggggacugccucagagcggccgcauugugguggauuauaugguccagaagucugggaaaacaggaaccaucaccuaccaaagaggcauucuccugccccagaagguguggugcgccuccgggcggagcaaaguuaucaagggaucccuuccucugauuggcgaagcugacugucuccaugagaaauauggcgggcugaacaagucuaagcccuacuacacaggagagcacgccaaagcgaucggcaauugccccaucugggugaagaccccucugaaacucgccaacgggacaaaguaucgcccgcccgcuaaacugcuuaaggaaagaggauuuuucggcgccauugcuggguuucuggagggcggaugggaaggcaugaucgccggguggcauggauacacgagccacggcgcccacggggucgcuguggcggccgaucucaaguccacccaggaggcuauuaauaaaaucacaaagaaccugaauagccuuucugaacuggagguuaaaaaccuccagcggcuguccggagccauggacgagcugcauaaugaaauucucgagcuggaugaaaagguggacgaccuucgcgccgauaccaucagcucucaaaucgagcuggcuguccuccugagcaacgaaggcauuaucaauuccgaggacgagcaccuucuggcccucgaaagaaaacugaagaagaugcuggggccuucugcgguggagauuggcaacggauguuucgaaacaaaacauaagugcaaucagaccugccucgaucggaucgcugccggcacguuugacgccggggaguucagccugcccaccuuugauucccuuaacauuacagcugccagccugaaugacgauggacucgacaaccacaccauccugcuguauuacucuacagcugccuccagccuugcggucacccucaugauggccauuuucgugguuuauauggugucucgcgauaacgucuccuguagcaucugccuguga

SEQ ID NO: 219223 - RNA, 1758 nt, Artificial Sequence; identical to SEQ ID NO: 218586
  derived and/or modified CDS sequence (opt5) from hemagglutinin__InfluenzaB__AGX17598

SEQ ID NO: 219224 - RNA, 1758 nt, Artificial Sequence
  derived and/or modified CDS sequence (opt5) from hemagglutinin__InfluenzaB__AGX17609
augaaggccaucauugugcugcucauggucguuaccagcaacgcugacagaaucugcacaggcauuacguccucuaauagcccccacguggugaaaaccgccacacagggggaggucaacgugaccggaguuaucccucugacaaccacaccgaccaagucccauuucgcgaaucuuaaaggcacggaaacccgggggaagcugugucccaaaugccucaacuguacagaucuggacguggcucuuggacgcccuaagugcaccggcaagauucccucugccagagucagcauccugcacgaggugcggccuguuacauccggguguuuucccaucaugcaugaucgcaccaaaauuagacaacucccuaaucugcugcggggauacgaacacauccgccucucuacgcauaacgugauuaaugccgagaacgcuccgggcggccccuauaagaucgggacaagcggauccugcccuaaugucaccaacggcaauggguucuuugccacaauggcuugggccgugcccaaaaacgacaauaacaagaccgcgaccaauagccugacaauugaagugccuuacaucuguacggagggagaggaucagauuaccgucuggggcuuccacucugacaacgaaacacagauggccaaacuuuauggggauuccaagccccagaaguuuaccagcucugcuaacggaguuacaacccacuacgugucccaaaucggcggcuucccgaaucagacggaggacgggggacugccucagagcggcagaaucguggucgauuauauggugcagaaaucugggaagacaggaaccauuaccuaccaacggggcauccuccugccccagaaaguuuggugcgccuccgggcgcagcaaggugauuaaaggaucccuuccucugaucggcgaagcugacugucuccaugagaaguauggcgggcugaacaaaucuaagcccuacuacacaggagagcacgccaaggcgauuggcaauugccccaucugggucaaaaccccucugaagcucgccaacgggacaaaauauagaccgcccgcuaagcugcuuaaagaacggggauuuuucggcgccaucgcuggguuucuggagggcggaugggaaggcaugauugccggguggcauggauacacgagccacggcgcccacgggguggcuguugcggccgaucucaaguccacccaggaggcuaucaauaagauuaccaaaaaccugaauagccuuucugaacuggaggugaagaaccuccagcgccuguccggagccauggacgagcugcauaaugaaauccucgagcuggaugaaaaagucgacgaccuuagagccgauacaauuagcucucaaaucgagcuggcugugcuccugagcaacgaaggcaucauuaauuccgaggacgagcaccuucuggcccucgaacggaagcugaaaaagaugcuggggccuucugcggucgagaucggcaacggauguuucgaaacaaagcauaaaugcaaucagaccugccucgaucgcauugcugccggcacguuugacgccggggaguucagccugcccaccuuugauucccuuaacaucacagcugccagccugaaugacgauggacucgacaaccacaccauucugcuguauuacucuacagcugccuccagccuugcggugacccucaugaucgccauuuucguuguguauauggucucuagagauaacguguccuguagcaucugccuguga

SEQ ID NO: 219225 - RNA, 1758 nt, Artificial Sequence; identical to SEQ ID NO: 219053
  derived and/or modified CDS sequence (opt5) from hemagglutinin__InfluenzaB__AGX17620

SEQ ID NO: 219226 - RNA, 1758 nt, Artificial Sequence; identical to SEQ ID NO: 218586
  derived and/or modified CDS sequence (opt5) from hemagglutinin__InfluenzaB__AGX17631

SEQ ID NO: 219227 - RNA, 1758 nt, Artificial Sequence; identical to SEQ ID NO: 218710
  derived and/or modified CDS sequence (opt5) from hemagglutinin__InfluenzaB__AGX17642

SEQ ID NO: 219228 - RNA, 1758 nt, Artificial Sequence; identical to SEQ ID NO: 219053
  derived and/or modified CDS sequence (opt5) from hemagglutinin__InfluenzaB__AGX17653

SEQ ID NO: 219229 - RNA, 1758 nt, Artificial Sequence; identical to SEQ ID NO: 218586
  derived and/or modified CDS sequence (opt5) from hemagglutinin__InfluenzaB__AGX17664

SEQ ID NO: 219230 - RNA, 1758 nt, Artificial Sequence; identical to SEQ ID NO: 218710
  derived and/or modified CDS sequence (opt5) from hemagglutinin__InfluenzaB__AGX17675

SEQ ID NO: 219231 - RNA, 1758 nt, Artificial Sequence; identical to SEQ ID NO: 219053
  derived and/or modified CDS sequence (opt5) from hemagglutinin__InfluenzaB__AGX17686

SEQ ID NO: 219232 - RNA, 1758 nt, Artificial Sequence
  derived and/or modified CDS sequence (opt5) from hemagglutinin__InfluenzaB__AGX17697
augaaggccaucauugugcugcucauggucguuaccagcaacgcugacagaaucugcacaggcauuacguccucuaauagcccccacguggugaaaaccgccacacagggggaagucaacgugaccggaguuaucccucugacaaccacaccgaccaagucccauuucgcgaaucuuaaaggcacggaaacccgggggaagcugugucccaaaugccucaacuguacagaucuggacguggcucuuggacgcccuaagugcaccggcgagauucccucugccagagucagcauccugcacgaagugcggccuguuacauccggguguuuucccaucaugcaugaucgcaccaagauuagacaacucccuaaucugcugcggggauacgagcacauccgccucucuacgcauaacgccauuaaugcugaaaacgccccgggcggccccuauaaaaucgggacaagcggauccugcccuaaugugaccaacggcaauggguucuuugcuacaauggccugggcgguccccaagaacgacaauaacaaaaccgccaccaauagccugacaauugaggugccuuacaucuguacggagggagaagaucagauuaccguguggggcuuccacucugacaacgagacacagauggcuaaacuuuauggggauuccaagccccagaaguuuaccagcucugccaacggagucacaacccacuacguuucccaaaucggcggcuucccgaaucagacggaagacgggggacugccucagagcggcagaaucgugguggauuauaugguccagaagucugggaaaacaggaaccauuaccuaccaacggggcauccuccugccccagaagguguggugcgcuuccgggcgcagcaaaguuauuaagggaucccuuccucugaucggcgaggccgacugucuccaugagaaauauggcgggcugaacaagucuaaacccuacuacacaggagaacacgcgaaggccauuggcaauugccccaucugggugaagaccccucugaaacucgcuaacgggacaaaguauagaccgcccgccaaacugcuuaaggagcggggauuuuucggcgcuaucgccggguuucuggaaggcggaugggagggcaugauugccggguggcauggauacacgagccacggcgcucacggggucgcgguggccgcugaucucaaauccacccaggaagccaucaauaagauuacaaagaaccugaauagccuuucugagcuggagguuaaaaaccuccagcgccuguccggagccauggacgaacugcauaaugagauccucgaacuggaugagaagguggacgaccuuagagcugauaccauuagcucucaaaucgaacuggccguccuccugagcaacgagggcaucauuaauuccgaggacgaacaccuucuggcgcucgagcggaaacugaagaaaaugcuggggccuucugcuguggaaaucggcaacggauguuucgagacaaagcauaagugcaaucagaccugccucgaucgcauugccgccggcacguuugacgcuggggaguucagccugcccaccuuugauucccuuaacaucacagccgcuagccugaaugacgauggacucgacaaccacaccauucugcuguauuacucuacagccgcguccagccuugccgucacccucaugaucgcuauuuucgugguuuauauggugucuagagauaacgucuccuguagcaucugccuguga

SEQ ID NO: 219233 - RNA, 1758 nt, Artificial Sequence; identical to SEQ ID NO: 218710
  derived and/or modified CDS sequence (opt5) from hemagglutinin__InfluenzaB__AGX17708

SEQ ID NO: 219234 - RNA, 1758 nt, Artificial Sequence; identical to SEQ ID NO: 219053
  derived and/or modified CDS sequence (opt5) from hemagglutinin__InfluenzaB__AGX17719

SEQ ID NO: 219235 - RNA, 1758 nt, Artificial Sequence; identical to SEQ ID NO: 218710
  derived and/or modified CDS sequence (opt5) from hemagglutinin__InfluenzaB__AGX17730

SEQ ID NO: 219236 - RNA, 1758 nt, Artificial Sequence; identical to SEQ ID NO: 218586
  derived and/or modified CDS sequence (opt5) from hemagglutinin__InfluenzaB__AGX17741

SEQ ID NO: 219237 - RNA, 1758 nt, Artificial Sequence; identical to SEQ ID NO: 219053
  derived and/or modified CDS sequence (opt5) from hemagglutinin__InfluenzaB__AGX17752

SEQ ID NO: 219238 - RNA, 1758 nt, Artificial Sequence; identical to SEQ ID NO: 219053
  derived and/or modified CDS sequence (opt5) from hemagglutinin__InfluenzaB__AGX17774

SEQ ID NO: 219239 - RNA, 1758 nt, Artificial Sequence
  derived and/or modified CDS sequence (opt5) from hemagglutinin__InfluenzaB__AGX17785
augaaggccaucauugugcugcucauggucguuaccagcaacgcugacagaaucugcacaggcauuacguccucuaauagcccccacguggugaaaaccgccacacagggggaggucaacgugaccggaguuaucccucugacaaccacaccgaccaagucccauuucgcgaaucuuaaaggcacgaagacccgggggaaacugugucccaagugccucaacuguacagaucuggacguggcucuuggacgcccuaagugcaccggcaauauucccucugccgaagucagcauccugcacgaggugagaccuguuacauccggguguuuucccaucaugcaugaucggaccaaaauucgccaacucccuaaccugcugagaggauacgaacacgugcggcucucuacgcauaaugucaucaacgccgagaaggcuccgggcggccccuauaaaauugggacaagcggauccugcccuaaugugaccaacggcaauggguucuuugccacaauggcuugggccgugcccaagaacgacaauaacaaaaccgcgaccaauagccugacaaucgaagucccuuacauuuguacggagggagaggaucagaucaccauuuggggcuuccacucugacaacgaaacacagauggccaaacuuuauggggauuccaagccccagaaguuuaccagcucugcuaacggaguuacaacccacuacgugucccaaaucggcggcuucccgaaucagacggaggacgggggacugccucagagcggccgcaucguggucgauuauauggugcagaagucugggaaaacaggaaccauuaccuaccaaagaggcauccuccugccccagaagguuuggugcgccuccgggcggagcaaagugauuaagggaucccuuccucugaucggcgaagcugacugucuccaugagaaauauggcgggcugaacaagucuaagcccuacuacacaggagagcacgccaaagcgauuggcaauugccccaucugggucaagaccccucugaaacucgccaacgggacaaaguaucgcccgcccgcuaaacugcuuaaggaaagaggauuuuucggcgccaucgcuggguuucuggagggcggaugggaaggcaugauugccggguggcauggauacacgagccacggcgcccacgggguggcuguugcggccgaucucaaguccacccaggaggcuaucaauaaaauuacaaagaaccugaauagccuuucugaacuggaggugaaaaaccuccagcggcuguccggagccauggacgagcugcauaaugaaauccucgagcuggaugaaaaggucgacgaccuucgcgccgauaccauuagcucucaaaucgagcuggcugugcuccugagcaacgaaggcaucauuaauuccgaggacgagcaccuucuggcccucgaaagaaaacugaagaagaugcuggggccuucugcggucgagaucggcaacggauguuucgaaacaaaacauaagugcaaucagaccugccucgaucggauugcugccggcacguuugacgccggggaguucagccugcccaccuuugauucccuuaacaucacagcugccagccugaaugacgauggacucgacaaccacaccauucugcuguauuacucuacagcugccuccagccuugcggugacccucaugaucgccauuuucguuguguauauggucucucgcgauaacguguccuguagcaucugccuguga

SEQ ID NO: 219240 - RNA, 1758 nt, Artificial Sequence; identical to SEQ ID NO: 219053
  derived and/or modified CDS sequence (opt5) from hemagglutinin__InfluenzaB__AGX17796

SEQ ID NO: 219241 - RNA, 1758 nt, Artificial Sequence; identical to SEQ ID NO: 218637
  derived and/or modified CDS sequence (opt5) from hemagglutinin__InfluenzaB__AGX17807

SEQ ID NO: 219242 - RNA, 1758 nt, Artificial Sequence; identical to SEQ ID NO: 219224
  derived and/or modified CDS sequence (opt5) from hemagglutinin__InfluenzaB__AGX17818

SEQ ID NO: 219243 - RNA, 1758 nt, Artificial Sequence
  derived and/or modified CDS sequence (opt5) from hemagglutinin__InfluenzaB__AGX17829
augaaggccaucauugugcugcucauggucguuaccagcaacgcugacagaaucugcacaggcauuacguccucuaauagcccccacguggugaaaaccgccacacagggggaggucaacgugaccggaguuaucccucugacaaccacaccgaccaagucccauuucgcgaaucuuaaaggcacggaaacccgggggaagcugugucccaaaugccucaacuguacagaucuggacguggcucuuggacgcccuaagugcaccggcaagauucccucugccagagucagcauccugcacgaggugcggccuguuacauccggguguuuucccaucaugcaugaucgcaccaaaauuagacaacucccuaaucugcugcggggauacgaacacauccgccucucuacgcauaacgugauuaaugccgagaacgcuccgggcggccccuauaagaucgggacaagcggauccugcccuaaugucaccaacggcaauggguucuuugccacaauggcuugggccgugcccaaaaacgacaauaacaagaccgcgaccaauagccugacaauugaagugccuuacaucuguacggagggagaggaucagauuaccgucuggggcuuccacucugacaacgaaacacagauggccaaacuuuauggggauuccaagccccagaaguuuaccagcucugcuaacggaguuacaacccacuacgugucccaaaucggcggcuucccgaaucagacggaggacgggggacugccucagagcggcagaaucguggucgauuauauggugcagaaaucugggaagacaggaaccauuaccuaccaacggggcauccuccugccccagaaaguuuggugcgccuccgggcgcagcaaggugauuaaaggaucccuuccucugaucggcgaagcugacugucuccaugagaaguauggcgggcugaacaaaucuaagcccuacuacacaggagagcacgccaaggcgauuggcaauugccccaucugggucaaaaccccucugaagcucgccaacgggacaaaauauagaccgcccgcuaagcugcuuaaagaacggggauuuuucggcgccaucgcuggguuucuggagggcggaugggaaggcaugauugccggguggcauggauacacgagccacggcgcccacgggguggcuguugcggccgaucucaaguccacccaggaggcugugaauaagaucaccaaaaaccugaauagccuuucugaacuggaggucaagaaccuccagcgccuguccggagccauggacgagcugcauaaugaaauucucgagcuggaugaaaaaguggacgaccuuagagccgauacaaucagcucucaaauugagcuggcuguccuccugagcaacgaaggcaucaucaauuccgaggacgagcaccuucuggcccucgaacggaagcugaaaaagaugcuggggccuucugcgguggagauuggcaacggauguuucgaaacaaagcauaaaugcaaucagaccugccucgaucgcaucgcugccggcacguuugacgccggggaguucagccugcccaccuuugauucccuuaacauuacagcugccagccugaaugacgauggacucgacaaccacaccauccugcuguauuacucuacagcugccuccagccuugcgguuacccucaugauugccaucuucguggucuauauggugucuagagauaacguuuccuguagcauuugccuguga

SEQ ID NO: 219244 - RNA, 1758 nt, Artificial Sequence; identical to SEQ ID NO: 218710
  derived and/or modified CDS sequence (opt5) from hemagglutinin__InfluenzaB__AGX17840

SEQ ID NO: 219245 - RNA, 1758 nt, Artificial Sequence; identical to SEQ ID NO: 219053
  derived and/or modified CDS sequence (opt5) from hemagglutinin__InfluenzaB__AGX17851

SEQ ID NO: 219246 - RNA, 1758 nt, Artificial Sequence
  derived and/or modified CDS sequence (opt5) from hemagglutinin__InfluenzaB__AGX17862
augaaggccaucauugugcugcucauggucguuaccagcaacgcugacagaaucugcacaggcauuacguccucuaauagcccccacguggugaaaaccgccacacagggggaggucaacgugaccggaguuaucccucugacaaccacaccgaccaagucccauuucgcgaaucuuaaaggcacgaagacccgggggaaacugugucccaagugccucaacuguacagaucuggacguggcucuuggacgcccuaagugcaccggcaauauucccucugccgaagucagcauccugcacgaggugagaccuguuacauccggguguuuucccaucaugcaugaucggaccaaaauucgccaacucccuaaccugcugagaggauacgaacacauccggcucucuacgcauaaugugauuaacgccgagaaggcuccgggcggccccuauaaaaucgggacaagcggauccugcccuaaugucaccaacggcaauggguucuuugccacaauggcuugggccgugcccaagaacgacaauaacaaaaccgcgaccaauagccugacaauugaagugccuuacaucuguacggagggagaggaucagauuaccaucuggggcuuccacucugacaacgaaacacagauggccaagcuguauggggauuccaagccccagaaauuuaccagcucugcuaacggagucacaacccacuacguuucccaaaucggcggcuucccgaaucagacggaggacgggggacugccucagagcggccgcauugugguggauuauaugguccagaagucugggaaaacaggaaccaucaccuaccaaagaggcauucuccugccccagaagguguggugcgccuccgggcggagcaaaguuaucaagggaacacuuccucugauuggcgaagcugacugucuccaugagaaauauggcgggcugaacaaguccaagcccuacuacaccggagagcacgccaaagcgaucggcaauugccccaucugggugaagacaccucugaaacucgccaacgggacgaaguaucgcccgcccgcuaaacugcuuaaggaaagaggauuuuucggcgccauugcuggguuucuggagggcggaugggaaggcaugaucgccggguggcauggauacaccucucacggcgcccacggggucgcuguggcggccgaucucaagagcacacaggaggcuauuaauaaaaucaccaagaaccuuaauucccuuagcgaacuggagguuaaaaaccuccagcggcugucuggagccauggacgagcugcauaaugaaauucucgagcuggaugaaaagguggacgaccuucgcgccgauacaaucuccagccaaaucgagcuggcuguccuccugucuaacgaaggcauuaucaauagcgaggacgagcaccuucuggcccucgaaagaaaacugaagaagaugcuggggccuuccgcgguggagauuggcaacggauguuucgaaaccaaacauaagugcaaucagacgugccucgaucggaucgcugccggcaccuuugacgccggggaguucucucugcccacauuugauagccuuaacauuaccgcugccucccugaaugacgauggacucgacaaccacacaauccugcuguauuacagcaccgcugccucuucccuugcggucacgcucaugauugccaucuucgugguuuauauggugagccgcgauaacgucucuuguuccaucugccuguga

SEQ ID NO: 219247 - RNA, 1758 nt, Artificial Sequence
  derived and/or modified CDS sequence (opt5) from hemagglutinin__InfluenzaB__AGX17873
augaaggccaucauugugcugcucauggucguuaccagcaacgcugacagaaucugcacaggcauuacguccucuaauagcccccacguggugaaaaccgccacacagggggaggucaacgugaccggaguuaucccucugacaaccacaccgaccaagucccauuucgcgaaucuuaaaggcacggaaacccgggggaagcugugucccaaaugccucgauuguacagaccuggauguggcucuuggacgcccuaagugcaccggcaacauucccucugccagagucagcauccugcacgaggugcggccuguuacauccggguguuuucccaucaugcaugaccgcaccaagauuagacaacucccuaaucugcugcggggauacgaacacauccgccucucuacgcauaacgugauuaaugccgagaacgcuccgggcggccccuauaaaaucgggacaagcggauccugcccuaaugucaccaacggcaauggguucuuugccacaauggcuugggccgugcccaagaacgauaauaacaaaaccgcgaccaauagccugacaauugaagugccuuacaucuguacggagggagaggaccagauuaccgucuggggcuuccacucugauaacgaaacacagauggccaaacuuuauggggacuccaagccccagaaguuuaccagcucugcuaacggaguuacaacccacuacgugucccaaaucggcggcuucccgaaucagacggaggaugggggacugccucagagcggcagaaucguggucgacuauauggugcagaagucugggaaaacaggaaccauuaccuaccaacggggcauccuccugccccagaagguuuggugcgccuccgggcgcagcaaagugauuaagggaucccuuccucugaucggcgaagcugauugucuccaugagaaauauggcgggcugaacaagucuaaacccuacuacacaggagagcacgccaaggcgauuggcaauugccccaucugggucaagaccccucugaaacucgccaacgggacaaaguauagaccgcccgcuaaacugcuuaaggaacggggauuuuucggcgccaucgcuggguuucuggagggcggaugggaaggcaugauugccggguggcauggauacacgagccacggcgcccacgggguggcuguugcggccgaccucaaauccacccaggaggcuaucaauaagauuacaaagaaccugaauagccuuucugaacuggaggugaaaaaccuccagcgccuguccggagccauggaugagcugcauaaugaaauccucgagcuggacgaaaaggucgacgaucuuagagccgacaccauuagcucucaaaucgagcuggcugugcuccugagcaacgaaggcaucauuaauuccgaggaugagcaccuucuggcccucgaacggaaacugaagaaaaugcuggggccuucugcggucgagaucggcaacggauguuucgaaacaaagcauaagugcaaucagaccugccucgaccgcauugcugccggcacguuugaugccggggaguucagccugcccaccuuugacucccuuaacaucacagcugccagccugaaugaugacggacucgauaaccacaccauucugcuguauuacucuacagcugccuccagccuugcggugacccucaugaucgccauuuucguuguguauauggucucuagagacaacguguccuguagcaucugccuguga

SEQ ID NO: 219248 - RNA, 1758 nt, Artificial Sequence; identical to SEQ ID NO: 218710
  derived and/or modified CDS sequence (opt5) from hemagglutinin__InfluenzaB__AGX17884

SEQ ID NO: 219249 - RNA, 1758 nt, Artificial Sequence
  derived and/or modified CDS sequence (opt5) from hemagglutinin__InfluenzaB__AGX17895
augaaggccaucauugugcugcucauggucguuaccagcaacgcugacagaaucugcacaggcauuacguccucuaauagcccccacguggugaaaaccgccacacagggggaggucaacgugaccggaguuaucccucugacaaccacaccgaccaagucccauuucgcgaaucuuaaaggcacggaaacccgggggaagcugugucccaaaugccucaacuguacagaucuggacguggcucuuggacgcccuaagugcaccggcaauauucccucugccagagucagcauccugcacgaggugcggccuguuacauccggguguuuucccaucaugcaugaucgcaccaagauuagacaacucccuaaccugcugcggggauacgaacacauccgccucucuacgcauaaugugauuaacgccgagaaugcuccgggcggccccuauaaaaucgggacaagcggauccugcccuaacgucaccaauggcaacggguucuuugccacaauggcuugggccgugcccaagaaugacaacaauaaaaccgcgaccaacagccugacaauugaagugccuuacaucuguacggagggagaggaucagauuaccgucuggggcuuccacucugacaacgaaaaucagauggccaaacuuuauggggauuccaagccccagaaguuuacaagcucugcuaacggaguuaccacacacuacgugucccaaaucggcggcuucccgaaucagaccgaggacgggggacugccucagagcggcagaaucguggucgauuauauggugcagaagucugggaaaacgggaacaauuaccuaccaacggggcauccuccugccccagaagguuuggugcgccuccgggcgcagcaaagugauuaagggaucccuuccucugaucggcgaagcugacugucuccaugagaaauauggcgggcugaacaagucuaaacccuacuacaccggagagcacgccaaggcgauuggcaauugccccaucugggucaagacaccucugaaacucgccaacgggaccaaguauagaccgcccgcuaaacugcuuaaggaacggggauuuuucggcgccaucgcuggguuucuggagggcggaugggaaggcaugauugccggguggcauggauacacaagccacggcgcccacgggguggcuguugcggccgaucucaaauccacgcaggaggcuaucaauaagauuaccaagaaccugaauagccuuucugaacuggaggugaaaaaccuccagcgccuguccggagccauggacgagcugcauaaugaaauccucgagcuggaugaaaaggucgacgaccuuagagccgauacaauuagcucucaaaucgagcuggcugugcuccugagcaacgaaggcaucauuaauuccgaggacgagcaccuucuggcccucgaacggaaacugaagaaaaugcuggggccuucugcggucgagaucggcaacggauguuucgaaaccaagcauaagugcaaucagacaugccucgaucgcauugcugccggcaccuuugacgccggggaguucagccugcccacguuugauucccuuaacaucaccgcugccagccugaacgacgauggacucgacaaucacacaauucugcuguauuacucuaccgcugccuccagccuugcggugacacucaugaucgccauuuucguuguguauauggucucuagagauaacguguccuguagcaucugccuguga

SEQ ID NO: 219250 - RNA, 1758 nt, Artificial Sequence; identical to SEQ ID NO: 218710
  derived and/or modified CDS sequence (opt5) from hemagglutinin__InfluenzaB__AGX17906

SEQ ID NO: 219251 - RNA, 1758 nt, Artificial Sequence; identical to SEQ ID NO: 218710
  derived and/or modified CDS sequence (opt5) from hemagglutinin__InfluenzaB__AGX17917

SEQ ID NO: 219252 - RNA, 1758 nt, Artificial Sequence
  derived and/or modified CDS sequence (opt5) from hemagglutinin__InfluenzaB__AGX17928
augaagaccaucauugugcugcucauggucguuacaagcaacgccgacagaaucugcacgggcauuaccuccucuaauagcccccacguggugaaaacagcuacccagggggaggucaacgugacaggaguuaucccucugaccacaaccccgacgaagucccauuucgccaaucuuaaaggcaccaagacacgggggaaacugugucccaagugccucaacuguaccgaucuggacguggcgcuuggacgcccuaagugcacaggcaauauucccucugcugaagucagcauccugcacgaggugagaccuguuaccuccggguguuuucccaucaugcaugaucggacgaaaauucgccaacucccuaaccugcugagaggauacgaacacauccggcucucuacacauaaugugauuaacgccgagaaggccccgggcggccccuauaaaaucgggaccagcggauccugcccuaaugucacaaacggcaauggguucuuugcuaccauggccugggcugugcccaagaacgacaauaacaaaaccgccacaaauagccugacgauugaagugccuuacaucuguaccgagggagaggaucagauuacaaucuggggcuuccacucugacaacgaaacccagauggcgaagcuguauggggauuccaagccccagaaauuuacaagcucugccaacggagucaccacgcacuacguuucccaaaucggcggcuucccgaaucagacagaggacgggggacugccucagagcggccgcauugugguggauuauaugguccagaagucugggaaaaccggaaccaucacauaccaaagaggcauucuccugccccagaagguguggugcgcuuccgggcggagcaaaguuaucaagggaacccuuccucugauuggcgaagccgacugucuccaugagaaauauggcgggcugaacaaguccaagcccuacuacacaggagagcacgcuaaagccaucggcaauugccccaucugggugaagacgccucugaaacucgcgaacgggaccaaguaucgcccgcccgccaaacugcuuaaggaaagaggauuuuucggcgcuauugccggguuucuggagggcggaugggaaggcaugaucgcuggguggcauggauacacaucucacggcgcccacggggucgccguggcugcggaucucaagagcacccaggaggccauuaauaaaaucacaaagaaccuuaauucccuuagcgaacuggagguuaaaaaccuccagcggcugucuggagcuauggacgagcugcauaaugaaauucucgagcuggaugaaaagguggacgaccuucgcgccgauaccaucuccagccaaaucgagcuggccguccuccugucuaacgaaggcauuaucaauagcgaggacgagcaccuucuggcucucgaaagaaaacugaagaagaugcuggggccuuccgccguggagauuggcaacggauguuucgaaacgaaacauaagugcaaucagaccugccucgaucggaucgcggcuggcacauuugacgccggggaguucucucugcccaccuuugauagccuuaacauuacagccgcuucccugaaugacgauggacucgacaaccacaccauccugcuguauuacagcacggccgcuucuucccuugccgucacacucaugauugcgaucuucgugguuuauauggugagccgcgauaacgucucuuguuccaucugccuguga

SEQ ID NO: 219253 - RNA, 1758 nt, Artificial Sequence; identical to SEQ ID NO: 218586
  derived and/or modified CDS sequence (opt5) from hemagglutinin__InfluenzaB__AGX17939

SEQ ID NO: 219254 - RNA, 1758 nt, Artificial Sequence; identical to SEQ ID NO: 218586
  derived and/or modified CDS sequence (opt5) from hemagglutinin__InfluenzaB__AGX17950

SEQ ID NO: 219255 - RNA, 1758 nt, Artificial Sequence; identical to SEQ ID NO: 218586
  derived and/or modified CDS sequence (opt5) from hemagglutinin__InfluenzaB__AGX17961

SEQ ID NO: 219256 - RNA, 1758 nt, Artificial Sequence; identical to SEQ ID NO: 219053
  derived and/or modified CDS sequence (opt5) from hemagglutinin__InfluenzaB__AGX17972

SEQ ID NO: 219257 - RNA, 1758 nt, Artificial Sequence; identical to SEQ ID NO: 218586
  derived and/or modified CDS sequence (opt5) from hemagglutinin__InfluenzaB__AGX17983

SEQ ID NO: 219258 - RNA, 1758 nt, Artificial Sequence; identical to SEQ ID NO: 218710
  derived and/or modified CDS sequence (opt5) from hemagglutinin__InfluenzaB__AGX17994

SEQ ID NO: 219259 - RNA, 1758 nt, Artificial Sequence
  derived and/or modified CDS sequence (opt5) from hemagglutinin__InfluenzaB__AGX18005
augaaggccaucauugugcugcucauggucguuaccagcaacgcugacagaaucugcacaggcauuacguccucuaauagcccccacguggugaaaaccgccacacagggggaggucaacgugaccggaguuaucccucugacaaccacaccgaccaagucccauuucgcgaaucuuaaaggcacggaaacccgggggaagcugugucccaaaugccucaacuguacagaucuggacguggcucuuggacgcccuaagugcaccggcaauauucccucugccagagucagcauccugcacgaggugcggccuguuacauccggguguuuucccaucaugcaugaucgcaccaagauuagacaacucccuaaccugcugcggggauacgaacacauccgccucucuacgcauaaugugauuaacgccgagaaugcuccgggcggccccuauaaaaucgggacaagcggauccugcccuaacgucaccaauggcaacggguucuuugccacaauggcuugggccgugcccaagaaugacaacaauaaaaccgcgaccaacagccugacaauugaagugccuuacaucuguacggagggagaggaucagauuaccgucuggggcuuccacucugacaacgaaacacagauggccaagcuguauggggauuccaaaccccagaaguuuaccagcucugcuaauggaguuacaacccacuacgugucccaaaucggcggcuucccgaaccagacggaggacgggggacugccucagagcggcagaaucguggucgauuauauggugcagaagucugggaaaacaggaaccauuaccuaccaacggggcauccuccugccccagaagguuuggugcgccuccgggcgcagcaaagugauuaagggaucccuuccucugaucggcgaagcugacugucuccaugagaaauauggcgggcugaauaagucuaaacccuacuacacaggagagcacgccaaggcgauuggcaacugccccaucugggucaagaccccucugaaacucgccaaugggacaaaguauagaccgcccgcuaaacugcuuaaggaacggggauuuuucggcgccaucgcuggguuucuggagggcggaugggaaggcaugauugccggguggcauggauacacgagccacggcgcccacgggguggcuguugcggccgauaucaaauccacccaggaggcuauuaacaagaucacaaagaaucucaacagccugucugaacuugaggugaaaaaucugcagcgccucuccggagccauggacgagcugcauaacgaaauucuggagcucgaugaaaaggucgacgaccugagagccgauaccaucagcucucaaaucgagcuugcugugcugcucagcaaugaaggcauuaucaacuccgaggacgagcaccuucuugcccuggaacggaaacucaagaaaaugcuggggccuucugcggucgagauuggcaauggauguuucgaaacaaagcauaagugcaaccagaccugccuggaucgcaucgcugccggcacguuugacgccggggaguucagccuccccaccuuugauucccugaauauuacagcugccagccuuaacgacgauggacuggacaaccacaccauccuccuguauuacucuacagcugccuccagccuggcggugacccuuaugauugccaucuucguuguguauauggucucuagagauaauguguccuguagcaucugccucuga

SEQ ID NO: 219260 - RNA, 1758 nt, Artificial Sequence
  derived and/or modified CDS sequence (opt5) from hemagglutinin__InfluenzaB__AGX18016
augaaggccaucauugugcugcucauggucguuaccagcaacgcugacagaaucugcacaggcauuacguccucuaauagcccccacguggugaaaaccgccacacagggggaggucaacgugaccggaguuaucccucugacaaccacaccgaccaagucccauuucgcgaaucuuaaaggcacggaaacccgggggaagcugugucccaaaugccucaacuguacagaucuggacguggcucuuggacgcccuaagugcaccggcaauauucccucugccagagucagcauccugcacgaggugcggccuguuacauccggguguuuucccaucaugcaugaucgcaccaagauuagacaacucccuaaccugcugcggggauacgaacacauccgccucucuacgcauaaugugauuaacgccgagaaugcuccgggcggccccuauaaaaucgggacaagcggauccugcccuaacgucaccaauggcaacggguucuuugccacaauggcuugggccgugcccaagaaugacaacaauaaaaccgcgaccaacagccugacaauugaagugccuuacaucuguauugagggagaggaucagaucacggucuggggcuuccacucugacaacgaaacccagauggccaaacuuuauggggauuccaagccccagaaguuuacaagcucugcuaauggaguuaccacacacuacgugucccaaaucggcggcuucccgaaccagaccgaggacgggggacugccucagagcggcagaauuguggucgauuauauggugcagaagucugggaaaacgggaacaaucaccuaccaacggggcauucuccugccccagaagguuuggugcgccuccgggcgcagcaaagugaucaagggaucccuuccucugauuggcgaagcugacugucuccaugagaaauauggcgggcugaauaagucuaaacccuacuacaccggagagcacgccaaggcgaucggcaacugccccaucugggucaagacaccucugaaacucgccaaugggaccaaguauagaccgcccgcuaaacugcuuaaggaacggggauuuuucggcgccauugcuggguuucuggagggcggaugggaaggcaugaucgccggguggcauggauacacaagccacggcgcccacgggguggcuguugcggccgaucucaaauccacgcaggaggcuauuaacaagaucaccaagaaucugaacagccuuucugaacuggaggugaaaaaucuccagcgccuguccggagccauggacgagcugcauaacgaaauucucgagcuggaugaaaaggucgacgaccuuagagccgauacaaucagcucucaaaucgagcuggcugugcuccugagcaaugaaggcauuaucaacuccgaggacgagcaccuucuggcccucgaacggaaacugaagaaaaugcuggggccuucugcggucgagauuggcaauggauguuucgaaaccaagcauaagugcaaccagacaugccucgaucgcaucgcugccggcaccuuugacgccggggaguucagccugcccacguuugauucccuuaauauuaccgcugccagccugaacgacgauggacucgacaaccacacaauccugcuguauuacucuaccgcugccuccagccuugcggugacacucaugauugccaucuucguuguguauauggucucuagagauaauguguccuguagcaucugccuguga

SEQ ID NO: 219261 - RNA, 1758 nt, Artificial Sequence; identical to SEQ ID NO: 219224
  derived and/or modified CDS sequence (opt5) from hemagglutinin__InfluenzaB__AGX18027

SEQ ID NO: 219262 - RNA, 1758 nt, Artificial Sequence; identical to SEQ ID NO: 218710
  derived and/or modified CDS sequence (opt5) from hemagglutinin__InfluenzaB__AGX18038

SEQ ID NO: 219263 - RNA, 1758 nt, Artificial Sequence; identical to SEQ ID NO: 218710
  derived and/or modified CDS sequence (opt5) from hemagglutinin__InfluenzaB__AGX18049

SEQ ID NO: 219264 - RNA, 1758 nt, Artificial Sequence; identical to SEQ ID NO: 218710
  derived and/or modified CDS sequence (opt5) from hemagglutinin__InfluenzaB__AGX18060

SEQ ID NO: 219265 - RNA, 1758 nt, Artificial Sequence; identical to SEQ ID NO: 218586
  derived and/or modified CDS sequence (opt5) from hemagglutinin__InfluenzaB__AGX18071

SEQ ID NO: 219266 - RNA, 1758 nt, Artificial Sequence; identical to SEQ ID NO: 219246
  derived and/or modified CDS sequence (opt5) from hemagglutinin__InfluenzaB__AGX18082

SEQ ID NO: 219267 - RNA, 1758 nt, Artificial Sequence; identical to SEQ ID NO: 219246
  derived and/or modified CDS sequence (opt5) from hemagglutinin__InfluenzaB__AGX18093

SEQ ID NO: 219268 - RNA, 1758 nt, Artificial Sequence; identical to SEQ ID NO: 219053
  derived and/or modified CDS sequence (opt5) from hemagglutinin__InfluenzaB__AGX18104

SEQ ID NO: 219269 - RNA, 1758 nt, Artificial Sequence; identical to SEQ ID NO: 218710
  derived and/or modified CDS sequence (opt5) from hemagglutinin__InfluenzaB__AGX18115

SEQ ID NO: 219270 - RNA, 1758 nt, Artificial Sequence; identical to SEQ ID NO: 218710
  derived and/or modified CDS sequence (opt5) from hemagglutinin__InfluenzaB__AGX18126

SEQ ID NO: 219271 - RNA, 1758 nt, Artificial Sequence; identical to SEQ ID NO: 218586
  derived and/or modified CDS sequence (opt5) from hemagglutinin__InfluenzaB__AGX18137

SEQ ID NO: 219272 - RNA, 1758 nt, Artificial Sequence; identical to SEQ ID NO: 219246
  derived and/or modified CDS sequence (opt5) from hemagglutinin__InfluenzaB__AGX18148

SEQ ID NO: 219273 - RNA, 1758 nt, Artificial Sequence; identical to SEQ ID NO: 218586
  derived and/or modified CDS sequence (opt5) from hemagglutinin__InfluenzaB__AGX18159

SEQ ID NO: 219274 - RNA, 1758 nt, Artificial Sequence; identical to SEQ ID NO: 218586
  derived and/or modified CDS sequence (opt5) from hemagglutinin__InfluenzaB__AGX18170

SEQ ID NO: 219275 - RNA, 1758 nt, Artificial Sequence; identical to SEQ ID NO: 219246
  derived and/or modified CDS sequence (opt5) from hemagglutinin__InfluenzaB__AGX18181

SEQ ID NO: 219276 - RNA, 1758 nt, Artificial Sequence
  derived and/or modified CDS sequence (opt5) from hemagglutinin__InfluenzaB__AGX18192
augaaggccaucauugugcugcucauggucguuaccagcaacgcugacagaaucugcacaggcauuacguccucuaauagcccccacguggugaaaaccgccacacagggggaggucaacgugaccggaguuaucccucugacaaccacaccgaccaagucccauuucgcgaaucuuaaaggcacgaagacccgggggaaacugugucccaagugccucaacuguacagaucuggacguggcucuuggacgcccuaagugcaccggcaauauucccucugccgaagucagcauccugcacgaggugagaccuguuacauccggguguuuucccaucaugcaugaucggaccaaaauucgccaacucccuaaccugcugagaggauacgaacacauccggcucucuacgcauaaugugauuaacgccgagaaggcuccgggcggccccuauaaaaucgggacaagcggauccugcccuaaugucaccaacggcaauggguucuuugccacaauggcuugggccgugcccaagaacgacaauaacaaaaccgcgaccaauagccugacaauugaagugccuuacaucuguacggagggagaggaucagauuaccaucuggggcuuccacucugacaacgaaacacagauggccaagcuguauggggauuccaagccccagaaauuuaccagcucuacaaacggagucaccacgcacuacguuucccaaaucggcggcuucccgaaucagacagaggacgggggacugccucagagcggccgcauugugguggauuauaugguccagaagcccgggaaaaccggaaccaucacauaccaaagaggcauucuccugccucagaagguguggugcgcuucugggcgguccaaaguuaucaagggaagccuuccccugauuggcgaagccgacugucuccaugagaaauauggcgggcugaacaaguccaagcccuacuacaccggagagcacgcuaaagccaucggcaauugcccuaucugggugaagacaccgcugaaacucgcgaacgggacgaaguauagacccccugccaaacugcuuaaggaacgcggauuuuucggcgcuauugccggguuucuggagggcggaugggaaggcaugaucgcuggguggcauggauacaccucucacggcgcccacggggucgccguggcugcggaucucaagagcacacaggaggccauuaauaaaaucaccaagaaccuuaauucccuuagcgaacuggagguuaaaaaccuccagcggcugucuuccgcuauggacgagcugcauaaugaaauucucgagcuggaugaaaagguggacgaccuucgcgccgauacaaucagcucucaaaucgagcuggccguccuccugagcaacgaaggaauuaucaauuccgaggacgagcaccuucuggcucucgaaagaaaacugaagaagaugcugggccccucugccguggagauugggaacggcuguuucgaaaccaaacauaagugcaaucagacgugccucgaucggaucgcggcuggaaccuuugacgccggcgaguucagccugccuacauuugauucccuuaacauuaccgccgcuagccugaaugacgaugggcucgacaaccacacaauccugcuguauuacucuaccgccgcuuccagccuugccgucacgcucaugauugcgaucuucgugguuuauauggugucucgcgauaacgucuccuguagcaucugccuguga

SEQ ID NO: 219277 - RNA, 1758 nt, Artificial Sequence; identical to SEQ ID NO: 219224
  derived and/or modified CDS sequence (opt5) from hemagglutinin__InfluenzaB__AGX18203

SEQ ID NO: 219278 - RNA, 1758 nt, Artificial Sequence
  derived and/or modified CDS sequence (opt5) from hemagglutinin__InfluenzaB__AGX18214
augaaggccaucauugugcugcucauggucguuaccagcaacgcugacagaaucugcacaggcauuacguccucuaauagcccccacguggugaaaaccgccacacagggggaggucaacgugaccggaguuaucccucugacaaccacaccgaccaagucccauuucgcgaaucuuaaaggcacgaagacccgggggaaacugugucccaagugccucaacuguacagaucuggacguggcucuuggacgcccuaagugcaccggcaauauucccucugccgaagucagcauccugcacgaggugagaccuguuacauccggguguuuucccaucaugcaugaucggaccaaaauucgccaacucccuaaccugcugagaggauacgaacacauccggcucucuacgcauaaugugauuaacgccgagaaggcuccgggcggccccuauaaaacagggaccagcggauccugcccuaaugucacaaacggcaauggguucuuugccaccauggcuugggccgugcccaagaacgacaauaacaaaaccgcgacaaauagccugacgaucgaagugccuuacauuuguaccgagggagaggaucagaucacaauuuggggcuuccacucugacaacgaaacccagauggccaaacuuuauggggauuccaagccccagaaguuuacaagcucugcuaacggagucaccacgcacuacguuucccaaaucggcggcuucccgaaucagacagaggacgggggacugccucagagcggccgcaucgugguggauuauaugguccagaagucugggaaaaccggaaccauuacauaccaaagaggcauccuccugccccagaagguguggugcgccuccgggcggagcaaaguuauuaagggaucccuuccucugaucggcgaagcugacugucuccaugagaaauauggcgggcugaacaagucuaagcccuacuacaccggagagcacgccaaagcgauuggcaauugccccaucugggugaagacaccucugaaacucgccaacgggacgaaguaucgcccgcccgcuaaacugcuuaaggaaagaggauuuuucggcgccaucgcuggguuucuggagggcggaugggaaggcaugauugccggguggcauggauacaccagccacggcgcccacggggucgcuguggcggccgaucucaaguccacacaggaggcuaucaauaaaauuaccaagaaccugaauagccuuucugaacuggagguuaaaaaccuccagcggcuguccggagccauggacgagcugcauaaugaaauccucgagcuggaugaaaagguggacgaccuucgcgccgauacaauuagcucucaaaucgagcuggcuguccuccugagcaacgaaggcaucauuaauuccgaggacgagcaccuucuggcccucgaaagaaaacugaagaagaugcuggggccuucugcgguggagaucggcaacggauguuucgaaaccaaacauaagugcaaucagacgugccucgaucggauugcugccggcaccuuugacgccggggaguucagccugcccacauuugauucccuuaacaucaccgcugccagccugaaugacgauggacucgacaaccacauuauccugcuguauuacucuacagcugccuccagccuugcggucacccucaugauugccaucuucgugguuuauauggugucucgcgauaacgucuccuguagcaucugccuguga

SEQ ID NO: 219279 - RNA, 1758 nt, Artificial Sequence
  derived and/or modified CDS sequence (opt5) from hemagglutinin__InfluenzaB__AGX18225
augaaggccaucauugugcugcucauggucguuaccagcaacgcugacagaaucugcacaggcauuacguccucuaauagcccccacguggugaaaaccgccacacagggggaggucaacgugaccggaguuaucccucugacaaccacaccgaccaagucccauuucgcgaaucuuaaaggcacgaagacccgggggaaacugugucccaagugccucaacuguacagaucuggacguggcucuuggacgcccuaagugcaccggcaauauucccucugccgaagucagcauccugcacgaggugagaccuguuacauccggguguuuucccaucaugcaugaucggaccaaaauucgccaacucccuaaccugcugagaggauacgaacacauccggcucucuacgcauaaugugauuaacgccgagaaggcuccgggcggccccuauaaaaucgggacaagcggauccugcccuaaugucaccaacggcaauggguucuuugccacaauggcuugggccgugcccaagaacgacaauaacaaaaccgcgaccaauagccugacaauugaagugccuuacaucuguacggagggagaggaucagauuaccaucuggggcuuccacucugacaacgaaacacagauggccaaacuuuauggggauuccaagccccagaaauuuaccagcucugcuaacggagucacaacccacuacguuucccaaaucggcggcuucccgaaucagacggaggacgggggacugccucagagcggccgcauugugguggauuauaugguccagaagucugggaaaacaggaaccaucaccuaccaaagaggcauucuccugccccagaagguguggugcgccuccgggcggagcaaaguuaucaagggaucccuuccucugauuggcgaagcugacugucuccaugagaaauauggcgggcugaacaagucuaagcccuacuacacaggagagcacgccaaagcgaucggcaauugccccaucugggugaagaccccucugaaacucgccaacgggacaaaguaucgcccgcccgcuaaacugcuuaaggaaagaggauuuuucggcgccauugcuggguuucuggagggcggaugggaaggcaugaucgccggguggcauggauacacgagccacggcgcccacggggucgcuguggcggccgaucucaaguccacccaggaggcuauuaaucggaucacaaagaaccugaauagccuuucugaacuggagguuaagaaccuccagcgccuguccggagccauggacgagcugcauaaugaaauucucgagcuggaugaaaaaguggacgaccuuagagccgauaccaucagcucucaaaucgagcuggcuguccuccugagcaacgaaggcauuaucaauuccgaggacgagcaccuucuggcccucgaacggaagcugaaaaagaugcuggggccuucugcgguggagauuggcaacggauguuucgaaacaaagcauaaaugcaaucagaccugccucgaucgcaucgcugccggcacguuugacgccggggaguucagccugcccaccuuugauucccuuaacauuacagcugccagccugaaugacgauggacucgacaaccacaccauccugcuguauuacucuacagcugccuccagccuugcggucacccucaugauugccaucuucgugguuuauauggugucuagagauaacgucuccuguagcaucugccuguga

SEQ ID NO: 219280 - RNA, 1758 nt, Artificial Sequence
  derived and/or modified CDS sequence (opt5) from hemagglutinin__InfluenzaB__AGX18236
augaaggccaucauugugcugcucauggucguuaccagcaacgcugacagaaucugcacaggcauuacguccucuaauagcccccacguggugaaaaccgccacacagggggaggucaacgugaccggaguuaucccucugacaaccacaccgaccaagucccauuucgcgaaucuuaaaggcacgaagacccgggggaaacugugucccaagugccucaacuguacagaucuggacguggcucuuggacgcccuaagugcaccggcaauauucccucugccgaagucagcauccugcacgaggugagaccuguuacauccggguguuuucccaucaugcaugaucggaccaaaauucgccaacucccuaaccugcugagaggauacgaacacauccggcucucuacgcauaaugugauuaacgccgagaaggcuccgggcggccccuauaaaaucgggacaagcggauccugcccuaaugucaccaacggcaauggguucuuugccacaauggcuugggccgugcccaagaacgacaauaacaaaaccgcgaccaauagccugacaauugaagugccuuacaucuguacggagggagaggaucagauuaccaucuggggcuuccacucugacaacgaaacacagauggccaaacuuuauggggauuccaagccccagaaguuuaccagcucugcuaacggagucacaacccacuacguuucccaaaucggcggcuucccgaaucagacggaggacgggggacugccucagagcggccgcauugugguggauuauaugaugcagaagucugggaaaacaggaaccaucaccuaccaaagaggcauucuccugccccagaaggucuggugcgccuccgggcggagcaaagugaucaagggaucccuuccucugauuggcgaagcugacugucuccaugagaaauauggcgggcugaacaagucuaagcccuacuacacaggagagcacgccaaagcgaucggcaauugccccaucuggguuaagaccccucugaaacucgccaacgggacaaaguaucgcccgcccgcuaaacugcuuaaggaaagaggauuuuucggcgccauugcuggguuucuggagggcggaugggaaggcaugaucgccggguggcauggauacacgagccacggcgcccacgggguggcugucgcggccgaucucaaguccacccaggaggcuauuaauaaaaucacaaagaaccugaauagccuuucugaacuggaggugaaaaaccuccagcggcuguccggagccauggacgagcugcauaaugaaauucucgagcuggaugaaaagguugacgaccuucgcgccgauaccaucagcucucaaaucgagcuggcugugcuccugagcaacgaaggcauuaucaauuccgaggacgagcaccuucuggcccucgaaagaaaacugaagaagaugcuggggccuucugcggucgagauuggcaacggauguuucgaaacaaaacauaagugcaaucagaccugccucgaucggaucgcugccggcacguuugacgccggggaguucagccugcccaccuuugauucccuuaacauuacagcugccagccugaaugacgauggacucgacaaccacaccauccugcuguauuacucuacagcugccuccagccuugcggugacccucaugauugccaucuucgucguguauaugguuucucgcgauaacguguccuguagcaucugccuguga

SEQ ID NO: 219281 - RNA, 1758 nt, Artificial Sequence; identical to SEQ ID NO: 218637
  derived and/or modified CDS sequence (opt5) from hemagglutinin__InfluenzaB__AGX18247

SEQ ID NO: 219282 - RNA, 1758 nt, Artificial Sequence
  derived and/or modified CDS sequence (opt5) from hemagglutinin__InfluenzaB__AGX18258
augaaggccaucauugugcugcucauggucguuaccagcaacgcugacagaaucugcacaggcauuacguccucuaauagcccccacguggugaaaaccgccacacagggggaggucaacgugaccggaguuaucccucugacaaccacaccgaccaagucccauuucgcgaaucuuaaaggcacgaagacccgggggaaacugugucccaagugccucaacuguacagaucuggacguggcucuuggacgcccuaagugcaccggcaauauucccucugccgaagucagcauccugcacgaggugagaccuguuacauccggguguuuucccaucaugcaugaucggaccaaaauucgccaacucccuaaccugcugagaggauacgaacacauccggcucucuacgcauaaugugauuaacgccgagaaggcuccgggcggccccuauaaaaucgggacaagcggauccugcccuaaugucaccaacggcaauggguucuuugccacaauggcuugggccgugcccaagaacgacaaaaauaagaccgcgaccaacagccugacaauugaagugccuuacaucuguacggagggagaggaucagauuaccaucuggggcuuccacucugacaaugaaacacagauggccaaacuuuauggggauuccaagccccagaaguuuaccagcucugcuaacggagucacaacccacuacguuucccaaaucggcggcuucccgaaccagacggaggacgggggacugccucagagcggccgcauugugguggauuauaugguccagaaaucugggaagacaggaaccaucaccuaccaaagaggcauucuccugccccagaaaguguggugcgccuccgggcggagcaagguuaucaaaggaacacuuccucugauuggcgaagcugacugucuccaugagaaguauggcgggcugaauaaguccaaacccuacuacaccggagagcacgccaaggcgaucggcaacugccccaucugggugaaaacaccucugaagcucgccaaugggacgaaauaucgcccgcccgcuaagcugcuuaaggaaagaggauuuuucggcgccauugcuggguuucuggagggcggaugggaaggcaugaucgccggguggcauggauacaccucucacggcgcccacggggucgcuguggcggccgaucucaaaagcacacaggaggcuauuaacaagaucaccaaaaaucugaacucccuuagcgaacuggagguuaagaaucuccagcggcugucuggagccauggacgagcugcauaacgaaauucucgagcuggaugaaaaaguggacgaccuucgcgccgauacaaucuccagccaaaucgagcuggcuguccuccugucuaaugaaggcauuaucaacagcgaggacgagcaccuucuggcccucgaaagaaagcugaagaaaaugcuggggccuuccgcgguggagauuggcaauggauguuucgaaaccaagcauaaaugcaaccagacgugccucgaucggaucgcugccggcaccuuugacgccggggaguucucucugcccacauuugauagccuuaauauuaccgcugccucccugaacgacgauggacucgacaaucacacaauccugcuguauuacagcaccgcugccucuucccuugcggucacgcucaugauugccaucuucgugguuuauauggugagccgcgauaacgucucuuguuccaucugccuguga

SEQ ID NO: 219283 - RNA, 1758 nt, Artificial Sequence; identical to SEQ ID NO: 218586
  derived and/or modified CDS sequence (opt5) from hemagglutinin__InfluenzaB__AGX18280

SEQ ID NO: 219284 - RNA, 1758 nt, Artificial Sequence
  derived and/or modified CDS sequence (opt5) from hemagglutinin__InfluenzaB__AGX18291
augaaggccaucauugugcugcucauggucguuaccagcaacgcugacagaaucugcacaggcauuacguccucuaauagcccccacguggugaaaaccgccacacagggggaggucaacgugaccggaguuaucccucugacaaccacaccgaccaagucccauuucgcgaaucuuaaaggcacgaagacccgggggaaacugugucccaagugccucaacuguacagaucuggacguggcucuuggacgcccuaagugcaccggcaauauucccucugccgaagucagcauccugcacgaggugagaccuguuacauccggguguuuucccaucaugcaugaucggaccaaaauucgccaacucccuaaccugcugagaggauacgaacacauccggcucucuacgcauaaugugauuaacgccgagaaggcuccgggcggccccuauaaaaucgggacaagcggauccugcccuaaugucaccaacggcaauggguucuuugccacaauggcuugggccgugcccaagaacgacaauaacaaaaccgcgaccaauagccugacaauugaagugccuuacaucuguacggagggagaggaucagauuaccaucuggggcuuccacucugacaacgaaacacagauggccaaacuuuauggggauuccaagccccagaaguuuaccagcucugcuaacggagucacaacccacuacguuucccaaaucggcggcuucccgaaucagacggaggacgggggacugccucagagcggccgcauugugguggauuauaugguccagaagucugggaaaacaggaaccaucaccuaccaaagaggcauucuccugccccagaagguguggugcguuuccgggcggagcaaagugaucaagggaucccuuccucugauuggcgaagccgacugucuccaugagaaauauggcgggcugaacaagucuaagcccuacuacacaggagagcacgcuaaagccaucggcaauugccccaucugggucaagaccccucugaaacucgcgaacgggacaaaguaucgcccgcccgccaaacugcuuaaggaaagaggauuuuucggcgcuauugccggguuucuggagggcggaugggaaggcaugaucgcuggguggcauggauacacgagccacggcgcccacgggguggccguugcugcggaucucaaguccacccaggaggccauuaauaaaaucacaaagaaccugaauagccuuucugaacuggaggugaaaaaccuccagcggcuguccggagcuauggacgagcugcauaaugaaauucucgagcuggaugaaaaggucgacgaccuucgcgccgauaccaucagcucucaaaucgagcuggccgugcuccugagcaacgaaggcauuaucaauuccgaggacgagcaccuucuggcucucgaaagaaaacugaagaagaugcuggggccuucugccgucgagauuggcaacggauguuucgaaacaaaacauaagugcaaucagaccugccucgaucggaucgcggcuggcacguuugacgccggggaguucagccugcccaccuuugauucccuuaacauuacagccgcuagccugaaugacgauggacucgacaaccacaccauccugcuguauuacucuacagccgcuuccagccuugccgugacccucaugauugcgaucuucguuguguauauggucucucgcgauaacguguccuguagcaucugccuguga

SEQ ID NO: 219285 - RNA, 1758 nt, Artificial Sequence
  derived and/or modified CDS sequence (opt5) from hemagglutinin__InfluenzaB__AGX18302
augaaggccaucauugugcugcucauggucguuaccagcaacgcugacagaaucugcacaggcauuacguccucuaauagcccccacguggugaaaaccgccacacagggggaagucaacgugaccggaguuaucccucugacaaccacaccgaccaagucccauuucgcgaaucuuaaaggcacgaagacccgggggaaacugugucccaagugccucaacuguacagaucuggacguggcucuuggacgcccuaagugcaccggcaauauucccucugccgaagucagcauccugcacgaggugagaccuguuacauccggguguuuucccaucaugcaugaucggaccaaaauucgccaacucccuaaccugcugagaggauacaagcacauccggcucucuacgcauaaugugauuaacgccgaaaaagcuccgggcggccccuauaagaucgggacaagcggauccugcccuaaugucaccaacggcaauggguucuuugccacaauggcuugggccgugcccaaaaacgacaauaacaagaccgcgaccaauagccugacaauugaggugccuuacaucuguacggaaggagaggaucagauuaccaucuggggcuuccacucugacaacgagacacagauggccaagcuguauggggauuccaaaccccagaaguuuaccagcucugcuaacggagucacaacccacuacguuucccaaaucggcggcuucccgaaucagacggaagacgggggacugccucagagcggccgcauugugguggauuauaugguccagaaaucugggaagacaggaaccaucaccuaccaaagaggcauucuccugccccagaaaguguggugcgccuccgggcggagcaagguuaucaaaggaacacuuccucugauuggcgaggcugacugucuccaugaaaaguauggcgggcugaacaaguccaaacccuacuacaccggagagcacgccaaggcgaucggcaauugccccaucugggugaaaacaccucugaagcucgccaacgggacgaaauaucgcccgcccgcuaagcugcuuaaggagagaggauuuuucggcgccauugcuggguuucuggaaggcggaugggagggcaugaucgccggguggcauggauacaccucucacggcgcccacggggucgcuguggcggccgaucucaaaagcacacaggaagcuauuaauaagaucaccaaaaaccuuaauucccuuagcgagcuggaaguuaagaaccuccagcggcugucuggagccauggacgagcugcauaaugagauucucgaacuggaugagaaaguggacgaccuucgcgccgauacaaucuccagccaaaucgaacuggcuguccuccugucuaacgagggcauuaucaauagcgaagacgagcaccuucuggcccucgagagaaagcugaagaaaaugcuggggccuuccgcgguggaaauuggcaacggauguuucgagaccaagcauaaaugcaaucagacgugccucgaucggaucgcugccggcaccuuugacgccggggaguucucucugcccacauuugauagccuuaacauuaccgcugccucccugaaugacgauggacucgacaaccacacaauccugcuguauuacagcaccgcugccucuucccuugcggucacgcucaugauugccaucuucgugguuuauauggugagccgcgauaacgucucuuguuccaucugccuguga

SEQ ID NO: 219286 - RNA, 1758 nt, Artificial Sequence; identical to SEQ ID NO: 218586
  derived and/or modified CDS sequence (opt5) from hemagglutinin__InfluenzaB__AGX18313

SEQ ID NO: 219287 - RNA, 1758 nt, Artificial Sequence
  derived and/or modified CDS sequence (opt5) from hemagglutinin__InfluenzaB__AGX18324
augaaggccaucauugugcugcucauggucguuaccagcaacgcugacagaaucugcacaggcauuacguccucuaauagcccccacguggugaaaaccgccacacagggggaggucaacgugaccggaguuaucccucugacaaccacaccgaccaagucccauuucgcgaaucuuaaaggcacgaagacccgggggaaacugugucccaagugccucaacuguacagaucuggacguggcucuuggacgcccuaagugcaccggcaauauucccucugccgaagucagcauccugcacgaggugagaccuguuacauccggguguuuucccaucaugcaugaucggaccaaaauucgccaacucccuaaccugcugagaggauacgaacacauccggcucucuacgcauaaugugauuaacgccgagaaggcuccgggcggccccuauaaaaucgggacaagcggauccugcccuaaugucaccaacggcaauggguucuuugccacaauggcuugggccgugcccaagaacgacaauaacaaaaccgcgaccaauagccugacaauugaagugccuuacaucuguacggagggagaggaucagauuaccaucuggggcuuccacucugacaacgaagcccagauggcuaaacuuuauggggauuccaagccccagaaguuuacaagcucugccaacggagucaccacacacuacguuucccaaaucggcggcuucccgaaucagaccgaggacgggggacugccucagagcggccgcauugugguggauuauaugguccagaagucugggaaaacgggaacaaucaccuaccaaagaggcauucuccugccccagaagguguggugcgcuuccgggcggagcaaaguuaucaagggaucccuuccucugauuggcgaagccgacugucuccaugagaaauauggcgggcugaacaagucuaagcccuacuacaccggagagcacgcgaaagccaucggcaauugccccaucugggugaagacaccucugaaacucgcuaacgggaccaaguaucgcccgcccgccaaacugcuuaaggaaagaggauuuuucggcgcuauugccggguuucuggagggcggaugggaaggcaugaucgccggguggcauggauacacaagccacggcgcucacggggucgcgguggccgcugaucucaaguccacgcaggaggccauuaauaaaaucaccaagaaccugaauagccuuucugaacuggagguuaaaaaccuccagcggcuguccggagccauggacgagcugcauaaugaaauucucgagcuggaugaaaagguggacgaccuucgcgcugauacaaucagcucucaaaucgagcuggccguccuccugagcaacgaaggcauuaucaauuccgaggacgagcaccuucuggcgcucgaaagaaaacugaagaagaugcuggggccuucugcuguggagauuggcaacggauguuucgaaaccaaacauaagugcaaucagacaugccucgaucggaucgccgccggcaccuuugacgcuggggaguucagccugcccacguuugauucccuuaacauuaccgccgcuagccugaaugacgauggacucgacaaccacacaauccugcuguauuacucuaccgccgcguccagccuugccgucacacucaugauugcuaucuucgugguuuauauggugucucgcgauaacgucuccuguagcaucugccuguga

SEQ ID NO: 219288 - RNA, 1758 nt, Artificial Sequence; identical to SEQ ID NO: 219246
  derived and/or modified CDS sequence (opt5) from hemagglutinin__InfluenzaB__AGX18335

SEQ ID NO: 219289 - RNA, 1758 nt, Artificial Sequence
  derived and/or modified CDS sequence (opt5) from hemagglutinin__InfluenzaB__AGX18346
augaaggccaucauugugcugcucauggucguuaccagcaacgcugacagaaucugcacaggcauuacguccucuaauagcccccacguggugaaaaccgccacacagggggaggucaacgugaccggaguuaucccucugacaaccacaccgaccaagucccauuucgcgaaucuuaaaggcacgaagacccgggggaaacugugucccaagugccucaacuguacagaucuggacguggcucuuggacgcccuaagugcaccggcaauauucccucugccgaagucagcauccugcacgaggugagaccuguuacauccggguguuuucccaucaugcaugaucggaccaaaauucgccaacucccuaaccugcugagaggauacgaacacauccggcucucuacgcauaaugugauuaacgccgagaaggcuccgggcggccccuauaaaaucgggacaagcggauccugcccuaaugucaccaacggcaauggguucuuugccacaauggcuugggccgugcccaagaacgacaauaacaaaaccgcgaccaauagccugacaauugaagugccuuacaucuguacggagggagaggaucagauuaccaucuggggcuuccacucugacaacgaaacacagauggccaaacuuuauggggauuccaagccccagaaguuuaccagcucugcuaacggagucacaacccacuacguuucccaaaucggcggcuucccgaaucagacggaggacgggggacugccucagagcggccgcauugugguggauuauaugguccagaagucugggaaaacaggaaccaucaccuaccaaagaggcauucuccugccccagaagguguggugcgccuccgggcggagcaaaguuaucaagggaucccuuccucugauuggcgaagcugacugucuccaugagaaauauggcgggcugaacaagucuaagcccuacuacacaggagagcacgccaaagcgaucggcaauugccccaucugggugaagaccccucugaaacucgccaacgggacaaaguaucgcccgcccgcuaaacugcuuaaggaaagaggauuuuucggcgccauugcuggguuucuggagggcggaugggaaggcaugaucgccggguggcauggauacacgagccacggcgcccacggggucgcuguggcggccgaucucaaguccacccaggaggcuauuaauaaaaucacaaagaaccugaauagccuuucugaacuggagguuaaaaaccuccagcggcuguccggagccauggacgagcugcauaaugaaauucucgagcuggaugaaaagguggacgaccuucgcgccgauaccaucagcucucaaaucgagcuggcuguccuccugagcaacgaaggcauuaucaauuccgaggacgagcaccuucuggcccucgaaagaaaacugaagaagaugcuggggccuucugcgguggagauuggcaacggauguuucgaaacaaaacauaagugcaaucagaccugccucgaucggaucgcugccggcacguuugacgccggggaguucagccugcccaccuuugauucccuuaacauuacagcugccagccugaaugaagacggacucgauaaccacaccauccugcuguauuacucuacagcugccuccagccuugcggucacccucaugauugccaucuucgugguuuauauggugucucgcgacaacgucuccuguagcaucugccuguga

SEQ ID NO: 219290 - RNA, 1758 nt, Artificial Sequence
  derived and/or modified CDS sequence (opt5) from hemagglutinin__InfluenzaB__AGX18357
augaaggccaucauugugcugcucauggucguuaccagcaacgcugacagaaucugcacaggcauuacguccucuaauagcccccacguggugaaaaccgccacacagggggaggucaacgugaccggaguuaucccucugacaaccgcgccgacaaagucccauuucgcuaaucuuaaaggcaccaagacgcgggggaaacugugucccaagugccucaacuguaccgaucuggacguggcccuuggacgcccuaagugcacaggcaauauucccucugccgaagucagcauccugcacgaggugagaccuguuaccuccggguguuuucccaucaugcaugaucggacaaaaauucgccaacucccuaaccugcugagaggauacgaacacauccggcucucuacccauaaugugauuaacgcugagaaggccccgggcggccccuauaaaaucgggacgagcggauccugcccuaaugucacaaacggcaauggguucuuugcuaccauggccugggcggugcccaagaacgacaauaacaaaacagccaccaauagccugaccauugaagugccuuacaucuguacagagggagaggaucagauuacgaucuggggcuuccacucugacaaggaaacccagauggcuaaacuuuauggggauuccaagccccagaaguuuacaagcucugccaacggagucaccacacacuacguuucccaaaucggcggcuucccgaaccagaccgaggacgggggacugccucagagcggccgcauugugguggauuauaugguccagaaacccgggaagacgggaacaaucaccuaccaaagaggcauucuccugccucagaaaguguggugcgcuucugggcgguccaagguuaucaaaggaagccuuccccugauuggcgaagccgacugucuccaugagaaguauggcgggcugaauaaguccaaacccuacuacaccggagagcacgcgaaggccaucggcaacugcccuaucugggugaaaacaccgcugaagcucgcuaaugggaccaaauauagacccccugccaagcugcuuaaggaacgcggauuuuucggcgcuauugccggguuucuggagggcggaugggaaggcaugaucgccggguggcauggauacacaucucacggcgcucacggggucgcgguggccgcugaucucaaaagcacgcaggaggccauuaacaagaucaccaaaaaucugaacucccuuagcgaacuggagguuaagaaucuccagcggcugucuuccgccauggacgagcugcauaacgaaauucucgagcuggaugaaaaaguggacgaccuucgcgcugauacaaucagcucucaaaucgagcuggccguccuccugagcaaugaaggaauuaucaacuccgaggacgagcaccuucuggcgcucgaaagaaagcugaagaaaaugcugggccccucugcuguggagauugggaauggcuguuucgaaaccaagcauaaaugcaaccagacaugccucgaucggaucgccgccggaaccuuugacgcuggcgaguucagccugccuacguuugauucccuuaauauuaccgccgcuagccugaacgacgaugggcucgacaaucacacaauccugcuguauuacucuaccgccgcguccagccuugccgucacacucaugauugcuaucuucgugguuuauauggugucucgcgauaacgucuccuguagcaucugccuguga

SEQ ID NO: 219291 - RNA, 1758 nt, Artificial Sequence
  derived and/or modified CDS sequence (opt5) from hemagglutinin__InfluenzaB__AGX18368
augaaggccaucauugugcugcucauggucguuaccagcaacgcugacagaaucugcacaggcauuacguccucuaauagcccccacguggugaaaaccgccacacagggggaggucaacgugaccggaguuaucccucugacaaccgcgccgacaaagucccauuucgcuaaucuuaaaggcaccaagacgcgggggaaacugugucccaagugccucaacuguaccgaucuggacguggcccuuggacgcccuaagugcacaggcaauacccccucugccgaagucagcauucugcacgaggugagaccuguuacauccggguguuuucccaucaugcaugaucggaccaaaauccgccaacucccuaaccugcugagaggauacgaacacauucggcucucuaaucauaacgugaucaaugcugagaaggccccgggcggccccuauaaaauugggacgagcggauccugcccuaacgucacaaauggcaacggguucuuugcuaccauggccugggcggugcccaagaaugacaacaauaaaacagccaccaacagccugaccaucgaagugccuuacauuuguacagagggagaggaucagaucacgauuuggggcuuccacucugacaacgaaacccagauggcuaaacuuuauggggauuccaagccccagaaguuuacaagcucugccaauggagucaccacacacuacguuucccaaaucggcggcuucccgaaccagaccgaggacgggggacugccucagagcggccgcaucgugguggauuauaugguccagaagcccgggaaaacgggaacaauuaccuaccaaagaggcauccuccugccucagaagguguggugcgcuucugggcgguccaaaguuauuaagggaagccuuccccugaucggcgaagccgacugucuccaugagaaauauggcgggcugaauaaguccaagcccuacuacaccggagagcacgcgaaagccauuggcaacugcccuaucugggugaagacaccgcugaaacucgcuaaugggaccaaguauagacccccugccaaacugcuuaaggaacgcggauuuuucggcgcuaucgccggguuucuggagggcggaugggaaggcaugauugccggguggcauggauacacaucucacggcgcucacggggucgcgguggccgcugaucucaagagcacgcaggaggccaucaacaaaauuaccaagaaucugaacucccuuagcgaacuggagguuaaaaaucuccagcggcugucuuccgccauggacgagcugcauaacgaaauccucgagcuggaugaaaagguggacgaccuucgcgcugauacaauuagcucucaaaucgagcuggccguccuccugagcaaugaaggaaucauuaacuccgaggacgagcaccuucuggcgcucgaaagaaaacugaagaagaugcugggccccucugcuguggagaucgggaauggcuguuucgaaaccaaacauaagugcaaccagacaugccucgaucggauugccgccggaaccuuugacgcuggcgaguucagccugccuacguuugauucccuuaauaucaccgccgcuagccugaacgacgaugggcucgacaaccacacaauucugcuguauuacucuaccgccgcguccagccuugccgucacacucaugaucgcuauuuucgugguuuauauggugucucgcgauaaugucuccuguagcaucugccuguga

SEQ ID NO: 219292 - RNA, 1758 nt, Artificial Sequence; identical to SEQ ID NO: 218710
  derived and/or modified CDS sequence (opt5) from hemagglutinin__InfluenzaB__AGX18379

SEQ ID NO: 219293 - RNA, 1758 nt, Artificial Sequence; identical to SEQ ID NO: 219246
  derived and/or modified CDS sequence (opt5) from hemagglutinin__InfluenzaB__AGX18390

SEQ ID NO: 219294 - RNA, 1758 nt, Artificial Sequence
  derived and/or modified CDS sequence (opt5) from hemagglutinin__InfluenzaB__AGX18401
augaaggccaucauugugcugcucauggucguuaccagcaacgcugacagaaucugcacaggcauuacguccucuaauagcccccacguggugaaaaccgccacacagggggaggucaacgugaccggaguuaucccucugacaaccgcgccgacaaagucccauuucgcuaaucuuaaaggcaccaagacgcgggggaaacugugucccaagugccucaacuguaccgaucuggacguggcccuuggacgcccuaagugcacaggcaauauucccucugccgaagucagcauccugcacgaggugagaccuguuaccuccggguguuuucccaucaugcaugaucggacaaaaauucgccaacucccuaaccugcugagaggauacgaacacauccggcucucuacccauaaugugauuaacgcugagaaggccccgggcggccccuauaaaaucgggacgagcggauccugcccuaaugucacaaacggcaauggguucuuugcuaccauggccugggcggugcccaagaacgacaauaacaaaacagccaccaauagccugaccauugaagugccuuacaucuguacagagggagaggaucagauuacgaucuggggcuuccacucugacaacgaaauccagauggcuaagcuguauggggauuccaagccccagaaauuuaccagcucugccaacggagucacaacccacuacguuucccaaauuggcggcuucccgaaucagacagaggacgggggacugccucagagcggccgcaucgugguggauuauaugguccagaagcccgggaaaaccggaacgauuacauaccaaagaggcauccuccugccucagaagguguggugcgcuucugggcgguccaaaguuauuaagggaagccuuccccugaucggcgaagccgacugucuccaugagaaauauggcgggcugaacaaguccaagcccuacuacaccggagagcacgcgaaagccaucggcaauugcccuauuugggugaagaccccgcugaaacucgcuaacgggacaaaguauagacccccugccaaacugcuuaaggaacgcggauuuuucggcgcuaucgccggguuucuggagggcggaugggaaggcaugauugccggguggcauggauacaccucucacggcgcucacggggucgcgguggccgcugaucucaagagcacacaggaggccaucaauaaaauuacgaagaaccuuaauucccuuagcgaacuggagguuaaaaaccuccagcggcugucuuccgccauggacgagcugcauaaugaaauccucgagcuggaugaaaagguggacgaccuucgcgcugauaccaucagcucucaaauugagcuggccguccuccugagcaacgaaggaaucauuaauuccgaggacgagcaccuucuggcgcucgaaagaaaacugaagaagaugcugggccccucugcuguggagaucgggaacggcuguuucgaaacaaaacauaagugcaaucagaccugccucgaucggauugccgccggaacauuugacgcuggcgaguucagccugccuaccuuugauucccuuaacaucacggccgcuagccugaaugacgaugggcucgacaaccacaccauucugcuguauuacucuacagccgcguccagccuugccgucacccucaugaucgcuaucuucgugguuuauauggugucucgcgauaacgucuccuguagcauuugccuguga

SEQ ID NO: 219295 - RNA, 1758 nt, Artificial Sequence
  derived and/or modified CDS sequence (opt5) from hemagglutinin__InfluenzaB__AGX18412
augaaggccaucauugugcugcucauggucguuaccagcaacgcugacagaaucugcacaggcauuacguccucuaauagcccccacguggugaaaaccgccacacagggggaggucaacgugaccggaguuaucccucugacaaccacaccgaccaagucccauuucgcgaaucuuaaaggcacgaagacccgggggaaacugugucccaagugccucaacuguacagaucuggacguggcucuuggacgcccuaagugcaccggcaauauucccucugccgaagucagcauccugcacgaggugagaccuguuacauccggguguuuucccaucaugcaugaucggaccaaaauucgccaacucccuaaccugcugagaggauacgaacacauccggcucucuaaucauaacgugauuaaugccgagaaggcuccgggcggccccuauaaaaucgggacgagcggauccugcccuaacgucacaaauggcaacggguucuuugccaccauggcuugggccgugcccaagaaugacaacaauaaaacagcgaccaacagccugaccauugaagugccuuacaucuguacagagggagaggaucagauuacgaucuggggcuuccacucugacaacgaagcccagauggcuaaacuuuauggggauuccaagccccagaaguuuaccagcucugccaauggagucacaacccacuacguuucccaaaucggcggcuucccgaaccagacagaggacgggggacugccucagagcggccgcauugugguggauuauaugguccagaagucugggaaaaccggaacgaucacauaccaaagaggcauucuccugccccagaagguguggugcgcuuccgggcggagcaaaguuaucaagggaucccuuccucugauuggcgaagccgacugucuccaugagaaauauggcgggcugaauaagucuaagcccuacuacaccggagagcacgcgaaagccaucggcaacugccccaucugggugaagaccccucugaaacucgcuaaugggacaaaguaucgcccgcccgccaaacugcuuaaggaaagaggauuuuucggcgcuauugccggguuucuggagggcggaugggaaggcaugaucgccggguggcauggauacaccagccacggcgcucacggggucgcgguggccgcugaucucaaguccacacaggaggccauuaacaaaaucacgaagaaucugaacagccuuucugaacuggagguuaaaaaucuccagcggcuguccggagccauggacgagcugcauaacgaaauucucgagcuggaugaaaagguggacgaccuucgcgcugauaccaucagcucucaaaucgagcuggccguccuccugagcaaugaaggcauuaucaacuccgaggacgagcaccuucuggcgcucgaaagaaaacugaagaagaugcuggggccuucugcuguggagauuggcaauggauguuucgaaacaaaacauaagugcaaccagaccugccucgaucggaucgccgccggcacauuugacgcuggggaguucagccugcccaccuuugauucccuuaauauuacggccgcuagccugaacgacgauggacucgacaaccacaccauccugcuguauuacucuacagccgcguccagccuugccgucacccucaugauugcuaucuucgugguuuauauggugucucgcgauaaugucuccuguagcaucugccuguga

SEQ ID NO: 219296 - RNA, 1758 nt, Artificial Sequence; identical to SEQ ID NO: 219053
  derived and/or modified CDS sequence (opt5) from hemagglutinin__InfluenzaB__AGX18423

SEQ ID NO: 219297 - RNA, 1755 nt, Artificial Sequence
  derived and/or modified CDS sequence (opt5) from hemagglutinin__InfluenzaB__AGX18424
augaaggccaucauugugcugcucauggucguuaccagcaacgcugacagaaucugcacaggcauuacguccucuaauagcccccacguggugaaaaccgccacacagggggaggucaacgugaccggaguuaucccucugacaaccacaccgauuaagucccauuucgcgaaucuuaaaggcacccggacgcgcgggaagcugugucccgauugccucaacuguaccgaccuggauguggcucuuggaagaccuaugugcgucggcacaacccccucugccaaagccagcauccugcacgaagugcggccuguuacauccggguguuuucccaucaugcaugaccgcaccaagauuagacaacucccuaaucugcugcggggauacgagaacauccgccucucuacgcagaaugugauugaugcugaaaaggcccugggcggcccguauagacuugggacaagcggauccugccccaacgcuaccagcaaaucuggcuucuuugccacaauggcgugggccgucccuaaggacaauaacaaaaaugcuaccaacccccugaccguggaggugccuuacaucuguacagaaggggaggaucagauuacggucuggggauuccacuccgacgauaagacccagaugaaaaaucucuauggcgacagcaacccccaaaaguuuacaucuuccgccaaugggguuaccacacauuacgugagccagaucggaggcuucccggaucagaccgaggacggcgggcugccucagucuggacggauuguggucgauuauauggugcaaaagcccggcaaaacggggacaaucguuuaccagcgcggagugcuucugccucagaaggucuggugcgcuuccggcagaagcaaagugaucaaggggucccucccccugauuggagaagccgacugucugcacgagaaauauggcggccucaacaagucuaaacccuacuacaccggggaacacgcgaaggccaucggaaacugcccuauuuggguuaagaccccgcugaaacuugcuaauggcacaaaguaucggcccccugccaaacugcucaaggagcgcggguuuuucggagcuaucgccggcuuucuggaagggggcugggaaggaaugauugccggcuggcauggguacaccagccacggagcucauggcguggcggucgccgcugaccuuaaauccacacaggaggccaucaacaagaucacgaagaaucugaacagccucucugaacuggaggugaaaaaucugcaaagacucuccggggccauggaugaacugcacaacgagauucuugagcuggacgaaaaggucgaugaccuccgggcugauaccaucagcucucagauugagcuggccgugcuucugagcaaugaaggaaucauuaacuccgaggacgaacaccuccuggcgcuggagcgcaaacucaagaaaaugcugggccccucugcuguugauaucgggaauggcuguuucgagacaaagcauaagugcaaccagaccugccuugacagaaucgccgccggaacauuuaaugcuggcgaguucagccugccuaccuuugauucccucaacauuacggccgcuagccugaaugacgaugggcuggacaaccacaccauccuucucuauuacucuacagccgcguccagccuggccgugacccugaugcucgcuauuuucaucgucuauauggugucucgggacaauguuuccuguagcauuugccuguga

SEQ ID NO: 219298 - RNA, 1758 nt, Artificial Sequence
  derived and/or modified CDS sequence (opt5) from hemagglutinin__InfluenzaB__AGX18435
augaaggccaucauugugcugcucauggucguuaccagcaacgcugacagaaucugcacaggcauuacguccucuaauagcccccacguggugaaaaccgccacacagggggaggucaacgugaccggaguuaucccucugacaaccacaccgaccaagucccauuucgcgaaucuuaaaggcacgaagacccgggggaaacugugucccaagugccucaacuguacagaucuggacguggcucuuggacgcccuaagugcaccggcaauauucccucugccgaagucagcauccugcacgaggugagaccuguuacauccggguguuuucccaucaugcaugaucggaccaaaauucgccaacucccuaaccugcugagaggauacgaacacauccggcucucuacgcauaaugugauuaacgccgagaaggcuccgggcggccccuauaaaaucgggacaagcggauccugcccuaaugucaccaacggcaauggguucuuugccacaauggcuugggccgugcccaagaacgacaauaacaaaaccgcgaccaauagccugacaauugaagugccuuacaucuguacggagggagaggaucagauuaccaucuggggcuuccacucugacaacgaaauccagauggccaaacuuuauggggauuccaagccccagaaguuuacaagcucugcuaacggagucaccacacacuacguuucccaaauuggcggcuucccgaaucagaccgaggacgggggacugccucagagcggccgcaucgugguggauuauaugguccagaagucugggaaaacgggaacaauuaccuaccaaagaggcauccuccugccccagaagguguggugcgccuccgggcggagcaaaguuauuaagggaucccuuccucugaucggcgaagcugacugucuccaugagaaauauggcgggcugaacaagucuaagcccuacuacaccggagagcacgccaaagcgaucggcaauugccccauuugggugaagacaccucugaaacucgccaacgggaccaaguaucgcccgcccgcuaaacugcuuaaggaaagaggauuuuucggcgccaucgcuggguuucuggagggcggaugggaaggcaugauugccggguggcauggauacacaagccacggcgcccacggggucgcuguggcggccgaucucaaguccacgcaggaggcuaucaauaaaauuaccaagaaccugaauagccuuucugaacuggagguuaaaaaccuccagcggcuguccggagccauggacgagcugcauaaugaaauccucgagcuggaugaaaagguggacgaccuucgcgccgauacaaucagcucucaaauugagcuggcuguccuccugagcaacgaaggcaucauuaauuccgaggacgagcaccuucuggcccucgaaagaaaacugaagaagaugcuggggccuucugcgguggagaucggcaacggauguuucgaaaccaaacauaagugcaaucagacaugccucgaucggauugcugccggcaccuuugacgccggggaguucagccugcccacguuugauucccuuaacaucaccgcugccagccugaaugacgauggacucgacaaccacacaauucugcuguauuacucuaccgcugccuccagccuugcggucacacucaugaucgccaucuucgugguuuauauggugucucgcgauaacgucuccuguagcauuugccuguga

SEQ ID NO: 219299 - RNA, 1758 nt, Artificial Sequence; identical to SEQ ID NO: 218710
  derived and/or modified CDS sequence (opt5) from hemagglutinin__InfluenzaB__AGX18446

SEQ ID NO: 219300 - RNA, 1758 nt, Artificial Sequence; identical to SEQ ID NO: 219246
  derived and/or modified CDS sequence (opt5) from hemagglutinin__InfluenzaB__AGX18457

SEQ ID NO: 219301 - RNA, 1758 nt, Artificial Sequence; identical to SEQ ID NO: 219053
  derived and/or modified CDS sequence (opt5) from hemagglutinin__InfluenzaB__AGX18468

SEQ ID NO: 219302 - RNA, 1758 nt, Artificial Sequence; identical to SEQ ID NO: 219246
  derived and/or modified CDS sequence (opt5) from hemagglutinin__InfluenzaB__AGX18479

SEQ ID NO: 219303 - RNA, 1758 nt, Artificial Sequence; identical to SEQ ID NO: 218586
  derived and/or modified CDS sequence (opt5) from hemagglutinin__InfluenzaB__AGX18490

SEQ ID NO: 219304 - RNA, 1758 nt, Artificial Sequence
  derived and/or modified CDS sequence (opt5) from hemagglutinin__InfluenzaB__AGX18512
augaaggccaucauugugcugcucauggucguuaccagcaacgcugacagaaucugcacaggcauuacguccucuaauagcccccacguggugaaaaccgccacacagggggaggucaacgugaccggaguuaucccucugacaaccacaccgaccaagucccauuucgcgaaucuuaaaggcacggaaacccgggggcgccugugucccaagugccucaacuguacagaucuggacguggcucuuggaagaccuaaaugcaccggcaauauucccucugcccgggucagcauccugcacgaggugcgcccuguuacauccggguguuuucccaucaugcaugauagaaccaagauucggcaacucccuaaccugcugcgcggauacgaacacaucagacucucuacgcauaaugugauuaacgccgagaaugcuccgggcggccccuauaagaucgggacaagcggauccugcccuaacgucaccaauggcaacggguucuuugccacaauggcuugggccgugcccaaaaaugacaacaauaagaccgcgaccaacagccugacaauugaagugccuuacaucuguacggagggagaggaucagauuaccgucuggggcuuccacucugacaacgaaacacagauggccaaacuuuauggggauuccaagccccagaaauuuaccagcucugcuaauggaguuacaacccacuacgugucccaaaucggcggcuucccgaaccagacggaggacgggggacugccucagagcggccggaucguggucgauuauauggugcagaagucugggaagacaggaaccauuaccuaccaacgcggcauccuccugccccagaaaguuuggugcgccuccgggagaagcaaggugauuaaaggaucccuuccucugaucggcgaagcugacugucuccaugagaaguauggcgggcugaauaaaucuaagcccuacuacacaggagagcacgccaaagcgauuggcaacugccccaucugggucaagaccccucugaagcucgccaaugggacaaaauaucggccgcccgcuaagcugcuuaaagaacgcggauuuuucggcgccaucgcuggguuucuggagggcggaugggaaggcaugauugccggguggcauggauacacgagccacggcgcccacgggguggcuguugcggccgaucucaaguccacccaggaggcuaucaacaaaauuacaaagaaucugaacagccuuucugaacuggaggugaagaaucuccagagacuguccggagccauggacgagcugcauaacgaaauccucgagcuggaugaaaaagucgacgaccuucgggccgauaccauuagcucucaaaucgagcuggcugugcuccugagcaaugaaggcaucauuaacuccgaggacgagcaccuucuggcccucgaacgcaagcugaaaaagaugcuggggccuucugcggucgagaucggcaauggauguuucgaaacaaaacauaagugcaaccagaccugccucgauagaauugcugccggcacguuugacgccggggaguucagccugcccaccuuugauucccuuaauaucacagcugccagccugaacgacgauggacucgacaaccacaccauucugcuguauuacucuacagcugccuccagccuugcggugacccucaugaucgccauuuucguuguguauauggucucucgggauaauguguccuguagcaucugccuguga

SEQ ID NO: 219305 - RNA, 1758 nt, Artificial Sequence; identical to SEQ ID NO: 218586
  derived and/or modified CDS sequence (opt5) from hemagglutinin__InfluenzaB__AGX18523

SEQ ID NO: 219306 - RNA, 1758 nt, Artificial Sequence; identical to SEQ ID NO: 218586
  derived and/or modified CDS sequence (opt5) from hemagglutinin__InfluenzaB__AGX18534

SEQ ID NO: 219307 - RNA, 1758 nt, Artificial Sequence; identical to SEQ ID NO: 218647
  derived and/or modified CDS sequence (opt5) from hemagglutinin__InfluenzaB__AGX18545

SEQ ID NO: 219308 - RNA, 1758 nt, Artificial Sequence; identical to SEQ ID NO: 218586
  derived and/or modified CDS sequence (opt5) from hemagglutinin__InfluenzaB__AGX18556

SEQ ID NO: 219309 - RNA, 1758 nt, Artificial Sequence; identical to SEQ ID NO: 218586
  derived and/or modified CDS sequence (opt5) from hemagglutinin__InfluenzaB__AGX18567

SEQ ID NO: 219310 - RNA, 1758 nt, Artificial Sequence
  derived and/or modified CDS sequence (opt5) from hemagglutinin__InfluenzaB__AGX18578
augaaggccaucauugugcugcucauggucguuaccagcaacgcugacagaaucugcacaggcauuacguccucuaauagcccccacguggugaaaaccgccacacagggggaggucaacgugaccggaguuaucccucugacaaccacaccgaccaagucccauuucgcgaaucuuaaaggcacggaaacccgggggaagcugugucccaaaugccucaacuguacagaucuggacguggcucuuggacgcccuaagugcaccggcaauauucccucugccagagucagcauccugcacgaggugcggccuguuacauccggguguuuucccaucaugcaugaucgcaccaagauuagacaacucccuaaccugcugcggggauacgaacacauccgccucucuacgcauaaugugauuaacgccgagaaugcuccgggcggccccuauaaaaucgggacaagcggauccugcccuaacgucaccaauggcaacggguucuuugccacaauggcuugggccgugcccaagaaugacaaaaacaagaccgcgaccaauagccugacaauugaagugccuuacaucuguacggagggagaggaucagauuaccgucuggggcuuccacucugacaacgaaacacagauggccaaacuuuauggggauuccaagccccagaaguuuaccagcucugcuaacggaguuacaacccacuacgugucccaaaucggcggcuucccgaaucagacggaggacgggggacugccucagagcggcagaaucguggucgauuauauggugcagaaaucugggaagacaggaaccauuaccuaccaacggggcauccuccugccccagaaaguuuggugcgccuccgggcgcagcaaggugauuaaaggaucccuuccucugaucggcgaagcugacugucuccaugagaaguauggcgggcugaacaaaucuaagcccuacuacacaggagagcacgccaaggcgauuggcaauugccccaucugggucaaaaccccucugaagcucgccaacgggacaaaauauagaccgcccgcuaagcugcuuaaagaacggggauuuuucggcgccaucgcuggguuucuggagggcggaugggaaggcaugauugccggguggcauggauacacgagccacggcgcccacgggguggcuguugcggccgaucucaaguccacccaggaggcuaucaauaagauuaccaaaaaccugaauagccuuucugaacuggaggugaagaaccuccagcgccuguccggagccauggacgagcugcauaaagaaauccucgagcuggaugaaaaggucgacgaccuuagagccgauacaauuagcucucaaaucgagcuggcugugcuccugagcaaugaaggcaucauuaacuccgaggacgagcaccuucuggcccucgaacggaaacugaagaagaugcuggggccuucugcggucgagaucggcaauggauguuucgaaacaaaacauaagugcaaccagaccugccucgaucgcauugcugccggcacguuugacgccggggaguucagccugcccaccuuugauucccuuaauaucacagcugccagccugaacgacgauggacucgacaaucacaccauucugcuguauuacucuacagcugccuccagccuugcggugacccucaugaucgccauuuucguuguguauauggucucuagagauaacguguccuguagcaucugccuguga

SEQ ID NO: 219311 - RNA, 1758 nt, Artificial Sequence
  derived and/or modified CDS sequence (opt5) from hemagglutinin__InfluenzaB__AGX18589
augaaggccaucauugugcugcucauggucguuaccagcaacgcugacagaaucugcacaggcauuacguccucuaauagcccccacguggugaaaaccgccacacagggggaggucaacgugaccggaguuaucccucugacaaccacaccgaccaagucccauuucgcgaaucuuaaaggcacggaaacccgggggaagcugugucccaaaugccucaacuguacagaucuggacguggcucuuggacgcccuaagugcaccggcaauauucccucugccagagucagcauccugcacgaggugcggccuguuacauccggguguuuucccaucaugcaugaucgcaccaagauuagacaacucccuaaccugcugcggggauacgaacacauccgccucucuacgcauaaugugauuaacgccgagaaugcuccgggcggccccuauaaaaucgggacaagcggauccugcccuaacgucaccaauggcaacggguucuuugccacaauggcuugggccgugcccaagaaugacaacaauaaaaccgcgaccaacagccugacaauugaagugccuuacaucuguacggagggagaggaucagauuaccgucuggggcuuccacucugacacagaaacccagauggccaaacuuuauggggauuccaagccccagaaguuuacaagcucugcuaacggaguuaccacgcacuacgugucccaaaucggcgacuucccgaaucagacagaggauggcgggcugccucagagcggaagaaucguggucgacuauauggugcagaagucuggcaaaaccgggaccauuacauaccaacggggaauccuccugccccagaagguuuggugcgccuccggccgcagcaaagugauuaaggggucccuuccucugaucggagaagcugauugucuccaugagaaauauggcggccugaacaagucuaaacccuacuacaccggggagcacgccaaggcgauuggaaauugccccaucugggucaagacaccucugaaacucgccaacggcacgaaguauagaccgcccgcuaaacugcuuaaggaacggggguuuuucggagccaucgcuggcuuucuggaagggggcugggagggaaugauugccggcuggcauggguacaccagccacggagcccacggcguggcuguugcggccgaccucaaauccacacaggaggcuaucaauaagauuaccaagaaccugaauagccuuucugaacuggaggugaaaaaccuccagcgccuguccggggccauggaugagcugcauaaugaaauccucgagcuggacgaaaaggucgacgaucuuagagccgacacaauuagcucucaaaucgagcuggcugugcuccugagcaacgaaggaaucauuaauuccgaggaugagcaccuucuggcccucgaacggaaacugaagaaaaugcugggcccuucugcggucgagaucgggaacggcuguuucgaaaccaagcauaagugcaaucagacgugccucgaccgcauugcugccggaaccuuugaugccggcgaguucagccugcccacauuugacucccuuaacaucaccgcugccagccugaaugaugacgggcucgauaaccacacaauucugcuguauuacucuaccgcugccuccagccuugcggugacgcucaugaucgccauuuucguuguguauauggucucuagagacaacguguccuguagcaucugccuguga

SEQ ID NO: 219312 - RNA, 1758 nt, Artificial Sequence; identical to SEQ ID NO: 218586
  derived and/or modified CDS sequence (opt5) from hemagglutinin__InfluenzaB__AGX18600

SEQ ID NO: 219313 - RNA, 1758 nt, Artificial Sequence; identical to SEQ ID NO: 218586
  derived and/or modified CDS sequence (opt5) from hemagglutinin__InfluenzaB__AGX18611

SEQ ID NO: 219314 - RNA, 1758 nt, Artificial Sequence; identical to SEQ ID NO: 218586
  derived and/or modified CDS sequence (opt5) from hemagglutinin__InfluenzaB__AGX18622

SEQ ID NO: 219315 - RNA, 1758 nt, Artificial Sequence; identical to SEQ ID NO: 218586
  derived and/or modified CDS sequence (opt5) from hemagglutinin__InfluenzaB__AGX18633

SEQ ID NO: 219316 - RNA, 1758 nt, Artificial Sequence; identical to SEQ ID NO: 218586
  derived and/or modified CDS sequence (opt5) from hemagglutinin__InfluenzaB__AGX18644

SEQ ID NO: 219317 - RNA, 1758 nt, Artificial Sequence; identical to SEQ ID NO: 218586
  derived and/or modified CDS sequence (opt5) from hemagglutinin__InfluenzaB__AGX18655

SEQ ID NO: 219318 - RNA, 1758 nt, Artificial Sequence; identical to SEQ ID NO: 218586
  derived and/or modified CDS sequence (opt5) from hemagglutinin__InfluenzaB__AGX18666

SEQ ID NO: 219319 - RNA, 1758 nt, Artificial Sequence; identical to SEQ ID NO: 218586
  derived and/or modified CDS sequence (opt5) from hemagglutinin__InfluenzaB__AGX18677

SEQ ID NO: 219320 - RNA, 1758 nt, Artificial Sequence; identical to SEQ ID NO: 218586
  derived and/or modified CDS sequence (opt5) from hemagglutinin__InfluenzaB__AGX18688

SEQ ID NO: 219321 - RNA, 1758 nt, Artificial Sequence; identical to SEQ ID NO: 218586
  derived and/or modified CDS sequence (opt5) from hemagglutinin__InfluenzaB__AGX18699

SEQ ID NO: 219322 - RNA, 1758 nt, Artificial Sequence; identical to SEQ ID NO: 218586
  derived and/or modified CDS sequence (opt5) from hemagglutinin__InfluenzaB__AGX18710

SEQ ID NO: 219323 - RNA, 1758 nt, Artificial Sequence; identical to SEQ ID NO: 218586
  derived and/or modified CDS sequence (opt5) from hemagglutinin__InfluenzaB__AGX18721

SEQ ID NO: 219324 - RNA, 1758 nt, Artificial Sequence; identical to SEQ ID NO: 218586
  derived and/or modified CDS sequence (opt5) from hemagglutinin__InfluenzaB__AGX18732

SEQ ID NO: 219325 - RNA, 1758 nt, Artificial Sequence
  derived and/or modified CDS sequence (opt5) from hemagglutinin__InfluenzaB__AGX18743
augaaggccaucauugugcugcucauggucguuaccagcaacgcugacagaaucugcacaggcauuacguccucuaauagcccccacguggugaaaaccgccacacagggggaggucaacgugaccggaguuaucccucugacaaccacaccgaccaagucccauuucgcgaaucuuaaaggcacggaaacccgggggaagcugugucccaaaugccucaacuguacagaucuggacguggcucuuggacgcccuaagugcaccggcaauauucccucugccagagucagcauccugcacgaggugcggccuguuacauccggguguuuucccaucaugcaugaucgcaccaagauuagacaacucccuaaccugcugcggggauacgaacacauccgccucucuaaucauaacgugauuaaugccgagaacgcuccgggcggccccuauaaaaucgggacgagcggauccugcccuaaugucacaaacggcaauggguucuuugccaccauggcuugggccgugcccaagaacgacaauaacaaaacagcgaccaacagccugaccauugaagugccuuacaucuguacagagggagaggaucagauuacggucuggggcuuccacucugacaaugaaacccagauggccaaacuuuauggggauuccaagccccagaaguuuacaagcucugcuaacggaguuaccacacacuacgugucccaaaucggcggcuucccgaaucagaccgaggacgggggacugccucagagcggcagaaucguggucgauuauauggugcagaagucugggaaaacgggaacaauuaccuaccaacggggcauccuccugccccagaagguuuggugcgccuccgggcgcagcaaagugauuaagggaucccuuccucugaucggcgaagcugacugucuccaugagaaauauggcgggcugaacaagucuaaacccuacuacaccggagagcacgccaaggcgauuggcaauugccccaucugggucaagacaccucugaaacucgccaacgggaccaaguauagaccgcccgcuaaacugcuuaaggaacggggauuuuucggcgccaucgcuggguuucuggagggcggaugggaaggcaugauugccggguggcauggauacacaagccacggcgcccacgggguggcuguugcggccgaucucaaauccacgcaggaggcuaucaauaagauuaccaagaaccugaauagccuuucugaacuggaggugaaaaaccuccagcgccuguccggagccauggacgagcugcauaaugaaauccucgagcuggaugaaaaggucgacgaccuuagagccgauacaauuagcucucaaaucgagcuggcugugcuccugagcaacgaaggcaucauuaauuccgaggacgagcaccuucuggcccucgaacggaaacugaagaaaaugcuggggccuucugcggucgagaucggcaacggauguuucgaaaccaagcauaagugcaaucagacaugccucgaucgcauugcugccggcaccuuugacgccggggaguucagccugcccacguuugauucccuuaacaucaccgcugccagccugaacgacgauggacucgacaaucacacaauucugcuguauuacucuaccgcugccuccagccuugcggugacacucaugaucgccauuuucguuguguauauggucucuagagauaacguguccuguagcaucugccuguga

SEQ ID NO: 219326 - RNA, 1758 nt, Artificial Sequence; identical to SEQ ID NO: 218586
  derived and/or modified CDS sequence (opt5) from hemagglutinin__InfluenzaB__AGX18754

SEQ ID NO: 219327 - RNA, 1758 nt, Artificial Sequence; identical to SEQ ID NO: 218586
  derived and/or modified CDS sequence (opt5) from hemagglutinin__InfluenzaB__AGX18765

SEQ ID NO: 219328 - RNA, 1758 nt, Artificial Sequence; identical to SEQ ID NO: 218637
  derived and/or modified CDS sequence (opt5) from hemagglutinin__InfluenzaB__AGX18776

SEQ ID NO: 219329 - RNA, 1758 nt, Artificial Sequence; identical to SEQ ID NO: 218586
  derived and/or modified CDS sequence (opt5) from hemagglutinin__InfluenzaB__AGX18787

SEQ ID NO: 219330 - RNA, 1758 nt, Artificial Sequence; identical to SEQ ID NO: 218586
  derived and/or modified CDS sequence (opt5) from hemagglutinin__InfluenzaB__AGX18798

SEQ ID NO: 219331 - RNA, 1758 nt, Artificial Sequence
  derived and/or modified CDS sequence (opt5) from hemagglutinin__InfluenzaB__AGX18809
augaaggccaucauugugcugcucauggucguuaccagcaacgcugacagaaucugcacaggcauuacguccucuaauagcccccacguggugaaaaccgccacacagggggaggucaacgugaccggaguuaucccucugacaaccacaccgaccaagucccauuucgcgaaucuuaaaggcacggaaacccgggggaagcugugucccaaaugccucaacuguacagaucuggacguggcucuuggacgcccuaagugcaccggcaauauucccucugccagagucagcauccugcacgaggugcggccuguuacauccggguguuuucccaucaugcaugaucgcaccaagauuagacaacucccuaaccugcugcggggauacgaacacauccgccucucuacgcauaaugugauuaacgccgagaaugcuccgggcggccccuauaaaaucgggacaagcggauccugcccuaacgucaccaauggcaacggguucuuugccacaauggcuugggccgugcccaagaaugacaacaauaaaaccgcgaccaacagccugacaauugaagugccuuacaucuguacggagggagaggaucagauuaccgucuggggcuuccacucugacuccgaaacacagauggccaagcuguauggggauagcaaaccccagaaguuuaccucuuccgcuaacggaguuacaacccacuacgugagccaaaucggcggcuucccgaaucagacggaggacgggggacugccucagucuggcagaaucguggucgauuauaugaugcagaaguccgggaaaacaggaaccauuaccuaccaacggggcauccuccugccccagaagguguggugcgccagcgggcgcuccaaaguuauuaagggaucucuuccucugaucggcgaagcugacugucuccaugagaaauauggcgggcugaacaagagcaaacccuacuacacaggagagcacgccaaggcgauuggcaauugccccaucugggugaagaccccucugaaacucgccaacgggacaaaguauagaccgcccgcuaaacugcuuaaggaacggggauuuuucggcgccaucgcuggguuucuggagggcggaugggaaggcaugauugccggguggcauggauacacgucccacggcgcccacggggucgcuguggcggccgaucucaaaagcacccaggaggcuaucaauaagauuacaaagaaccuuaauucucuuuccgaacuggagguuaaaaaccuccagcgccugagcggagccauggacgagcugcauaaugaaauccucgagcuggaugaaaagguggacgaccuuagagccgauaccauuucuagccaaaucgagcuggcuguccuccuguccaacgaaggcaucauuaauucugaggacgagcaccuucuggcccucgaacggaaacugaagaaaaugcuggggccuagcgcgguggagaucggcaacggauguuucgaaacaaagcauaagugcaaucagaccugccucgaucgcauugcugccggcacguuugacgccggggaguucucccugcccaccuuugauagccuuaacaucacagcugccucucugaaugacgauggacucgacaaccacaccauucugcuguauuacuccacagcugccagcucucuugcggucacccucaugaucgccauuuucgugguuuauaugguguccagagauaacgucagcuguuccaucugccuguga

SEQ ID NO: 219332 - RNA, 1758 nt, Artificial Sequence; identical to SEQ ID NO: 219249
  derived and/or modified CDS sequence (opt5) from hemagglutinin__InfluenzaB__AGX18820

SEQ ID NO: 219333 - RNA, 1758 nt, Artificial Sequence; identical to SEQ ID NO: 218586
  derived and/or modified CDS sequence (opt5) from hemagglutinin__InfluenzaB__AGX18831

SEQ ID NO: 219334 - RNA, 1758 nt, Artificial Sequence; identical to SEQ ID NO: 218586
  derived and/or modified CDS sequence (opt5) from hemagglutinin__InfluenzaB__AGX18842

SEQ ID NO: 219335 - RNA, 1758 nt, Artificial Sequence; identical to SEQ ID NO: 218654
  derived and/or modified CDS sequence (opt5) from hemagglutinin__InfluenzaB__AGX18853

SEQ ID NO: 219336 - RNA, 1758 nt, Artificial Sequence
  derived and/or modified CDS sequence (opt5) from hemagglutinin__InfluenzaB__AGX18864
augaaggccaucauugugcugcucauggucguuaccagcaacgcugacagaaucugcacaggcauuacguccucuaauagcccccacguggugaaaaccgccacacagggggaggucaacgugaccggaguuaucccucugacaaccacaccgaccaaguccuacuucgcgaaucuuaaaggcacggaaacccgggggaagcugugucccaaaugccucaacuguacagaucuggacguggcucuuggacgcccuaagugcaccggcaauauucccucugccagagucagcauccugcaugaggugcggccuguuacauccggguguuuucccaucaugcacgaucgcaccaagauuagacaacucccuaaccugcugcggggauaugaacauauccgccucucuaaucacaacgugauuaaugccgagaacgcuccgggcggccccuacaaaaucgggacgagcggauccugcccuaaugucacaaacggcaauggguucuuugccaccauggcuugggccgugcccaagaacgacaauaacaaaacagcgaccaacagccugaccauugaagugccuuauaucuguacagagggagaggaucagauuacggucuggggcuuccauucugacaaugaagcccagauggcuaaacuuuacggggauuccaagccccagaaguuuaccagcucugccaacggaguuacaacccacuaugugucccaaaucggcggcuucccgaaucagacagaggacgggggacugccucagagcggcagaaucguggucgauuacauggugcagaagucugggaaaaccggaacgauuacauaucaacggggcauccuccugccccagaagguuuggugcgcuuccgggcgcagcaaagugauuaagggaucccuuccucugaucggcgaagccgacugucuccacgagaaauacggcgggcugaacaagucuaaacccuacuauaccggagagcaugcgaaggccauuggcaauugccccaucugggucaagaccccucugaaacucgcuaacgggacaaaguacagaccgcccgccaaacugcuuaaggaacggggauuuuucggcgcuaucgccggguuucuggagggcggaugggaaggcaugauugccggguggcacggauauaccagccauggcgcucacgggguggcgguugccgcugaucucaaauccacacaggaggccaucaauaagauuacgaagaaccugaauagccuuucugaacuggaggugaaaaaccuccagcgccuguccggagccauggacgagcugcacaaugaaauccucgagcuggaugaaaaggucgacgaccuuagagcugauaccauuagcucucaaaucgagcuggccgugcuccugagcaacgaaggcaucauuaauuccgaggacgagcaucuucuggcgcucgaacggaaacugaagaaaaugcuggggccuucugcugucgagaucggcaacggauguuucgaaacaaagcacaagugcaaucagaccugccucgaucgcauugccgccggcacauuugacgcuggggaguucagccugcccaccuuugauucccuuaacaucacggccgcuagccugaacgacgauggacucgacaaucauaccauucugcuguacuauucuacagccgcguccagccuugccgugacccucaugaucgcuauuuucguuguguacauggucucuagagauaacguguccuguagcaucugccuguga

SEQ ID NO: 219337 - RNA, 1758 nt, Artificial Sequence
  derived and/or modified CDS sequence (opt5) from hemagglutinin__InfluenzaB__AGX18875
augaaggccaucauugugcugcucauggucguuaccagcaacgcugacagaaucugcacaggcauuacguccucuaauagcccccacguggugaaaaccgccacacagggggaggucaacgugaccggaguuaucccucugacaaccacaccgaccaagucccauuucgcgaaucuuaaaggcacggaaacccgggggaagcugugucccaaaugccucaacuguacagaucuggacguggcucuuggacgcccuaagugcaccggcaauauucccucugccagagucagcauccugcacgaggugcggccuguuacauccggguguuuucccaucaugcaugaucgcaccaagauuagacaacucccuaaccugcugcggggauacgaacacauccgccucucuacgcauaaugugauuaacgccgagaaugcuccgggcggccccuauaaaaucgggacaagcggauccugcccuaacgucaccaauagaaacggcuucuuugccacaauggcuugggccgugcccaagaaugacaacaauaaaaccgcgaccaacagccugacaauugaagugccuuacaucuguacggagggggaggaucagauuaccgucuggggauuccacucugacaacgaaauccagauggccaaacuuuauggcgauuccaagccccagaaguuuacaagcucugcuaaugggguuaccacacacuacgugucccaaaucggaggcuucccgaaccagaccgaggacggcgggcugccucagagcggacggauuguggucgauuauauggugcagaagucuggcaaaacggggacaaucaccuaccaacgcgggauucuccugccccagaagguuuggugcgccuccggcagaagcaaagugaucaaggggucccuuccucugauuggagaagcugacugucuccaugagaaauauggcggccugaauaagucuaaacccuacuacaccggggagcacgccaaggcgaucggaaacugccccaucugggucaagacaccucugaaacucgccaauggcaccaaguaucggccgcccgcuaaacugcuuaaggaacgcggguuuuucggagccauugcuggcuuucuggagggaggcugggaaggaaugaucgccggcuggcauggguacacaagccacggagcccacggcguggcuguugcggccgaucucaaauccacgcaggaggcuauuaacaagaucaccaagaaucugaacagccuuucugaacuggaggugaaaaaucuccagagacuguccggggccauugacgagcugcauaacgaaauccucgagcuggaugaaaaggucgacgaccuucgggccgauacaaucagcucucaaauugagcuggcugugcuccugagcaaugaaggaaucauuaacuccgaggacgagcaccuucuggcccucgaacgcaaacugaagaaaaugcugggcccuucugcggucgagaucgggaauggcuguuucgaaaccaagcauaagugcaaccagacaugccucgauagaauugcugccggaaccuuugacgccggcgaguucagccugcccacguuugauucccuuaauaucaccgcugccagccugaacgacgaugggcucgacaaccacacaauucugcuguauuacucuaccgcugccuccagccuugcggugacacucaugaucgccaucuucguuguguauauggucucucgggauaauguguccuguagcauuugccuguga

SEQ ID NO: 219338 - RNA, 1758 nt, Artificial Sequence
  derived and/or modified CDS sequence (opt5) from hemagglutinin__InfluenzaB__AGX18886
augaaggccaucauugugcugcucauggucguuaccagcaacgcugacagaaucugcacaggcauuacguccucuaauagcccccacguggugaaaaccgccacacagggggaggucaacgugaccggaguuaucccucugacaaccacaccgaccaagucccauuucgcgaaucuuaaaggcacggaaacccgggggaagcugugucccaaaugccucaacuguacagaucuggacguggcucuuggacgcccuaagugcaccggcaauauucccucugccagagucagcauccugcacgaggugcggccuguuacauccggguguuuucccaucaugcaugaucgcaccaagauuagacaacucccuaaccugcugcggggauacgaacacauccgccucucuacgcauaaugugauuaacgccgagaaugcuccgggcggccccuauaaaaucgggacaagcggauccugcccuaacgucaccaauggcaacggguucuuugccacaauggcuugggccgugcccaagaaugacaacaauaaaaccgcgaccaacagccugacaauugaagugccuuacaucuguacggagggagaggaucagauuaccgucuggggcuuccacucugacaacgaaauccagauggccaaacuuuauggggauuccaagccccagaaguuuacaagcucugcuaauggaguuaccacacacuacgugucccaaaucggcggcuucccgaaccagaccgaggacgggggacugccucagagcggcagaauuguggucgauuauauggugcagaagucugggaaaacgggaacaaucaccuaccaacggggcauucuccugccccagaagguuuggugcgccuccgggcgcagcaaagugaucaagggaucccuuccucugauuggcgaagcugacugucuccaugagaaauauggcgggcugaauaagucuaaacccuacuacaccggagagcacgccaaggcgaucggcaacugccccaucugggucaagacaccucugaaacucgccaaugggaccaaguauagaccgcccgcuaaacugcuuaaggaacggggauuuuucggcgccauugcuggguuucuggagggcggaugggaaggcaugaucgccggguggcauggauacacaagccacggcgcccacgggguggcuguugcggccgaucucaaauccacgcaggaggcuauuaacaagaucaccaagaaucugaacagccuuucugaacuggaggugaaaaaucuccagcgccuguccggagccauggacgagcugcauaacgaaauucucgagcuggaugaaaaggucgacgaccuuagagccgauacaaucagcucucaaaucgagcuggcugugcuccugagcaaugaaggcauuaucaacuccgaggacgagcaccuucuggcccucgaacggaaacugaagaaaaugcuggggccuucugcggucgagauuggcaauggauguuucgaaaccaagcauaagugcaaccagacaugccucgaucgcaucgcugccggcaccuuugacgccggggaguucagccugcccacguuugauucccuuaauauuaccgcugccagccugaacgacaacggacucgauaaucacacaauccugcuguauuacucuaccgcugccuccagccuugcggugacacucauuaucgccaucuucguuguguauauggucucuagagacaacguguccuguagcauuugccuguga

SEQ ID NO: 219339 - RNA, 1758 nt, Artificial Sequence; identical to SEQ ID NO: 219059
  derived and/or modified CDS sequence (opt5) from hemagglutinin__InfluenzaB__AGX18897

SEQ ID NO: 219340 - RNA, 1758 nt, Artificial Sequence; identical to SEQ ID NO: 218586
  derived and/or modified CDS sequence (opt5) from hemagglutinin__InfluenzaB__AGX18908

SEQ ID NO: 219341 - RNA, 1758 nt, Artificial Sequence; identical to SEQ ID NO: 218586
  derived and/or modified CDS sequence (opt5) from hemagglutinin__InfluenzaB__AGX18919

SEQ ID NO: 219342 - RNA, 1758 nt, Artificial Sequence
  derived and/or modified CDS sequence (opt5) from hemagglutinin__InfluenzaB__AGX18930
augaaggccaucauugugcugcucauggucguuaccagcaacgcugacagaaucugcacaggcauuacguccucuaauagcccccacguggugaaaaccgccacacagggggaggucaacgugaccggaguuaucccucugacaaccacaccgaccaagucccauuucgcgaaucuuaaaggcacggaaacccgggggaagcugugucccaaaugccucaacuguacagaucuggacguggcucuuggacgcccuaagugcaccggcaauauucccucugccagagucagcauccugcacgaggugcggccuguuacauccggguguuuucccaucaugcaugaucgcaccaagauuagacaacucccuaaccugcugcggggauacgaacacauccgccucucuacgcauaaugugauuaacgccgagaaugcuccgggcggccccuauaaaaucgggacaagcggauccugcccuaacgucaccaauggcaacggguucuuugccacaauggcuugggccgugcccaagaaugacaacaauaaaaccgcgaccaacagccugacaauugaagugccuuacaucuguacggagggagaggaucagauuaccgucuggggcuuccacucugacaacgaaacacagauggccaaacuuuauggggauuccaagccccagaaguuuaccagcucugcuaauggaguuacaacccacuacgugucccaaaucggcggcuucccgaaccagacggaggacgggggacugccucagagcggcagaaucguggucgauuauauggugcagaagucugggaaaacaggaaccauuaccuaccaacggggcauccuccugccccagaagguuuggugcgccuccgggcgcagcaaagugauuaagggaucccuuccucugaucggcgaagcugacugucuccaugagaaauauggcgggcugaauaagucuaaacccuacuacacaggagagcacgccaaggcgauuggcaacugccccaucugggucaagaccccucugaaacucgccaaugggacaaaguauagaccgcccgcuaaacugcuuaaggaacggggauuuuucggcgccaucgcuggguuucuggagggcggaugggaaggcaugauugccggguggcauggauacacgagccacggcgcccacgggguggcuguugcggccgaucucaaauccacccaggaggcuaucaacaagauuacaaagaaucugaacagccuuucugaacuggaggugaaaaaucuccagcgccuguccggagccauggacgagcugcauaacgaaauccucgagcuggaugaaaaggucgacgaccuuagagccgauaccauuagcucucaaaucgagcuggcugugcuccugagcaaugaaggcaucauuaacuccgaggacgagcaccuucuggcccucgaacggaaacugaagaaaaugcuggggccuucugcggucgagaucggcaauggauguuucgaaacaaagcauaagugcaaccagaccugcauugaucgcaucgcugccggcacguuugacgccggggaguucagccuccccaccuuugauucccugaauauuacagcugccagccuuaacgacgauggacuggacaaccacaccauccuccuguauuacucuacagcugccuccagccuggcggugacccuuaugauugccaucuucguuguguauauggucucuagagauaauguguccuguagcaucugccucuga

SEQ ID NO: 219343 - RNA, 1758 nt, Artificial Sequence; identical to SEQ ID NO: 218586
  derived and/or modified CDS sequence (opt5) from hemagglutinin__InfluenzaB__AGX18941

SEQ ID NO: 219344 - RNA, 1758 nt, Artificial Sequence; identical to SEQ ID NO: 218586
  derived and/or modified CDS sequence (opt5) from hemagglutinin__InfluenzaB__AGX18952

SEQ ID NO: 219345 - RNA, 1758 nt, Artificial Sequence; identical to SEQ ID NO: 218586
  derived and/or modified CDS sequence (opt5) from hemagglutinin__InfluenzaB__AGX18963

SEQ ID NO: 219346 - RNA, 1758 nt, Artificial Sequence
  derived and/or modified CDS sequence (opt5) from hemagglutinin__InfluenzaB__AGX18974
augaaggccaucauugugcugcucauggucguuaccagcaacgcugacagaaucugcacaggcauuacguccucuaauagcccccacguggugaaaaccgccacacagggggaggucaacgugaccggaguuaucccucugacaaccacaccgaccaagucccauuucgcgaaucuuaaaggcacggaaacccgggggaagcugugucccaaaugccucaacuguacagaucuggacguggcucuuggacgcccuaagugcaccggcaauauucccucugccagagucagcauccugcacgaggugcggccuguuacauccggguguuuucccaucaugcaugaucgcaccaagauuagacaacucccuaaccugcugcggggauacgaacacauccgccucucuacgcauaaugugauuaacgccgagaaugcuccgggcggccccuauaaaaucgggacaagcggauccugcccuaacgucaccaauggcaacggguucuuugccacaauggcuugggccgugcccaagaaugacaacaauaaaaccgcgaccaacagccugacaauugaagugccuuacaucuguacggagggagaggaucagauuaccgucuggggcuuccacucugacaacgaaacacagauggccaaacuuuauggggauuccaaaccccagaaguuuaccagcucugcuaauggaguuacaacccacuacgugucccaaaucggcggcuucccgaaccagacggaggacgggggacugccucagagcggcagaaucguggucgauuauauggugcagaagucugggaaaacaggaaccauuaccuaccaacggggcauccuccugccccagaagguuuggugcgccuccgggcgcagcaaagugauuaagggaucccuuccucugaucggcgaagcugacugucuccaugagaaauauggcgggcugaauaagucuaaacccuacuacacaggagagcacgccaaggcgauuggcaacugccccaucugggucaagaccccucugaaacucgccaaugggacaaaguauagaccgcccgcuaaacugcuuaaggaacggggauuuuucggcgccaucgcuggguuucuggagggcggaugggaaggcaugauugccggguggcauggauacacgagccacggcgcccacgggguggcuguugcggccgaucucaaauccacccaggaggcuaucaacaagauuacaaagaaucugaacagccuuucugaacuggaggugaaaaaucuccagcgccuguccggagccauggacgagcugcauaacgaaauccucgagcuggaugaaaaggucgacgaccuuagagccgauaccauuagcucucaaaucgagcuggcugugcuccugagcaaugaaggcaucauuaacuccgaggacgagcaccuucuggcccucgaaaagaagcugaaaaagaugcuggggccuucugcggucgagaucggcaauggauguuucgaaacaaagcauaaaugcaaccagaccugccucgaucggauugcugccggcacguuugacgccggggaguucagccugcccaccuuugauucccuuaauaucacagcugccagccugaacgacgauggacucgacaaccacaccauucugcuguauuacucuacagcugccuccagccuugcggugacccucaugaucgccauuuucguuguguauauggucucucgcgauaauguguccuguagcaucugccuguga

SEQ ID NO: 219347 - RNA, 1758 nt, Artificial Sequence; identical to SEQ ID NO: 218586
  derived and/or modified CDS sequence (opt5) from hemagglutinin__InfluenzaB__AGX18985

SEQ ID NO: 219348 - RNA, 1758 nt, Artificial Sequence
  derived and/or modified CDS sequence (opt5) from hemagglutinin__InfluenzaB__AGX18996
augaaggccaucauugugcugcucauggucguuaccagcaacgcugacagaaucugcacaggcauuacguccucuaauagcccccacguggugaaaaccgccacacagggggaagucaacgugaccggaguuaucccucugacaaccacaccgaccaagucccauuucgcgaaucuuaaaggcacggaaacccgggggaagcugugucccaaaugccucaacuguacagaucuggacguggcucuuggacgcccuaagugcaccggcaauacacccucugccagagucagcauucugcacgaggugcggccuguuaccuccggguguuuucccaucaugcaugaucgcacgaagaucagacaacucccuaaccugcugcggggauacgaacacauucgccucucuacacauaaugugaucaacgccgagaaugcuccgggcggccccuauaaaauugggaccagcggauccugcccuaacgucacaaauggcaacggguucuuugccaccauggcuugggccgugcccaagaaugacaacaauaaaaccgcgacaaacagccugacgaucgaagugccuuacauuuguaccgagggagaggaucagaucacagucuggggcuuccacucugacaacgggacccagauggccaaacuuuauggagauuccaagccccagaaguuuacaagcucugcuaauggcguuaccacgcacuacgugucccaaauuggcggguucccgaaccagacagaagacggaggccugccucagagcgggagaaucguggucgauuauauggugcagaagucuggaaaaaccggcaccaucacauaccaacgggggauucuccugccccagaagguuuggugcgccuccggacgcagcaaagugaucaagggcucccuuccucugauuggcgaggcugacugucuccaugaaaaauaugggggacugaauaagucuaaacccuacuacaccggcgagcacgccaaggcgaucgggaacugccccauuugggucaagacaccucugaaacucgccaauggaacgaaguauagaccgcccgcuaaacugcuuaaggagcggggcuuuuucggggccaucgcuggcuuucuggaaggaggcugggaggggaugaucgccggauggcauggcuacaccagccacggggcccacggaguggcuguugcggccgaucucaaauccacacaggaagcuauuaacaagaucaccaagaaucugaacagccuuucugagcuggaagugaaaaaucuccagcgccuguccggcgccauggacgagcugcauaacgagauucucgaacuggaugagaaggucgacgaccuuagagccgauacaaucagcucucaaauugaacuggcugugcuccugagcaaugaggggaucaucaacuccgaagacgagcaccuucuggcccucgagcggaaacugaagaaaaugcugggcccuucugcggucgaaauuggaaauggcuguuucgagaccaagcauaagugcaaccagacgugccucgaucgcaucgcugccgggaccuuugacgccggagaguucagccugcccacauuugauucccuuaauauuaccgcugccagccugaacgacgauggccucgacaaccacacaauccugcuguauuacucuaccgcugccuccagccuugcggugacgcucaugauugccaucuucguuguguauauggucucuagagauaauguguccuguagcauuugccuguga

SEQ ID NO: 219349 - RNA, 1758 nt, Artificial Sequence; identical to SEQ ID NO: 218586
  derived and/or modified CDS sequence (opt5) from hemagglutinin__InfluenzaB__AGX19007

SEQ ID NO: 219350 - RNA, 1758 nt, Artificial Sequence
  derived and/or modified CDS sequence (opt5) from hemagglutinin__InfluenzaB__AGX19018
augaaggccaucauugugcugcucauggucguuaccagcaacgcugacagaaucugcacaggcauuacguccucuaauagcccccacguggugaaaaccgccacacagggggaggucaacgugaccggaguuaucccucugacaaccacaccgaccaagucccauuucgcgaaucuuaaaggcacggaaacccgggggaagcugugucccaaaugccucaacuguacagaucuggacguggcucuuggacgcccuaagugcaccggcaauauucccucugccagagucagcauccugcacgaggugcggccuguuacauccggguguuuucccaucaugcaugaucgcaccaagauuagacaacucccuaacuuccugcggggauacgaacacauccgccugucuacgcauaaugugauuaacgccgagaaugcuccgggcggccccuauaaaaucgggacaagcggauccugcccuaacgucaccaauggcaacggguuuuucgccacaauggcuugggccgugcccaagaaugacaacaauaaaaccgcgaccaacagccucacaauugaagugccuuacaucuguacggagggagaggaucagauuaccgucuggggcuuucacucugacuccgaaacacagauggccaagcuguauggggauagcaaaccccagaaguucaccucuuccgcuaacggaguuacaacccacuacgugagccaaaucggcggcuuuccgaaucagacggaggacgggggacuuccucagucuggcagaaucguggucgauuauauggugcagaaguccgggaaaacaggaaccauuaccuaccaacggggcauccugcucccccagaagguuuggugcgccagcgggcgcuccaaagugauuaagggaucucugccucuuaucggcgaagcugacugucugcaugagaaauauggcgggcucaacaagagcaaacccuacuacacaggagagcacgccaaggcgauuggcaauugccccaucugggucaagaccccucugaaacuggccaacgggacaaaguauagaccgcccgcuaaacuccugaaggaacggggauucuuuggcgccaucgcuggguuccuugagggcggaugggaaggcaugauugccggguggcauggauacacgucccacggcgcccacgggguggcuguugcggccgaucugaaaagcacccaggaggcuaucaauaagauuacaaagaaccucaauucucuguccgaacuugaggugaaaaaccugcagcgccucagcggagccauggacgagcugcauaaugaaauccuggagcucgaugaaaaggucgacgaccugagagccgauaccauuucuagccaaaucgagcuugcugugcugcucuccaacgaaggcaucauuaauucugaggacgagcaucugcuugcccuggaacggaaacucaagaaaaugcuggggccuagcgcggucgagaucggcaacggauguuuugaaacaaagcacaagugcaaucagaccugccuggaucgcauugcugccggcacguucgacgccggggaguuuucccuccccaccuucgauagccugaacaucacagcugccucucuuaaugacgauggacuggacaaccacaccauucuccuguauuacuccacagcugccagcucucuggcggugacccuuaugaucgccauuuucguuguguauauggucuccagagauaacgugagcuguuccaucugccucuga

SEQ ID NO: 219351 - RNA, 1758 nt, Artificial Sequence; identical to SEQ ID NO: 219249
  derived and/or modified CDS sequence (opt5) from hemagglutinin__InfluenzaB__AGX19029

SEQ ID NO: 219352 - RNA, 1758 nt, Artificial Sequence; identical to SEQ ID NO: 218586
  derived and/or modified CDS sequence (opt5) from hemagglutinin__InfluenzaB__AGX19040

SEQ ID NO: 219353 - RNA, 1758 nt, Artificial Sequence
  derived and/or modified CDS sequence (opt5) from hemagglutinin__InfluenzaB__AGX19051
augaaggccaucauugugcugcucauggucguuaccagcaacgcugacagaaucugcacaggcauuacguccucuaauagcccccacguggugaaaaccgccacacagggggaggucaacgugaccggaguuaucccucugacaaccacaccgaccaagucccauuucgcgaaucuuaaaggcacggaaacccgggggaagcugugucccaaaugccucaacuguacagaucuggacguggcucuuggacgcccuaagugcaccggcaauauucccucugccagagucagcauccugcacgaggugcggccuguuacauccggguguuuucccaucaugcaugaucgcaccaagauuagacaacucccuaaccugcugcggggauacgaacacauccgccucucuacgcauaaugugauuaacacagagaaugccccgggcggccccuauaaaaucgggaccagcggauccugcccuaacgucacaaauggcaacggguucuuugcuaccauggccugggcugugcccaagaaugacaacaauaaaaccgccacaaacagccugacgauugaagugccuuacaucuguaccgagggagaggaucagauuacagucuggggcuuccacucugacuccgaaacccagauggcgaagcuguauggggauagcaaaccccagaaguuuacaucuuccgccaacggaguuaccacgcacuacgugagccaaaucggcggcuucccgaaucagacagaggacgggggacugccucagucuggcagaaucguggucgauuauauggugcagaaguccgggaaaaccggaaccauuacauaccaacggggcauccuccugccccagaagguuuggugcgcuagcgggcgcuccaaagugauuaagggaucucuuccucugaucggcgaagccgacugucuccaugagaaauauggcgggcugaacaagagcaaacccuacuacaccggagagcacgcuaaggccauuggcaauugccccaucugggucaagacaccucugaaacucgcgaacgggacgaaguauagaccgcccgccaaacugcuuaaggaacggggauuuuucggcgcuaucgccggguuucuggagggcggaugggaaggcaugauugcuggguggcauggauacaccucccacggcgcccacgggguggccguugcugcggaucucaaaagcacacaggaggccaucaauaagauuaccaagaaccuuaauucucuuuccgaacuggaggugaaaaaccuccagcgccugagcggagcuauggacgagcugcauaaugaaauccucgagcuggaugaaaaggucgacgaccuuagagccgauacaauuucuagccaaaucgagcuggccgugcuccuguccaacgaaggcaucauuaauucugaggacgagcaccuucuggcucucgaacggaaacugaagaaaaugcuggggccuagcgccgucgagaucggcaacggauguuucgaaaccaagcauaagugcaaucagacgugccucgaucgcauugcggcuggcaccuuugacgccggggaguucucccugcccacauuugauagccuuaacaucaccgccgcuucucugaaugacgauggacucgacaaccacacaauucugcuguauuacuccaccgccgcuagcucucuugccgugacgcucaugaucgcgauuuucguuguguauauggucuccagagauaacgugagcuguuccaucugccuguga

SEQ ID NO: 219354 - RNA, 1758 nt, Artificial Sequence
  derived and/or modified CDS sequence (opt5) from hemagglutinin__InfluenzaB__AGX19062
augaaggccaucauugugcugcucauggucguuaccagcaacgcugacagaaucugcacaggcauuacguccucuaauagcccccacguggugaaaaccgccacacagggggaggucaacgugaccggaguuaucccucugacaaccacaccgaccaagucccauuucgcgaaucuuaaaggcacggaaacccgggggaagcugugucccaaaugccucaacuguacagaucuggacguggcucuuggacgcccuaagugcaccggcaauauucccucugccagagucagcauccugcacgaggugcggccuguuacauccggguguuuucccaucaugcaugaucgcaccaagauuagacaacucccuaaccugcugcggggauacgaacacauccgccucucuacgcauaaugugauuaacgccgagaaugcuccgggcggccccuauaaaaucgggacaagcggauccugcccuaacgucaccaauggcaacggguucuuugccacaauggcuugggccgugcccaagaaugacaacaauaaaaccgcgaccaacagccugacaauugaagugccuuacaucuguacggagggagaggaucagauuaccgucuggggcuuccacucugacaacgaaacacagauggccaagcuguauggggauuccaaaccccagaaguuuaccagcucugcuaauggaguuacaacccacuacgugucccaaaucggcggcuucccgaaccagacggaggacgggggacugccucagagcggcagaaucguggucgauuauauggugcagaagucugggaaaacaggaaccauuaccuaccaacggggcauccuccugccccagaagguuuggugcgccuccgggcgcagcaaagugauuaagggaucccuuccucugaucggcgaagcugacugucuccaugagaaauauggcgggcugaauaagucuaaacccuacuacacaggagagcacgccaaggcgauuggcaacugccccaucugggucaagaccccucugaaacucgccaaugggacaaaguauagaccgcccgcuaaacugcuuaaggaacggggauuuuucggcgccaucgcuggguuucuggagggcggaugggaaggcaugauugccggguggcauggauacacgagccacggcgcccacgggguggcuguugcggccgaucucaaauccacccaggaggcuaucaacaagauuacaaagaauuucaacagccugucugaacuugaggugaaaaaucugcagcgccucuccggagccauggacgagcugcauaacgaaauccuggagcucgaugaaaaggucgacgaccugagagccgauaccauuagcucucaaaucgagcuugcugugcugcucagcaaugaaggcaucauuaacuccgaggacgagcaccuucuugcccuggaacggaaacucaagaaaaugcuggggccuucugcggucgagaucggcaauggauguuuugaaacaaagcauaagugcaaccagaccugccuggaucgcauugcugccggcacguucgacgccggggaguuuagccuccccaccuucgauucccugaauaucacagcugccagccuuaacgacgauggacuggacaaccacaccauucuccuguauuacucuacagcugccuccagccuggcggugacccuuaugaucgccauuuucguuguguauauggucucuagagauaauguguccuguagcaucugccucuga

SEQ ID NO: 219355 - RNA, 1758 nt, Artificial Sequence; identical to SEQ ID NO: 218586
  derived and/or modified CDS sequence (opt5) from hemagglutinin__InfluenzaB__AGX19073

SEQ ID NO: 219356 - RNA, 1758 nt, Artificial Sequence
  derived and/or modified CDS sequence (opt5) from hemagglutinin__InfluenzaB__AGX19084
augaaggccaucauugugcugcucauggucguuaccagcaacgcugacagaaucugcacaggcauuacguccucuaauagcccccacguggugaaaaccgccacacagggggaggucaacgugaccggaguuaucccucugacaaccacaccgaccaagucccauuucgcgaaucuuaaaggcacggaaacccgggggaagcugugucccaaaugccucaacuguacagaucuggacguggcucuuggacgcccuaagugcaccggcaauauucccucugccagagucagcauccugcacgaggugcggccuguuacauccggguguuuucccaucaugcaugaucgcaccaagauuagacaacucccuaaccugcugcggggauacgaacacaucaaacucucuacgcauaaugugauuaacgccgagaaugcuccgggcggccccuauaagaucgggacaagcggauccugcccuaacgucaccaauggcaacggguucuuugccacaauggcuugggccgugcccaaaaaugacaacaauaagaccgcgaccaacagccugacaauugaagugccuuacaucuguacggagggagaggaucagauuaccgucuggggcuuccacucugacaacgaaaaucagauggccaaacuuuauggggauuccaagccccagaaguuuacaagcucugcuaacggaguuaccacacacuacgugucccaaaucggcggcuucccgaaucagaccgaggacgggggacugccucagagcggccgcaucguggucgauuauauggugcagaaaucugggaagacgggaacaauuaccuaccaaagaggcauccuccugccccagaaaguuuggugcgccuccgggcggagcaaggugauuaaaggaucccuuccucugaucggcgaagcugacugucuccaugagaaguauggcgggcugaacaaaucuaagcccuacuacaccggagagcacgccaaggcgauuggcaauugccccaucugggucaaaacaccucugaagcucgccaacgggaccaaauaucgcccgcccgcuaagcugcuuaaagaaagaggauuuuucggcgccaucgcuggguuucuggagggcggaugggaaggcaugauugccggguggcauggauacacaagccacggcgcccacgggguggcuguugcggccgaucucaaguccacgcaggaggcuaucaauaagauuaccaaaaaccugaauagccuuucugaacuggaggugaagaaccuccagcggcuguccggagccauggacgagcugcauaaugaaauccucgagcuggaugaaaaagucgacgaccuucgcgccgauacaauuagcucucaaaucgagcuggcugugcuccugagcaacgaaggcaucauuaauuccgaggacgagcaccuucuggcccucgaaagaaagcugaaaaagaugcuggggccuucugcggucgagaucggcaacggauguuucgaaaccaagcauaaaugcaaucagacaugccucgaucggauugcugccggcaccuuugacgccggggaguucagccugcccacguuugauucccuuaacaucaccgcugccagccugaacgacgauggacucgacaaucacacaauucugcuguauuacucuaccgcugccuccagccuugcggugacacucaugaucgccauuuucguuguguauauggucucucgcgauaacguguccuguagcaucugccuguga

SEQ ID NO: 219357 - RNA, 1758 nt, Artificial Sequence; identical to SEQ ID NO: 218586
  derived and/or modified CDS sequence (opt5) from hemagglutinin__InfluenzaB__AGX19095

SEQ ID NO: 219358 - RNA, 1758 nt, Artificial Sequence; identical to SEQ ID NO: 219249
  derived and/or modified CDS sequence (opt5) from hemagglutinin__InfluenzaB__AGX19106

SEQ ID NO: 219359 - RNA, 1758 nt, Artificial Sequence; identical to SEQ ID NO: 218586
  derived and/or modified CDS sequence (opt5) from hemagglutinin__InfluenzaB__AGX19117

SEQ ID NO: 219360 - RNA, 1758 nt, Artificial Sequence
  derived and/or modified CDS sequence (opt5) from hemagglutinin__InfluenzaB__AGX19128
augaaggccaucauugugcugcucauggucguuaccagcaacgcugacagaaucugcacaggcauuacguccucuaauagcccccacguggugaaaaccgccacacagggggaggucaacgugaccggaguuaucccucugacaaccacaccgaccaagucccauuucgcgaaucuuaaaggcacggaaacccgggggaagcugugucccaaaugccucaacuguacagaucuggacguggcucuuggacgcccuaagugcaccggcaauacacccucugccagagucagcauucugcacgaggugcggccuguuaccuccggguguuuucccaucaugcaugaucgcacgaagaucagacaacucccuaaccugcugcggggauacgaacacauucgccucucuacacauaaugugaucaacgccgagaaugcuccgggcggccccuauaaaauugggaccagcggauccugcccuaacgucacaaauggcaacggguucuuugccaccauggcuugggccgugcccaagaaugacaacaauaaaaccgcgacaaacagccugacgaucgaagugccuuacauuuguaccgagggagaggaucagaucacagucuggggcuuccacucugacuccgaaacccagauggccaagcuguauggggauagcaaaccccagaaguuuacaucuuccgcuaacggaguuaccacgcacuacgugagccaaauuggcggcuucccgaaucagacagaggacgggggacugccucagucuggcagaaucguggucgauuauauggugcagaaguccgggaaaaccggaaccaucacauaccaacggggcauucuccugccccagaagguuuggugcgccagcgggcgcuccaaagugaucaagggaucucuuccucugauuggcgaagcugacugucuccaugagaaauauggcgggcugaacaagagcaaacccuacuacaccggagagcacgccaaggcgaucggcaauugccccauuugggucaagacaccucugaaacucgccaacgggacgaaguauagaccgcccgcuaaacugcuuaaggaacggggauuuuucggcgccaucgcuggguuucuggagggcggaugggaaggcaugaucgccggguggcauggauacaccucccacggcgcccacgggguggcuguugcggccgaucucaaaagcacacaggaggcuauuaauaagaucaccaagaaccuuaauucucuuuccgaacuggaggugaaaaaccuccagcgccugagcggagccauggacgagcugcauaaugaaauucucgagcuggaugaaaaggucgacgaccuuagagccgauacaaucucuagccaaauugagcuggcugugcuccuguccaacgaaggcaucaucaauucugaggacgagcaccuucuggcccucgaacggaaacugaagaaaaugcuggggccuagcgcggucgagauuggcaacggauguuucgaaaccaagcauaagugcaaucagacgugccucgaucgcaucgcugccggcaccuuugacgccggggaguucucccugcccacauuugauagccuuaacauuaccgcugccucucugaaugacgauggacucgacaaccacacaauccugcuguauuacuccaccgcugccagcucucuugcggugacgcucaugauugccaucuucguuguguauauggucuccagagauaacgugagcuguuccauuugccuguga

SEQ ID NO: 219361 - RNA, 1758 nt, Artificial Sequence; identical to SEQ ID NO: 218586
  derived and/or modified CDS sequence (opt5) from hemagglutinin__InfluenzaB__AGX19139

SEQ ID NO: 219362 - RNA, 1758 nt, Artificial Sequence; identical to SEQ ID NO: 219059
  derived and/or modified CDS sequence (opt5) from hemagglutinin__InfluenzaB__AGX19150

SEQ ID NO: 219363 - RNA, 1758 nt, Artificial Sequence; identical to SEQ ID NO: 218586
  derived and/or modified CDS sequence (opt5) from hemagglutinin__InfluenzaB__AGX19161

SEQ ID NO: 219364 - RNA, 1758 nt, Artificial Sequence; identical to SEQ ID NO: 219059
  derived and/or modified CDS sequence (opt5) from hemagglutinin__InfluenzaB__AGX19172

SEQ ID NO: 219365 - RNA, 1758 nt, Artificial Sequence
  derived and/or modified CDS sequence (opt5) from hemagglutinin__InfluenzaB__AGX19183
augaaggccaucauugugcugcucauggucguuaccagcaacgcugacagaaucugcacaggcauuacguccucuaauagcccccacguggugaaaaccgccacacagggggaggucaacgugaccggaguuaucccucugacaaccacaccgaccaagucccauuucgcgaaucuuaaaggcacggaaacccgggggaagcugugucccaaaugccucaacuguacagaucuggacguggcucuuggacgcccuaagugcaccggcaauauucccucugccagagucagcauccugcacgaggugcggccuguuacauccggguguuuucccaucaugcaugaucgcaccaagauuagacaacucccuaaccugcugcggggauacgaacacauccgccucucuacgcauaaugugauuaacgccgagaaugcuccgggcggccccuauaaaaucgggacaagcggauccugcccuaacgucaccaauggcaacggguucuuugccacaauggcuugggccgugcccaagaaugacaacaauaaaaccgcgaccaacagccugacaauugaagugccuuacaucuguacggagggagaggaucagauuaccgucuggggcuuccacucugacacagaaacccagauggccaaacuuuauggggauuccaagccccagaaguuuacaagcucugcuaacggaguuaccacgcacuacgugucccaaaucggcggcuucccgaaucagacagaggacgggggacugccucagagcggcagaaucguggucgauuauauggugcagaagucugggaaaaccggaaccauuacauaccaacggggcauccuccugccccagaagguuuggugcgccuccgggcgcagcaaagugauuaagggaucccuuccucugaucggcgaagcugacugucuccaugagaaauauggcgggcugaacaagucuaaacccuacuacaccggagagcacgccaaggcgauuggcaauugccccaucugggucaagacaccucugaaacucgccaacgggacgaaguauagaccgcccgcuaaacugcuuaaggaacggggauuuuucggcgccaucgcuggguuucuggagggcggaugggaaggcaugauugccggguggcauggauacaccagccacggcgcccacgggguggcuguugcggccgaucucaaauccacacaggaggcuaucaauaagauuaccaagaaccugaauagccuuucugaacuggaggugaaaaaccuccagcgccuguccggagccauggacgagcugcauaaugaaauccucgagcuggaugaaaaggucgacgaccuuagagccgauacaauuagcucucaaaucgagcuggcugugcuccugagcaacgaaggcaucauuaauuccgaggacgagcaccuucuggcccucgaacggaaacugaagaaaaugcuggggccuucugcggucgagaucggcaacggauguuucgaaaccaagcauaagugcaaucagacgugccucgaucgcauugcugccggcaccuuugacgccggggaguucagccugcccacauuugauucccuuaacaucaccgcugccagccugaaugacgauggacucgacaaccacacaauucugcuguauuacucuaccgcugccuccagccuugcggugacgcucaugaucgccauuuucguuguguauauggucucuagagauaacguguccuguagcaucugccuguga

SEQ ID NO: 219366 - RNA, 1758 nt, Artificial Sequence; identical to SEQ ID NO: 218586
  derived and/or modified CDS sequence (opt5) from hemagglutinin__InfluenzaB__AGX19194

SEQ ID NO: 219367 - RNA, 1758 nt, Artificial Sequence
  derived and/or modified CDS sequence (opt5) from hemagglutinin__InfluenzaB__AGX19205
augaaggccaucauugugcugcucauggucguuaccagcaacgcugacagagugugcacaggcaucacguccucuaauagcccccacguggucaaaaccgccacacagggggaggugaacguuaccggagugauuccucugacaaccacaccgaccaagucccauuucgcgaaucuuaaaggcacggaaacccgggggaagcugugucccaaaugccucaacuguacagaucuggacgucgcucuuggacgcccuaagugcaccggcaauauccccucugccagagugagcauucugcacgagguucggccugugacauccggguguuuucccaucaugcaugaucgcaccaagaucagacaacucccuaaccugcugcggggauacgaacacauucgccucucuacgcauaaugucaucaacgccgagaaugcuccgggcggccccuauaaaauugggacaagcggauccugcccuaacgugaccaauggcaacggguucuuugccacaauggcuugggccgugcccaagaaugacaacaauaaaaccgcgaccaacagccugacaaucgaagucccuuacauuuguacggagggagaggaucagaucaccguuuggggcuuccacucugacaacgaaacacagauggccaaacuuuauggggauuccaagccccagaaguuuaccagcucugcuaauggagugacaacccacuacgugucccaaauuggcggcuucccgaaccagacggaggacgggggacugccucagagcggcagaaucgucguggauuauaugguucagaagucugggaaaacaggaaccaucaccuaccaacggggcauucuccugccccagaagguguggugcgccuccgggcgcagcaaagucaucaagggaucccuuccucugauuggcgaagcugacugucuccaugagaaauauggcgggcugaauaagucuaaacccuacuacacaggagagcacgccaaggcgaucggcaacugccccauuugggugaagaccccucugaaacucgccaaugggacaaaguauagaccgcccgcuaaacugcuuaaggaacggggauuuuucggcgccaucgcuggguuucuggagggcggaugggaaggcaugaucgccggguggcauggauacacgagccacggcgcccacgggguugcuguggcggccgaucucaaauccacccaggaggcuauuaacaagaucacaaagaaucugaacagccuuucugaacuggaggucaaaaaucuccagcgccuguccggagccauggacgagcugcauaacgaaauucucgagcuggaugaaaagguggacgaccuuagagccgauaccaucagcucucaaauugagcuggcuguccuccugagcaaugaaggcaucaucaacuccgaggacgagcaccuucuggcccucgaacggaaacugaagaaaaugcuggggccuucugcgguggagauuggcaauggauguuucgaaacaaagcauaagugcaaccagaccugccucgaucgcaucgcugccggcacguuugacgccggggaguucagccugcccaccuuugauucccuuaauauuacagcugccagccugaacgacgauggacucgacaaccacaccauccugcuguauuacucuacagcugccuccagccuugcgguuacccucaugauugccaucuucguggucuauauggugucuagagauaauguuuccuguagcauuugccuguga

SEQ ID NO: 219368 - RNA, 1758 nt, Artificial Sequence
  derived and/or modified CDS sequence (opt5) from hemagglutinin__InfluenzaB__AGX19216
augaaggccaucauugugcugcucauggucguuaccagcaacgcugacagaaucugcacaggcauuacguccucuaauagcccccacguggugaaaaccgccacacagggggaggucaacgugaccggaguuaucccucugacaaccacaccgaccaagucccauuucgcgaaucuuaaaggcacggaaacccgggggaagcugugucccaaaugccucaacuguacagaucuggacguggcucuuggacgcccuaagugcaccggcaauauucccucugccagagucagcauccugcacgaggugcggccuguuacauccggguguuuucccaucaugcaugaucgcaccaagauuagacaacucccuaaccugcugcggggauacgaacacauccgccucucuacgcauaaugugauuaacgccgagaaugcuccgggcggccccuauaaaaucgggacaagcggauccugcccuaacgucaccaauggcaacggguucuuugccacaauggcuugggccgugcccaagaaugacaacaauaaaaccgcgaccaacagccugacaauugaagugccuuacaucuguacggagggagaggaucagauuaccgucuggggcuuccacucugacaacgaaacacagauggccaaacuuuauggggauuccaagccccagaaguuuaccagcucugcuaauggaguuacaacccacuacgugucccaaaucggcggcuucccgaaccagacggaggacgggggacugccucagagcggcagaaucguggucgauuauauggugcagaagucugggaaacccggaacaauuaccuaccaacggggcauccuccugccucagaagguuuggugcgccuccgggcgcagcaaagugauuaagggaucccuuccccugaucggcgaagcugacugucuccaugagaaauauggcgggcugaauaagucuaaacccuacuacaccggagagcacgccaaggcgauuggcaacugcccuaucugggucaagacaccgcugaaacucgccaaugggaccaaguauagacccccugcuaaacugcuuaaggaacggggauuuuucggcgccaucgcuggguuucuggagggcggaugggaaggcaugauugccggguggcauggauacacaagccacggcgcccacgggguggcuguugcggccgaucucaaauccacgcaggaggcuaucaacaagauuaccaagaaucugaacagccuuucugaacuggaggugaaaaaucuccagcgccuguccggagccauggacgagcugcauaacgaaauccucgagcuggaugaaaaggucgacgaccuuagagccgauacaauuagcucucaaaucgagcuggcugugcuccugagcaaugaaggcaucauuaacuccgaggacgagcaccuucuggcccucgaacggaaacugaagaaaaugcuggggcccucugcggucgagaucggcaauggauguuucgaaaccaagcauaagugcaaccagacaugccucgaucgcauugcugccggcaccuuugacgccggggaguucagccugccuacguuugauucccuuaauaucaccgcugccagccugaacgacgauggacucgacaaccacacaauucugcuguauuacucuaccgcugccuccagccuugcggugacacucaugaucgccauuuucguuguguauauggucucuagagauaauguguccuguagcaucugccuguga

SEQ ID NO: 219369 - RNA, 1758 nt, Artificial Sequence
  derived and/or modified CDS sequence (opt5) from hemagglutinin__InfluenzaB__AGX19227
augaaggccaucauugugcugcucauggucguuaccagcaacgcugacagaaucugcacaggcauuacguccucuaauagcccccacguggugaaaaccgccacacagggggaggucaacgugaccggaguuaucccucugacaaccacaccgaccaagucccauuucgcgaaucuuaaaggcacggaaacccgggggaagcuguguccccaaugccucaacuguacagaucuggacguggcucuuggacgcccuaaaugcaccggcaauauucccucugccagagucagcauccugcacgaggugcggccuguuacauccggguguuuucccaucaugcaugaucgcaccaagauuagacagcucccuaaccugcugcggggauacgaacacauccgccucucuacgcauaaugugauuaacgccgagaaugcuccgggcggccccuauaagaucgggacaagcggauccugcccuaacgucaccaauggcaacggguucuuugccacaauggcuugggccgugcccaaaagcgacaauaacaagaccgcgaccaauucucugacaauugaagugccuuacaucuguacggagggagaggaucagauuaccgucuggggcuuccacuccgacaacgaaacacagauggccaaacuuuauggggauagcaagccccaaaaauuuaccucuuccgcuaacggaguuacaacccacuacgugagccagaucggcggcuucccgaaucagacggaggacgggggacugccucagucuggcagaaucguggucgauuauauggugcaaaaguccgggaagacaggaaccauuaccuaccagcggggcauccuccugccccagaaaguuuggugcgccagcgggcgcuccaaggugauuaaaggaucucuuccucugaucggcgaagcugacugucuccaugagaaguauggcgggcugaacaaaagcaagcccuacuacacaggagagcacgccaaagcgauuggcaauugccccaucugggucaagaccccucugaagcucgccaacgggacaaaauauagaccgcccgcuaagcugcuuaaagaacggggauuuuucggcgccaucgcuggguuucuggagggcggaugggaaggcaugauugccggguggcauggauacacgucccacggcgcccacgggguggcuguugcggccgaucucaagagcacccaggaggcuaucaauaaaauuacaaagaaccuuaauucucuguccgaacuggaggugaagaaccuccaacgccugagcggagccauggacgagcugcauaaugaaauccucgagcuggaugaaaaagucgacgaccuuagagccgauaccauuucuagccagaucgagcuggcugugcuccuguccaacgaaggcaucauuaauucugaggacgagcaccuucuggcccucgaacggaagcugaaaaagaugcuggggccuagcgcggucgagaucggcaacggauguuucgaaacaaaacauaagugcaaucagaccugccucgaucgcauugcugccggcacguuugacgccggggaguucucccugcccaccuuugauagccuuaacaucacagcugccucucugaaugacgauggacucgacaaccacaccauucugcuguauuacuccacagcugccagcucucuugcggugacccucaugaucgccauuuucguuguguauauggucuccagagauaacgugagcuguuccaucugccuguga

SEQ ID NO: 219370 - RNA, 1758 nt, Artificial Sequence
  derived and/or modified CDS sequence (opt5) from hemagglutinin__InfluenzaB__AGX19238
augaaggccaucauugugcugcucauggucguuaccagcaacgcugacagaaucugcacaggcauuacguccucuaauagcccccacguggugaaaaccgccacacagggggaggucaacgugaccggaguuaucccucugacaaccacaccgaccaagucccauuucgcgaaucuuaaaggcacggaaacccgggggaagcugugucccaaaugccucaacuguacagaucuggacguggcucuuggacgcccuaagugcaccggcaauauucccucugccagagucagcauccugcacgaggugcggccuguuacauccggguguuuucccaucaugcaugaucgcaccaagauuagacaacucccuaaccugcugcggggauacgaacacauccgccucucuacgcauaaugugauuaacgccgagaaugcuccgggcggccccuauaaaaucgggacaagcggauccugcccuaacgucaccaauggcaacggguucuuugccacaauggcuugggccgugcccaagaaugacaaaaacaagaccgcgaccaauagccugacaauugaagugccuuacaucuguacggagggagaggaucagauuaccgucuggggcuuccacucugacaacgaaacacagauggccaaacuuuauggggauuccaagccccagaaguuuaccagcucugcuaacggaguuacaacccacuacgugucccaaaucggcggcuucccgaaucagacggaggacgggggacugccucagagcggcagaaucguggucgauuauauggugcagaaaucugggaagacaggaaccauuaccuaccaacggggcauccuccugccccagaaaguuuggugcgccuccgggcgcagcaaggugauuaaaggaucccuuccucugaucggcgaagcugacugucuccaugagaaguauggcgggcugaacaaaucuaagcccuacuacacaggagagcacgccaaggcgauuggcaauugccccaucugggucaaaaccccucugaagcucgccaacgggacaaaauauagaccgcccgcuaagcugcuuaaagaacggggauuuuucggcgccaucgcuggguuucuggagggcggaugggaaggcaugauugccggguggcauggauacacgagccacggcgcccacgggguggcuguugcggccgaucucaaguccacccaggaggcuaucaauaagauuaccaaaaaccugaauagccuuucugaacuggaggugaagaaccuccagcgccuguccggagccauggacgagcugcauaaugaaauccucgagcuggaugaaaaagucgacgaccuuagagccgauacaauuagcucucaaaucgagcuggcugugcuccugagcaacgaaggcaucauuaauuccgaggacgagcaccuucuggcccucgaacggaagcugaaaaagaugcuggggccuucugcggucgagaucggcaacggauguuucgaaacaaagcauaaaugcaaucagaccugccucgaucgcauugcugccggcacguuugacgccggggaguucagccugcccaccuuugauucccuuaacaucacagcugccagccugaaugacgauggacucgacaaccacaccauucugcuguauuacucuacagcugccuccagccuugcggugacccucaugaucgccauuuucguuguguauauggucucuagagauaacguguccuguagcaucugccuguga

SEQ ID NO: 219371 - RNA, 1758 nt, Artificial Sequence; identical to SEQ ID NO: 219370
  derived and/or modified CDS sequence (opt5) from hemagglutinin__InfluenzaB__AGX19249

SEQ ID NO: 219372 - RNA, 1758 nt, Artificial Sequence; identical to SEQ ID NO: 218586
  derived and/or modified CDS sequence (opt5) from hemagglutinin__InfluenzaB__AGX19260

SEQ ID NO: 219373 - RNA, 1758 nt, Artificial Sequence; identical to SEQ ID NO: 218586
  derived and/or modified CDS sequence (opt5) from hemagglutinin__InfluenzaB__AGX19271

SEQ ID NO: 219374 - RNA, 1758 nt, Artificial Sequence
  derived and/or modified CDS sequence (opt5) from hemagglutinin__InfluenzaB__AGX19282
augaaggccaucauugugcugcucauggucguuaccagcaacgcugacagaaucugcacaggcauuacguccucuaauagcccccacguggugaaaaccgccacacagggggaggucaacgugaccggaguuaucccucugacaaccacaccgaccaagucccauuucgcgaaucuuaaaggcacggaaacccgggggaagcugugucccaaaugccucaacuguacagaucuggacguggcucuuggacgcccuaagugcaccggcaauauucccucugccagagucagcauccugcacgaggugcggccuguuacauccggguguuuucccaucaugcaugaucgcaccaagauuagacaacucccuaaccugcugcggggauacgaacacauccgccucucuacgcauaaugugauuaacgccgagaaugcuccgggcggccccuauaaaaucgggacaagcggauccugcccuaacgucaccaauggcaacggguucuuugccacaauggcuugggccgugcccaagaaugacaacaauaaaaccgcgaccaacagccugacaauugaagugccuuacaucuguacggagggagaggaucagauuaccgucuggggcuuccacucugacaacgaaacacagauggccaaacuuuauggggauuccaagccccagaaguuuaccagcucugcuaauggaguuacaacccacuacgugucccaaaucggcggcuucccgaaccagacggaggacgggggacugccucagagcggcagaaucguggucgauuauauggugcagaagucugggaaaacaggaaccauuaccuaccaacggggcauccuccugccccagaagguuuggugcacauccgggcgcagcaaagugauuaagggaucccuuccucugaucggcgaagccgacugucuccaugagaaauauggcgggcugaauaagucuaaacccuacuacaccggagagcacgcuaaggccauuggcaacugccccaucugggucaagacaccucugaaacucgcgaaugggacgaaguauagaccgcccgccaaacugcuuaaggaacggggauuuuucggcgcuaucgccggguuucuggagggcggaugggaaggcaugauugcuggguggcauggauacaccagccacggcgcccacgggguggccguugcugcggaucucaaauccacacaggaggccaucaacaagauuaccaagaaucugaacagccuuucugaacuggaggugaaaaaucuccagcgccuguccggagcuauggacgagcugcauaacgaaauccucgagcuggaugaaaaggucgacgaccuuagagccgauacaauuagcucucaaaucgagcuggccgugcuccugagcaaugaaggcaucauuaacuccgaggacgagcaccuucuggcucucgaacggaaacugaagaaaaugcuggggccuucugccgucgagaucggcaauggauguuucgaaaccaagcauaagugcaaccagacgugccucgaucgcauugcggcuggcaccuuugacgccggggaguucagccugcccacauuugauucccuuaauaucaccgccgcuagccugaacgacgauggacucgacaaccacacaauucugcuguauuacucuaccgccgcuuccagccuugccgugacgcucaugaucgcgauuuucguuguguauauggucucuagagauaauguguccuguagcaucugccuguga

SEQ ID NO: 219375 - RNA, 1758 nt, Artificial Sequence
  derived and/or modified CDS sequence (opt5) from hemagglutinin__InfluenzaB__AGX19304
augaaggccaucauugugcugcucauggucguuaccagcaacgcugacagaaucugcacaggcauuacguccucuaauagcccccacguggugaaaaccgccacacagggggaggucaacgugaccggaguuaucccucugacaaccacaccgaccaagucccauuucgcgaaucuuaaaggcacggaaacccgggggaagcugugucccaaaugccucaacuguacagaucuggacguggcucuuggacgcccuaagugcaccggcaauauucccucugccagagucagcauccugcacgaggugcggccuguuacauccggguguuuucccaucaugcaugaucgcaccaagauuagacaacucccuaaccugcugcggggauacgaacacauccgccucucuacgcauaaugugauuaacgccgagaaugcuccgggcggccccuauaaaaucgggacaagcggauccugcccuaacgucaccaauggcaacggguucuuugccacaauggcuugggccgugcccaagaaugacaacaauaaaaccgcgauuaacagccugaccaucgaagugccuuacauuuguacagagggagaggaucagaucacggucuggggcuuccacucugacaacgaaacccagauggccaaacuuuauggggauuccaagccccagaaguuuacaagcucugcuaauggaguuaccacacacuacgugucccaaaucggcggcuucccgaaccagaccgaggacgggggacugccucagagcggcagaauuguggucgauuauauggugcagaagucugggaaaacgggaacaaucaccuaccaacggggcauucuccugccccagaagguuuggugcgccuccgggcgcagcaaagugaucaagggaucccuuccucugauuggcgaagcugacugucuccaugagaaauauggcgggcugaauaagucuaaacccuacuacaccggagagcacgccaaggcgaucggcaacugccccaucugggucaagacaccucugaaacucgccaaugggaccaaguauagaccgcccgcuaaacugcuuaaggaacggggauuuuucggcgccauugcuggguuucuggagggcggaugggaaggcaugaucgccggguggcauggauacacaagccacggcgcccacgggguggcuguugcggccgaucucaaauccacgcaggaggcuauuaacaagaucaccaagaaucugaacagccuuucugaacuggaggugaaaaaucuccagcgccuguccggagccauggacgagcugcauaacgaaauucucgagcuggaugaaaaggucgacgaccuuagagccgauacaaucagcucucaaaucgagcuggcugugcuccugagcaaugaaggcauuaucaacuccgaggacgagcaccuucuggcccucgaacggaaacugaagaaaaugcuggggccuucugcggucgagauuggcaauggauguuucgaaaccaagcauaagugcaaccagacaugccucgaucgcaucgcugccggcaccuuugacgccggggaguucagccugcccacguuugauucccuuaauauuaccgcugccagccugaacgacgauggacucgacaaccacacaauccugcuguauuacucuaccgcugccuccagccuugcggugacacucaugauugccaucuucguuguguauauggucucuagagauaauguguccuguagcaucugccuguga

SEQ ID NO: 219376 - RNA, 1758 nt, Artificial Sequence; identical to SEQ ID NO: 219375
  derived and/or modified CDS sequence (opt5) from hemagglutinin__InfluenzaB__AGX19315

SEQ ID NO: 219377 - RNA, 1758 nt, Artificial Sequence; identical to SEQ ID NO: 219374
  derived and/or modified CDS sequence (opt5) from hemagglutinin__InfluenzaB__AGX19326

SEQ ID NO: 219378 - RNA, 1758 nt, Artificial Sequence; identical to SEQ ID NO: 219374
  derived and/or modified CDS sequence (opt5) from hemagglutinin__InfluenzaB__AGX19337

SEQ ID NO: 219379 - RNA, 1758 nt, Artificial Sequence
  derived and/or modified CDS sequence (opt5) from hemagglutinin__InfluenzaB__AGX19348
augaaggccaucauugugcugcucauggucguuaccagcaacgcugacagaaucugcacaggcauuacguccucuaauagcccccacguggugaaaaccgccacacagggggaggucaacgugaccggaguuaucccucugacaaccacaccgaccaagucccauuucgcgaaucuuaaaggcacggaaacccgggggaagcugugucccaaaugccucaacuguacagaucuggacguggcucuuggacgcccuaagugcaccggcaauauucccucugccagagucagcauccugcacgaggugcggccuguuacauccggguguuuucccaucaugcaugaucgcaccaagauuagacaacucccuaaccugcugcggggauacgaacacauccgccucucuacgcauaaugugauuaacgccgagaaugcuccgggcggccccuauaaaaucgggacaagcggauccugcccuaacgucaccaauggcaacggguucuuugccacaauggcuugggccgugcccaagaaugacaacaauaaaaccgcgaccaacagccugacaauugaagugccuuacaucuguacggagggagaggaucagauuaccgucuggggcuuccacucugacaacgaagcccagauggcuaaacuuuauggggauuccaagccccagaaguuuacaagcucugccaauggaguuaccacacacuacgugucccaaaucggcggcuucccgaaccagaccgaggacgggggacugccucagagcggcagaaucguggucgauuauauggugcagaagucugggaaaacgggaacaauuaccuaccaacggggcauccuccugccccagaagguuuggugcaccuccgggcgcagcaaagugauuaagggaucccuuccucugaucggcgaagcugacugucuccaugagaaauauggcgggcugaauaagucuaaacccuacuacacaggagagcacgccaaggcgauuggcaacugccccaucugggucaagaccccucugaaacucgccaaugggacaaaguauagaccgcccgcuaaacugcuuaaggaacggggauuuuucggcgccaucgcuggguuucuggagggcggaugggaaggcaugauugccggguggcauggauacacgagccacggcgcccacgggguggcuguugcggccgaucucaaauccacccaggaggcuaucaacaagauuacaaagaaucugaacagccuuucugaacuggaggugaaaaaucuccagcgccuguccggagccauggacgagcugcauaacgaaauccucgagcuggaugaaaaggucgacgaccuuagagccgauaccauuagcucucaaaucgagcuggcugugcuccugagcaaugaaggcaucauuaacuccgaggacgagcaccuucuggcccucgaacggaaacugaagaaaaugcuggggccuucugcggucgagaucggcaauggauguuucgaaacaaagcauaagugcaaccagaccugccucgaucgcauugcugccggcacguuugacgccggggaguucagccugcccaccuuugauucccuuaauaucacagcugccagccugaacgacgauggacucgacaaccacaccauucugcuguauuacucuacagcugccuccagccuugcggugacccucaugaucgccauuuucguuguguauauggucucuagagauaauguguccuguagcaucugccuguga

SEQ ID NO: 219380 - RNA, 1758 nt, Artificial Sequence; identical to SEQ ID NO: 219374
  derived and/or modified CDS sequence (opt5) from hemagglutinin__InfluenzaB__AGX19359

SEQ ID NO: 219381 - RNA, 1755 nt, Artificial Sequence; identical to SEQ ID NO: 218803
  derived and/or modified CDS sequence (opt5) from hemagglutinin__InfluenzaB__AGX19370

SEQ ID NO: 219382 - RNA, 1758 nt, Artificial Sequence; identical to SEQ ID NO: 218637
  derived and/or modified CDS sequence (opt5) from hemagglutinin__InfluenzaB__AGX19381

SEQ ID NO: 219383 - RNA, 1758 nt, Artificial Sequence; identical to SEQ ID NO: 219374
  derived and/or modified CDS sequence (opt5) from hemagglutinin__InfluenzaB__AGX19392

SEQ ID NO: 219384 - RNA, 1758 nt, Artificial Sequence; identical to SEQ ID NO: 219374
  derived and/or modified CDS sequence (opt5) from hemagglutinin__InfluenzaB__AGX19403

SEQ ID NO: 219385 - RNA, 1758 nt, Artificial Sequence; identical to SEQ ID NO: 219061
  derived and/or modified CDS sequence (opt5) from hemagglutinin__InfluenzaB__AGX19414

SEQ ID NO: 219386 - RNA, 1755 nt, Artificial Sequence
  derived and/or modified CDS sequence (opt5) from hemagglutinin__InfluenzaB__AGX19425
augaagaccaucauugugcugcucauggucguuacaagcaacgccgacagaaucugcacgggcauuaccuccucuaauagcccccacguggugaaaacagcuacccagggggaggucaacgugacaggaguuaucccucugaccacaaccccgacgaaguccuacuucgccaaucuuaaaggcacccggacacgcgggaagcugugucccgauugccucaacuguaccgaccuggauguggcgcuuggaagaccuaugugcgucggcacaacccccucugcuaaagccagcauucugcaugaagugcggccuguuacguccggguguuuucccaucaugcacgaccgcacaaagaucagacaacucccuaaucugcugcggggauaugagaacauucgccucucuacccagaaugugaucgaugccgaaaaggcuccgggcggccccuacagacuggggacaagcggauccugcccuaacgccaccagcaaaucuggcuucuuugcuaccauggccugggcgguccccaaggacaauaacaaaaaugccacaaacccucuuacgguggaggugcccuauauuuguaccgaaggggaggaucagaucacagucuggggauuccauuccgacaauaagacccagaugcggaaccuguacggcgauagcaauccgcaaaaauuuacaucuuccgcuaacgggguuaccacgcacuaugugagccagauuggaucuuucccugaccagacagaggauggcggccucccccaguccgggcgcaucguggucgacuacaugaugcaaaagccuggaaagaccggcaccauuguguaucagagagggguucugcuuccccagcggguguggugcgccagcggacgcuccaaagucaucaagggcgcucugccccucaucggggaagccgauugucugcaugagaaauacggaggccugaacaagucuaaaccuuacuauacaggcgaacacgcgaaggccauugggaauugcccgaucugggugaaaacaccccucaagcuggcuaacggaacaaaguacagaccucccgccaaacuucugaaggagcggggcuuuuucggggcuauugccggauuucucgagggcgggugggaaggcaugaucgccggauggcacggcuauacgagccauggggcucacggaguugcgguggccgcugaccugaaauccacccaggaggccauuaauaagaucaccaaaaaccuuaauagccugucugaacucgaggucaagaaccugcaacgccuguccggcgccauggacgaacuccauaaugagauccuggagcuugaugaaaagguggacgaucugagagcugacaccauuagcucucagaucgagcucgccguccugcuuagcaacgaagggauuaucaauuccgaggaugaacaucugcucgcgcuggagcggaaacugaagaaaaugcucggaccuucugcuguggagauuggcaacggguguuucgaaacaaagcacaaaugcaaucagaccugccuggacagaaucgccgccggcacguuuaacgcuggagaguucagccuucccaccuuugauucccugaauaucacagccgcuagccucaacgacgauggccuggacaaucacaccauucugcuuuacuauucuacagccgcguccagccucgccguuacccugaugcuggcuaucuucauuguguacauggucucucgcgauaacguguccuguagcaucugccucuga

SEQ ID NO: 219387 - RNA, 1758 nt, Artificial Sequence; identical to SEQ ID NO: 218586
  derived and/or modified CDS sequence (opt5) from hemagglutinin__InfluenzaB__AGX19436

SEQ ID NO: 219388 - RNA, 1758 nt, Artificial Sequence; identical to SEQ ID NO: 219249
  derived and/or modified CDS sequence (opt5) from hemagglutinin__InfluenzaB__AGX19447

SEQ ID NO: 219389 - RNA, 1755 nt, Artificial Sequence; identical to SEQ ID NO: 219128
  derived and/or modified CDS sequence (opt5) from hemagglutinin__InfluenzaB__AGX19458

SEQ ID NO: 219390 - RNA, 1755 nt, Artificial Sequence; identical to SEQ ID NO: 219128
  derived and/or modified CDS sequence (opt5) from hemagglutinin__InfluenzaB__AGX19469

SEQ ID NO: 219391 - RNA, 1758 nt, Artificial Sequence; identical to SEQ ID NO: 219061
  derived and/or modified CDS sequence (opt5) from hemagglutinin__InfluenzaB__AGX19480

SEQ ID NO: 219392 - RNA, 1758 nt, Artificial Sequence; identical to SEQ ID NO: 218654
  derived and/or modified CDS sequence (opt5) from hemagglutinin__InfluenzaB__AGX19491

SEQ ID NO: 219393 - RNA, 1758 nt, Artificial Sequence
  derived and/or modified CDS sequence (opt5) from hemagglutinin__InfluenzaB__AGX19502
augaaggccaucauugugcugcucauggucguuaccagcaacgcugacagaaucugcacaggcauuacguccucuaauagcccccacguggugaaaaccgccacacagggggaggucaacgugaccggaguuaucccucugacaaccacaccgaccaagucccauuucgcgaaucuuaaaggcacggaaacccgggggaagcugugucccaaaugccucaacuguacagaucuggacguggcucuuggacgcccuaagugcaccggcaagauucccucugccagagucagcauccugcacgaggugcggccuguuacauccggguguuuucccaucaugcaugaucgcaccaaaauuagacaacucccuaaucugcugcggggauacgaacacauccgccucucuacgcauaacgugauuaaugccgagaacgcuccgggcggccccuauaagaucgggacaagcggauccugcccuaauauuaccaacggcaauggguucuuugccacaauggcuugggccguccccaaaaacgacaagaauaaaaccgcgaccaacccucugacaaucgaagugcccuacauuuguacggagggagaggaucagaucaccguguggggcuuccacagcgacucugaaacacagauggccaaacuuuauggggauuccaagccgcagaaguuuaccagcucugcuaauggagucacaacccacuacguuucccaaaucggcggcuucccuaaccagacggaggacgggggacugccccagagcggcagaauugugguggauuauaugguccagaagucugggaaaacaggaaccaucaccuaccaacggggcauucuccugccucagaagguguggugcgccuccgggcgcagcaaaguuaucaagggaucccuuccccugauuggcgaagcugacugucuccaugagaaauauggcgggcugaacaagucuaagcccuacuacacaggagagcacgccaaagcgaucggcaauugcccuaucugggugaagaccccgcugaaacucgccaacgggacaaaguauagacccccugcuaaacugcuuaaggaacggggauuuuucggcgccauugcuggguuucuggagggcggaugggaaggcaugaucgccggguggcauggauacacgagccacggcgcccacggggucgcuguggcggccgaucucaaguccacccaggaggcuauuaauaaaaucacaaagaaccugaauagccuuucugaacuggagguuaaaaaccuccagcgccuguccggagccauggacgagcugcauaaugaaauucucgagcuggaugaaaagguggacgaccuuagagccgauaccaucagcucucaaaucgagcuggcuguccuccugagcaacgaaggcauuaucaauuccgaggacgagcaccuucuggcccucgaacggaaacugaagaagaugcuggggcccucugcgguggagauuggcaacggauguuucgaaacaaaacauaagugcaaucagaccugccucgaucgcaucgcugccggcacguuugacgccggggaguucagccugccuaccuuugauucccuuaacauuacagcugccagccugaaugacgauggacucgacaaccacaccauccugcuguauuacucuacagcugccuccagccuugcggucacccucaugauugccaucuucgugguuuauauggugucuagagauaaugucuccuguagcaucugccuguga

SEQ ID NO: 219394 - RNA, 1758 nt, Artificial Sequence
  derived and/or modified CDS sequence (opt5) from hemagglutinin__InfluenzaB__AGX19513
augaaggccaucauugugcugcucauggucguuaccagcaacgcugacagaaucugcacaggcauuacguccucuaauagcccccacguggugaaaaccgccacacagggggaggucaacgugaccggaguuaucccucugacaaccacaccgaccaagucccauuucgcgaaucuuaaaggcacggaaacccgggggaagcugugucccaaaugccucaacuguacagaucuggacguggcucuuggacgcccuaagugcaccggcaagauucccucugccagagucagcauccugcacgaggugcggccuguuacauccggguguuuucccaucaugcaugaucgcaccaaaauuagacaacucccuaaucugcugcggggauacgaacacauccgccucucuacgcauaacgugauuaaugccgagaacgcuccgggcggccccuauaagaucgggacaagcggauccugcccuaauauuaccaacggcaauggguucuuugccacaauggcuugggccguccccaaaaacgacaagaauaaaaccgcgaccaacccucugacaaucgaagugcccuacauuuguacggagggagaggaucagaucaccguguggggcuuccacagcgacaaugaaacacagauggccaaacuuuauggggauucuaagccgcagaaguuuaccuccagcgcuaacggagucacaacccacuacaucucucaaauuggcggcuucccuaaccagacggaggacgggggacugccccaguccggcagaaucguuguggauuauauggugcaaaagagcgggaaaacaggaaccauuaccuaccagcggggcauccuccugccucagaaggucuggugcgccucugggcgcuccaaagugauuaagggaagccuuccccugaucggcgaagcugacugucuccaugagaaauauggcgggcugaauaaguccaagcccuacuacacaggagagcacgccaaagcgaucggcaacugcccuauuuggguuaagaccccgcugaaacucgccaaugggacaaaguauagacccccugcuaaacugcuuaaggaacggggauuuuucggcgccaucgcuggguuucuggagggcggaugggaaggcaugauugccggguggcauggauacacgucucacggcgcccacgggguggcugucgcggccgaucucaagagcacccaggaggcuaucaacaaaauuacaaagaaucugaacucccuuagcgaacuggaggugaaaaaucuccagcgccugucuggagccauggacgagcugcauaacgaaauccucgagcuggaugaaaagguugacgaccuuagagccgauaccaucuccagccaaauugagcuggcugugcuccugucuaaugaaggcaucauuaacagcgaggacgagcaccuucuggcccucgaacggaaacugaagaagaugcuggggcccuccgcggucgagaucggcaauggauguuucgaaacaaaacauaagugcaaccagaccugccucgaucgcauugcugccggcacguuugacgccggggaguucucucugccuaccuuugauagccuuaauaucacagcugccucccugaacgacgauggacucgacaaucacaccauucugcuguauuacagcacagcugccucuucccuugcggugacccucaugaucgccaucuucgucguguauaugguuagcagagauaacgugucuuguuccauuugccuguga

SEQ ID NO: 219395 - RNA, 1758 nt, Artificial Sequence; identical to SEQ ID NO: 219394
  derived and/or modified CDS sequence (opt5) from hemagglutinin__InfluenzaB__AGX19524

SEQ ID NO: 219396 - RNA, 1758 nt, Artificial Sequence
  derived and/or modified CDS sequence (opt5) from hemagglutinin__InfluenzaB__AGX19535
augaaggccaucauugugcugcucauggucguuaccagcaacgcugacagaaucugcacaggcauuacguccucuaauagcccccacguggugaaaaccgccacacagggggaggucaacgugaccggaguuaucccucugacaaccacaccgaccaagucccauuucgcgaaucuuaaaggcacggaaacccgggggaagcugugucccaaaugccucaacuguacagaucuggacguggcucuuggacgcccuaagugcaccggcaauauucccucugccagagucagcauccugcacgaggugcggccuguuacauccggguguuuucccaucaugcaugaucgcaccaagauuagacaacucccuaaccugcugcggggauacgaacacauccgccucucuacgcauaaugugauuaacgccgagaaugcuccgggcggccccuauaaaaucgggacaagcggauccugcccuaacgucaccaauggcaacggguucuuugccacaauggcuugggccgugcccaagaaugacaacaauaaaaccgcgaccaacagccugacaauugaagugccuuacaucuguacggagggagaggaucagauuaccgucuggggcuuccacucugacgaugaaacacagauggccaaacuuuauggggacuccaagccccagaaguuuaccagcucugcuaacggaguuacaacccacuacgugucccaaaucggcggcuucccgaaucagacggaggaugggggacugccucagagcggcagaaucguggucgacuauauggugcagaagucugggaaaacaggaaccauuaccuaccaacggggcauccuccugccccagaagguuuggugcgccuccgggcgcagcaaagugauuaagggaucccuuccucugaucggcgaagcugauugucuccaugagaaauauggcgggcugaacaagucuaaacccuacuacacaggagagcacgccaaggcgauuggcaauugccccaucugggucaagaccccucugaaacucgccaacgggacaaaguauagaccgcccgcuaaacugcuuaaggaacggggauuuuucggcgccaucgcuggguuucuggagggcggaugggaaggcaugauugccggguggcauggauacacgagccacggcgcccacgggguggcuguugcggccgaccucaaauccacccaggaggcuaucaauaagauuacaaagaaccugaauagccuuucugaacuggaggugaaaaaccuccagcgccuguccggagccauggaugagcugcauaaugaaauccucgagcuggacgaaaaggucgacgaucuuagagccgacaccauuagcucucaaaucgagcuggcugugcuccugagcaacgaaggcaucauuaauuccgaggaugagcaccuucuggcccucgaacggaaacugaagaaaaugcuggggccuucugcggucgagaucggcaacggauguuucgaaacaaagcauaagugcaaucagaccugccucgaccgcauugcugccggcacguuugaugccggggaguucagccugcccaccuuugacucccuuaacaucacagcugccagccugaaugaugacggacucgauaaccacaccauucugcuguauuacucuacagcugccuccagccuugcggugacccucaugaucgccauuuucguuguguauauggucucuagagacaacguguccuguagcaucugccuguga

SEQ ID NO: 219397 - RNA, 1758 nt, Artificial Sequence
  derived and/or modified CDS sequence (opt5) from hemagglutinin__InfluenzaB__AGX19546
augaaggccaucauugugcugcucauggucguuaccagcaacgcugacagaaucugcacaggcauuacguccucuaauagcccccacguggugaaaaccgccacacagggggaggucaacgugaccggaguuaucccucugacaaccacaccgaccaagucccauuucgcgaaucuuaaaggcacggaaacccgggggaagcugugucccaaaugccucaacuguacagaucuggacguggcucuuggacgcccuaagugcaccggcaauauucccucugccagagucagcauccugcacgaggugcggccuguuacauccggguguuuucccaucaugcaugaucgcaccaagauuagacaacucccuaaccugcugcggggauacgaacacauccgccucucuacgcauaaugugauuaacgccgagaaugcuccgggcggccccuauaaaaucgggacaagcggauccugcccuaacgucaccaauggcaacggguucuuugccacaauggcuugggccgugcccaagaaugacaacaauaaaaccgcgaccaacagccugacaauugaagugccuuacaucuguacggagggagaggaucagauuaccgucuggggcuuccacucugacaaggaaacacagauggccaaacuuuauggggauuccaagccccagaaguuuaccagcucugcuaacggaguuacaacccacuacgugucccaaaucggcggcuucccgaaucagacggaggacgggggacugccucagagcggcagaaucguggucgauuauauggugcagaaaucugggaagacaggaaccauuaccuaccaacggggcauccuccugccccagaaaguuuggugcgccuccgggcgcagcaaggugauuaaaggaucccuuccucugaucggcgaagcugacugucuccaugagaaguauggcgggcugaacaaaucuaagcccuacuacacaggagagcacgccaaggcgauuggcaauugccccaucugggucaaaaccccucugaagcucgccaacgggacaaaauauagaccgcccgcuaagcugcuuaaagaacggggauuuuucggcgccaucgcuggguuucuggagggcggaugggaaggcaugauugccggguggcauggauacacgagccacggcgcccacgggguggcuguugcggccgaucucaaguccacccaggaggcuaucaauaagauuaccaaaaaccugaauagccuuucugaacuggaggugaagaaccuccagcgccuguccggagccauggacgagcugcauaaugaaauccucgagcuggaugaaaaagucgacgaccuuagagccgauacaauuagcucucaaaucgagcuggcugugcuccugagcaacgaaggcaucauuaauuccgaggacgagcaccuucuggcccucgaacggaagcugaaaaagaugcuggggccuucugcggucgagaucggcaacggauguuucgaaacaaagcauaaaugcaaucagaccugccucgaucgcauugcugccggcacguuugacgccggggaguucagccugcccaccuuugauucccuuaacaucacagcugccagccugaaugacgauggacucgacaaccacaccauucugcuguauuacucuacagcugccuccagccuugcggugacccucaugaucgccauuuucguuguguauauggucucuagagauaacguguccuguagcaucugccuguga

SEQ ID NO: 219398 - RNA, 1758 nt, Artificial Sequence
  derived and/or modified CDS sequence (opt5) from hemagglutinin__InfluenzaB__AGX19557
augaaggccaucauugugcugcucauggucguuaccagcaacgcugacagaaucugcacaggcauuacguccucuaauagcccccacguggugaaaaccgccacacagggggaagucaacgugaccggaguuaucccucugacaaccacaccgaccaagucccauuucgcgaaucuuaaaggcacggaaacccgggggaagcugugucccaaaugccucaacuguacagaucuggacguggcucuuggacgcccuaagugcaccggcaauauucccucugccagagucagcauccugcacgaggugcggccuguuacauccggguguuuucccaucaugcaugaucgcaccaagauuagacaacucccuaaccugcugcggggauacgaacacauccgccucucuacgcauaaugugauuaacgccgagaaugcuccgggcggccccuauaaaaucgggacaagcggauccugcccuaacgucaccaauggcaacggguucuuugccacaauggcuugggccgugcccaagaaugacaacaauaaaaccgcgaccaacagccugacaauugaagugccuuacaucuguacgggaggcgaggaucagauuaccgucuggggguuccacucugacaacgagacacagauggccaaacuuuauggagauuccaagccccagaaguuuaccagcucugcuaauggcguuacaacccacuacgugucccaaaucggcggguucccgaaccagacggaagacggaggccugccucagagcgggagaaucguggucgauuauauggugcagaagucuggaaaaacaggcaccauuaccuaccaacgggggauccuccugccccagaagguuuggugcgccuccggacgcagcaaagugauuaagggcucccuuccucugaucggcgaggcugacugucuccaugaaaaauaugggggacugaauaagucuaaacccuacuacacaggcgagcacgccaaggcgauugggaacugccccaucugggucaagaccccucugaaacucgccaauggaacaaaguauagaccgcccgcuaaacugcuuaaggagcggggcuuuuucggggccaucgcuggcuuucuggaaggaggcugggaggggaugauugccggauggcauggcuacacgagccacggggcccacggaguggcuguugcggccgaucucaaauccacccaggaagcuaucaacaagauuacaaagaaucugaacagccuuucugagcuggaagugaaaaaucuccagcgccuguccggcgccauggacgagcugcauaacgagauccucgaacuggaugagaaggucgacgaccuuagagccgauaccauuagcucucaaaucgaacuggcugugcuccugagcaaugaggggaucauuaacuccgaagacgagcaccuucuggcccucgagcggaaacugaagaaaaugcugggcccuucugcggucgaaaucggaaauggcuguuucgagacaaagcauaagugcaaccagaccugccucgaucgcauugcugccgggacguuugacgccggagaguucagccugcccaccuuugauucccuuaauaucacagcugccagccugaacgacgauggccucgacaaccacaccauucugcuguauuacucuacagcugccuccagccuugcggugacccucaugaucgccauuuucguuguguauauggucucuagagauaauguguccuguagcaucugccuguga

SEQ ID NO: 219399 - RNA, 1758 nt, Artificial Sequence; identical to SEQ ID NO: 219061
  derived and/or modified CDS sequence (opt5) from hemagglutinin__InfluenzaB__AGX19568

SEQ ID NO: 219400 - RNA, 1758 nt, Artificial Sequence; identical to SEQ ID NO: 219394
  derived and/or modified CDS sequence (opt5) from hemagglutinin__InfluenzaB__AGX19579

SEQ ID NO: 219401 - RNA, 1758 nt, Artificial Sequence; identical to SEQ ID NO: 219061
  derived and/or modified CDS sequence (opt5) from hemagglutinin__InfluenzaB__AGX19590

SEQ ID NO: 219402 - RNA, 1758 nt, Artificial Sequence; identical to SEQ ID NO: 219061
  derived and/or modified CDS sequence (opt5) from hemagglutinin__InfluenzaB__AGX19601

SEQ ID NO: 219403 - RNA, 1758 nt, Artificial Sequence; identical to SEQ ID NO: 219061
  derived and/or modified CDS sequence (opt5) from hemagglutinin__InfluenzaB__AGX19612

SEQ ID NO: 219404 - RNA, 1758 nt, Artificial Sequence
  derived and/or modified CDS sequence (opt5) from hemagglutinin__InfluenzaB__AGX19623
augaaggccaucauugugcugcucauggucguuaccagcaacgcugacagaaucugcacaggcauuacguccucuaauagcccccacguggugaaaaccgccacacagggggaggucaacgugaccggaguuaucccucugacaaccacaccgaccaagucccauuucgcgaaucuuaaaggcacggaaacccgggggaagcugugucccaaaugccucaacuguacagaucuggacguggcucuuggacgcccuaagugcaccggcaauauucccucugccagagucagcauccugcacgaggugcggccuguuacauccggguguuuucccaucaugcaugaucgcaccaagauuagacaacucccuaaccugcugcggggauacgaacacauccgccucucuacgcauaaugugauuaacgccgagaaugcuccgggcggccccuauaaaaucgggacaagcggauccugcccuaacgucaccaauggcaacggguucuuugccacaauggcuugggccgugcccaagaaugacaacaauaaaaccgcgaccaacagccugacaauugaagugccuuacaucuguacggagggagaggaucagauuaccgucuggggcuuccacucugacaacgaaacacagauggccaaacuuuauggggauuccaagccccagaaguuuaccagcucugcuaauggaguuacaacccacuacgugucccaaaucggcggcuucccgaaccagacggaggacgggggacugccucagagcggcagaaucguggucgauuauauggugcagaagucugggaaaacaggaaccauuaccuaccaacggggcauccuccugccccagaagguuuggugcgccuccgggcgcagcaaagugauuaagggaucccuuccucugaucggcgaagcugacugucuccaugagaaauauggcgggcugaauaagucuaaacccuacuacacaggagagcacgccaaggcgauuggcaacugccccaucugggucaagaccccucugaaacucgccaaugggacaaaguauagaccgcccgcuaaacugcuuaaggaacggggauuuuucggcgccaucgcuggguuucuggagggcggaugggaaggcaugauugccggguggcauggauacacgagccacggcgcccacgggguggcuguugcggccgaucucaaauccacccaggaggcuaucaacaagauuacaaagaaucugaacagccuuucugaacuggaggugaaaaaucuccagcgccuguccggagccauggacgagcugcauaacgaaauccucgagcuggaugaaaaggucgacgaccuuagagccgauaccauuagcucucaaaucgagcuggcugugcuccugagcaaugaaggcaucauuaacuccgaggacgagcaccuucuggcccucgaacggaaacugaagaaaaugcuggggccuucugcggucgagaucggcaauggauguuucgaaacaaagcauaagugcaaccagaccugccucgaucgcauugcugccggcacguuugacgccggggaguucagccugcccaccuuugauucccuuaauaucacagcugccagccugaacgacgauggacucgacaaccacaccauucugcuguauuacucuacagcugccuccagccuugcgguggcccucaugaucgcuauuuucguuguguauauggucucuagagauaauguguccuguagcaucugccuguga

SEQ ID NO: 219405 - RNA, 1758 nt, Artificial Sequence; identical to SEQ ID NO: 219061
  derived and/or modified CDS sequence (opt5) from hemagglutinin__InfluenzaB__AGX19634

SEQ ID NO: 219406 - RNA, 1758 nt, Artificial Sequence; identical to SEQ ID NO: 218586
  derived and/or modified CDS sequence (opt5) from hemagglutinin__InfluenzaB__AGX19645

SEQ ID NO: 219407 - RNA, 1758 nt, Artificial Sequence; identical to SEQ ID NO: 218637
  derived and/or modified CDS sequence (opt5) from hemagglutinin__InfluenzaB__AGX19656

SEQ ID NO: 219408 - RNA, 1758 nt, Artificial Sequence
  derived and/or modified CDS sequence (opt5) from hemagglutinin__InfluenzaB__AGX19667
augaaggccaucauugugcugcucauggucguuaccagcaacgcugacagaaucugcacaggcauuacguccucuaauagcccccacguggugaaaaccgccacacagggggaggucaacgugaccggaguuaucccucugacaaccacaccgaccaagucccauuucgcgaaucuuaaaggcacggaaacccgggggaagcugugucccaaaugccucaacuguacagaucuggacguggcucuuggacgcccuaagugcaccggcaagauucccucugccagagucagcauccugcacgaggugcggccuguuacauccggguguuuucccaucaugcaugaucgcaccaaaauuagacaacucccuaaucugcugcggggauacgaacacauccgccucucuacgcauaacgugauuaaugccgagaacgcuccgggcggccccuauaagaucgggacaagcggauccugcccuaauauuaccaacggcaauggguucuuugccacaauggcuugggccguccccaaaaacgacaagaauaaaaccgcgaccaacccucugacaaucgaagugcccuacauuuguacggagggagaggaucagaucaccguguggggcuuccacagcgacaaugaaacacagauggccaaacuuuauggggauucuaagccgcagaaguuuaccuccagcgcuaacggagucacaacccacuacguuucucaaaucggcggcuucccuaaccagacggaggacgggggacugccccaguccggcagaauugugguggauuauaugguccaaaagagcgggaaaacaggaaccaucaccuaccagcggggcauucuccugccucagaagguguggugcgccucugggcgcuccaaaguuaucaagggaagccuuccccugauuggcgaagcugacugucuccaugagaaauauggcgggcugaauaaguccaagcccuacuacacaggagagcacgccaaagcgaucggcaacugcccuaucugggugaagaccccgcugaaacucgccaaugggacaaaguauagacccccugcuaaacugcuuaaggaacggggauuuuucggcgccauugcuggguuucuggagggcggaugggaaggcaugaucgccggguggcauggauacacgucucacggcgcccacggggucgcuguggcggccgaucucaagagcacccaggaggcuauuaacaaaaucacaaagaaucugaacucccuuagcgaacuggagguuaaagaccuccagcgccugucuggagccauggaugagcugcauaaugaaauucucgagcuggacgaaaagguggacgaucuuagagccgacaccaucuccagccaaaucgagcuggcuguccuccugucuaacgaaggcauuaucaauagcgaggaugagcaccuucuggcccucgaacggaaacugaagaagaugcuggggcccuccgcgguggagauuggcaacggauguuucgaaacaaaacauaagugcaaucagaccugccucgaccgcaucgcugccggcacguuugaugccggggaguucucucugccuaccuuugacagccuuaacauuacagcugccucccugaaugaugacggacucgauaaccacaccauccugcuguauuacagcacagcugccucuucccuugcggucacccucaugauugccaucuucgugguuuauauggugagcagagacaaugucucuuguuccaucugccuguga

SEQ ID NO: 219409 - RNA, 1758 nt, Artificial Sequence; identical to SEQ ID NO: 219061
  derived and/or modified CDS sequence (opt5) from hemagglutinin__InfluenzaB__AGX19678

SEQ ID NO: 219410 - RNA, 1758 nt, Artificial Sequence; identical to SEQ ID NO: 218586
  derived and/or modified CDS sequence (opt5) from hemagglutinin__InfluenzaB__AGX19700

SEQ ID NO: 219411 - RNA, 1758 nt, Artificial Sequence
  derived and/or modified CDS sequence (opt5) from hemagglutinin__InfluenzaB__AGX19711
augaaggccaucauugugcugcucauggucguuaccagcaacgcugacagaaucugcacaggcauuacguccucuaauagcccccacguggugaaaaccgccacacagggggaggucaacgugaccggaguuaucccucugacaaccacaccgaccaagucccauuucgcgaaucuuaaaggcacggaaacccgggggaagcugugucccaaaugccucaacuguacagaucuggacguggcucuuggacgcccuaagugcaccggcaauauucccucugccagagucagcauccugcacgaggugcggccuguuacauccggguguuuucccaucaugcaugaucgcaccaagauuagacaacucccuaaccugcugcggggauacgaacacauccgccucucuacgcauaaugugauuaacgccgagaaugcuccgggcggccccuauaaaaucgggacaagcggauccugcccuaacgucaccaauggcaacggguucuuugccacaauggcuugggccgugcccaagaaugacaaaaacaagaccgcgaccaauagccugacaauugaagugccuuacaucuguaaagagggagaggaucagauuacggucuggggcuuccacucugacaacgaaacccagauggccaaacuuuauggggauuccaagccccagaaguuuacaagcucugcuaacggaguuaccacacacuacgugucccaaaucggcggcuucccgaaucagaccgaggacgggggacugccucagagcggcagaaucguggucgauuauauggugcagaagucugggaaaacgggaacaauuaccuaccaacggggcauccuccugccccagaagguuuggugcgccuccgggcgcagcaaagugauuaagggaucccuuccucugaucggcgaagcugacugucuccaugagaaauauggcgggcugaacaagucuaagcccuacuacaccggagagcacgccaaagcgauuggcaauugccccaucugggucaagacaccucugaaacucgccaacgggaccaaguauagaccgcccgcuaaacugcuuaaggaacggggauuuuucggcgccaucgcuggguuucuggagggcggaugggaaggcaugauugccggguggcauggauacacaagccacggcgcccacgggguggcuguugcggccgaucucaaguccacgcaggaggcuaucaauaaaauuaccaagaaccugaauagccuuucugaacuggaggugaaaaaccuccagcgccuguccggagccauggacgagcugcauaaugaaauccucgagcuggaugaaaaggucgacgaccuuagagccgauacaauuagcucucaaaucgagcuggcugugcuccugagcaacgaaggcaucauuaauuccgaggacgagcaccuucuggcccucgaacggaaacugaagaagaugcuggggccuucugcggucgagaucggcaacggauguuucgaaaccaaacauaagugcaaucagacaugccucgaucgcauugcugccggcaccuuugacgccggggaguucagccugcccacguuugauucccuuaacaucaccgcugccagccugaaugacgauggacucgacaaccacacaauucugcuguauuacucuaccgcugccuccagccuugcggugacacucaugaucgccauuuucguuguguauauggucucuagagauaacguguccuguagcaucugccuguga

SEQ ID NO: 219412 - RNA, 1758 nt, Artificial Sequence; identical to SEQ ID NO: 219061
  derived and/or modified CDS sequence (opt5) from hemagglutinin__InfluenzaB__AGX19722

SEQ ID NO: 219413 - RNA, 1758 nt, Artificial Sequence; identical to SEQ ID NO: 219061
  derived and/or modified CDS sequence (opt5) from hemagglutinin__InfluenzaB__AGX19733

SEQ ID NO: 219414 - RNA, 1758 nt, Artificial Sequence; identical to SEQ ID NO: 219061
  derived and/or modified CDS sequence (opt5) from hemagglutinin__InfluenzaB__AGX19744

SEQ ID NO: 219415 - RNA, 1758 nt, Artificial Sequence; identical to SEQ ID NO: 218586
  derived and/or modified CDS sequence (opt5) from hemagglutinin__InfluenzaB__AGX19755

SEQ ID NO: 219416 - RNA, 1758 nt, Artificial Sequence; identical to SEQ ID NO: 219061
  derived and/or modified CDS sequence (opt5) from hemagglutinin__InfluenzaB__AGX19766

SEQ ID NO: 219417 - RNA, 1758 nt, Artificial Sequence; identical to SEQ ID NO: 219394
  derived and/or modified CDS sequence (opt5) from hemagglutinin__InfluenzaB__AGX19788

SEQ ID NO: 219418 - RNA, 1758 nt, Artificial Sequence; identical to SEQ ID NO: 219061
  derived and/or modified CDS sequence (opt5) from hemagglutinin__InfluenzaB__AGX19799

SEQ ID NO: 219419 - RNA, 1758 nt, Artificial Sequence; identical to SEQ ID NO: 219061
  derived and/or modified CDS sequence (opt5) from hemagglutinin__InfluenzaB__AGX19810

SEQ ID NO: 219420 - RNA, 1758 nt, Artificial Sequence
  derived and/or modified CDS sequence (opt5) from hemagglutinin__InfluenzaB__AGX19821
augaaggccaucauugugcugcucauggucguuaccagcaacgcugacagaaucugcacaggcauuacguccucuaauagcccccacguggugaaaaccgccacacagggggaggucaacgugaccggaguuaucccucugacaaccacaccgaccaagucccauuucgcgaaucuuaaaggcacggaaacccgggggaagcugugucccaaaugccucaacuguacagaucuggacguggcucuuggacgcccuaagugcaccggcaauauucccucugccagagucagcauccugcacgaggugcggccuguuacauccggguguuuucccaucaugcaugaucgcaccaagauuagacaacucccuaaccugcugcggggauacgaacacauccgccucucuacgcauaaugugauuaacgccgagaaugcuccgggcggccccuauaaaaucgggacaagcggauccugcccuaacgucaccaauggcaacggguucuuugccacaauggcuugggccgugcccaagaaugacaacaauaaaaccgcgaccaacagccugacaauugaagugccuuacaucuguacggagggagaggaucagauuaccgucuggggcuuccacucugacaacgaaacacagauggccaaacuuuauggggauuccaagccccagaaguuuaccagcucugcuaauggaguuacaacccacuacgugucccaaaucggcggcuucccgaaccagacggaggacgggggacugccucagagcggcagaaucguggucgauuauauggugcagaagucugggaaaacaggaaccauuaccuaccaacggggcauccuccugccccagaagguuuggugcgccuccgggcgcagcaaagugauuaagggaucccuuccucugaucggcgaagcugacugucuccaugagaaauauggcgggcugaauaagucuaaacccuacuacacaggagagcacgccaaggcgauuggcaacugccccaucugggucaagaccccucugaaacucgccaaugggacaaaguauagaccgcccgcuaaacugcuuaaggaacggggauuuuucggcgccaucgcuggguuucuggagggcggaugggaaggcaugauugccggguggcauggauacacgagccacggcgcccacgggguggcuguugcggccgaucucaaauccacccaggaggcuaucaacaagauuacaaagaaucugaacagccuuucugaacuggaggugaaaaaucuccagcgccuguccggaagcauggacgagcugcauaacgaaauccucgagcuggaugaaaaggucgacgaccuuagagccgauaccauuucuagccaaaucgagcuggccgugcuccuguccaaugaaggcaucauuaacucugaggacgagcaccuucuggcucucgaacggaaacugaagaaaaugcuggggccuagcgccgucgagaucggcaauggauguuucgaaacaaagcauaagugcaaccagaccugccucgaucgcauugcggcuggcacguuugacgccggggaguucucccugcccaccuuugauagccuuaauaucacagccgcuucucugaacgacgauggacucgacaaccacaccauucugcuguauuacuccacagccgcuagcucucuugccgugacccucaugaucgcgauuuucguuguguauauggucuccagagauaaugugagcuguuccaucugccuguga

SEQ ID NO: 219421 - RNA, 1758 nt, Artificial Sequence; identical to SEQ ID NO: 219394
  derived and/or modified CDS sequence (opt5) from hemagglutinin__InfluenzaB__AGX19832

SEQ ID NO: 219422 - RNA, 1758 nt, Artificial Sequence; identical to SEQ ID NO: 219061
  derived and/or modified CDS sequence (opt5) from hemagglutinin__InfluenzaB__AGX19843

SEQ ID NO: 219423 - RNA, 1758 nt, Artificial Sequence; identical to SEQ ID NO: 219061
  derived and/or modified CDS sequence (opt5) from hemagglutinin__InfluenzaB__AGX19854

SEQ ID NO: 219424 - RNA, 1758 nt, Artificial Sequence; identical to SEQ ID NO: 219061
  derived and/or modified CDS sequence (opt5) from hemagglutinin__InfluenzaB__AGX19865

SEQ ID NO: 219425 - RNA, 1758 nt, Artificial Sequence; identical to SEQ ID NO: 219394
  derived and/or modified CDS sequence (opt5) from hemagglutinin__InfluenzaB__AGX19876

SEQ ID NO: 219426 - RNA, 1758 nt, Artificial Sequence; identical to SEQ ID NO: 219061
  derived and/or modified CDS sequence (opt5) from hemagglutinin__InfluenzaB__AGX19887

SEQ ID NO: 219427 - RNA, 1758 nt, Artificial Sequence
  derived and/or modified CDS sequence (opt5) from hemagglutinin__InfluenzaB__AGX19898
augaaggccaucauugugcugcucauggucguuaccagcaacgcugacagaaucugcacaggcauuacguccucuaauagcccccacguggugaaaaccgccacacagggggaagucaacgugaccggaguuaucccucugacaaccacaccgaccaagucccauuucgcgaaucuuaaaggcacggaaacccgggggaagcugugucccaaaugccucaacuguacagaucuggacguggcucuuggacgcccuaagugcaccggcaagauucccucugccagagucagcauccugcacgaggugcggccuguuacauccggguguuuucccaucaugcaugaucgcaccaaaauuagacaacucccuaaucugcugcggggauacgaacacauccgccucucuacgcauaacgugauuaaugccgagaacgcuccgggcggccccuauaagaucgggacaagcggauccugcccuaauauuaccaacgaaaauggcuucuuugccacaauggcuugggccguccccaaaaacgacaagaauaaaaccgcgaccaacccucugacaaucgaggugcccuacauuuguacggagggggaagaucagaucaccguguggggauuccacagcgacaaugagacacagauggccaaacuuuauggcgauucuaagccgcagaaguuuaccuccagcgcuaacggggucacaacccacuacguuucucaaaucggaggcuucccuaaccagacggaagacggcgggcugccccaguccggaagaauugugguggauuauaugguccaaaagagcggcaaaacagggaccaucaccuaccagcggggcauucuccugccucagaagguguggugcgccucuggacgcuccaaaguuaucaaggggagccuuccccugauuggagaggcugacugucuccaugagaaauauggcggccugaauaaguccaagcccuacuacacaggggaacacgccaaagcgaucggaaacugcccuaucugggugaagaccccgcugaaacucgccaauggcacaaaguauagacccccugcuaaacugcuuaaggagcggggguuuuucggagccauugcuggcuuucuggaagggggcugggagggaaugaucgccggcuggcauggguacacgucucacggagcccacggcgucgcuguggcggccgaucucaagagcacccaggaagcuauuaacaaaaucacaaagaaucugaacucccuuagcgagcuggagguuaaaaaucuccagcgccugucuggggccauggacgaacugcauaacgagauucucgaacuggaugagaagguggacgaccuuagagccgauaccaucuccagccaaaucgaacuggcuguccuccugucuaaugagggaauuaucaacagcgaggacgaacaccuucuggcccucgagcggaaacugaagaagaugcugggccccuccgcgguggaaauugggaauggcuguuucgagacaaaacauaagugcaaccagaccugccucgaucgcaucgcugccggaacguuugacgccggcgaguucucucugccuaccuuugauagccuuaauauuacagcugccucccugaacgacgaugggcucgacaaucacaccauccugcuguauuacagcacagcugccucuucccuugcggucacccucaugauugccaucuucgugguuuauauggugagcagagauaacgucucuuguuccaucugccuguga

SEQ ID NO: 219428 - RNA, 1758 nt, Artificial Sequence; identical to SEQ ID NO: 218586
  derived and/or modified CDS sequence (opt5) from hemagglutinin__InfluenzaB__AGX19909

SEQ ID NO: 219429 - RNA, 1758 nt, Artificial Sequence; identical to SEQ ID NO: 219061
  derived and/or modified CDS sequence (opt5) from hemagglutinin__InfluenzaB__AGX19920

SEQ ID NO: 219430 - RNA, 1758 nt, Artificial Sequence; identical to SEQ ID NO: 219427
  derived and/or modified CDS sequence (opt5) from hemagglutinin__InfluenzaB__AGX19931

SEQ ID NO: 219431 - RNA, 1758 nt, Artificial Sequence; identical to SEQ ID NO: 219394
  derived and/or modified CDS sequence (opt5) from hemagglutinin__InfluenzaB__AGX19942

SEQ ID NO: 219432 - RNA, 1758 nt, Artificial Sequence; identical to SEQ ID NO: 219061
  derived and/or modified CDS sequence (opt5) from hemagglutinin__InfluenzaB__AGX19953

SEQ ID NO: 219433 - RNA, 1758 nt, Artificial Sequence; identical to SEQ ID NO: 218819
  derived and/or modified CDS sequence (opt5) from hemagglutinin__InfluenzaB__AGX19964

SEQ ID NO: 219434 - RNA, 1758 nt, Artificial Sequence; identical to SEQ ID NO: 218586
  derived and/or modified CDS sequence (opt5) from hemagglutinin__InfluenzaB__AGX19975

SEQ ID NO: 219435 - RNA, 1758 nt, Artificial Sequence
  derived and/or modified CDS sequence (opt5) from hemagglutinin__InfluenzaB__AGX19986
augaaggccaucauugugcugcucauggucguuaccagcaacgcugacagaaucugcacaggcauuacguccucuaauagcccccacguggugaaaaccgccacacagggggaggucaacgugaccggaguuaucccucugacaaccacaccgaccaagucccauuucgcgaaucuuaaaggcacggaaacccgggggaagcugugucccaaaugccucaacuguacagaucuggacguggcucuuggacgcccuaagugcaccggcaagauucccucugccagagucagcauccugcacgaggugcggccuguuacauccggguguuuucccaucaugcaugaucgcaccaaaauuagacaacucccuaaucugcugcggggauacgaacacauccgccucucuacgcauaacgugauuaaugccgagaacgcuccgggcggccccuauaagaucgggacaagcggauccugcccuaauauuaccaacggcaauggguucuuugccacaauggcuugggccguccccaaaaacgacaagaauaaaaccgcgaccaacccucugacaaucgaagugcccuacauuuguacggagggagaggaucagaucaccguguggggcuuccacagcgacaaugaaacacagauggccaaacuuuauggggauucuaagccgcagaaguuuaccuccagcgcuaacggagucacaacccacuacguuucucaaaucggcggcuucccuaaccagacggaggacgggggacugccccaguccggcagaauugugguggauuauaugguccaaaagagcgggaaaacaggaaccaucaccuaccagcggggcauucuccugccucagaagguguggugcguuucugggcgcuccaaagugaucaagggaagccuuccccugauuggcgaagccgacugucuccaugagaaauauggcgggcugaauaaguccaagcccuacuacacaggagagcacgcuaaagccaucggcaacugcccuaucugggucaagaccccgcugaaacucgcgaaugggacaaaguauagacccccugccaaacugcuuaaggaacggggauuuuucggcgcuauugccggguuucuggagggcggaugggaaggcaugaucgcuggguggcauggauacacgucucacggcgcccacgggguggccguugcugcggaucucaagagcacccaggaggccauuaacaaaaucacaaagaaucugaacucccuuagcgaacuggaggugaaaaaucuccagcgccugucuggagcuauggacgagcugcauaacgaaauucucgagcuggaugaaaaggucgacgaccuuagagccgauaccaucuccagccaaaucgagcuggccgugcuccugucuaaugaaggcauuaucaacagcgaggacgagcaccuucuggcucucgaacggaaacugaagaagaugcuggggcccuccgccgucgagauuggcaauggauguuucgaaacaaaacauaagugcaaccagaccugccucgaucgcaucgcggcuggcacguuugacgccggggaguucucucugccuaccuuugauagccuuaauauuacagccgcuucccugaacgacgauggacucgacaaucacaccauccugcuguauuacagcacagccgcuucuucccuugccgugacccucaugauugcgaucuucguuguguauauggucagcagagauaacgugucuuguuccaucugccuguga

SEQ ID NO: 219436 - RNA, 1758 nt, Artificial Sequence
  derived and/or modified CDS sequence (opt5) from hemagglutinin__InfluenzaB__AGX19997
augaaggccaucauugugcugcucauggucguuaccagcaacgcugacagaaucugcacaggcauuacguccucuaauagcccccacguggugaaaaccgccacacagggggaggucaacgugaccggaguuaucccucugacaaccacaccgaccaagucccauuucgcgaaucuuaaaggcacggaaacccgggggaagcugugucccaaaugccucaacuguacagaucuggacguggcucuuggacgcccuaagugcaccggcaagauucccucugccagagucagcauccugcacgaggugcggccuguuacauccggguguuuucccaucaugcaugaucgcaccaaaauuagacaacucccuaaucugcugcggggauacgaacacauccgccucucuacgcauaacgugauuaaugccgagaacgcuccgggcggccccuauaagaucgggacaagcggauccugcccuaauauuaccaacggcaauggguucuuugccacaauggcuugggccguccccaaaaacgacaagaauaaaaccgcgaccaacccucugacaaucgaagugcccuacauuuguacggagggagaggaucagaucaccguguggggcuuccacagcgacaaugaaacacagauggccaaacuuuauggggauucuaagccgcagaaguuuaccuccagcgcuaacggagucacaacccacuacguuucucaaaucggcggcuucccuaaccagauugaggacgggggacugccccaguccggcagaaucgugguggauuauaugguccaaaagagcgggaaaacgggaacaauuaccuaccagcggggcauccuccugccucagaagguguggugcgccucugggcgcuccaaaguuauuaagggaagccuuccccugaucggcgaagcugacugucuccaugagaaauauggcgggcugaauaaguccaagcccuacuacaccggagagcacgccaaagcgaucggcaacugcccuauuugggugaagacaccgcugaaacucgccaaugggaccaaguauagacccccugcuaaacugcuuaaggaacggggauuuuucggcgccaucgcuggguuucuggagggcggaugggaaggcaugauugccggguggcauggauacacaucucacggcgcccacggggucgcuguggcggccgaucucaagagcacgcaggaggcuaucaacaaaauuaccaagaaucugaacucccuuagcgaacuggagguuaaaaaucuccagcgccugucuggagccauggacgagcugcauaacgaaauccucgagcuggaugaaaagguggacgaccuuagagccgauacaaucuccagccaaauugagcuggcuguccuccugucuaaugaaggcaucauuaacagcgaggacgagcaccuucuggcccucgaacggaaacugaagaagaugcuggggcccuccgcgguggagaucggcaauggauguuucgaaaccaaacauaagugcaaccagacaugccucgaucgcauugcugccggcaccuuugacgccggggaguucucucugccuacguuugauagccuuaauaucaccgcugccucccugaacgacgauggacucgacaaucacacaauucugcuguauuacagcaccgcugccucuucccuugcggucacacucaugaucgccaucuucgugguuuauauggugagcagagauaacgucucuuguuccauuugccuguga

SEQ ID NO: 219437 - RNA, 1758 nt, Artificial Sequence; identical to SEQ ID NO: 219061
  derived and/or modified CDS sequence (opt5) from hemagglutinin__InfluenzaB__AGX20008

SEQ ID NO: 219438 - RNA, 1758 nt, Artificial Sequence; identical to SEQ ID NO: 219061
  derived and/or modified CDS sequence (opt5) from hemagglutinin__InfluenzaB__AGX20019

SEQ ID NO: 219439 - RNA, 1758 nt, Artificial Sequence; identical to SEQ ID NO: 219061
  derived and/or modified CDS sequence (opt5) from hemagglutinin__InfluenzaB__AGX20030

SEQ ID NO: 219440 - RNA, 1758 nt, Artificial Sequence
  derived and/or modified CDS sequence (opt5) from hemagglutinin__InfluenzaB__AGX20041
augaaggccaucauugugcugcucauggucguuaccagcgacgcugauagaaucugcacaggcauuacguccucuaacagcccccacguggugaaaaccgccacacagggggaggucaaugugaccggaguuaucccucugacaaccacaccgaccaagucccauuucgcgaaccuuaaaggcaaggaaacgcgggggaaacugugucccaagugccucaauuguaccgaccuggauguggcucuuggacgcccuaagugcacaggcaaaauucccucugccagagucagcauccugcacgaggugcggccuguuaccuccggguguuuucccaucaugcaugaccgcacaaagauuagacaacucccuaaccugcugcggggauacgaacacauccgccucucuacccauaaugugauuaacgccgagaaugcuccgggcggccccuauaaaaucgggacgagcggauccugcccuaacauuacaaauggcaacggguucuuugccaccauggcuugggccguccccaagaaugauaaaaacaagacagcgaccaauccucugaccaucgaagugcccuacauuuguacagagggagaggaccagaucacgguguggggcuuccacagcgauaacgaaacccagauggccaagcuguauggggacucuaaaccgcagaaguuuacauccagcgcuaauggagucaccacacacuacguuucucaaaucggcggcuucccuaaccagaccgaggaugggggacugccccaguccggcagaauugugguggacuauaugguccagaaaagcgggaagacgggaacaaucaccuaccaacggggcauucuccugccucagaaaguguggugcgccucugggcgcuccaagguuaucaaaggaagccuuccccugauuggcgaagcugauugucuccaugagaaguauggcgggcugaacaaguccaaacccuacuacaccggagagcacgccaaggcgaucggcaauugcccuaucugggugaaaacaccgcugaagcucgccaacgggaccaaauauagacccccugcuaagcugcuuaaggaacggggauuuuucggcgccauugcuggguuucuggagggcggaugggaaggcaugaucgccggguggcauggauacacaucucacggcgcccacggggucgcuguggcggccgaccucaaaagcacgcaggaggcuauuaauaagaucaccaaaaaccuuaauucccuuagcgaacuggagguuaagaaccuccagcgccugucuggagccauggaugagcugcauaaugaaauucucgagcuggacgaaaaaguggacgaucuuagagccgacacaaucuccagccaaaucgagcuggcuguccuccugucuaacgaaggcauuaucaauagcgaggaugagcaccuucuggcccucgaacggaagcugaagaaaaugcuggggcccuccgcgguggagauuggcaacggauguuucgaaaccaagcauaaaugcaaucagacaugccucgaccgcaucgcugccggcaccuuugaugccggggaguucucucugccuacguuugacagccuuaacauuaccgcugccucccugaaugaugacggacucgauaaccacacaauccugcuguauuacagcaccgcugccucuucccuugcggucacacucaugauugccaucuucgugguuuauauggugagcagagacaaugucucuuguuccaucugccuguga

SEQ ID NO: 219441 - RNA, 1758 nt, Artificial Sequence; identical to SEQ ID NO: 219061
  derived and/or modified CDS sequence (opt5) from hemagglutinin__InfluenzaB__AGX20052

SEQ ID NO: 219442 - RNA, 1758 nt, Artificial Sequence; identical to SEQ ID NO: 219061
  derived and/or modified CDS sequence (opt5) from hemagglutinin__InfluenzaB__AGX20063

SEQ ID NO: 219443 - RNA, 1758 nt, Artificial Sequence
  derived and/or modified CDS sequence (opt5) from hemagglutinin__InfluenzaB__AGX20074
augaaggccaucauugcucugcucaugguggucaccagcaacgccgacagaaucugcacaggcauuacguccucuaauagcccccacguugugaaaaccgcgacacagggggaggugaacgucaccggagugaucccucugacaaccacaccgaccaagucccauuucgcuaaucuuaaaggcacggaaacccgggggaagcugugucccaaaugccucaacuguacagaucuggacguugcccuuggacgcccuaagugcaccggcaagauucccucugccagagugagcauccugcacgagguccggccugugacauccggguguuuucccaucaugcaugaucgcaccaaaauuagacaacucccuaaucugcugcggggauacgaacacauccgccucucuacgcauaacguuauuaaugcugagaacgccccgggcggccccuauaagaucgggacaagcggauccugcccuaauauuaccaacggcaauggguucuuugcuacaauggccugggcggugcccaaaaacgacaagaauaaaaccgccaccaacccucugacaaucgaaguccccuacauuuguacggagggagaggaucagaucaccguguggggcuuccacagcgacaaugaaacacagauggcuaaacuuuauggggauucuaagccgcagaaguuuaccuccagcgccaacggagugacaacccacuacgucucucaaaucggcggcuucccuaaccagacggaggacgggggacugccccaguccggcagaauuguuguggauuauauggugcaaaagagcgggaaaacaggaaccaucaccuaccagcggggcauucuccugccucagaaggucuggugcgcuucugggcgcuccaaagugaucaagggaagccuuccccugauuggcgaagccgacugucuccaugagaaauauggcgggcugaauaaguccaagcccuacuacacaggagagcacgcgaaagccaucggcaacugcccuaucuggguuaagaccccgcugaaacucgcuaaugggacaaaguauagacccccugccaaacugcuuaaggaacggggauuuuucggcgcuauugccggguuucuggagggcggaugggaaggcaugaucgccggguggcauggauacacgucucacggcgcucacgggguggcggucgccgcugaucucaagagcacccaggaggccauuaacaaaaucacaaagaaucugaacucccuuagcgaacuggaggugaaaaaucuccagcgccugucuggagccauggacgagcugcauaacgaaauucucgagcuggaugaaaagguugacgaccuuagagcugauaccaucuccagccaaaucgagcuggccgugcuccugucuaaugaaggcauuaucaacagcgaggacgagcaccuucuggcgcucgaacggaaacugaagaagaugcuggggcccuccgcugucgagauuggcaauggauguuucgaaacaaaacauaagugcaaccagaccugccucgaucgcaucgccgccggcacguuugacgcuggggaguucucucugccuaccuuugauagccuuaauauuacagccgcuucccugaacgacgauggacucgacaaucacaccauccugcuguauuacagcacagccgcgucuucccuugccgugacccucaugauugcuaucuucgucguguauaugguuagcagagauaacgugucuuguuccaucugccuguga

SEQ ID NO: 219444 - RNA, 1758 nt, Artificial Sequence
  derived and/or modified CDS sequence (opt5) from hemagglutinin__InfluenzaB__AGX20085
augaaggccaucauugugcugcucauggucguuaccagcaacgcugacagaaucugcacaggcauuacguccucuaauagcccccacguggugaaaaccgccacacagggggaggucaacgugaccggaguuaucccucugacaaccacaccgaccaagucccauuucgcgaaucuuaaaggcacggaaacccgggggaagcugugucccaaaugccucaacuguacagaucuggacguggcucuuggacgcccuaagugcaccggcaagauucccucugccagagucagcauccugcacgaggugcggccuguuacauccggguguuuucccaucaugcaugaucgcaccaaaauuagacaacucccuaaucugcugcggggauacgaacacauccgccucucuacgcauaacgugauuaaugccgagaacgcuccgggcggccccuauaagaucgggacaagcggauccugcccuaauauuaccaacggcaauggguucuuugccacaauggcuugggccguccccaaaaacgacaagaauaaaaccgcgaccaacccucugacaaucgaagugcccuacauuuguacggagggagaggaucagaucaccaucuggggcuuccacagcgacaaugaaacacagauggccaaacuuuauggggauucuaagccgcagaaguuuaccuccagcgcuaacggagugacaacccacuacgucucucaaauuggcggcuucccuaaccagacggaggacgggggacugccccaguccggcagaaucguuguggauuauauggugcaaaagagcgggaaaacaggaaccauuaccuaccagcggggcauccuccugccucagaaggucuggugcgccucugggcgcuccaaagugauuaagggaagccuuccccugaucggcgaagcugacugucuccaugagaaauauggcgggcugaauaaguccaagcccuacuacacaggagagcacgccaaagcgaucggcaacugcccuauuuggguuaagaccccgcugaaacucgccaaugggacaaaguauagacccccugcuaaacugcuuaaggaacggggauuuuucggcgccaucgcuggguuucuggagggcggaugggaaggcaugauugccggguggcauggauacacgucucacggcgcccacgggguggcugucgcggccgaucucaagagcacccaggaggcuaucaacaaaauuacaaagaaucugaacucccuuagcgaacuggaggugaaaaaucuccagcgccugucuggagccauggacgagcugcauaacgaaauccucgagcuggaugaaaagguugacgaccuuagagccgauaccaucuccagccaaauugagcuggcugugcuccugucuaaugaaggcaucauuaacagcgaggacgagcaccuucuggcccucgaacggaaacugaagaagaugcuggggcccuccgcggucgagaucggcaauggauguuucgaaacaaaacauaagugcaaccagaccugccucgaucgcauugcugccggcacguuugacgccggggaguucucucugccuaccuuugauagccuuaauaucacagcugccucccugaacgacgauggacucgacaaucacaccauucugcuguauuacagcacagcugccucuucccuugcggugacccucaugaucgccaucuucgucguguauaugguuagcagagauaacgugucuuguuccauuugccuguga

SEQ ID NO: 219445 - RNA, 1758 nt, Artificial Sequence
  derived and/or modified CDS sequence (opt5) from hemagglutinin__InfluenzaB__AGX20096
augaaggccaucauugugcugcucauggucguuaccagcaacgcugacagaaucugcacaggcgugacguccucuaauagcccccacguggucaaaaccgccacacagggggaggugaacguuaccggagugauuccucugacaaccacaccgaccaagucccauuucgcgaaucuuaaaggcacggaaacccgggggaagcugugucccaaaugccucaacuguacagaucuggacgucgcucuuggacgcccuaagugcaccggcaauauccccucugccagagugagcauucugcacgagguucggccugugacauccggguguuuucccaucaugcaugaucgcaccaagaucagacaacucccuaaccugcugcggggauacgaacacauucgccucucuacgcauaaugucaucaacgccgagaaugcuccgggcggccccuauaaaauugggacaagcggauccugcccuaacgugaccaauggcaacggguucuuugccacaauggcuugggccgugcccaagaaugacaacaauaaaaccgcgaccaacagccugacaaucgaagucccuuacauuuguacggagggagaggaucagaucaccguuuggggcuuccacucugacaacgaaacacagauggccaaacuuuauggggauuccaagccccagaaguuuaccagcucugcuaauggagugacaacccacuacgugucccaaauuggcggcuucccgaaccagacggaggacgggggacugccucagagcggcagaaucgucguggauuauaugguucagaagucugggaaaacaggaaccaucaccuaccaacggggcauucuccugccccagaagguguggugcgccuccgggcgcagcaaagucaucaagggaucccuuccucugauuggcgaagcugacugucuccaugagaaauauggcgggcugaauaagucuaaacccuacuacacaggagagcacgccaaggcgaucggcaacugccccauuugggugaagaccccucugaaacucgccaaugggacaaaguauagaccgcccgcuaaacugcuuaaggaacggggauuuuucggcgccaucgcuggguuucuggagggcggaugggaaggcaugaucgccggguggcauggauacacgagccacggcgcccacgggguugcuguggcggccgaucucaaauccacccaggaggcuauuaacaagaucacaaagaaucugaacagccuuucugaacuggaggucaaaaaucuccagcgccuguccggagccauggacgagcugcauaacgaaauucucgagcuggaugaaaagguggacgaccuuagagccgauaccaucagcucucaaauugagcuggcuguccuccugagcaaugaaggcaucaucaacuccgaggacgagcaccuucuggcccucgaacggaaacugaagaaaaugcuggggccuucugcgguggagauuggcaauggauguuucgaaacaaagcauaagugcaaccagaccugccucgaucgcaucgcugccggcacguuugacgccggggaguucagccugcccaccuuugauucccuuaauauuacagcugccagccugaacgacgauggacucgacaaccacaccauccugcuguauuacucuacagcugccuccagccuugcgguuacccucaugauugccaucuucguggucuauauggugucuagagauaauguuuccuguagcauuugccuguga

SEQ ID NO: 219446 - RNA, 1758 nt, Artificial Sequence; identical to SEQ ID NO: 218680
  derived and/or modified CDS sequence (opt5) from hemagglutinin__InfluenzaB__AGX20107

SEQ ID NO: 219447 - RNA, 1758 nt, Artificial Sequence; identical to SEQ ID NO: 218680
  derived and/or modified CDS sequence (opt5) from hemagglutinin__InfluenzaB__AGX20118

SEQ ID NO: 219448 - RNA, 1758 nt, Artificial Sequence; identical to SEQ ID NO: 218680
  derived and/or modified CDS sequence (opt5) from hemagglutinin__InfluenzaB__AGX20129

SEQ ID NO: 219449 - RNA, 1758 nt, Artificial Sequence; identical to SEQ ID NO: 218680
  derived and/or modified CDS sequence (opt5) from hemagglutinin__InfluenzaB__AGX20140

SEQ ID NO: 219450 - RNA, 1758 nt, Artificial Sequence; identical to SEQ ID NO: 218680
  derived and/or modified CDS sequence (opt5) from hemagglutinin__InfluenzaB__AGX20151

SEQ ID NO: 219451 - RNA, 1758 nt, Artificial Sequence; identical to SEQ ID NO: 218680
  derived and/or modified CDS sequence (opt5) from hemagglutinin__InfluenzaB__AGX20162

SEQ ID NO: 219452 - RNA, 1758 nt, Artificial Sequence; identical to SEQ ID NO: 218680
  derived and/or modified CDS sequence (opt5) from hemagglutinin__InfluenzaB__AGX20173

SEQ ID NO: 219453 - RNA, 1758 nt, Artificial Sequence; identical to SEQ ID NO: 218680
  derived and/or modified CDS sequence (opt5) from hemagglutinin__InfluenzaB__AGX20184

SEQ ID NO: 219454 - RNA, 1758 nt, Artificial Sequence; identical to SEQ ID NO: 218680
  derived and/or modified CDS sequence (opt5) from hemagglutinin__InfluenzaB__AGX20195

SEQ ID NO: 219455 - RNA, 1758 nt, Artificial Sequence; identical to SEQ ID NO: 218680
  derived and/or modified CDS sequence (opt5) from hemagglutinin__InfluenzaB__AGX20206

SEQ ID NO: 219456 - RNA, 1758 nt, Artificial Sequence; identical to SEQ ID NO: 218680
  derived and/or modified CDS sequence (opt5) from hemagglutinin__InfluenzaB__AGX20217

SEQ ID NO: 219457 - RNA, 1758 nt, Artificial Sequence; identical to SEQ ID NO: 218717
  derived and/or modified CDS sequence (opt5) from hemagglutinin__InfluenzaB__AGX20228

SEQ ID NO: 219458 - RNA, 1758 nt, Artificial Sequence
  derived and/or modified CDS sequence (opt5) from hemagglutinin__InfluenzaB__AGX20239
augaaggccaucauugugcugcucauggucguuaccagcaacgcugacagaaucugcacaggcauuacguccucuaauagcccccacguggugaaaaccgccacacagggggaggucaacgugaccggaguuaucccucugacaaccacaccgaccaagucccauuucgcgaaucuuaaaggcacggaaacccgggggaagcugugucccaaaugcccuaacuguacagaucucgacguggcucugggacgccccaagugcaccggcaagauuccuucugccagagucagcauccuucacgaggugcggcccguuacauccggguguuuuccuaucaugcaugaucgcaccaaaauuagacaacugccgaaucuccugcggggauacgaacacauccgccugucuacgcauaacgugauuaaugccgagaacgcucccggcggcccuuauaagaucgggacaagcggauccugccccaaugucaccaacggcaauggguucuuugccacaauggcuugggccgugccuaaaaacgacaagaauaaaaccgcgaccaacccccucacaauugaagugccguacaucuguacggagggagaggaucagauuaucgucuggggcuuccacagcgacaaugaaacccagauggccaagcuguauggggauucuaagccucagaaauuuacauccagcgcuaacggaguuaccacacacuacgugucucaaaucggcggcuuccccaaccagaccgaggacgggggacuuccucaguccggcagaauuguggucgauuauauggugcaaaagagcgggaaaacgggaacaaucaccuaccagcggggcauucugcucccccagaagguuuggugcgccucugggcgcuccaaagugaucaagggaagccugccccuuauuggcgaagcugacugucugcaugagaaauauggcgggcucaauaaguccaagccuuacuacaccggagagcacgccaaagcgaucggcaacugcccgaucugggucaagacaccccugaaacuggccaaugggaccaaguauagaccucccgcuaaacuccugaaggaacggggauuuuucggcgccauugcuggguuucuugagggcggaugggaaggcaugaucgccggguggcauggauacacaucucacggcgcccacgggguggcuguugcggccgaucucaagagcacgcaggaggcuauuaacaaaaucaccaagaaucugaacucccugagcgaacuugaggugaaaaaucugcagcgccucucuggagccauggacgagcugcauaacgaaauucuggagcucgaugaaaaggucgacgaccugagagccgauacaaucuccagccaaaucgagcuugcugugcugcucucuaaugaaggcauuaucaacagcgaggacgagcaucugcuugcccuggaacggaaacucaagaagaugcuggggccuuccgcggucgagauuggcaauggauguuucgaaaccaaacacaagugcaaccagacaugccuggaucgcaucgcugccggcaccuuugacgccggggaguucucucuccccacguuugauagccugaauauuaccgcugccucccuuaacgacgauggacuggacaaucacacaauccuccuguauuacagcaccgcugccucuucccuggcggugacacuuaugauugccaucuucguuguguauauggucagcagagauaacgugucuuguuccaucugccucuga

SEQ ID NO: 219459 - RNA, 1758 nt, Artificial Sequence; identical to SEQ ID NO: 218680
  derived and/or modified CDS sequence (opt5) from hemagglutinin__InfluenzaB__AGX20250

SEQ ID NO: 219460 - RNA, 1758 nt, Artificial Sequence; identical to SEQ ID NO: 218680
  derived and/or modified CDS sequence (opt5) from hemagglutinin__InfluenzaB__AGX20261

SEQ ID NO: 219461 - RNA, 1758 nt, Artificial Sequence; identical to SEQ ID NO: 218680
  derived and/or modified CDS sequence (opt5) from hemagglutinin__InfluenzaB__AGX20272

SEQ ID NO: 219462 - RNA, 1758 nt, Artificial Sequence; identical to SEQ ID NO: 218680
  derived and/or modified CDS sequence (opt5) from hemagglutinin__InfluenzaB__AGX20283

SEQ ID NO: 219463 - RNA, 1758 nt, Artificial Sequence; identical to SEQ ID NO: 218680
  derived and/or modified CDS sequence (opt5) from hemagglutinin__InfluenzaB__AGX20294

SEQ ID NO: 219464 - RNA, 1758 nt, Artificial Sequence
  derived and/or modified CDS sequence (opt5) from hemagglutinin__InfluenzaB__AGX20305
augaaggccaucauugugcugcucauggucguuaccagcaacgcugacagaaucugcacaggcauuacguccucuaauagcccccacguggugaaaaccgccacacagggggaggucaacgugaccggaguuaucccucugacaaccacaccgaccaagucccauuucgcgaaucuuaaaggcacggaaacccgggggaagcugugucccaaaugcccuaacuguacagaucucgacguggcucugggacgccccaagugcaccggcaagauuccuucugccagagucagcauccuucacgaggugcggcccguuacauccggguguuuuccuaucaugcaugaucgcaccaaaauuagacaacugccgaaucuccugcggggauacgaacacauccgccugucuacgcauaacgugauuaaugccgagaacgcucccggcggcccuuauaagaucgggacaagcggauccugccccaaugucaccaacggcaauggguucuuugccacaauggcuugggccgugccuaaaaacgacaagaauaaaaccgcgaccaaccagcucacaauugaagugcccuacaucuguacggagggagaggaucagauuaccgucuggggcuuccacagcgacaaugaaacacagauggccaagcuguauggggauucuaagccgcaaaaauuuaccuccagcgcuaacggaguuacaacccacuacgugucucagaucggcggcuucccuaaccagacggaggacgggggacuuccccaguccggcagaaucguggucgauuauauggugcaaaagagcgggaaaacaggaaccauuaccuaccagcggggcauccugcucccucagaagguuuggugcgccucugggcgcuccaaagugauuaagggaagccugccccuuaucggcgaagcugacugucugcaugagaaauauggcgggcucaauaaguccaagcccuacuacacaggagagcacgccaaagcgauuggcaacugcccuaucugggucaagaccccgcugaaacuggccaaugggacaaaguauagacccccugcuaaacuccugaaggaacggggauuuuucggcgccaucgcuggguuucuugagggcggaugggaaggcaugauugccggguggcauggauacacgucucacggcgcccacgggguggcuguugcggccgaucucaagagcacccaggaggcuaucaacaaaauuacaaagaaucugaacucccugagcgaacuugaggugaaaaaucugcaacgccucucuggagccauggacgagcugcauaacgaaauccuggagcucgaugaaaaggucgacgaccugagagccgauaccauuuccagccagaucgagcuugcugugcugcucucuaaugaaggcaucauuaacagcgaggacgagcaucugcuugcccuggaacggaaacucaagaagaugcuggggcccuccgcggucgagaucggcaauggauguuucgaaacaaaacacaagugcaaccagaccugccuggaucgcauugcugccggcacguuugacgccggggaguucucucucccuaccuuugauagccugaauaucacagcugccucccuuaacgacgauggacuggacaaucacaccauucuccuguauuacagcacagcugccucuucccuggcggugacccuuaugaucgccauuuucguuguguauauggucagcagagauaacgugucuuguuccaucugccucuga

SEQ ID NO: 219465 - RNA, 1758 nt, Artificial Sequence; identical to SEQ ID NO: 218680
  derived and/or modified CDS sequence (opt5) from hemagglutinin__InfluenzaB__AGX20316

SEQ ID NO: 219466 - RNA, 1758 nt, Artificial Sequence; identical to SEQ ID NO: 218680
  derived and/or modified CDS sequence (opt5) from hemagglutinin__InfluenzaB__AGX20327

SEQ ID NO: 219467 - RNA, 1758 nt, Artificial Sequence
  derived and/or modified CDS sequence (opt5) from hemagglutinin__InfluenzaB__AGX20338
augaaggccaucauugugcugcucauggucguuaccagcaacgcugacagaaucugcacaggcauuacguccucuaauagcccccacguggugaaaaccgccacacagggggaggucaacgugaccggaguuaucccucugacaaccacaccgaccaagucccauuucgcgaaucuuaaaggcacggaaacccgggggaagcugugucccaaaugcccuaacuguacagaucucgacguggcucugggacgccccaagugcaccggcaagauuccuucugccagagucagcauccuucacgaggugcggcccguuacauccggguguuuuccuaucaugcaugaucgcaccaaaauuagacaacugccgaaucuccugcggggauacgaacacauccgccugucuacgcauaacgugauuaaugccgagaacgcucccggcggcccuuauaagaucgggacaagcggauccugccccaaugucaccaacggcaauggguucuuugccacaauggcuugggccgugccuaaaaacgacaagaauaaaaccgcgaccaacccccucacaauugaagugccguacaucuguacggagggagaggaucagauuaccgucuggggcuuccacagcgacaaugaaacacagauggccaaccuguauggggauucuaagccucagaaguuuaccuccagcgcuaacggaguuacaacccacuacgugucucaaaucggcggcuuccccaaucagacggaggacgggggacuuccucaguccggcagaaucguggucgauuauauggugcagaaaagcgggaagacaggaaccauuaccuaccaacggggcauccugcucccccagaaaguuuggugcgccucugggcgcuccaaggugauuaaaggaagccugccccuuaucggcgaagcugacugucugcaugagaaguauggcgggcucaacaaauccaagccuuacuacacaggagagcacgccaaggcgauuggcaauugcccgaucugggucaaaacaccccugaagcuggccaacgggacaaaauauagaccucccgcuaagcuccugaaagaacggggauuuuucggcgccaucgcuggguuucuugagggcggaugggaaggcaugauugccggguggcauggauacacgucucacggcgcccacgggguggcuguugcggccgaucugaaaagcacccaggaggcuaucaauaagauuaccaagaaccucaauucccugagcgaacuugaggugaagaaccugcagcgccucucuggagccauggacgagcugcauaaugaaauccuggagcucgaugaaaaagucgacgaccugagagccgauaccauuuccagccaaaucgagcuugcugugcugcucucuaacgaaggcaucauuaauagcgaggacgagcaucugcuugcccuggaacggaagcucaaaaagaugcuggggccuuccgcggucgagaucggcaacggauguuucgaaacaaagcacaaaugcaaucagaccugccuggaucgcauugcugccggcacguuugacgccggggaguucucucuccccaccuuugauagccugaacaucacagcugccucccuuaaugacgauggacuggacaaccacaccauucuccuguauuacagcacagcugccucuucccuggcggugacccuuaugaucgccauuuucguuguguauauggucagcagagauaacgugucuuguuccaucugccucuga

SEQ ID NO: 219468 - RNA, 1758 nt, Artificial Sequence; identical to SEQ ID NO: 218680
  derived and/or modified CDS sequence (opt5) from hemagglutinin__InfluenzaB__AGX20349

SEQ ID NO: 219469 - RNA, 1758 nt, Artificial Sequence; identical to SEQ ID NO: 218680
  derived and/or modified CDS sequence (opt5) from hemagglutinin__InfluenzaB__AGX20360

SEQ ID NO: 219470 - RNA, 1758 nt, Artificial Sequence; identical to SEQ ID NO: 218717
  derived and/or modified CDS sequence (opt5) from hemagglutinin__InfluenzaB__AGX20371

SEQ ID NO: 219471 - RNA, 1758 nt, Artificial Sequence
  derived and/or modified CDS sequence (opt5) from hemagglutinin__InfluenzaB__AGX20382
augaaggccaucauugugcugcucauggucguuaccagcaacgcugacagaaucugcacaggcauuacguccucuaauagcccccacguggugaaaaccgccacacagggggaggucaacgugaccggaguuaucccucugacaaccacaccgaccaagucccauuucgcgaaucuuaaaggcacggaaacccgggggaagcugugucccaaaugcccuaacuguacagaucucgacguggcucugggacgccccaagugcaccggcaagauuccuucugccagagucagcauccuucacgaggugcggcccguuacauccggguguuuuccuaucaugcaugaucgcaccaaaauuagacaacugccgaaucuccugcggggauacgaacacauccgccugucuacgcauaacgugauuaaugccgagaacgcucccggcggcccuuauaagaucgggacaagcggauccugccccaaugucaccaacggcaauggguucuuugccacaauggcuugggccgugccuaaaaacgacaagaauaaaaccgcgaccaacccccucacaauugaagugccguacaucuguacggagggagaggaucagauuaccgucuggggcuuccacagcgacaaugaaacacagauggccaagcuguauggggauucuaagccucagaaauuuaccuccagcgcuaacggaguuacaacccacuacgugucucaaaucggcggcuuccccaaccagacggaggacgggggacuuccucaguccggcagaaucguggucgauuauauggugcaaaagagcgggaaaacaggaaccauuaccuaccagcggggcauccugcucccccagaagguuuggugcgccucugggcgcuccaaagugauuaagggaagccugccccuuaucggcgaagcugacugucugcaugagaaauauggcgggcucaauaaguccaagccuuacuacacaggagagcacgccaaagcgauuggcaacugcccgaucugggucaagacaccccugaaacuggccaaugggaccaaguauagaccucccgcuaaacuccugaaggaacggggauuuuucggcgccaucgcuggguuucuugagggcggaugggaaggcaugauugccggguggcauggauacacgucucacggcgcccacgggguggcuguugcggccgaucucaagagcacccaggaggcuaucaacaaaauuacaaagaaucugaacucccugagcgaacuugaggugaaaaaucugcagcgccucucuggagccaugaacgagcugcauaaugaaauccuggagcucgacgaaaaggucgaugaccugagagccgacaccauuuccagccaaaucgagcuugcugugcugcucucuaacgaaggcaucauuaauagcgaggaugagcaucugcuugcccuggaacggaaacucaagaagaugcuggggccuuccgcggucgagaucggcaacggauguuucgaaacaaaacacaagugcaaucagaccugccuggaccgcauugcugccggcacguuugaugccggggaguucucucuccccaccuuugacagccugaacaucacagcugccucccuuaaugaugacggacuggauaaccacaccauucuccuguauuacagcacagcugccucuucccuggcggugacccuuaugaucgccauuuucguuguguauauggucagcagagacaacgugucuuguuccaucugccucuga

SEQ ID NO: 219472 - RNA, 1758 nt, Artificial Sequence; identical to SEQ ID NO: 218680
  derived and/or modified CDS sequence (opt5) from hemagglutinin__InfluenzaB__AGX20393

SEQ ID NO: 219473 - RNA, 1758 nt, Artificial Sequence; identical to SEQ ID NO: 218717
  derived and/or modified CDS sequence (opt5) from hemagglutinin__InfluenzaB__AGX20404

SEQ ID NO: 219474 - RNA, 1758 nt, Artificial Sequence; identical to SEQ ID NO: 218680
  derived and/or modified CDS sequence (opt5) from hemagglutinin__InfluenzaB__AGX20415

SEQ ID NO: 219475 - RNA, 1758 nt, Artificial Sequence; identical to SEQ ID NO: 218680
  derived and/or modified CDS sequence (opt5) from hemagglutinin__InfluenzaB__AGX20426

SEQ ID NO: 219476 - RNA, 1758 nt, Artificial Sequence; identical to SEQ ID NO: 218680
  derived and/or modified CDS sequence (opt5) from hemagglutinin__InfluenzaB__AGX20437

SEQ ID NO: 219477 - RNA, 1758 nt, Artificial Sequence; identical to SEQ ID NO: 218680
  derived and/or modified CDS sequence (opt5) from hemagglutinin__InfluenzaB__AGX20448

SEQ ID NO: 219478 - RNA, 1758 nt, Artificial Sequence; identical to SEQ ID NO: 218680
  derived and/or modified CDS sequence (opt5) from hemagglutinin__InfluenzaB__AGX20459

SEQ ID NO: 219479 - RNA, 1758 nt, Artificial Sequence; identical to SEQ ID NO: 218680
  derived and/or modified CDS sequence (opt5) from hemagglutinin__InfluenzaB__AGX20470

SEQ ID NO: 219480 - RNA, 1758 nt, Artificial Sequence; identical to SEQ ID NO: 218680
  derived and/or modified CDS sequence (opt5) from hemagglutinin__InfluenzaB__AGX20481

SEQ ID NO: 219481 - RNA, 1758 nt, Artificial Sequence; identical to SEQ ID NO: 218680
  derived and/or modified CDS sequence (opt5) from hemagglutinin__InfluenzaB__AGX20492

SEQ ID NO: 219482 - RNA, 1758 nt, Artificial Sequence; identical to SEQ ID NO: 218680
  derived and/or modified CDS sequence (opt5) from hemagglutinin__InfluenzaB__AGX20503

SEQ ID NO: 219483 - RNA, 1758 nt, Artificial Sequence; identical to SEQ ID NO: 218680
  derived and/or modified CDS sequence (opt5) from hemagglutinin__InfluenzaB__AGX20514

SEQ ID NO: 219484 - RNA, 1758 nt, Artificial Sequence
  derived and/or modified CDS sequence (opt5) from hemagglutinin__InfluenzaB__AGX20525
augaaggccaucauugugcugcucauggucguuaccagcaacgcugacagaaucugcacaggcauuacguccucuaauagcccccacguggugaaaaccgccacacagggggaggucaacgugaccggaguuaucccucugacaaccacaccgaccaagucccauuucucuaaucuuaaaggcacggaaacccgggggaagcugugucccaaaugcccuaacuguacagaucucgacguggcgcugggacgccccaagugcaccggcaagauuccuagcgcuagagucuccauccuucacgaggugcggcccguuacaucuggguguuuuccuaucaugcaugaucgcaccaaaauuagacaacugccgaaucuccugcggggauacgaacacauccgccugagcacgcauaacgugauuaaugccgagaacgcccccggcggcccuuauaagaucgggacauccggaagcugccccaaugucaccaacggcaauggguucuuugcuacaauggccugggcugugccuaaaaacgacaagaauaaaaccgccaccaacccccucacaauugaagugccguacaucuguacggagggagaggaucagauuaccgucuggggcuuccacucugacaaugaaacacagauggcgaagcuguauggggauuccaagccucagaaauuuaccagcucugccaacggaguuacaacccacuacgugucccaaaucggcggcuuccccaaccagacggaggacgggggacuuccucagagcggcagaaucguggucgauuauauggugcagaagucugggaaaacaggaaccauuaccuaccaacggggcauccugcucccccagaagguuuggugcgcuuccgggcgcagcaaagugauuaagggaucccugccccuuaucggcgaagccgacugucugcaugagaaauauggcgggcucaauaagucuaagccuuacuacacaggagagcacgcuaaagccauuggcaacugcccgaucugggucaagacaccccugaaacuggcgaaugggaccaaguauagaccucccgccaaacuccugaaggaacggggauuuuucggcgcuaucgccggguuucuugagggcggaugggaaggcaugauugcuggguggcauggauacacgagccacggcgcccacgggguggccguugcugcggaucugaaguccacccaggaggccaucaacaaaauuacaaagaaucucaacagccugucugaacuugaggugaaaaaucugcagcgccucuccggagcuauggacgagcugcauaacgaaauccuggagcucgaugaaaaggucgacgaccugagagccgauaccauuagcucucaaaucgagcuugccgugcugcucagcaaugaaggcaucauuaacuccgaggacgagcaucugcuugcucuggaacggaaacucaagaagaugcuggggccuucugccgucgagaucggcaauggauguuucgaaacaaaacacaagugcaaccagaccugccuggaucgcauugcggcuggcacguuugacgccggggaguucagccuccccaccuuugauucccugaauaucacagccgcuagccuuaacgacgauggacuggacaaucacaccauucuccuguauuacucuacagccgcuuccagccuggccgugacccuuaugaucgcgauuuucguuguguauauggucucuagagauaacguguccuguagcaucugccucuga

SEQ ID NO: 219485 - RNA, 1758 nt, Artificial Sequence; identical to SEQ ID NO: 218680
  derived and/or modified CDS sequence (opt5) from hemagglutinin__InfluenzaB__AGX20536

SEQ ID NO: 219486 - RNA, 1758 nt, Artificial Sequence
  derived and/or modified CDS sequence (opt5) from hemagglutinin__InfluenzaB__AGX20547
augaaggccaucauugugcugcucauggucguuaccagcaacgcugacagaaucugcacaggcauuacguccucuaauagcccccacguggugaaaaccgccacacagggggaggucaacgugaccggaguuaucccucugacaaccacaccgaccaagucccauuucgcgaaucuuaaaggcacggaaacccgggggaagcugugucccaaaugccucaacuguacagaucuggacguggcucuuggacgcccuaagugcaccggcaagauucccucugccagagucagcauccugcacgaggugcggccuguuacauccggguguuuucccaucaugcaugaucgcaccaaaauuagacaacucccuaaucugcugcggggauacgaacacauccgccucucuacgcauaacgugauuaaugccgagaacgcuccgggcggccccuauaagaucgggacaagcggauccugcccuaaugucaccaacggcaauggguucuuugccacaauggcuugggccgugcccaaaaacgacaagaauaaaaccgcgaccaacccucugacaauugaagugcccuacaucuguacggagggagaggaucagauuaccgucuggggcuuccacagcgacaaugaaacacagauggccaaacuuuauggggauucuaagccgcagaaguuuaccuccagcgcuaacggaguuacaacccaccaugugucucaaaucggcggcuucccuaaccagacggaggacgggggacugccccaguccggcagaaucguggucgauuacauggugcaaaagagcgggaaaacaggaaccauuaccuaucagcggggcauccuccugccucagaagguuuggugcgccucugggcgcuccaaagugauuaagggaagccuuccccugaucggcgaagcugacugucuccacgagaaauacggcgggcugaauaaguccaagcccuauuacacaggagagcaugccaaagcgauuggcaacugcccuaucugggucaagaccccgcugaaacucgccaaugggacaaaguacagacccccugcuaaacugcuuaaggaacggggauuuuucggcgccaucgcuggguuucuggagggcggaugggaaggcaugauugccggguggcacggauauacgucucacggcgcccaugggguggcuguugcggccgaucucaagagcacccaggaggcuaucaacaaaauuacaaagaaucugaacucccuuagcgaacuggagaucaaaaaucuccagcgccugucuggagccauggacgagcugcacaacgaaauucucgagcuggaugaaaagguggacgaccuuagagccgauaccaucuccagccaaaucgagcuggcuguccuccugucuaaugaaggcauuaucaacagcgaggacgagcaucuucuggcccucgaacggaaacugaagaagaugcuggggcccuccgcgguggagauuggcaauggauguuucgaaacaaaacacaagugcaaccagaccugccucgaucgcaucgcugccggcacguuugacgccggggaguucucucugccuaccuuugauagccuuaauauuacagcugccucccugaacgacgauggacucgacaaucauaccauccugcuguacuauagcacagcugccucuucccuugcggucacccucaugauugccaucuucgugguuuacauggugagcagagauaacgucucuuguuccaucugccuguga

SEQ ID NO: 219487 - RNA, 1758 nt, Artificial Sequence; identical to SEQ ID NO: 218734
  derived and/or modified CDS sequence (opt5) from hemagglutinin__InfluenzaB__AGX20558

SEQ ID NO: 219488 - RNA, 1758 nt, Artificial Sequence; identical to SEQ ID NO: 218680
  derived and/or modified CDS sequence (opt5) from hemagglutinin__InfluenzaB__AGX20569

SEQ ID NO: 219489 - RNA, 1758 nt, Artificial Sequence; identical to SEQ ID NO: 218717
  derived and/or modified CDS sequence (opt5) from hemagglutinin__InfluenzaB__AGX20580

SEQ ID NO: 219490 - RNA, 1758 nt, Artificial Sequence; identical to SEQ ID NO: 218680
  derived and/or modified CDS sequence (opt5) from hemagglutinin__InfluenzaB__AGX20591

SEQ ID NO: 219491 - RNA, 1758 nt, Artificial Sequence; identical to SEQ ID NO: 218680
  derived and/or modified CDS sequence (opt5) from hemagglutinin__InfluenzaB__AGX20602

SEQ ID NO: 219492 - RNA, 1758 nt, Artificial Sequence; identical to SEQ ID NO: 218680
  derived and/or modified CDS sequence (opt5) from hemagglutinin__InfluenzaB__AGX20613

SEQ ID NO: 219493 - RNA, 1758 nt, Artificial Sequence; identical to SEQ ID NO: 218680
  derived and/or modified CDS sequence (opt5) from hemagglutinin__InfluenzaB__AGX20624

SEQ ID NO: 219494 - RNA, 1758 nt, Artificial Sequence
  derived and/or modified CDS sequence (opt5) from hemagglutinin__InfluenzaB__AGX20635
augaaggccaucauugugcugcucauggucguuaccagcaacgcugacagaaucugcacaggcauuacguccucuaauagcccccacguggugaaaaccgccacacagggggaggucaacgugaccggaguuaucccucugacaaccacaccgaccaagucccauuucgcgaaucuuaaaggcacggaaacccgggggaagcugugucccaaaugccucaacuguacagaucuggacguggcucuuggacgcccuaagugcaccggcaagauucccucugccagagucagcauccugcacgaggugcggccuguuacauccggguguuuucccaucaugcaugaucgcaccaaaauuagacaacucccuaaucugcugcggggauacgaacacauccgccucucuacgcauaacgugauuaaugccgagaacgcuccgggcggccccuauaagaucgggacaagcggauccugcccuaaugucaccaacggcaauggguucuuugccacaauggcuugggccgugcccaaaaacgacaagaauaaaaccgcgaccaacccucugacaauugaagugcccuacaucuguacggagggagaggaucagauuaccgucuggggcuuccacagcgacaaugaaacacuuauggccaagcuguauggggauucuaagccgcagaaauuuaccuccagcgcuaacggaguuacaacccacuacgugucucagaucggcggcuucccuaaccaaacggaggacgggggacucccccaguccggcagaaucguggucgauuauauggugcaaaagagcgggaaaacaggaaccauuaccuaccagcggggcauccugcuuccucagaagguuuggugcgccucugggcgcuccaaagugauuaagggaagccugccccucaucggcgaagcugacugucugcaugagaaauauggcgggcugaauaaguccaagcccuacuacacaggagagcacgccaaagcgauuggcaacugcccuaucugggucaagaccccgcucaaacuggccaaugggacaaaguauagacccccugcuaaacuucugaaggaacggggauuuuucggcgccaucgcuggguuucucgagggcggaugggaaggcaugauugccggguggcauggauacacgucucacggcgcccacgggguggcuguugcggccgaucuuaagagcacccaggaggcuaucaacaaaauuacaaagaaucugaacucccugagcgaacucgaggugaaaaaucugcagcgccugucuggagccauggacgagcuccauaacgaaauccuggagcuugaugaaaaggucgacgaccugagagccgauaccauuuccagccagaucgagcucgcugugcugcuuucuaaugaaggcaucauuaacagcgaggacgagcaucugcucgcccuggaacggaaacugaagaagaugcucgggcccuccgcggucgagaucggcaauggauguuucgaaacaaaacacaagugcaaccaaaccugccuggaucgcauugcugccggcacguuugacgccggggaguucucucuuccuaccuuugauagccugaauaucacagcugccucccucaacgacgauggacuggacaaucacaccauucugcuuuauuacagcacagcugccucuucccucgcggugacccugaugaucgccauuuucguuguguauauggucagcagagauaacgugucuuguuccaucugccuguga

SEQ ID NO: 219495 - RNA, 1758 nt, Artificial Sequence; identical to SEQ ID NO: 218680
  derived and/or modified CDS sequence (opt5) from hemagglutinin__InfluenzaB__AGX20646

SEQ ID NO: 219496 - RNA, 1758 nt, Artificial Sequence
  derived and/or modified CDS sequence (opt5) from hemagglutinin__InfluenzaB__AGX20668
augaaggccaucauugugcugcucauggucguuaccagcaacgcugacagaaucugcacaggcauuacguccucuaauagcccccacguggugaaaaccgccacacagggggaggucaacgugaccggaguuaucccucugacaaccacaccgaccaagucccauuucgcgaaucuuaaaggcacggaaacccgggggaagcugugucccaaaugcccuaacuguacagaucucgacguggcucugggacgccccaagugcaccggcaagauuccuucugccagagucagcauccuucacgaggugcggcccguuacauccggguguuuuccuaucaugcaugaucgcaccaaaauuagacaacugccgaaucuccugcggggauacgaacacauccgccugucuacgcauaacgugauuaaugccgagaacgcucccggcggcccuuauaagaucgggacaagcggauccugccccaaugucaccaacggcaauggguucuuugccacaauggcuugggccgugccuaaaaacgacaagaccaaaaccgcgacaaauccccucacgauugaagugccguacaucuguaccgagggagaggaucagauuacagucuggggcuuccacagcgacaacgaaacccagauggccaagcuguauggggauucuaagccucagaaauuuacauccagcgcuaauggaguuaccacgcacuacgugucucaaaucggcggcuuccccaaccagacagaggacgggggacuuccucaguccggcagaaucguggucgauuauauggugcaaaagagcgggaaaaccggaaccauuacauaccagcggggcauccugcucccccagaagguuuggugcgccucugggcgcuccaaagugauuaagggaagccugccccuuaucggcgaagcugacugucugcaugagaaauauggcgggcucaacaaguccaagccuuacuacaccggagagcacgccaaagcgauuggcaauugcccgaucugggucaagacaccccugaaacuggccaacgggacgaaguauagaccucccgcuaaacuccugaaggaacggggauuuuucggcgccaucgcuggguuucuugagggcggaugggaaggcaugauugccggguggcauggauacaccucucacggcgcccacgggguggcuguugcggccgaucugaaaagcacacaggaggcuaucaauaagauuaccaagaaccucaauucccugagcgaacuugaggugaaaaaccugcagcgccucucuggagccauggacgagcugcauaaugaaauccuggagcucgaugaaaaggucgacgaccugagagccgauacaauuuccagccaaaucgagcuugcugugcugcucucuaacgaaggcaucauuaauagcgaggacgagcaucugcuugcccuggaacggaaacucaagaagaugcuggggccuuccgcggucgagaucggcaacggauguuucgaaaccaaacacaagugcaaucagacgugccuggaucgcauugcugccggcaccuuugacgccggggaguucucucuccccacauuugauagccugaacaucaccgcugccucccuuaaugacgauggacuggacaaccacacaauucuccuguauuacagcaccgcugccucuucccuggcggugacgcuuaugaucgccauuuucguuguguauauggucagcagagauaaugugucuuguuccaucugccucuga

SEQ ID NO: 219497 - RNA, 1758 nt, Artificial Sequence; identical to SEQ ID NO: 218755
  derived and/or modified CDS sequence (opt5) from hemagglutinin__InfluenzaB__AGX20679

SEQ ID NO: 219498 - RNA, 1758 nt, Artificial Sequence; identical to SEQ ID NO: 218717
  derived and/or modified CDS sequence (opt5) from hemagglutinin__InfluenzaB__AGX20690

SEQ ID NO: 219499 - RNA, 1758 nt, Artificial Sequence; identical to SEQ ID NO: 218717
  derived and/or modified CDS sequence (opt5) from hemagglutinin__InfluenzaB__AGX20701

SEQ ID NO: 219500 - RNA, 1758 nt, Artificial Sequence; identical to SEQ ID NO: 219061
  derived and/or modified CDS sequence (opt5) from hemagglutinin__InfluenzaB__AGX20712

SEQ ID NO: 219501 - RNA, 1758 nt, Artificial Sequence; identical to SEQ ID NO: 218680
  derived and/or modified CDS sequence (opt5) from hemagglutinin__InfluenzaB__AGX20723

SEQ ID NO: 219502 - RNA, 1758 nt, Artificial Sequence
  derived and/or modified CDS sequence (opt5) from hemagglutinin__InfluenzaB__AGX20734
augaaggccaucauugugcugcucauggucguuaccagcaacgcugacagaaucugcacaggcauuacguccucuaauagcccccacguggugaaaaccgccacacagggggaggucaacgugaccggaguuaucccucugacaaccacaccgaccaagucccauuucgcgaaucuuaaaggcacggaaacccgggggaagcugugucccaaaugccucaacuguacagaucuggacguggcucuuggacgcccuaagugcaccggcaagauucccucugccagagucagcauccugcacgaggugcggccuguuacauccggguguuuucccaucaugcaugaucgcaccaaaauuagacaacucccuaaucugcugcggggauacgaacacauccgccucucuacgaacaaugugauuaacgccgagaaugcuccgggcggccccuauaagaucgggacaagcggauccugcccuaacgucaccaauggcaacggguucuuugccacaauggcuugggccgugcccaaaaaugacaagaacaaaaccgcgaccaauccucugacaauugaagugcccuacaucuguacggagggagaggaucagauuaccgucuggggcuuccauagcgacaacgaaacacagauggccaagcuguauggggauucuaagccgcagaaauuuaccuccagcgcuaacggaguuacaacccacuacgugucucaaaucggcggcuucccuaaucagacggaggacgggggacugccccaguccggcagaaucguggucgauuauauggugcaaaagagcgggaaaacaggaaccauuaccuaccagcggggcauccuccugccucagaagguuuggugcgccucugggcgcuccaaagugauuaagggaagccuuccccugaucggcgaagcugacugucuccacgagaaauauggcgggcugaacaaguccaagcccuacuacacaggagagcaugccaaagcgauuggcaauugcccuaucugggucaagaccccgcugaaacucgccaacgggacaaaguauagacccccugcuaaacugcuuaaggaacggggauuuuucggcgccaucgcuggguuucuggagggcggaugggaaggcaugauugccggguggcacggauacacgucucauggcgcccacgggguggcuguugcggccgaucucaagagcacccaggaggcuaucaauaaaauuacaaagaaccuuaauucccuuagcgaacuggaggugaaaaaccuccagcgccugucuggagccauggacgagcugcacaaugaaauccucgagcuggaugaaaaggucgacgaccuuagagccgauaccauuuccagccaaaucgagcuggcugugcuccugucuaacgaaggcaucauuaauagcgaggacgagcaucuucuggcccucgaacggaaacugaagaagaugcuggggcccuccgcggucgagaucggcaacggauguuucgaaacaaaacacaagugcaaucagaccugccucgaucgcauugcugccggcacguuugacgccggggaguucucucugccuaccuuugauagccuuaacaucacagcugccucccugaaugacgauggacucgacaaccauaccauucugcuguauuacagcacagcugccucuucccuugcggugacccucaugaucgccauuuucguuguguauauggucagcagagauaacgugucuuguuccaucugccuguga

SEQ ID NO: 219503 - RNA, 1758 nt, Artificial Sequence
  derived and/or modified CDS sequence (opt5) from hemagglutinin__InfluenzaB__AGX20745
augaaggccaucauugugcugcucauggucguuaccagcaacgcugacagaaucugcacaggcauuacguccucuaauagcccccacguggugaaaaccgccacacagggggaggucaacgugaccggaguuaucccucugacaaccacaccgaccaagucccauuucgcgaaucuuaaaggcacggaaacccgggggaagcugugucccaaaugcccuaacuguacagaucucgacguggcucugggacgccccaagugcaccggcaagauuccuucugccagagucagcauccuucacgaggugcggcccguuacauccggguguuuuccuaucaugcaugaucgcaccaaaauuagacaacugccgaaucuccugcggggauacgaacacauccgccugucuacgcauaacgugauuaaugccgagaacgcucccggcggcccuuauaagaucgggacaagcggauccugccccaaugucaccaacggcaauggguucuuugccacaauggcuugggccgugccuaaaaacgacaagaauaaaaccgcgaccaacccccucacaauugaagugccguacaucuguacggagggagaggaucagauuaccaucuggggcuuccacagcgacaaugaaacacagauggccaagcuguauggggauucuaagccucagaaauuuaccuccagcgcuaacggagucacaacccacuacguuucucaaaucggcggcuuccccaaccagacggaggacgggggacuuccucaguccggcagaauugugguggauuauaugguccaaaagagcgggaaaacaggaaccaucaccuaccagcggggcauucugcucccccagaagguguggugcgccucugggcgcuccaaaguuaucaagggaagccugccccuuauuggcgaagcugacugucugcaugagaaauauggcgggcucaauaaguccaagccuuacuacacaggagagcacgccaaagcgaucggcaacugcccgaucugggugaagacaccccugaaacuggccaaugggaccaaguauagaccucccgcuaaacuccugaaggaacggggauuuuucggcgccauugcuggguuucuugagggcggaugggaaggcaugaucgccggguggcauggauacacgucucacggcgcccacggggucgcuguggcggccgaucucaagagcacccaggaggcuauuaacaaaaucacaaagaaucugaacucccugagcgaacuugagguuaaaaaucugcagcgccucucuggagccauggacgagcugcauaacgaaauucuggagcucgaugaaaagguggacgaccugagagccgauaccaucuccagccaaaucgagcuugcuguccugcucucuaaugaaggcauuaucaacagcgaggacgagcaucugcuugcccuggaacggaaacucaagaagaugcuggggccuuccgcgguggagauuggcaauggauguuucgaaacaaaacacaagugcaaccagaccugccuggaucgcaucgcugccggcacguuugacgccggggaguucucucuccccaccuuugauagccugaauauuacagcugccucccuuaacgacgauggacuggacaaucacaccauccuccuguauuacagcacagcugccucuucccuggcggucacccuuaugauugccaucuucgugguuuauauggugagcagagauaacgucucuuguuccaucugccucuga

SEQ ID NO: 219504 - RNA, 1758 nt, Artificial Sequence; identical to SEQ ID NO: 219061
  derived and/or modified CDS sequence (opt5) from hemagglutinin__InfluenzaB__AGX20756

SEQ ID NO: 219505 - RNA, 1758 nt, Artificial Sequence; identical to SEQ ID NO: 218680
  derived and/or modified CDS sequence (opt5) from hemagglutinin__InfluenzaB__AGX20767

SEQ ID NO: 219506 - RNA, 1758 nt, Artificial Sequence; identical to SEQ ID NO: 218717
  derived and/or modified CDS sequence (opt5) from hemagglutinin__InfluenzaB__AGX20778

SEQ ID NO: 219507 - RNA, 1758 nt, Artificial Sequence
  derived and/or modified CDS sequence (opt5) from hemagglutinin__InfluenzaB__AGX20789
augaaggccaucauugugcugcucauggucguuaccagcaacgcugacagaaucugcacaggcauuacguccucuaauagcccccacguggugaaaaccgccacacagggggaggucaacgugaccggaguuaucccucugacaaccacaccgaccaagucccauuucgcgaaucuuaaaggcacggaaacccgggggaagcugugucccaaaugcccuaacuguacagaucucgacguggcucugggacgccccaagugcaccggcaagauuccuucugccagagucagcauccuucacgaggugcggcccguuacauccggguguuuuccuaucaugcaugaucgcaccaaaauuagacaacugccgaaucuccugcggggauacgaacacauccgccugucuacgcauaacgugauuaaugccgagaacgcucccggcggcccuuauaagaucgggacaagcggauccugccccaaugucaccaacggcaauggguucuuugccacaauggcuugggccgugccuaaaaacgacaagaauaaaaccgcgaccaacccccucacaauugaagugccguacaucuguacggagggagaggaucagauuaccgucuggggcuuccacagcgacaaugaaacacagauggccaagcuguauggggauucuaagccucagaaauuuaccuccagcgcuaacggaguuacaacccacuacgugucucaaaucggcggcuuccccaaccagacggaggacgggggacuuccucaguccggcagaaucguggucgauuauauggugcaaaagagcgggaaaacaggaaccauuaccuaccagcggggcauccugcucccccagaagguuuggugcgccucugggcgcuccaaagugauuaagggaagccugccccuuaucggcgaagcugacugucugcaugagaaauauggcgggcucaauaaguccaagccuuacuacacaggagagcacgccaaagcgauuggcaacugcccgaucugggucaagacaccccugaaacuggccaaugggaccaaguauagaccucccgcuaaacuccugaaggaacggggauuuuucggcgccaucgcuggguuucuugagggcggaugggaaggcaugauugccggguggcauggauacacgucucacggcgcccacgggguggcuguugcggccgaucucaagagcacccaggaggcuaucaacaaaauuacaaagaaucugaacucccugagcgaacuugaggugaaaaaucugcagcgccucucuggagccauggacgagcugcauggcgaaauccuggagcucgaugaaaaggucgacgaccugagagccgauaccauuuccagccaaaucgagcuugcugugcugcucucuaacgaagggaucauuaauagcgaggacgagcaucugcuugcccuggaacggaaacucaagaagaugcugggcccuuccgcggucgagaucggaaacggcuguuucgaaacaaaacacaagugcaaucagaccugccuggaucgcauugcugccgggacguuugacgccggagaguucucucuccccaccuuugauagccugaacaucacagcugccucccuuaaugacgauggccuggacaaccacaccauucuccuguauuacagcacagcugccucuucccuggcggugacccuuaugaucgccauuuucguuguguauauggucagcagagauaaugugucuuguuccaucugccucuga

SEQ ID NO: 219508 - RNA, 1758 nt, Artificial Sequence
  derived and/or modified CDS sequence (opt5) from hemagglutinin__InfluenzaB__AGX20800
augaaggccaucauugugcugcucauggucguuaccagcaacgcugacagaaucugcacaggcauuacguccucuaauagcccccacguggugaaaaccgccacacagggggaggucaacgugaccggaguuaucccucugacaaccacaccgaccaagucccauuucgcgaaucuuaaaggcacggaaacccgggggaagcugugucccaaaugcccuaacuguacagaucucgacguggcucugggacgccccaagugcaccggcaagauuccuucugccagagucagcauccuucacgaggugcggcccguuacauccggguguuuuccuaucaugcaugaucgcaccaaaauuagacaacugccgaaucuccugcggggauacgaacacauccgccugucuacgcauaacgugauuaaugccgagaacgcucccggcggcccuuauaagaucgggacaagcggauccugccccaaugucaccaacggcaauggguucuuugccacaauggcuugggccgugccuaaaaacgacaagaauaaaaccgcgaccaacccccucacaauugaagugccguacaucuguacggagggagaggaucagauuaccgucuggggcuuccacagcgacaaugaaacacagauggccaagcuguauggggauucuaagccucagaaauuuaccuccagcgcuaacggaguuacaacccacuacgugucucaaaucggcggcuuccccaaccagacggaggacgggggacuuccucaguccggcagaaucguggucgauuauauggugcaaaagagcgggaaaacaggaaccauuaccuaccagcggggcauccugcucccccagaagguuuggugcgccucugggcgcuccaaagugauuaagggaagccugccccuuaucggcgaagcugacugucugcaugagaaauauggcgggcucaauaaguccaagccuuacuacacaggagagcacgccaaagcgauuggcaacugcccgaucugggucaagacaccccugaaacuggccaaugggaccaaguauagaccucccgcuaaacuccugaaggaacggggauuuuucggcgccaucgcuggguuucuugagggcggaugggaaggcaugauugccggguggcauggauacacgucucacggcgcccacgggguggcuguugcggccgaucucaagagcacccaggaggcuaucaacaaaauuacaaagaaucugaacucccugagcgaacuugaggugaaaaaucugcagcgccucucuggagccauggacgagcugcauaacgaaauccuggagcucgaugaaaaggucgacgaccugagagccgauaccauuuccagccaaaucgagcuugcugugcugcucucuaaugaaggcaucauuaacagcgaggacgagcaucugcuugcccuggaacggaaacucaagaagaugcuggggccuuccgcggucgagaucggcaauggauguuucgaaacaaaacacaagugcaaccagaccugccuggaucgcauugcugccggcacguuugacgccggggaguucucucuccccaccuuugauagccugaauaucacagcugccucccuuaacgacgaugaacuggacaaucacaccauucuccuguauuacagcacagcugccucuucccuggcggugacccuuaugaucgccauuuucguuguguauauggucagcagagauaacgugucuuguuccaucugccucuga

SEQ ID NO: 219509 - RNA, 1758 nt, Artificial Sequence; identical to SEQ ID NO: 218755
  derived and/or modified CDS sequence (opt5) from hemagglutinin__InfluenzaB__AGX20811

SEQ ID NO: 219510 - RNA, 1758 nt, Artificial Sequence; identical to SEQ ID NO: 218755
  derived and/or modified CDS sequence (opt5) from hemagglutinin__InfluenzaB__AGX20822

SEQ ID NO: 219511 - RNA, 1758 nt, Artificial Sequence; identical to SEQ ID NO: 218755
  derived and/or modified CDS sequence (opt5) from hemagglutinin__InfluenzaB__AGX20833

SEQ ID NO: 219512 - RNA, 1758 nt, Artificial Sequence
  derived and/or modified CDS sequence (opt5) from hemagglutinin__InfluenzaB__AGX20844
augaaggccaucauugugcugcucauggucguuaccagcaacgcugacagaaucugcacaggcauuacguccucuaauagcccccacaucgugaaaaccgccacacagggggaggugaacgucaccggagugauuccucugacaaccacaccgaccaagucccauuucgcgaaucuuaaaggcacggaaacccgggggaagcugugucccaaaugccucaacuguacagaucuggacguugcucuuggacgcccuaagugcaugggcaagauccccucugccagagugagcauccugcacgagguccggccugugaccuccggguguuuucccauuaugcaugaucgcacaaaaaucagacaacucccuaaucugcugcggggauacgaacacauucgccucucuacccauaacguuaucaaugccgagaacgcuccgggcggccccuauaagauugggacgagcggauccugcccuaauaucacaaacggcaauggguucuuugccaccauggcuugggccgugcccaaaaacgacaagaauaaaacagcgaccaacccucugaccauugaaguccccuacaucuguacagagggagaggaucagaucacgguguggggcuuccacagcgacaaugaaacccagauggccaaacuuuauggggauucuaagccgcagaaguuuacauccagcgcuaacggagugaccacacacuacgucucucaaauuggcggcuucccuaaccagaccgaggacgggggacugccccaguccggcagaaucguuguggauuauauggugcaaaagagcgggaaaacgggaacaauuaccuaccagcggggcauccuccugccucagaaggucuggugcgccucugggcgcuccaaagugauuaagggaagccuuccccugaucggcgaagcugacugucuccaugagaaauauggcgggcugaauaaguccaagcccuacuacaccggagagcacgccaaagcgaucggcaacugcccuauuuggguuaagacaccgcugaaacucgccaaugggaccaaguauagacccccugcuaaacugcuuaaggaacggggauuuuucggcgccaucgcuggguuucuggagggcggaugggaaggcaugauugccggguggcauggauacacaucucacggcgcccacgggguggcugucgcggccgaucucaagagcacgcaggaggcuaucaacaaaauuaccaagaaucugaacucccuuagcgaacuggaggugaaaaaucuccagcgccugucuggagccauggacgagcugcauaacgaaauccucgagcuggaugaaaagguugacgaccuuagagccgauacaaucuccagccaaauugagcuggcugugcuccugucuaaugaaggcaucauuaacagcgaggacgagcaccuucuggcccucgaacggaaacugaagaagaugcuggggcccuccgcggucgagaucggcaauggauguuucgaaaccaaacauaagugcaaccagacaugccucgaucgcauugcugccggcaccuuugacgccggggaguucucucugccuacguuugauagccuuaauaucaccgcugccucccugaacgacgauggacucgacaaucacacaauucugcuguauuacagcaccgcugccucuucccuugcggugacacucaugaucgccaucuucgucguguauaugguuagcagagauaacgugucuuguuccauuugccuguga

SEQ ID NO: 219513 - RNA, 1758 nt, Artificial Sequence; identical to SEQ ID NO: 218680
  derived and/or modified CDS sequence (opt5) from hemagglutinin__InfluenzaB__AGX20855

SEQ ID NO: 219514 - RNA, 1758 nt, Artificial Sequence; identical to SEQ ID NO: 218755
  derived and/or modified CDS sequence (opt5) from hemagglutinin__InfluenzaB__AGX20866

SEQ ID NO: 219515 - RNA, 1758 nt, Artificial Sequence; identical to SEQ ID NO: 218755
  derived and/or modified CDS sequence (opt5) from hemagglutinin__InfluenzaB__AGX20877

SEQ ID NO: 219516 - RNA, 1758 nt, Artificial Sequence
  derived and/or modified CDS sequence (opt5) from hemagglutinin__InfluenzaB__AGX20888
augaaggccaucauugugcugcucauggucguuaccagcaacgcugacagaaucugcacaggcauuacguccucuaauagcccccacguggugaaaaccgccacacagggggaggucaacgugaccggaguuaucccucugacaaccacaccgaccaagucccauuucgcgaaucuuaaaggcacggaaacccgggggaagcugugucccaaaugcccuaacuguacagaucucgacguggcucugggacgccccaagugcaccggcaagauuccuucugccagagucagcauccuucacgaggugcggcccguuacauccggguguuuuccuaucaugcaugaucgcaccaaaauuagacaacugccgaaucuccugcggggauacgaacacauccgccugucuacgcauaacgugauuaaugccgagaacgcucccggcggcccuuauaagaucgggacaagcggauccugccccaaugucaccaacggcaauggguucuuugccacaauggcuugggccgugccuaaaaacgacaagaauaaaaccgcgaccaacccccucacaauugaagugccguacaucuguacggagggagaggaucagauuaccgucuggggcuuccacagcgacucugaaacacagauggccaagcuguauggggauuccaagccucagaaauuuaccagcucugcuaauggaguuacaacccacuacgugucccaaaucggcggcuuccccaaccagacggaggacgggggacuuccucagagcggcagaaucguggucgauuauauggugcagaagucugggaaaacaggaaccauuaccuaccaacggggcauccugcucccccagaagguuuggugcgccuccgggcgcagcaaagugauuaagggaucccugccccuuaucggcgaagcugacugucugcaugagaaauauggcgggcucaacaagucuaagccuuacuacacaggagagcacgccaaagcgauuggcaauugcccgaucugggucaagacaccccugaaacuggccaacgggaccaaguauagaccucccgcuaaacuccugaaggaacggggauuuuucggcgccaucgcuggguuucuugagggcggaugggaaggcaugauugccggguggcauggauacacgagccacggcgcccacgggguggcuguugcggccgaucugaaguccacccaggaggcuaucaauaaaauuacaaagaaccucaauagccugucugaacuugaggugaaaaaccugcagcgccucuccggagccauggacgagcugcauaaugaaauccuggagcucgaugaaaaggucgacgaccugagagccgauaccauuagcucucaaaucgagcuugcugugcugcucagcaacgaaggcaucauuaauuccgaggacgagcaucugcuugcccuggaacggaaacucaagaagaugcuggggccuucugcggucgagaucggcaacggauguuucgaaacaaaacacaagugcaaucagaccugccuggaucgcauugcugccggcacguuugacgccggggaguucagccuccccaccuuugauucccugaacaucacagcugccagccuuaaugacgauggacuggacaaccacaccauucuccuguauuacucuacagcugccuccagccuggcggugacccuuaugaucgccauuuucguuguguauauggucucuagagauaauguguccuguagcaucugccucuga

SEQ ID NO: 219517 - RNA, 1758 nt, Artificial Sequence; identical to SEQ ID NO: 218755
  derived and/or modified CDS sequence (opt5) from hemagglutinin__InfluenzaB__AGX20899

SEQ ID NO: 219518 - RNA, 1758 nt, Artificial Sequence; identical to SEQ ID NO: 218755
  derived and/or modified CDS sequence (opt5) from hemagglutinin__InfluenzaB__AGX20910

SEQ ID NO: 219519 - RNA, 1758 nt, Artificial Sequence; identical to SEQ ID NO: 218680
  derived and/or modified CDS sequence (opt5) from hemagglutinin__InfluenzaB__AGX20921

SEQ ID NO: 219520 - RNA, 1758 nt, Artificial Sequence
  derived and/or modified CDS sequence (opt5) from hemagglutinin__InfluenzaB__AGX20932
augaaggccaucauugugcugcucauggucguuaccagcaacgcugacagaaucugcacaggcauuacguccucuaauagcccccacguggugaaaaccgccacacagggggaggucaacgugaccggaguuaucccucugacaaccacaccgaccaagucccauuucgcgaaucuuaaaggcacggaaacccgggggaagcugugucccaaaugcccuaacuguacagaucucgacguggcucugggacgccccaagugcaccggcaagauuccuucugccagagucagcauccuucacgaggugcggcccguuacauccggguguuuuccuaucaugcaugaucgcaccaaaauuagacaacugccgaaucuccugcggggauacgaacacauccgccugucuacgcauaacgugauuaaugccgagaacgcucccggcggcccuuauaagaucgggacaagcggauccugccccaaugucaccaacggcaauggguucuuugccacaauggcuugggccgugccuaaaaacgacaagaauaaaaccgcgaccaacccccucacaauugaagugccguacaucuguacggagggagaggaucagauuaccgucuggggcuuccacagcgacaaugaaacacagauggccaagcuguauggggauccuaagccccagaaauuuaccucuuccgcuaacggaguuacaacccacuacgugagccaaaucggcggcuucccuaaccagacggaggacgggggacuuccccagucuggcagaaucguggucgauuauauggugcagaaguccgggaaaacaggaaccauuaccuaccaacggggcauccugcucccccagaagguuuggugcgccagcgggcgcucuaaagugauuaagggaucccugccucuuaucggcgaagcugacugucugcaugagaaauauggcgggcucaauaagagcaagccguacuacacaggagagcacgccaaagcgauuggcaacugccccaucugggucaagaccccucugaaacuggccaaugggacaaaguauagacccccugcuaaacuccugaaggaacggggauuuuucggcgccaucgcuggguuucuugagggcggaugggaaggcaugauugccggguggcauggauacacgucccacggcgcccacgggguggcuguugcggccgaucugaagucuacccaggaggcuaucaacaaaauuacaaagaaucucaacagccuguccgaacuugaggugaaaaaucugcagcgccucagcggagccauggacgagcugcauaacgaaauccuggagcucgaugaaaaggucgacgaccugagagccgauaccauuucuucccaaaucgagcuugcugugcugcucagcaaugaaggcaucauuaacucugaggacgagcaucugcuugcccuggaacggaaacucaagaagaugcuggggcccagcgcggucgagaucggcaauggauguuucgaaacaaaacacaagugcaaccagaccugccuggaucgcauugcugccggcacguuugacgccggggaguucucccucccgaccuuugauucucugaauaucacagcugccagccuuaacgacgauggacuggacaaucacaccauucuccuguauuacuccacagcugccagcucucuggcggugacccuuaugaucgccauuuucguuguguauauggucuccagagauaacgugagcuguucuaucugccucuga

SEQ ID NO: 219521 - RNA, 1758 nt, Artificial Sequence; identical to SEQ ID NO: 218680
  derived and/or modified CDS sequence (opt5) from hemagglutinin__InfluenzaB__AGX20943

SEQ ID NO: 219522 - RNA, 1758 nt, Artificial Sequence; identical to SEQ ID NO: 218680
  derived and/or modified CDS sequence (opt5) from hemagglutinin__InfluenzaB__AGX20954

SEQ ID NO: 219523 - RNA, 1758 nt, Artificial Sequence; identical to SEQ ID NO: 218680
  derived and/or modified CDS sequence (opt5) from hemagglutinin__InfluenzaB__AGX20965

SEQ ID NO: 219524 - RNA, 1758 nt, Artificial Sequence
  derived and/or modified CDS sequence (opt5) from hemagglutinin__InfluenzaB__AGX20976
augaaggccaucauugugcugcucauggucguuaccagcaacgcugacagaaucugcacaggcauuacguccucuaauagcccccacguggugaaaaccgccacacagggggaggucaacgugaccggaguuaucccucugacaaccacaccgaccaagucccauuucgcgaaucuuaaaggcacggaaacccgggggaagcugugucccaaaugccucaacuguacagaucuggacguggcucuuggacgcccuaagugcaccggcaagauucccucugccagagucagcauccugcacgaggugcggccuguuacauccggguguuuucccaucaugcaugaucgcaccaaaauuagacaacucccuaaucugcugcggggauacgaacacauccgccucucuacgcauaacgugauuaaugccgagaacgcuccgggcggccccuauaagaucgggacaagcggauccugcccuaaugucaccaacggcaauggguucuuugccacaauggcuugggccgugcccaaaaacgacaagaauaaaaccgcgaccaacccucugacaauugaagugcccuacaucuguacggagggagaggaucagauuaccgucuggggcuuccacagcgacaaugaaacacagauggccaaacuuuauggggauucuaagccgcagaaguuuaccuccagcgcuaacggaguuacaacccacuacgugucucaaaucggcggcuucccuaaccagacggaggacgggggacugccccaguccggcagaaucguggucgauuauauggugcaaaagagcgggaaaacaggaaccauuaccuaccagcggggcauccuccugccucagaagguuuggugcgccucugggcgcuccaaagugauuaagggaagccuuccccugaucggcgaagcugacugucuccaugagaaauauggcgggcugaauaaguccaagcccuacuacacaggagagcacgccaaagcgauuggcaacugcccuaucugggucaagaccccgcugaaacucgccaaugggacaaaguauagacccccugcuaaacugcuuaaggaacggggauuuuucggcgccaucgcuggguuucuggagggcggaugggaaggcaugauugccggguggcauggauacacgucucacggcgcccacgggguggcuguugcggccgaucucaagagcacccaggaggcuaucaacaaaauuacaaagaaucugaacucccuuagcgaacuggaggugaaaaaucuccagcgccugucuggagccauggacgagcugcauggcgaaauccucgagcuggaugaaaaggucgacgaccuuagagccgauaccauuuccagccaaaucgagcuggcugugcuccugucuaacgaagggaucauuaauagcgaggacgagcaccuucuggcccucgaacggaaacugaagaagaugcugggccccuccgcggucgagaucggaaacggcuguuucgaaacaaaacauaagugcaaucagaccugccucgaucgcauugcugccgggacguuugacgccggagaguucucucugccuaccuuugauagccuuaacaucacagcugccucccugaaugacgauggccucgacaaccacaccauucugcuguauuacagcacagcugccucuucccuugcggugacccucaugaucgccauuuucguuguguauauggucagcagagauaaugugucuuguuccaucugccuguga

SEQ ID NO: 219525 - RNA, 1758 nt, Artificial Sequence; identical to SEQ ID NO: 218680
  derived and/or modified CDS sequence (opt5) from hemagglutinin__InfluenzaB__AGX20987

SEQ ID NO: 219526 - RNA, 1758 nt, Artificial Sequence; identical to SEQ ID NO: 218755
  derived and/or modified CDS sequence (opt5) from hemagglutinin__InfluenzaB__AGX20998

SEQ ID NO: 219527 - RNA, 1758 nt, Artificial Sequence
  derived and/or modified CDS sequence (opt5) from hemagglutinin__InfluenzaB__AGX21009
augaaggccaucauugugcugcucauggucguuaccagcaacgcugacagaaucugcacaggcauuacguccucuaauagcccccacguggugaaaaccgccacacagggggaggucaacgugaccggaguuaucccucugacaaccacaccgaccaagucccauuucgcgaaucuuaaaggcacggaaacccgggggaagcugugucccaaaugcccuaacuguacagaucucgacguggcucugggacgccccaagugcaccggcaagauuccuucugccagagucagcauccuucacgaggugcggcccguuacauccggguguuuuccuaucaugcaugaucgcaccaaaauuagacaacugccgaaucuccugcggggauacgaacacauccgccugucuacgcauaacgugauuaaugccgagaacgcucccggcggcccuuauaagaucgggacaagcggauccugccccaaugucaccaacggcaauggguucuuugccacaauggcuugggccgugccuaaaaacgacaagaauaaaaccgcgaccaacccccucacaauugaagugccguacaucuguacggagggagaggaucagauuaccgucuggggcuuccacagcgacaaugaaacacagauggccaagcuguauggggauucuaagccucagaaauuuaccuccagcgcuaacggaguuacaacccacuacgugucucaaaucggcggcuuccccaaccagacggaggacgggggacuuccucaguccggcagaaucguggucgauuauauggugcaaaagagcgggaaaacaggaaccauuaccuaccagcggggcauccugcucccccagaagguuuggugcgccucugggcgcuccaaagugauuaagggaagccugccccuuaucggcgaagcugacugucugcaugagaaauauggcgggcucaauaaguccaagccuuacuacacaggagagcacgccaaagcgauuggcaacugcccgaucugggucaagacaccccugaaacuggccaaugggaccaaguauagaccucccgcuaaacuccugaaggaacggggauuuuucggcgccaucgcuggguuucuugagggcggaugggaaggcaugauugccggguggcauggauacacgucucacggcgcccacgggguggcuguugcggccgaucucaagagcacccaggaggcuaucaacaaaauuacaaagaaucugaacucccugagcgaacuugaggugaaaaaucugcagcgccucucuggagccauggacgagcugcauaacgaaauccuggagcucgaugaaaaggucgacgaccugagagccgauaccauuuccagccaaaucgagcuugcugugcugcucucuaaugaaggcaucauuaacagcgaggacgagcaucugcuugcccuggaacggaaacucaagaagaugcuggggccuuccgcggucgagaucggcaauggauguuucgaaacaaaacacaagugcaaccagaccugccuggaucgcauugcugccggcacguuugacgccggggaguucucucuccccaccuuugauagccugaauaucacagcugccucccuuaacgacgauggacuggacaaucacaccauucuccuguauuacagcacagcugccucuucccuggcggugacccuuaugaucgccauuuucguuguguauaugaucagcagagauaacgucucuuguuccaucugccucuga

SEQ ID NO: 219528 - RNA, 1758 nt, Artificial Sequence
  derived and/or modified CDS sequence (opt5) from hemagglutinin__InfluenzaB__AGX21020
augaaggccaucauugugcugcucauggucguuaccagcaacgcugacagaaucugcacaggcauuacguccucuaauagcccccacguggugaaaaccgccacacagggggaagucaacgugaccggaguuaucccucugacaaccacaccgaccaagucccauuucgcgaaucuuaaaggcacggaaacccgggggaagcugugucccaaaugccucaacuguacagaucuggacguggcucuuggacgcccuaagugcaccggcaagauucccucugccagagucagcauccugcacgaggugcggccuguuacauccggguguuuucccaucaugcaugaucgcaccaaaauuagacaacucccuaaucugcugcggggauacgaacacauccgccucucuacgcauaacgugauuaaugccgagaacgcuccgggcggccccuauaagaucgggacaagcggauccugcccuaaugucaccaacggcaauggguucuuugccacaauggcuugggccgugcccaaaaacgacaagaauaaaaccgcgaccaacccucugacaauugaagugcccuacaucuguacggagggagaggaucagauuaccgucuggggcuuccacagcgacaaugaaacacagauggccaaacuuuauggggauucugagccgcagaaguuuaccuccagcgcuaacggaguuacaacccacuacgugucucaaaucggcggcuucccuaaccagacggaagacgggggacugccccaguccggcagaaucguggucgauuauauggugcagaaaagcgggaagacaggaaccauuaccuaccaacggggcauccuccugccucagaaaguuuggugcgccucugggcgcuccaaggugauuaaaggaagccuuccccugaucggcgaggcugacugucuccaugagaaguauggcgggcugaauaaauccaagcccuacuacacaggagaacacgccaaggcgauuggcaacugcccuaucugggucaaaaccccgcugaagcucgccaaugggacaaaauauagacccccugcuaagcugcuuaaagagcggggauuuuucggcgccaucgcuggguuucuggaaggcggaugggagggcaugauugccggguggcauggauacacgucucacggcgcccacgggguggcuguugcggccgaucucaagagcacccaggaagcuaucaacaagauuacaaagaaucugaacucccuuagcgagcuggaggugaagaaucuccagcgccugucuggagccauggacgaacugcauaacgagauccucgaacuggaugagaaagucgacgaccuuagagccgauaccauuuccagccaaaucgaacuggcugugcuccugucuaaugagggcaucauuaacagcgaggacgaacaccuucuggcccucgagcggaagcugaaaaagaugcuggggcccuccgcggucgaaaucggcaauggauguuucgagacaaagcauaaaugcaaccagaccugccucgaucgcauugcugccggcacguuugacgccggggaguucucucugccuaccuuugauagccuuaauaucacagcugccucccugaacgacgauggacucgacaaucacaccauucugcuguauuacagcacagcugccucuucccuugcggugacccucaugaucgccauuuucguuguguauauggucagcagagauaacgugucuuguuccaucugccuguga

SEQ ID NO: 219529 - RNA, 1758 nt, Artificial Sequence; identical to SEQ ID NO: 218755
  derived and/or modified CDS sequence (opt5) from hemagglutinin__InfluenzaB__AGX21031

SEQ ID NO: 219530 - RNA, 1758 nt, Artificial Sequence
  derived and/or modified CDS sequence (opt5) from hemagglutinin__InfluenzaB__AGX21042
augaaggccaucauugugcugcucauggucguuaccagcaacgcugacagaaucugcacaggcauuacguccucuaauagcccccacguggugaaaaccgccacacagggggaggucaacgugaccggaguuaucccucugacaaccacaccgaccaagucccauuucgcgaaucuuaaaggcacggaaacccgggggaagcugugucccaaaugccucaacuguacagaucuggacguggcucuuggacgcccuaagugcaccggcaagauucccucugccagagucagcauccugcacgaggugcggccuguuacauccggguguuuucccaucaugcaugaucgcaccaaaauuagacaacucccuaaucugcugcggggauacgaacacauccgccucucuacgcauaacgugauuaauacagagaacgccccgggcggccccuauaagaucgggaccagcggauccugcccuaaugucacaaacggcaauggguucuuugcuaccauggccugggcugugcccaaaaacgacaagaauaaaaccgccacaaacccucugacgauugaagugcccuacaucuguaccgagggagaggaucagauuacagucuggggcuuccacagcgacaaugaaacccagauggcgaaacuuuauggggauucuaagccgcagaaguuuacauccagcgccaacggaguuaccacgcacuacgugucucaaaucggcggcuucccuaaccagacagaggacgggggacugccccaguccggcagaaucguggucgauuauauggugcaaaagagcgggaaaaccggaaccauuacauaccagcggggcauccuccugccucagaagguuuggugcgcuucugggcgcuccaaagugauuaagggaagccuuccccugaucggcgaagccgacugucuccaugagaaauauggcgggcugaauaaguccaagcccuacuacaccggagagcacgcuaaagccauuggcaacugcccuaucugggucaagacaccgcugaaacucgcgaaugggacgaaguauagacccccugccaaacugcuuaaggaacggggauuuuucggcgcuaucgccggguuucuggagggcggaugggaaggcaugauugcuggguggcauggauacaccucucacggcgcccacgggguggccguugcugcggaucucaagagcacacaggaggccaucaacaaaauuaccaagaaucugaacucccuuagcgaacuggaggugaaaaaucuccagcgccugucuggagcuauggacgagcugcauaacgaaauccucgagcuggaugaaaaggucgacgaccuuagagccgauacaauuuccagccaaaucgagcuggccgugcuccugucuaaugaaggcaucauuaacagcgaggacgagcaccuucuggcucucgaacggaaacugaagaagaugcuggggcccuccgccgucgagaucggcaauggauguuucgaaaccaaacauaagugcaaccagacgugccucgaucgcauugcggcuggcaccuuugacgccggggaguucucucugccuacauuugauagccuuaauaucaccgccgcuucccugaacgacgauggacucgacaaucacacaauucugcuguauuacagcaccgccgcuucuucccuugccgugacgcucaugaucgcgauuuucguuguguauauggucagcagagauaacgugucuuguuccaucugccuguga

SEQ ID NO: 219531 - RNA, 1758 nt, Artificial Sequence; identical to SEQ ID NO: 218717
  derived and/or modified CDS sequence (opt5) from hemagglutinin__InfluenzaB__AGX21053

SEQ ID NO: 219532 - RNA, 1758 nt, Artificial Sequence; identical to SEQ ID NO: 218680
  derived and/or modified CDS sequence (opt5) from hemagglutinin__InfluenzaB__AGX21064

SEQ ID NO: 219533 - RNA, 1758 nt, Artificial Sequence; identical to SEQ ID NO: 218717
  derived and/or modified CDS sequence (opt5) from hemagglutinin__InfluenzaB__AGX21075

SEQ ID NO: 219534 - RNA, 1758 nt, Artificial Sequence; identical to SEQ ID NO: 218717
  derived and/or modified CDS sequence (opt5) from hemagglutinin__InfluenzaB__AGX21084

SEQ ID NO: 219535 - RNA, 1758 nt, Artificial Sequence; identical to SEQ ID NO: 218717
  derived and/or modified CDS sequence (opt5) from hemagglutinin__InfluenzaB__AGX21095

SEQ ID NO: 219536 - RNA, 1758 nt, Artificial Sequence
  derived and/or modified CDS sequence (opt5) from hemagglutinin__InfluenzaB__AGX21106
augaaggccaucauugugcugcucauggucguuaccagcaacgcugacagaaucugcacaggcauuacguccucuaauagcccccacguggugaaaaccgccacacagggggaggucaacgugaccggaguuaucccucugacaaccacaccgaccaagucccauuucgcgaaucuuaaaggcacggaaacccgggggaagcugugucccaaaugcccuaacuguacagaucucgacguggcucugggacgccccaagugcaccggcaagauuccuucugccagagucagcauccuucacgaggugcggcccguuacauccggguguuuuccuaucaugcaugaucgcaccaaaauuagacaacugccgaaucuccugcggggauacgaacacauccgccugucuacgcauaacgugauuaaugccgagaacgcucccggcggcccuuauaagaucgggacaagcggauccugccccaaugucaccaacggcaauggguucuuugccacaauggcuugggccgugccuaaaaacgacaagaauaaaaccgcgaccaacccccucacaauugaagugccguacaucuguacggagggagaggaucagauuaccgucuggggcuuccacagcgacaaugaagcccagauggcuaagcuguauggggauucuaagccucagaaauuuacauccagcgccaacggaguuaccacacacuacgugucucaaaucggcggcuuccccaaccagaccgaggacgggggacuuccucaguccggcagaaucguggucgauuauauggugcaaaagagcgggaaaacgggaacaauuaccuaccagcggggcauccugcucccccagaagguuuggugcgcuucugggcgcuccaaagugauuaagggaagccugccccuuaucggcgaagccgacugucugcaugagaaauauggcgggcucaauaaguccaagccuuacuacaccggagagcacgcgaaagccauuggcaacugcccgaucugggucaagacaccccugaaacuggcuaaugggaccaaguauagaccucccgccaaacuccugaaggaacggggauuuuucggcgcuaucgccggguuucuugagggcggaugggaaggcaugauugccggguggcauggauacacaucucacggcgcucacgggguggcgguugccgcugaucucaagagcacgcaggaggccaucaacaaaauuaccaagaaucugaacucccugagcgaacuugaggugaaaaaucugcagcgccucucuggagccauggacgagcugcauaacgaaauccuggagcucgaugaaaaggucgacgaccugagagcugauacaauuuccagccaaaucgagcuugccgugcugcucucuaaugaaggcaucauuaacagcgaggacgagcaucugcuugcgcuggaacggaaacucaagaagaugcuggggccuuccgcugucgagaucggcaauggauguuucgaaaccaaacacaagugcaaccagacaugccuggaucgcauugccgccggcaccuuugacgcuggggaguucucucuccccacguuugauagccugaauaucaccgccgcuucccuuaacgacgauggacuggacaaucacacaauucuccuguauuacagcaccgccgcgucuucccuggccgugacacuuaugaucgcuauuuucguuguguauauggucagcagagauaacgugucuuguuccaucugccucuga

SEQ ID NO: 219537 - RNA, 1758 nt, Artificial Sequence; identical to SEQ ID NO: 218680
  derived and/or modified CDS sequence (opt5) from hemagglutinin__InfluenzaB__AGX21117

SEQ ID NO: 219538 - RNA, 1758 nt, Artificial Sequence; identical to SEQ ID NO: 219530
  derived and/or modified CDS sequence (opt5) from hemagglutinin__InfluenzaB__AGX21128

SEQ ID NO: 219539 - RNA, 1758 nt, Artificial Sequence
  derived and/or modified CDS sequence (opt5) from hemagglutinin__InfluenzaB__AGX21139
augaaggccaucauugugcugcucauggucguuaccagcaacgcugacagaaucugcacaggcauuacguccucuaauagcccccacguggugaaaaccgccacacagggggaggucaacgugaccggaguuaucccucugacaaccacaccgaccaagucccauuucgcgaaucuuaaaggcacggaaacccgggggaagcugugucccaaaugcccuaacuguacagaucucgacguggcucugggacgccccaagugcaccggcaagauuccuucugccagagucagcauccuucacgaggugcggcccguuacauccggguguuuuccuaucaugcaugaucgcaccaaaauuagacaacugccgaaucuccugcggggauacgaacacauccgccugucuacgcauaacgugauuaaugccgagaacgcucccggcggcccuuauaagaucgggacaagcggauccugccccaaugucaccaacggcaauggguucuuugccacaauggcuugggccgugccuaaaaacgacaagaauaaaaccgcgaccaacccccucacaauugaagugccguacaucuguacggagggagaggaucagauuaccgucuggggcuuccacagcgacaaugaaacacagauggccaagcuguauggggauucuaagccucagaaauuuaccuccagcgcuaacggaguuacaacccacuacgugucucaaaucggcgacuuccccaaccagacggaggauggcgggcuuccucaguccggaagaaucguggucgacuauauggugcaaaagagcggcaaaacagggaccauuaccuaccagcggggaauccugcucccccagaagguuuggugcgccucuggccgcuccaaagugauuaaggggagccugccccuuaucggagaagcugauugucugcaugagaaauauggcggccucaauaaguccaagccuuacuacacaggggagcacgccaaagcgauuggaaacugcccgaucugggucaagacaccccugaaacuggccaauggcaccaaguauagaccucccgcuaaacuccugaaggaacggggguuuuucggagccaucgcuggcuuucuugaagggggcugggagggaaugauugccggcuggcauggguacacgucucacggagcccacggcguggcuguugcggccgaccucaagagcacccaggaggcuaucaacaaaauuacaaagaaucugaacucccugagcgaacuugaggugaaaaaucugcagcgccucucuggggccauggaugagcugcauaacgaaauccuggagcucgacgaaaaggucgacgaucugagagccgacaccauuuccagccaaaucgagcuugcugugcugcucucuaaugaaggaaucauuaacagcgaggaugagcaucugcuugcccuggaacggaaacucaagaagaugcugggcccuuccgcggucgagaucgggaauggcuguuucgaaacaaaacacaagugcaaccagaccugccuggaccgcauugcugccggaacguuugaugccggcgaguucucucuccccaccuuugacagccugaauaucacagcugccucccuuaacgaugacgggcuggauaaucacaccauucuccuguauuacagcacagcugccucuucccuggcggugacccuuaugaucgccauuuucguuguguauauggucagcagagacaacgugucuuguuccaucugccucuga

SEQ ID NO: 219540 - RNA, 1758 nt, Artificial Sequence; identical to SEQ ID NO: 218755
  derived and/or modified CDS sequence (opt5) from hemagglutinin__InfluenzaB__AGX21150

SEQ ID NO: 219541 - RNA, 1758 nt, Artificial Sequence; identical to SEQ ID NO: 218680
  derived and/or modified CDS sequence (opt5) from hemagglutinin__InfluenzaB__AGX21161

SEQ ID NO: 219542 - RNA, 1758 nt, Artificial Sequence; identical to SEQ ID NO: 218755
  derived and/or modified CDS sequence (opt5) from hemagglutinin__InfluenzaB__AGX21172

SEQ ID NO: 219543 - RNA, 1758 nt, Artificial Sequence; identical to SEQ ID NO: 218717
  derived and/or modified CDS sequence (opt5) from hemagglutinin__InfluenzaB__AGX21183

SEQ ID NO: 219544 - RNA, 1758 nt, Artificial Sequence; identical to SEQ ID NO: 218755
  derived and/or modified CDS sequence (opt5) from hemagglutinin__InfluenzaB__AGX21194

SEQ ID NO: 219545 - RNA, 1758 nt, Artificial Sequence
  derived and/or modified CDS sequence (opt5) from hemagglutinin__InfluenzaB__AGX21205
augaaggccaucauugugcugcucauggucguuaccagcaacgcugacagaaucugcacaggcauuacguccucuaauagcccccacaucgugaaaaccgccacacagggggaagugaacgucaccggagugauuccucugacaaccacaccgaccaagucccauuucgcgaaucuuaaaggcacggaaacccgggggaagcugugucccaaaugccucaacuguacagaucuggacguugcucuuggacgcccuaagugcaccggcaagauccccucugccagagugagcauccugcacgagguccggccugugacauccggguguuuucccauuaugcaugaucgcaccaaaaucagacaacucccuaaucugcugcggggauacgaacacauucgccucucuacgcauaacguuaucaaugccaagaacgcuccgggcggccccuauaaaauugggacaagcggauccugcccuaauaucaccaacggcaauggguucuuugccacaauggcuugggccgugcccaagaacgacaaaaauaagaccgcgaccaacccucugacaauugagguccccuacaucuguacggaaggagaggaucagaucaccguguggggcuuccacagcgacaaugagacacagauggccaaacuuuauggggauucuaaaccgcagaaguuuaccuccagcgcuaacggagugacaacccacuacgucucucaaauuggcggcuucccuaaccagacggaagacgggggacugccccaguccggcagaaucguuguggauuauauggugcagaaaagcgggaagacaggaaccauuaccuaccaacggggcauccuccugccucagaaagucuggugcgccucugggcgcuccaaggugauuaaaggaagccuuccccugaucggcgaggcugacugucuccaugaaaaguauggcgggcugaauaaguccaaacccuacuacacaggagagcacgccaaggcgaucggcaacugcccuauuuggguuaaaaccccgcugaagcucgccaaugggacaaaauauagacccccugcuaagcugcuuaaggagcggggauuuuucggcgccaucgcuggguuucuggaaggcggaugggagggcaugauugccggguggcauggauacacgucucacggcgcccacgggguggcugucgcggccgaucucaaaagcacccaggaagcuaucaacaagauuacaaagaaucugaacucccuuagcgagcuggaagugaagaaucuccagcgccugucuggagccauggacgagcugcauaacgagauccucgaacuggaugagaaaguugacgaccuuagagccgauaccaucuccagccaaauugaacuggcugugcuccugucuaaugagggcaucauuaacagcgaagacgagcaccuucuggcccucgagcggaagcugaagaaaaugcuggggcccuccgcggucgaaaucggcaauggauguuucgagacaaagcauaaaugcaaccagaccugccucgaucgcauugcugccggcacguuugacgccggggaguucucucugccuaccuuugauagccuuaauaucacagcugccucccugaacgacgauggacucgacaaucacaccauucugcuguauuacagcacagcugccucuucccuugcggugacccucaugaucgccaucuucgucguguauaugguuagcagagauaacgugucuuguuccauuugccuguga

SEQ ID NO: 219546 - RNA, 1758 nt, Artificial Sequence; identical to SEQ ID NO: 218717
  derived and/or modified CDS sequence (opt5) from hemagglutinin__InfluenzaB__AGX21216

SEQ ID NO: 219547 - RNA, 1758 nt, Artificial Sequence; identical to SEQ ID NO: 218680
  derived and/or modified CDS sequence (opt5) from hemagglutinin__InfluenzaB__AGX21227

SEQ ID NO: 219548 - RNA, 1758 nt, Artificial Sequence
  derived and/or modified CDS sequence (opt5) from hemagglutinin__InfluenzaB__AGX21238
augaaggccaucauugugcugcucauggucguuaccagcaacgcugacagaaucugcacaggcauuacguccucuaauagcccccacguggugaaaaccgccacacagggggaggucaacgugaccggaguuaucccucugacaaccacaccgaccaagucccauuucgcgaaucuuaaaggcacggaaacccgggggaagcugugucccaaaugccucaacuguacagaucuggacguggcucuuggacgcccuaagugcaccggcaagauucccucugccagagucagcauccugcacgaggugcggccuguuacauccggguguuuucccaucaugcaugaucgcaccaaaauuagacaacucccuaaucugcugcggggauacgaacacauccgccucucuacgcauaacgugauuaaugccgagaacgcuccgggcggccccuauaagaucgggacaagcggauccugcccuaaugucaccaacggcaauggguucuuugccacaauggcuugggccgugcccaaaaacgacaagaauaaaaccgcgaccaacccucugacaauugaagugcccuacaucuguacggagggagaggaucagauuaccgucuggggcuuccacagcgacaaugaaacacagauggccaaacuuuauggggauucuaagccgcagaaguuuaccuccagcgcuaacggaguuacaacccacuacgugucucaaaucggcggcuucccuaaccagacggaggacgggggacugccccaguccggcagaaucguggucgauuauauggugcaaaagagcgggaaaacaggaaccauuaccuaccagcggggcauccuccugccucagaagguuuggugcgccaaugggcgcucuaaagugauuaagggaucccuuccccugaucggcgaagcugacugucuccaugagaaauauggcgggcugaacaagagcaagcccuacuacacaggagagcacgccaaagcgauuggcaauugcccuaucugggucaagaccccgcugaaacucgccaacgggacaaaguauagacccccugcuaaacugcuuaaggaacggggauuuuucggcgccaucgcuggguuucuggagggcggaugggaaggcaugauugccggguggcauggauacacgucccacggcgcccacgggguggcuguugcggccgaucucaagucuacccaggaggcuaucaauaaaauuacaaagaaccugaauagccuuuccgaacuggaggugaaaaaccuccagcgccugagcggagccauggacgagcugcauaaugaaauccucgagcuggaugaaaaggucgacgaccuuagagccgauaccauuucuucccaaaucgagcuggcugugcuccugagcaacgaaggcaucauuaauucugaggacgagcaccuucuggcccucgaacggaaacugaagaagaugcuggggcccagcgcggucgagaucggcaacggauguuucgaaacaaaacauaagugcaaucagaccugccucgaucgcauugcugccggcacguuugacgccggggaguucucccugccuaccuuugauucucuuaacaucacagcugccagccugaaugacgauggacucgacaaccacaccauucugcuguauuacuccacagcugccagcucucuugcggugacccucaugaucgccauuuucguuguguauaugaucuccagagauaacgucagcuguucuaucugccuguga

SEQ ID NO: 219549 - RNA, 1758 nt, Artificial Sequence; identical to SEQ ID NO: 218755
  derived and/or modified CDS sequence (opt5) from hemagglutinin__InfluenzaB__AGX21249

SEQ ID NO: 219550 - RNA, 1758 nt, Artificial Sequence
  derived and/or modified CDS sequence (opt5) from hemagglutinin__InfluenzaB__AGX21260
augaaggccaucauugugcugcucauggucguuaccagcaacgcugacagaaucugcacaggcauuacguccucuaauagcccccacguggugaaaaccgccacacagggggaggucaacgugaccggaguuaucccucugacaaccacaccgaccaagucccauuucgcgaaucuuaaaggcacggaaacccgggggaagcugugucccaaaugccucaacuguacagaucuggacguggcucuuggacgcccuaagugcaccggcaagauucccucugccagagucagcauccugcacgaggugcggccuguuacauccggguguuuucccaucaugcaugaucgcaccaaaauuagacaacucccuaaucugcugcggggauacgaacacauccgccucucuacgcauaacgugauuaaugccgagaacgcuccgggcggccccuauaagaucgggacaagcggauccugcccuaaugucaccaacggcaauggguucuuugccacaauggcuugggccgugcccaaaaacgacaagaauaaaaccgcgaccaacccucugacaauugaagugcccuacaucuguacggagggagaggaucagauuaccgucuggggcuuccacagcgacaaugaaacacagauggccaaacuuuauggggauucuaagccgcagaaauuuaccuccagcgcuaacggaguuacaacccacuacgugucucaaaucggcggcuucccuaaccagacggaggacgggggacugccccaguccggcagaaucguggucgauuauauggugcaaaagagcgggaaaacaggaaccauuaccuaccagcggggcauccuccugccucagcgcguuuggugcgccucugggagauccaaggugauuaaaggaagccuuccccugaucggcgaagcugacugucuccaugagaaguauggcgggcugaauaaauccaagcccuacuacacaggagagcacgccaaggcgauuggcaacugcccuaucugggucaaaaccccgcugaagcucgccaaugggacaaaauaucggcccccugcuaagcugcuuaaagaacgcggauuuuucggcgccaucgcuggguuucuggagggcggaugggaaggcaugauugccggguggcauggauacacgucucacggcgcccacgggguggcuguugcggccgaucucaagagcacccaggaggcuaucaacaagauuacaaagaaucugaacucccuuagcgaacuggaggugaagaaucuccagagacugucuggagccauggacgagcugcauaacgaaauccucgagcuggaugaaaaagucgacgaccuucgggccgauaccauuuccagccaaaucgagcuggcugugcuccugucuaaugaaggcaucauuaacagcgaggacgagcaccuucuggcccucgaacgcaagcugaaaaagaugcuggggcccuccgcggucgagaucggcaauggauguuucgaaacaaagcauaaaugcaaccagaccugccucgauagaauugcugccggcacguuugacgccggggaguucucucugccuaccuuugauagccuuaauaucacagcugccucccugaacgacgauggacucgacaaucacaccauucugcuguauuacagcacagcugccucuucccuugcggugacccucaugaucgccauuuucguuguguauauggucagccgggauaacgugucuuguuccaucugccuguga

SEQ ID NO: 219551 - RNA, 1758 nt, Artificial Sequence; identical to SEQ ID NO: 218680
  derived and/or modified CDS sequence (opt5) from hemagglutinin__InfluenzaB__AGX21271

SEQ ID NO: 219552 - RNA, 1758 nt, Artificial Sequence
  derived and/or modified CDS sequence (opt5) from hemagglutinin__InfluenzaB__AGX21282
augaaggccaucauugugcugcucauggucguuaccagcaacgcugacagaaucugcacaggcauuacguccucuaauagcccccacaucgugaaaaccgccacacagggggaagugaacgucaccggagugauuccucugacaaccuccccgacaaagucucauuucgcgaaucuuaaaggcaccgaaacgcgggggaagcugugucccaaaugccucaacuguaccgaucuggacguugcucuuggacgcccuaagugcacaggcaagauccccagcgccagaguguccauccugcacgagguccggccugugaccucuggguguuuucccauuaugcaugaucgcacaaaaaucagacaacucccuaaucugcugcggggauacgaacacauucgccucagcacccauaacguuaucaaugccaagaacgcuccgggcggccccuauaaaauugggacguccggaagcugcccuaauaucacaaacggcaauggguucuuugccaccauggcuugggccgugcccaagaacgacaaaaauaagacagcgaccaacccucugaccauugagguccccuacaucuguacagaaggagaggaucagaucacgguguggggcuuccacucugacaaugagacccagauggccaaacuuuauggggauuccaagccgcagaaguuuacaagcucugcuaacggagugaccacacacuacgucucccaaauuggcggcuucccuaaccagaccgaagacgggggacugccccagagcggcagaaucguuguggauuauauggugcagaaaucugggaagacgggaacaauuaccuaccaacggggcauccuccugccucagaaagucuggugcgccuccgggcgcagcaaggugauuaaaggaucccuuccccugaucggcgaggcugacugucuccaugaaaaguauggcgggcugaauaagucuaaacccuacuacaccggagagcacgccaaggcgaucggcaacugcccuauuuggguuaaaacaccgcugaagcucgccaaugggaccaaauauagacccccugcuaagcugcuuaaggagcggggauuuuucggcgccaucgcuggguuucuggaaggcggaugggagggcaugauugccggguggcauggauacacaagccacggcgcccacgggguggcugucgcggccgaucucaaauccacgcaggaagcuaucaacaagauuaccaaaaaucugaacagccuuucugagcuggaagugaagaaucuccagcgccuguccggagccauggacgagcugcauaacgagauccucgaacuggaugagaaaguugacgaccuuagagccgauacaaucagcucucaaauugaacuggcugugcuccugagcaaugagggcaucauuaacuccgaagacgagcaccuucuggcccucgagcggaagcugaagaaaaugcuggggcccucugcggucgaaaucggcaauggauguuucgagaccaagcauaaaugcaaccagacaugccucgaucgcauugcugccggcaccuuugacgccggggaguucagccugccuacguuugauucccuuaauaucaccgcugccagccugaacgacgauggacucgacaaucacacaauucugcuguauuacucuaccgcugccuccagccuugcggugacacucaugaucgccaucuucgucguguauaugguuucuagagauaacguguccuguagcauuugccuguga

SEQ ID NO: 219553 - RNA, 1758 nt, Artificial Sequence; identical to SEQ ID NO: 218717
  derived and/or modified CDS sequence (opt5) from hemagglutinin__InfluenzaB__AGX21293

SEQ ID NO: 219554 - RNA, 1758 nt, Artificial Sequence; identical to SEQ ID NO: 218755
  derived and/or modified CDS sequence (opt5) from hemagglutinin__InfluenzaB__AGX21304

SEQ ID NO: 219555 - RNA, 1758 nt, Artificial Sequence; identical to SEQ ID NO: 218717
  derived and/or modified CDS sequence (opt5) from hemagglutinin__InfluenzaB__AGX21315

SEQ ID NO: 219556 - RNA, 1758 nt, Artificial Sequence; identical to SEQ ID NO: 218680
  derived and/or modified CDS sequence (opt5) from hemagglutinin__InfluenzaB__AGX21326

SEQ ID NO: 219557 - RNA, 1758 nt, Artificial Sequence
  derived and/or modified CDS sequence (opt5) from hemagglutinin__InfluenzaB__AGX21337
augaaggccaucauugugcugcucauggucguuaccagcaacgcugacagaaucugcacaggcauuacguccucuaauagcccccacguggugaaaaccgccacacagggggaggucaacgugaccggaguuaucccucugacaaccacaccgaccaagucccauuucgcgaaucuuaaaggcacggaaacccgggggaagcugugucccaaaugcccuaacuguacagaucucgacguggcucugggacgccccaagugcaccggcaagauuccuucugccagagucagcauccuucacgaggugcggcccguuacauccggguguuuuccuaucaugcaugaucgcaccaaaauuagacaacugccgaaucuccugcggggauacgaacacauccgccugucuacgcauaacgugauuaaugccgagaacgcucccggcggcccuuauaagaucgggacaagcggauccugccccaaugucaccaacggcaauggguucuuugccacaauggcuugggccgugccuaaaaacgacaagaauaaaaccgcgaccaacccccucacaauugaagugccguacaucuguacggagggagaggaucagauuaccgucuggggcuuccacagcgacaaggaaacacagauggccaagcuguauggggauucuaaaccucagaaguuuaccuccagcgcuaauggaguuacaacccacuacgugucucaaaucggcggcuuccccaaccagacggaggacgggggacuuccucaguccggcagaaucguggucgauuauauggugcagaaaagcgggaagacaggaaccauuaccuaccaacggggcauccugcucccccagaaaguuuggugcgccucugggcgcuccaaggugauuaaaggaagccugccccuuaucggcgaagcugacugucugcaugagaaguauggcgggcucaacaaguccaaaccuuacuacacaggagagcacgccaaggcgauuggcaauugcccgaucugggucaaaacaccccugaagcuggccaacgggacaaaauauagaccucccgcuaagcuccugaaggaacggggauuuuucggcgccaucgcuggguuucuugagggcggaugggaaggcaugauugccggguggcauggauacacgucucacggcgcccacgggguggcuguugcggccgaucugaaaagcacccaggaggcuaucaauaagauuaccaaaaaccucaauucccugagcgaacuugaggugaagaaccugcagcgccucucuggagccauggacgagcugcauaaugaaauccuggagcucgaugaaaaagucgacgaccugagagccgauaccauuuccagccaaaucgagcuugcugugcugcucucuaacgaaggcaucauuaauagcgaggacgagcaucugcuugcccuggaacggaagcucaagaaaaugcuggggccuuccgcggucgagaucggcaacggauguuucgaaacaaagcacaaaugcaaucagaccugccuggaucgcauugcugccggcacguuugacgccggggaguucucucuccccaccuuugauagccugaacaucacagcugccucccuuaaugacgauggacuggacaaccacaccauucuccuguauuacagcacagcugccucuucccuggcggugacccuuaugaucgccauuuucguuguguauauggucagcagagauaaugugucuuguuccaucugccucuga

SEQ ID NO: 219558 - RNA, 1758 nt, Artificial Sequence; identical to SEQ ID NO: 218717
  derived and/or modified CDS sequence (opt5) from hemagglutinin__InfluenzaB__AGX21348

SEQ ID NO: 219559 - RNA, 1758 nt, Artificial Sequence; identical to SEQ ID NO: 218717
  derived and/or modified CDS sequence (opt5) from hemagglutinin__InfluenzaB__AGX21359

SEQ ID NO: 219560 - RNA, 1758 nt, Artificial Sequence
  derived and/or modified CDS sequence (opt5) from hemagglutinin__InfluenzaB__AGX21370
augaaggccaucauugugcugcucauggucguuaccagcaacgcugacagaaucugcacaggcauuacguccucuaauagcccccacguggugaaaaccgccacacagggggaggucaacgugaccggaguuaucccucugacaaccacaccgaccaagucccauuucgcgaaucuuaaaggcacggaaacccgggggaagcugugucccaaaugcccuaacuguacagaucucgacguggcucugggacgccccaagugcaugggcaagauuccuucugccagagucagcauccuucacgaggugcggcccguuaccuccggguguuuuccuaucaugcaugaucgcacaaaaauuagacaacugccgaaucuccugcggggauacgaacacauccgccugucuacccauaacgugauuaaugccgagaacgcucccggcggcccuuauaagaucgggacgagcggauccugccccaaugucacaaacggcaauggguucuuugccaccauggcuugggccgugccuaaaaacgacaagaauaaaacagcgaccaacccccucaccauugaagugccguacaucuguacagagggagaggaucagauuacggucuggggcuuccacagcgacaaugaaacccagauggccaagcuguauggggauucuaagccucagaaauuuacauccagcgcuaacggaguuaccacacacuacgugucucaaaucggcggcuuccccaaccagaccgaggacgggggacuuccucaguccggcagaaucguggucgauuauauggugcaaaagagcgggaaaacgggaacaauuaccuaccagcggggcauccugcucccccagaagguuuggugcgccucugggcgcuccaaagugauuaagggaagccugccccuuaucggcgaagcugacugucugcaugagaaauauggcgggcucaauaaguccaagccuuacuacaccggagagcacgccaaagcgauuggcaacugcccgaucugggucaagacaccccugaaacuggccaaugggaccaaguauagaccucccgcuaaacuccugaaggaacggggauuuuucggcgccaucgcuggguuucuugagggcggaugggaaggcaugauugccggguggcauggauacacaucucacggcgcccacgggguggcuguugcggccgaucucaagagcacgcaggaggcuaucaacaaaauuaccaagaaucugaacucccugagcgaacuugaggugaaaaaucugcagcgccucucuggagccauggacgagcugcauaacgaaauccuggagcucgaugaaaaggucgacgaccugagagccgauacaauuuccagccaaaucgagcuugcugugcugcucucuaaugaaggcaucauuaacagcgaggacgagcaucugcuugcccuggaacggaaacucaagaagaugcuggggccuuccgcggucgagaucggcaauggauguuucgaaaccaaacacaagugcaaccagacaugccuggaucgcauugcugccggcaccuuugacgccggggaguucucucuccccacguuugauagccugaauaucaccgcugccucccuuaacgacgauggacuggacaaucacacaauucuccuguauuacagcaccgcugccucuucccuggcggugacacuuaugaucgccauuuucguuguguauauggucagcagagauaacgugucuuguuccaucugccucuga

SEQ ID NO: 219561 - RNA, 1758 nt, Artificial Sequence
  derived and/or modified CDS sequence (opt5) from hemagglutinin__InfluenzaB__AGX21381
augaaggccaucauugugcugcucauggucguuaccagcaacgcugacagaaucugcacaggcauuacguccucuaauagcccccacaucgugaaaaccgccacacagggggaggugaacgucaccggagugauuccucugacaaccacaccgaccaagucccauuucgcgaaucuuaaaggcacggaaacccgggggaagcugugucccaaaugccucaacuguacagaucuggacguugcucuuggacgcccuaagugcaccggcaagauccccucugccagagugagcauccugcacgagguccggccugugacauccggguguuuucccauuaugcaugaucgcaccaaaaucagacaacucccuaaucugcugcggggauacgaacacauucgccucucuacgcauaacguuaucaaugccgagaacgcuccgggcggccccuauaagauugggacaagcggauccugcccuaauaucaccaacggcaauggguucuuugccacaauggcuugggccgugcccaaaaacgacaagaauaaaaccgcgaccaacccucugacaauugaaguccccuacaucuguacggagggagaggaucagaucaccguguggggcuuccacagcgacaaugaaacacagauggccaaacuuuauggggauucuaagccgcagaaguuuaccuccagcgcuaacggagugacaacccacuacauuucucaaaucggcggcuucccuaaccagacggaggacgggggacugccccaguccggcagaauugucguugauuauauggugcaaaagagcgggaaaacaggaaccaucaccuaccagcggggcauucuccugccucagaagguguggugcgccucugggcgcuccaaagucaucaagggaagccuuccccugaucggcgaagcugacugucuccaugagaaauauggcgggcugaauaaguccaagcccuacuacacaggagagcacgccaaagcgauuggcaacugcccuaucugggugaagaccccgcugaaacucgccaaugggacaaaguauagacccccugcuaaacugcuuaaggaacggggauuuuucggcgccauugcuggguuucuggagggcggaugggaaggcaugaucgccggguggcauggauacacgucucacggcgcccacgggguugcuguggcggccgaucucaagagcacccaggaggcuauuaacaaaaucacaaagaaucugaacucccuuagcgaacuggaggucaaaaaucuccagcgccugucuggagccauggacgagcugcauaacgaaauccucgagcuggaugaaaagguggacgaccuuagagccgauaccauuuccagccaaaucgagcuggcuguucuccugucuaaugaaggcauuaucaacagcgaggacgagcaccuucuggcccucgaacggaaacugaagaagaugcuggggcccuccgcgguggagauuggcaauggauguuucgaaacaaaacauaagugcaaccagaccugccucgaucgcaucgcugccggcacguuugacgccggggaguucucucugccuaccuuugauagccuuaauauuacagcugccucccugaacgacgauggacucgacaaucacaccauccugcuguauuacagcacagcugccucuucccuugcggucacccucaugaucgccauuuucguggucuauauggugagcagagauaacguuucuuguuccaucugccuguga

SEQ ID NO: 219562 - RNA, 1758 nt, Artificial Sequence
  derived and/or modified CDS sequence (opt5) from hemagglutinin__InfluenzaB__AGX21392
augaaggccaucauugugcugcucauggucguuaccagcaacgcugacagaaucugcacaggcauuacguccucuaauagcccccacaucgugaaaaccgccacacagggggaggugaacgucaccggagugauuccucugacaaccacaccgaccaagucccauuucgcgaaucuuaaaggcacggaaacccgggggaagcugugucccaaaugccucaacuguacagaucuggacguugcucuuggacgcccuaagugcaccggcaagauccccucugccagagugagcauccugcacgagguccggccugugacauccggguguuuucccauuaugcaugaucgcaccaaaaucagacaacucccuaaucugcugcggggauacgaacacauucgccucucuacgcauaacguuaucaaugccgagaacgcuccgggcggccccuauaagauugggacaagcggauccugcccuaauaucaccaacggcaauggguucuuugccacaauggcuugggccgugcccaaaaacgacaagaauaaaaccgcgaccaacccucugacaauugaaguccccuacaucuguacggagggagaggaucagaucaccguguggggcuuccacagcgacaaugaagcccagauggcuaaacuuuauggggauucuaagccgcagaaguuuacauccagcgccaacggagugaccacacacuacgucucucaaauuggcggcuucccuaaccagaccgaggacgggggacugccccaguccggcagaaucguuguggauuauauggugcaaaagagcgggaaaacgggaacaauuaccuaccagcggggcauccuccugccucagaaggucuggugcgcuucugggcgcuccaaagugauuaagggaagccuuccccugaucggcgaagccgacugucuccaugagaaauauggcgggcugaauaaguccaagcccuacuacaccggagagcacgcgaaagccaucggcaacugcccuauuuggguuaagacaccgcugaaacucgcuaaugggaccaaguauagacccccugccaaacugcuuaaggaacggggauuuuucggcgcuaucgccggguuucuggagggcggaugggaaggcaugauugccggguggcauggauacacaucucacggcgcucacgggguggcggucgccgcugaucucaagagcacgcaggaggccaucaacaaaauuaccaagaaucugaacucccuuagcgaacuggaggugaaaaaucuccagcgccugucuggagccauggacgagcugcauaacgaaauccucgagcuggaugaaaagguugacgaccuuagagcugauacaaucuccagccaaauugagcuggccgugcuccugucuaaugaaggcaucauuaacagcgaggacgagcaccuucuggcgcucgaacggaaacugaagaagaugcuggggcccuccgcugucgagaucggcaauggauguuucgaaaccaaacauaagugcaaccagacaugccucgaucgcauugccgccggcaccuuugacgcuggggaguucucucugccuacguuugauagccuuaauaucaccgccgcuucccugaacgacgauggacucgacaaucacacaauucugcuguauuacagcaccgccgcgucuucccuugccgugacacucaugaucgcuaucuucgucguguauaugguuagcagagauaacgugucuuguuccauuugccuguga

SEQ ID NO: 219563 - RNA, 1758 nt, Artificial Sequence
  derived and/or modified CDS sequence (opt5) from hemagglutinin__InfluenzaB__AGX21403
augaaggccaucauugugcugcucauggucguuaccagcaacgcugacagaaucugcacaggcauuacguccucuaauagcccccacguggugaaaaccgccacacagggggaggucaacgugaccggaguuaucccucugacaaccacaccgaccaagucccauuucgcgaaucuuaaaggcacggaaacccgggggaagcugugucccaaaugcccuaacuguacagaucucgacguggcucugggacgccccaagugcaccggcaagauuccuucugccagagucagcauccuucacgaggugcggcccguuacauccggguguuuuccuaucaugcaugaucgcaccaaaauuagacaacugccgaaucuccugcggggauacgaacacauccgccugucuacgcauaacgugauuaaugccgagaacgcucccggcggcccuuauaagaucgggacaagcggauccugccccaaugucaccaacggcaauggguucuuugccacaauggcuugggccgugccuaaaaacgacaagaauaaaaccgcgaccaacccccucacaauugaagugccguacaucuguacggagggagaggaucagauuaccgucuggggcuuccacagcgacaaugaaacacagauggccaagcuguauggggauucuaagccucagaaauuuaccuccagcgcuaacggaguuacaacccacuacgugucucaaaucggcggcuuccccaaccagacggaggacgggggacuuccucaguccggcagaaucguggucgauuauauggugcaaaagagcgggaaaacaggaaccauuaccuaccagcggggcauccugcucccccagaagguuuggugcgccucugggcgcuccaaagugauuaagggaagccugccccuuaucggcgaagcugacugucugcaugagaaauauggcgggcucaauaaguccaagccuuacuacacaggagagcacgccaaagcgauuggcaacugcccgaucugggucaagacaccccugaaacuggccaaugggaccaaguauagaccucccgcuaaacuccugaaggaacggggauuuuucggcgccaucgcuggguuucuugagggcggaugggaaggcaugauugccggguggcauggauacacgucucacggcgcccacgggguggcuguugcggccgaucucaagagcacccaggaggcuaucaacaaaauuacaaagaaucugaacucccugagcgaacuugaggugaaaaaucugcagcgccucucuggagccauggacgagcugcauaacgaaauccuggagcucgaugaaaaggucgacgaccugagagccgauaccauuuccagccaaaucgagcuugcugugcugcucucuaaugaaggcaucauuaacagcgaggacgagcaucugcuugcccuggaacggaaacucaagaagaugcuggggccuuccgcggucgagaucggcaauggauguuucgaaacaaaacacaagugcaaccagaccugccugaaucgcauugcugccggcacguuugaugccggggaguucucucuccccaccuuugacagccugaacaucacagcugccucccuuaaugaugacggacuggauaaccacaccauucuccuguauuacagcacagcugccucuucccuggcggugacccuuaugaucgccauuuucguuguguauauggucagcagagacaacgugucuuguuccaucugccucuga

SEQ ID NO: 219564 - RNA, 1758 nt, Artificial Sequence
  derived and/or modified CDS sequence (opt5) from hemagglutinin__InfluenzaB__AGX21414
augaaggccaucauugugcugcucauggucguuaccagcaacgcugacagaaucugcacaggcauuacguccucuaauagcccccacguggugaaaaccgccacacagggggaggucaacgugaccggaguuaucccucugacaaccacaccgaccaagucccauuucgcgaaucuuaaaggcacggaaacccgggggaagcugugucccaaaugcccuaacuguacagaucucgacguggcucugggacgccccaagugcaccggcaagauuccuucugccagagucagcauccuucacgaggugcggcccguuacauccggguguuuuccuaucaugcaugaucgcaccaaaauuagacaacugccgaaucuccugcggggauacgaacacauccgccugucuacgcauaacgugauuaaugccgagaacgcucccggcggcccuuauaagaucgggacaagcggauccugccccaaugucaccaacggcaauggguucuuugccacaauggcuugggccgugccuaaaaacgacaagaauaaaaccgcgaccgauccccucacaauugaagugccguacaucuguacggagggagaggaccagauuaccgucuggggcuuccacagcgauaacgaaacacagauggccaagcuguauggggacucuaagccucagaaauuuaccuccagcucuaauggaguuacaacccacuacgugucccaaaucggcggcuuccccaaccagacggaggaugggggacuuccucagagcggcagaaucguggucgacuauauggugcagaagucugggaaaacaggaaccauuaccuaccaacggggcauccugcucccccagaagguuuggugcgcuuccgggcgcagcaaagugauuaagggaucccugccccuuaucggcgaagccgauugucugcaugagaaauauggcgggcucaacaagucuaagccuuacuacacaggagagcacgcuaaagccauuggcaauugcccgaucugggucaagacaccccugaaacuggcgaacgggaccaaguauagaccucccgccaaacuccugaaggaacggggauuuuucggcgcuaucgccggguuucuugagggcggaugggaaggcaugauugcuggguggcauggauacacgagccacggcgcccacgggguggccguugcugcggaccugaaguccacccaggaggccaucaauaaaauuacaaagaaccucaauagccugucugaacuugaggugaaaaaccugcagcgccucuccggagcuauggaugagcugcauaaugaaauccuggagcucgacgaaaaggucgacgaucugagagccgacaccauuagcucucaaaucgagcuugccgugcugcucagcaacgaaggcaucauuaauuccgaggaugagcaucugcuugcucuggaacggaaacucaagaagaugcuggggccuucugccgucgagaucggcaacggauguuucgaaacaaaacacaagugcaaucagaccugccuggaccgcauugcggcuggcacguuugaugccggggaguucagccuccccaccuuugacucccugaacaucacagccgcuagccuuaaugaugacggacuggauaaccacaccauucuccuguauuacucuacagccgcuuccagccuggccgugacccuuaugaucgcgauuuucguuguguauauggucucuagagacaauguguccuguagcaucugccucuga

SEQ ID NO: 219565 - RNA, 1758 nt, Artificial Sequence; identical to SEQ ID NO: 218680
  derived and/or modified CDS sequence (opt5) from hemagglutinin__InfluenzaB__AGX21425

SEQ ID NO: 219566 - RNA, 1758 nt, Artificial Sequence
  derived and/or modified CDS sequence (opt5) from hemagglutinin__InfluenzaB__AGX21436
augaaggccaucauugugcugcucauggucguuaccagcaacgcugacagaaucugcacaggcauuacguccucuaauagcccccacaucgugaaaaccgccacacagggggaggugaacgucaccggagugauuccucugacaaccacaccgaccaagucccauuucgcgaaucuuaaaggcacggaaacccgggggaagcugugucccaaaugccucaacuguacagaucuggacguugcucuuggacgcccuaagugcaccggcaagauccccucugccagagugagcauccugcacgagguccggccugugacauccggguguuuucccauuaugcaugaucgcaccaaaaucagacaacucccuaaucugcugcggggauacgaacacauucgccucucuacgcauaacguuaucaaugccgagaacgcuccgggcggccccuauaagauugggacaagcggauccugcccuaauaucaccaacggcaauggguucuuugccacaauggcuugggccgugcccaaaaacgacaagaauaaaaccgcgaccaacccucugacaauugaaguccccuacaucuguacggagggagaggaucagaucaccguguggggcuuccacagcgacaaugaaacacagauggccaaacuuuauggggauucuaagccgcagaaguuuaccuccagcgcuaacggagugacaacccacuacgucucucaaauuggcggcuucccuaaccagacggaggacgggggacugccccaguccggcagaaucguuguggauuauauggugcaaaagagcgggaaaacaggaaccauuaccuaccagcggggcauccuccugccucagaaggucuggugcgccucugggcgcuccaaagugauuaagggaagccuuccccugaucggcgaagcugacugucuccaugagaaauauggcgggcugaauaaguccaagcccuacuacacaggagagcacgccaaagcgaucggcaacugcccuauuuggguuaagaccccgcugaaacucgccaaugggacaaaguauagacccccugcuaaacugcuuaaggaacggggauuuuucggcgccaucgcuggguuucuggagggcggaugggaaggcaugauugccggguggcauggauacacgucucacggcgcccacgggguggcugucgcggccgaucucaagagcacccaggaggcuaucaacaaaauuacaaagaaucugaacucccuuagcgaacuggaggugaaaaaucuccagcgccugucuggagccauggacgagcugcauaacgaaauccucgagcuggaugaaaagguugacgaccuuagagccgauaccaucuccagccaaauugagcuggcugugcuccugucuaaugaaggcaucauuaacagcgaggacgagcaccuucuggcccucgaacggaaacugaagaagaugcuggggcccuccgcggucgagaucggcaauggauguuucgaaacaaaacauaagugcaaccagaccugccucgaucgcauugcugccggcacguuugacgccggggaguucucucugccuaccuuugauagccuuaauaucacagcugccucccugaacgacgauggacucgacaaucacaccauucugcuguauuacagcacaguggcuucuucccuugccgucacccucaugaucgcgaucuucgugguuuauauggugagcagagauaacgucucuuguuccauuugccuguga

SEQ ID NO: 219567 - RNA, 1758 nt, Artificial Sequence; identical to SEQ ID NO: 218755
  derived and/or modified CDS sequence (opt5) from hemagglutinin__InfluenzaB__AGX21447

SEQ ID NO: 219568 - RNA, 1758 nt, Artificial Sequence; identical to SEQ ID NO: 218680
  derived and/or modified CDS sequence (opt5) from hemagglutinin__InfluenzaB__AGX21458

SEQ ID NO: 219569 - RNA, 1758 nt, Artificial Sequence; identical to SEQ ID NO: 218680
  derived and/or modified CDS sequence (opt5) from hemagglutinin__InfluenzaB__AGX21469

SEQ ID NO: 219570 - RNA, 1758 nt, Artificial Sequence
  derived and/or modified CDS sequence (opt5) from hemagglutinin__InfluenzaB__AGX21480
augaaggccaucauugugcugcucauggucguuaccagcaacgcugacagaaucugcacaggcauuacguccucuaauagcccccacguggugaaaaccgccacacagggggaggucaacgugaccggaguuaucccucugacaaccacaccgaccaagucccauuucgcgaaucuuaaaggcacggaaacccgggggaagcugugucccaaaugccucaacuguacagaucuggacguggcucuuggacgcccuaagugcaccggcaagauucccucugccagagucagcauccugcacgaggugcggccuguuacauccggguguuuucccaucaugcaugaucgcaccaaaauuagacaacucccuaaucugcugcggggauacgaacacauccgccucucuacgcauaacgugauuaaugccgagaacgcuccgggcggccccuauaagaucgggacaagcggauccugcccuaaugucaccaacggcaauggguucuuugccacaauggcuugggccgugcccaaaaacgacaagaauaaaaccgcgaccaacccucugacaauugaagugcccuacaucuguacggagggagaggaucagauuaccgucuggggcuuccacagcgacaaugaaacacagauggccaaacuuuauggggauucuaagccgcagaaguuuaccuccagcgcuaacggaguuacaacccacuacgugucucaaaucggcggcuucccuaaccagacggaggacgggggacugccccaguccggcagaaucguggucgauuauauggugcaaaagagcgggaaaacaggaaccauuaccuaccagcggggcauccuccugccucagaagguuuggugcgccucugggcgcuccaaagugauuaagggaagccuuccccugaucggcgaagcugacugucuccaugagaaauauggcgggcugaauaaguccaagcccuacuacacaggagagcacgccaaagcgauuggcaacugcccuaucugggucaagaccccgcugaaacucgccaaugggacaaaguauagacccccugcuaaacugcuuaaggaacggggauuuuucggcgccaucgcuggguuucuggagggcggaugggaaggcaugauugccggguggcauggauacacgucucacggcgcccacgggguggcuguugcggccgaucucaagagcacccaggaggcuaucaacaaaauuacaaagaaucugaacucccuuagcgaacuggaggugaaaaaucuccagcgccugucuggagccauggacgagcugcauaacgaaauccucgagcuggaugaaaaggucgacgaccuuagagccgauaccauuuccagccaaaucgagcuggcugugcuccugucuaaugaaggcaucauuaacagcgaggacgagcaccuucuggcccucgaacggaaacugaagaagaugcuggggcccuccgcggucgagaucggcaauggauguuucgaaacaaaacauaagugcaaccagaccugccucgaucgcauugcugccggcacguuugacgccggggaguucucucugccuaccuuugauagccuuaauaucacagcugccucccugaacgaagacggacucgauaaucacaccauucugcuguauuacagcacagcugccucuucccuugcggugacccucaugaucgccauuuucguuguguauauggucagcagagacaacgugucuuguuccaucugccuguga

SEQ ID NO: 219571 - RNA, 1758 nt, Artificial Sequence; identical to SEQ ID NO: 218755
  derived and/or modified CDS sequence (opt5) from hemagglutinin__InfluenzaB__AGX21491

SEQ ID NO: 219572 - RNA, 1758 nt, Artificial Sequence; identical to SEQ ID NO: 218755
  derived and/or modified CDS sequence (opt5) from hemagglutinin__InfluenzaB__AGX21502

SEQ ID NO: 219573 - RNA, 1758 nt, Artificial Sequence; identical to SEQ ID NO: 218680
  derived and/or modified CDS sequence (opt5) from hemagglutinin__InfluenzaB__AGX21513

SEQ ID NO: 219574 - RNA, 1758 nt, Artificial Sequence; identical to SEQ ID NO: 218717
  derived and/or modified CDS sequence (opt5) from hemagglutinin__InfluenzaB__AGX21524

SEQ ID NO: 219575 - RNA, 1758 nt, Artificial Sequence
  derived and/or modified CDS sequence (opt5) from hemagglutinin__InfluenzaB__AGX21535
augaaggccaucauugugcugcucauggucguuaccagcaacgcugacagaaucugcacaggcauuacguccucuaauagcccccacaucgugaaaaccgccacacagggggaggugaacgucaccggagugauuccucugacaaccacaccgaccaagucccauuucgcgaaucuuaaaggcacggaaacccgggggaagcugugucccaaaugccucaacuguacagaucuggacguugcucuuggacgcccuaagugcaccggcaagauccccucugccagagugagcauccugcacgagguccggccugugacauccggguguuuucccauuaugcaugaucgcaccaaaaucagacaacucccuaaucugcugcggggauacgaacacauucgccucucuacgcauaacguuaucaaugccgagaacgcuccgggcggccccuauaagauugggacaagcggauccugcccuaauaucaccaacggcaauggguucuuugccacaauggcuugggccgugcccaaaaacgacaagaauaaaaccgcgaccaacccucugacaauugaaguccccuacaucuguacggagggagaggaucagaucaccguguggggcuuccacagcgacucugaaacacagauggccaaacuuuauggggauuccaagccgcagaaguuuaccagcucugcuaauggagugacaacccacuacgucucccaaauuggcggcuucccuaaccagacggaggacgggggacugccccagagcggcagaaucguuguggauuauauggugcagaagucugggaaaacaggaaccauuaccuaccaacggggcauccuccugccucagaaggucuggugcgccuccgggcgcagcaaagugauuaagggaucccuuccccugaucggcgaagcugacugucuccaugagaaauauggcgggcugaacaagucuaagcccuacuacacaggagagcacgccaaagcgaucggcaauugcccuauuuggguuaagaccccgcugaaacucgccaacgggacaaaguauagacccccugcuaaacugcuuaaggaacggggauuuuucggcgccaucgcuggguuucuggagggcggaugggaaggcaugauugccggguggcauggauacacgagccacggcgcccacgggguggcugucgcggccgaucucaaguccacccaggaggcuaucaauaaaauuacaaagaaccugaauagccuuucugaacuggaggugaaaaaccuccagcgccuguccggagccauggacgagcugcauaaugaaauccucgagcuggaugaaaagguugacgaccuuagagccgauaccaucagcucucaaauugagcuggcugugcuccugagcaacgaaggcaucauuaauuccgaggacgagcaccuucuggcccucgaacggaaacugaagaagaugcuggggcccucugcggucgagaucggcaacggauguuucgaaacaaaacauaagugcaaucagaccugccucgaucgcauugcugccggcacguuugacgccggggaguucagccugccuaccuuugauucccuuaacaucacagcugccagccugaaugacgauggacucgacaaccacaccauucugcuguauuacucuacagcugccuccagccuugcggugacccucaugaucgccaucuucgucguguauaugguuucuagagauaauguguccuguagcauuugccuguga

SEQ ID NO: 219576 - RNA, 1758 nt, Artificial Sequence; identical to SEQ ID NO: 218717
  derived and/or modified CDS sequence (opt5) from hemagglutinin__InfluenzaB__AGX21546

SEQ ID NO: 219577 - RNA, 1758 nt, Artificial Sequence
  derived and/or modified CDS sequence (opt5) from hemagglutinin__InfluenzaB__AGX21557
augaaggccaucauugugcugcucauggucguuaccagcaacgcugacagaaucugcacaggcauuacguccucuaauagcccccacguggugaaaaccgccacacagggggaggucaacgugaccggaguuaucacacugaccacaaccccuacgaagucccauuucgcgaaucuuaaaggcaccgaaacacgggggaagcuguguccgaaaugccucaacuguaccgaucuggacguggcucuuggacgccccaagugcacaggcaagauuccuucugccagagucagcauccugcacgaggugcggcccguuaccuccggguguuuuccuaucaugcaugaucgcacgaaaauuagacaacuccccaaucugcugcggggauacgaacacauccgccucucuacacauaacgugauuaaugccgagaacgcuccuggcggcccguauaagaucgggaccagcggauccugccccaaugucacaaacggcaauggguucuuugccaccauggcuugggccgugccuaaaaacgacaagaauaaaaccgcgacaaacccccugacgauugaagugccuuacaucuguaccgagggagaggaucagauuacagucuggggcuuccacagcgacaaugaaacccagauggccaaacuuuauggggauucuaagccccagaaguuuacauccagcgcuaacggaguuaccacgcacuacgugucucaaaucggcggcuucccgaaccagacagaggacgggggacugccucaguccggcagaaucguggucgauuauauggugcaaaagagcgggaaaaccggaaccauuacauaccagcggggcauccuccugccccagaagguuuggugcgccucugggcgcuccaaagugauuaagggaagccuuccucugaucggcgaagcugacugucuccaugagaaauauggcgggcugaauaaguccaagcccuacuacaccggagagcacgccaaagcgauuggcaacugccccaucugggucaagacaccucugaaacucgccaaugggacgaaguauagaccgcccgcuaaacugcuuaaggaacggggauuuuucggcgccaucgcuggguuucuggagggcggaugggaaggcaugauugccggguggcauggauacaccucucacggcgcccacgggguggcuguugcggccgaucucaagagcacacaggaggcuaucaacaaaauuaccaagaaucugaacucccuuagcgaacuggaggugaaaaaucuccagcgccugucuggagccauggacgagcugcauaacgaaauccucgagcuggaugaaaaggucgacgaccuuagagccgauacaauuuccagccaaaucgagcuggcugugcuccugucuaaugaaggcaucauuaacagcgaggacgagcaccuucuggcccucgaacggaaacugaagaagaugcuggggccuuccgcggucgagaucggcaauggauguuucgaaaccaaacauaagugcaaccagacgugccucgaucgcauugcugccggcaccuuugacgccggggaguucucucugcccacauuugauagccuuaauaucaccgcugccucccugaacgacgauggacucgacaaucacacaauucugcuguauuacagcaccgcugccucuucccuugcggugacgcucaugaucgccauuuucguuguguauauggucagcagagauaacgugucuuguuccaucugccuguga

SEQ ID NO: 219578 - RNA, 1758 nt, Artificial Sequence
  derived and/or modified CDS sequence (opt5) from hemagglutinin__InfluenzaB__AGX21568
augaaggccaucauugugcugcucauggucguuaccagcaacgcugacagaaucugcacaggcauuacguccucuaauagcccccacguggugaaaaccgccacacagggggaggucaacgugaccggaguuaucccucugacaaccacaccgaccaagucccauuucgcgaaucuuaaaggcacggaaacccgggggaagcugugucccaaaugccucaacuguacagaucuggacguggcucuuggacgcccuaagugcaccggcaagauucccucugccagagucagcauccugcacgaggugcggccuguuacauccggguguuuucccaugaugcaugaucgcaccaaaaucagacaacucccuaaucugcugcggggauacgaacacauucgccucucuacgcauaacgugaucaaugccgagaacgcuccgggcggccccuauaagauugggacaagcggauccugcccuaaugucaccaacggcaauggguucuuugccacaauggcuugggccgugcccaaaaacgacaagaauaaaaccgcgaccaacccucugacaaucgaagugcccuacauuuguacggagggagaggaucagaucaccgucuggggcuuccacagcgacaaugaaacacagauggccaaacuuuauggggauucuaagccgcagaaguuuaccuccagcgcuaacggaguuacaacccacuacgugucucaaauuggcggcuucccuaaccagacggaggacgggggacugccccaguccggcagaaucguggucgauuauauggugcaaaagagcgggaaaacaggaaccaucaccuaccagcggggcauucuccugccucagaagguuuggugcgccucugggcgcuccaaagugaucaagggaagccuuccccugauuggcgaagcugacugucuccaugagaaauauggcgggcugaauaaguccaagcccuacuacacaggagagcacgccaaagcgaucggcaacugcccuauuugggucaagaccccgcugaaacucgccaaugggacaaaguauagacccccugcuaaacugcuuaaggaacggggauuuuucggcgccaucgcuggguuucuggagggcggaugggaaggcaugaucgccggguggcauggauacacgucucacggcgcccacgggguggcuguugcggccgaucucaagagcacccaggaggcuauuaacaaaaucacaaagaaucugaacucccuuagcgaacuggaggugaaaaaucuccagcgccugucuggagccauggacgagcugcauaacgaaauucucgagcuggaugaaaaggucgacgaccuuagagccgauaccaucuccagccaaauugagcuggcugugcuccugucuaaugaaggcaucaucaacagcgaggacgagcaccuucuggcccucgaacggaaacugaagaagaugcuggggcccuccgcggucgagauuggcaauggauguuucgaaacaaaacauaagugcaaccagaccugccucgaucgcaucgcugccggcacguuugacgccggggaguucucucugccuaccuuugauagccuuaauauuacagcugccucccugaacgacgauggacucgacaaucacaccauccugcuguauuacagcacagcugccucuucccuugcggugacccucaugauugccaucuucguuguguauauggucagcagagauaacgugucuuguuccauuugccuguga

SEQ ID NO: 219579 - RNA, 1758 nt, Artificial Sequence; identical to SEQ ID NO: 218680
  derived and/or modified CDS sequence (opt5) from hemagglutinin__InfluenzaB__AGX21579

SEQ ID NO: 219580 - RNA, 1758 nt, Artificial Sequence; identical to SEQ ID NO: 218717
  derived and/or modified CDS sequence (opt5) from hemagglutinin__InfluenzaB__AGX21590

SEQ ID NO: 219581 - RNA, 1758 nt, Artificial Sequence; identical to SEQ ID NO: 219530
  derived and/or modified CDS sequence (opt5) from hemagglutinin__InfluenzaB__AGX21601

SEQ ID NO: 219582 - RNA, 1758 nt, Artificial Sequence; identical to SEQ ID NO: 218717
  derived and/or modified CDS sequence (opt5) from hemagglutinin__InfluenzaB__AGX21611

SEQ ID NO: 219583 - RNA, 1758 nt, Artificial Sequence; identical to SEQ ID NO: 219061
  derived and/or modified CDS sequence (opt5) from hemagglutinin__InfluenzaB__AGX21622

SEQ ID NO: 219584 - RNA, 1758 nt, Artificial Sequence
  derived and/or modified CDS sequence (opt5) from hemagglutinin__InfluenzaB__AGX21633
augaaggccaucauugugcugcucauggucguuaccagcaacgcugacagaaucugcacaggcauuacguccucuaauagcccccacaucgugaaaaccgccacacagggggaggugaacgucaccggagugauuccucugacaaccacaccgaccaagucccauuucgcgaaucuuaaaggcacggaaacccgggggaagcugugucccaaaugccucaacuguacagaucuggacguugcucuuggacgcccuaagugcaccggcaagauccccucugccagagugagcauccugcacgagguccggccugugacauccggguguuuucccauuaugcaugaucgcaccaaaaucagacaacucccuaaucugcugcggggauacgaacacauucgccucucuacgcauaacguuaucaaugccgagaacgcuccgggcggccccuauaagauugggacaagcggauccugcccuaauaucaccaacggcaauggguucuuugccacaauggcuugggccgugcccaaaaacgacaagaauaaaaccgcgaccaacccucugacaauugaaguccccuacaucuguacggagggagaggaucagaucaccguguggggcuuccacagcgacaaugaaacacagauggccaaacuuuauggggauucuaagccgcagaaauuuaccuccagcgcuaacggagugacaacccacuacgucucucaaauuggcggcuucccuaaccagacggaggacgggggacugccccaguccggcagaaucguuguggauuauauggugcaaaagagcgggaaaacaggaaccauuaccuaccagcggggcauccuccugccucagaaggucuggugcgccucugggcgcuccaaagugauuaagggaagccuuccccugaucggcgaagcugacugucuccaugagaaauauggcgggcugaauaaguccaagcccuacuacacaggagagcacgccaaagcgaucggcaacugcccuauuuggguuaagaccccgcugaaacucgccaaugggacaaaguauagacccccugcucggcugcuuaaagaacgcggauuuuucggcgccaucgcuggguuucuggagggcggaugggaaggcaugauugccggguggcauggauacacgucucacggcgcccacgggguggcugucgcggccgaucucaagagcacccaggaggcuaucaacaagauuacaaagaaucugaacucccuuagcgaacuggaggugaagaaucuccagagacugucuggagccauggacgagcugcauaacgaaauccucgagcuggaugaaaaaguugacgaccuucgggccgauaccaucuccagccaaauugagcuggcugugcuccugucuaaugaaggcaucauuaacagcgaggacgagcaccuucuggcccucgaacgcaagcugaaaaagaugcuggggcccuccgcggucgagaucggcaauggauguuucgaaacaaagcauaaaugcaaccagaccugccucgauagaauugcugccggcacguuugacgccggggaguucucucugccuaccuuugauagccuuaauaucacagcugccucccugaacgacgauggacucgacaaucacaccauucugcuguauuacagcacagcugccucuucccuugcggugacccucaugaucgccaucuucgucguguauaugguuagccgggauaacgugucuuguuccauuugccuguga

SEQ ID NO: 219585 - RNA, 1758 nt, Artificial Sequence; identical to SEQ ID NO: 218755
  derived and/or modified CDS sequence (opt5) from hemagglutinin__InfluenzaB__AGX21644

SEQ ID NO: 219586 - RNA, 1758 nt, Artificial Sequence; identical to SEQ ID NO: 218680
  derived and/or modified CDS sequence (opt5) from hemagglutinin__InfluenzaB__AGX21655

SEQ ID NO: 219587 - RNA, 1758 nt, Artificial Sequence
  derived and/or modified CDS sequence (opt5) from hemagglutinin__InfluenzaB__AGX21666
augaaggccaucauugugcugcucauggucguuaccagcaacgcugacagaaucugcacaggcauuacguccucuaauagcccccacguggugaaaaccgccacacagggggaggucaacgugaccggaguuaucccucugacaaccacaccgaccaagucccauuucgcgaaucuuaaaggcacggaaacccgggggaagcugugucccaaaugcccuaacuguacagaucucgacguggcucugggacgccccaagugcaccggcaagauuccuucugccagagucagcauccuucacgaggugcggcccguuacauccggguguuuuccuaucaugcaugaucgcaccaaaauuagacaacugccgaaucuccugcggggauacgaacacauccgccugucuacgcauaacgugauuaaugccgagaacgcucccggcggcccuuauaagaucgggacaagcggauccugccccaaugucaccaacggcaauggguucuuugccacaauggcuugggccgugccuaaaaacgacaagaauaaaaccgcgaccaacccccucacaauugaagugccguacaucuguacggagggagaggaucagauuaccgucuggggcuuccacagcgacaaugaaacacagauggccaagcuguauggggauucuaagccucagaaauuuaccuccagcgcuaacggaguuacaacccacuacgugucucaaaucggcggcuuccccaaccagacggaggacgggggacuuccucaguccggcagaaucguggucgauuauauggugcaaaagagcgggaaaacaggaaccauuaccuaccagcggggcauccugcucccccagaagguuuggugcgccucugggcgcuccaaagugauuaagggaagccugccccuuaucggcgaagcugacugucugcaugagaaauauggcgggcucaauaaguccaagccuuacuacacaggagagcacgccaaagcgauuggcaacugcccgaucugggucaagacaccccugaaacuggccaaugggaccaaguauagaccucccgcuaaacuccugaaggaacggggauuuuucggcgccaucgcuggguuucuugagggcggaugggaaggcaugauugccggguggcauggauacacgucucacggcgcccacgggguggcuguugcggccgaucucaagagcacccaggaggcuaucaacaaaauuacaaagaaucugaacucccugagcgaacuugaggugaaaaaucugcagcgccucucuggagccauggacgagcugcauaacgaaauccuggagcucgaugaaaaggucgacgaccugagagccgauaccauuuccagccaaaucgagcuugcugugcugcucucuaaugaaggcaucauuaacagcgaggacgagcaucugcuugcccuggaacggaaacucaagaagaugcuggggccuuccgcggucgagaucggcaauggauguuucgaaacaaaacacaagugcaaccagaccugccuggauaaaauugcugccggcacguuugacgccggggaguucucucuccccaccuuugauagccugaauaucacagcugccucccuuaacgacgauggacuggacaaucacaccauucuccuguauuacagcacagcugccucuucccuggcggugacccuuaugaucgccauuuucguuguguauauggucagccgcgauaacgugucuuguuccaucugccucuga

SEQ ID NO: 219588 - RNA, 1758 nt, Artificial Sequence; identical to SEQ ID NO: 218755
  derived and/or modified CDS sequence (opt5) from hemagglutinin__InfluenzaB__AGX21677

SEQ ID NO: 219589 - RNA, 1758 nt, Artificial Sequence; identical to SEQ ID NO: 218680
  derived and/or modified CDS sequence (opt5) from hemagglutinin__InfluenzaB__AGX21688

SEQ ID NO: 219590 - RNA, 1758 nt, Artificial Sequence
  derived and/or modified CDS sequence (opt5) from hemagglutinin__InfluenzaB__AGX21699
augaaggccaucauugugcugcucauggucguuaccagcaacgcugacagaaucugcacaggcauuacguccucuaauagcccccacguggugaaaaccgccacacagggggaggucaacgugaccggaguuaucccucugacaaccacaccgaccaagucccauuucgcgaaucuuaaaggcacggaaacccgggggaagcugugucccaaaugccucaacuguacagaucuggacguggcucuuggacgcccuaagugcaccggcaagauucccucugccagagucagcauccugcacgaggugcggccuguuacauccggguguuuucccaucaugcaugaucgcaccaaaauuagacaacucccuaaucugcugcggggauacgaacacauccgccucucuacgcauaacgugauuaaugccgagaacgcuccgggcggccccuauaagaucgggacaagcggauccugcccuaaugucaccaacggcaauggguucuuugccacaauggcuugggccgugcccaaaaacgacaagaauaaaaccgcgaccaacccucugacaauugaagugcccuacaucuguacggagggagaggaucagauuaccgucuggggcuuccacagcgacaaugaaacacagauggccaagcuguauggggauucuaagccgcagaaauuuaccuccagcgcuaacggaguuacaacccacuacgugucucaaaucggcggcuucccuaaccagacggaggacgggggacugccccaguccggcagaaucguggucgauuauauggugcagaaaagcgggaaaacaggaaccauuaccuaccaacggggcauccuccugccucagaagguuuggugcgccucugggcgcuccaaagugauuaagggaagccuuccccugaucggcgaagcugacugucuccaugagaaauauggcgggcugaauaaguccaagcccuacuacacaggagagcacgccaaagcgauuggcaacugcccuaucugggucaagaccccgcugaaucucgccaacgggacaaaauauagacccccugcuaagcugcuuaaagaacggggauuuuucggcgccaucgcuggguuucuggagggcggaugggaaggcaugauugccggguggcauggauacacgucucacggcgcccacgggguggcuguugcggccgaucucaagagcacccaggaggcuaucaauaagauuacaaagaaccuuaauucccuuagcgaacuggaggugaagaaccuccagcgccugucuggagccauggacgagcugcauaaugaaauccucgagcuggaugaaaaagucgacgaccuuagagccgauaccauuuccagccaaaucgagcuggcugugcuccugucuaacgaaggcaucauuaauagcgaggacgagcaccuucuggcccucgaacggaagcugaaaaagaugcuggggcccuccgcggucgagaucggcaacggauguuucgaaacaaagcauaaaugcaaucagaccugccucgaucgcauugcugccggcacguuugacgccggggaguucucucugccuaccuuugauagccuuaacaucacagcugccucccugagcgacgauggacucgacaaucacaccauucugcuguauuacucuacagcugccuccagccuugcggugacccucaugaucgccauuuucguuguguauauggucucuagagauaacguguccuguagcaucugccuguga

SEQ ID NO: 219591 - RNA, 1758 nt, Artificial Sequence; identical to SEQ ID NO: 219530
  derived and/or modified CDS sequence (opt5) from hemagglutinin__InfluenzaB__AGX21710

SEQ ID NO: 219592 - RNA, 1758 nt, Artificial Sequence; identical to SEQ ID NO: 218755
  derived and/or modified CDS sequence (opt5) from hemagglutinin__InfluenzaB__AGX21721

SEQ ID NO: 219593 - RNA, 1755 nt, Artificial Sequence
  derived and/or modified CDS sequence (opt5) from hemagglutinin__InfluenzaB__AGX21732
augaaggccaucauugugcugcucauggucguuaccagcaacgcugacagaaucugcacaggcauuacguccucuaauagcccccacguggugaaaaccgccacacagggggaggucaacgugaccggagcgaucccucugacaaccacaccgaccaagucccauuucgcuaaucuuaaaggcacgaagacccgggggaaacugugucccacaugccucaacuguaccgaucuggacguugcccuuggaggcccuaugugcguggggauuacacccucugccaaggcuagcauccugcacgaaguccgcccugugaccuccggauguuuucccaucaugcaugauagaacgaagauucggcaacucccuaaucugcugcgcggcuacgagaaaaucagacucucugcccagaacguuauuaaugcugaaaaggccccgggcgggcccuauaaacugggaacaagcggcuccugcccuaacgcgaccagcaagucuggguucuuugccacaauggcuugggccgugccccgggacgauaauaaaaccgcuaccaacccucuuacagucgaggugccccacaucugugccaaugaagaggaccagauuacgguguggggauuccauuccgauaacaagacccagaugaagaaucuguacggcgacagcaacccgcaaaaauuuacaucuuccgcgaaugggaucaccacacacuaugucagccagauuggaggcuucccugaucagaccgaggacggcgggcucccccagucuggacgcaucguuguggauuacauggugcaaaagccuggcaaaacggggacaaucgucuaucagagaggcauucugcuuccccagaagguguggugcgccuccggacggagcaaaguuaucaaggggucccugccccucauuggagaagcugacugucugcacgagaaauacggcggccugaacaagucuaagccuuauuacaccggggaacaugccaaagcuaucggaaacugcccgauuugggugaagacaccccucaaacuggccaauggcaccaaguaccgcccucccgccaaacuucugaaggagagaggguuuuucggagcuaucgcgggcuuucucgaagggggcugggaaggaaugaucgccggcuggcacggguauaccagccauggagcucacggcgucgccguggccgcugaucugaaguccacacaggaggccauuaacaaaaucacgaagaaucuuaacagccugucugaacucgagguuaaaaaucugcaacggcuguccggggcgauggacgaacuccacaacgagauucuggagcuugacgaaaagguggaugaccugcgcgcugauaccaucagcucucagauugagcucgccguccugcuuagcaaugaaggaaucaucaacuccgaggacgaacaucugcucgcccuggagagaaaacugaagaagaugcucggcccuucugcuguggauauugggaauggcuguuucgagacaaaacacaagugcaaccagaccugccuggaccggaucgccgcuggaacauuuaaugccggcgaguucagccuucccaccuuugauucccugaacauuacggcggccagccucaaugacgaugggcuggacaaccauaccauccugcuuuacuauucuacagcugccuccagccucgcugucacccugaugauugccaucuucauuguguacaugaucucucgcgauaauguuuccuguagcaucugccuguga

SEQ ID NO: 219594 - RNA, 1755 nt, Artificial Sequence
  derived and/or modified CDS sequence (opt5) from hemagglutinin__InfluenzaB__AGX21743
augaaggccaucauugugcugcucauggucguuaccagcaacgcugacagaaucugcacaggcauuacguccucuaauagcccccacguggugaaaaccgccacacagggggaggucaacgugaccggaguuaucccucugacaaccacaccgaccaagucccauuucgcgaaucuuaaaggcacgcggacccgcgggaagcugugucccgauugccucaacuguacagaccuggauguggcucuuggaagaccuaugugcgucggcaccacacccucugccaaagccagcauucugcacgaagugcggccuguuaccuccggguguuuucccaucaugcaugaccgcacgaagaucagacaacucccuaaucugcugcggggauacgagaacauucgccucucuacacagaaugugaucgaugcugaaaaggcccugggcggcccguauagacuugggaccagcggauccugccccaacgcuacaagcaaaucuggcuucuuugccaccauggcgugggccgucccuaaggacaauaacaaaaaugcuaccaacccccugacaguggaggugccuuacauuuguacggaaggggaggaucagaucaccgucuggggauuccacuccgacaauaagacacagaugaaaaaccucuauggcgauagcaauccccaaaaguuuaccucuuccgccaacgggguuacaacccauuacgugagccagauuggaggcuucccggaccagacggaggauggcgggcugccucagucuggacggaucguggucgacuauauggugcaaaagcccggcaaaacagggaccauuguuuaccagcgcggagugcuucugccucagaaggucuggugcgcuuccggcaaaagcaaggugaucaaagggucccucccccugaucggagaagccgauugucugcacgagaaguauggcggccucaacaaaucuaagcccuacuacaccggggaacacgcgaaggccauuggaaauugcccuaucuggguuaaaacaccgcugaaacuugcuaacggcaccaaguauagacccccugccaagcugcucaaagagcggggguuuuucggagcuauugccggcuuucuggaagggggcugggaaggaaugaucgccggcuggcauggguacacaagccacggagcucauggcguggcggucgccgcugaccuuaaguccacgcaggaggccauuaauaagaucaccaaaaaccugaauagccucucugaacuggaggugaagaaccugcaacgccucuccggggccauggacgaacugcacaaugagauccuugagcuggaugaaaaagucgacgaucucagagcugacacaauuagcucucagaucgagcuggccgugcuucugagcaacgaaggaauuaucaauuccgaggaugaacaccuccuggcgcuggagcggaagcucaaaaagaugcugggccccucugcuguugacauugggaacggcuguuucgagaccaagcauaaaugcaaucagacaugccuugaucgcaucgccgccggaaccuuuaacgcuggcgaguucagccugccuacguuugacucccucaauaucaccgccgcuagccugaacgaugacgggcuggauaaucacacaauucuucucuauuacucuaccgccgcguccagccuggccgugacacugaugcucgcuaucuucauugucuauauggugucuagagacaacguuuccuguagcaucugccuguga

SEQ ID NO: 219595 - RNA, 1755 nt, Artificial Sequence
  derived and/or modified CDS sequence (opt5) from hemagglutinin__InfluenzaB__AGX21754
augaaggccaucauugugcugcucauggucguuaccagcaacgcugacagaaucugcacaggcauuacguccucuaauagcccccacguggugaaaaccgccacacagggggaggucaacgugaccggagcgaucccucugacaaccacaccggcuaagucccauuucgccaaucuuaaaggcaccaagacgcgggggaaacuguguccuaccugccucaacuguacagaucuggacguugcccuuggaggccccaugugcguggggauuacccccucugcuaaggccagcauccugcacgaaguccgcccugugacauccggauguuuucccaucaugcaugauagaaccaagauucggcaacucccuaaucugcugcgcggcuacgagaaaaucagacucucugcucagaacguuauuaaugccgaaaaggcgccgggcgggcccuauaaacugggaacgagcggcuccugcccuaacgccacaagcaagucuggguucuuugcuaccauggccugggcugugccccgggacgauaauaaaacagccaccaacccucuuaccgucgaggugccccacaucugugcgaaugaagaggaccagauuacaguguggggauuccauuccgauaacaagacgcagaugaagaaucuguacggcgacagcaacccgcaaaaauuuaccucuuccgccaaugggaucacaacccacuaugucagccagauuggaggcuucccugaucagacagaggacggcgggcucccccagucuggacgcaucguuguggauuacauggugcaaaagccuggcaaaaccgggacgaucgucuaucagagaggcauucugcuuccccagaagguguggugcgcuuccggacggagcaaaguuaucaaggggucccugccccucauuggagaagccgacugucugcacgagaaauacggcggccugaacaagucuaagccuuauuacacaggggaacaugcuaaagccaucggaaacugcccgauuugggugaagacaccccucaaacuggccaauggcaccaaguaccgcccucccgcuaaacuucugaaggagagaggguuuuucggagcgaucgccggcuuucucgaagggggcugggaaggaaugaucgcuggcuggcacggguauaccagccauggagcccacggcgucgccguggcugccgaucugaaguccacccaggaggcgauuaacaaaaucacaaagaaucuuaacagccugucugaacucgagguuaaaaaucugcaacggcuguccggggcuauggacgaacuccacaacgagauucuggagcuugacgaaaagguggaugaccugcgcgccgauacgaucagcucucagauugagcucgccguccugcuuagcaaugaaggaaucaucaacuccgaggacgaacaucugcucgcucuggagagaaaacugaagaagaugcucggcccuucugccguggauauugggaauggcuguuucgagaccaaacacaagugcaaccagacaugccuggaccggaucgcugccggaaccuuuaaugcgggcgaguucagccuucccacauuugauucccugaacauuaccgccgcuagccucaaugacgaugggcuggacaaccauacgauccugcuuuacuauucuaccgccgcuuccagccucgccgucacacugaugauugcgaucuucauuguguacaugaucucucgcgauaauguuuccuguagcaucugccuguga

SEQ ID NO: 219596 - RNA, 1755 nt, Artificial Sequence
  derived and/or modified CDS sequence (opt5) from hemagglutinin__InfluenzaB__AGX21776
augaaggccaucauugugcugcucauggucguuaccagcaacgcugacagaaucugcacaggcauuacguccucuaauagcccccacguggugaaaaccgccacacagggggaggucaacgugaccggaguuaucccucugacaaccacaccgaccaaguccuacuucgcgaaucuuaaaggcacgcggacccgcgggaagcugugucccgauugccucaacuguacagaccuggauguggcucuuggaagaccuaugugcgucggcauuacccccucugccaaagccagcauccugcaugaagugcggccuguuacauccggguguuuucccaucaugcacgaccgcaccaagauuagacaacucccuaaucugcugcggggauaugagaacauccgccucucuacgcagaaugugauugaugcugaaaaggccccgggcggccccuacagacuggggacaagcggauccugcccuaacgcuaccagcaaaucuggcuucuuugccacaauggcgugggccguccccaaggacaauaacaaaaaugcuaccaacccucuuaccguggaggugcccuaugucuguacagaaggggaggaucagaucacgguuuggggauuccauuccgacaauaagacccagaugaaaaaccuguacggcgauagcaauccgcaaaaguuuacaucuuccgccaacggggugaccacacacuaugugagccagauuggaggcuucccugaccagaccgaggauggcgggcucccccagucuggacggaucgucguggacuacaugguucaaaagccuggcaaaacggggacaauuguguaucagcgcggaguccugcuuccccagaagguguggugcgcuuccggcagaagcaaaguuaucaaggggucccugccccucaucggagaagccgauugucugcaugagaaauacggcggccugaacaagucuaaaccuuacuauaccggggaacacgcgaaggccauuggaaauugcccgaucugggugaagacaccccucaaacuggcuaacggcaccaaguaccggccucccgccaaacuucugaaggagcgcggguuuuucggagcuauugccggcuuucucgaagggggcugggaaggaaugaucgccggcuggcacggguauaccagccauggagcucacggcgucgcgguggccgcugaccugaaauccacacaggaggccauuaauaagaucacgaagaaccuuaauagccugucugaacucgaggucaaaaaccugcaaagacuguccggggccauggacgaacuccauaaugagauccuggagcuugaugaaaagguggacgaucugcgggcugacaccauuagcucucagaucgagcucgccguucugcuuagcaacgaaggaauuaucaauuccgaggaugaacaucugcucgcgcuggagcgcaaacugaagaaaaugcucggcccuucugcuguggacauugggaacggcuguuucgagacaaagcacaagugcaaucagaccugccuggauagaaucgccgccggaacauuuaacgcuggcgaguucagccuucccaccuuugacucccugaauaucacggccgcuagccucaacgaugacgggcuggauaaucacaccauucugcuuuacuauucuacagccgcguccagccucgccgucacccugaugcuggcuaucuucauuguguacaugguuucucgggacaacguguccuguagcaucugccucuga

SEQ ID NO: 219597 - RNA, 1758 nt, Artificial Sequence; identical to SEQ ID NO: 219051
  derived and/or modified CDS sequence (opt5) from hemagglutinin__InfluenzaB__AGX21787

SEQ ID NO: 219598 - RNA, 1755 nt, Artificial Sequence
  derived and/or modified CDS sequence (opt5) from hemagglutinin__InfluenzaB__AGX21798
augaaggccaucauugugcugcucauggucguuaccagcaacgcugacagaaucugcacaggcauuacguccucuaauagcccccacguggugaaaaccgccacacagggggaggucaacgugaccggaguuaucccucugacaaccacaccgaccaaguccuacuucgcgaaucuuaaaggcacgcggacccgcgggaagcugugucccgauugccucaacuguacagaccuggauguggcucuuggaagaccuaugugcgucggcaccacacccucugccaaagccagcauucugcaugaagugcggccuguuaccuccggguguuuucccaucaugcacgaccgcacgaagaucagacaacucccuaaucugcugcggggauaugagaacauucgccucucuacacagaaugugaucgaugcugaaaaggccccgggcggccccuacagacuggggaccagcggauccugcccuaacgcuacaagcaaaucuggcuucuuugccaccauggcgugggccguccccaaggacaauaacaaaaaugcuaccaacccucuuacaguggaggugcccuaugucuguacggaaggggaggaucagauuaccguuuggggauuccauuccgacaauaagacacagaugaaaaaccuguacggcgauagcaauccgcaaaaguuuaccucuuccgccaacggggugacaacccacuaugugagccagaucggaggcuucccugaccagacggaggauggcgggcucccccagucuggacggauugucguggacuacaugguucaaaagccuggcaaaacagggaccaucguguaucagcgcggaguccugcuuccccagaagguguggugcgcuuccggcagaagcaaaguuauuaaggggucccugccccucaucggagaagccgauugucugcaugagaaauacggcggccugaacaagucuaaaccuuacuauaccggggaacacgcgaaggccaucggaaauugcccgauuugggugaagacaccccucaaacuggcuaacggcaccaaguaccggccucccgccaaacuucugaaggagcgcggguuuuucggagcuaucgccggcuuucucgaagggggcugggaaggaaugauugccggcuggcacggguauacaagccauggagcucacggcgucgcgguggccgcugaccugaaauccacgcaggaggccaucaauaagauuaccaagaaccuuaauagccugucugaacucgaggucaaaaaccugcaaagacuguccggggccauggacgaacuccauaaugagauccuggagcuugaugaaaagguggacgaucugcgggcugacacaaucagcucucagauugagcucgccguucugcuuagcaacgaaggaaucauuaauuccgaggaugaacaucugcucgcgcuggagcgcaaacugaagaaaaugcucggcccuucugcuguggacaucgggaacggcuguuucgagaccaagcacaagugcaaucagacaugccuggauagaauugccgccggaaccuuuaacgcuggcgaguucagccuucccacguuugacucccugaauaucaccgccgcuagccucaacgaugacgggcuggauaaucacacaauccugcuuuacuauucuaccgccgcguccagccucgccgucacacugaugcuggcuauuuucaucguguacaugguuucucgggacaacguguccuguagcauuugccucuga

SEQ ID NO: 219599 - RNA, 1755 nt, Artificial Sequence
  derived and/or modified CDS sequence (opt5) from hemagglutinin__InfluenzaB__AGX21809
augaaggccaucauugugcugcucauggucguuaccagcaacgcugacagaaucugcacaggcauuacguccucuaauagcccccacguggugaaaaccgccacacagggggaggucaacgugaccggaguuaucccucugacaaccacaccgaccaaguccuacuucgcgaaucuuaaaggcacgcggacccgcgggaagcugugucccgauugccucaacuguacagaccuggauguggcucuuggaagaccuaugugcgucggcaccacacccucugccaaagccagcauucugcaugaagugcggccuguuaccuccggguguuuucccaucaugcacgaccgcacgaagaucagacaacucccuaaucugcugcggggauaugagaacauucgccucucuacacagaaugugaucgaugcugaaaaggccccgggcggccccuacagacuggggaccagcggauccugcccuaacgcuacaagcaaaucuggcuucuuugccaccauggcgugggccguccccaaggacaauaacaaaaaugcuaccaacccucuuacaguggaggugcccuaugucuguacggaaggggaggaucagauuaccguuuggggauuccauuccgacaauaagacacagaugaaaaaccuguacggcgauagcaauccgcaaaaguuuaccucuuccgccaacggggugacaacccacuaugugagccagaucggaggcuucccugaccagacggaggauggcgggcucccccagucuggacggauugucguggacuacaugguucaaaagccuggcaaaacagggaccaucguguaucagcgcggaguccugcuuccccagaagguguggugcgcuuccggcagaagcaaaguuauuaaggggucccugccccucaucggagaagccgauugucugcaugagaaauacggcggccugaacaagucucggccuuacuauaccggggaacacgcgaaagccaucggaaauugcccgauuugggugaagacaccccucaagcuggcuaacggcaccaaauaccgcccucccgccaagcugcugaaagagagaggguuuuucggagcuaucgccggcuuucucgaagggggcugggaaggaaugauugccggcuggcacggguauacaagccauggagcucacggcgucgcgguggccgcugaccugaaguccacgcaggaggccaucaauaaaauuaccaagaaccuuaauagccugucugaacucgaggucaagaaccugcaacggcuguccggggccauggacgaacuccauaaugagauccuggagcuugaugaaaaaguggacgaucugcgcgcugacacaaucagcucucagauugagcucgccguucugcuuagcaacgaaggaaucauuaauuccgaggaugaacaccuucucgcgcuggagagaaagcugaaaaagaugcucggcccuucugcuguggacaucgggaacggcuguuucgagaccaaacacaagugcaaucagacaugccuggaucggauugccgccggaaccuuuaacgcuggcgaguucagccuucccacguuugacucccugaauaucaccgccgcuagccucaacgaugacgggcuggauaaucauacaauccugcuuuacuauucuaccgccgcguccagccucgccgucacacugaugcuggcuauuuucaucguguacaugguuucuagagacaacguguccuguagcauuugccucuga

SEQ ID NO: 219600 - RNA, 1755 nt, Artificial Sequence
  derived and/or modified CDS sequence (opt5) from hemagglutinin__InfluenzaB__AGX21820
augaaggccaucauugugcugcucauggucguuaccagcaacgcugacagaaucugcacaggcauuacguccucuaauagcccccacguggugaaaaccgccacacagggggaggucaacgugaccggaguuaucccucugacaaccacaccgaccaaguccuacuucgcgaaucuuaaaggcacgcggacccgcgggaagcugugucccgauugccucaacuguacagaccuggauguggcucuuggaagaccuaugugcgucggcaccacacccucugccaaagccagcauucugcaugaagugcggccuguuaccuccggguguuuucccaucaugcacgaccgcacgaagaucagacaacucccuaaucugcugcggggauaugagaacauucgccucucuacacagaaugugaucgaugcugaaaaggccccgggcggccccuacagacuggggaccagcggauccugcccuaacgcuacaaauaaaagcggcuucuuugccaccauggcgugggccguccccaaggacaacaauaaaaacgcuaccaauccucuuacaguggaggugcccuauauuuguacggaaggggaggaucagaucaccgucuggggauuccauucugacaacaagacacagaugaaaaaucuguacggcgauuccaacccgcaaaaguuuaccagcucugccaacgggguuacaacccacuaugugucccagauuggaggcuucccugaccagacggaggauggcgggcucccccagagcggacggaucguggucgacuacaugaugcaaaagccuggcaaaacagggaccauuguguaucagcgcggaguucugcuuccccagaagguguggugcgcuucuggcagauccaaagucaucaaggggagccugccccucaucggagaagccgauugucugcaugagaaauacggcggccugaauaaguccaaaccuuacuauaccggggaacacgcgaaggccauuggaaacugcccgaucugggugaagacaccccucaaacuggcuaauggcaccaaguaccggccucccgccaaacuucugaaggagcgcggguuuuucggagcuauugccggcuuucucgaagggggcugggaaggaaugaucgccggcuggcacggguauacaucucauggagcucacggcguugcgguggccgcugaccugaaaagcacgcaggaggccauuaacaagaucaccaagaaucuuaacucccugagcgaacucgaggucaaaaaucugcaaagacugucuggggccauggacgaacuccauaacgagauccuggagcuugaugaaaagguggacgaucugcgggcugacacaauuuccagccagaucgagcucgccguccugcuuucuaaugaaggaauuaucaacagcgaggaugaacaucugcucgcgcuggagcgcaaacugaagaaaaugcucggcccuuccgcuguggacauugggaauggcuguuucgagaccaagcacaagugcaaccagacaugccuggauagaaucgccgccggaaccuuuaaugcuggcgaguucucucuucccacguuugacagccugaacaucaccgccgcuucccucaaugaugacgggcuggauaaccacacaauucugcuuuacuauagcaccgccgcgucuucccucgccguuacacugaugcuggcuaucuucauuguguacauggucagccgggacaacgugucuuguuccaucugccucuga

SEQ ID NO: 219601 - RNA, 1755 nt, Artificial Sequence; identical to SEQ ID NO: 219095
  derived and/or modified CDS sequence (opt5) from hemagglutinin__InfluenzaB__AGX21831

SEQ ID NO: 219602 - RNA, 1755 nt, Artificial Sequence; identical to SEQ ID NO: 219098
  derived and/or modified CDS sequence (opt5) from hemagglutinin__InfluenzaB__AGX21842

SEQ ID NO: 219603 - RNA, 1755 nt, Artificial Sequence; identical to SEQ ID NO: 219098
  derived and/or modified CDS sequence (opt5) from hemagglutinin__InfluenzaB__AGX21853

SEQ ID NO: 219604 - RNA, 1755 nt, Artificial Sequence
  derived and/or modified CDS sequence (opt5) from hemagglutinin__InfluenzaB__AGX21864
augaaggccaucauugugcugcucauggucguuaccagcaacgcugacagaaucugcacaggcauuacguccucuaauagcccccacguggugaaaaccgccacacagggggaggucaacgugaccggaguuaucccucugacaaccacaccgaccaaguccuacuucgcgaaucuuaaaggcacgcggacccgcgggaagcugugucccgauugccucaacuguacagaccuggauguggcucuuggaagaccuaugugcgucggcaccacacccucugccaaagccagcauucugcaugaagugcggccuguuaccuccggguguuuucccaucaugcacgaccgcacgaagaucagacaacucccuaaucugcugcggggauaugagaacauucgccucucuaaucagaacgugaucgaugcugaaaaggccccgggcggccccuacagacuggggacaagcggauccugcccuaaugcuaccagcaaaucuggcuucuuugccacaauggcgugggccguccccaaggacaacaauaaaaacgcuaccaauccucuuaccguggaggugcccuauauuuguacagaaggggaggaucagaucacggucuggggauuccauuccgacaacaagacccagaugaaaaaucuguacggcgauagcaacccgcaaaaguuuacaucuuccgccaacgggguuaccacacacuaugugagccagauuggaggcuucccugaccagaccgaggauggcgggcucccccagucuggacggaucguggucgacuacaugaugcaaaagccuggcaaaacggggacaauuguguaucagcgcggaguucugcuuccccagaagguguggugcgcuuccggcagaagcaaagucaucaaggggucccugccccucaucggagaagccgauugucugcaugagaaauacggcggccugaauaagucuaaaccuuacuauaccggggaacacgcgaaggccauuggaaacugcccgaucugggugaagacaccccucaaacuggcuaauggcaccaaguaccggccucccgccaaacuucugaaggagcgcggguuuuucggagcuauugccggcuuucucgaagggggcugggaaggaaugaucgccggcuggcacggguauaccagccauggagcucacggcguugcgguggccgcugaccugaaauccacacaggaggccauuaacaagaucacgaagaaucuuaacagccugucugaacucgaggucaaaaaucugcaaagacuguccggggccauggacgaacuccauaacgagauccuggagcuugaugaaaagguggacgaucugcgggcugacaccauuagcucucagaucgagcucgccguccugcuuagcaaugaaggaauuaucaacuccgaggaugaacaucugcucgcgcuggagcgcaaacugaagaaaaugcucggcccuucugcuguggacauugggaauggcuguuucgagacaaagcacaagugcaaccagaccugccuggauagaaucgccgccggaacauuuaaugcuggcgaguucagccuucccaccuuugacucccugaacaucacggccgcuagccucaaugaugacgggcuggauaaccacaccauucugcuuuacuauucuacagccgcguccagccucgccguuacccugaugcuggcuaucuucauuguguacauggucucucgggacaacguguccuguagcaucugccucuga

SEQ ID NO: 219605 - RNA, 1755 nt, Artificial Sequence; identical to SEQ ID NO: 219096
  derived and/or modified CDS sequence (opt5) from hemagglutinin__InfluenzaB__AGX21875

SEQ ID NO: 219606 - RNA, 1755 nt, Artificial Sequence; identical to SEQ ID NO: 219095
  derived and/or modified CDS sequence (opt5) from hemagglutinin__InfluenzaB__AGX21886

SEQ ID NO: 219607 - RNA, 1755 nt, Artificial Sequence; identical to SEQ ID NO: 219095
  derived and/or modified CDS sequence (opt5) from hemagglutinin__InfluenzaB__AGX21897

SEQ ID NO: 219608 - RNA, 1755 nt, Artificial Sequence; identical to SEQ ID NO: 219095
  derived and/or modified CDS sequence (opt5) from hemagglutinin__InfluenzaB__AGX21908

SEQ ID NO: 219609 - RNA, 1755 nt, Artificial Sequence
  derived and/or modified CDS sequence (opt5) from hemagglutinin__InfluenzaB__AGX21919
augaaggccaucauugugcugcucauggucguuaccagcaacgcugacagaaucugcacaggcauuacguccucuaauagcccccacguggugaaaaccgccacacagggggaggucaacgugaccggaguuaucccucugacaaccacaccgaccaaguccuacuucgcgaaucuuaaaggcacgcggacccgcgggaagcugugucccgauugccucaacuguacagaccuggauguggcucuuggaagaccuaugugcgucggcaccacacccucugccaaagccagcauucugcaugaagugcggccuguuaccuccggguguuuucccaucaugcacgaccgcacgaagaucagacaacucccuaaucugcugcggggauaugagaacauucgccucucuacacagaaugugaucgaugcugaaaaggccccgggcggccccuacagacuggggaccagcggauccugcccuaacgcuacaagcaaaucuggcuucuuugccaccauggcgugggccguccccaaggacaauaacaaaaaugcuaccaacccucuuacaguggaggugcccuauauuuguacggaaggggaggaucagaucaccgucuggggauuccauuccgacaauaagacacagaugaaaaaccuguacggcgauagcaauccgcaaaaguuuaccucuuccgccaacgggguuacaacccacuaugugagccagauuggaggcuucccugaccagacggaggauggcgggcucccccagucuggacggaucguggucgacuacaugaugcaaaagccuggcaaagcugggacaauuguguaucagcgcggaguucugcuuccccagaagguguggugcgccuccggcagaagcaaagucaucaaggggucccugccccucaucggagaagcggauugucugcaugagaaauacggcggccugaacaagucuaaaccuuacuauaccggggaacacgccaaggcuauuggaaauugcccgaucugggugaagacaccccucaaacuggccaacggcaccaaguaccggccucccgcuaaacuucugaaggagcgcggguuuuucggagccauugccggcuuucucgaagggggcugggaaggaaugaucgcuggcuggcacggguauaccagccauggagcgcacggcguugccguggcugccgaccugaaauccacacaggaggccauuaauaagaucacgaagaaccuuaauagccugucugaacucgaggucaaaaaccugcaaagacuguccggggcuauggacgaacuccauaaugagauccuggagcuugaugaaaagguggacgaucugcgggccgacaccauuagcucucagaucgagcucgcgguccugcuuagcaacgaaggaauuaucaauuccgaggaugaacaucugcucgcucuggagcgcaaacugaagaaaaugcucggcccuucugccguggacauugggaacggcuguuucgagacaaagcacaagugcaaucagaccugccuggauagaaucgccgcuggaacauuuaacgccggcgaguucagccuucccaccuuugacucccugaauaucacggcugccagccucaacgaugacgggcuggauaaucacaccauucugcuuuacuauucuacagcggccuccagccucgcuguuacccugaugcuggccaucuucauuguguacauggucucucgggacaacguguccuguagcaucugccucuga

SEQ ID NO: 219610 - RNA, 1755 nt, Artificial Sequence; identical to SEQ ID NO: 219098
  derived and/or modified CDS sequence (opt5) from hemagglutinin__InfluenzaB__AGX21941

SEQ ID NO: 219611 - RNA, 1755 nt, Artificial Sequence; identical to SEQ ID NO: 219095
  derived and/or modified CDS sequence (opt5) from hemagglutinin__InfluenzaB__AGX21952

SEQ ID NO: 219612 - RNA, 1755 nt, Artificial Sequence; identical to SEQ ID NO: 219098
  derived and/or modified CDS sequence (opt5) from hemagglutinin__InfluenzaB__AGX21963

SEQ ID NO: 219613 - RNA, 1755 nt, Artificial Sequence
  derived and/or modified CDS sequence (opt5) from hemagglutinin__InfluenzaB__AGX21974
augaaggccaucauugugcugcucauggucguuaccagcaacgcugacagaaucugcacaggcauuacguccucuaauagcccccacguggugaaaaccgccacacagggggaagucaacgugaccggaguuaucccucugacaaccacaccgaccaaguccuacuucgcgaaucuuaaaggcacgcggacccgcgggaagcugugucccgauugccucaacuguacagaccuggauguggcucuuggaagaccuaugugcgucggcaccacacccucugccaaagccagcauucugcaugaagugcggccuguuaccuccggguguuuucccaucaugcacgaccgcacgaagaucagacaacucccuaaucugcugcggggauaugagaacauucgccucucuacacagaaugugaucgaugcugaaaaggccccgggcggccccuacagacuggggaccagcggauccugcccuaacgcuacaagcaaaucuggcuucuuugccaccauggcgugggccguccccaaggugaauaacaaaaaugcuaccaacccucuuacaguggagguccccuauauuuguacggaaggggaggaccagaucaccguuuggggauuccauuccgauaauaagacacagaugaaaaaccuguacggcgacagcaauccgcaaaaguuuaccucuuccgccaacggggugacaacccacuaugugagccagauuggaucuuucccugaucagacggaggacggcggccucccccaguccgggcggaucgucguggauuacaugaugcaaaagccuggaaaaacaggcaccauuguuuaucagcgcggggugcugcuuccccagaaggucuggugcgcuagcggaagauccaaagugaucaagggcucucugccccucaucggggaagccgacugucugcaugagaaauacggaggccugaacaagagcaaaccuuacuauaccggcgaacacgcgaaggccauugggaauugcccgaucuggguuaagacaccccucaaacuggcuaacggaaccaaguaccggccucccgccaaacuucugaaggagcgcggcuuuuucggggcuauugccggauuucucgagggcgggugggaaggcaugaucgccggauggcacggcuauacaucccauggggcucacggaguggcggucgccgcugaucugaaaagcacgcaggaggccauuaauaagaucaccaagaaccuuaauucucuguccgaacucgaggugaaaaaccugcaaagacugagcggcgccauggacgaacuccauaaugagauccuggagcuugacgaaaaggucgaugaccugcgggcugauacaauuucuagccagaucgagcucgccgugcugcuuuccaacgaagggauuaucaauucugaggacgaacaucugcucgcgcuggagcgcaaacugaagaaaaugcucggaccuagcgcuguugauauuggcaacggguguuucgagaccaagcacaagugcaaucagacaugccuggacagaaucgccgccggcaccuuuaacgcuggagaguucucccuucccacguuugauagccugaauaucaccgccgcuucucucaacgacgauggccuggacaaucacacaauucugcuuuacuauuccaccgccgcgagcucucucgccgugacacugaugcuggcuaucuucauugucuacaugaucucccgggauaacgugagcuguuccauuugccucuga

SEQ ID NO: 219614 - RNA, 1755 nt, Artificial Sequence; identical to SEQ ID NO: 219098
  derived and/or modified CDS sequence (opt5) from hemagglutinin__InfluenzaB__AGX21985

SEQ ID NO: 219615 - RNA, 1755 nt, Artificial Sequence; identical to SEQ ID NO: 219096
  derived and/or modified CDS sequence (opt5) from hemagglutinin__InfluenzaB__AGX21996

SEQ ID NO: 219616 - RNA, 1755 nt, Artificial Sequence; identical to SEQ ID NO: 219096
  derived and/or modified CDS sequence (opt5) from hemagglutinin__InfluenzaB__AGX22007

SEQ ID NO: 219617 - RNA, 1755 nt, Artificial Sequence; identical to SEQ ID NO: 219095
  derived and/or modified CDS sequence (opt5) from hemagglutinin__InfluenzaB__AGX22018

SEQ ID NO: 219618 - RNA, 1755 nt, Artificial Sequence; identical to SEQ ID NO: 219095
  derived and/or modified CDS sequence (opt5) from hemagglutinin__InfluenzaB__AGX22029

SEQ ID NO: 219619 - RNA, 1755 nt, Artificial Sequence; identical to SEQ ID NO: 219095
  derived and/or modified CDS sequence (opt5) from hemagglutinin__InfluenzaB__AGX22040

SEQ ID NO: 219620 - RNA, 1755 nt, Artificial Sequence
  derived and/or modified CDS sequence (opt5) from hemagglutinin__InfluenzaB__AGX22051
augaaggccaucauugugcugcucauggucguuaccagcaacgcugacagaaucugcacaggcauuacguccucuaauagcccccacguggugaaaaccgccacacagggggaggucaacgugaccggaguuaucccucugacaaccacaccgaccaaguccuacuucgcgaaucuuaaaggcacgcggacccgcgggaagcugugucccgauugccucaacuguacagaccuggauguggcucuuggaagaccuaugugcgucggcaccacacccucugccaaagccagcauucugcaugaagugcggccuguuaccuccggguguuuucccaucaugcacgaccgcacgaagaucagacaacucccuaaucugcugcggggauaugagaacauucgccucucuacacagaaugugaucgaugcugaaaaggccccgggcggccccuacagacuggggaccagcggauccugcccuaacgcuacaagcaaaucuggcuucuuugccaccauggcgugggccguccccaaggacaauaacaaaaaugcuaccaacccucuuacaguggaggugcccuauauuuguacggaaggggaggaucagaucaccgucuggggauuccauuccgacaauaagacacagaugaaaaaccuguacggcgauagcaauccgcaaaaguuuaccucuuccgccaacgggguuacaacccacuaugugagccagauuggaggcuucccugaccagaucgaggauggcgggcucccccagucuggacggauuguggucgacuacaugaugcaaaagccuggcaaaacggggacaaucguguaucagcgcggaguucugcuuccccagaagguguggugcgcuuccggcagaagcaaagucaucaaggggucccugccccucauuggagaagccgauugucugcaugagaaauacggcggccugaacaagucuaaaccuuacuauaccggggaacacgcgaaggccaucggaaauugcccgauuugggugaagacaccccucaaacuggcuaacggcaccaaguaccggccucccgccaaacuucugaaggagcgcggguuuuucggagcuaucgccggcuuucucgaagggggcugggaaggaaugauugccggcuggcacggguauaccagccauggagcucacggcguugcgguggccgcugaccugaaauccacacaggaggccaucaauaagaucacgaagaaccuuaauagccugucugaacucgaggucaaaaaccugcaaagacuguccggggccauggacgcucuccauaaugaaauucuggagcuugaugagaagguggacgaucugcgggccgacaccaucagcucucagauugaacucgcgguccugcuuagcaacgagggaaucauuaauuccgaagaugagcaucugcucgcucuggaacgcaaacugaagaaaaugcucggcccuucugccguggagaucgggaacggcuguuucgagacaaagcacaagugcaaucagaccugccuggacagaaucgccgcuggaacauuuaacgccggcgaguucagccuucccaccuuugauucccugaauauuacggcugccagccucaacgacgaugggcuggacaaucacaccauccugcuuuacuauucuacagcggccuccagccucgcuguuacccugaugcuggccauuuucaucguguacauggucucucgggauaacguguccuguagcauuugccucuga

SEQ ID NO: 219621 - RNA, 1755 nt, Artificial Sequence; identical to SEQ ID NO: 219095
  derived and/or modified CDS sequence (opt5) from hemagglutinin__InfluenzaB__AGX22062

SEQ ID NO: 219622 - RNA, 1755 nt, Artificial Sequence
  derived and/or modified CDS sequence (opt5) from hemagglutinin__InfluenzaB__AGX22073
augaaggccaucauugugcugcucauggucguuaccagcaacgcugacagaaucugcacaggcauuacguccucuaauagcccccacguggugaaaaccgccacacagggggaggucaacgugaccggaguuaucccucugacaaccacaccgaccaaguccuacuucgcgaaucuuaaaggcacgcggacccgcgggaagcugugucccgauugccucaacuguacagaccuggauguggcucuuggaagaccuaugugcgucggcaccacacccucugccaaagccagcauucugcaugaagugcggccuguuaccuccggguguuuucccaucaugcacgaccgcacgaagaucagacaacucccuaaucugcugcggggauaugagaacauucgccucucuacacagaaugugaucgaugcugaaaaggccccgggcggccccuacagacuggggaccagcggauccugcccuaacgcuacaagcaaaucuggcuucuuugccaccauggcgugggccguccccaaggacaauaacaaaaaugcuaccaacccucuuacaguggaggugcccuauauuuguacggaaggggaggaucagaucaccgucuggggauuccauuccgacaauaagacacagaugaaaaaccuguacggcgauagcaauccgcaaaaguuuaccucuuccgccaacgggguuacaacccacuaugugagccagauuggaggcuucccugaccagacggaggauggcgggcucccccagucuggacggaucguggucgacuacaugaugcaaaagccuggcaaaacagggaccauuguguaucagcgcggaguucugcuuccccagaagguguggugcgcuuccggcagaagcaaagucaucaaggggucccugccccucaucggagaagccgauugucugcaugagaaauacggcggccugaacaagucuaaaccuuacuauaccggggaacacgcgaaggccauuggaaauugcccgaucugggugaagacaccccucaaacuggcuaacggcaccaaguaccggccucccgccaaacuucugaaggagcgcggguuuuucggagcuauugccggcuuuaucgaagggggcugggagggaaugauugccggcuggcacggguauacaagccauggagcucacggcguugcgguggccgcugaccucaaauccacgcaggaggccaucaauaagaucaccaagaaccugaauagccuuucugaacuggaggucaaaaaccuccaaagacuguccggggccauggacgaacugcauaaugagauucucgagcuggaugaaaagguggacgaucuucgggcugacacaaucagcucucagauugagcuggccguccuccugagcaacgaaggaaucauuaauuccgaggaugaacaccuucuggcgcucgagcgcaaacugaagaaaaugcugggcccuucugcuguggacaucgggaacggcuguuucgagaccaagcacaagugcaaucagacaugccucgauagaaucgccgccggaaccuuuaacgcuggcgacuucagccugcccacguuugauucccuuaauauuaccgccgcuagccugaacgacgaugggcucgacaaucauacaauccugcuguacuauucuaccgccgcguccagccuugccguuacacucaugcuggcuauuuucaucguguacauggucucucgggacaacguguccuguagcauuugccuguga

SEQ ID NO: 219623 - RNA, 1755 nt, Artificial Sequence; identical to SEQ ID NO: 219098
  derived and/or modified CDS sequence (opt5) from hemagglutinin__InfluenzaB__AGX22095

SEQ ID NO: 219624 - RNA, 1755 nt, Artificial Sequence; identical to SEQ ID NO: 219096
  derived and/or modified CDS sequence (opt5) from hemagglutinin__InfluenzaB__AGX22106

SEQ ID NO: 219625 - RNA, 1755 nt, Artificial Sequence
  derived and/or modified CDS sequence (opt5) from hemagglutinin__InfluenzaB__AGX22128
augaaggccaucauugugcugcucauggucguuaccagcaacgcugacagaaucugcacaggcauuacguccucuaauagcccccacguggugaaaaccgccacacagggggaagucaacgugaccggaguuaucccucugacaaccacaccgaccaaguccuacuucgcgaaucuuaaaggcacgcggacccgcgggaagcugugucccgauugccucaacuguacagaccuggauguggcucuuggaagaccuaugugcgucggcaccacacccucugccaaagccagcauucugcaugaagugcggccuguuaccuccggguguuuucccaucaugcacgaccgcacgaagaucagacaacucccuaaucugcugcggggauaugagaacauucgccucucuacacagaaugugaucgaugcugaaaacgccccgggcggccccuacagacuggggaccagcggauccugcccuaaugcuacaagcaagucuggcuucuuugccaccauggcgugggccguccccaaagacaacaauaagaacgcuaccaauccucuuacaguggaggugcccuaugucuguacggaaggggaggaucagauuaccguuuggggauuccauuccgacaacaaaacacagaugaagaaucuguacggcgauagcaacccgcaaaaauuuaccucuuccgccaacggggugacaacccacuaugugagccagaucggaggcuucccugcucagacggaggacggcgggcucccccagucuggacggauugucguggauuacaugguucaaaagccucgcaagacaggcaccaucguguaucagagagggguccugcuuccccagaaaguguggugcgccuccggacggagcaagguuauuaaaggcucccugccccucaucggggaagcggacugucugcaugagaaguacggaggccugaauaaaucuaagccuuacuauaccggcgaacacgccaaagcuaucgggaacugcccgauuugggugaagacaccccucaagcuggccaauggaaccaaauaccgcccucccgcuaagcugcugaaagagagaggcuuuuucggggccaucgccggauuucucgagggcgggugggaaggcaugauugcuggauggcacggcuauacaagccauggggcgcacggagucgccguggcugccgaucugaaguccacgcaggaggccaucaacaaaauuaccaagaaucuuaacagccugucugaacucgagaucaagaaucugcaacggcuguccggcgcuaugaacgaacuccauaaugagauccuggagcuugacgaaaaagucgacgaucugcgcgccgacacaauuagcucucagaucgagcucgcggugcugcuuagcaacgaagggauuaucaauuccgaggaugaacaccuucucgcucuggagagaaagcugaaaaagaugcucggaccuucugccguugacauuggcaacggguguuucgagaccaaacacaagugcaaucagacaugccuggaucggaucgccgcuggcaccuuuaacgccggagaguucagccuucccacguuugacucccugaauaucaccgcugccagccucaacgaugacggccuggauaaccauacaauucugcuuuacuauucuaccgcggccuccagccucgcugugacacugaugcuggccaucuucauugucuacauggugucuagagacaauguuuccuguagcaucugccucuga

SEQ ID NO: 219626 - RNA, 1755 nt, Artificial Sequence
  derived and/or modified CDS sequence (opt5) from hemagglutinin__InfluenzaB__AGX22139
augaaggccaucauugugcugcucauggucguuaccagcaacgcugacagaaucugcacaggcauuacguccucuaauagcccccacguggugaaaaccgccacacagggggaggucaacgugaccggaguuaucccucugacaaccacaccgaccaaguccuacuucgcgaaucuuaaaggcacgcggacccgcgggaagcugugucccgauugccucaacuguacagaccuggauguggcucuuggaagaccuaugugcgucggcaccacacccucugccgaagccagcauucugcaugaggugcggccuguuaccuccggguguuuucccaucaugcacgaccgcacgaaaaucagacaacucccuaaucugcugcggggauaugaaaacauucgccucucuacacagaaugugaucgaugcugagaaggccccgggcggccccuacagacuggggaccagcggauccugcccuaacgcuacaagcaagucuggcuucuuugccaccauggcgugggccguccccaaagacaauaacaagaaugcuaccaacccucuuacaguggaagugcccuauauuuguacggagggggaggaucagaucaccgucuggggauuccauuccgacaauaaaacacagaugaagaaccuguacggcgauagcaauccgcaaaaauuuaccucuuccgccaacgggguuacaacccacuaugugagccagauuggaggcuucccugaccagacggaagauggcgggcucccccagucuggacggaucguggucgacuacaugaugcaaaagccuggcaagacagggaccauuguguaucagcgcggaguucugcuuccccagaaaguguggugcgcuuccggcagaagcaaggucaucaaagggucccugccccucaucggagaggccgauugucugcaugaaaaguacggcggccugaacaaaucuaagccuuacuauaccggggagcacgcgaaagccauuggaaauugcccgaucugggugaagacaccccucaagcuggcuaacggcaccaaauaccggccucccgccaagcugcugaaagagcgcggguuuuucggagcuauugccggcuuucucgaagggggcugggagggaaugaucgccggcuggcacggguauacaagccauggagcucacggcguugcgguggccgcugaccugaaguccacgcaggaagccauuaauaaaaucaccaagaaccuuaauagccugucugagcucgaagucaagaaccugcaaagacuguccggggccauggacgagcuccauaaugagauccuggaacuugaugagaaaguggacgaucugcgggcugacacaauuagcucucagaucgaacucgccguccugcuuagcaacgagggaauuaucaauuccgaagaugagcaccuucucgcgcuggagcgcaagcugaaaaagaugcucggcccuucugcuguggacauugggaacggcuguuucgaaaccaaacacaagugcaaucagacaugccuggauagaaucgccgccggaaccuuuaacgcuggcgaguucagccuucccacguuugacucccugaauaucaccgccgcuagccucaacgaugacgggcuggauaaucauacaauucugcuuuacuauucuaccgccgcguccagccucgccguuacacugaugcuggcuaucuucauuguguacauggucucucgggacaacguguccuguagcaucugccucuga

SEQ ID NO: 219627 - RNA, 1755 nt, Artificial Sequence; identical to SEQ ID NO: 219626
  derived and/or modified CDS sequence (opt5) from hemagglutinin__InfluenzaB__AGX22150

SEQ ID NO: 219628 - RNA, 1755 nt, Artificial Sequence; identical to SEQ ID NO: 219626
  derived and/or modified CDS sequence (opt5) from hemagglutinin__InfluenzaB__AGX22161

SEQ ID NO: 219629 - RNA, 1755 nt, Artificial Sequence; identical to SEQ ID NO: 219095
  derived and/or modified CDS sequence (opt5) from hemagglutinin__InfluenzaB__AGX22172

SEQ ID NO: 219630 - RNA, 1755 nt, Artificial Sequence; identical to SEQ ID NO: 219626
  derived and/or modified CDS sequence (opt5) from hemagglutinin__InfluenzaB__AGX22183

SEQ ID NO: 219631 - RNA, 1755 nt, Artificial Sequence; identical to SEQ ID NO: 219626
  derived and/or modified CDS sequence (opt5) from hemagglutinin__InfluenzaB__AGX22194

SEQ ID NO: 219632 - RNA, 1755 nt, Artificial Sequence; identical to SEQ ID NO: 219626
  derived and/or modified CDS sequence (opt5) from hemagglutinin__InfluenzaB__AGX22205

SEQ ID NO: 219633 - RNA, 1755 nt, Artificial Sequence; identical to SEQ ID NO: 219096
  derived and/or modified CDS sequence (opt5) from hemagglutinin__InfluenzaB__AGX22216

SEQ ID NO: 219634 - RNA, 1755 nt, Artificial Sequence; identical to SEQ ID NO: 219098
  derived and/or modified CDS sequence (opt5) from hemagglutinin__InfluenzaB__AGX22227

SEQ ID NO: 219635 - RNA, 1755 nt, Artificial Sequence
  derived and/or modified CDS sequence (opt5) from hemagglutinin__InfluenzaB__AGX22238
augaaggccaucauugugcugcucauggucguuaccagcaacgcugacagaaucugcacaggcauuacguccucuaauagcccccacauggugaaaaccgccacacagggggaggugaacgucaccggagugaucccucugacaaccacaccgaccaaguccuacuucgcgaaucuuaaaggcacgcggacccgcgggaagcugugucccgauugccucaacuguacagaccuggauguugcucuuggaagaccuaugugcgugggcaccacacccucugccaaagccagcauucugcaugaaguccggccugugaccuccggguguuuucccaucaugcacgaccgcacgaagaucagacaacucccuaaucugcugcggggauaugagaacauucgccucucuacacagaauguuaucgaugcugaaaaggccccgggcggccccuacagacuggggaccagcggauccugcccuaacgcuacaagcaaaucuggcuucuuugccaccauggcgugggccgugcccaaggacaauaacaaaaaugcuaccaacccucuuacagucgaggugcccuauauuuguacggaaggggaggaucagaucaccguguggggauuccauuccgacaauaagacacagaugaaaaaccuguacggcgauagcaauccgcaaaaguuuaccucuuccgccaacggggucacaacccacuauguuagccagauuggaggcuucccugaccagacggaggauggcgggcucccccagucuggacggaucgugguggacuacaugaugcaaaagccuggcaaaacagggaccauugucuaucagcgcggagugcugcuuccccagaagguuuggugcgcuuccggcagaagcaaagugaucaaggggucccugccccucaucggagaagccgauugucugcaugagaaauacggcggccugaacaagucuaaaccuuacuauaccggggaacacgcgaaggccauuggaaauugcccgaucugggucaagacaccccucaaacuggcuaacggcaccaaguaccggccucccgccaaacuucugaaggagcgcggguuuuucggagcuauugccggcuuucucgaagggggcugggaaggaaugaucgccggcuggcacggguauacaagccauggagcucacggcguggcgguugccgcugaccugaaauccacgcaggaggccauuaauaagaucaccaagaaccuuaauagccugucugaacucgaggugaaaaaccugcaaagacuguccggggccauggacgaacuccauaaugagauccuggagcuugaugaaaaggucgacgaucugcgggcugacacaauuagcucucagaucgagcucgccgugcugcuuagcaacgaaggaauuaucaauuccgaggaugaacaucugcucgcgcuggagcgcaaacugaagaaaaugcucggcccuucugcugucgacauugggaacggcuguuucgagaccaagcacaagugcaaucagacaugccuggauagaaucgccgccggaaccuuuaacgcuggcgaguucagccuucccacguuugacucccugaauaucaccgccgcuagccucaacgaugacgggcuggauaaucacacaauucugcuuuacuauucuaccgccgcguccagccucgccgugacacugaugcuggcuaucuucauuguuuacauggugucucgggacaacgucuccuguagcaucugccucuga

SEQ ID NO: 219636 - RNA, 1755 nt, Artificial Sequence; identical to SEQ ID NO: 219096
  derived and/or modified CDS sequence (opt5) from hemagglutinin__InfluenzaB__AGX22249

SEQ ID NO: 219637 - RNA, 1755 nt, Artificial Sequence; identical to SEQ ID NO: 219095
  derived and/or modified CDS sequence (opt5) from hemagglutinin__InfluenzaB__AGX22260

SEQ ID NO: 219638 - RNA, 1755 nt, Artificial Sequence
  derived and/or modified CDS sequence (opt5) from hemagglutinin__InfluenzaB__AGX22271
augaaggccaucauugugcugcucauggucguuaccagcaacgcugacagaaucugcacaggcauuacguccucuaauagcccccacguggugaaaaccgccacacagggggaggucaacgugaccggaguuaucccucugacaaccacaccgaccaaguccuacuucgcgaaucuuaaaggcacgcggacccgcgggaagcugugucccgauugccucaacuguacagaccuggauguggcucuuggaagaccuaugugcgucggcaccacacccucugccaaagccagcauucugcaugaagugcggccuguuaccuccggguguuuucccaucaugcacgaccgcacgaagaucagacaacucccuaaucugcugcggggauaugagaacauucgccucucuacacagaaugugaucgaugcugaaaaggccccgggcggccccuacagacuggggaccagcggauccugcccuaacgcuacaagcaaaucuggcuucuuugccaccauggcgugggccguccccaaggacaauaacaaaaaugcuaccaacccucuuacaguggaggugcccuauauuuguacggaaggggaggaucagaucaccgucuggggauuccauuccgacaauaagacacagaugaaaaaccuguacggcgauagcaauccgcaaaaguuuaccucuuccgccaacgggguuacaacccacuaugugagccagauuggaggcuucccugaccagacggaggauggcgggcucccccagucuggacggaucguggucgacuacaugaugcaaaagccuggcaaaacagggaccauuguguaucagcgcggaguucugcuuccccagaagguguggugcgcuuccggcagaagcaaagucaucaaggggucccugccccucaucggagaagccgauugucugcaugagaaauacggcggccugaacaagucuaaaccuuacuauaccggggaacacgcgaaggccauuggaaauugcccgaucugggugaagacaccccucaaacuggcuaacggcaccaaguaccggccuagcgccaaacuucugaaggagcgcggguuuuucggagcuauugccggcuuucucgaagggggcugggagggaaugaucgccggcuggcacggguauacaucccauggagcucacggcguugcgguggccgcugaccugaaaagcacgcaggaggccauuaauaagaucaccaagaaccuuaauucucuguccgaacucgaggucaaaaaccugcaaagacugagcggggccauggacgaacuccauaaugagauccuggagcuugaugaaaagguggacgaucugcgggcugacacaauuucuagccagaucgagcucgccguccugcuuuccaacgaaggaauuaucaauucugaggaugaacaucugcucgcgcuggagcgcaaacugaagaaaaugcucggccccagcgcuguggagauugggaacggcuguuucgaaaccaagcacaagugcaaucagacaugccuggacagaaucgccgccggaaccuuuaacgcuggcgaguucucccuuccuacguuugauagccugaauaucaccgccgcuucucucaacgacgaugggcuggacaaucacacaauucugcuuuacuauuccaccgccgcgagcucucucgccguuacacugaugcuggcuaucuucauuguguacauggucucccgggauaacgugagcuguuccaucugccucuga

SEQ ID NO: 219639 - RNA, 1755 nt, Artificial Sequence
  derived and/or modified CDS sequence (opt5) from hemagglutinin__InfluenzaB__AGX22282
augaaggccaucauugugcugcucauggucguuaccagcaacgcugacagaaucugcacaggcauuacguccucuaauagcccccacguggugaaaaccgccacacagggggaagucaacgugaccggaguuaucccucugacaaccacaccgaccaaguccuacuucgcgaaucuuaaaggcacgcggacccgcgggaagcugugucccgauugccucaacuguacagaccuggauguggcucuuggaagaccuaugugcgucggcaccacacccucugccaaagccagcauucugcaugaagugcggccuguuaccuccggguguuuucccaucaugcacgaccgcacgaagaucagacaacucccuaaucugcugcggggauaugagaacauucgccucucuacacagaaugugaucgaugcugaaaaggccccgggcggccccuacagacuggggaccagcggauccugcccuaacgcuacaagcaaaucuggcuucuuugccaccauggcgugggccguccccaaggacaauaacaaaaaugcuaccaacccucuuacaguggaggugcccuauauuuguacggaaggggaggaucagaucaccgucuggggauuccauuccgacaauaagacacagaugaaaaaccuguacggcgauagcaauccgcaaaaguuuaccucuuccgccaacgggguuacaacccacuaugugagccagauuggagacuucccugaucagacggaggacggcggccucccccagucugggcggaucguggucgauuacaugaugcaaaagccuggaaaaacaggcaccauuguguaucagcgcgggguucugcuuccccagaagguguggugcgcuuccggaagaagcaaagucaucaagggcucccugccccucaucggggaagccgacugucugcaugagaaauacggaggccugaacaagucuaaaccuuacuauaccggcgaacacgcgaaggccauugggaauugcccgaucugggugaagacaccccucaaacuggcuaacggaaccaaguaccggccucccgccaaacuucugaaggagcgcggcuuuuucggggcuauugccggauuucucgagggcgggugggaaggcaugaucgccggauggcacggcuauacaagccauggggcucacggaguugcgguggccgcugaccugaaauccacgcaggaggccauuaauaagaucaccaagaaccuuaauagccugucugaacucgaggucaaaaaccugcaaagacuguccggcgccauggaugaacuccauaaugagauccuggagcuugacgaaaagguggaugaccugcgggcugauacaauuagcucucagaucgagcucgccguccugcuuagcaacgaagggauuaucaauuccgaggacgaacaucugcucgcgcuggagcgcaaacugaagaaaaugcucggaccuucugcuguggauauuggcaacggguguuucgagaccaagcacaagugcaaucagacaugccuggacagaaucgccgccggcaccuuuaacgcuggagaguucagccuucccacguuugauucccugaauaucaccgccgcuagccucaacgacgauggccuggacaaucacacaauucugcuuuacuauucuaccgccgcguccagccucgccguuacacugaugcuggcuaucuucauuguguacauggucucucgggacaacguguccuguagcaucugccucuga

SEQ ID NO: 219640 - RNA, 1755 nt, Artificial Sequence; identical to SEQ ID NO: 219095
  derived and/or modified CDS sequence (opt5) from hemagglutinin__InfluenzaB__AGX22293

SEQ ID NO: 219641 - RNA, 1755 nt, Artificial Sequence
  derived and/or modified CDS sequence (opt5) from hemagglutinin__InfluenzaB__AGX22304
augaaggccaucauugugcugcucauggucguuaccagcaacgcugacagaaucugcacaggcauuacguccucuaauagcccccacguggugaaaaccgccacacagggggaggucaacgugaccggaguuaucccucugacaaccacaccgaccaaguccuacuucgcgaaucuuaaaggcacgcggacccgcgggaagcugugucccgauugccucaacuguacagaccuggauguggcucuuggaagaccuaugugcgucggcaccacacccucugccaaagccagcauucugcaugaagugcggccuguuaccuccggguguuuucccaucaugcacgaccgcacgaagaucagacaacucccuaaucugcugcggggauaugagaacauucgccucucuacacagaaugugaucgaugcugaaaaggccccgggcggccccuacagacuggggaccagcggauccugcccuaacgcuacaagcaaaucuggcuucuuugccaccauggcgugggccguccccaaggacaauaacaaaaaugcuaccaacccucuuacaguggaggugcccuauauuuguacggaaggggaggaucagaucaccgucuggggauuccauuccgacaauaagacacagaugaaaaaccuguacggcgauagcaauccgcaaaaguuuaccucuuccacaaacgggguuaccacgcacuaugugagccagauuggaggcuucccugaccagacagaggauggcgggcucccccagucuggacggaucguggucgacuacaugaugcaaaagccuggcaaaaccgggaccauuguguaucagcgcggaguucugcuuccccagaagguguggugcgccuccggcagaagcaaagucaucaaggggucccugccccucaucggagaagcugauugucugcaugagaaauacggcggccugaacaagucuaaaccuuacuauacaggggaacacgccaaggcgauuggaaauugcccgaucugggugaagacaccccucaaacuggccaacggcaccaaguaccggccucccgcuaaacuucugaaggagcgcggguuuuucggagccauugcuggcuuucucgaagggggcugggaaggaaugaucgccggcuggcacggguauacgagccauggagcccacggcguugcuguggcggccgaccugaaauccacccaggaggcuauuaauaagaucacaaagaaccuuaauagccugucugaacucgaggucaaaaaccugcaaagacuguccggggccauggacgaacuccauaaugagauccuggagcuugaugaaaagguggacgaucugcgggccgacaccauuagcucucagaucgagcucgcuguccugcuuagcaacgaaggaauuaucaauuccgaggaugaacaucugcucgcccuggagcgcaaacugaagaaaaugcucggcccuucugcgguggacauugggaacggcuguuucgagacaaagcacaagugcaaucagaccugccuggauagaaucgcugccggaacguuuaacgccggcgaguucagccuucccaccuuugacucccugaauaucacagcugccagccucaacgaugacgggcuggauaaucacaccauucugcuuuacuauucuacagcugccuccagccucgcgguuacccugaugcuggccaucuucauuguguacauggucucucgggacaacguguccuguagcaucugccucuga

SEQ ID NO: 219642 - RNA, 1755 nt, Artificial Sequence; identical to SEQ ID NO: 219095
  derived and/or modified CDS sequence (opt5) from hemagglutinin__InfluenzaB__AGX22315

SEQ ID NO: 219643 - RNA, 1755 nt, Artificial Sequence; identical to SEQ ID NO: 218498
  derived and/or modified CDS sequence (opt5) from hemagglutinin__InfluenzaB__AGX22326

SEQ ID NO: 219644 - RNA, 1755 nt, Artificial Sequence; identical to SEQ ID NO: 219098
  derived and/or modified CDS sequence (opt5) from hemagglutinin__InfluenzaB__AGX22337

SEQ ID NO: 219645 - RNA, 1755 nt, Artificial Sequence; identical to SEQ ID NO: 219098
  derived and/or modified CDS sequence (opt5) from hemagglutinin__InfluenzaB__AGX22348

SEQ ID NO: 219646 - RNA, 1755 nt, Artificial Sequence
  derived and/or modified CDS sequence (opt5) from hemagglutinin__InfluenzaB__AGX22359
augaaggccaucauugugcugcucauggucguuaccagcaacgcugacagaaucugcacaggcauuacguccucuaauagcccccacguggugaaaaccgccacacagggggaagucaacgugaccggaguuaucccucugacaaccacaccgaccaaguccuacuucgcgaaucuuaaaggcacgcggacccgcgggaagcugugucccgauugccucaacuguacagaccuggauguggcucuuggaagaccuaugugcgucggcaccacacccucugccaaagccagcauucugcaugaagugcggccuguuaccuccggguguuuucccaucaugcacgaccgcacgaagaucagacaacucccuaaucugcugcggggauaugagaacauucgccucucuacacagaaugugaucgaugcugaaaacgccccgggcggccccuacagacuggggaccagcggauccugcccuaaugcuacaagcaagucuggcuucuuugccaccauggcgugggccguccccaaagacaacaauaagaacgcuaccaauccucuuacaguggaggugcccuaugucuguacggaaggggaggaucagauuaccguuuggggauuccauuccgacaacaaaacacagaugaagaaucuguacggcgauagcaacccgcaaaaauuuaccucuuccgccaacggggugacaacccacuaugugagccagaucggaggcuucccugcucagacggaggacggcgggcucccccagucuggacggauugucguggauuacaugguucaaaagccuaagaaaacaggcaccaucguguaucagcgcgggguccugcuuccccagaagguguggugcgccuccggaagaagcaaaguuauuaagggcucccugccccucaucggggaagcggacugucugcaugagaaauacggaggccugaauaagucuaaaccuuacuauaccggcgaacacgccaaggcuaucgggaacugcccgauuugggugaagacaccccucaaacuggccaauggaaccaaguaccggccucccgcuaaacuucugaaggagcgcggcuuuuucggggccaucgccggauuucucgagggcgggugggaaggcaugauugcuggauggcacggcuauacaagccauggggcgcacggagucgccguggcugccgaucugaaauccacgcaggaggccaucaacaagauuaccaagaaucuuaacagccugucugaacucgagaucaaaaaucugcaaagacuguccggcgcuauggacgaacuccauaacgagauccuggagcuugacgaaaaggucgaugaccugcgggccgauacaauuagcucucagaucgagcucgcggugcugcuuagcaaugaagggauuaucaacuccgaggacgaacaucugcucgcucuggagcgcaaacugaagaaaaugcucggaccuucugccguugauauuggcaauggguguuucgagaccaagcacaagugcaaccagacaugccuggacagaaucgccgcuggcaccuuuaaugccggagaguucagccuucccacguuugauucccugaacaucaccgcugccagccucaaugacgauggccuggacaaccacacaauucugcuuuacuauucuaccgcggccuccagccucgcugugacacugaugcuggccaucuucauugucuacauggugucucgggauaacguuuccuguagcaucugccucuga

SEQ ID NO: 219647 - RNA, 1755 nt, Artificial Sequence; identical to SEQ ID NO: 219096
  derived and/or modified CDS sequence (opt5) from hemagglutinin__InfluenzaB__AGX22370

SEQ ID NO: 219648 - RNA, 1755 nt, Artificial Sequence
  derived and/or modified CDS sequence (opt5) from hemagglutinin__InfluenzaB__AGX22381
augaaggccaucauugugcugcucauggucguuaccagcaacgcugacagaaucugcacaggcauuacguccucuaauagcccccacguggugaaaaccgccacacagggggaggucaacgugaccggaguuaucccucugacaaccacaccgaccaaguccuacuucgcgaaucuuaaaggcacgcggacccgcgggaagcugugucccgauugccucaacuguacagaccuggauguggcucuuggaagaccuaugugcgucggcaccacacccucugccaaagccagcauucugcaugaagugcggccuguuaccuccggguguuuucccaucaugcacgaccgcacgaagaucagacaacucucuaaucugcugcggggauaugagaacauucgccucagcacacagaaugugaucgaugcugaaaaggccccuggcggcccguacagacuggggaccuccggaagcugccccaacgcuacaucuaaauccggcuucuuugccaccauggcgugggccgucccuaaggacaauaacaaaaaugcuaccaacccccuuacaguggaggugccuuauauuuguacggaaggggaggaucagaucaccgucuggggauuccauagcgacaauaagacacagaugaaaaaccuguacggcgauucuaauccccaaaaguuuaccuccagcgccaacgggguuacaacccacuaugugucucagauuggaggcuucccggaccagacggaggauggcgggcucccucaguccggacggaucguggucgacuacaugaugcaaaagcccggcaaaacagggaccauuguguaucagcgcggaguucugcuuccucagaagguguggugcgcuagcggcagauccaaagucaucaaggggucucugccccucaucggagaagccgauugucugcaugagaaauacggcggccugaacaagagcaaacccuacuauaccggggaacacgcgaaggccauuggaaauugcccuaucugggugaagacaccgcucaaacuggcuaacggcaccaaguaccggcccccugccaaacuucugaaggagcgcggguuuuucggagcuauugccggcuuucucgaagggggcugggaaggaaugaucgccggcuggcacggguauacaucccauggagcucacggcguugcgguggccgcugaccugaaaagcacgcaggaggccauuaauaagaucaccaagaaccuuaauucucuguccgaacucgaggucaaaaaccugcaaagacugagcggggccauggacgaacuccauaaugagauccuggagcuugaugaaaagguggacgaucugcgggcugacacaauuucuagccagaucgagcucgccguccugcuuuccaacgaaggaauuaucaauucugaggaugaacaucugcucgcgcuggagcgcaaacugaagaaaaugcucggccccagcgcuguggacauugggaacggcuguuucgagaccaagcacaagugcaaucagacaugccuggauagaaucgccgccggaaccuuuaacgcuggcgaguucucccuuccuacguuugacagccugaauaucaccgccgcuucucucaacgaugacgggcuggauaaucacacaauucugcuuuacuauuccaccgccgcgagcucucucgccguuacacugaugcuggcuaucuucauuguguacauggucucccgggacaacgugagcuguuccaucugccucuga

SEQ ID NO: 219649 - RNA, 1755 nt, Artificial Sequence; identical to SEQ ID NO: 219095
  derived and/or modified CDS sequence (opt5) from hemagglutinin__InfluenzaB__AGX22392

SEQ ID NO: 219650 - RNA, 1755 nt, Artificial Sequence
  derived and/or modified CDS sequence (opt5) from hemagglutinin__InfluenzaB__AGX22403
augaaggccaucauugugcugcucauggucguuaccagcaacgcugacagaaucugcacaggcauuacguccucuaauagcccccacguggugaaaaccgccacacagggggaggucaacgugaccggaguuaucccucugacaaccacaccgaccaaguccuacuucgcgaaucuuaaaggcacgcggacccgcgggaagcugugucccgauugccucaacuguacagaccuggauguggcucuuggaagaccuaugugcgucggcaccacacccucugccaaagccagcauucugcaugaagugcggccuguuaccuccggguguuuucccaucaugcacgaccgcacgaagaucagacaacucccuaaucugcugcggggauaugagaacauucgccucucuacacagaaugugaucgaugcugaaaaggccccgggcggccccuacagacuggggaccagcggauccugcccuaacgcuacaagcaaaucuggcuucuuugccaccauggcgugggccguccccaaggacaauaacaaaaaugcuaccaacccucuuacaguggaggugcccuauauuuguacggaaggggaggaucagaucaccgucuggggauuccauuccgacaauaagacacagaugaaaaaccuguacggcgauagcaauccgcaaaaguuuaccucuuccgccaacgggguuacaacccacuaugugagccagauuggaggcuucccugaccagacggaggauggcgggcucccccagucuggacggaucguggucgacuacaugaugcaaaagccuggcaaaacagggaccauuguguaucagcgcggaguucugcuuccccagaagguguggugcgcuuccggcagaagcaaagucaucaaggggucccugccccucaucggagaagccgauugucugcaugagaaauacggcggccugaacaagucuaaaccuuacuauaccggggaacacgcgaaggccauuggaaauugcccgaucugggugaagacaccccucaaacuggcuaacggcaccaaguaccggccucccgccaaacuucugaaggagcgcggguuuuucggagcuauugccggcuuucucgaagggggcugggagggaaugaucgccggcuggcacggguauacaagccauggagcucacggcguugcgguggccgcugaccugaaauccacgcaggaggccauuaauaagaucaccaagaaccuuaauagccugucugaacucgaggucaaaaaccugcaaagacuguccggggccauggacgaacuccauaaugagauccuggagcuugaugaaaagguggacgaucugcgggcugacacaauuagcucucagaucgagcucgccguccugcuuagcaacgaaggaauuaucaauuccgaggaugaacaucugcucgcgcuggagcgcaaacugaagaaaaugcucggcccuucugcuguggacauugggaacggcuguuucgagaccaagcacaagugcaaucagacaugccuggauagaaucgccgccggaaccuuuaacgcuggcgacuucagccuucccacguuugauucccugaauaucaccgccgcuagccucaacgacgaugggcuggacaaucacacaauucugcuuuacuauucuaccgccgcguccagccucgccguuacacugaugcuggcuaucuucauuguguacauggucucucgggacaacguguccuguagcaucugccucuga

SEQ ID NO: 219651 - RNA, 1755 nt, Artificial Sequence; identical to SEQ ID NO: 219095
  derived and/or modified CDS sequence (opt5) from hemagglutinin__InfluenzaB__AGX22414

SEQ ID NO: 219652 - RNA, 1755 nt, Artificial Sequence
  derived and/or modified CDS sequence (opt5) from hemagglutinin__InfluenzaB__AGX22425
augaaggccaucauugugcugcucauggucguuaccagcaacgcugacagaaucugcacaggcauuacguccucuaauagcccccacguggugaaaaccgccacacagggggaggucaacgugaccggaguuaucccucugacaaccacaccgaccaaguccuacuucgcgaaucuuaaaggcacgcggacccgcgggaagcugugucccgauugccucaacuguacagaccuggauguggcucuuggaagaccuaugugcgucggcaccacacccucugccaaagccagcauucugcaugaagugcggccuguuaccuccggguguuuucccaucaugcacgaccgcacgaagaucagacaacucccuaaucugcugcggggauaugagaacauucgccucucuacacagaaugugaucgaugcugaaaaggccccgggcggccccuacagacuggggaccagcggauccugcccuaacgcuacaagcaaaucuggcuucuuugccaccauggcgugggccguccccaaggacaauaacaaaaaugcuaccaacccucuuacaguggaggugcccuauauuuguacggaaggggaggaucagaucaccgucuggggauuccauuccgacaauaagauucagaugaaaaaccuguacggcgauagcaauccgcaaaaguuuacaucuuccgccaacgggguuaccacacacuaugugagccagaucggaggcuucccugaccagaccgaggauggcgggcucccccagucuggacggauuguggucgacuacaugaugcaaaagccuggcaaaacggggacaaucguguaucagcgcggaguucugcuuccccagaagguguggugcgcuuccggcagaagcaaagucaucaaggggucccugccccucauuggagaagccgauugucugcaugagaaauacggcggccugaacaagucuaaaccuuacuauaccggggaacacgcgaaggccaucggaaauugcccgauuugggugaagacaccccucaaacuggcuaacggcaccaaguaccggccucccgccaaacuucugaaggagcgcggguuuuucggagcuaucgccggcuuucucgaagggggcugggagggaaugauugccggcuggcacggguauaccagccauggagcucacggcguugcgguggccgcugaccugaaauccacacaggaggccaucaauaagaucacgaagaaccuuaauagccugucugaacucgaggucaaaaaccugcaaagacuguccggggccauggacgaacuccauaaugagauucuggagcuugaugaaaagguggacgaucugcgggcugacaccaucagcucucagauugagcucgccguccugcuuagcaacgaaggaaucauuaauuccgaggaugaacaucugcucgcgcuggagcgcaaacugaagaaaaugcucggcccuucugcuguggagaucgggaacggcuguuucgaaacaaagcacaagugcaaucagaccugccuggacagaaucgccgccggaacauuuaacgcuggcgaguucagccuucccaccuuugauucccugaauauuacggccgcuagccucaacgacgaugggcuggacaaucacaccauccugcuuuacuauucuacagccgcguccagccucgccguuacccugaugcuggcuauuuucaucguguacauggucucucgggauaacguguccuguagcauuugccucuga

SEQ ID NO: 219653 - RNA, 1755 nt, Artificial Sequence; identical to SEQ ID NO: 219096
  derived and/or modified CDS sequence (opt5) from hemagglutinin__InfluenzaB__AGX22436

SEQ ID NO: 219654 - RNA, 1755 nt, Artificial Sequence; identical to SEQ ID NO: 219096
  derived and/or modified CDS sequence (opt5) from hemagglutinin__InfluenzaB__AGX22445

SEQ ID NO: 219655 - RNA, 1755 nt, Artificial Sequence
  derived and/or modified CDS sequence (opt5) from hemagglutinin__InfluenzaB__AGX22456
augaaggccaucauugugcugcucauggucguuaccagcaacgcugacagaaucugcacaggcauuacguccucuagcucuccccacguggugaaaaccgccacacagggggaggucaaugugaccggaguuaucccucugacaaccacaccgaccaaguccuacuucgcgaaccuuaaaggcacgcggacccgcgggaagcugugucccgauugccucaauuguacagaccuggauguggcucuuggaagaccuaugugcgucggcaccacacccagcgccaaagccuccauucugcaugaagugcggccuguuaccucuggguguuuucccaucaugcacgaccgcacgaagaucagacaacucccuaaccugcugcggggauaugagaauauucgccucagcacacagaacgugaucgaugcugaaaaggccccgggcggccccuacagacuggggaccuccggaagcugcccuaaugcuacaucuaaauccggcuucuuugccaccauggcgugggccguccccaaggacaacaauaaaaacgcuaccaauccucuuacaguggaggugcccuauauuuguacggaaggggaggaucagaucaccgucuggggauuccauagcgacaacaagacacagaugaaaaaucuguacggcgauucuaacccgcaaaaguuuaccuccagcgccaaugggguuacaacccacuaugugucucagauuggaggcuucccugaccagacggaggauggcgggcucccccaguccggacggaucguggucgacuacaugaugcaaaagccuggcaaaacagggaccauuguguaucagcgcggaguucugcuuccccagaagguguggugcgcuagcggcagauccaaagucaucaaggggucucugccccucaucggagaagccgauugucugcaugagaaauacggcggccugaacaagagcaaaccuuacuauaccggggaacacgcgaaggccauuggaaacugcccgaucugggugaagacaccccucaaacuggcuaauggcaccaaguaccggccucccgccaaacuucugaaggagcgcggguuuuucggagcuauugccggcuuucucgaagggggcugggaaggaaugaucgccggcuggcacggguauacaucccauggagcucacggcguugcgguggccgcugaccugaaaagcacgcaggaggccauuaacaagaucaccaagaaucuuaacucucuguccgaacucgaggucaaaaaucugcaaagacugagcggggccauggacgaacuccauucugagauccuggagcuugaugaaaagguggacgaucugcgggcugacacaauuagcucccagaucgagcucgccguccugcuuucuaacgaaggaauuaucaauagcgaggaugaacaucugcucgcgcuggagcgcaaacugaagaaaaugcucggcccuuccgcuguggacauugggaacggcuguuucgagaccaagcacaagugcaaucagacaugccuggauagaaucgccgccggaaccuuuaacgcuggcgaguucagccuucccacguuugacucucugaauaucaccgccgcuucccucaacgaugacgggcuggauaaucacacaauucugcuuuacuauagcaccgccgcgucuucccucgccguuacacugaugcuggcuaucuucauuguguacaucgucagccgggacaacguguccuguucuauuugccucuga

SEQ ID NO: 219656 - RNA, 1755 nt, Artificial Sequence; identical to SEQ ID NO: 219095
  derived and/or modified CDS sequence (opt5) from hemagglutinin__InfluenzaB__AGX22467

SEQ ID NO: 219657 - RNA, 1755 nt, Artificial Sequence; identical to SEQ ID NO: 219095
  derived and/or modified CDS sequence (opt5) from hemagglutinin__InfluenzaB__AGX22478

SEQ ID NO: 219658 - RNA, 1755 nt, Artificial Sequence
  derived and/or modified CDS sequence (opt5) from hemagglutinin__InfluenzaB__AGX22489
augaaggccaucauugugcugcucauggucguuaccagcaacgcugacagaaucugcacaggcauuacguccucuaauagcccccacguggugaaaaccgccacacagggggaagucaacgugaccggaguuaucccucugacaaccacaccgaccaaguccuacuucgcgaaucuuaaaggcacgcggacccgcgggaagcugugucccgauugccucaacuguacagaccuggauguggcucuuggaagaccuaugugcgucggcaccacacccucugccaaagccagcauucugcaugaagugcggccuguuaccuccggguguuuucccaucaugcacgaccgcacgaagaucagacaacucccuaaucugcugcggggauaugagaacauucgccucucuacacagagcgcuaucgaugccgaaaaggcuccgggcggccccuacagacuggggaccuccggaagcugcccuaaugccacaucuaaauccggcuucuuugcgaccauggccugggcugugcccaaggacaacaauaaaaacgccaccaauccucuuacagucgaggugcccuauauuuguacggaaggggaggaucagaucaccguguggggauuccauagcgacaacaagacacagaugaaaaaucuguacggcgauucuaacccgcaaaaguuuaccuccagcgcuaauggggucacaacccacuauguuucucagauuggaggcuucccuggccagacggaggacgggggacucccccaguccggccggaucgugguggauuacaugauucaaaagccugggaaaacaggaaccaucgucuaucagcgcggcgugcugcuuccccagaagguuuggugcgccagcgggagauccaaagugaucaagggaucucugccccucauuggcgaagcggacugucugcaugagaaauacggcgggcugaacaagagcaaaccuuacuauaccggagaacacgccaaggcuaucggcaacugcccgauuugggucaagacaccccucaaacuggccaaugggaccaaguaccggccucccgcuaaacuucugaaggagcgcggauuuuucggcgccaucgccggguuucucgagggcggaugggaaggcaugauugcuggguggcacggauauacaucccauggcgcgcacgggguggccguugcugccgaucugaaaagcacgcaggaggccaucaacaagaucaccaagaaucuuaacucucuguccgaacucgaggugaaaaaucugcaaagacugagcggagcuauggacgaacuccauaacgagauucuggagcuugacgaaaaggucgaugaccugcgggccgauacaaucucugcgcagauugagcucgcugugcugcuuagcaaugaaggcaucauuaacuccgaggacgaacaucugcucgcccuggagcgcaaacugaagaaaaugcucgggccuucugccgucgauaucggcaauggauguuucgagaccaagcacaagugcaaccagacaugccuggacagaaucgcugccggcaccuuuaaugcuggggaguucagccuucccacguuugauucccugaacauuaccgccgcgagccucaaugacgauggacuggacaaccacacaauccugcuuuacuauucuaccgccgcuuccagccucgccgugacacugaugcuggcuauuuucaucguuuacauggugucucgggauaaugucuccuguagcauuugccucuga

SEQ ID NO: 219659 - RNA, 1755 nt, Artificial Sequence
  derived and/or modified CDS sequence (opt5) from hemagglutinin__InfluenzaB__AGX22500
augaaggccaucauugugcugcucauggucguuaccagcaacgcugacagaaucugcacaggcauuacguccucuaauagcccccacguggugaaaaccgccacacagggggaagucaacgugaccggaguuaucccucugacaaccacaccgaccaaguccuacuucgcgaaucuuaaaggcacgcggacccgcgggaagcugugucccgauugccucaacuguacagaccuggauguggcucuuggaagaccuaugugcgucggcaccacacccucugccaaagccagcauucugcaugaagugcggccuguuaccuccggguguuuucccaucaugcacgaccgcacgaagaucagacaacucccuaaucugcugcggggauaugagaacauucgccucucuacacagaaugugaucgaugcugaaaacgccccgggcggccccuacagacuggggaccagcggauccugcccuaaugcuacaagcaagucuggcuucuuugccaccauggcgugggccguccccaaagacaacaauaagaacgcuaccaauccucuuacaguggaggugcccuauauuuguacggaaggggaggaucagaucaccgucuggggauuccauuccgacaacaaaacacagaugaagaaucuguacggcgauagcaacccgcaaaaauuuaccucuuccgccaacgggguuacaacccacuaugugagccagauuggaggcuucccugcucagacggaggacggcgggcucccccagucuggacggaucauuguggauuacaugguccaaaagccucgcaagacaggcaccaucguguaucagagagggguucugcuuccccagaaaguguggugcgccuccggacggagcaaggucaucaaaggcucccugccccucauuggggaagcggacugucugcaugagaaguacggaggccugaauaaaucuaagccuuacuauaccggcgaacacgccaaagcuaucgggaacugcccgauuugggugaagacaccccucaagcuggccaauggaaccaaauaccgcccucccgcuaagcugcugaaagagagaggcuuuuucggggccaucgccggauuucucgagggcgggugggaaggcaugauugcuggauggcacggcuauacaagccauggggcgcacggaguugccguggcugccgaucugaaguccacgcaggaggccaucaacaaaaucaccaagaaucuuaacagccugucugaacucgaggucaagaaucugcaacggcuguccggcgcuauggacgaacuccauaacgagauucuggagcuugacgaaaaaguggaugaccugcgcgccgauacaaucagcucucagauugagcucgcgguccugcuuagcaaugaagggaucauuaacuccgaggacgaacaccuucucgcucuggagagaaagcugaaaaagaugcucggaccuucugccguggauaucggcaauggguguuucgagaccaaacacaagugcaaccagacaugccuggaccggaucgccgcuggcaccuuuaaugccggagaguucagccuucccacguuugauucccugaacauuaccgcugccagccucaaugacgauggccuggacaaccauacaauccugcuuuacuauucuaccguugcguccagccucgccgugacacugaugcuggcuauuuucaucgucuacauggugucuagagauaacguuuccuguagcauuugccucuga

SEQ ID NO: 219660 - RNA, 1755 nt, Artificial Sequence; identical to SEQ ID NO: 219096
  derived and/or modified CDS sequence (opt5) from hemagglutinin__InfluenzaB__AGX22511

SEQ ID NO: 219661 - RNA, 1755 nt, Artificial Sequence
  derived and/or modified CDS sequence (opt5) from hemagglutinin__InfluenzaB__AGX22522
augaaggccaucauugugcugcucauggucguuaccagcaacgcugacagaaucugcacaggcauuacguccucuaauagcccccacguggugaaaaccgccacacagggggaggucaacgugaccggaguuaucccucugacaaccacaccgaccaaguccuacuucgcgaaucuuaaaggcacgcggacccgcgggaagcugugucccgauugccucaacuguacagaccuggauguggcucuuggaagaccuaugugcgucggcaccacacccucugccaaagccagcauucugcaugaagugcggccuguuaccuccggguguuuucccaucaugcacgaccgcacgaagaucagacaacucgcuaaucugcugcggggauaugagaacauucgccucucuacacagaaugugaucgaugccgaaaaggcuccuggcggcccguacagacuggggaccagcggauccugccccaacgccacaagcaaaucuggcuucuuugcgaccauggccugggcugucccuaaggacaauaacaaaaaugccaccaacccccuuacaguggaggugccuuauauuuguacggaaggggaggaucagaucaccgucuggggauuccauuccgacaauaagacacagaugaaaaaccuguacggcgauagcaauccccaaaaguuuaccucuuccgcuaacgggguuacaaagcacuaugugagccagauuggaggcuucccggaccagaccgaggauggcgggcucccucagucuggacggaucguggucgacuacaugaugcaaaaacccggcaagacggggacaauuguguaucagcgcggaguucugcuuccucagaaaguguggugcgccuccggcagaagcaaggucaucaaagggucccugccccucaucggagaagcggauugucugcaugagaaguacggcggccugaacaaaucuaagcccuacuauaccggggaacacgccaaggcuauuggaaauugcccuaucugggugaaaaccccgcucaagcuggccaacggcacaaaauaccggcccccugcuaagcugcugaaagagcgcggguuuuucggagccauugccggcuuucucgaagggggcugggaaggaaugaucgcuggcuggcacggguauaccagccauggagcgcacggcguugccguggcugccgaccugaaguccacacaggaggccauuaauaagaucacgaaaaaccuuaauagccugucugaacucgaggucaagaaccugcaaagacuguccggggcuauggacgaacuccauaaugagauccuggagcuugaugaaaaaguggacgaucugcgggccgacaccauuagcucucagaucgagcucgcgguccugcuuagcaacgaaggaauuaucaauuccgaggaugaacaccuucucgcucuggagcgcaagcugaaaaagaugcucggccccucugccguggacauugggaacggcuguuucgagacaaagcacaaaugcaaucagaccugccuggauagaaucgccgcuggaacauuuaacgccggcgaguucagccuuccuaccuuugacucccugaauaucacggcugccagccucaacgaugacgggcuggauaaucauaccauucugcuuuacuauucuacagcggccuccagccucgcuguuacccugaugcuggccaucuucauuguguacauggucucucgggacaacguguccuguagcaucugccucuga

SEQ ID NO: 219662 - RNA, 1755 nt, Artificial Sequence; identical to SEQ ID NO: 218498
  derived and/or modified CDS sequence (opt5) from hemagglutinin__InfluenzaB__AGX22533

SEQ ID NO: 219663 - RNA, 1755 nt, Artificial Sequence; identical to SEQ ID NO: 219110
  derived and/or modified CDS sequence (opt5) from hemagglutinin__InfluenzaB__AGX22566

SEQ ID NO: 219664 - RNA, 1755 nt, Artificial Sequence; identical to SEQ ID NO: 219096
  derived and/or modified CDS sequence (opt5) from hemagglutinin__InfluenzaB__AGX22577

SEQ ID NO: 219665 - RNA, 1755 nt, Artificial Sequence; identical to SEQ ID NO: 219110
  derived and/or modified CDS sequence (opt5) from hemagglutinin__InfluenzaB__AGX22588

SEQ ID NO: 219666 - RNA, 1755 nt, Artificial Sequence; identical to SEQ ID NO: 218498
  derived and/or modified CDS sequence (opt5) from hemagglutinin__InfluenzaB__AGX22599

SEQ ID NO: 219667 - RNA, 1755 nt, Artificial Sequence
  derived and/or modified CDS sequence (opt5) from hemagglutinin__InfluenzaB__AGX22610
augaaggccaucauugugcugcucauggucguuaccagcaacgcugacagaaucugcacaggcauuacguccucuaauagcccccacguggugaaaaccgccacacagggggaggucaacgugaccggaguuaucccucugacaaccacaccgaccaaguccuacuucgcgaaucuuaaaggcacgcggacccgcgggaagcugugucccgauugccucaacuguacagaccuggauguggcucuuggaagaccuaugugcgucggcaccacacccucugccaaagccagcauucugcaugaagugcggccuguuaccuccggguguuuucccaucaugcacgaccgcacgaagaucagacaacucccuaaucugcugcggggauaugagaacauucgccucucuacacagaaugugaucgaugcugaaaaggccccgggcggccccuacagacuggggaccagcggauccugcccuaacgcuacaagcaaaucuggcuucuuugccaccauggcgugggccguccccaaggacaauaacaaaaaugcuaccaacccucuuacaguggaggugcccuauauuuguacggaaggggaggaucagaucaccgucuggggauuccauuccgacaauaagacacagaugaaaaaccuguacggcgauccgaauccucaaaaguuuaccagcucugccaacgggguuacaacccacuaugugucccagauuggaggcuuccccgaccagacggaggauggcgggcucccucagagcggacggaucguggucgacuacaugaugcaaaagcccggcaaaacagggaccauuguguaucagcgcggaguucugcuuccccagaagguguggugcgcuucuggcagauccaaagucaucaaggggagccugccucucaucggagaagccgauugucugcaugagaaauacggcggccugaacaaguccaaaccguacuauaccggggaacacgcgaaggccauuggaaauugccccaucugggugaagacaccucucaaacuggcuaacggcaccaaguaccggcccccugccaaacuucugaaggagcgcggguuuuucggagcuauugccggcuuucucgaagggggcugggaaggaaugaucgccggcuggcacggguauacaucucauggagcucacggcguugcgguggccgcugaccugaaaagcacgcaggaggccauuaauaagaucaccaagaaccuuaauucccugagcgaacucgaggucaaaaaccugcaaagacugucuggggccauggacgaacuccauaaugagauccuggagcuugaugaaaagguggacgaucugcgggcugacacaauuuccagccagaucgagcucgccguccugcuuucuaacgaaggaauuaucaauagcgaggaugaacaucugcucgcgcuggagcgcaaacugaagaaaaugcucggccccuccgcuguggacauugggaacggcuguuucgagaccaagcacaagugcaaucagacaugccuggauagaaucgccgccggaaccuuuaacgcuggcgaguucucucuuccgacguuugacagccugaauaucaccgccgcuucccucaacgaugacgggcuggauaaucacacaauucugcuuuacuauagcaccgccgcgucuucccucgccguuacacugaugcuggcuaucuucauuguguacauggucagccgggacaacgugucuuguuccaucugccucuga

SEQ ID NO: 219668 - RNA, 1755 nt, Artificial Sequence
  derived and/or modified CDS sequence (opt5) from hemagglutinin__InfluenzaB__AGX22621
augaaggccaucauugugcugcucauggucguuaccagcaacgcugacagaaucugcacaggcauuacguccucuaauagcccccacguggugaaaaccgccacacagggggaggucaacgugaccggaguuaucccucugacaaccacaccgaccaaguccuacuucgcgaaucuuaaaggcacgcggacccgcgggaagcugugucccgauugccucaacuguacagaccuggauguggcucuuggaagaccuaugugcgucggcaccacacccucugccaaagccagcauucugcaugaagugcggccuguuaccuccggguguuuucccaucaugcacgaccgcacgaagaucagacaacucgcuaaucugcugcggggauaugagaacauucgccucucuacacagaaugugaucgaugccgaaaaggcuccuggcggcccguacagacuggggaccagcggauccugccccaacgccacaagcaaaucuggcuucuuugcgaccauggccugggcugucccuaaggacaauaacaaaaaugccaccaacccccuuacaguggaggugccuuauauuuguaccgggggagaagaucagaucacggucuggggcuuccauuccgacaauaagacacagaugaaaaaccuguacggggauagcaauccccaaaaguuuaccucuuccgcuaacggaguuacaacccacuaugugagccagauuggcggcuucccggaccagacggaggaugggggacucccucagucuggccggaucguggucgacuacaugaugcaaaagcccgggaaaacaggaaccauuguguaucagcgcggcguucugcuuccucagaagguguggugcgccuccgggagaagcaaagucaucaagggaucccugccccucaucggcgaggcggauugucugcaugaaaaauacggcgggcugaacaagucuaaacccuacuauaccggagagcacgccaaggcuauuggcaauugcccuaucugggugaagacaccgcucaaacuggccaacgggaccaaguaccggcccccugcuaaacuucugaaggaacgcggauuuuucggcgccauugccggguuucucgagggcggaugggagggcaugaucgcuggguggcacggauauacaagccauggcgcgcacgggguugccguggcugccgaccugaaauccacgcaggaagccauuaauaagaucaccaagaaccuuaauagccugucugagcucgaagucaaaaaccugcaaagacuguccggagcuauggacgagcuccauaaugaaauccuggagcuugaugagaagguggacgaucugcgggccgacacaauuagcucucagaucgaacucgcgguccugcuuagcaacgagggcauuaucaauuccgaagaugagcaucugcucgcucuggaacgcaaacugaagaaaaugcucgggcccucugccguggacauuggcaacggauguuucgagaccaagcacaagugcaaucagacaugccuggauagaaucgccgcuggcaccuuuaacgccggggaguucagccuuccuacguuugacucccugaauaucaccgcugccagccucaacgaugacggacuggauaaucacacaauucugcuuuacuauucuaccgcggccuccagccucgcuguuacacugaugcuggccaucuucauuguguacauggucucucgggacaacguguccuguagcaucugccucuga

SEQ ID NO: 219669 - RNA, 1755 nt, Artificial Sequence; identical to SEQ ID NO: 218498
  derived and/or modified CDS sequence (opt5) from hemagglutinin__InfluenzaB__AGX22632

SEQ ID NO: 219670 - RNA, 1755 nt, Artificial Sequence
  derived and/or modified CDS sequence (opt5) from hemagglutinin__InfluenzaB__AGX22643
augaaggccaucauugugcugcucauggucguuaccagcaacgcugacagaaucugcacaggcauuacguccucuaauagcccccacguggugaaaaccgccacacagggggaggucaacgugaccggaguuaucccucugacaaccacaccgaccaaguccuacuucgcgaaucuuaaaggcacgcggacccgcgggaagcugugucccgauugccucaacuguacagaccuggauguggcucuuggaagaccuaugugcgucggcaccacacccucugccaaagccagcauucugcaugaagugcggccuguuaccuccggguguuuucccaucaugcacgaccgcacgaagaucagacaacucgcuaaucugcugcggggauaugagaacauucgccucucuauccagaaugugauugaugccgaaaaggcuccuggcggcccguacagacuggggacaagcggauccugccccaacgccaccagcaaaucuggcuucuuugcgacaauggccugggcugucccuaaggacaauaacaaaaaugccaccaacccccuuaccguggaggugccuuauaucuguacagaaggggaggaucagauuacggucuggggauuccauuccgacaauaagacccagaugaaaaaccuguacggcgauagcaauccccaaaaguuuacaucuuccgcuaacgggguuaccacacacuaugugagccagaucggaggcuucccggaccagaccgaggauggcgggcucccucagucuggacggauuguggucgacuacaugaugcaaaagcccggcaaaacggggacaaucguguaucagcgcggaguucugcuuccucagaagguguggugcgccuccggcagaagcaaagucaucaaggggucccugccccucauuggagaagcggauugucugcaugagaaauacggcggccugaacaagucuaaacccuacuauaccggggaacacgccaaggcuaucggaaauugcccuauuugggugaagaccccgcucaaacuggccaacggcacaaaguaccggcccccugcuaaacuucugaaggagcgcggguuuuucggagccaucgccggcuuucucgaagggggcugggaaggaaugauugcuggcuggcacggguauaccagccauggagcgcacggcguugccguggcugccgaccugaaauccacacaggaggccaucaauaagaucacgaagaaccuuaauagccugucugaacucgaggucaaaaaccugcaaagacuguccggggcuauggacgaacuccauaaugagauucuggagcuugaugaaaagguggacgaucugcgggccgacaccaucagcucucagauugagcucgcgguccugcuuagcaacgaaggaaucauuaauuccgaggaugaacaucugcucgcucuggagcgcaaacugaagaaaaugcucggccccucugccguggacaucgggaacggcuguuucgagacaaagcacaagugcaaucagaccugccuggauagaaucgccgcuggaacauuuaacgccggcgaguucagccuuccuaccuuugacucccugaauauuacggcugccagccucaacgaugacgggcuggauaaucacaccauccugcuuuacuauucuacagcggccuccagccucgcuguuacccugaugcuggccauuuucaucguguacauggucucucgggacaacguguccuguagcauuugccucuga

SEQ ID NO: 219671 - RNA, 1755 nt, Artificial Sequence
  derived and/or modified CDS sequence (opt5) from hemagglutinin__InfluenzaB__AGX22654
augaaggccaucauugugcugcucauggucguuaccagcaacgcugacagaaucugcacaggcauuacguccucuaauagcccccacguggugaaaaccgccacacagggggaggucaacgugaccggaguuaucccucugacaaccacaccgaccaaguccuacuucgcgaaucuuaaaggcacgcggacccgcgggaagcugugucccgauugccucaacuguacagaccuggauguggcucuuggaagaccuaugugcgucggcaccacacccucugccaaagccagcauucugcaugaagugcggccuguuaccuccggguguuuucccaucaugcacgaccgcacgaagaucagacaacucgcuaaucugcugcggggauaugagaacauucgccucucuacacagaaugugaucgaugccgaaaaggcuccuggcggcccguacagacuggggaccagcggauccugccccaacgccacaagcaaaucuggcuucuuugcgaccauggccugggcugucccuaaggacaauaacaaaaaugccaccaacccccuuacaguggaggugccuuauauuuguacggaaggggaggaucagaucaccgucuggggauuccauuccgacaauaagacacagaugaaaaaccuguacggcgauagcaauccccaaaaguuuaccucuuccgcuaacgggguuacaacccacuaugugagccagauuggaggcuucccggaccagacggaggauggcgggcucccucagucuggacggaucguggucgacuacaugaugcaaaagcccggcaaaacagggaccauuguguaucagcgcggaguucugcuuccucagaagguguggugcgccuccggcagaagcaaagucaucaaggggucccugccccucaucggagaagcggauugucugcaugagaaauacggcggccugaacaagucuaaacccuacuauaccggggaacacgccaaggcuauuggaaauugcccuaucugggugaagacaccgcucaaacuggccaacggcaccaaguaccggcccccugcuaaacuucugaaggagcgcggguuuuucggagccauugccggcuuucucgaagggggcugggaaggaaugaucgcuggcuggcacggguauacaagccauggagcgcacggcguugccguggcugccgaccugaaauccacgcaggaggccauuaauaagaucaccaagaaccuuaauagccugucugaacucgaggucaaaaaccugcaaagacuguccggggcuauggacgaacuccauagcgagauccuggagcuugaugaaaagguggacgaucugcgggccgacacaauuucuagccagaucgagcucgcgguccugcuuuccaaugaaggaauuaucaacucugaggaugaacaucugcucgcucuggagcgcaaacugaagaaaaugcucggccccagcgccguggacauugggaauggcuguuucgagaccaagcacaagugcaaccagacaugccuggauagaaucgccgcuggaaccuuuaaugccggcgaguucucccuuccuacguuugacagccugaacaucaccgcugccucucucaaugaugacgggcuggauaaccacacaauucugcuuuacuauuccaccgcggccagcucucucgcuguuacacugaugcuggccaucuucauuguguacauggucucccgggacaaugugagcuguuccaucugccucuga

SEQ ID NO: 219672 - RNA, 1755 nt, Artificial Sequence; identical to SEQ ID NO: 219110
  derived and/or modified CDS sequence (opt5) from hemagglutinin__InfluenzaB__AGX22665

SEQ ID NO: 219673 - RNA, 1755 nt, Artificial Sequence; identical to SEQ ID NO: 219110
  derived and/or modified CDS sequence (opt5) from hemagglutinin__InfluenzaB__AGX22676

SEQ ID NO: 219674 - RNA, 1755 nt, Artificial Sequence; identical to SEQ ID NO: 218498
  derived and/or modified CDS sequence (opt5) from hemagglutinin__InfluenzaB__AGX22687

SEQ ID NO: 219675 - RNA, 1755 nt, Artificial Sequence; identical to SEQ ID NO: 219110
  derived and/or modified CDS sequence (opt5) from hemagglutinin__InfluenzaB__AGX22698

SEQ ID NO: 219676 - RNA, 1755 nt, Artificial Sequence
  derived and/or modified CDS sequence (opt5) from hemagglutinin__InfluenzaB__AGX22709
augaaggccaucauugugcugcucauggucguuaccagcaacgcugacagaaucugcacaggcauuacguccucuaauagcccccacguggugaaaaccgccacacagggggaggucaacgugaccggaguuaucccucugacaaccacaccgaccaaguccuacuucgcgaaucuuaaaggcacgcggacccgcgggaagcugugucccgauugccucaacuguacagaccuggauguggcucuuggaagaccuaugugcgucggcaccacacccucugccaaagccagcauucugcaugaagugcggccuguuaccuccggguguuuucccaucaugcacgaccgcacgaagaucagacaacucgcuaaucugcugcggggauaugagaacauucgccucucuacacagaaugugaucgaugccgaaaaggcuccuggcggcccguacagacuggggaccagcggauccugccccaacgccacaagcaaaucuggcuucuuugcgaccauggccugggcugucccuaaggacaauaacaaaaaugccaccaacccccuuacaguggaggugccuuauauuuguacggaaggggaggaucagaucaccgucuggggauuccauuccgacaauaagacacagaugaaaaaccuguacggcgauagcaauccccaaaaguuuaccucuuccgcuaacgggguuacaacccacuaugugagccagauuggaggcuucccggaccagacggaggauggcgggcucccucagucuggacggaucguggucgacuacaugaugcaaaagcccgagaaaacaggcaccauuguguaucagcgcgggguucugcuuccucagaagguguggugcgccuccggaagaagcaaagucaucaagggcucccugccccucaucggggaagcggauugucugcaugaaaaauacggaggccugaacaagucuaaacccuacuauaccggcgagcacgccaaggcuauugggaauugcccuaucugggugaagacaccgcucaaacuggccaacggaaccaaguaccggcccccugcuaaacuucugaaggagcgcggcuuuuucggggccauugccggauuucucgaaggcgggugggagggcaugaucgcuggauggcacggcuauacaagccauggggcgcacggaguugccguggcugccgaccugaaauccacgcaggaagccauuaauaagaucaccaagaaccuuaauagccugucugagcucgaagucaaaaaccugcaaagacuguccggcgcuauggacgagcuccauaaugagauccuggaacuugaugagaagguggacgaucugcgggccgacacaauuagcucucagaucgaacucgcgguccugcuuagcaacgaggggauuaucaauuccgaagaugagcaucugcucgcucuggagcgcaaacugaagaaaaugcucggacccucugccguggacauuggcaacggguguuucgaaaccaagcacaagugcaaucagacaugccuggauagaaucgccgcuggcaccuuuaacgccggagaguucagccuuccuacguuugacucccugaauaucaccgcugccagccucaacgaugacggccuggauaaucacacaauucugcuuuacuauucuaccgcggccuccagccucgcuguuacacugaugcuggccaucuucauuguguacauggucucucgggacaacguguccuguagcaucugccucuga

SEQ ID NO: 219677 - RNA, 1755 nt, Artificial Sequence
  derived and/or modified CDS sequence (opt5) from hemagglutinin__InfluenzaB__AGX22720
augaaggccaucauugugcugcucauggucguuaccagcaacgcugacagaaucugcacaggcauuacguccucuaauagcccccacguggugaaaaccgccacacagggggaggucaacgugaccggaguuaucccucugacaaccacaccgaccaaguccuacuucgcgaaucuuaaaggcacgcggacccgcgggaagcugugucccgauugccucaacuguacagaccuggauguggcucuuggaagaccuaugugcgucggcaccacacccucugccaaagccagcauucugcaugaagugcggccuguuaccuccggguguuuucccaucaugcacgaccgcacgaagaucagacaacucccuaaucugcugcggggauaugagaacauucgccucucuacacagaaugugaucgaugcugaaaaggccccgggcggccccuacagacuggggaccagcggauccugcccuaacgcuacaagcaaaucuggcuucuuugccaccauggcgugggccguccccaaggacaauaacaaaaaugcuaccaacccucuuacaguggaggugcccuauauuuguacggaaggggaggaucagaucaccgucuggggauuccauuccgacaauaagacacagaugaaaaaccuguacggcgauagcaauccgcaaaaguuuaccucuuccgccaacggggcuacaacccacuauguuagccagauuggaggcuucccugaccagacggaggauggcgggcucccccagucuggacggaucgugguggacuacaugaugcaaaagccuggcaaaacagggaccauugucuaucagcgcggagugcugcuuccccagaagguuuggugcgccuccggcagaagcaaagugaucaaggggucccugccccucaucggagaagcggauugucugcaugagaaauacggcggccugaacaagucuaaaccuuacuauaccggggaacacgccaaggcuauuggaaauugcccgaucugggucaagacaccccucaaacuggccaacggcaccaaguaccggccucccgcuaaacuucugaaggagcgcggguuuuucggagccauugccggcuuucucgaagggggcugggaaggaaugaucgcuggcuggcacggguauacaagccauggagcgcacggcguggccguugcugccgaccugaaauccacgcaggaggccauuaauaagaucaccaagaaccuuaauagccugucugaacucgaggugaaaaaccugcaaagacuguccggggcuauggacgaacuccauaaugagauccuggagcuugaugaaaaggucgacgaucugcgggccgacacaauuagcucucagaucgagcucgcggugcugcuuagcaacgaaggaauuaucaauuccgaggaugaacaucugcucgcucuggagcgcaaacugaagaaaaugcucggcccuucugccgucgacauugggaacggcuguuucgagaccaagcacaagugcaaucagacaugccuggauagaaucgccgcuggaaccuuuaacgccggcgaguucagccuucccacguuugacucccugaauaucaccgcugccagccucaacgaugacgggcuggauaaucacacaauucugcuuuacuauucuaccgcggccuccagccucgcugugacacugaugcuggccaucuucauuguuuacauggugucucgggacaacgucuccuguagcaucugccucuga

SEQ ID NO: 219678 - RNA, 1755 nt, Artificial Sequence; identical to SEQ ID NO: 219110
  derived and/or modified CDS sequence (opt5) from hemagglutinin__InfluenzaB__AGX22731

SEQ ID NO: 219679 - RNA, 1755 nt, Artificial Sequence; identical to SEQ ID NO: 219671
  derived and/or modified CDS sequence (opt5) from hemagglutinin__InfluenzaB__AGX22742

SEQ ID NO: 219680 - RNA, 1755 nt, Artificial Sequence
  derived and/or modified CDS sequence (opt5) from hemagglutinin__InfluenzaB__AGX22753
augaaggccaucauugugcugcucauggucguuaccagcaacgcugacagaaucugcacaggcauuacguccucuaauagcccccacguggugaaaaccgccacacagggggaggucaacgugaccggaguuaucccucugacaaccacaccggcgaaguccuacuucgcuaaucuuaaaggcacccggacgcgcgggaagcugugucccgauugccucaacuguaccgaccuggauguggcccuuggaagaccuaugugcgucggcacaacccccucugccaaagcuagcauucugcaugaagugcggccuguuacauccggguguuuucccaucaugcacgaccgcaccaagaucagacaacucgccaaucugcugcggggauaugagaacauucgccucucuacgcagaaugugaucgaugcugaaaaggccccuggcggcccguacagacuggggacaagcggauccugccccaacgcgaccagcaaaucuggcuucuuugccacaauggcuugggccgucccuaaggacaauaacaaaaaugcuaccaacccccuuaccguggaggugccuuauauuuguaaggaaggggaggaucagaucacagucuggggauuccauuccgacaauaaaacgcagaugaagaaccuguacggcgauagcaauccccaaaaguuuaccucuuccgccaacgggguuacaacccacuaugugagccagauuggaggcuucccggaccagacagaggauggcgggcucccucagucuggacggaucguggucgacuacaugauucaaaaacccggcaagaccgggacgaucguguaucagcgcggaguucugcuuccucagaaaguguggugcgcguccggcagaagcaaggucaucaaagggucccugccccucauuggagaagccgauugucugcaugagaaguacggcggccugaacaaaucuaagcccuacuauacaggggaacacgcuaaggccaucggaaauugcccuauuugggugaaaaccccgcucaagcuggcuaacggcaccaaauaccggcccccugccaaacuucugaaagagcgcggguuuuucggagccaucgcuggcuuucucgaagggggcugggaaggaaugauugcgggcuggcacggguauacaagccauggagcccacggcguugcuguggccgccgaccugaaguccacccaggaggcuaucaauaagaucacaaagaaccuuaauagccugucugaacucgaggucaagaaccugcaaagacuguccggggccauggacgaacuccauaaugagauucuggagcuugaugaaaaaguggacgaucugcgggcggacacgaucagcucucagauugagcucgcuguccugcuuagcaacgaaggaaucauuaauuccgaggaugaacaucugcucgcccuggagcgcaagcugaaaaagaugcucggccccucugccguggacaucgggaacggcuguuucgagaccaagcacaaaugcaaucagacaugccuggauagaaucgcugccggaaccuuuaacgcuggcgaguucagccuuccuacauuugacucccugaauauuaccgccgcgagccucaacgaugacgggcuggauaaucacacgauccugcuuuacuauucuaccgccgcuuccagccucgccguuacacugaugcuggcuauuuucaucguguacauggucucucgggacaacguguccuguagcauuugccucuga

SEQ ID NO: 219681 - RNA, 1755 nt, Artificial Sequence
  derived and/or modified CDS sequence (opt5) from hemagglutinin__InfluenzaB__AGX22764
augaaggccaucauugugcugcucauggucguuaccagcaacgcugacagaaucugcacaggcauuacguccucuaauagcccccacguggugaaaaccgccacacagggggaggucaacgugaccggaguuaucccucugacaaccacaccgaccaaguccuacuucgcgaaucuuaaaggcacgcggacccgcgggaagcugugucccgauugccucaacuguacagaccuggauguggcucuuggaagaccuaugugcgucggcaccacacccucugccaaagccagcauucugcaugaagugcggccuguuaccuccggguguuuucccaucaugcacgaccgcacgaagaucagacaacucgcuaaucugcugcggggauaugagaacauucgccucucuacacagaaugugaucgaugccgaaaaggcuccuggcggcccguacagacuggggaccagcggauccugccccaacgccacaagcaaaucuggcuucuuugcgaccauggccugggcugucccuaaggacaauaacaaaaaugccaccaacccccuuacaguggaggugccuuauauuuguaaggaaggggaggaucagaucacggucuggggauuccauuccgacaauaaaacccagaugaagaaccuguacggcgauagcaauccccaaaaguuuacaucuuccgcuaacgggguuaccacacacuaugugagccagauuggaggcuucccggaccagaccgaggauggcgggcucccucagucuggacggaucguggucgacuacaugauucaaaaacccggcaagacggggacaaucguguaucagcgcggaguucugcuuccucagaaaguguggugcgccuccggcagaagcaaggucaucaaagggucccugccccucauuggagaagcggauugucugcaugagaaguacggcggccugaacaaaucuaagcccuacuauaccggggaccacgccaaggcuaucggaaauugcccuauuugggugaaaaccccgcucaagcuggccaacggcacaaaauaccggcccccugcuaagcugcugaaagaacgcggguuuuucggagccaucgccggcuuucucgaagggggcugggagggaaugauugcuggcuggcacggguauaccagccauggagcgcacggcguugccguggcugccgaccugaaguccacacaggaggccaucaauaagaucacgaaaaaccuuaauagccugucugagcucgaagucaagaaccugcaaagacuguccggggcuauggaugagcuccauaaugaaauucuggagcuugacgagaaaguggaugaccugcgggccgauaccaucagcucucagauugaacucgcgguccugcuuagcaacgagggaaucauuaauuccgaagacgagcaccuucucgcucuggaacgcaagcugaaaaagaugcucggccccucugccguggauaucgggaacggcuguuucgagacaaagcacaaaugcaaucagaccugccuggacagaaucgccgcuggaacauuuaacgccggcgaguucagccuuccuaccuuugauucccugaauauuacggcugccagccucaacgacgaugggcuggacaaucauaccauccugcuuuacuauucuacagcggccuccagccucgcuguuacccugaugcuggccauuuucaucguguacauggucucucgggacaacguguccuguagcauuugccucuga

SEQ ID NO: 219682 - RNA, 1755 nt, Artificial Sequence
  derived and/or modified CDS sequence (opt5) from hemagglutinin__InfluenzaB__AGX22775
augaaggccaucauugugcugcucauggucguuaccagcaacgcugacagaaucugcacaggcauuacguccucuaauagcccccacguggugaaaaccgccacacagggggaggucaacgugaccggaguuaucccucugacaaccacaccgaccaaguccuacuucgcgaaucuuaaaggcacgcggacccgcgggaagcugugucccgauugccucaacuguacagaccuggauguggcucuuggaagaccuaugugcgucggcaccacacccucugccaaagccagcauucugcaugaagugcggccuguuaccuccggguguuuucccaucaugcacgaccgcacgaagaucagacaacucccuaaucugcugcggggauaugagaacauucgccucucuacacagaaugugaucgaugcugaaaaggccccgggcggccccuacagacuggggaccagcggauccugcccuaacgcuacaagcaaaucuggcuucuuugccaccauggcgugggccguccccaaggacaauaacaaaaaugcuaccaacccucuuacaguggaggugcccuauauuuguacggaaggggaggaucagaucaccgucuggggauuccauuccgacaauaagacacagaugaaaaaccuguacggcgauagcaauccgcaaaaguuuaccucuuccgccaacgggguuacaacccacuaugugagccagauuggaggcuucccugaccagacggaggauggcgggcucccccagucuggacggaucguggucgacuacaugaugcaaaagccuggcaaaacagggaccauuguguaucagcgcggaguucugcuuccccagaagguguggugcgcuuccggcagaagcaaagucaucaaggggucccugccccucaucggagaagccgauugucugcaugagaaauacggcggccugaacaagucuaaaccuuacuauaccggggaacacgcgaaggccauuggaaauugcccgaucugggugaagacaccccucaaacuggcuaacggcaccaaguaccggccucccgccaaacuucugaaggagcgcggguuuuucggagcuauugccggcuuucucgaagggggcugggagggaaugaucgccggcuggcacggguauacaagccauggagcucacggcguugcgguggccgcugaccugaaauccacgcaggaggccauuaauaagaucaccaagaaccuuaauagccugucugaacucgaggucaaaaaccugcaaagacuguccggggccauggacgaacuccauaaugagauccuggagcuugaugaaaagguggacgaucugcgggcugacacaauuagcucucagaucgagcucgccguccugcuuagcaacgaaggaauuaucaauuccgaggaugaacaucugcucgcgcuggagcgcagacugaaaaagaugcucggcccuucugcuguggagauugggaacggcuguuucgaaaccaaacacaagugcaaucagacaugccuggaccggaucgccgccggaaccuuuaacgcuggcgaguucagccuucccacguuugauucccugaauaucaccgccgcuagccucaacgacgaugggcuggacaaucacacaauucugcuuuacuauucuaccgccgcguccagccucgccguuacacugaugcuggcuaucuucauuguguacauggucucuagagauaacguguccuguagcaucugccucuga

SEQ ID NO: 219683 - RNA, 1755 nt, Artificial Sequence; identical to SEQ ID NO: 219110
  derived and/or modified CDS sequence (opt5) from hemagglutinin__InfluenzaB__AGX22786

SEQ ID NO: 219684 - RNA, 1755 nt, Artificial Sequence
  derived and/or modified CDS sequence (opt5) from hemagglutinin__InfluenzaB__AGX22797
augaaggccaucauugugcugcucauggucguuaccagcaacgcugacagaaucugcacaggcauuacguccucuaauagcccccacguggugaaaaccgccacacagggggaggucaacgugaccggaguuaucccucugacaaccacaccgaccaaguccuacuucgcgaaucuuaaaggcacgcggacccgcgggaagcugugucccgauugccucaacuguacagaccuggauguggcucuuggaagaccuaugugcgucggcaccacacccucugccaaagccagcauucugcaugaagugcggccuguuaccuccggguguuuucccaucaugcacgaccgcacgaagaucagacaacucgcuaaucugcugcggggauaugagaacauucgccucucuacacagaaugugaucgaugccgaaaaggcuccuggcggcccguacagacuggggaccagcggauccugccccaacgccacaagcaaaucuggcuucuuugcgaccauggccugggcugucccuaaggacaauaacaaaaaugccaccaacccccuuacaguggaggugccuuauauuuguaaggaaggggaggaucagaucacggucuggggauuccauuccgacaauaaaacccagaugaagaaccuguacggcgauagcaauccccaaaaguuuacaucuuccgcuaacgggguuaccacacacuaugugagccagauuggaggcuucccggaccagaccgaggauggcgggcucccucagucuggacggaucguggucgacuacaugauucaaaaacccggcaagacggggacaaucguguaucagcgcggaguucuguuuccucagaaaguguggugcgccuccggcagaagcaaggucaucaaagggucccuuccccugauuggagaagcggauugucuccaugagaaguacggcggccugaacaaaucuaagcccuacuauaccggggaacacgccaaggcuaucggaaauugcccuauuugggugaaaaccccgcugaagcucgccaacggcacaaaauaccggcccccugcuaagcugcuuaaagagcgcggguucuuuggagccaucgccggcuuccuggaagggggcugggagggaaugauugcuggcuggcacggguauaccagccauggagcgcacggcguugccguggcugccgaccucaaguccacacaggaggccaucaauaagaucacgaaaaaccugaauagccuuucugaacuggaggucaagaaccuccaaagacuguccggggcuauggacgaacugcauaaugagauucucgagcuggaugaaaaaguggacgaucuucgggccgacaccaucagcucucagauugagcuggcgguccuccugagcaacgaaggaaucauuaauuccgaggaugaacaccuucuggcucucgagcgcaagcugaaaaagaugcugggccccucugccguggacaucgggaacggcuguuuugagacaaagcacaaaugcaaucagaccugccucgauagaaucgccgcuggaacauucaacgccggcgaauuuagccugccuaccuucgacucccuuaauauuacggcugccagccugaacgaugacgggcucgauaaucauaccauccugcuguacuauucuacagcggccuccagccuugcuguuacccucaugcuggccauuuucaucguguacauggucucucgggacaacguguccuguagcauuugccuguga

SEQ ID NO: 219685 - RNA, 1755 nt, Artificial Sequence; identical to SEQ ID NO: 219110
  derived and/or modified CDS sequence (opt5) from hemagglutinin__InfluenzaB__AGX22808

SEQ ID NO: 219686 - RNA, 1755 nt, Artificial Sequence; identical to SEQ ID NO: 219110
  derived and/or modified CDS sequence (opt5) from hemagglutinin__InfluenzaB__AGX22819

SEQ ID NO: 219687 - RNA, 1755 nt, Artificial Sequence; identical to SEQ ID NO: 219110
  derived and/or modified CDS sequence (opt5) from hemagglutinin__InfluenzaB__AGX22830

SEQ ID NO: 219688 - RNA, 1755 nt, Artificial Sequence
  derived and/or modified CDS sequence (opt5) from hemagglutinin__InfluenzaB__AGX22841
augaaggccaucauugugcugcucauggucguuaccagcaacgcugacagaaucugcacaggcauuacguccucuaauagcccccacguggugaaaaccgccacacagggggaggucaacgugaccggaguuaucccucugacaaccacaccgaccaaguccuacuucgcgaaucuuaaaggcacgcggacccgcgggaagcugugucccgauugccucaacuguacagaccuggauguggcucuuggaagaccuaugugcgucggcaccacacccucugccaaagccagcauucugcaugaagugcggccuguuaccuccggguguuuucccaucaugcacgaccgcacgaagaucagacaacucgcuaaucugcugcggggauaugagaacauucgccucucuacacagaaugugaucgaugccgaaaaggcuccuggcggcccguacagacuggggaccagcggauccugccccaacgccacaagcaaaucuggcuucuuugcgaccauggccugggcugucccuaaggacaauaacaaaaaugccaccaacccccuuacaguggaggugccuuauauuuguaaggaaggggaggaucagaucacggucuggggauuccauuccgacaauaaaacccagaugaagaaccuguacggcgauagcaauccccaaaaguuuacaucuuccgcugacgggguuaccacacacuaugugagccagauuggaggcuucccggaucagaccgaggacggcgggcucccucagucuggacggaucguggucgauuacaugauucaaaaacccggcaagacggggacaaucguguaucagcgcggaguucugcuuccucagaaaguguggugcgccuccggcagaagcaaggucaucaaagggucccugccccucauuggagaagcggacugucugcaugagaaguacggcggccugaacaaaucuaagcccuacuauaccggggaacacgccaaggcuaucggaaacugcccuauuugggugaaaaccccgcucaagcuggccaauggcacaaaauaccggcccccugcuaagcugcugaaagagcgcggguuuuucggagccaucgccggcuuucucgaagggggcugggaaggaaugauugcuggcuggcacggguauaccagccauggagcgcacggcguugccguggcugccgaccugaaguccacacaggaggccaucaacaagaucacgaaaaaucuuaacagccugucugaacucgaggucaagaaucugcaaagacuguccggggcuauggaugaacuccauaacgagauucuggagcuugacgaaaaaguggaugaccugcgggccgauaccaucagcucucagauugagcucgcgguccugcuuagcaaugaaggaaucauuaacuccgaggacgaacaccuucucgcucuggagcgcaagcugaaaaagaugcucggccccucugccguggauaucgggaauggcuguuucgagacaaagcacaaaugcaaccagaccugccuggacagaaucgccgcuggaacauuuaaugccggcgaguucagccuuccuaccuuugauucccugaacauuacggcugccagccucaaugacgaugggcuggacaaccauaccauccugcuuuacuauucuacagcggccuccagccucgcuguuacccugaugcuggccauuuucaucguguacauggucucucgggacaauguguccuguagcauuugccucuga

SEQ ID NO: 219689 - RNA, 1755 nt, Artificial Sequence; identical to SEQ ID NO: 218498
  derived and/or modified CDS sequence (opt5) from hemagglutinin__InfluenzaB__AGX22852

SEQ ID NO: 219690 - RNA, 1755 nt, Artificial Sequence; identical to SEQ ID NO: 219110
  derived and/or modified CDS sequence (opt5) from hemagglutinin__InfluenzaB__AGX22863

SEQ ID NO: 219691 - RNA, 1755 nt, Artificial Sequence; identical to SEQ ID NO: 219110
  derived and/or modified CDS sequence (opt5) from hemagglutinin__InfluenzaB__AGX22874

SEQ ID NO: 219692 - RNA, 1755 nt, Artificial Sequence; identical to SEQ ID NO: 218498
  derived and/or modified CDS sequence (opt5) from hemagglutinin__InfluenzaB__AGX22885

SEQ ID NO: 219693 - RNA, 1755 nt, Artificial Sequence; identical to SEQ ID NO: 219671
  derived and/or modified CDS sequence (opt5) from hemagglutinin__InfluenzaB__AGX22896

SEQ ID NO: 219694 - RNA, 1755 nt, Artificial Sequence
  derived and/or modified CDS sequence (opt5) from hemagglutinin__InfluenzaB__AGX22907
augaaggccaucauugugcugcucauggucguuaccagcaacgcugacagaaucugcacaggcauuacguccucuaauagcccccacguggugaaaaccgccacacagggggaggucaacgugaccggaguuaucccucugacaaccacaccgaccaaguccuacuucgcgaaucuuaaaggcacgcggacccgcgggaagcugugucccgauugccucaacuguacagaccuggauguggcucuuggaagaccuaugugcgucggcaccacacccucugccaaagccagcauucugcaugaagugcggccuguuaccuccggguguuuucccaucaugcacgaccgcacgaagaucagacaacucgcuaaucugcugcggggauaugagaacauucgccucucuacacagaaugugaucgaugccgaaaaggcuccuggcggcccguacagacuggggaccagcggauccugccccaacgccacaagcaaaucuggcuucuuugcgaccauggccugggcugucccuaaggacaauaacaaaaaugccaccaacccccuuacaguggaggugccuuauauuuguacggaaggggaggaucagaucaccgucuggggauuccauuccgacaauaagacacagaugaaaaaccuguacggcgauagcaauccccaaaaguuuaccucuuccgcuaacgggguuacaacccacuaugugagccagauuggaggcuucccggaccagacggaggauggcgggcucccucagucuggacggaucguggucgacuacaugaugcaaaagcccggcaaaacagggaccauuguguaucagcgcggaguucugcuuccucagaagguguggugcgccuccggcagaagcaaagucaucaaggggucccugccccucaucggagaagcggauugucugcaugagaaauacggcggccugaacaagucuaaacccuacuauaccggggaacacgccaaggcuauuggaaauugcccuaucugggugaagacaccgcucaaacuggccaacggcaccaaguaccggcccccugcuaaacuucugaaggagcgcggguuuuucggagccauugccggcuuucucgaagggggcugggaaggaaugaucgcuggcuggcacggguauacaagccauggagcgcacggcguugccguggcugccgaccugaaauccacgcaggaggccauuaauaagaucaccaagaaccuuaauagccugucugaacucgaggucaaaaaccugcaaagacuguccggggcuauggacgaacuccauaaugagauccuggagcuugaugaaaagguggacgaucugcgggccgacacaauuagcucucagaucgagcucgcgguccugcuuagcaacgaaggaauuaucaauuccgaggaugaacaucugcucgcucuggagcgcaaacugaagaaaaugcucggccccucugccguggacauugggaacggcuguuucgagaccaagcacaagugcaaucagacaugccuggauagaaucgccgcuggaaccuuuaacgccggcgaguucagccuuccuacguuugacucccugaauaucaccgcugccagccucaacgaugacgggcuggauaaucacacaauucugcuuuacuauucuaccgcggccuccagccucgcuguuacacugaugcuggccaucuucauuguguacauggucucucgggacuccgugagcuguuccaucugccucuga

SEQ ID NO: 219695 - RNA, 1755 nt, Artificial Sequence; identical to SEQ ID NO: 218498
  derived and/or modified CDS sequence (opt5) from hemagglutinin__InfluenzaB__AGX22918

SEQ ID NO: 219696 - RNA, 1755 nt, Artificial Sequence; identical to SEQ ID NO: 218498
  derived and/or modified CDS sequence (opt5) from hemagglutinin__InfluenzaB__AGX22929

SEQ ID NO: 219697 - RNA, 1755 nt, Artificial Sequence; identical to SEQ ID NO: 219110
  derived and/or modified CDS sequence (opt5) from hemagglutinin__InfluenzaB__AGX22940

SEQ ID NO: 219698 - RNA, 1755 nt, Artificial Sequence; identical to SEQ ID NO: 218498
  derived and/or modified CDS sequence (opt5) from hemagglutinin__InfluenzaB__AGX22951

SEQ ID NO: 219699 - RNA, 1755 nt, Artificial Sequence; identical to SEQ ID NO: 218498
  derived and/or modified CDS sequence (opt5) from hemagglutinin__InfluenzaB__AGX22962

SEQ ID NO: 219700 - RNA, 1755 nt, Artificial Sequence; identical to SEQ ID NO: 218498
  derived and/or modified CDS sequence (opt5) from hemagglutinin__InfluenzaB__AGX22973

SEQ ID NO: 219701 - RNA, 1755 nt, Artificial Sequence; identical to SEQ ID NO: 218498
  derived and/or modified CDS sequence (opt5) from hemagglutinin__InfluenzaB__AGX22984

SEQ ID NO: 219702 - RNA, 1755 nt, Artificial Sequence; identical to SEQ ID NO: 218498
  derived and/or modified CDS sequence (opt5) from hemagglutinin__InfluenzaB__AGX22995

SEQ ID NO: 219703 - RNA, 1755 nt, Artificial Sequence; identical to SEQ ID NO: 218498
  derived and/or modified CDS sequence (opt5) from hemagglutinin__InfluenzaB__AGX23006

SEQ ID NO: 219704 - RNA, 1755 nt, Artificial Sequence
  derived and/or modified CDS sequence (opt5) from hemagglutinin__InfluenzaB__AGX23017
augaaggccaucauugugcugcucauggucguuaccagcaacgcugacagaaucugcacaggcauuacguccucuaauagcccccacguggugaaaaccgccacacagggggaggucaacgugaccggaguuaucccucugacaaccacaccgaccaaguccuacuucgcgaaucuuaaaggcacgcggacccgcgggaagcugugucccgauugccucaacuguacagaccuggauguggcucuuggaagaccuaugugcgucggcaccacacccucugccaaagccagcauucugcaugaaauccggccugugaccuccggguguuuucccaucaugcacgaccgcacgaagauuagacaacucgcuaaucugcugcggggauaugagaacauccgccucucuacacagaauguuauugaugccgaaaaggcuccuggcggcccguacagacuggggaccagcggauccugccccaacgccacaagcaaaucuggcuucuuugcgaccauggccugggcugugccuaaggacaauaacaaaaaugccaccaacccccuuacagucgaggugccuuauaucuguacggaaggggaggaucagauuaccguguggggauuccauuccgacaauaagacacagaugaaaaaccuguacggcgauagcaauccccaaaaguuuaccucuuccgcuaacggggucacaacccacuauguuagccagaucggaggcuucccggaccagacggaggauggcgggcucccucagucuggacggauugugguggacuacaugaugcaaaagcccggcaaaacagggaccaucgucuaucagcgcggagugcugcuuccucagaagguuuggugcgccuccggcagaagcaaagugaucaaggggucccugccccucauuggagaagcggauugucugcaugagaaauacggcggccugaacaagucuaaacccuacuauaccggggaacacgccaaggcuaucggaaauugcccuauuugggucaagacaccgcucaaacuggccaacggcaccaaguaccggcccccugcuaaacuucugaaggagcgcggguuuuucggagccaucgccggcuuucucgaagggggcugggaaggaaugauugcuggcuggcacggguauacaagccauggagcgcacggcguggccguugcugccgaccugaaauccacgcaggaggccaucaauaagaucaccaagaaccuuaauagccugucugaacucgaggugaaaaaccugcaaagacuguccggggcuauggacgaacuccauaaugagauucuggagcuugaugaaaaggucgacgaucugcgggccgacacaaucagcucucagauugagcucgcggugcugcuuagcaacgaaggaaucauuaauuccgaggaugaacaucugcucgcucuggagcgcaaacugaagaaaaugcucggccccucugccgucgacaucgggaacggcuguuucgagaccaagcacaagugcaaucagacaugccuggauagaaucgccgcuggaaccuuuaacgccggcgaguucagccuuccuacguuugacucccugaauauuaccgcugccagccucaacgaugacgggcuggauaaucacacaauccugcuuuacuauucuaccgcggccuccagccucgcugugacacugaugcuggccauuuucaucguuuacauggugucucgggacaacgucuccuguagcauuugccucuga

SEQ ID NO: 219705 - RNA, 1755 nt, Artificial Sequence
  derived and/or modified CDS sequence (opt5) from hemagglutinin__InfluenzaB__AGX23028
augaaggccaucauugugcugcucauggucguuaccagcaacgcugacagaaucugcacaggcauuacguccucuaauagcccccacguggugaaaaccgccacacagggggaggucaacgugaccggaguuaucccucugacaaccacaccgaccaaguccuacuucgcgaaucuuaaaggcacgaagacccgggggaaacugugucccgauugccucaacuguacagaccuggauguggcucuuggacgcccuaugugcgucggcaccacacccucugccaaggccagcauucugcaugaagugagaccuguuaccuccggguguuuucccaucaugcacgaccggacgaagauccgccaacucgcuaaucugcugagaggauaugagaacauucggcucucuacacagaaugugaucgaugccgaaaaagcuccuggcggcccguacaagcuggggaccagcggauccugccccaacgccacaagcaaaucuggcuucuuugcgaccauggccugggcugucccuaaggacaauaacaaaaaugccaccaacccccuuacaguggaggugccuuauauuuguacggaaggggaggaucagaucaccgucuggggauuccauuccgacaauaagacacagaugaagaaccuguacggcgauagcaauccccaaaaauuuaccucuuccgcuaacgggguuacaacccacuaugugagccagauuggaggcuucccggaccagacggaggauggcgggcucccucagucuggacgcaucguggucgacuacaugaugcaaaagcccggcaaaacagggaccauuguguaucagagaggaguucugcuuccucagaagguguggugcgccuccggccggagcaaagucaucaaggggucccugccccucaucggagaagcggauugucugcaugagaaauacggcggccugaacaagucuaagcccuacuauaccggggaacacgccaaagcuauuggaaauugcccuaucugggugaagacaccgcucaaacuggccaacggcaccaaguacagacccccugcuaaacuucugaaggagcgcggguuuuucggagccauugccggcuuucucgaagggggcugggaaggaaugaucgcuggcuggcacggguauacaagccauggagcgcacggcguugccguggcugccgaccugaaguccacgcaggaggccauuaauaaaaucaccaagaaccuuaauagccugucugaacucgaggucaaaaaccugcaacggcuguccggggcuauggacgaacuccauaaugagauccuggagcuugaugaaaagguggacgaucugcgcgccgacacaauuagcucucagaucgagcucgcgguccugcuuagcaacgaaggaauuaucaauuccgaggaugaacaucugcucgcucuggagagaaaacugaagaagaugcucggccccucugccguggacauugggaacggcuguuucgagaccaaacacaagugcaaucagacaugccuggaucggaucgccgcuggaaccuuuaacgccggcgaguucagccuuccuacguuugacucccugaauaucaccgcugccagccucaacgaugacgggcuggauaaucacacaauucugcuuuacuauucuaccgcggccuccagccucgcuguuacacugaugcuggccaucuucauuguguacauggucucucgcgacaacguguccuguagcaucugccucuga

SEQ ID NO: 219706 - RNA, 1755 nt, Artificial Sequence; identical to SEQ ID NO: 218498
  derived and/or modified CDS sequence (opt5) from hemagglutinin__InfluenzaB__AGX23039

SEQ ID NO: 219707 - RNA, 1755 nt, Artificial Sequence
  derived and/or modified CDS sequence (opt5) from hemagglutinin__InfluenzaB__AGX23050
augaaggccaucauugugcugcucauggucguuaccagcaacgcugacagaaucugcacaggcauuacguccucuaauagcccccacguggugaaaaccgccacacagggggaggucaacgugaccggaguuaucccucugacaaccacaccgaccaaguccuacuucgcgaaucuuaaaggcacgcggacccgcgggaagcugugucccgauugccucaacuguacagaccuggauguggcucuuggaagaccuaugugcgucggcaccacacccucugccaaagccagcauucugcaugaaguguccccuguuaccucuggguguuuucccaucaugcacgaccggacgaagauccgccaacucgcuaaucugcugagaggauaugagaacauucggcucagcacacagaaugugaucgaugccgaaaaggcuccuggcggcccguaccgccuggggaccuccggaagcugccccaacgccacaucuaaauccggcuucuuugcgaccauggccugggcugucccuaaggacaauaacaaaaaugccaccaacccccuuacaguggaggugccuuauauuuguacggaaggggaggaucagaucaccgucuggggauuccauagcgacaauaagacacagaugaaaaaccuguacggcgauucuaauccccaaaaguuuaccuccagcgcuaacgggguuacaacccacuaugugucucagauuggaggcuucccggaccagacggaggauggcgggcucccucaguccggaagaaucguggucgacuacaugaugcaaaagcccggcaaaacagggaccauuguguaucagcggggaguucugcuuccucagaagguguggugcgccagcggccgcuccaaagucaucaaggggucucugccccucaucggagaagcggauugucugcaugagaaauacggcggccugaacaagagcaaacccuacuauaccggggaacacgccaaggcuauuggaaauugcccuaucugggugaagacaccgcucagacuggccaacggcaccaaauaccggcccccugcuaagcugcugaaagagcgcggguuuuucggagccauugccggcuuucucgaagggggcugggaaggaaugaucgcuggcuggcacggguauacaucccauggagcgcacggcguugccguggcugccgaccuuaagagcacgcaggaggccauuaauaaaaucaccaagaaccuuaauucucuguccgaacucgaggucaagaaccugcaaagacugagcggggcuauggacgaacuccauaaugagauccuggagcuugaugaaaaaguggacgaucugcgggccgacacaauuucuagccagaucgagcucgcgguccugcuuuccaacgaaggaauuaucaauucugaggaugaacaucugcucgcucuggagcgcaagcugaaaaagaugcucggccccagcgccguggacauugggaacggcuguuucgagaccaaacacaagugcaaucagacaugccuggauagaaucgccgcuggaaccuuuaacgccggcgaguucucccuuccuacguuugacagccugaauaucaccgcugccucucucaacgaugacgggcuggauaaucacacaauucugcuuuacuauuccaccgcggccagcucucucgcuguuacacugaugcuggccaucuucauuguguacauggucucccgggacaacgugagcuguuccaucugccucuga

SEQ ID NO: 219708 - RNA, 1755 nt, Artificial Sequence
  derived and/or modified CDS sequence (opt5) from hemagglutinin__InfluenzaB__AGX23061
augaaggccaucauugugcugcucauggucguuaccagcaacgcugacagaaucugcacaggcauuacguccucuaauagcccccacguggugaaaaccgccacacagggggaggucaacgugaccggaguuaucccucugacaaccacaccgaccaaguccuacuucgcgaaucuuaaaggcacgcggacccgcgggaagcugugucccgauugccucaacuguacagaccuggauguggcucuuggaagaccuaugugcgucggcaccacacccucugccaaagccagcauucugcaugaagugcggccuguuaccuccggguguuuucccaucaugcacgaccgcacgaagaucagacaacucgcuaaucugcugcggggauaugagaacauucgccucucuacacagaaugugaucgaugccgaaaaggcuccuggcggcccguacagacuggggaccagcggauccugccccaacgccacaagcaaaucuggcuucuuugcgaccauggccugggcugucccuaaggacaauaacaaaaaugccaccaacccccuuacaguggaggugccuuauauuuguacggaaggggaggaucagaucaccgucuggggauuccauuccgacaauaagacacagaugaaaaaccuguacggcgauagcaauccccaaaaguuuaccucuuccgcuaacgggguuacaacccacuaugugagccagauuggaggcuucccggaccagacggaggauggcgggcucccucagucuggacggaucguggucgacuacaugaugcaaaagcccggcaaaacagggaccauuguguaucagcgcggaguucugcuuccucagaagguguggugcgccuccggcagaagcaaagucaucaaggggucccugccccucaucggagaagcggauugucugcaugagaaauacggcggccugaacaagucuaaacccuacuauaccggggaacacgccaaggcuauuggaaauugcccuaucugggugaagacaccgcuccggcuggccaacggcaccaaauacagacccccugcuaagcugcugaaagagcgcggguuuuucggagccauugccggcuuucucgaagggggcugggaaggaaugaucgcuggcuggcacggguauacaagccauggagcgcacggcguugccguggcugccgaccugaaguccacgcaggaggccauuaauaaaaucaccaagaaccuuaauagccugucugaacucgaggucaagaaccugcaacggcuguccggggcuauggacgaacuccauaaugagauccuggagcuugaugaaaaaguggacgaucugcgcgccgacacaauuagcucucagaucgagcucgcgguccugcuuagcaacgaaggaauuaucaauuccgaggaugaacaccuucucgcucuggagagaaagcugaaaaagaugcucggccccucugccguggacauugggaacggcuguuucgagaccaaacacaagugcaaucagacaugccuggaucggaucgccgcuggaaccuuuaacgccggcgaguucagccuuccuacguuugacucccugaauaucaccgcugccagccucaacgaugacgggcuggauaaucauacaauucugcuuuacuauucuaccgcggccuccagccucgcuguuacacugaugcuggccaucuucauuguguacauggucucuagagacaacguguccuguagcaucugccucuga

SEQ ID NO: 219709 - RNA, 1755 nt, Artificial Sequence; identical to SEQ ID NO: 218498
  derived and/or modified CDS sequence (opt5) from hemagglutinin__InfluenzaB__AGX23072

SEQ ID NO: 219710 - RNA, 1755 nt, Artificial Sequence; identical to SEQ ID NO: 219110
  derived and/or modified CDS sequence (opt5) from hemagglutinin__InfluenzaB__AGX23083

SEQ ID NO: 219711 - RNA, 1755 nt, Artificial Sequence; identical to SEQ ID NO: 218498
  derived and/or modified CDS sequence (opt5) from hemagglutinin__InfluenzaB__AGX23094

SEQ ID NO: 219712 - RNA, 1755 nt, Artificial Sequence; identical to SEQ ID NO: 218498
  derived and/or modified CDS sequence (opt5) from hemagglutinin__InfluenzaB__AGX23105

SEQ ID NO: 219713 - RNA, 1755 nt, Artificial Sequence; identical to SEQ ID NO: 219110
  derived and/or modified CDS sequence (opt5) from hemagglutinin__InfluenzaB__AGX23116

SEQ ID NO: 219714 - RNA, 1755 nt, Artificial Sequence; identical to SEQ ID NO: 218498
  derived and/or modified CDS sequence (opt5) from hemagglutinin__InfluenzaB__AGX23127

SEQ ID NO: 219715 - RNA, 1755 nt, Artificial Sequence; identical to SEQ ID NO: 218498
  derived and/or modified CDS sequence (opt5) from hemagglutinin__InfluenzaB__AGX23138

SEQ ID NO: 219716 - RNA, 1755 nt, Artificial Sequence
  derived and/or modified CDS sequence (opt5) from hemagglutinin__InfluenzaB__AGX23149
augaaggccaucauugugcugcucauggucguuaccagcaacgcugacagaaucugcacaggcauuacguccucugauagcccccacguggugaaaaccgccacacagggggaggucaaugugaccggaguuaucccucugacaaccacaccgaccaaguccuacuucgcgaaccuuaaaggcacgcggacccgcgggaagcugugucccgacugccucaauuguacagaucuggacguggcucuuggaagaccuaugugcgucggcaccacacccucugccaaagccagcauucugcaugaagugcggccuguuaccuccggguguuuucccaucaugcacgaucgcacgaagaucagacaacucgcuaaccugcugcggggauaugagaauauucgccucucuacacagaacgugaucgacgccgaaaaggcuccuggcggcccguacagacuggggaccagcggauccugccccaaugccacaagcaaaucuggcuucuuugcgaccauggccugggcugucccuaaggauaacaauaaaaacgccaccaauccccuuacaguggaggugccuuauauuuguacggaaggggaggaccagaucaccgucuggggauuccauuccgauaacaagacacagaugaaaaaucuguacggcgacagcaacccccaaaaguuuaccucuuccgcuaaugggguuacaacccacuaugugagccagauuggaggcuucccggaucagacggaggacggcgggcucccucagucuggacggaucguggucgauuacaugaugcaaaagcccggcaaaacagggaccauuguguaucagcgcggaguucugcuuccucagaagguguggugcgccuccggcagaagcaaagucaucaaggggucccugccccucaucggagaagcggacugucugcaugagaaauacggcggccugaacaagucuaaacccuacuauaccggggaacacgccaaggcuauuggaaacugcccuaucugggugaagacaccgcucaaacuggccaauggcaccaaguaccggcccccugcuaaacuucugaaggagcgcggguuuuucggagccauugccggcuuucucgaagggggcugggaaggaaugaucgcuggcuggcacggguauacaagccauggagcgcacggcguugccguggcugccgaccugaaauccacgcaggaggccauuaacaagaucaccaagaaucuuaacagccugucugaacucgaggucaaaaaucugcaaagacuguccggggcuauggaugaacuccauaacgagauccuggagcuugacgaaaagguggaugaccugcgggccgauacaauuagcucucagaucgagcucgcgguccugcuuagcaaugaaggaauuaucaacuccgaggacgaacaucugcucgcucuggagcgcaaacugaagaaaaugcucggccccucugccguggauauugggaauggcuguuucgagaccaagcacaagugcaaccagacaugccuggacagaaucgccgcuggaaccuuuaaugccggcgaguucagccuuccuacguuugauucccugaacaucaccgcugccagccucaaugacgaugggcuggacaaccacacaauucugcuuuacuauucuaccgcggccuccagccucgcuguuacacugaugcuggccaucuucauuguguacauggucucucgggacaauguguccuguagcaucugccucuga

SEQ ID NO: 219717 - RNA, 1755 nt, Artificial Sequence
  derived and/or modified CDS sequence (opt5) from hemagglutinin__InfluenzaB__AGX23160
augaaggccaucauugugcugcucauggucguuaccagcaacgcugacagaaucugcacaggcauuacguccucuaauagcccccacguggugaaaaccgccacacagggggaggucaacgugaccggaguuaucccucugacaaccacaccgaccaaguccuacuucgcgaaucuuaaaggcacgcggacccgcgggaagcugugucccgauugccucaacuguacagaccuggauguggcucuuggaagaccuaugugcgucggcauuacccccucugccaaagccagcauccugcaugaagugcggccuguuacauccggguguuuucccaucaugcacgaccgcaccaagauuagacaacucgcuaaucugcugcggggauaugagaacauccgccucucuacgcagaaugugauugaugccgaaaaggcuccuggcggcccguacagacuggggacaagcggauccugccccaacgccaccagcaaaucuggcuucuuugcgacaauggccugggcugucccuaaggacaauaacaaaaaugccaccaacccccuuaccguggaggugccuuauaucuguacagaaggggaggaucagauuacggucuggggauuccauuccgacaauaagacccagaugaaaaaccuguacggcgauagcaauccccaacgguuuacaucuuccgcuaacgggguuaccacacacuaugugagccagaucggaggcuucccggaccagaccgaggauggcgggcucccucagucuggacgcauuguggucgacuacaugaugcaaaagcccggcaagacggggacaaucguguaucagagaggaguucugcuuccucagaaaguguggugcgccuccggccggagcaaggucaucaaagggucccugccccucauuggagaagcggauugucugcaugagaaguacggcggccugaacaaaucuaagcccuacuauaccggggaacacgccaaagcuaucggaaauugcccuauuugggugaagaccccgcuccgccuggccaacggcacaaaguacagacccccugcuaaacuucugaaggagcggggguuuuucggagccaucgccggcuuucucgaagggggcugggaaggaaugauugcuggcuggcacggguauaccagccauggagcgcacggcguugccguggcugccgaccugaaauccacacaggaggccaucaauaagaucacgaaaaaccuuaauagccugucugaacucgaggucaagaaccugcaacgccuguccggggcuauggacgaacuccauaaugagauucuggagcuugaugaaaagguggacgaucugagagccgacaccaucagcucucagauugagcucgcgguccugcuuagcaacgaaggaaucauuaauuccgaggaugaacaucugcucgcucuggagcggaaacugaagaaaaugcucggccccucugccguggacaucgggaacggcuguuucgagacaaagcacaaaugcaaucagaccugccuggauagaaucgccgcuggaacauuuaacgccggcgaguucagccuuccuaccuuugacucccugaauauuacggcugccagccucaacgaugacgggcuggauaaucacaccauccugcuuuacuauucuacagcggccuccagccucgcuguuacccugaugcuggccauuuucaucguguacauggucucucgcgacaacguguccuguagcauuugccucuga

SEQ ID NO: 219718 - RNA, 1755 nt, Artificial Sequence
  derived and/or modified CDS sequence (opt5) from hemagglutinin__InfluenzaB__AGX23171
augaaggccaucauugugcugcucauggucguuaccagcaacgcugacagaaucugcacaggcauuacguccucuaauagcccccacguggugaaaaccgccacacagggggaggucaacgugaccggaguuaucccucugacaaccacaccgaccaaguccuacuucgcgaaucuuaaaggcacgcggacccgcgggaagcugugucccgauugccucaacuguacagaccuggauguggcucuuggaagaccuaugugcgucggcaccacacccucugccaaagccagcauucugcaugaagugcggccuguuaccuccggguguuuucccaucaugcacgaccgcacgaagaucagacaacucgcuaaucugcugcggggauaugagaacauucgccucucuacacagaaugugaucgaugccgaaaaggcuccuggcggcccguacagacuggggaccagcggauccugccccaacgccacaagcaaaucuggcuucuuugcgaccauggccugggcugucccuaaggacaauaacaaaaaugccaccaacccccuuacaguggaggugccuuauauuuguacggaaggggaggaucagaucaccgucuggggauuccauuccgacaauaagacacagaugaaaaaccuguacggcgauagcaauccccaacgguuuaccucuuccgcuaacgggguuacaacccacuaugugagccagauuggaggcuucccggaccagacggaggauggcgggcucccucagucuggacgcaucguggucgacuacaugaugcaaaagcccggcaagacagggaccauuguguaucagagaggaguucugcuuccucagaaaguguggugcgccuccggccggagcaaggucaucaaagggucccugccccucaucggagaagcggauugucugcaugagaaguacggcggccugaacaaaucuaagcccuacuauaccggggaacacgccaaagcuauuggaaauugcccuaucugggugaagacaccgcuccgccuggccaacggcaccaaguacagacccccugcuaaacuucugaaggagcggggguuuuucggagccauugccggcuuucucgaagggggcugggaaggaaugaucgcuggcuggcacggguauacaagccauggagcgcacggcguugccguggcugccgaccugaaauccacgcaggaggccauuaauaagaucaccaaaaaccuuaauagccugucugaacucgaggucaagaaccugcaacgccuguccggggcuauggacgaacuccauaaugagauccuggagcuugaugaaaagguggacgaucugagagccgacacaauuagcucucagaucgagcucgcgguccugcuuagcaacgaaggaauuaucaauuccgaggaugaacaucugcucgcucuggagcggaaacugaagaaaaugcucggccccucugccguggacauugggaacggcuguuucgagaccaagcacaaaugcaaucagacaugccuggauagaaucgccgcuggaaccuuuaacgccggcgaguucagccuuccuacguuugacucccugaauaucaccgcugccagccucaacgaugacgggcuggauaaucacacaauucugcuuuacuauucuaccgcggccuccagccucgcuguuacacugaugcuggccaucuucauuguguacauggucucucgcgacaacguguccuguagcaucugccucuga

SEQ ID NO: 219719 - RNA, 1755 nt, Artificial Sequence; identical to SEQ ID NO: 218498
  derived and/or modified CDS sequence (opt5) from hemagglutinin__InfluenzaB__AGX23182

SEQ ID NO: 219720 - RNA, 1755 nt, Artificial Sequence; identical to SEQ ID NO: 218498
  derived and/or modified CDS sequence (opt5) from hemagglutinin__InfluenzaB__AGX23193

SEQ ID NO: 219721 - RNA, 1755 nt, Artificial Sequence; identical to SEQ ID NO: 219110
  derived and/or modified CDS sequence (opt5) from hemagglutinin__InfluenzaB__AGX23204

SEQ ID NO: 219722 - RNA, 1755 nt, Artificial Sequence; identical to SEQ ID NO: 218498
  derived and/or modified CDS sequence (opt5) from hemagglutinin__InfluenzaB__AGX23215

SEQ ID NO: 219723 - RNA, 1755 nt, Artificial Sequence
  derived and/or modified CDS sequence (opt5) from hemagglutinin__InfluenzaB__AGX23226
augaaggccaucauugugcugcucauggucguuaccagcaacgcugacagaaucugcacaggcauuacguccucuaauagcccccacguggugaaaaccgccacacagggggaggucaacgugaccggaguuaucccucugacaaccacaccgaccaaguccuacuucgcgaaucuuaaaggcacgcggacccgcgggaagcugugucccgauugccucaacuguacagaccuggauguggcucuuggaagaccuaugugcgucggcaccacacccucugccaaagccagcauucugcaugaagugcggccuguuaccuccggguguuuucccaucaugcacgaccgcacgaagaucagacaacucgcuaaucugcugcggggauaugagaacauucgccucucuacacagaaugugaucgaugccgaaaaggcuccuggcggcccguacagacuggggaccagcggauccugccccaacgccacaagcaaaucuggcuucuuugcgaccauggccugggcugucccuaaggacaauaacaaaaaugccaccaacccccuuacaguggaggugccuuauauuuguaaggaaggggaggaucagaucacggucuggggauuccauuccgacaauaaaacccagaugaagaaccuguacggcgauagcaauccccaaaaguuuacaucuuccgcuagcgggguuaccacacacuaugugucucagauuggaggcuucccggaccagaccgaggauggcgggcucccucaguccggacggaucguggucgacuacaugauucaaaaacccggcaagacggggacaaucguguaucagcgcggaguucugcuuccucagaaaguguggugcgccagcggcagauccaaggucaucaaagggucucugccccucauuggagaagcggauugucugcaugagaaguacggcggccugaacaaaagcaagcccuacuauaccggggaacacgccaaggcuaucggaaacugcccuauuugggugaaaaccccgcucaagcuggccaauggcacaaaauaccggcccccugcuaagcugcugaaagagcgcggguuuuucggagccaucgccggcuuucucgaagggggcugggaaggaaugauugcuggcuggcacggguauaccucccauggagcgcacggcguugccguggcugccgaccuuaagagcacacaggaggccaucaacaagaucacgaaaaaucuuaacucucuguccgaacucgaggucaagaaucugcaaagacugagcggggcuauggacgaacuccauaacgagauucuggagcuugaugaaaaaguggacgaucugcgggccgacaccaucucuagccagauugagcucgcgguccugcuuuccaaugaaggaaucauuaacucugaggaugaacaucugcucgcucuggagcgcaagcugaaaaagaugcucggccccagcgccguggacaucgggaauggcuguuucgagacaaagcacaaaugcaaccagaccugccuggauagaaucgccgcuggaacauuuaaugccggcgaguucucccuuccuaccuuugacagccugaacauuacggcugccucucucaaugaugacgggcuggauaaccacaccauccugcuuuacuauuccacagcggccagcucucucgcuguuacccugaugcuggccauuuucaucguguacauggucucccgggacaaugugagcuguuccauuugccucuga

SEQ ID NO: 219724 - RNA, 1755 nt, Artificial Sequence; identical to SEQ ID NO: 219671
  derived and/or modified CDS sequence (opt5) from hemagglutinin__InfluenzaB__AGX23237

SEQ ID NO: 219725 - RNA, 1755 nt, Artificial Sequence
  derived and/or modified CDS sequence (opt5) from hemagglutinin__InfluenzaB__AGX23248
augaaggccaucauugugcugcucauggucguuaccagcaacgcugacagaaucugcacaggcauuacguccucuaauagcccccacguggugaaaaccgccacacagggggaggucaacgugaccggaguuaucccucugacaaccacaccgaccaaguccuacuucgcgaaucuuaaaggcacgcggacccgcgggaagcugugucccgauugccucaacuguacagaccuggauguggcucuuggaagaccuaugugcgucggcaccacacccucugccaaagccagcauucugcaugaagugcggccuguuaccuccggguguuuucccaucaugcacgaccgcacgaagaucagacaacucgcuaaucugcugcggggauaugagaacauucgccucucuacacagaaugugaucgaugccgaaaaggcuccuggcggcccguacagacuggggaccagcggauccugccccaacgccacaagcaaaucuggcuucuuugcgaccauggccugggcugucccuaaggacaauaacaaaaaugccaccaacccccuuacaguggaggugccuuauauuuguaaggaaggggaggaucagaucacggucuggggauuccauuccgacaauaaaacccagaugaagaaccuguacggcgauagcaauccccaaaaguuuacaucuuccgcuagcgggguuaccacacacuaugugucucagauuggaggcuucccggaccagaccgaggauggcgggcucccucaguccggacggaucguggucgacuacaugauucaaaaacccggcaagacggggacaaucguguaucagcgcggaguucugcuuccucagaaaguguggugcgccagcggcagauccaaggucaucaaagggucucugccccucauuggagaagcggauugucugcaugagaaguacggcggccugaacaaaagcaagcccuacuauaccggggaacacgccaaggcuaucggaaacugcccuauuugggugaaaaccccgcucaagcuggccaauggcacaaaauaccggcccccugcuaagcugcugaaagagcgcggguuuuucggagccaucgccggcuuucucgaagggggcugggaaggaaugauugcuggcuggcacggguauaccucccauggagcgcacggcguugccguggcugccgaccuuaagagcacacaggaggccaucaacaagaucacgaaaaaucuuaacucucuguccgaacucgaggucaagaaucugcaaagacugagcggggcuauggacgaacuccauaacgagauucuggagcuugaugaaaaaguggacgaucugcgggccgacaccaucucuagccagauugagcucgcgguccugcuuuccaaugaaggaaucauuaacucugaggaugaacaucugcucgcucuggagcgcaagcugaaaaagaugcucggccccagcgccguggacaucgggaauggcuguuucgagacaaagcacaaaugcaaccagaccugccugaauagaaucgccgcuggaacauuuaacgccggcgaguucucccuuccuaccuuugauagccugaauauuacggcugccucucucaacgacgaugggcuggacaaucacaccauccugcuuuacuauuccacagcggccagcucucucgcuguuacccugaugcuggccauuuucaucguguacauggucucccgggauaacgugagcuguuccauuugccucuga

SEQ ID NO: 219726 - RNA, 1755 nt, Artificial Sequence; identical to SEQ ID NO: 218498
  derived and/or modified CDS sequence (opt5) from hemagglutinin__InfluenzaB__AGX23259

SEQ ID NO: 219727 - RNA, 1755 nt, Artificial Sequence; identical to SEQ ID NO: 218498
  derived and/or modified CDS sequence (opt5) from hemagglutinin__InfluenzaB__AGX23270

SEQ ID NO: 219728 - RNA, 1755 nt, Artificial Sequence
  derived and/or modified CDS sequence (opt5) from hemagglutinin__InfluenzaB__AGX23281
augaaggccaucauugugcugcucauggucguuaccagcaacgcugacagaaucugcacaggcauuacguccucuaauagcccccacguggugaaaaccgccacacagggggaggucaacgugaccggaguuaucccucugacaaccacaccgaccaaguccuacuucgcgaaucuuaaaggcacgcggacccgcgggaagcugugucccgauugccucaacuguacagaccuggauguggcucuuggaagaccuaugugcgucggcaccacacccucugccaaagccagcauucugcaugaagugcggccuguuaccuccggguguuuucccaucaugcacgaccgcacgaagaucagacaacucgcuaaucugcugcggggauaugagaacauucgccucucuacacagaaugugaucgaugccgaaaaggcuccuggcggcccguacagacuggggaccagcggauccugccccaacgccgcgagcaaaucuggcuucuuugccacaauggcuugggccgucccuaaggacaauaacaaaaaugcuaccaacccccuuaccguggaggugccuuauauuuguacagaaggggaggaucagaucacggucuggggauuccauuccgacaauaagacccagaugaaaaaccuguacggcgauagcaauccccaaaaguuuacaucuuccgccaacgggguuaccacacacuaugugagccagauuggaggcuucccggaccagaccgaggauggcgggcucccucagucuggacggaucguggucgacuacaugaugcaaaagcccggcaaaacggggacaauuguguaucagcgcggaguucugcuuccucagaagguguggugcgcguccggcagaagcaaagucaucaaggggucccugccccucaucggagaagccgauugucugcaugagaaauacggcggccugaacaagucuaaacccuacuauaccggggaacacgcuaaggccauuggaaauugcccuaucugggugaagaccccgcucaaacuggcuaacggcacaaaguaccggcccccugccaaacuucugaaggagcgcggguuuuucggagccauugcuggcuuucucgaagggggcugggaaggaaugaucgcgggcuggcacggguauaccagccauggagcccacggcguugcuguggccgccgaccugaaauccacacaggaggcuauuaauaagaucacgaagaaccuuaauagccugucugaacucgaggucaaaaaccugcaaagacuguccggggccauggacgaacuccauagcgagauccuggagcuugaugaaaagguggacgaucugcgggcggacaccauuucuagccagaucgagcucgcuguccugcuuuccaaugaaggaauuaucaacucugaggaugaacaucugcucgcccuggagcgcaaacugaagaaaaugcucggccccagcgccguggacauugggaauggcuguuucgagacaaagcacaagugcaaccagaccugccuggauagaaucgcugccggaacauuuaaugcuggcgaguucucccuuccuaccuuugacagccugaacaucacggccgcgucucucaaugaugacgggcuggauaaccacaccauucugcuuuacuauuccacagccgcuagcucucucgccguuacccugaugcuggcuaucuucauuguguacauggucucccgggacaaugugagcuguuccaucugccucuga

SEQ ID NO: 219729 - RNA, 1755 nt, Artificial Sequence
  derived and/or modified CDS sequence (opt5) from hemagglutinin__InfluenzaB__AGX23292
augaaggccaucauugugcugcucauggucguuaccagcaacgcugacagaaucugcacaggcauuacguccucuaauagcccccacguggugaaaaccgccacacagggggaggucaacgugaccggaguuaucccucugacaaccacaccgaccaaguccuacuucgcgaaucuuaaaggcacgcggacccgcgggaagcugugucccgauugccucaacuguacagaccuggauguggcucuuggaagaccuaugugcgucggcaccacacccucugccaaagccagcauucugcaugaagugcggccuguuaccuccggguguuuucccaucaugcacgaccgcacgaagaucagacaacucgcuaaucugcugcggggauaugagaacauucgccucucuacacagaaugugaucgaugccgaaaaggcuccuggcggcccguacagacuggggaccagcggauccugccccaacgccaauagcaaaucuggcuucuuugcgacaauggccugggcugucccuaaggacaacaauaaaaacgccaccaauccccuuaccguggaggugccuuauauuuguacagaaggggaggaucagaucacggucuggggauuccauuccgacaacaagacccagaugaaaaaucuguacggcgauagcaacccccaaaaguuuacaucuuccgcuaacgggguuaccacacacuaugugagccagauuggaggcuucccggaccagaccgaggauggcgggcucccucagucuggacggaucguggucgacuacaugaugcaaaagcccggcaaaacggggacaauuguguaucagcgcggaguucugcuuccucagaagguguggugcgccuccggcagaagcaaagucaucaaggggucccugccccucaucggagaagcggauugucugcaugagaaauacggcggccugaauaagucuaaacccuacuauaccggggaacacgccaaggcuauuggaaacugcccuaucugggugaagaccccgcucaaacuggccaauggcacaaaguaccggcccccugcuaaacuucugaaggagcgcggguuuuucggagccauugccggcuuucucgaagggggcugggaaggaaugaucgcuggcuggcacggguauaccagccauggagcgcacggcguugccguggcugccgaccugaaauccacacaggaggccauuaacaagaucacgaagaaucuuaacagccugucugaacucgaggucaaaaaucugcaaagacuguccggggcuauggacgaacuccauaacgagauccuggagcuugaugaaaagguggacgaucugcgggccgacaccauuagcucucagaucgagcucgcgguccugcuuagcaaugaaggaauuaucaacuccgaggaugaacaucugcucgcucuggagcgcaaacugaagaaaaugcucggccccucugccguggacauugggaauggcuguuucgagacaaagcacaagugcaaccagaccugccuggauagaaucgccgcuggaacauuuaaugccggcgaguucagccuuccuaccuuugacucccugaacaucacggcugccagccucaaugaugacgggcuggauaaccacaccauucugcuuuacuauucuacagcggccuccagccucgcuguuacccugaugcuggccaucuucauuguguacauggucucucgggacaacguguccuguagcaucugccucuga

SEQ ID NO: 219730 - RNA, 1755 nt, Artificial Sequence
  derived and/or modified CDS sequence (opt5) from hemagglutinin__InfluenzaB__AGX23314
augaaggccaucauugugcugcucauggucguuaccagcaacgcugacagaaucugcacaggcauuacguccucuaauagcccccacguggugaaaaccgccacacagggggaggucaacgugaccggaguuaucccucugacaaccacaccgaccaaguccuacuucgcgaaucuuaaaggcacgcggacccgcgggaagcugugucccgauugccucaacuguacagaccuggauguggcucuuggaagaccuaugugcgucggcaccacacccucugccaaagccagcauucugcaugaagugcggccuguuaccuccggguguuuucccaucaugcacgaccgcacgaagaucagacaacucgcuaaucugcugcggggauaugagaacauucgccucucuacacagaaugugaucgaugccgaaagagcuccuggcggcccguaccggcuggggaccagcggauccugccccaacgccacaagcaagucuggcuucuuugcgaccauggccugggcugucccuaaagacaauaacaagaaugccaccaacccccuuacaguggaggugccuuauauuuguacggaaggggaggaucagaucaccgucuggggauuccauuccgacaauaaaacacagaugaagaaccuguacggcgauagcaauccccaaaaauuuaccucuuccgcuaacgggguuacaacccacuaugugagccagauuggaggcuucccggaccagacggaggauggcgggcucccucagucuggacgcaucguggucgacuacaugaugcaaaagcccggcaagacagggaccauuguguaucagagaggaguucugcuuccucagaaaguguggugcgccuccggccggagcaaggucaucaaagggucccugccccucaucggagaagcggauugucugcaugagaaguacggcggccugaacaaaucuaagcccuacuauaccggggaacacgccaaagcuauuggaaauugcccuaucugggugaagacaccgcucaagcuggccaacggcaccaaauacagacccccugcuaagcugcugaaagagcgcggguuuuucggagccauugccggcuuucucgaagggggcugggaaggaaugaucgcuggcuggcacggguauacaagccauggagcgcacggcguugccguggcugccgaccugaaguccacgcaggaggccauuaauaaaaucaccaagaaccuuaauagccugucugaacucgaggucaagaaccugcaacggcuguccggggcuauggacgaacuccauaaugagauccuggagcuugaugaaaaaguggacgaucugcgcgccgacacaauuagcucucagaucgagcucgcgguccugcuuagcaacgaaggaauuaucaauuccgaggaugaacaccuucucgcucuggagagaaagcugaaaaagaugcucggccccucugccguggacauugggaacggcuguuucgagaccaaacacaagugcaaucagacaugccuggaucggaucgccgcuggaaccuuuaacgccggcgaguucagccuuccuacguuugacucccugaauaucaccgcugccagccucaacgaugacgggcuggauaaucauacaauucugcuuuacuauucuaccgcggccuccagccucgcuguuacacugaugcuggccaucuucauuguguacauggucucuagagacaacguguccuguagcaucugccucuga

SEQ ID NO: 219731 - RNA, 1755 nt, Artificial Sequence; identical to SEQ ID NO: 219730
  derived and/or modified CDS sequence (opt5) from hemagglutinin__InfluenzaB__AGX23325

SEQ ID NO: 219732 - RNA, 1755 nt, Artificial Sequence; identical to SEQ ID NO: 219730
  derived and/or modified CDS sequence (opt5) from hemagglutinin__InfluenzaB__AGX23336

SEQ ID NO: 219733 - RNA, 1755 nt, Artificial Sequence; identical to SEQ ID NO: 219730
  derived and/or modified CDS sequence (opt5) from hemagglutinin__InfluenzaB__AGX23347

SEQ ID NO: 219734 - RNA, 1755 nt, Artificial Sequence; identical to SEQ ID NO: 219730
  derived and/or modified CDS sequence (opt5) from hemagglutinin__InfluenzaB__AGX23358

SEQ ID NO: 219735 - RNA, 1755 nt, Artificial Sequence; identical to SEQ ID NO: 219730
  derived and/or modified CDS sequence (opt5) from hemagglutinin__InfluenzaB__AGX23369

SEQ ID NO: 219736 - RNA, 1755 nt, Artificial Sequence; identical to SEQ ID NO: 219730
  derived and/or modified CDS sequence (opt5) from hemagglutinin__InfluenzaB__AGX23380

SEQ ID NO: 219737 - RNA, 1755 nt, Artificial Sequence; identical to SEQ ID NO: 218498
  derived and/or modified CDS sequence (opt5) from hemagglutinin__InfluenzaB__AGX23391

SEQ ID NO: 219738 - RNA, 1755 nt, Artificial Sequence
  derived and/or modified CDS sequence (opt5) from hemagglutinin__InfluenzaB__AGX23413
augaaggccaucauugugcugcucauggucguuaccagcaacgcugacagaaucugcacaggcauuacguccucuaauagcccccacguggugaaaaccgccacacagggggaggucaacgugaccggaguuaucccucugacaaccacaccgaccaaguccuacuucgcgaaucuuaaaggcacgcggacccgcgggaagcugugucccgauugccucaacuguacagaccuggauguggcucuuggaagaccuaugugcgucggcaccacacccucugccaaagccagcauucugcaugaagugcggccuguuaccuccggguguuuucccaucaugcacgaccgcacgaagaucagacaacucgcuaaucugcugcggggauaugagaacauucgccucucuaaucagaacgugaucgaugccgaaagagcuccuggcggcccguaccggcuggggacaagcggauccugccccaaugccaccagcaagucuggcuucuuugcgacaauggccugggcugucccuaaagacaacaauaagaacgccaccaauccccuuaccguggaggugccuuauauuuguacagaaggggaggaucagaucacggucuggggauuccauuccgacaacaaaacccagaugaagaaucuguacggcgauagcaacccccaaaaauuuacaucuuccgcuaacgggguuaccacacacuaugugagccagauuggaggcuucccggaccagaccgaggauggcgggcucccucagucuggacgcaucguggucgacuacaugaugcaaaagcccggcaagacggggacaauuguguaucagagaggaguucugcuuccucagaaaguguggugcgccuccggccggagcaaggucaucaaagggucccugccccucaucggagaagcggauugucugcaugagaaguacggcggccugaauaaaucuaagcccuacuauaccggggaacacgccaaagcuauuggaaacugcccuaucugggugaagaccccgcucaagcuggccaauggcacaaaauacagacccccugcuaagcugcugaaagagcgcggguuuuucggagccauugccggcuuucucgaagggggcugggaaggaaugaucgcuggcuggcacggguauaccagccauggagcgcacggcguugccguggcugccgaccugaaguccacacaggaggccauuaacaaaaucacgaagaaucuuaacagccugucugaacucgaggucaagaaucugcaacggcuguccggggcuauggacgaacuccauaacgagauccuggagcuugaugaaaaaguggacgaucugcgcgccgacaccauuagcucucagaucgagcucgcgguccugcuuagcaaugaaggaauuaucaacuccgaggaugaacaccuucucgcucuggagagaaagcugaaaaagaugcucggccccucugccguggacauugggaauggcuguuucgagacaaaacacaagugcaaccagaccugccuggaucggaucgccgcuggaacauuuaaugccggcgaguucagccuuccuaccuuugacucccugaacaucacggcugccagccucaaugaugacgggcuggauaaccauaccauucugcuuuacuauucuacagcggccuccagccucgcuguuacccugaugcuggccaucuucauuguguacauggucucuagagacaacguguccuguagcaucugccucuga

SEQ ID NO: 219739 - RNA, 1755 nt, Artificial Sequence; identical to SEQ ID NO: 219738
  derived and/or modified CDS sequence (opt5) from hemagglutinin__InfluenzaB__AGX23424

SEQ ID NO: 219740 - RNA, 1755 nt, Artificial Sequence; identical to SEQ ID NO: 218892
  derived and/or modified CDS sequence (opt5) from hemagglutinin__InfluenzaB__AGX23435

SEQ ID NO: 219741 - RNA, 1755 nt, Artificial Sequence; identical to SEQ ID NO: 218803
  derived and/or modified CDS sequence (opt5) from hemagglutinin__InfluenzaB__AGX23446

SEQ ID NO: 219742 - RNA, 1755 nt, Artificial Sequence; identical to SEQ ID NO: 218892
  derived and/or modified CDS sequence (opt5) from hemagglutinin__InfluenzaB__AGX23457

SEQ ID NO: 219743 - RNA, 1755 nt, Artificial Sequence; identical to SEQ ID NO: 218803
  derived and/or modified CDS sequence (opt5) from hemagglutinin__InfluenzaB__AGX23468

SEQ ID NO: 219744 - RNA, 1755 nt, Artificial Sequence; identical to SEQ ID NO: 218498
  derived and/or modified CDS sequence (opt5) from hemagglutinin__InfluenzaB__AGX23479

SEQ ID NO: 219745 - RNA, 1755 nt, Artificial Sequence; identical to SEQ ID NO: 218498
  derived and/or modified CDS sequence (opt5) from hemagglutinin__InfluenzaB__AGX23490

SEQ ID NO: 219746 - RNA, 1755 nt, Artificial Sequence; identical to SEQ ID NO: 219119
  derived and/or modified CDS sequence (opt5) from hemagglutinin__InfluenzaB__AGX23501

SEQ ID NO: 219747 - RNA, 1755 nt, Artificial Sequence
  derived and/or modified CDS sequence (opt5) from hemagglutinin__InfluenzaB__AGX23512
augaaggccaucauugugcugcucauggucguuaccagcaacgcugacagaaucugcacaggcauuacguccucuaauagcccccacguggugaaaaccgccacacagggggaggucaacgugaccggaguuaucccucugacaaccacaccgaccaaguccuacuucgcgaaucuuaaaggcacgaagacccgggggaaacugugucccgauugccucaacuguacagaccuggauguggcucuuggacgcccuaugugcgucggcaccacacccucugccaaggccagcauucugcaugaagugagaccuguuaccuccggguguuuucccaucaugcacgaccggacgaagauccgccaacucgcuaaucugcugagaggauaugagaacauucggcucucuacacagaaugugaucgaugccgaaaaagcuccuggcggcccguaccgccuggggaccagcggauccugccccaacgccacaagcaagucuggcuucuuugcgaccauggccugggcugucccuaaagacaauaacaagaaugccaccaacccccuuacaguggaggugccuuauauuuguacggaaggggaggaucagaucaccgucuggggauuccauuccgacaauaaaacacagaugaagacccuguacggcgauagcaacccccaaaaguuuacaucuuccgcuaaugggguuaccacgcacuaugugagccagauuggaggcuucccggaccagacagaggauggcgggcucccucagucuggaagaaucguggucgacuacaugaugcaaaaacccggcaagaccgggaccauuguguaucagcggggaguucugcuuccucagaaaguguggugcgccuccggccgcagcaaggucaucaaagggucccugccccucaucggagaagcggauugucugcaugagaaguacggcggccugaacaaaucuaagcccuacuauacaggggaacacgccaaggcuauuggaaacugcccuaucugggugaaaaccccgcucaagcuggccaauggcacaaaauacagacccccugcuaaacuucugaaagagcggggguuuuucggagccauugccggcuuucucgaagggggcugggaaggaaugaucgcuggcuggcacggguauacgagccauggagcgcacggcguugccguggcugccgaccugaaguccacccaggaggccauuaacaagaucacaaagaaucuuaacagccugucugaacucgaggucaagaaucugcaacgccuguccggggcuauggacgaacuccauaacgagauccuggagcuugaugaaaaaguggacgaucugagagccgacaccauuagcucucagaucgagcucgcgguccugcuuagcaaugaaggaauuaucaacuccgaggaugaacaucugcucgcucuggagcggaagcugaaaaagaugcucggccccucugccguggacauugggaauggcuguuucgagacaaagcacaaaugcaaccagaccugccuggaucgcaucgccgcuggaacguuuaaugccggcgaguucagccuuccuaccuuugacucccugaacaucacagcugccagccucaaugaugacgggcuggauaaccacaccauucugcuuuacuauucuacagcggccuccagccucgcuguuacccugaugcuggccaucuucauuguguacauggucucuagagacaauguguccuguagcaucugccucuga

SEQ ID NO: 219748 - RNA, 1755 nt, Artificial Sequence; identical to SEQ ID NO: 218498
  derived and/or modified CDS sequence (opt5) from hemagglutinin__InfluenzaB__AGX23523

SEQ ID NO: 219749 - RNA, 1755 nt, Artificial Sequence; identical to SEQ ID NO: 218803
  derived and/or modified CDS sequence (opt5) from hemagglutinin__InfluenzaB__AGX23534

SEQ ID NO: 219750 - RNA, 1755 nt, Artificial Sequence; identical to SEQ ID NO: 218803
  derived and/or modified CDS sequence (opt5) from hemagglutinin__InfluenzaB__AGX23545

SEQ ID NO: 219751 - RNA, 1755 nt, Artificial Sequence; identical to SEQ ID NO: 218498
  derived and/or modified CDS sequence (opt5) from hemagglutinin__InfluenzaB__AGX23556

SEQ ID NO: 219752 - RNA, 1755 nt, Artificial Sequence; identical to SEQ ID NO: 218498
  derived and/or modified CDS sequence (opt5) from hemagglutinin__InfluenzaB__AGX23567

SEQ ID NO: 219753 - RNA, 1755 nt, Artificial Sequence; identical to SEQ ID NO: 218498
  derived and/or modified CDS sequence (opt5) from hemagglutinin__InfluenzaB__AGX23578

SEQ ID NO: 219754 - RNA, 1755 nt, Artificial Sequence; identical to SEQ ID NO: 218498
  derived and/or modified CDS sequence (opt5) from hemagglutinin__InfluenzaB__AGX23600

SEQ ID NO: 219755 - RNA, 1755 nt, Artificial Sequence
  derived and/or modified CDS sequence (opt5) from hemagglutinin__InfluenzaB__AGX23611
augaaggccaucauugugcugcucauggucguuaccagcaacgcugacagaaucugcacaggcauuacguccucuaauagcccccacguggugaaaaccgccacacagggggaggucaacgugaccggaguuaucccucugacaaccacaccgaccaaguccuacuucgcgaaucuuaaaggcacgcggacccgcgggaagcugugucccgauugccucaacuguacagaccuggauguggcucuuggaagaccuaugugcgucggcaccacacccucugccaaagccagcauucugcaugaagugcggccuguuaccuccggguguuuucccaucaugcacgaccgcacgaagaucagacaacucgcuaaucugcugcggggauaugagaacauucgccucucuacacagaaugugaucgaugccgaaaaggcuccuggcggcccguacagacuggggaccagcggauccugccccaacgccacaagcaaaucuggcuucuuugcgaccauggccugggcugucccuaaggacaauaacaaaaaugccaccaacccccuuacaguggaggugccuuauauuuguacggaaggggaggaucagaucaccgucuggggauuccauuccgacaauaagacacagaugaaaaaccuguacggcgauagcaauccccaaaaguuuaccucuuccgcuaacgggguuacaacccacuaugugagccagauuggaggcuucccggaccagacggaggauggcgggcucccucagucuggacggaucguggucgacuacaugaugcaaaagcccggcaaaacagggaccauuguguaucagcgcggaguucugcuuccucagaagguguggugcgccuccggcagaagcaaagucaucaaggggucccugccccucaucggagaagcggauugucugcaugagaaauacggcggccugaacaagucuaaacccuacuauaccggggaacacgccaaggcuauuggaaauugcccuaucugggugaagacaccgcucaaacuggccaacggcaccaaguaccggcccccugcuaaacuucugaaggagcgcggguuuuucggagccauugccggcuuucucgaagggggcugggaaggaaugaucgcuggcuggcacggguauacaagccauggagcgcacggcguugccguggcugccgaccugaaauccacgcaggaggccauuaauaagaucaccaagaaccuuaauagccugucugaacucgagaucaaaaaccugcaaagacuguccggggcuauggacgaacuccauaaugagauucuggagcuugaugaaaaggucgacgaucugcgggccgacacaaucagcucucagauugagcucgcggugcugcuuagcaacgaaggaaucauuaauuccgaggaugaacaucugcucgcucuggagcgcaaacugaagaaaaugcucggccccucugccgucgacaucgggaacggcuguuucgagaccaagcacaagugcaaucagacaugccuggauagaaucgccgcuggaaccuuuaacgccggcgaguucagccuuccuacguuugacucccugaauauuaccgcugccagccucaacgaugacgggcuggauaaucacacaauccugcuuuacuauucuaccgcggccuccagccucgcugugacacugaugcuggccauuuucaucguuuacauggugucucgggacaacgucuccuguagcauuugccucuga

SEQ ID NO: 219756 - RNA, 1755 nt, Artificial Sequence; identical to SEQ ID NO: 218498
  derived and/or modified CDS sequence (opt5) from hemagglutinin__InfluenzaB__AGX23622

SEQ ID NO: 219757 - RNA, 1755 nt, Artificial Sequence; identical to SEQ ID NO: 218803
  derived and/or modified CDS sequence (opt5) from hemagglutinin__InfluenzaB__AGX23633

SEQ ID NO: 219758 - RNA, 1755 nt, Artificial Sequence; identical to SEQ ID NO: 218803
  derived and/or modified CDS sequence (opt5) from hemagglutinin__InfluenzaB__AGX23644

SEQ ID NO: 219759 - RNA, 1755 nt, Artificial Sequence; identical to SEQ ID NO: 218498
  derived and/or modified CDS sequence (opt5) from hemagglutinin__InfluenzaB__AGX23655

SEQ ID NO: 219760 - RNA, 1755 nt, Artificial Sequence; identical to SEQ ID NO: 218803
  derived and/or modified CDS sequence (opt5) from hemagglutinin__InfluenzaB__AGX23666

SEQ ID NO: 219761 - RNA, 1755 nt, Artificial Sequence
  derived and/or modified CDS sequence (opt5) from hemagglutinin__InfluenzaB__AGX23677
augaaggccaucauugugcugcucauggucguuaccagcaacgcugacagaaucugcacaggcauuacguccucuaauagcccccacguggugaaaaccgccacacagggggaggucaacgugaccggaguuaucccucugacaaccacaccgaccaaguccuacuucgcgaaucuuaaaggcacgaagacccgggggaaacugugucccgauugccucaacuguacagaccuggauguggcucuuggacgcccuaugugcgucggcaccacacccucugccaaggccagcauucugcaugaagugagaccuguuaccuccggguguuuucccaucaugcacgaccggacgaagauccgccaacucgcuaaucugcugagaggauaugagaaaauucggcucucuacacagaacgugaucgaugccgaaaaggcuccuggcggcccguaccgccuggggaccagcggauccugccccaaugccacaagcaaaucuggcuucuuugcgaccauggccugggcugucccuaaggacaacaauaaaaacgccaccaauccccuuacaguggaggugccuuauauuuguaucgaaggggaggaucagauuacggucuggggauuccauuccgacaacaagacccagaugaagaaucuguacggcgauagcaacccccaaaaauuuacaucuuccgcuaaugggguuaccacacacuaugugagccagaucggaggcuucccggaccagaccgaggauggcgggcucccucagucuggaagaauuguggucgacuacaugaugcaaaagcccggcaaaacggggacaaucguguaucagcggggaguucugcuuccucagaagguguggugcgccuccggccgcagcaaagucaucaaggggucccugccccucauuggagaagcggauugucugcaugagaaauacggcggccugaacaagucuaagcccuacuauaccggggaacacgccaaagcuaucggaaacugcccuauuugggugaagaccccgcucaaacuggccaauggcacaaaguacagacccccugcuaaacuucugaaggagcggggguuuuucggagccaucgccggcuuucucgaagggggcugggaaggaaugauugcuggcuggcacggguauaccagccauggagcgcacggcguugccguggcugccgaccugaaguccacacaggaggccaucaacaaaaucacgaagaaucuuaacagccugucugaacucgaggucaaaaaucugcaacgccuguccggggcuauggacgaacuccauaacgagauucuggagcuugaugaaaagguggacgaucugagagccgacaccaucagcucucagauugagcucgcgguccugcuuagcaaugaaggaaucauuaacuccgaggaugaacaucugcucgcucuggagcggaaacugaagaagaugcucggccccucugccguggacaucgggaauggcuguuucgagacaaaacacaagugcaaccagaccugccuggaucgcaucgccgcuggaacauuuaaugccggcgaguucagccuuccuaccuuugacucccugaacauuacggcugccagccucaaugaugacgggcuggauaaccacaccauccugcuuuacuauucuacagcggccuccagccucgcuguuacccugaugcuggccauuuucaucguguacauggucucuagagacaauguguccuguagcauuugccucuga

SEQ ID NO: 219762 - RNA, 1755 nt, Artificial Sequence; identical to SEQ ID NO: 218803
  derived and/or modified CDS sequence (opt5) from hemagglutinin__InfluenzaB__AGX23688

SEQ ID NO: 219763 - RNA, 1755 nt, Artificial Sequence; identical to SEQ ID NO: 218803
  derived and/or modified CDS sequence (opt5) from hemagglutinin__InfluenzaB__AGX23699

SEQ ID NO: 219764 - RNA, 1755 nt, Artificial Sequence; identical to SEQ ID NO: 218498
  derived and/or modified CDS sequence (opt5) from hemagglutinin__InfluenzaB__AGX23710

SEQ ID NO: 219765 - RNA, 1755 nt, Artificial Sequence; identical to SEQ ID NO: 218803
  derived and/or modified CDS sequence (opt5) from hemagglutinin__InfluenzaB__AGX23721

SEQ ID NO: 219766 - RNA, 1755 nt, Artificial Sequence; identical to SEQ ID NO: 218498
  derived and/or modified CDS sequence (opt5) from hemagglutinin__InfluenzaB__AGX23732

SEQ ID NO: 219767 - RNA, 1755 nt, Artificial Sequence; identical to SEQ ID NO: 218803
  derived and/or modified CDS sequence (opt5) from hemagglutinin__InfluenzaB__AGX23743

SEQ ID NO: 219768 - RNA, 1755 nt, Artificial Sequence; identical to SEQ ID NO: 218803
  derived and/or modified CDS sequence (opt5) from hemagglutinin__InfluenzaB__AGX23754

SEQ ID NO: 219769 - RNA, 1755 nt, Artificial Sequence; identical to SEQ ID NO: 218498
  derived and/or modified CDS sequence (opt5) from hemagglutinin__InfluenzaB__AGX23765

SEQ ID NO: 219770 - RNA, 1755 nt, Artificial Sequence; identical to SEQ ID NO: 218803
  derived and/or modified CDS sequence (opt5) from hemagglutinin__InfluenzaB__AGX23776

SEQ ID NO: 219771 - RNA, 1755 nt, Artificial Sequence; identical to SEQ ID NO: 218803
  derived and/or modified CDS sequence (opt5) from hemagglutinin__InfluenzaB__AGX23787

SEQ ID NO: 219772 - RNA, 1755 nt, Artificial Sequence; identical to SEQ ID NO: 218498
  derived and/or modified CDS sequence (opt5) from hemagglutinin__InfluenzaB__AGX23798

SEQ ID NO: 219773 - RNA, 1755 nt, Artificial Sequence; identical to SEQ ID NO: 218498
  derived and/or modified CDS sequence (opt5) from hemagglutinin__InfluenzaB__AGX23809

SEQ ID NO: 219774 - RNA, 1755 nt, Artificial Sequence; identical to SEQ ID NO: 218498
  derived and/or modified CDS sequence (opt5) from hemagglutinin__InfluenzaB__AGX23820

SEQ ID NO: 219775 - RNA, 1755 nt, Artificial Sequence; identical to SEQ ID NO: 218803
  derived and/or modified CDS sequence (opt5) from hemagglutinin__InfluenzaB__AGX23831

SEQ ID NO: 219776 - RNA, 1755 nt, Artificial Sequence; identical to SEQ ID NO: 218498
  derived and/or modified CDS sequence (opt5) from hemagglutinin__InfluenzaB__AGX23842

SEQ ID NO: 219777 - RNA, 1755 nt, Artificial Sequence
  derived and/or modified CDS sequence (opt5) from hemagglutinin__InfluenzaB__AGX23853
augaaggccaucauugugcugcucauggucguuaccagcaacgcugacagaaucugcacaggcauuacguccucuaauagcccccacguggugaaaaccgccacacagggggaggucaacgugaccggaguuaucccucugacaaccacaccgaccaaguccuacuucgcgaaucuuaaaggcacgcggacccgcgggaagcugugucccgauugccucaacuguacagaccuggauguggcucuuggaagaccuaugugcgucggcaccacacccucugccaaagccagcauucugcaugaagugcggccuguuaccuccggguguuuucccaucaugcacgaccgcacgaagaucagacaacucgcuaaucugcugcggggauaugagaacauucgccucucuauccagaaugugauugaugccgaaaaggcuccuggcggcccguacagacuggggacaagcggauccugccccaacgccaccagcaaaucuggcuucuuugcgacaauggccugggcugucccuaaggacaauaacaaaaaugccaccaacccccuuaccguggaggugccuuauaucuguacagaaggggaggaucagauuacggucuggggauuccauuccgacaauaagacccagaugaaaaaccuguacggcgauagcaauccccaaaaguuuacaucuuccgcuaacgggguuaccacacacuaugugagccagaucggaggcuucccggaccagaccgaggauggcgggcucccucagucuggacggauuguggucgacuacaugaugcaaaaguccggcaaaacggggacaaucguguaucagcgcggaguucugcuuccccagaagguguggugcgccagcggcagauccaaagucaucaaggggucucugccucucauuggagaagcggauugucugcaugagaaauacggcggccugaacaagagcaaacccuacuauaccggggaacacgccaaggcuaucggaaauugccccauuugggugaagaccccucucaaacuggccaacggcacaaaguaccggccgcccgcuaaacuucugaaggagcgcggguuuuucggagccaucgccggcuuucucgaagggggcugggaaggaaugauugcuggcuggcacggguauaccucccauggagcgcacggcguugccguggcugccgaccugaaaagcacacaggaggccaucaauaagaucacgaagaaccuuaauucucuguccgaacucgaggucaaaaaccugcaaagacugagcggggcuauggacgaacuccauaaugagauucuggagcuugaugaaaagguggacgaucugcgggccgacaccaucucuagccagauugagcucgcgguccugcuuuccaacgaaggaaucauuaauucugaggaugaacaucugcucgcucuggagcgcaaacugaagaaaaugcucggcccuagcgccguggacaucgggaacggcuguuucgagacaaagcacaagugcaaucagaccugccuggauagaaucgccgcuggaacauuuaacgccggcgaguucucccuucccaccuuugacagccugaauauuacggcugccucucucaacgaugacgggcuggauaaucacaccauccugcuuuacuauuccacagcggccagcucucucgcuguuacccugaugcuggccauuuucaucguguacauggucucccgggacaacgugagcuguuccauuugccucuga

SEQ ID NO: 219778 - RNA, 1755 nt, Artificial Sequence; identical to SEQ ID NO: 218498
  derived and/or modified CDS sequence (opt5) from hemagglutinin__InfluenzaB__AGX23864

SEQ ID NO: 219779 - RNA, 1755 nt, Artificial Sequence; identical to SEQ ID NO: 218803
  derived and/or modified CDS sequence (opt5) from hemagglutinin__InfluenzaB__AGX23875

SEQ ID NO: 219780 - RNA, 1755 nt, Artificial Sequence; identical to SEQ ID NO: 218498
  derived and/or modified CDS sequence (opt5) from hemagglutinin__InfluenzaB__AGX23886

SEQ ID NO: 219781 - RNA, 1755 nt, Artificial Sequence
  derived and/or modified CDS sequence (opt5) from hemagglutinin__InfluenzaB__AGX23897
augaaggccaucauugugcugcucauggucguuaccagcaacgcugacagaaucugcacaggcauuacguccucuaauagcccccacguggugaaaaccgccacacagggggaggucaacgugaccggaguuaucccucugacaaccacaccgaccaaguccuacuucgcgaaucuuaaaggcacgcggacccgcgggaagcugugucccgauugccucaacuguacagaccuggauguggcucuuggaagaccuaugugcgucggcaccacacccucugccaaagccagcauucugcaugaagugcggccuguuaccuccggguguuuucccaucaugcacgaccgcacgaagaucagacaacucgcuaaucugcugcggggauaugagaacauucgccucucuacacagaaugugaucgaugccgaaaaggcuccuggcggcccguacagacuggggaccagcggauccugccccaacgccacaagcaaaucuggcuucuuugcgaccauggccugggcugucccuaaggacaauaacaaaaaugccaccaacccccuuacaguggaggugccuuauauuuguacggaaggggaggaucagaucaccgucuggggauuccauuccgacaauaagacacagaugaaaaaccuguacggcgauagcaauccccaaaaguuuaccucuuccgcuaacgggguuacaacccacuaugugagccagauuggaggcuucccggaccagacggaggauggcgggcucccucagucuggacggaucguggucgacuacaugaugcaaaaguccggcaaaacagggaccauuguguaucagcgcggaguucugcuuccccagaagguguggugcgccagcggcagauccaaagucaucaaggggucucugccucucaucggagaagcggauugucugcaugagaaauacggcggccugaacaagagcaaacccuacuauaccggggaacacgccaaggcuauuggaaauugccccaucugggugaagacaccucucaaacuggccaacggcaccaaguaccggccgcccgcuaaacuucugaaggagcgcggguuuuucggagccauugccggcuuucucgaagggggcugggaaggaaugaucgcuggcuggcacggguauacaucccauggagcgcacggcguugccguggcugccgaccugaaaagcacgcaggaggccauuaauaagaucaccaagaaccuuaauucucuguccgaacucgaggucaaaaaccugcaaagacugagcggggcuauggacgaacuccauaaugagauccuggagcuugaugaaaagguggacgaucugcgggccgacacaauuucuagccagaucgagcucgcgguccugcuuuccaacgaaggaauuaucaauucugaggaugaacaucugcucgcucuggagcgcaaacugaagaaaaugcucggcccuagcgccguggacauugggaacggcuguuucgagaccaagcacaagugcaaucagacaugccuggauagaaucgccgcuggaaccuuuaacgccggcgaguucucccuucccacguuugacagccugaauaucaccgcugccucucucaacgaugacgggcuggauaaucacacaauucugcuuuacuauuccaccgcggccagcucucucgcuguuacacugaugcuggccaucuucauuguguacauggucucccgggacaacgugagcuguuccaucugccucuga

SEQ ID NO: 219782 - RNA, 1755 nt, Artificial Sequence
  derived and/or modified CDS sequence (opt5) from hemagglutinin__InfluenzaB__AGX23908
augaaggccaucauugugcugcucauggucguuaccagcaacgcugacagaaucugcacaggcauuacguccucuaauagcccccacguggugaaaaccgccacacagggggaggucaacgugaccggaguuaucccucugacaaccacaccgaccaaguccuacuucgcgaaucuuaaaggcacgcggacccgcgggaagcugugucccgauugccucaacuguacagaccuggauguggcucuuggaagaccuaugugcgucggcaccacacccucugccaaagccagcauucugcaugaagugcggccuguuaccuccggguguuuucccaucaugcacgaccgcacgaagaucagacaacucgcuaaucugcugcggggauaugagaacauucgccucucuacacagaaugugaucgaugccgaaaaggcuccuggcggcccguacagacuggggaccagcggauccugccccaacgccacaagcaaaucuggcuucuuugucaccauggcgugggccgugccuaaggacaauaacaaaaaugcuaccaacccccuuacaguggaggucccuuauauuuguacggaaggggaggaucagaucaccguuuggggauuccauuccgacaauaagacacagaugaaaaaccuguacggcgauagcaauccccaaaaguuuaccucuuccgccaacggggugacaacccacuaugugagccagauuggaggcuucccggaccagacggaggauggcgggcucccucagucuggacggaucgucguggacuacaugaugcaaaagcccggcaaaacagggaccauuguuuaucagcgcggagugcugcuuccucagaaggucuggugcgcuuccggcagaagcaaagugaucaaggggucccugccccucaucggagaagccgauugucugcaugagaaauacggcggccugaacaagucuaaacccuacuauaccggggaacacgcgaaggccauuggaaauugcccuaucuggguuaagacaccgcucaaacuggcuaacggcaccaaguaccggcccccugccaaacuucugaaggagcgcggguuuuucggagcuauugccggcuuucucgaagggggcugggaaggaaugaucgccggcuggcacggguauacaagccauggagcucacggcguggcggucgccgcugaccugaaauccacgcaggaggccauuaauaagaucaccaagaaccuuaauagccugucugaacucgaggugaaaaaccugcaaagacuguccggggccauggacgaacuccauaaugagauccuggagcuugaugaaaaggucgacgaucugcgggcugacacaauuagcucucagaucgagcucgccgugcugcuuagcaacgaaggaauuaucaauuccgaggaugaacaucugcucgcgcuggagcgcaaacugaagaaaaugcucggccccucugcuguugacauugggaacggcuguuucgagaccaagcacaagugcaaucagacaugccuggauagaaucgccgccggaaccuuuaacgcuggcgaguucagccuuccuacguuugacucccugaauaucaccgccgcuagccucaacgaugacgggcuggauaaucacacaauucugcuuuacuauucuaccgccgcguccagccucgccgugacacugaugcuggcuaucuucauugucuacauggugucucgggacaacguuuccuguagcaucugccucuga

SEQ ID NO: 219783 - RNA, 1755 nt, Artificial Sequence; identical to SEQ ID NO: 218639
  derived and/or modified CDS sequence (opt5) from hemagglutinin__InfluenzaB__AGX23919

SEQ ID NO: 219784 - RNA, 1755 nt, Artificial Sequence; identical to SEQ ID NO: 219119
  derived and/or modified CDS sequence (opt5) from hemagglutinin__InfluenzaB__AGX23930

SEQ ID NO: 219785 - RNA, 1755 nt, Artificial Sequence; identical to SEQ ID NO: 218498
  derived and/or modified CDS sequence (opt5) from hemagglutinin__InfluenzaB__AGX23941

SEQ ID NO: 219786 - RNA, 1755 nt, Artificial Sequence; identical to SEQ ID NO: 218803
  derived and/or modified CDS sequence (opt5) from hemagglutinin__InfluenzaB__AGX23952

SEQ ID NO: 219787 - RNA, 1755 nt, Artificial Sequence; identical to SEQ ID NO: 218803
  derived and/or modified CDS sequence (opt5) from hemagglutinin__InfluenzaB__AGX23963

SEQ ID NO: 219788 - RNA, 1755 nt, Artificial Sequence; identical to SEQ ID NO: 219119
  derived and/or modified CDS sequence (opt5) from hemagglutinin__InfluenzaB__AGX23974

SEQ ID NO: 219789 - RNA, 1755 nt, Artificial Sequence; identical to SEQ ID NO: 218639
  derived and/or modified CDS sequence (opt5) from hemagglutinin__InfluenzaB__AGX23985

SEQ ID NO: 219790 - RNA, 1755 nt, Artificial Sequence
  derived and/or modified CDS sequence (opt5) from hemagglutinin__InfluenzaB__AGX23996
augaaggccaucauugugcugcucauggucguuaccagcaacgcugacagaaucugcacaggcauuacguccucuaauagcccccacguggugaaaaccgccacacagggggaggucaacgugaccggaguuaucccucugacaaccacaccgaccaaguccuacuucgcgaaucuuaaaggcacgcggacccgcgggaagcugugucccgauugccucaacuguacagaccuggauguggcucuuggaagaccuaugugcgucggcaccacacccucugccaaagccagcauucugcaugaagugcggccuaucaccuccggguguuuucccaucaugcacgaccgcacgaagauuagacaacucgcuaaucugcugcggggauaugagaacauccgccucucuacacagaauguuauugaugccgaaaaggcuccuggcggcccguacagacuggggaccagcggauccugccccaacgccacaagcaaaucuggcuucuuugcgaccauggccugggcugugccuaaggacaauaacaaaaaugccaccaacccccuuacagucgaggugccuuauaucuguacggaaggggaggaucagauuaccguguggggauuccauuccgacaauaagacacagaugaaaaaccuguacggcgauagcaauccccaaaaguuuaccucuuccgcuaacggggucacaacccacuauguuagccagaucggaggcuucccggaccagacggaggauggcgggcucccucagucuggacggauugugguggacuacaugaugcaaaagcccggcaaaacagggaccaucgucuaucagcgcggagugcugcuuccucagaagguuuggugcgccuccggcagaagcaaagugaucaaggggucccugccccucauuggagaagcggauugucugcaugagaaauacggcggccugaacaagucuaaacccuacuauaccggggaacacgccaaggcuaucggaaauugcccuauuugggucaagacaccgcucaaacuggccaacggcaccaaguaccggcccccugcuaaacuucugaaggagcgcggguuuuucggagccaucgccggcuuucucgaagggggcugggaaggaaugauugcuggcuggcacggguauacaagccauggagcgcacggcguggccguugcugccgaccugaaauccacgcaggaggccaucaauaagaucaccaagaaccuuaauagccugucugaacucgaggugaaaaaccugcaaagacuguccggggcuauggacgaacuccauaaugagauucuggagcuugaugaaaaggucgacgaucugcgggccgacacaaucagcucucagauugagcucgcggugcugcuuagcaacgaaggaaucauuaauuccgaggaugaacaucugcucgcucuggagcgcaaacugaagaaaaugcucggccccucugccgucgacaucgggaacggcuguuucgagaccaagcacaagugcaaucagacaugccuggauagaaucgccgcuggaaccuuuaacgccggcgaguucagccuuccuacguuugacucccugaauauuaccgcugccagccucaacgaugacgggcuggauaaucacacaauccugcuuuacuauucuaccgcggccuccagccucgcugugacacugaugcuggccauuuucaucguuuacauggugucucgggacaacgucuccuguagcauuugccucuga

SEQ ID NO: 219791 - RNA, 1755 nt, Artificial Sequence; identical to SEQ ID NO: 219119
  derived and/or modified CDS sequence (opt5) from hemagglutinin__InfluenzaB__AGX24007

SEQ ID NO: 219792 - RNA, 1755 nt, Artificial Sequence; identical to SEQ ID NO: 219119
  derived and/or modified CDS sequence (opt5) from hemagglutinin__InfluenzaB__AGX24018

SEQ ID NO: 219793 - RNA, 1755 nt, Artificial Sequence
  derived and/or modified CDS sequence (opt5) from hemagglutinin__InfluenzaB__AGX24029
augaaggccaucauugugcugcucauggucguuaccagcaacgcugacagaaucugcacaggcauuacguccucuaauagcccccacguggugaaaaccgccacacagggggaggucaacgugaccggaguuaucccucugacaaccacaccgaccaaguccuacuucgcgaaucuuaaaggcacgcggacccgcgggaagcugugucccgauugccucaacuguacagaccuggauguggcucuuggaagaccuaugugcgucggcaccacacccucugccaaagccagcauucugcaugaagugcggccuguuaccuccggguguuuucccaucaugcacgaccgcacgaagaucagacaacucccuaaucugcugcggggauaugagaacauucgccucucuacacagaaugugaucgaugcugaaaaggccccgggcggccccuacagacuggggaccagcggauccugcccuaacgcuacaagcaaaucuggcuucuuugccaccauggcgugggccguccccaaggacaauaacaaaaaugcuaccaacccucuuacaguggaggugcccuauauuuguaaggaaggggaggaucagaucacggucuggggauuccauuccgacaauaaaacccagaugaagaaccuguacggcgauagcaauccgcaaaaguuuacaucuuccgccaacgggguuaccacacacuaugugagccagauuggaucuuucccugaccagaccgaggauggcggccucccccaguccgggcggaucguggucgacuacaugaugcaaaaaccuggaaagacgggcacaauuguguaucagcgcgggguucugcuuccccagaaaguguggugcgcuagcggaagauccaaggucaucaaaggcucucugccccucaucggggaagccgauugucugcaugagaaguacggaggccugaacaaaagcaagccuuacuauaccggcgaacacgcgaaggccauugggaauugcccgaucugggugaaaacaccccucaagcuggcuaacggaaccaaauaccggccucccgccaagcugcugaaagagcgcggcuuuuucggggcuauugccggauuucucgagggcgggugggaaggcaugaucgccggauggcacggcuauaccucccauggggcucacggaguugcgguggccgcugaccuuaagagcacacaggaggccauuaauaagaucacgaaaaaccuuaauucucuguccgaacucgaggucaagaaccugcaaagacugagcggcgccauggacgaacuccauaaugagauccuggagcuugaugaaaaaguggacgaucugcgggcugacaccauuucuagccagaucgagcucgccguccugcuuuccaacgaagggauuaucaauucugaggaugaacaucugcucgcgcuggagcgcaagcugaaaaagaugcucggaccuagcgcuguggagauuggcaacggguguuucgaaacaaagcacaaaugcaaucagaccugccugaacagaaucgccgccggcacauuuaaugcuggagaguucucccuucccaccuuugacagccugaacaucacggccgcuucucucaaugaugacggccuggauaaccacaccauucugcuuuacuauuccacagccgcgagcucucucgccguuacccugaugcuggcuaucuucauuguguacauggucucccgggacaacgugagcuguuccaucugccucuga

SEQ ID NO: 219794 - RNA, 1755 nt, Artificial Sequence; identical to SEQ ID NO: 219119
  derived and/or modified CDS sequence (opt5) from hemagglutinin__InfluenzaB__AGX24040

SEQ ID NO: 219795 - RNA, 1755 nt, Artificial Sequence; identical to SEQ ID NO: 218803
  derived and/or modified CDS sequence (opt5) from hemagglutinin__InfluenzaB__AGX24051

SEQ ID NO: 219796 - RNA, 1755 nt, Artificial Sequence; identical to SEQ ID NO: 218892
  derived and/or modified CDS sequence (opt5) from hemagglutinin__InfluenzaB__AGX24062

SEQ ID NO: 219797 - RNA, 1755 nt, Artificial Sequence; identical to SEQ ID NO: 218639
  derived and/or modified CDS sequence (opt5) from hemagglutinin__InfluenzaB__AGX24073

SEQ ID NO: 219798 - RNA, 1755 nt, Artificial Sequence
  derived and/or modified CDS sequence (opt5) from hemagglutinin__InfluenzaB__AGX24084
augaaggccaucauugugcugcucauggucguuaccagcaacgcugacagaaucugcacaggcauuacguccucuaauagcccccacguggugaaaaccgccacacagggggaggucaacgugaccggaguuaucccucugacaaccacaccgaccaaguccuacuucgcgaaucuuaaaggcacgcggacccgcgggaagcugugucccgauugccucaacuguacagaccuggauguggcucuuggaagaccuaugugcgucggcaccacacccucugccaaagccagcauuauccaugaagugcggccuguuaccuccggguguuuucccaucaugcacgaccgcacgaagauuagacaacuggcuaaucuccugcggggauaugagaacauccgccugucuacacagaaugugauugaugccgaaaaggcuccuggcggcccguacagacucgggaccagcggauccugccccaacgccacaagcaaaucuggcuucuuugcgaccauggccugggcugucccuaaggacaauaacaaaaaugccaccaacccccugacaguggaggugccuuauaucuguacggaaggggaggaucagauuaccgucuggggauuccauuccgacaauaagacacagaugaaaaaccuuuacggcgauagcaauccccaaaaguuuaccucuuccgcuaacgggguuacaacccacuaugugagccagaucggaggcuucccggaccagacggaggauggcgggcugccucagucuggacggauuguggucgacuacaugaugcaaaagcccggcaaaacagggaccaucguguaucagcgcggaguucuccugccucagaagguguggugcgccuccggcagaagcaaagucaucaaggggucccuuccccugauuggagaagcggauugucuccaugagaaauacggcggccugaacaagucuaaacccuacuauaccggggaacacgccaaggcuaucggaaauugcccuauuugggugaagacaccgcugaaacucgccaacggcaccaaguaccggcccccugcuaaacugcuuaaggagcgcggguuuuucggagccaucgccggcuuucuggaagggggcugggaaggaaugauugcuggcuggcacggguauacaagccauggagcgcacggcguugccguggcugccgaccucaaauccacgcaggaggccaucaauaagaucaccaagaaccugaauagccuuucugaacuggaggucaaaaaccuccaaagacuguccggggcuauggacgaacugcauaaugagauucucgagcuggaugaaaagguggacgaucuucgggccgacacaaucagcucucagauugagcuggcgguccuccugagcaacgaaggaaucauuaauuccgaggaugaacaccuucuggcucucgagcgcaaacugaagaaaaugcugggccccucugccguggacaucgggaacggcuguuucgagaccaagcacaagugcaaucagacaugccucgauagaaucgccgcuggaaccuuuaacgccggcgaguucagccugccuacguuugacucccuuaauauuaccgcugccagccugaacgaugacgggcucgauaaucauacaauccugcuguacuauucuaccgcggccuccagccuugcuguuacacucaugcuggccauuuucaucguguacauggucucucgggacaacguguccuguagcauuugccuguga

SEQ ID NO: 219799 - RNA, 1755 nt, Artificial Sequence; identical to SEQ ID NO: 219119
  derived and/or modified CDS sequence (opt5) from hemagglutinin__InfluenzaB__AGX24095

SEQ ID NO: 219800 - RNA, 1755 nt, Artificial Sequence
  derived and/or modified CDS sequence (opt5) from hemagglutinin__InfluenzaB__AGX24106
augaaggccaucauugugcugcucauggucguuaccagcaacgcugacagaaucugcacaggcauuacguccucuaauagcccccacguggugaaaaccgccacacagggggaggucaacgugaccggaguuaucccucugacaaccacaccgaccaaguccuacuucgcgaaucuuaaaggcacgcggacccgcgggaagcugugucccgauugccucaacuguacagaccuggauguggcucuuggaagaccuaugugcgucggcaccacacccucugccaaagccagcauucugcaugaagugcggccuguuaccuccggguguuuucccaucaugcacgaccgcacgaagaucagacaacucgcuaaucugcugcggggauaugagaacauucgccucucuacacagaaugugaucgaugccgaaaaggcuccuggcggcccguacagacuggggaccagcggauccugccccaacacaaccagcaaaucuggcuucuuugccaccauggcgugggccgucccuaaggacaauaacaaaaaugcuacaaacccccuuacgguggaggugccuuauauuuguaccgaaggggaggaucagaucacagucuggggauuccauuccgacaauaagacccagaugaaaaaccuguacggcgauagcaauccccaaaaguuuacaucuuccgccaacgggguuaccacgcacuaugugagccagauuggaggcuucccggaccagacagaggauggcgggcucccucagucuggacggaucguggucgacuacaugaugcaaaagcccggcaaaaccgggaccauuguguaucagcgcggaguucugcuuccucagaagguguggugcgcuuccggcagaagcaaagucaucaaggggucccugccccucaucggagaagccgauugucugcaugagaaauacggcggccugaacaagucuaaacccuacuauacaggggaacacgcgaaggccauuggaaauugcccuaucugggugaagaccccgcucaaacuggcuaacggcacaaaguaccggcccccugccaaacuucugaaggagcgcggguuuuucggagcuauugccggcuuucucgaagggggcugggaaggaaugaucgccggcuggcacggguauacgagccauggagcucacggcguugcgguggccgcugaccugaaauccacccaggaggccauuaauaagaucacaaagaaccuuaauagccugucugaacucgaggucaaaaaccugcaaagacuguccggggccauggacgaacuccauaaugagauccuggagcuugaugaaaagguggacgaucugcgggcugacaccauuagcucucagaucgagcucgccguccugcuuagcaacgaaggaauuaucaauuccgaggaugaacaucugcucgcgcuggagcgcaaacugaagaaaaugcucggccccucugcuguggacauugggaacggcuguuucgagacaaagcacaagugcaaucagaccugccuggauagaaucgccgccggaacguuuaacgcuggcgaguucagccuuccuaccuuugacucccugaauaucacagccgcuagccucaacgaugacgggcuggauaaucacaccauucugcuuuacuauucuacagccgcguccagccucgccguuacccugaugcuggcuaucuucauuguguacauggucucucgggacaacguguccuguagcaucugccucuga

SEQ ID NO: 219801 - RNA, 1755 nt, Artificial Sequence
  derived and/or modified CDS sequence (opt5) from hemagglutinin__InfluenzaB__AGX24117
augaaggccaucauugugcugcucauggucguuaccagcaacgcugacagaaucugcacaggcauuacguccucuaauagcccccacguggugaaaaccgccacacagggggaggucaacgugaccggaguuaucccucugacaaccacaccgaccaaguccuacuucgcgaaucuuaaaggcacgcggacccgcgggaagcugugucccgauugccucaacuguacagaccuggauguggcucuuggaagaccuaugugcgucggcaccacacccucugccaaagccagcauucugcaugaagugcggccuguuaccuccggguguuuucccaucaugcacgaccgcacgaagaucagacaacucccuaaucugcugcggggauaugagaacauucgccucucuacacagaaugugaucgaugcugaaaaggccccgggcggccccuacagacuggggaccagcggauccugcccuaacacaaccagcaaaucuggcuucuuugcuaccauggccugggcgguccccaaggacaauaacaaaaaugccacaaacccucuuacgguggaggugcccuauauuuguaccgaaggggaggaucagaucacagucuggggauuccauuccgacaauaagacccagaugaaaaaccuguacggcgauagcaauccgcaaaaguuuacaucuuccgcuaacgggguuaccacgcacuaugugagccagauuggaucuuucccugaccagacagaggauggcggccucccccaguccgggcggaucguggucgacuacaugaugcaaaagccuggaaaaaccggcaccauuguguaucagcgcgggauccugcuuccccagaagguuuggugcgccagcggaagauccaaagugaucaagggcucucugccccucauuggggaagcugauugucugcaugagaaauacggaggccugaacaagagcaaaccuuacuauacaggcgaacacgccaaggcgaucgggaauugcccgauuugggucaagacaccccucaaacuggccaacggaaccaaguaccggccucccgcuaaacuucugaaggagcgcggcuuuuucggggccaucgcuggauuucucgagggcgggugggaaggcaugauugccggauggcacggcuauacgucccauggggcccacggaguggcuguugcggccgaccugaaaagcacccaggaggcuaucaauaagaucacaaagaaccuuaauucucuguccgaacucgaggugaaaaaccugcaaagacugagcggcgccauggacgaacuccauaaugagauucuggagcuugaugaaaaggucgacgaucugcgggccgacaccaucucuagccagauugagcucgcugugcugcuuuccaacgaagggaucauuaauucugaggaugaacaucugcucgcccuggagcgcaaacugaagaaaaugcucggaccuagcgcggucgagaucggcaacggguguuucgaaacaaagcacaagugcaaucagaccugccuggacagaaucgcugccggcacguuuaacgccggagaguucucccuucccaccuuugauagccugaauauuacagcugccucucucaacgacgauggccuggacaaucacaccauccugcuuuacuauuccacagcugccagcucucucgcggugacccugaugcuggccauuuucaucguuuacauggugucccgggauaacgucagcuguuccauuugccucuga

SEQ ID NO: 219802 - RNA, 1755 nt, Artificial Sequence
  derived and/or modified CDS sequence (opt5) from hemagglutinin__InfluenzaB__AGX24128
augaaggccaucauugugcugcucauggucguuaccagcaacgcugacagaaucugcacaggcauuacguccucuaauagcccccacguggugaaaaccgccacacagggggaagucaacgugaccggaguuaucccucugacaaccacaccgaccaaguccuacuucgcgaaucuuaaaggcacgcggacccgcgggaagcugugucccgauugccucaacuguacagaccuggauguggcucuuggaagaccuaugugcgucggcaccacacccucugccaaagccagcauucugcaugaagugcggccuguuaccuccggguguuuucccaucaugcacgaccgcacgaagaucagacaacucccuaaucugcugcggggauaugagaacauucgccucucuacacagaaugugaucgaugcugaaaaggccccgggcggccccuacagacuggggaccagcggauccugcccuaacgcuacaagcaaaauuggcuucuuugccaccauggcgugggccguccccaaggacaauuauaaaaacgcuaccaauccucuuacaguggaggugcccuacaucuguacggaaggggaggaucagauuaccgucuggggauuccauucugacaacaagacacagaugaaaaaucuguauggcgauuccaacccgcaaaaguuuaccagcucugccaaugggguuacaacccacuacgugucccagaucggagacuucccugaucagacggaggacggcggccucccccagagcgggcggauuguggucgauuauaugaugcaaaagccuggaaaaacaggcaccaucguguaccagcgcgggguucugcuuccccagaagguguggugcgcuucuggaagauccaaagucaucaagggcagccugccccucauuggggaagccgacuguauccaugagaaauacggaggccugaacaaguccaaaccuuauuacaccggcgaacacgcgaaggccauugggaacugcccgaucugggugaagacaccccugaaacucgcuaauggaaccaaguaucggccucccgccaaacugcuuaaggagcgcggcuuuuucggggcuauugccggauuucuggagggcgggugggaaggcaugaucgccggauggcacggcuacacaucucauggggcucacggaguugcgguggccgcugaccucaaaagcacgcaggaggccaucaacaagauuaccaagaaucugaacucccuuagcgaacuggaggucaaaaaucuccaaagacugucuggcgccauggaugaacugcauaacgagauccucgagcuggacgaaaagguggaugaccuucgggcugauacaauuuccagccagaucgagcuggccguccuccugucuaaugaagggauuaucaacagcgaggacgaacaccuucuggcgcucgagcgcaaacugaagaaaaugcugggaccuuccgcuguggauaucggcaauggguguuucgagaccaagcacaagugcaaccagacaugccucgacagaauugccgccggcaccuuuaaugcuggagaguucucucugcccacguuugauagccuuaacaucaccgccgcuucccugaaugacgauggccucgacaaccauacaauucugcuguauuacagcaccgccgcgucuucccuugccguuacacucaugcuggcuaucuucauuguguauauggucagccgggacaaugugucuuguuccaucugccuguga

SEQ ID NO: 219803 - RNA, 1755 nt, Artificial Sequence; identical to SEQ ID NO: 218498
  derived and/or modified CDS sequence (opt5) from hemagglutinin__InfluenzaB__AGX24139

SEQ ID NO: 219804 - RNA, 1755 nt, Artificial Sequence
  derived and/or modified CDS sequence (opt5) from hemagglutinin__InfluenzaB__AGX24150
augaaggccaucauugugcugcucauggucguuaccagcaacgcugacagaaucugcacaggcauuacguccucuaauagcccccacguggugaaaaccgccacacagggggaggucaacgugaccggaguuaucccucugacaaccacaccgaccaaguccuacuucgcgaaucuuaaaggcacgcggacccgcgggaagcugugucccuauugccucaacuguacagaucuggacguggcucuuggaagaccuaugugcgucggcaccacacccucugccaaagccagcauucugcaugaagugcggccuguuaccuccggguguuuucccaucaugcacgaucgcacgaagaucagacaacucccuaaucugcugcggggauacgagaacauucgccucucuacacagaaugugaucgacgcugaaaaggccccgggcggccccuauagacuggggaccagcggauccugcccuaacgcuacaagcaaaucuggcuucuuugccaccauggcgugggccguccccaaggauaauaacaaaaaugcuaccaacccucuuacaguggaggugcccuacauuuguacggaaggggaggaccagaucaccgucuggggauuccauuccgauaauaagacacagaugaaaaaccuguauggcgacagcaauccgcaaaaguuuaccucuuccgccaacgggguuacaacccacuacgugagccagauuggaucuuucccugaucagacggaggacggcggccucccccaguccgggcggaucguggucgauuauaugaugcaaaagccuggaaaaacaggcaccauuguguaccagcgcgggauccugcuuccccagaagguuuggugcgcuagcggaagauccaaagugaucaagggcucucugccccucauuggggaagccgacugucugcaugagaaauacggaggccugaacaagagcaaaccuuauuacaccggcgaacacgcgaaggccaucgggaauugcccgauuugggucaagacaccccucaaacuggcuaacggaaccaaguaucggccucccgccaaacuucugaaggagcgcggcuuuuucggggcuaucgccggauuucucgagggcgggugggaaggcaugauugccggauggcacggcuacacaucccauggggcucacggaguggcgguugccgcugaucugaaaagcacgcaggaggccaucaauaagaucaccaagaaccuuaauucucuguccgaacucgaggugaaaaaccugcaaagacugagcggcgccauggacgaacuccauaaugagauucuggagcuugacgaaaaggucgaugaccugcgggcugauacaaucucuagccagauugagcucgccgugcugcuuuccaacgaagggaucauuaauucugaggacgaacaucugcucgcgcuggagcgcaaacugaagaaaaugcucggaccuagcgcugucgagaucggcaacggguguuucgaaaccaagcacaagugcaaucagacaugccuggauagaaucgccgccggcaccuuuaacgcuggagaguucucccuucccacguuugacagccugaauauuaccgccgcuucucucaacgaugacggccuggauaaucacacaauccugcuuuauuacuccaccgccgcgagcucucucgccgugacacugaugcuggcuauuuucaucguuuauauggugucccgggacaacgucagcuguuccauuugccucuga

SEQ ID NO: 219805 - RNA, 1755 nt, Artificial Sequence; identical to SEQ ID NO: 219119
  derived and/or modified CDS sequence (opt5) from hemagglutinin__InfluenzaB__AGX24161

SEQ ID NO: 219806 - RNA, 1755 nt, Artificial Sequence; identical to SEQ ID NO: 218892
  derived and/or modified CDS sequence (opt5) from hemagglutinin__InfluenzaB__AGX24172

SEQ ID NO: 219807 - RNA, 1755 nt, Artificial Sequence; identical to SEQ ID NO: 218892
  derived and/or modified CDS sequence (opt5) from hemagglutinin__InfluenzaB__AGX24183

SEQ ID NO: 219808 - RNA, 1755 nt, Artificial Sequence; identical to SEQ ID NO: 218892
  derived and/or modified CDS sequence (opt5) from hemagglutinin__InfluenzaB__AGX24194

SEQ ID NO: 219809 - RNA, 1755 nt, Artificial Sequence; identical to SEQ ID NO: 218639
  derived and/or modified CDS sequence (opt5) from hemagglutinin__InfluenzaB__AGX24205

SEQ ID NO: 219810 - RNA, 1755 nt, Artificial Sequence; identical to SEQ ID NO: 218803
  derived and/or modified CDS sequence (opt5) from hemagglutinin__InfluenzaB__AGX24227

SEQ ID NO: 219811 - RNA, 1755 nt, Artificial Sequence; identical to SEQ ID NO: 218892
  derived and/or modified CDS sequence (opt5) from hemagglutinin__InfluenzaB__AGX24238

SEQ ID NO: 219812 - RNA, 1755 nt, Artificial Sequence
  derived and/or modified CDS sequence (opt5) from hemagglutinin__InfluenzaB__AGX24249
augaaggccaucauugugcugcucauggucguuaccagcaacgcugacagaaucugcacaggcauuacguccucuaaaagcccccacguggugaagaccgccacacagggggaagucaaugugaccggaguuaucccucugacaaccacaccgaccaaauccuacuucgcgaaccuuaagggcacgcggacccgcgggaaacugugucccgauugccucaauuguacagaccuggauguggcucuuggaagaccuaugugcgucggcaccacacccucugccaaggccagcauucugcaugaagugcggccuguuaccuccggguguuuucccaucaugcacgaccgcacgaagaucagacaacucccuaaccugcugcggggauaugagaauauucgccucucuacacagaacgugaucgaugcugaaaaagccccgggcggccccuacagacuggggaccagcggauccugcccuaaugcuacaagcaagauuggcuucuuugccaccauggcgugggccguccccaaagacaacuauaagaaugcuaccaacccucuuacaguggaggugcccuacaucuguacggaaggggaggaucagauuaccgucuggggauuccauucugacaauaaaacacagaugaagaaccuguauggcgauuccaauccgcaaaaguuuaccagcucugccaacgggguuacaacccacuacgugucccagaucggagacuucccugaucagacggaggacggcggccucccccagagcgggcggauuguggucgauuauaugaugcaaaaaccuggaaagacaggcaccaucguguaccagcgcgggguucugcuuccccagaaaguguggugcgcuucuggaagauccaaggucaucaaaggcagccugccccucauuggggaagccgacugucugcaugagaaguacggaggccugaauaaauccaagccuuauuacaccggcgaacacgcgaaggccaucgggaacugcccgauuugggugaaaacaccccucaagcuggcuaacggaaccaaauaucggccucccgccaagcugcugaaagagcgcggcuuuuucggggcuaucgccggauuucucgagggcgggugggaaggcaugauugccggauggcacggcuacacaucucauggggcucacggaguugcgguggccgcugaccuuaagagcacgcaggaggccaucaauaagaucaccaaaaaccuuaauucccugagcgaacucgaggucaagaaccugcaaagacugucuggcgccauggaugaacuccauaaugagauucuggagcuugacgaaaaaguggaugaccugcgggcugauacaaucuccagccagauugagcucgccguccugcuuucuaacgaagggaucauuaauagcgaggacgaacaucugcucgcgcuggagcgcaagcugaaaaagaugcucggaccuuccgcuguggauaucggcaacggguguuucgagaccaagcacaaaugcaaucagacaugccuggacagaaucgccgccggcaccuuuaacgcuggagaguucucucuucccacguuugauagccugaauauuaccgccgcuucccucaacgacgauggccuggacaaucacacaauccugcuuuauuacagcaccgccgcgucuucccucgccguuacacugaugcuggcuauuuucaucguguauauggucagccgggacaacgugucuuguuccauuugccucuga

SEQ ID NO: 219813 - RNA, 1755 nt, Artificial Sequence; identical to SEQ ID NO: 218639
  derived and/or modified CDS sequence (opt5) from hemagglutinin__InfluenzaB__AGX24260

SEQ ID NO: 219814 - RNA, 1755 nt, Artificial Sequence; identical to SEQ ID NO: 219128
  derived and/or modified CDS sequence (opt5) from hemagglutinin__InfluenzaB__AGX24271

SEQ ID NO: 219815 - RNA, 1755 nt, Artificial Sequence
  derived and/or modified CDS sequence (opt5) from hemagglutinin__InfluenzaB__AGX24282
augaaggccaucauugugcugcucauggucguuaccagcaacgcugacagaaucugcacaggcauuacguccucuaauagcccccacguggugaaaaccgccacacagggggaagucaacgugaccggaguuaucccucugacaaccacaccgaccaaguccuacuucgcgaaucuuaaaggcacgcggacccgcgggaagcugugucccgauugccucaacuguacagaccuggauguggcucuuggaagaccuaugugcgucggcaccacacccucugccaaagccagcauucugcaugaagugcggccuguuaccuccggguguuuucccaucaugcacgaccgcacgaagaucagacaacucccuaaucugcugcggggauaugagaacauucgccucucuacacagaaugugaucgaugcugaaaaggccccgggcggccccuacagacuggggaccagcggauccugcccuaacgcuacaagcaaaucuggcuucuuugccaccauggcgugggccguccccaaggacaauaacaaaaaugcuaccaacccucuuacaguggaggugcccuauauuuguacgaagggggaagaucagaucaccgucuggggauuccauuccgacaauaaaacacagaugaagaaccuguacggcgauagcaauccgcaaaaguuuaccucuuccgccaacgggguuacaacccacuaugugagccagauuggaucuuucccugaccagacggaggauggcggccucccccaguccgggcggaucguggucgacuacaugaugcaaaaaccuggaaagacaggcaccauuguguaucagcgcgggguucugcuuccccagagaguguggugcgcuagcggacgguccaaagucaucaagggcucucugccccucaucggggaggccgauugucugcaugaaaaauacggaggccugaacaagagcaaaccuuacuauaccggcgagcacgcgaaggccauugggaauugcccgaucugggugaagacaccccucaaacuggcuaacggaaccaaguaccgcccucccgccaaacuucugaaggaaagaggcuuuuucggggcuauugccggauuucucgagggcgggugggagggcaugaucgccggauggcacggcuauacaucccauggggcucacggaguugcgguggccgcugaccugaaaagcacgcaggaagccauuaauaagaucaccaagaaccuuaauucucuguccgagcucgaagucaaaaaccugcaacggcugagcggcgccauggacgagcuccauaaugaaauccuggagcuugaugagaagguggacgaucugcgcgcugacacaauuucuagccagaucgaacucgccguccugcuuuccaacgaggggauuaucaauucugaagaugagcaucugcucgcgcuggaaagaaaacugaagaaaaugcucggaccuagcgcuguggagauuggcaacggguguuucgagaccaagcacaagugcaaucagacaugccuggaccggaucgccgccggcaccuuuaacgcuggagaguucucccuucccacguuugauagccugaauaucaccgccgcuucucucaacgacgauggccuggacaaucacacaauucugcuuuacuauuccaccgccgcgagcucucucgccguuacacugaugcuggcuaucuucauuguguacauggucuccagagauaacgugagcuguuccaucugccucuga

SEQ ID NO: 219816 - RNA, 1755 nt, Artificial Sequence; identical to SEQ ID NO: 218639
  derived and/or modified CDS sequence (opt5) from hemagglutinin__InfluenzaB__AGX24293

SEQ ID NO: 219817 - RNA, 1755 nt, Artificial Sequence; identical to SEQ ID NO: 218639
  derived and/or modified CDS sequence (opt5) from hemagglutinin__InfluenzaB__AGX24304

SEQ ID NO: 219818 - RNA, 1755 nt, Artificial Sequence; identical to SEQ ID NO: 219128
  derived and/or modified CDS sequence (opt5) from hemagglutinin__InfluenzaB__AGX24315

SEQ ID NO: 219819 - RNA, 1755 nt, Artificial Sequence
  derived and/or modified CDS sequence (opt5) from hemagglutinin__InfluenzaB__AGX24326
augaaggccaucauugugcugcucauggucguuaccagcaacgcugacagaaucugcacaggcauuacguccucuaauagcccccacguggugaaaaccgccacacagggggaggucaacgugaccggaguuaucccucugacaaccacaccgaccaaguccuacuucgcgaaucuuaaaggcacgcggacccgcgggaagcugugucccgauugccucaacuguacagaccuggauguggcucuuggaagaccuaccugcgucggcacaacccccucugccaaagccagcauucugcaugaagugcggccuguuacguccggguguuuucccaucaugcacgaccgcacaaagaucagacaacucccuaaucugcugcggggauaugagaacauucgccucucuacccagaaugugaucgaugcugaaaaggccccgggcggccccuacagacuggggacaagcggauccugcccuaacgcuaccagcaaaucuggcuucuuugccaccauggcgugggccguccccaaggacaauaacaaaaaugcuacaaacccucuuacgguggaggugcccuauauuuguaccgaaggggaggaucagaucacagucuggggauuccauuccgacaauaagacccagaugaaaaaccuguacggcgauagcaauccgcaaaaguuuacaucuuccgccaacgggguuaccacgcacuaugugagccagauuggaucuuucccugaccagacagaggauggcggccucccccaguccgggcggaucguggucgacuacaugaugcaaaagccuggaaaaaccggcaccauuguguaucagcgcgggauccugcuuccccagaagguuuggugcgcuagcggaagauccaaagugaucaagggcucucugccccucauuggggaagccgauugucugcaugagaaauacggaggccugaacaagagcaaaccuuacuauacaggcgaacacgcgaaggccaucgggaauugcccgauuugggucaagacaccccucaaacuggcuaacggaaccaaguaccggccucccgccaaacuucugaaggagcgcggcuuuuucggggcuaucgccggauuucucgagggcgggugggaaggcaugauugccggauggcacggcuauacgucccauggggcucacggaguggcgguugccgcugaccugaaaagcacccaggaggccaucaauaagaucacaaagaaccuuaauucucuguccgaacucgaggugaaaaaccugcaaagacugagcggcgccauggacgaacuccauaaugagauucuggagcuugaugaaaaggucgacgaucugcgggcugacaccaucucuagccagauugagcucgccgugcugcuuuccaacgaagggaucauuaauucugaggaugaacaucugcucgcgcuggagcgcaaacugaagaaaaugcucggaccuagcgcugucgagaucggcaacggguguuucgaaacaaagcacaagugcaaucagaccugccuggacagaaucgccgccggcacguuuaacgcuggagaguucucccuucccaccuuugauagccugaauauuacagccgcuucucucaacgacgauggccuggacaaucacaccauccugcuuuacuauuccacagccgcgagcucucucgccgugacccugaugcuggcuauuuucaucguuuacauggugucccgggauaacgucagcuguuccauuugccucuga

SEQ ID NO: 219820 - RNA, 1755 nt, Artificial Sequence
  derived and/or modified CDS sequence (opt5) from hemagglutinin__InfluenzaB__AGX24337
augaaggccaucauugugcugcucauggucguuaccagcaacgcugacagaaucugcacaggcauuacguccucuaauagcccccacguggugaaaaccgccacacagggggaagucaacgugaccggaguuaucccucugacaaccacaccgaccaaguccuacuucgcgaaucuuaaaggcacgcggacccgcgggaagcugugucccgauugccucaacuguacagaccuggauguggcucuuggaaugccuaugugcgucggcaccacacccucugccaaagccagcauucugcaugaagugagaccuguuaccuccggguguuuucccaucaugcacgaccggacgaagauccgccaacucccuaaucugcugagaggauaugagaacauucggcucucuacacagaaugugaucgaugcugaaaaggccccgggcggccccuaccgccuggggaccagcggauccugcccuaacgcuacaagcaaaauuggcuucuuugccaccauggcgugggccguccccaaggacaauuauaaaaacgcuaccaauccucuuacaguggaggugcccuacaucuguacggaaggggaggaucagauuaccgucuggggauuccauucugacaacaagacacagaugaaaaaucuguauggcgauuccaacccgcaaaaguuuaccagcucugccaaugggguuacaacccacuacgugucccagaucggagacuucccugaucagacggaggacggcggccucccccagagcgggagaauuguggucgauuauaugaugcaaaagccuggaaaaacaggcaccaucguguaccagcgcgggguucugcuuccccagaagguguggugcgcuucuggacgguccaaagucaucaagggcagccugccccucauuggggaagccgacugucugcaugagaaauacggaggccugaacaaguccaaaccuuauuacaccggcgaacacgcgaaggccaucgggaacugcccgauuugggugaagacaccccucaaacuggcuaauggaaccaaguauagaccucccgccaaacuucugaaggagcggggcuuuuucggggcuaucgccggauuucucgagggcgggugggaaggcaugauugccggauggcacggcuacacaucucauggggcucacggaguugcgguggccgcugaccugaaaagcacgcaggaggccaucaacaagaucaccaagaaucuuaacucccugagcgaacucgaggucaaaaaucugcaacgccugucuggcgccauggaugaacuccauaacgagauucuggagcuugacgaaaagguggaugaccugagagcugauacaaucuccagccagauugagcucgccguccugcuuucuaaugaagggaucauuaacagcgaggacgaacaucugcucgcgcuggagcggaaacugaagaaaaugcucggaccuuccgcuguggauaucggcaauggguguuucgagaccaagcacaagugcaaccagacaugccuggaccgcaucgccgccggcaccuuuaaugcuggagaguucucucuucccacguuugauagccugaacauuaccgccgcuucccucaaugacgauggccuggacaaccacacaauccugcuuuauuacagcaccgccgcgucuucccucgccguuacacugaugcuggcuauuuucaucguguauauggucagcagagacaaugugucuuguuccauuugccucuga

SEQ ID NO: 219821 - RNA, 1755 nt, Artificial Sequence; identical to SEQ ID NO: 218892
  derived and/or modified CDS sequence (opt5) from hemagglutinin__InfluenzaB__AGX24348

SEQ ID NO: 219822 - RNA, 1755 nt, Artificial Sequence; identical to SEQ ID NO: 218639
  derived and/or modified CDS sequence (opt5) from hemagglutinin__InfluenzaB__AGX24359

SEQ ID NO: 219823 - RNA, 1755 nt, Artificial Sequence; identical to SEQ ID NO: 218892
  derived and/or modified CDS sequence (opt5) from hemagglutinin__InfluenzaB__AGX24381

SEQ ID NO: 219824 - RNA, 1755 nt, Artificial Sequence
  derived and/or modified CDS sequence (opt5) from hemagglutinin__InfluenzaB__AGX24392
augaaggccaucauugugcugcucauggucguuaccagcaacgcugacagaaucugcacaggcauuacguccucuaauagcccccacguggugaaaaccgccacacagggggaggucaacgugaccggaguuaucccucugacaaccacaccgaccaaguccuacuucgcgaaucuuaaaggcacgcggacccgcgggaagcugugucccgauugccucaacuguacagaccuggauguggcucuuggaagaccuaugugcgucggcaccacacccucugccaaagccagcauucugcaugaagugcggccuguuaccuccggguguuuucccaucaugcacgaccgcacgaagaucagacaacucccuaaucugcugcggggauaugagaacauucgccucucuacacagaaugugaucgaugcugaaaaggccccgggcggccccuacagacuggggaccagcggauccugcccuaacgcuacaagcaaaucuggcuucuuugccaccauggcgugggccguccccaaggacaauaacaaaaaugcuaccaacccucuuacaguggagauucccuauaucuguacggaaggggaggaucagauuaccguguggggauuccauuccgacaauaagacacagaugaaaaaccuguacggcgauagcaauccgcaaaaguuuaccucuuccgccaacggggucacaacccacuauguuagccagaucggaucuuucccugaccagacggaggauggcggccucccccaguccgggcggauugugguggacuacaugaugcaaaagccuggaaaaacaggcaccaucgucuaucagcgcggggugcugcuuccccagaagguuuggugcgcuagcggaagauccaaagugaucaagggcucucugccccucauuggggaagccgauugucugcaugagaaauacggaggccugaacaagagcaaaccuuacuauaccggcgaacacgcgaaggccaucgggaauugcccgauuugggucaagacaccccucaaacuggcuaacggaaccaaguaccggccucccgccaaacuucugaaggagcgcggcuuuuucggggcuaucgccggauuucucgagggcgggugggaaggcaugauugccggauggcacggcuauacaucccauggggcucacggaguggcgguugccgcugaccugaaaagcacgcaggaggccaucaauaagaucaccaagaaccuuaauucucuguccgaacucgaggugaaaaaccugcaaagacugagcggcgccauggacgaacuccauaaugagauucuggagcuugaugaaaaggucgacgaucugcgggcugacacaaucucuagccagauugagcucgccgugcugcuuuccaacgaagggaucauuaauucugaggaugaacaucugcucgcgcuggagcgcaaacugaagaaaaugcucggaccuagcgcugucgagaucggcaacggguguuucgaaaccaagcacaagugcaaucagacaugccuggacagaaucgccgccggcaccuuuaacgcuggagaguucucccuucccacguuugauagccugaauauuaccgccgcuucucucaacgacgauggccuggacaaucacacaauccugcuuuacuauuccaccgccgcgagcucucucgccgugacacugaugcuggcuauuuucaucguuuacauggugucccgggauaacgucagcuguuccauuugccucuga

SEQ ID NO: 219825 - RNA, 1755 nt, Artificial Sequence; identical to SEQ ID NO: 218639
  derived and/or modified CDS sequence (opt5) from hemagglutinin__InfluenzaB__AGX24403

SEQ ID NO: 219826 - RNA, 1755 nt, Artificial Sequence; identical to SEQ ID NO: 218892
  derived and/or modified CDS sequence (opt5) from hemagglutinin__InfluenzaB__AGX24414

SEQ ID NO: 219827 - RNA, 1755 nt, Artificial Sequence; identical to SEQ ID NO: 218639
  derived and/or modified CDS sequence (opt5) from hemagglutinin__InfluenzaB__AGX24425

SEQ ID NO: 219828 - RNA, 1755 nt, Artificial Sequence; identical to SEQ ID NO: 218639
  derived and/or modified CDS sequence (opt5) from hemagglutinin__InfluenzaB__AGX24436

SEQ ID NO: 219829 - RNA, 1755 nt, Artificial Sequence; identical to SEQ ID NO: 219128
  derived and/or modified CDS sequence (opt5) from hemagglutinin__InfluenzaB__AGX24447

SEQ ID NO: 219830 - RNA, 1755 nt, Artificial Sequence; identical to SEQ ID NO: 219819
  derived and/or modified CDS sequence (opt5) from hemagglutinin__InfluenzaB__AGX24458

SEQ ID NO: 219831 - RNA, 1755 nt, Artificial Sequence
  derived and/or modified CDS sequence (opt5) from hemagglutinin__InfluenzaB__AGX24469
augaaggccaucauugugcugcucauggucguuaccagcaacgcugacagaaucugcacaggcauuacguccucuaauagcccccacguggugaaaaccgccacacagggggaggucaacgugaccggaguuaucccucugacaaccacaccgaccaaguccuacuucgcgaaucuuaaaggcacgcggacccgcgggaagcugugucccgauugccucaacuguacagaccuggauguggcucuuggaagaccuaccugcgucggcacaacccccucugccaaagccagcauucugcaugaagugcggccuguuacguccggguguuuucccaucaugcacgaccgcacaaagaucagacaacucccuaaucugcugcggggauaugagaacauucgccucucuacccagaaugugaucgaugcugaaaaggccccgggcggccccuacagacuggggacaagcggauccugcccuaacgcuaccagcaaaucuggcuucuuugccaccauggcgugggccguccccaaggacaauaacaaaaaugcuacaaacccucuuacgguggaggugcccuauauuuguaccgaaggggaggaucagaucacagucuggggauuccauuccgacaauaagacccagaugaaaaaccuguacggcgauagcaauccgcaaaaguuuacaucuuccgccaacgggguuaccacgcacuaugugagccagauuggaucuuucccugaccagacagaggauggcggccucccccaguccgggcggaucguggucgacuacaugaugcaaaagccuggaaaaaccggcaccauuguguaucagcgcgggauccugcuuccccagaagguuuggugcgcuagcggaagauccaaagugaucaagggcucucugccccucauuggggaagccgauugucugcaugagaaauacggaggccugaacaagagcaaaccuuacuauacaggcgaacacgcgaaggccaucgggaauugcccgauuugggucaagacaccccucaaacuggcuaacggaaccaaguaccggccucccgccaaacuucugaaggagcgcggcuuuuucggggcuaucgccggauuucucgagggcgggugggaaggcaugguggccggauggcacggcuauacgucccauggggcucacggaguugcgguggccgcugaccugaaaagcacccaggaggccauuaauaagaucacaaagaaccuuaauucucuguccgaacucgaggucaaaaaccugcaaagacugagcggcgccauggacgaacuccauaaugagauccuggagcuugaugaaaagguggacgaucugcgggcugacaccauuucuagccagaucgagcucgccguccugcuuuccaacgaagggauuaucaauucugaggaugaacaucugcucgcgcuggagcgcaaacugaagaaaaugcucggaccuagcgcuguggagauuggcaacggguguuucgaaacaaagcacaagugcaaucagaccugccuggacagaaucgccgccggcacguuuaacgcuggagaguucucccuucccaccuuugauagccugaauaucacagccgcuucucucaacgacgauggccuggacaaucacaccauucugcuuuacuauuccacagccgcgagcucucucgccguuacccugaugcuggcuaucuucauuguguacauggucucccgggauaacgugagcuguuccaucugccucuga

SEQ ID NO: 219832 - RNA, 1755 nt, Artificial Sequence; identical to SEQ ID NO: 219128
  derived and/or modified CDS sequence (opt5) from hemagglutinin__InfluenzaB__AGX24480

SEQ ID NO: 219833 - RNA, 1755 nt, Artificial Sequence; identical to SEQ ID NO: 219128
  derived and/or modified CDS sequence (opt5) from hemagglutinin__InfluenzaB__AGX24491

SEQ ID NO: 219834 - RNA, 1755 nt, Artificial Sequence
  derived and/or modified CDS sequence (opt5) from hemagglutinin__InfluenzaB__AGX24502
augaaggccaucauugugcugcucauggucguuaccagcaacgcugacagaaucugcacaggcauuacguccucuaauagcccccacguggugaaaaccgccacacagggggaggucaacgugaccggaguuaucccucugacaaccacaccgaccaaguccuacuucgcgaaucuuaaaggcacgcggacccgcgggaagcugugucccgauugccucaacuguacagaccuggauguggcucuuggaagaccuaugugcgucggcaccacacccucugccaaagccagcauucugcaugaagugcggccuguuaccuccggguguuuucccaucaugcacgaccgcacgaagaucagacaacucccuaaucugcugcggggauaugagaacauucgccucucuacacagaaugugaucgaugcugaaaaggccccgggcggccccuacagacuggggaccagcggauccugcccuaacgcuacaagcaaaucuggcuucuuugccaccauggcgugggccguccagaaggacaauaacaaaaaugcuaccaacccccuuacaguggaggugccuuauauuuguacggaaggggaggaucagaucaccgucuggggauuccauuccgacaauaagacacaaaugaaaaaccuguacggcgauagcaauccccagaaguuuaccucuuccgccaacgggguuacaacccacuaugugagccagauuggaucuuucccggaccagacggaggauggcggccucccucaauccgggcggaucguggucgacuacaugaugcagaagcccggaaaaacaggcaccauuguguaucagcgcgggguucugcuuccucagagaguguggugcgcuagcggacgguccaaggucaucaaaggcucucugccccucaucggggaagccgauugucugcaugagaaguacggaggccugaacaaaagcaagcccuacuauaccggcgaacacgcgaaagccauugggaauugcccuaucugggugaagacaccgcucaagcuggcuaacggaaccaaauacagacccccugccaagcugcugaaagagcgcggcuuuuucggggcuauugccggauuucucgagggcgggugggaaggcaugaucgccggauggcacggcuauacaucccauggggcucacggaguugcgguggccgcugaccuuaagagcacgcaagaggccauuaauaaaaucaccaagaaccuuaauucucuguccgaacucgaggucaagaaccugcagcggcugagcggcgccauggacgaacuccauaaugagauccuggagcuugaugaaaaaguggacgaucugcgcgcugacacaauuucuagccagaucgagcucgccguccugcuuuccaacgaagggauuaucaauucugaggaugaacaucugcucgcgcuggagagaaagcugaaaaagaugcucggacccagcgcuguggagauuggcaacggguguuucgaaaccaaacacaagugcaaucaaacaugccuggaccggaucgccgccggcaccuuuaacgcuggagaguucucccuuccuacguuugauagccugaauaucaccgccgcuucucucaacgacgauggccuggacaaucacacaauucugcuuuacuauuccaccgccgcgagcucucucgccguuacacugaugcuggcuaucuucauuguguacauggucuccagagauaacgugagcuguuccaucugccucuga

SEQ ID NO: 219835 - RNA, 1755 nt, Artificial Sequence; identical to SEQ ID NO: 218803
  derived and/or modified CDS sequence (opt5) from hemagglutinin__InfluenzaB__AGX24513

SEQ ID NO: 219836 - RNA, 1755 nt, Artificial Sequence; identical to SEQ ID NO: 219128
  derived and/or modified CDS sequence (opt5) from hemagglutinin__InfluenzaB__AGX24524

SEQ ID NO: 219837 - RNA, 1755 nt, Artificial Sequence
  derived and/or modified CDS sequence (opt5) from hemagglutinin__InfluenzaB__AGX24535
augaaggccaucauugugcugcucauggucguuaccagcaacgcugacagaaucugcacaggcauuacguccucuaauagcccccacguggugaaaaccgccacacagggggaagucaacgugaccggaguuaucccucugacaaccacaccgaccaaguccuacuucgcgaaucuuaaaggcacgcggacccgcgggaagcugugucccgauugccucaacuguacagaccuggauguggcucuuggaagaccuaugugcgucggcaccacacccucugccaaagccagcauucugcaugaagugcggccuguuaccuccggguguuuucccaucaugcacgaccgcacgaagaucagacaacucccuaaucugcugcggggauaugagaacauucgccucucuacacagaaugugaucgaugcugaaaaggccccgggcggccccuacagacuggggaccagcggauccugcccuaacgcuacaagcaaaauuggcuucuuugccaccauggcgugggccguccccaaggacaauuauaaaaacgcuaccaauccucuuacaguggaggugcccuacaucuguacggaaggggaggaucagauuaccgucuggggauuccauucugacaacaagacacagaugaaaaaucuguauggcgauuccaacccgcaaaaguuuaccagcucugccaaugggguuacaacccacuacgugucccagaucggagacuucccugaucagacggaggacggcggccucccccagagcgggcggauuguggucgauuauaugaugcaaaagccuggaaaaacaggcaccaucguguaccagcgcgggguucugcuuccccagaagguguggugcgcuucuggaagauccaaagucaucaagggcagccugccccucauuggggaagccgacugucugcaugagaaauacggaggccugaacaaguccaaaccuuauuacaccggcgaacacgcgaaggccaucgggaacugcccgauuugggugaagacaccccucaaacuggcuaauggaaccaaguaucggccucccgccaaacuucugaaggagcgcggcuuuuucggggcuaucgccggauuucucgagggcgggugggaaggcaugauugccggauggcacggcuacacaucucauggggcucacggaguugcgguggccgcugaccugaaaagcacgcaggaggccaucaacaagaucaccaagaaucuuaacucccugagcgaacucgaggucaaaaaucugcaaagacugucuggcgccauggaugaacuccauaacgagauucuggagcuugacgaaaagguggaugaccugcgggcugauacaaucuccgcccagauugagcucgcgguccugcuuagcaaugaagggaucauuaacucugaggacgaacaucugcucgcucuggagcgcaaacugaagaaaaugcucggaccuagcgccguggauaucggcaauggguguuucgagaccaagcacaagugcaaccagacaugccuggacagaaucgccgcuggcaccuuuaaugccggagaguucucccuucccacguuugauucucugaacauuaccgcugccagccucaaugacgauggccuggacaaccacacaauccugcuuuauuacuccaccgcggccagcucucucgcuguuacacugaugcuggccauuuucaucguguauauggucucccgggacaaugugagcuguucuauuugccucuga

SEQ ID NO: 219838 - RNA, 1755 nt, Artificial Sequence; identical to SEQ ID NO: 218639
  derived and/or modified CDS sequence (opt5) from hemagglutinin__InfluenzaB__AGX24546

SEQ ID NO: 219839 - RNA, 1755 nt, Artificial Sequence
  derived and/or modified CDS sequence (opt5) from hemagglutinin__InfluenzaB__AGX24557
augaagaccaucauugugcugcucauggucguuacaagcaacgccgacagaaucugcacgggcauuaccuccucuaauagcccccacguggugaaaacagcuacccagggggaggucaacgugacaggaguuaucccucugaccacaaccccgacgaaguccuacuucgccaaucuuaaaggcacccggacacgcgggaagcugugucccgauugccucaacuguaccgaccuggauguggcgcuuggaagaccuacaugcgucggcaccacgcccucugcuaaagccagcauucugcaugaagugcggccuguuacauccggguguuuucccaucaugcacgaccgcaccaagaucagacaacucccuaaucugcugcggggauaugagaacauucgccucucuacacagaaugugaucgaugccgaaaaggcuccgggcggccccuacagacuggggaccagcggauccugcccuaacgccaccagcaaaucuggcuucuuugcuacaauggccugggcgguccccaaggacaauaacaaaaaugccacgaacccucuuaccguggaggugcccuauauuuguacagaaggggaggaucagaucaccgucuggggauuccauuccgacaauaagacacagaugaaaaaccuguacggcgauagcaauccgcaaaaguuuaccucuuccgcuaacgggguuacgacacacuaugugagccagauuggaucuuucccugaccagaccgaggauggcggccucccccaguccgggcggaucguggucgacuacaugaugcaaaagccuggaaaaaccggcacaauuguguaucagcgcgggauccugcuuccccagaagguuuggugcgccagcggaagauccaaagugaucaagggcucucugccccucauuggggaagcugauugucugcaugagaaauacggaggccugaacaagagcaaaccuuacuauaccggcgaacacgccaaggcgaucgggaauugcccgauuugggucaagacaccccucaaacuggccaacggaacgaaguaccggccucccgcuaaacuucugaaggagcgcggcuuuuucggggccaucgcuggauuucucgagggcgggugggaaggcaugauugccggauggcacggcuauaccucccauggggcccacggaguggcuguugcggccgaccugaaaagcacacaggaggcuaucaauaagaucaccaagaaccuuaauucucuguccgaacucgaggugaaaaaccugcaaagacugagcggcgccauggacgaacuccauaaugagauucuggagcuugaugaaaaggucgacgaucugcgggccgacacaaucucuagccagauugagcucgcugugcugcuuuccaacgaagggaucauuaauucugaggaugaacaucugcucgcccuggagcgcaaacugaagaaaaugcucggaccuagcgcggucgagaucggcaacggguguuucgaaaccaagcacaagugcaaucagacgugccuggacagaaucgcugccggcaccuuuaacgccggagaguucucccuucccacauuugauagccugaauauuaccgcugccucucucaacgacgauggccuggacaaucacacaauccugcuuuacuauuccaccgcugccagcucucucgcggugacgcugaugcuggccauuuucaucguuuacauggugucccgggauaacgucagcuguuccauuugccucuga

SEQ ID NO: 219840 - RNA, 1755 nt, Artificial Sequence; identical to SEQ ID NO: 219128
  derived and/or modified CDS sequence (opt5) from hemagglutinin__InfluenzaB__AGX24579

SEQ ID NO: 219841 - RNA, 1755 nt, Artificial Sequence; identical to SEQ ID NO: 219128
  derived and/or modified CDS sequence (opt5) from hemagglutinin__InfluenzaB__AGX24590

SEQ ID NO: 219842 - RNA, 1755 nt, Artificial Sequence; identical to SEQ ID NO: 219128
  derived and/or modified CDS sequence (opt5) from hemagglutinin__InfluenzaB__AGX24601

SEQ ID NO: 219843 - RNA, 1755 nt, Artificial Sequence; identical to SEQ ID NO: 219128
  derived and/or modified CDS sequence (opt5) from hemagglutinin__InfluenzaB__AGX24612

SEQ ID NO: 219844 - RNA, 1755 nt, Artificial Sequence; identical to SEQ ID NO: 218639
  derived and/or modified CDS sequence (opt5) from hemagglutinin__InfluenzaB__AGX24623

SEQ ID NO: 219845 - RNA, 1755 nt, Artificial Sequence; identical to SEQ ID NO: 219128
  derived and/or modified CDS sequence (opt5) from hemagglutinin__InfluenzaB__AGX24634

SEQ ID NO: 219846 - RNA, 1755 nt, Artificial Sequence; identical to SEQ ID NO: 219837
  derived and/or modified CDS sequence (opt5) from hemagglutinin__InfluenzaB__AGX24656

SEQ ID NO: 219847 - RNA, 1755 nt, Artificial Sequence; identical to SEQ ID NO: 218639
  derived and/or modified CDS sequence (opt5) from hemagglutinin__InfluenzaB__AGX24667

SEQ ID NO: 219848 - RNA, 1755 nt, Artificial Sequence; identical to SEQ ID NO: 218892
  derived and/or modified CDS sequence (opt5) from hemagglutinin__InfluenzaB__AGX24678

SEQ ID NO: 219849 - RNA, 1755 nt, Artificial Sequence; identical to SEQ ID NO: 219128
  derived and/or modified CDS sequence (opt5) from hemagglutinin__InfluenzaB__AGX24689

SEQ ID NO: 219850 - RNA, 1755 nt, Artificial Sequence; identical to SEQ ID NO: 219128
  derived and/or modified CDS sequence (opt5) from hemagglutinin__InfluenzaB__AGX24700

SEQ ID NO: 219851 - RNA, 1755 nt, Artificial Sequence; identical to SEQ ID NO: 219128
  derived and/or modified CDS sequence (opt5) from hemagglutinin__InfluenzaB__AGX24711

SEQ ID NO: 219852 - RNA, 1755 nt, Artificial Sequence; identical to SEQ ID NO: 218639
  derived and/or modified CDS sequence (opt5) from hemagglutinin__InfluenzaB__AGX24722

SEQ ID NO: 219853 - RNA, 1755 nt, Artificial Sequence; identical to SEQ ID NO: 218639
  derived and/or modified CDS sequence (opt5) from hemagglutinin__InfluenzaB__AGX24733

SEQ ID NO: 219854 - RNA, 1755 nt, Artificial Sequence; identical to SEQ ID NO: 218639
  derived and/or modified CDS sequence (opt5) from hemagglutinin__InfluenzaB__AGX24744

SEQ ID NO: 219855 - RNA, 1755 nt, Artificial Sequence; identical to SEQ ID NO: 218639
  derived and/or modified CDS sequence (opt5) from hemagglutinin__InfluenzaB__AGX24755

SEQ ID NO: 219856 - RNA, 1755 nt, Artificial Sequence; identical to SEQ ID NO: 219128
  derived and/or modified CDS sequence (opt5) from hemagglutinin__InfluenzaB__AGX24766

SEQ ID NO: 219857 - RNA, 1755 nt, Artificial Sequence; identical to SEQ ID NO: 218639
  derived and/or modified CDS sequence (opt5) from hemagglutinin__InfluenzaB__AGX24777

SEQ ID NO: 219858 - RNA, 1755 nt, Artificial Sequence; identical to SEQ ID NO: 218639
  derived and/or modified CDS sequence (opt5) from hemagglutinin__InfluenzaB__AGX24788

SEQ ID NO: 219859 - RNA, 1755 nt, Artificial Sequence; identical to SEQ ID NO: 218639
  derived and/or modified CDS sequence (opt5) from hemagglutinin__InfluenzaB__AGX24799

SEQ ID NO: 219860 - RNA, 1755 nt, Artificial Sequence; identical to SEQ ID NO: 219128
  derived and/or modified CDS sequence (opt5) from hemagglutinin__InfluenzaB__AGX24810

SEQ ID NO: 219861 - RNA, 1755 nt, Artificial Sequence; identical to SEQ ID NO: 219128
  derived and/or modified CDS sequence (opt5) from hemagglutinin__InfluenzaB__AGX24821

SEQ ID NO: 219862 - RNA, 1755 nt, Artificial Sequence
  derived and/or modified CDS sequence (opt5) from hemagglutinin__InfluenzaB__AGX24832
augaaggccaucauugugcugcucauggucguuaccagcaacgcugacagaaucugcacaggcauuacguccucuaauagcccccacguggugaaaaccgccacacagggggaggucaacgugaccggaguuaucccucugacaaccacaccgaccaaguccuacuucgcgaaucuuaaaggcacgcggacccgcgggaagcugugucccgauugccucaacuguacagaccuggauguggcucuuggaagaccuaugugcgucggcaccacacccucugccaaagccagcauucugcaugaagugcggccuguuaccuccggguguuuucccaucaugcacgaccgcacgaagaucagacaacucccuaaucugcugcggggauaugagaacauucgccucucuacacagaaugugaucgaugcugaaaaggccccgggcggccccuacagacuggggaccagcggauccugcccuaacgcuacaagcaaaucuggcuucuuugccaccauggcgugggccguccccaaggacaauaacaaaaaugcuaccaacccucuuacaguggaggugcccuauauuuguacggaaggggaggaucagaucaccgucuggggauuccauuccgacaauaagacacagaugaaaaaccuguacggcgauagcaauccgcaaaaguuuaccucuuccgccaacgggguuacaacccacuaugugagccagauuggaucuuucccugaccagacggaggauggcggccucccccaguccgggcggaucguggucgacuacaugaugcaaaagccuggaaaaacaggcaccauuguguaucagcgcgggauccugcuuccccagagaguuuggugcgcuagcggacgguccaaggugaucaaaggcucucugccccucauuggggaagccgauugucugcaugagaaguacggaggccugaacaaaagcaagccuuacuauaccggcgaacacgcgaaagccaucgggaauugcccgauuugggucaagacaccccucaagcuggcuaacggaaccaaauaccgcccucccgccaagcugcugaaagagagaggcuuuuucggggcuaucgccggauuucucgagggcgggugggaaggcaugauugccggauggcacggcuauacaucccauggggcucacggaguggcgguugccgcugaccuuaagagcacgcaggaggccaucaauaaaaucaccaagaaccuuaauucucuguccgaacucgaggugaagaaccugcaacggcugagcggcgccauggacgaacuccauaaugagauucuggagcuugaugaaaaagucgacgaucugcgcgcugacacaaucucuagccagauugagcucgccgugcugcuuuccaacgaagggaucauuaauucugaggaugaacaucugcucgcgcuggagagaaagcugaaaaagaugcucggaccuagcgcugucgagaucggcaacggguguuucgaaaccaaacacaagugcaaucagacaugccuggaccggaucgccgccggcaccuuuaacgcuggagaguucucccuucccacguuugauagccugaauauuaccgccgcuucucucaacgacgauggccuggacaaucacacaauccugcuuuacuauuccaccgccgcgagcucucucgccgugacacugaugcuggcuauuuucaucguuuacaugguguccagagauaacgucagcuguuccauuugccucuga

SEQ ID NO: 219863 - RNA, 1755 nt, Artificial Sequence
  derived and/or modified CDS sequence (opt5) from hemagglutinin__InfluenzaB__AGX24843
augaaggccaucauugugcugcucauggucguuaccagcaacgcugacagaaucugcacaggcauuacguccucuaauagcccccacguggugaaaaccgccacacagggggaagucaacgugaccggaguuaucccucugacaaccacaccgaccaaguccuacuucgcgaaucuuaaaggcacgcggacccgcgggaagcugugucccgauugccucaacuguacagaccuggauguggcucuuggaagaccuaugugcgucggcaccacacccucugccaaagccagcauucugcaugaagugcggccuguuaccuccggguguuuucccaucaugcacgaccgcacgaagaucagacaacucccuaaucugcugcggggauaugagaacauucgccucucuacacagaaugugaucgaugcugaaaaggccccgggcggccccuacagacuggggaccagcggauccugcccuaacgcuacaagcaaaauuggcuucuuugccaccauggcgugggccguccccaaggacaauuauaaaaacgcuaccaauccucuuacaguggaggugcccuacaucuguacggaaggggaggaucagauuaccgucuggggauuccauucugacaacaagacacagaugaaaaaucuguauggcgauuccaacccgcaaaaguuuaccagcucugccaaugggguuacaacccacuacgugucccagaucggagacuucccugaucagacggaggacggcggccucccccagagcgggcggauuguggucgauuauauggugcaaaagccuggaaaaacaggcaccaucguuuaccagcgcggggugcugcuuccccagagagucuggugcaccucuggacgguccaaggugaucaaaggcagccugccccucauuggggaagcugacugucugcaugagaaguacggaggccugaacaaauccaagccuuauuacacaggcgaacacgccaaagcgaucgggaacugcccgauuuggguuaagacaccccucaagcuggccaauggaaccaaauaucgcccucccgcuaagcugcugaaagagagaggcuuuuucggggccaucgcuggauuucucgagggcgggugggaaggcaugauugccggauggcacggcuacacgucucauggggcccacggaguggcugucgcggccgaccuuaagagcacccaggaggcuaucaacaaaaucacaaagaaucuuaacucccugagcgaacucgaggugaagaaucugcaacggcugucuggcgccauggaugaacuccauaacgagauucuggagcuugacgaaaaagucgaugaccugcgcgccgauaccaucuccagccagauugagcucgcugugcugcuuucuaaugaagggaucauuaacagcgaggacgaacaucugcucgcccuggagagaaagcugaaaaagaugcucggaccuuccgcgguugauaucggcaauggguguuucgagacaaaacacaagugcaaccagaccugccuggaccggaucgcugccggcacguuuaaugccggagaguucucucuucccaccuuugauagccugaacauuacagcugccucccucaaugacgauggccuggacaaccacaccauccugcuuuauuacagcacagcugccucuucccucgcggugacccugaugcuggccauuuucaucgucuauauggugagcagagacaauguuucuuguuccauuugccucuga

SEQ ID NO: 219864 - RNA, 1755 nt, Artificial Sequence
  derived and/or modified CDS sequence (opt5) from hemagglutinin__InfluenzaB__AGX24854
augaaggccaucauugugcugcucauggucguuaccagcaacgcugacagaaucugcacaggcauuacguccucuaauagcccccacguggugaaaaccgccacacagggggaggucaacgugaccggaguuaucccucugacaaccacaccgaccaaguccuacuucgcgaaucuuaaaggcacgcggacccgcgggaagcugugucccgaaugccucaacuguacagaucuggacguggcucuuggaagaccuaugugcgucggcaccacacccucugccaaagccagcauucugcaugaggugcggccuguuaccuccggguguuuucccaucaugcacgaucgcacgaagaucagacaacucccuaaucugcugcggggauaugaaaacauucgccucucuacacagaaugugaucgacgcugagaaggccccgggcggccccuacagacuggggaccagcggauccugcccuaacgcuacaagcaaaauuggcuucuuugccaccauggcgugggccguccccaaggauaauuauaaaaacgcuaccaauccucuuacaguggaagugcccuacaucugugccgagggggaggaccagauuacggucuggggauuccauucugauaacaagacccagaugaaaaaucuguauggcgacuccaacccgcaaaaguuuacaagcucugcuaaugggguuaccacacacuacgugucccagaucggagauuucccugaccagaccgaagauggcggccucccccagagcgggcggauuguggucgacuauauggugcaacgcccuggaaagacgggcacaaucguuuaccagagaggggugcugcuuccccagaaagucuggugcgccucuggacgguccaaggugaucaaaggcagccugccccucauuggggaggcggauugucugcaugaaaaguacggaggccugaacaaauccaagccuuauuacaccggcgagcacgccaaagcuaucgggaacugcccgauuuggguuaagacaccccucaagcuggccaauggaaccaaauaucgcccucccgcuaagcugcugaaagagagaggcuuuuucggggccaucgccggauuucucgaaggcgggugggagggcaugauugcuggauggcacggcuacaccucucauggggcgcacggaguggccgucgcugccgaccuuaagagcacacaggaagccaucaacaaaaucacgaagaaucuuaacucccugagcgagcucgaagugaagaaucugcaacggcugucuggcgcuauggacgagcuccauaacgagauucuggaacuugaugagaaagucgacgaucugcgcgccgacaccaucuccagccagauugaacucgcggugcugcuuucuaaugaggggaucauuaacagcgaagaugagcaucugcucgcucuggagagaaagcugaaaaagaugcucggaccuuccgccguugacaucggcaauggguguuucgaaacaaaacacaagugcaaccagaccugccuggaucggaucgccgcuggcacauuuaaugccggagaguucucucuucccaccuuugacagccugaacauuacggcugccucccucaaugaugacggccuggauaaccacaccauccugcuuuauuacagcacagcggccucuucccucgcugugacccugaugcuggccauuuucaucgucuauauggugagcagagacaauguuucuuguuccauuugccucuga

SEQ ID NO: 219865 - RNA, 1755 nt, Artificial Sequence
  derived and/or modified CDS sequence (opt5) from hemagglutinin__InfluenzaB__AGX24865
augaaggccaucauugugcugcucauggucguuaccagcaacgcugacagaaucugcacaggcauuacguccucuaauagcccccacguggugaaaaccgccacacagggggaagucaacgugaccggaguuaucccucugacaaccacaccgaccaaguccuacuucgcgaaucuuaaaggcacgcggacccgcgggaagcugugucccgauugccucaacuguacagaccuggauguggcucuuggaagaccuaugugcgucggcaccacacccucugccaaagccagcauucugcaugaagugcggccuguuaccuccggguguuuucccaucaugcacgaccgcacgaagaucagacaacucccuaaucugcugcggggauaugagaacauucgccucucuacacagaaugugaucgaugcugaaaaggccccgggcggccccuacagacuggggaccagcggauccugcccuaacgcuacaagcaaaauuggcuucuuugccaccauggcgugggccguccccaaggacaauuauaaaaacgcuaccaauccucuuacaguggaggugcccuacaucugugccgaaggggaggaucagauuacggucuggggauuccauucugacaacaagacccagaugaaaaaucuguauggcgauuccaacccgcaaaaguuuacaagcucugcuaaugggguuaccacacacuacgugucccagaucggagacuucccugaucagaccgaggacggcggccucccccagagcgggcggauuguggucgauuauauggugcaacgcccuggaaagacgggcacaaucguuuaccagagaggggugcugcuuccccagaaagucuggugcgccucuggacgguccaaggugaucaaaggcagccugccccucauuggggaagcggacugucugcaugagaaguacggaggccugaacaaauccaagccuuauuacaccggcgaacacgccaaagcuaucgggaacugcccgauuuggguuaagacaccccucaagcuggccaauggaaccaaauaucgcccucccgcuaagcugcugaaagagagaggcuuuuucggggccaucgccggauuucucgagggcgggugggaaggcaugauugcuggauggcacggcuacaccucucauggggcgcacggaguggccgucgcugccgaccuuaagagcacacaggaggccaucaacaaaaucacgaagaaucuuaacucccugagcgaacucgaggugaagaaucugcaacggcugucuggcgcuauggaugaacuccauaacgagauucuggagcuugacgaaaaagucgaugaccugcgcgccgauaccaucuccagccagauugagcucgcggugcugcuuucuaaugaagggaucauuaacagcgaggacgaacaucugcucgcucuggagagaaagcugaaaaagaugcucggaccuuccgccguugauaucggcaauggguguuucgagacaaaacacaagugcaaccagaccugccuggaccggaucgccgcuggcacauuuaaugccggagaguucucucuucccaccuuugauagccugaacauuacggcugccucccucaaugacgauggccuggacaaccacaccauccugcuuuauuacagcacagcggccucuucccucgcugugacccugaugcuggccauuuucaucgucuauauggugagcagagacaauguuucuuguuccauuugccucuga

SEQ ID NO: 219866 - RNA, 1755 nt, Artificial Sequence
  derived and/or modified CDS sequence (opt5) from hemagglutinin__InfluenzaB__AGX24876
augaaggccaucauugugcugcucauggucguuaccagcaacgcugacagaaucugcacaggcauuacguccucuaauagcccccacguggugaaaaccgccacacagggggaagucaacgugaccggaguuaucccucugacaaccacaccgaccaaguccuacuucgcgaaucuuaaaggcacgcggacccgcgggaagcugugucccgauugccucaacuguacagaccuggauguggcucuuggaagaccuaugugcgucggcaccacacccucugccaaagccagcauucugcaugaagugcggccuguuaccuccggguguuuucccaucaugcacgaccgcacgaagaucagacaacucccuaaucugcugcggggauaugagaacauucgccucucuacacagaaugugaucgaugcugaaaaggccccgggcggccccuacagacuggggaccagcggauccugcccuaacgcuacaagcaaaauuggcuucuuugccaccauggcgugggccguccccaaggacaauuauaaaaacgcuaccaauucucuuacaguggaggugccuuacaucuguaaggaaggggaggaucagauuacggucuggggauuccauuccgacaacaaaccccagaugaagaaucuguauggcgauagcaacccgcaaaaguuuaccucuuccgccaaugggguuacaacccacuacgugagccaggugggagacuucccugaucagacagaggacggcggccucccccagucugggcggaucgucguggauuauaugaugcaaaaaccuggacgcaccggcacgauuguuuaccagagaggggugcugcuuccccagaaggucuggugcgcuuccggacggagcaaagugaucaagggcucccugccccucaucggggaagccgacugucugcaugagaaauacggaggccugaacaagucuaaaccuuauuacacaggcgaacacgcgaaggccauugggaacugcccgaucuggguuaagacaccccucaaacuggcuaauggaaccaaguaucgcccucccgccaaacuucugaaggagagaggcuuuuucggggcuauugccggauuucucgagggcgggugggaaggcaugaucgccggauggcacggcuacaccagccauggggcucacggaguggcggucgccgcugaccugaaauccacccaggaggccauuaacaagaucacaaagaaucuuaacagccugucugaacucgaggugaaaaaucugcaacggcuguccggcgccauggaugaacuccauaacgagauccuggagcuugacgaaaaggucgaugaccugcgcgcugauacgauuagcucucagaucgagcucgccgugcugcuuagcaaugaagggauuaucaacuccgaggacgaacaucugcucgcgcuggagagaaaacugaagaaaaugcucggaccuucugcuguugauauuggcaauggguguuucgagaccaagcacaagugcaaccagacaugccuggaccggaucgccgccggcaccuuuaaugcuggagaguucagccuucccacauuugauucccugaacaucaccgccgcuagccucaaugacgauggccuggacaaccacacgauucugcuuuauuacucuaccgccgcguccagccucgccgugacacugaugcuggcuaucuucauugucuauauggugucuagagacaauguuuccuguagcaucugccucuga

SEQ ID NO: 219867 - RNA, 1755 nt, Artificial Sequence
  derived and/or modified CDS sequence (opt5) from hemagglutinin__InfluenzaB__AGX24887
augaaggccaucauugugcugcucauggucguuaccagcaacgcugacagaaucugcacaggcauuacguccucuaauagcccccacguggugaaaaccgccacacagggggaagucaacgugaccggagcgaucccucugacaaccacaccgaccaaguccuacuucgcuaaucuuaaaggcacgcggacccgcgggaagcugugucccgauugccucaacuguacagaccuggauguugcccuuggaagaccuaugugcgugggcaccacacccucugccaaagcuagcauucugcaugaaguccggccugugaccuccggguguuuucccaucaugcacgaccgcacgaagaucagacaacucccuaaucugcugcggggauaugagaacauucgccucucuacacagaauguuaucgaugccgaaaaggcuccgggcggccccuacagacuggggaccagcggauccugcccuaacgccacaagcaaaauuggcuucuuugcgaccauggccugggcugugcccaaggacaauuauaaaaacgccaccaauccucagacagucgaggugcccuacaucuguacggaaggggaggaucagauuaccguguggggauuccauucugacaacaagacacaaaugaaaaaucuuuauggcgauuccaacccgcagaaguuuaccagcucugcuaauggggucacaacccacuacguuucccagaucggagacuucccugaucagacggaggacggcggccugccccaaagcgggcggauugugguggauuauaugguccagaagccuggaaaaacaggcaccaucguguaccagcgcgggguucuccugccccagaagguguggugcgccucuggaagauccaaagucaucaagggcagccuuccccugauuggggaagcggacugucuccaugagaaauacggaggccugaacaaguccaaaccuuauuacaccggcgaacacgccaaggcuaucgggaacugcccgauuugggugaagacaccccugaaacucgccaauggaaccaaguaucggccucccgcuaaacugcuuaaggagcgcggcuuuuucggggccaucgccggauuucuggagggcgggugggaaggcaugauugcuggauggcacggcuacacaucucauggggcgcacggaguugccguggcugccgaccucaaaagcacgcaagaggccaucaacaagaucaccaagaaucugaacucccuuagcgaacuggaggucaaaaaucuccagagacugucuggcgcuauggaugaacugcauaacgagauucucgagcuggacgaaaagguggaugaccuucgggccgauacaauguccagccagaucgagcuggcgguccuccugucuaaugaagggauuaucaacagcgaggacgaacaccuucuggcucucgagcgcaaacugaagaaaaugcugggaccuuccgccguggauauuggcaauggguguuucgagaccaagcacaagugcaaccaaacaugccucgacagaaucgccgcuggcaccuuuaaugccggagaguucucucugcccacguuugauagccuuaacaucaccgcugccucccugaaugacgauggccucgacaaccauacaauucugcuguauuacagcaccgcggccucuucccuugcuguuacacucaugcuggccaucuucauuguguauauggucagccgggacaaugugucuuguuccaucugccuguga

SEQ ID NO: 219868 - RNA, 1755 nt, Artificial Sequence
  derived and/or modified CDS sequence (opt5) from hemagglutinin__InfluenzaB__AGX24898
augaaggccaucauugugcugcucauggucguuaccagcaacgcugacagaaucugcacaggcauuacguccucuaauagcccccacguggugaaaaccgccacacagggggaggucaacgugaccggaguuaucccucugacaaccacaccgaccaaguccuacuucgcgaaucuuaaaggcacgcggacccgcgggaagcugugucccgauugccucaacuguacagaccuggauguggcucuuggaagaccuaugugcgucggcaccacacccucugccaaagccagcauucugcaugaagugcggccuguuaccuccggguguuuucccaucaugcacgaccgcacgaagaucagacaacucccuaaucugcugcggggauaugagaagauucgccucucuacacagaacgugaucgaugcugaaaaagccccgggcggccccuacagacuggggaccagcggauccugcccuaaugcuacaagcaagauuggcuucuuugccaccauggcgugggccguccccaaagacaacuauaagaaugcuaccaacccucuuacaguggaggugcccuacaucuguaccgggggagaagaucagauuacggucuggggcuuccauucugacaauaaaacacagaugaagucccuguauggggauagcaacccgcaaaaguuuaccucuuccgccaauggaguuacaacccacuacgugagccagaucggcgacuucccugaucagacggaggacggcgggcucccccagucuggacggauuguggucgauuauaugaugcaaaaaccuggcaagacagggaccaucguguaccagcgcggaguucugcuuccccagaaaguguggugcgcuuccggcagaagcaaggucaucaaagggucccugccccucauuggagaggccgacugucugcaugaaaaguacggcggccugaacaaaucuaagccuuauuacaccggggagcacgcgaaggccaucggaaauugcccgauuugggugaaaacaccccucaagcuggcuaacggcaccaaauaucggccucccgccaagcugcugaaagaacgcggguuuuucggagcuaucgccggcuuucucgaagggggcugggagggaaugauugccggcuggcacggguacacaagccauggagcucacggcguugcgguggccgcugaccugaaguccacgcaggaggccaucaacaagaucaccaaaaaucuuaacagccugucugagcucgaagucaagaaucugcaaagacuguccggggccauggaugagcuccauaacgaaauucuggagcuugacgagaaaguggaugaccugcgggcugauacaaucagcucucagauugaacucgccguccugcuuagcaaugagggaaucauuaacuccgaagacgagcaccuucucgcgcuggaacgcaagcugaaaaagaugcucggcccuucugcuguggauaucgggaauggcuguuucgagaccaagcacaaaugcaaccagacaugccuggacagaaucgccgccggaaccuuuaaugcuggcgaguucagccuucccacguuugauucccugaacauuaccgccgcuagccucaaugacgaugggcuggacaaccauacaauccugcuuuauuacucuaccgccgcguccagccucgccguuacacugaugcuggcuauuuucaucguguauauggucucucgggacaauguguccuguagcauuugccucuga

SEQ ID NO: 219869 - RNA, 1758 nt, Artificial Sequence; identical to SEQ ID NO: 218755
  derived and/or modified CDS sequence (opt5) from hemagglutinin__InfluenzaB__AGX84854

SEQ ID NO: 219870 - RNA, 1758 nt, Artificial Sequence
  derived and/or modified CDS sequence (opt5) from hemagglutinin__InfluenzaB__AGX84865
augaaggccaucauugugcugcucauggucguuaccagcaacgcugacagaaucugcacaggcauuacguccucuaauagcccccacaucgugaaaaccgccacacagggggaggugaacgucaccggagugauuccucugacaaccacaccgaccaagucccauuucgcgaaucuuaaaggcacggaaacccgggggaagcugugucccaaaugcccuaacuguacagaucucgacguugcucugggacgccccaagugcaccggcaagaucccuucugccagagugagcauccuucacgagguccggcccgugacauccggguguuuuccuauuaugcaugaucgcaccaaaaucagacaacugccgaaucuccugcggggauacgaacacauucgccugucuacgcauaacguuaucaaugccgagaacgcucccggcggcccuuauaagauugggacaagcggauccugccccaaugugaccaacggcaauggguucuuugccacaauggcuugggccgucccuaaaaacgacaagaauaaaaccgcgaccaacccccucacaaucgaagugccguacauuuguacggagggagaggaucagaucaccguguggggcuuccacagcgacaaugaaacacagauggccaagcuguauggggauucuaagccucagaaauuuaccuccagcgcuaacggagucacaacccacuacguuucucaaaucggcggcuuccccaaccagacggaggacgggggacuuccucaguccggcagaauugugguggauuauaugguccaaaagagcgggaaaacaggaaccaucaccuaccagcggggcauucugcucccccagaagguguggugcgccucugggcgcuccaaaguuaucaagggaagccugccccuuauuggcgaagcugacugucugcaugagaaauauggcgggcucaauaaguccaagccuuacuacacaggagagcacgccaaagcgaucggcaacugcccgaucugggugaagacaccccugaaacuggccaaugggaccaaguauagaccucccgcuaaacuccugaaggaacggggauuuuucggcgccauugcuggguuucuugagggcggaugggaaggcaugaucgccggguggcauggauacacgucucacggcgcccacggggucgcuguggcggccgaucucaagagcacccaggaggcuauuaacaaaaucacaaagaaucugaacucccugagcgaacuugagguuaaaaaucugcagcgccucucuggagccauggacgagcugcauaacgaaauucuggagcucgaugaaaagguggacgaccugagagccgauaccaucuccagccaaaucgagcuugcuguccugcucucuaaugaaggcauuaucaacagcgaggacgagcaucugcuugcccuggaacggaaacucaagaagaugcuggggccuuccgcgguggagauuggcaauggauguuucgaaacaaaacacaagugcaaccagaccugccuggaucgcaucgcugccggcacguuugacgccggggaguucucucuccccaccuuugauagccugaauauuacagcugccucccuuaacgacgauggacuggacaaucacaccauccuccuguauuacagcacagcugccucuucccuggcggucacccuuaugauugccaucuucgugguuuauauggugagcagagauaacgucucuuguuccaucugccucuga

SEQ ID NO: 219871 - RNA, 1758 nt, Artificial Sequence; identical to SEQ ID NO: 219870
  derived and/or modified CDS sequence (opt5) from hemagglutinin__InfluenzaB__AGX84876

SEQ ID NO: 219872 - RNA, 1758 nt, Artificial Sequence; identical to SEQ ID NO: 219870
  derived and/or modified CDS sequence (opt5) from hemagglutinin__InfluenzaB__AGX84887

SEQ ID NO: 219873 - RNA, 1758 nt, Artificial Sequence; identical to SEQ ID NO: 218755
  derived and/or modified CDS sequence (opt5) from hemagglutinin__InfluenzaB__AGX84898

SEQ ID NO: 219874 - RNA, 1758 nt, Artificial Sequence
  derived and/or modified CDS sequence (opt5) from hemagglutinin__InfluenzaB__AGX84920
augaaggccaucauugugcugcucauggucguuaccagcaacgcugacagaaucugcacaggcauuacguccucuaauagcccccacguggugaaaaccgccacacagggggaggucaacgugaccggaguuaucccucugacaaccacaccgaccaagucccauuucgcgaaucuuaaaggcacggaaacccgggggaagcugugucccaaaugcccuaacuguacagaucucgacguggcucugggacgccccaagugcaccggcaagauuccuucugccggggucagcauccuucacgaggugagacccguuacauccggauguuuuccuaucaugcaugaucggaccaaaauucgccaacugccgaaucuccugagaggcuacgaacacauccggcugucuacgcauaacgugauuaaugccgagaacgcucccggcgggccuuauaagaucggaacaagcggcuccugccccaaugucaccaacgggaauggauucuuugccacaauggcuugggccgugccuaaaaacgacaagaauaaaaccgcgaccaacccccucacaauugaagugccguacaucuguacggagggcgaggaucagauuaccgucuggggguuccacagcgacaaugaaacacagauggccaagcuguauggagauucuaagccucagaaauuuaccuccagcgcuaacggcguuacaacccacuacgugucucaaaucggcggguuccccaaccagacggaggacggaggccuuccucaguccgggcgcaucguggucgauuauauggugcaaaagagcggaaaaacaggcaccauuaccuaccagagagggauccugcucccccagaagguuuggugcgccucuggacgguccaaagugauuaagggcagccugccccuuaucggcgaagcugacugucugcaugagaaauaugggggacucaauaaguccaagccuuacuacacaggcgagcacgccaaagcgauugggaacugcccgaucugggucaagacaccccugaaacuggccaauggaaccaaguaucgcccucccgcuaaacuccugaaggaaagaggcuuuuucggggccaucgcuggcuuucuugagggaggcugggaagggaugauugccggauggcauggcuacacgucucacggggcccacggaguggcuguugcggccgaucucaagagcacccaggaggcuaucaacaaaauuacaaagaaucugaacucccugagcgaacuugaggugaaaaaucugcagcggcucucuggcgccauggacgagcugcauaacgaaauccuggagcucgaugaaaaggucgacgaccugcgcgccgauaccauuuccagccaaaucgagcuugcugugcugcucucuaaugaagggaucauuaacagcgaggacgagcaucugcuugcccuggaaagaaaacucaagaagaugcugggcccuuccgcggucgagaucggaaauggcuguuucgaaacaaaacacaagugcaaccagaccugccuggaucggauugcugccgggacguuugacgccggagaguucucucuccccaccuuugauagccugaauaucacagcugccucccuuaacgacgauggccuggacaaucacaccauucuccuguauuacagcacagcugccucuucccuggcggugacccuuaugaucgccauuuucguuguguauauggucagccgcgauaacgugucuuguuccaucugccucuga

SEQ ID NO: 219875 - RNA, 1758 nt, Artificial Sequence
  derived and/or modified CDS sequence (opt5) from hemagglutinin__InfluenzaB__AGZ59821
augaaggccaucauugugcugcucauggucguuaccagcaacgcugacagaaucugcacaggcauuacguccucuaauagcccccacguggugaaaaccgccacacagggggaggucaacgugaccggaguuaucccucugacaaccacaccgaccaagucccauuucgcgaaucuuaaaggcacgaagacccgggggaaacugugucccaagugcuuuaacuguacagaucucgacguggcucugggacgcccuaagugcaccggcaauauucccucugccaaagucagcauccuucacgaagugagaccuguuacauccggguguuuccccaucaugcaugaucggaccaaggugcgccaacugccuaaccuccugagaggauacgagcacauucggcugucuacgcauaaugucaucaacgccgaaaaagcuccgggcggccccuauaagauugggacaagcggauccugcccuaaugugaccaacggcaauggguuuuucgccacaauggcuugggccgugcccaaaaacgacaauaacaagaccgcgaccaauagccucacaaucgaggucccuuacauuuguacggaaggagaggaucagaucaccguuuggggcuuucacucugacaacgagacacagauggccaagcuguauggggauuccaaaccccagaaguucaccagcucugcuaacggagugacaacccacuacgugucccaaauuggcggcuuuccgaaucagacggaagacgggggacuuccucagagcggccgcaucgucguggauuauaugguucagaaaucugggaagacaggaaccaucaccuaccaaagaggcauucugcucccccagaaaguguggugcgccuccgggcggagcaaggucaucaaaggaucccugccucuuauuggcgaggcugacugucugcaugaaaaguauggcgggcucaacaagucuaaacccuacuacacaggagagcacgccaaggcgaucggcaauugccccauuugggugaaaaccccucugaagcuggccaacgggacaaaauaucgcccgcccgcuaagcuccugaaggagagaggauucuuuggcgccaucgcuggguuccuugaaggcggaugggagggcaugaucgccggguggcauggauacacgagccacggcgcccacgggguugcuguggcggccgaucugaaauccacccaggaagcuauuaauaagaucaccaaaaaccucaauagccugucugagcuugaagucaagaaccugcagcggcucuccggagccauggacgagcugcauaaugagauucuggaacucgaugagaaaguggacgaccugcgcgccgauacaaucagcucucaaauugaacuugcuguccugcucagcaacgagggcaucaucaauuccgaagacgagcaucugcuugcccuggagagaaagcucaagaaaaugcuggggccuucugcgguggaaauuggcaacggauguuuugagacaaagcacaaaugcaaucagaccugccuggaucggaucgcugccggcacguucgacgccggggaauuuagccuccccaccuucgauucccugaacauuacagcugccagccuuaaugacgauggacuggacaaccacaccauccuccuguauuacucuacagcugccuccagccuggcgguuacccuuaugauugccaucuucguggucuauauggugucucgcgauaacguuuccuguagcauuugccucuga

SEQ ID NO: 219876 - RNA, 1758 nt, Artificial Sequence
  derived and/or modified CDS sequence (opt5) from hemagglutinin__InfluenzaB__AGZ59832
augaaggccaucauugugcugcucauggucguuaccagcaacgcugacagaaucugcacaggcauuacguccucuaauagcccccacguggugaaaaccgccacacagggggaggucaacgugaccggaguuaucccucugacaaccacaccgaccaagucccauuucgcgaaucuuaaaggcacgaagacccgggggaaacugugucccaagugccucaacuguacagaucuggacguggcucuuggacgcccuaagugcaccggcaauauucccucugccaaagucagcauccugcacgaagugagaccuguuacauccggguguuuucccaucaugcaugaucggaccaagauucgccaacucccuaaccugcugagaggauacgagcacauccggcucucuacgcauaaugugauuaacgccgaaaaagcuccgggcggccccuauaagaucgggacaagcggauccugcccuaaugucaccaacggcaauggguucuuugccacaauggcuugggccgugcccaaaaacgacaauaacaagaccgcgaccaauagccugacaauugaggugccuuacaucuguacggaaggagaggaucagauuaccgucuggggcuuccacucugacaacgagacacagauggccaaacuuuauggggauuccaagccccagaaguuuaccagcucugcuaacggaguuacaacccacuacgugucccaaaucggcggcuucccgaaucagacggaagacgggggacugccucagagcggccgcaucguggucgauuauauggugcagaaaucugggaagacaggaaccauuaccuaccaaagaggcauccuccugccccagaaaguuuggugcgccuccggaaagagcaaagugauuaaggggucccuuccucugaucggcgaggcugacugucuccaugaaaaguauggcgggcugaacaaaucuaagcccuacuacacaggagagcacgccaaagcgauuggcaauugccccaucugggucaagaccccucugaaacucgccaacgggacaaaguaucggccgcccgcuaagcugcuuaaagagcgcggauuuuucggcgccaucgcuggguuucuggaaggcggaugggagggcaugauugccggguggcauggauacacgagccacggcgcccacgggguggcuguugcggccgaucucaaguccacccaggaagcuaucaauaaaauuacaaagaaccugaauagccuuucugagcuggaagugaaaaaccuccagagacuguccggagccauggacgagcugcauaaugagauccucgaacuggaugagaaggucgacgaccuucgggccgauaccauuagcucucaaaucgaacuggcugugcuccugagcaacgagggcaucauuaauuccgaagacgagcaccuucuggcccucgagcgcaagcugaaaaagaugcuggggccuucugcggucgaaaucggcaacggauguuucgagacaaaacauaagugcaaucagaccugccucgauagaauugcugccggcacguuugacgccggggaguucagccugcccaccuuugauucccuuaacaucacagcugccagccugaaugaagacggacucgauaaccacaccauucugcuguauuacucuacagcugccuccagccuugcggugacccucaugaucgccauuuucguuguguauauggucucucgggacaacguguccuguagcaucugccuguga

SEQ ID NO: 219877 - RNA, 1758 nt, Artificial Sequence
  derived and/or modified CDS sequence (opt5) from hemagglutinin__InfluenzaB__AGZ59843
augaaggccaucauugugcugcucauggucguuaccagcaacgcugacagaaucugcacaggcauuacguccucuaauagcccccacguggugaaaaccgccacacagggggaggucaacgugaccggaguuaucccucugacaaccacaccgaccaagucccauuucgcgaaucuuaaaggcacggaaacccgggggaagcugugucccaaaugccucaacuguacagaucuggacguggcucuuggacgcccuaagugcaccggcaauauucccucugccagagucagcauccugcacgaggugcggccuguuacauccggguguuuucccaucaugcaugaucgcaccaagauuagacaacucccuaaccugcugcggggauacgaacacauccgccucucuacgcauaaugugauuaacgccgagaaugcuccgggcggccccuauaaaaucgggacaagcggauccugcccuaacgucaccaauggcaacggguucuuugccacaauggcuugggccgugcccaagaaugacaacaauaaaaccgcgaccaacagccugacaauugaagugccuuacaucuguacggagggagaggaucagauuaccgucuggggcuuccacucugacaacgaaacacagauggccaaacuuuauggggauuccaagccccagaaguuuaccagcucugcuaauggaguuacaacccacuacgugucccaaaucggcggcuucccgaaccagacggaggacgggggacugccucagagcggcagaaucguggucgauuauauggugcagaagucugggaaaacaggaaccauuaccuaccaacggggcauccuccugccccagaagguuuggugcgccuccgggcgcagcaaagugauuaagggaucccuuccucugaucggcgaagcugacugucuccaugagaaauauggcgggcugaauaagucuaaacccuacuacacaggagagcacgccaaggcgauuggcaacugccccaucugggucaagaccccucugaaacucgccaaugggacaaaguauagaccgcccgcuaaacugcuuaaggaacggggauuuuucggcgccaucgcuggguuucuggagggcggaugggaaggcaugauugccggguggcauggauacacgagccacggcgcccacgggguggcuguugcggccgaucucaaauccacccaggaggcuaucaacaagauuacaaagaaucugaacagccuuucugaacuggaggugaaaaaucuccagcgccuguccggagccauggacgagcugcauaacgaaauccucgagcuggaugaaaaggucgacgaccuuagagccgauaccauuagcucucaaaucgagcuggcugugcuccugagcaaugaaggcaucauuaacuccgaggacgagcaccuucuggcccucgaacggaaacugaagaaaaugcuggggccuucugcggucgagaucggcaauggauguuucgaaacaaagcauaagugcaaccagaccugccucgaucgcauugcugccggcacguuugacgccggggaguucagccugcccaccuuugauucccuuaauaucacagcugccagccugaacgacgauggacucgacaaccacaccauucugcuguauuacucuacagcugccuccagccuugcggugacccucaugaucgccauuuucaucguuuauauggugucuagagauaaugucuccuguagcaucugccuguga

SEQ ID NO: 219878 - RNA, 1758 nt, Artificial Sequence; identical to SEQ ID NO: 219224
  derived and/or modified CDS sequence (opt5) from hemagglutinin__InfluenzaB__AGZ59854

SEQ ID NO: 219879 - RNA, 1758 nt, Artificial Sequence; identical to SEQ ID NO: 218586
  derived and/or modified CDS sequence (opt5) from hemagglutinin__InfluenzaB__AGZ59865

SEQ ID NO: 219880 - RNA, 1758 nt, Artificial Sequence
  derived and/or modified CDS sequence (opt5) from hemagglutinin__InfluenzaB__AGZ59876
augaaggccaucauugugcugcucauggucguuaccagcaacgcugacagaaucugcacaggcauuacguccucuaauagcccccacguggugaaaaccgccacacagggggaggucaacgugaccggaguuaucccucugacaaccacaccgaccaagucccauuucgcgaaucuuaaaggcacggaaacccgggggaagcugugucccaaaugccucaacuguacagaucuggacguggcucuuggacgcccuaagugcaccggcaauauucccucugccagagucagcauccugcacgaggugcggccuguuacauccggguguuuucccaucaugcaugaucgcaccaagauuagacaacucccuaaccugcugcggggauacgaacacauccgccucucuacgcauaaugugauuaacgccgagaaugcuccgggcggccccuauaaaaucgggacaagcggauccugcccuaacgucaccaauggcaacggguucuuugccacaauggcuugggccgugcccaagaaugacaaaaacaagaccgcgaccaauagccugacaauugaagugccuuacaucuguacggagggagaggaucagauuaccgucuggggcuuccacucugacaacgaaacacagauggccaaacuuuauggggauuccaagccccagaaguuuaccagcucugcuaacggaguuacaacccacuacgugucccaaaucggcggcuucccgaaucagacggaggacgggggacugccucagagcggcagaaucguggucgauuauauggugcagaaaucugggaagacaggaaccauuaccuaccaacggggcauccuccugccccagaaaguuuggugcacauccgggcgcagcaaggugauuaaaggaucccuuccucugaucggcgaagccgacugucuccaugagaaguauggcgggcugaacaaaucuaagcccuacuacaccggagagcacgcuaaggccauuggcaauugccccaucugggucaaaacaccucugaagcucgcgaacgggacgaaauauagaccgcccgccaagcugcuuaaagaacggggauuuuucggcgcuaucgccggguuucuggagggcggaugggaaggcaugauugcuggguggcauggauacaccagccacggcgcccacgggguggccguugcugcggaucucaaguccacacaggaggccaucaauaagauuaccaaaaaccugaauagccuuucugaacuggaggugaagaaccuccagcgccuguccggagcuauggacgagcugcauaaugaaauccucgagcuggaugaaaaagucgacgaccuuagagccgauacaauuagcucucaaaucgagcuggccgugcuccugagcaacgaaggcaucauuaauuccgaggacgagcaccuucuggcucucgaacggaagcugaaaaagaugcuggggccuucugccgucgagaucggcaacggauguuucgaaaccaagcauaaaugcaaucagacgugccucgaucgcauugcggcuggcaccuuugacgccggggaguucagccugcccacauuugauucccuuaacaucaccgccgcuagccugaaugacgauggacucgacaaccacacaauucugcuguauuacucuaccgccgcuuccagccuugccgugacgcucaugaucgcgauuuucguuguguauauggucucuagagauaacguguccuguagcaucugccuguga

SEQ ID NO: 219881 - RNA, 1755 nt, Artificial Sequence; identical to SEQ ID NO: 218639
  derived and/or modified CDS sequence (opt5) from hemagglutinin__InfluenzaB__AGZ59887

SEQ ID NO: 219882 - RNA, 1758 nt, Artificial Sequence; identical to SEQ ID NO: 219061
  derived and/or modified CDS sequence (opt5) from hemagglutinin__InfluenzaB__AGZ59898

SEQ ID NO: 219883 - RNA, 1758 nt, Artificial Sequence; identical to SEQ ID NO: 219427
  derived and/or modified CDS sequence (opt5) from hemagglutinin__InfluenzaB__AGZ59909

SEQ ID NO: 219884 - RNA, 1758 nt, Artificial Sequence; identical to SEQ ID NO: 219061
  derived and/or modified CDS sequence (opt5) from hemagglutinin__InfluenzaB__AGZ59920

SEQ ID NO: 219885 - RNA, 1758 nt, Artificial Sequence; identical to SEQ ID NO: 219061
  derived and/or modified CDS sequence (opt5) from hemagglutinin__InfluenzaB__AGZ59931

SEQ ID NO: 219886 - RNA, 1758 nt, Artificial Sequence; identical to SEQ ID NO: 219061
  derived and/or modified CDS sequence (opt5) from hemagglutinin__InfluenzaB__AGZ59942

SEQ ID NO: 219887 - RNA, 1758 nt, Artificial Sequence; identical to SEQ ID NO: 219061
  derived and/or modified CDS sequence (opt5) from hemagglutinin__InfluenzaB__AGZ59953

SEQ ID NO: 219888 - RNA, 1758 nt, Artificial Sequence
  derived and/or modified CDS sequence (opt5) from hemagglutinin__InfluenzaB__AGZ59965
augaaggccaucauugugcugcucauggucguuaccagcaacgcugacagaaucugcacaggcauuacguccucuaauagcccccacguggugaaaaccgccacacagggggaggucaacgugaccggaguuaucccucugacaaccacaccgaccaagucccauuucgcgaaucuuaaaggcacggaaacccgggggaagcugugucccaaaugccucaacuguacagaucuggacguggcucuuggacgcccuaagugcaccggcaagauucccucugccagagucagcauccugcacgaggugcggccuguuacauccggguguuuucccaucaugcaugaucgcaccaaaauuagacaacucccuaaucugcugcggggauacgaacacauccgccucucuacgcauaacgugauuaaugccgagaacgcuccgggcggccccuauaagaucgggacaagcggauccugcccuaauauuaccaacggcaauggguucuuugccacaauggcuugggccguccccaaaaacgacaagaauaaaaccgcgaccaacccucugacaaucgaagugcccuacauuuguacggagggagaggaucagaucaccguguggggcuuccacagcgacaaugaaacacagauggccaaacuuuauggggauucuaagccgcagaaguuuaccuccagcgcuaacggagucacaacccacuacguuucucaaaucggcggcuucccuaaccagacggaggacgggggacugccccaguccggcagagugguggucgauuauaugaugcaaaagagcgggaaaacaggaaccauuaccuaccagcggggcauccuccugccucagaagguguggugcgccucugggcgcuccaaaguuauuaagggaagccuuccccugaucggcgaagcugacugucuccaugagaaauauggcgggcugaauaaguccaagcccuacuacacaggagagcacgccaaagcgauuggcaacugcccuaucugggugaagaccccgcugaaacucgccaaugggacaaaguauagacccccugcuaaacugcuuaaggaacggggauuuuucggcgccaucgcuggguuucuggagggcggaugggaaggcaugauugccggguggcauggauacacgucucacggcgcccacggggucgcuguggcggccgaucucaagagcacccaggaggcuaucaacaaaauuacaaagaaucugaacucccuuagcgaacuggagguuaaaaaucuccagcgccugucuggagccauggacgagcugcauaacgaaauccucgagcuggaugaaaagguggacgaccuuagagccgauaccauuuccagccaaaucgagcuggcuguccuccugucuaaugaaggcaucauuaacagcgaggacgagcaccuucuggcccucgaacggaaacugaagaagaugcuggggcccuccgcgguggagaucggcaauggauguuucgaaacaaaacauaagugcaaccagaccugccucgaucgcauugcugccggcacguuugacgccggggaguucucucugccuaccuuugauagccuuaauaucacagcugccucccugaacgacgauggacucgacaaucacaccauucugcuguauuacagcacagcugccucuucccuugcggucacccucaugaucgccauuuucgugguuuauauggugagcagagauaacgucucuuguuccaucugccuguga

SEQ ID NO: 219889 - RNA, 1758 nt, Artificial Sequence; identical to SEQ ID NO: 219061
  derived and/or modified CDS sequence (opt5) from hemagglutinin__InfluenzaB__AGZ59976

SEQ ID NO: 219890 - RNA, 1758 nt, Artificial Sequence; identical to SEQ ID NO: 219061
  derived and/or modified CDS sequence (opt5) from hemagglutinin__InfluenzaB__AGZ59987

SEQ ID NO: 219891 - RNA, 1758 nt, Artificial Sequence; identical to SEQ ID NO: 219061
  derived and/or modified CDS sequence (opt5) from hemagglutinin__InfluenzaB__AGZ59999

SEQ ID NO: 219892 - RNA, 1758 nt, Artificial Sequence; identical to SEQ ID NO: 218680
  derived and/or modified CDS sequence (opt5) from hemagglutinin__InfluenzaB__AGZ60010

SEQ ID NO: 219893 - RNA, 1758 nt, Artificial Sequence; identical to SEQ ID NO: 218680
  derived and/or modified CDS sequence (opt5) from hemagglutinin__InfluenzaB__AGZ60021

SEQ ID NO: 219894 - RNA, 1758 nt, Artificial Sequence; identical to SEQ ID NO: 218680
  derived and/or modified CDS sequence (opt5) from hemagglutinin__InfluenzaB__AGZ60033

SEQ ID NO: 219895 - RNA, 1755 nt, Artificial Sequence
  derived and/or modified CDS sequence (opt5) from hemagglutinin__InfluenzaB__AGZ60044
augaaggccaucauugugcugcucauggucguuaccagcaacgcugacagaaucugcacaggcauuacguccucuaauagcccccacguggugaaaaccgccacacagggggaagucaacgugaccggaguuaucccucugacaaccacaccgaccaaguccuacuucgcgaaucuuaaaggcacgcggacccgcgggaagcugugucccgauugccucaacuguacagaccuggauguggcucuuggaagaccuaugugcgucggcaccacacccucugccaaagccagcauucugcaugaagugcggccuguuaccuccggguguuuucccaucaugcacgaccgcacgaagaucagacaacucccuaaucugcugcggggauaugagaacauucgccucucuacacagaaugugaucgaugcugaaaacgccccgggcggccccuacagacuggggaccagcggauccugcccuaaugcuacaagcaagucuggcuucuuugccaccauggcgugggccguccccaaagacaacaauaagaacgcuaccaauccucuuacaguggaggugcccuaugucuguacggaaggggaggaucagauuaccguuuggggauuccauuccgacaacaaaacacagaugaagaaucuguacggcgauagcaacccgcaaaaauuuaccucuuccgccaacggggugacaacccacuaugugagccagaucggaggcuucccugcucagacggaggacggcgggcucccccagucuggacggauugucguggauuacaugguucaaaagccucgcaagacaggcaccaucguguaucagagagggguccugcuuccccagaaaguguggugcgccuccggacggagcaagguuauuaaaggcucccugccccucaucggggaagcggacugucugcaugagaaguacggaggccugaauaaaucuaagccuuacuauaccggcgaacacgccaaagcuaucgggaacugcccgauuugggugaagacaccccucaagcuggccaauggaaccaaauaccgcccucccgcuaagcugcugaaagagagaggcuuuuucggggccaucgccggauuucucgagggcgggugggaaggcaugauugcuggauggcacggcuauacaagccauggggcgcacggagucgccguggcugccgaucugaaguccacgcaggaggccaucaacaaaauuaccaagaaucuuaacagccugucugaacucgaggucaagaaucugcaacggcuguccggcgcuauggacgaacuccauaacgagauccuggagcuugacgaaaaaguggaugaccugcgcgccgauacaaucagcucucagauugagcucgcgguucugcuuagcaaugaagggaucauuaacuccgaggacgaacaccuucucgcucuggagagaaagcugaaaaagaugcucggaccuucugccguggauaucggcaauggguguuucgagaccaaacacaagugcaaccagacaugccuggaccggauugccgcuggcaccuuuaaugccggagaguucagccuucccacguuugauucccugaacaucaccgcugccagccucaaugacgauggccuggacaaccauacaauccugcuuuacuauucuaccgcggccuccagccucgcugucacacugaugcuggccauuuucaucguguacaugguuucuagagauaacguguccuguagcauuugccucuga

SEQ ID NO: 219896 - RNA, 1755 nt, Artificial Sequence; identical to SEQ ID NO: 219098
  derived and/or modified CDS sequence (opt5) from hemagglutinin__InfluenzaB__AGZ60055

SEQ ID NO: 219897 - RNA, 1755 nt, Artificial Sequence
  derived and/or modified CDS sequence (opt5) from hemagglutinin__InfluenzaB__AGZ60066
augaaggccaucauugugcugcucauggucguuaccagcaacgcugacagaaucugcacaggcauuacguccucuaauagcccccacguggugaaaaccgccacacagggggaggucaacgugaccggaguuaucccucugacaaccacaccgaccaagucccauuucgcgaaucuuaaaggcacgcggacccgcgggaagcugugucccgauugccucaacuguacagaccuggauguggcucuuggaagaccuaugugcgucggcaccacacccucugccaaagccagcauucugcacgaagugcggccuguuaccuccggguguuuucccaucaugcaugaccgcacgaagaucagacaacucccuaaucugcugcggggauacgagaacauucgccucucuacacagaaugugaucgaugcugaaaaggcccugggcggcccguauagacuugggaccagcggauccugccccaacgcuacaagcaaaucuggcuucuuugccaccauggcgugggccgucccuaaggacaauaacaaaaaugcuaccaacccccugacaguggaggugccuuacauuuguacggaaggggaggaucagaucaccgucuggggauuccacuccgacaauaagacacagaugaaaaaccucuauggcgauagcaauccccaaaaguuuaccucuuccgccaacgggguuacaacccauuacgugagccagauuggaggcuucccggaccagacggaggauggcgggcugccucagucuggacggaucguggucgacuauauggugcaaaagcccggcaaaacagggaccauuguuuaccagcgcggagugcuucugccucagaaggucuggugcgcuuccggcagaagcaaagugaucaaggggucccucccccugaucggagaagccgauugucugcacgagaaauauggcggccucaacaagucuaaacccuacuacaccggggaacacgcgaaggccauuggaaauugcccuaucuggguuaagacaccgcugaaacuugcuaacggcaccaaguaucggcccccugccaaacugcucaaggagcgcggguuuuucggagcuauugccggcuuucuggaagggggcugggaaggaaugaucgccggcuggcauggguacacaagccacggagcucauggcguggcggucgccgcugaccuuaaauccacgcaggaggccauuaauaagaucaccaagaaccugaauagccucucugaacuggaggugaaaaaccugcaaagacucuccggggccauggacgaacugcacaaugagauccuugagcuggaugaaaaggucgacgaucuccgggcugacacaauuagcucucagaucgagcuggccgugcuucugagcaacgaaggaauuaucaauuccgaggaugaacaccuccuggcgcuggagcgcaaacucaagaaaaugcugggccccucugcuguugacauugggaacggcuguuucgagaccaagcauaagugcaaucagacaugccuugauagaaucgccgccggaaccuuuaacgcuggcgaguucagccugccuacguuugacucccucaauaucaccgccgcuagccugaacgaugacgggcuggauaaucacacaauucuucucuauuacucuaccgccgcguccagccuggccgugacacugaugcucgcuaucuucauugucuauauggugucucgggacaacguuuccuguagcaucugccuguga

SEQ ID NO: 219898 - RNA, 1755 nt, Artificial Sequence
  derived and/or modified CDS sequence (opt5) from hemagglutinin__InfluenzaB__AGZ60077
augaaggccaucauugugcugcucauggucguuaccagcaacgcugacagaaucugcacaggcauuacguccucuaauagcccccacguggugaaaaccgccacacagggggaggucaacgugaccggaguuaucccucugacaaccacaccgaccaaguccuacuucgcgaaucuuaaaggcacgcggacccgcgggaagcugugucccgauugccucaacuguacagaccuggauguggcucuuggaucuccuaugugcgucggcaccacacccagcgccaaagccuccauucugcaugaagugagaccuguuaccucuggguguuuucccaucaugcacgaccggacgaagauccgccaacucgcuaaucugcugagaggauaugagaacauucggcucagcacacagaaugugaucgaugccgaaaaggcuccuggcggcccguaccgccuggggaccuccggaagcugccccaacgccacaucuaaauccggcuucuuugcgaccauggccugggcugucccuaaggacaauaacaaaaaugccaccaacccccuuacaguggaggugccuuauauuuguacggaaggggaggaucagaucaccgucuggggauuccauagcgacaauaagacacagaugaaaaaccuguacggcgauucuaauccccaaaaguuuaccuccagcgcuaacgggguuacaacccacuaugugucucagauuggaggcuucccggaccagacggaggauggcgggcucccucaguccggaagaaucguggucgacuacaugaugcaaaagagcggcaaaacagggaccauuguguaucagcggggaguucugcuuccccagaagguguggugcgccuccggccgcucuaaagucaucaaggggagccugccucucaucggagaagcggauugucugcaugagaaauacggcggccugaacaaguccaaacccuacuauaccggggaacacgccaaggcuauuggaaauugccccaucugggugaagacaccucucaaacuggccaacggcaccaaguacagaccgcccgcuaaacuucugaaggagcggggguuuuucggagccauugccggcuuucucgaagggggcugggaaggaaugaucgcuggcuggcacggguauacaagccauggagcgcacggcguugccguggcugccgaccugaaaucuacgcaggaggccauuaauaagaucaccaagaaccuuaauucccugagcgaacucgaggucaaaaaccugcaacgccugucuggggcuauggacgaacuccauagcgagauccuggagcuugaugaaaagguggacgaucugagagccgacacaauuuccucucagaucgagcucgcgguccugcuuagcaaugaaggaauuaucaacuccgaggaugaacaucugcucgcucuggagcggaaacugaagaaaaugcucggcccuagcgccguggacauugggaauggcuguuucgagaccaagcacaagugcaaccagacaugccuggaucgcaucgccgcuggaaccuuuaaugccggcgaguucucucuucccacguuugacucccugaacaucaccgcugccagccucaaugaugacgggcuggauaaccacacaauucugcuuuacuauucuaccgcggccuccagccucgcuguuacacugaugcuggccaucuucauuguguacauggucuccagagacaaugugucuuguagcaucugccucuga

SEQ ID NO: 219899 - RNA, 1755 nt, Artificial Sequence; identical to SEQ ID NO: 218803
  derived and/or modified CDS sequence (opt5) from hemagglutinin__InfluenzaB__AGZ60088

SEQ ID NO: 219900 - RNA, 1755 nt, Artificial Sequence; identical to SEQ ID NO: 218498
  derived and/or modified CDS sequence (opt5) from hemagglutinin__InfluenzaB__AGZ60099

SEQ ID NO: 219901 - RNA, 1755 nt, Artificial Sequence
  derived and/or modified CDS sequence (opt5) from hemagglutinin__InfluenzaB__AGZ60131
augaaggccaucauugugcugcucauggucguuaccagcaacgcugacagaaucugcacaggcauuacguccucuaauagcccccacguggugaaaaccgccacacagggggaggucaacgugaccggaguuaucccucugacaaccacaccgaccaaguccuacuucgcgaaucuuaaaggcacgcggacccgcgggaagcugugucccgauugccucaacuguacagaccuggauguggcucuuggaagaccuaugugcgucggcaccacacccucugccaaagccagcauucugcaugaagugcggccuaucaccuccggguguuuucccaucaugcacgaccgcacgaagauuagacaacucccuaaucugcugcggggauaugagaacauccgccucucuacacagaauguuauugaugcugaaaaggccccgggcggccccuacagacuggggaccagcggauccugcccuaacgcuacaagcaaaucuggcuucuuugccaccauggcgugggccgugcccaaggacaauaacaaaaaugcuaccaacccucuuacagucgaggugcccuauaucuguacggaaggggaggaucagauuaccguguggggauuccauuccgacaauaagacacagaugaaaaaccuguacggcgauagcaauccgcaaaaguuuaccucuuccgccaacggggucacaacccacuauguuagccagaucggaucuuucccugaccagacggaggauggcggccucccccaguccgggcggauugugguggacuacaugaugcaaaagccuggaaaaacaggcaccaucgucuaucagcgcggggugcugcuuccccagaagguuuggugcgcuagcggaagauccaaagugaucaagggcucucugccccucauuggggaagccgauugucugcaugagaaauacggaggccugaacaagagcaaaccuuacuauaccggcgaacacgcgaaggccaucgggaauugcccgauuugggucaagacaccccucaaacuggcuaacggaaccaaguaccggccucccgccaaacuucugaaggagcgcggcuuuuucggggcuaucgccggauuucucgagggcgggugggaaggcaugauugccggauggcacggcuauacaucccauggggcucacggaguggcgguugccgcugaccugaaaagcacgcaggaggccaucaauaagaucaccaagaaccuuaauucucuguccgaacucgaggugaaaaaccugcaaagacugagcggcgccauggacgaacuccauaaugagauucuggagcuugaugaaaaggucgacgaucugcgggcugacacaaucucuagccagauugagcucgccgugcugcuuuccaacgaagggaucauuaauucugaggaugaacaucugcucgcgcuggagcgcaaacugaagaaaaugcucggaccuagcgcugucgagaucggcaacggguguuucgaaaccaagcacaagugcaaucagacaugccuggacagaaucgccgccggcaccuuuaacgcuggagaguucucccuucccacguuugauagccugaauauuaccgccgcuucucucaacgacgauggccuggacaaucacacaauccugcuuuacuauuccaccgccgcgagcucucucgccgugacacugaugcuggcuauuuucaucguuuacauggugucccgggauaacgucagcuguuccauuugccucuga

SEQ ID NO: 219902 - RNA, 1755 nt, Artificial Sequence; identical to SEQ ID NO: 218803
  derived and/or modified CDS sequence (opt5) from hemagglutinin__InfluenzaB__AGZ60142

SEQ ID NO: 219903 - RNA, 1755 nt, Artificial Sequence; identical to SEQ ID NO: 218803
  derived and/or modified CDS sequence (opt5) from hemagglutinin__InfluenzaB__AGZ60160

SEQ ID NO: 219904 - RNA, 1755 nt, Artificial Sequence; identical to SEQ ID NO: 218892
  derived and/or modified CDS sequence (opt5) from hemagglutinin__InfluenzaB__AGZ60172

SEQ ID NO: 219905 - RNA, 1755 nt, Artificial Sequence; identical to SEQ ID NO: 218892
  derived and/or modified CDS sequence (opt5) from hemagglutinin__InfluenzaB__AGZ60183

SEQ ID NO: 219906 - RNA, 1755 nt, Artificial Sequence
  derived and/or modified CDS sequence (opt5) from hemagglutinin__InfluenzaB__AGZ60194
augaaggccaucauugugcugcucauggucguuaccagcaacgcugacagaaucugcacaggcauuacguccucuaauagcccccacguggugaaaaccgccacacagggggaagucaacgugaccggaguuaucccucugacaaccacaccgaccaaguccuacuucgcgaaucuuaaaggcacgcggacccgcgggaagcugugucccgauugccucaacuguacagaccuggauguggcucuuggaagaccuaugugcgucggcaccacacccucugccaaagccagcauucugcaugaagugcggccuguuaccuccggguguuuucccaucaugcacgaccgcacgaagaucagacaacucccuaaucugcugcggggauaugagaacauucgccucucuacacagaaugugaucgaugcugaaaaggccccgggcggccccuacagacuggggaccagcggauccugcccuaacgcuacaagcaaaauuggcuucuuugccaccauggcgugggccguccccaaggacaauuauaaaaacgcuaccaauccucuuacaguggaggugcccuacaucuguacggaaggggaggaucagauuaccgucuggggauuccauucugacaacaagacacagaugaaaaaucuguauggcgauuccaacccgcaaaaguuuaccagcucugccaaugggguuacaacccacuacgugucccagaucggagacuucccugaucagacggaggacggcggccucccccagagcgggcggauuguggucgauuauaugaugcaaaagacaggaaaaaccggcaccaucguguaccagcgcgggguucugcuuccucagaagguguggugcgcuucuggaagauccaaagucaucaagggcagccugccccucauuggggaagccgacugucugcaugagaaauacggaggccugaacaaguccaaacccuauuacacaggcgaacacgcgaaggccaucgggaacugcccuauuugggugaagaccccgcucaaacuggcuaauggaacaaaguaucggcccccugccaaacuucugaaggagcgcggcuuuuucggggcuaucgccggauuucucgagggcgggugggaaggcaugauugccggauggcacggcuacacgucucauggggcucacggaguugcgguggccgcugaccugaaaagcacccaggaggccaucaacaagaucacaaagaaucuuaacucccugagcgaacucgaggucaaaaaucugcaaagacugucuggcgccauggaugaacuccauaacgagauucuggagcuugacgaaaagguggaugaccugcgggcugauaccaucuccagccagauugagcucgccguccugcuuucuaaugaagggaucauuaacagcgaggacgaacaucugcucgcgcuggagcgcaaacugaagaaaaugcucggacccuccgcuguggauaucggcaauggguguuucgagacaaagcacaagugcaaccagaccugccuggacagaaucgccgccggcacguuuaaugcuggagaguucucucuuccuaccuuugauagccugaacauuacagccgcuucccucaaugacgauggccuggacaaccacaccauccugcuuuauuacagcacagccgcgucuucccucgccguuacccugaugcuggcuauuuucaucguguauauggucagccgggacaaugugucuuguuccauuugccucuga

SEQ ID NO: 219907 - RNA, 1755 nt, Artificial Sequence
  derived and/or modified CDS sequence (opt5) from hemagglutinin__InfluenzaB__AGZ60206
augaaggccaucauugugcugcucauggucguuaccagcaacgcugacagaaucugcacaggcauuacguccucuaauagcccccacguggugaaaaccgccacacagggggaagucaacgugaccggaguuaucccucugacaaccacaccgauuaaguccuacuucgcgaaucuuaaaggcacccggacgcgcgggaagcugugucccgauugccucaacuguaccgaccuggauguggcucuuggaagaccuaugugcgucggcacaacccccucugccaaagccagcauccugcaugaagugcggccuguuacauccggguguuuucccaucaugcacgaccgcaccaagauuagacaacucccuaaucugcugcggggauaugagaacauccgccucucuacgcagaaugugauugaugcugaaaaggccccgggcggccccuacagacuggggacaagcggauccugcccuaacgcuaccagcaaaaucggcuucuuugccacaauggcgugggccguccccaaggacaauuauaaaaacgcuaccaauccucuuaccguggaggugcccuacauuuguacagaaggggaggaucagaucacggucuggggauuccauucugacaacaagacccagaugaaaaaucuguauggcgauuccaacccgcaaaaguuuacaagcucugccaaugggguuaccacacacuacgugucccagauuggagacuucccugaucagaccgaggacggcggccucccccagagcgggcggaucguggucgauuauaugaugcaaaagccuggaaaaacgggcacaaucguguaccagcgcgggguucugcuuccccagaagguguggugcgcuucuggaagauccaaagucauuaagggcagccugccccucaucggggaagccgacugucugcaugagaaauacggaggccugaacaaguccaaaccuuauuacaccggcgaacacgcgaaggccauugggaacugcccgaucugggugaagacaccccucaaacuggcuaauggaaccaaguaucggccucccgccaaacuucugaaggagcgcggcuuuuucggggcuauugccggauuucucgagggcgggugggaaggcaugaucgccggauggcacggcuacaccucucauggggcucacggaguugcgguggccgcugaccugaaaagcacacaggaggccaucaacaagauuacgaagaaucuuaacucccugagcgaacucgaggucaaaaaucugcaaagacugucuggcgccauggaugaacuccauaacgagauccuggagcuugacgaaaagguggaugaccugcgggcugauaccauuuccagccagaucgagcucgccguccugcuuucuaaugaagggauuaucaacagcgaggacgaacaucugcucgcgcuggagcgcaaacugaagaaaaugcucggaccuuccgcuguggauaucggcaauggguguuucgagacaaagcacaagugcaaccagaccugccuggacagaauugccgccggcacauuuaaugcuggagaguucucucuucccaccuuugauagccugaacaucacggccgcuucccucaaugacgauggccuggacaaccacaccauucugcuuuauuacagcacagccgcgucuucccucgccguuacccugaugcuggcuaucuucauuguguauauggucagccgggacaaugugucuuguuccaucugccucuga

SEQ ID NO: 219908 - RNA, 1755 nt, Artificial Sequence; identical to SEQ ID NO: 219837
  derived and/or modified CDS sequence (opt5) from hemagglutinin__InfluenzaB__AGZ60217

SEQ ID NO: 219909 - RNA, 1755 nt, Artificial Sequence
  derived and/or modified CDS sequence (opt5) from hemagglutinin__InfluenzaB__AGZ60268
augaaggccaucauugugcugcucauggucguuaccagcaacgcugacagaaucugcacaggcauuacguccucuaauagcccccacguggugaaaaccgccacacagggggaggucaacgugaccggaguuaucccucugacaaccacaccgaccaaguccuacuucgcgaaucuuaaaggcacgcggacccgcgggaagcugugucccgauugccucaacuguacagaccuggauguggcucuuggaagaccuaugugcgucggcaccacacccucugccaaagccagcauucugcaugaagugcggccuguuaccuccggguguuuucccaucaugcacgaccgcacgaagaucagacaacucgcuaaucugcugcggggauaugagaacauucgccucucuacacagaaugugaucgaugccgaaaaggcuccuggcggcccguacagacuggggaccagcggauccugccccaacgccacaagcaaaucuggcuucuuugcgaccauggccugggcugucccuaaggacaauaacaaaaaugccaccaacccccuuacaguggaggugccuuauauuuguacggaaggggaggaucagaucaccgucuggggauuccauuccgacaauaagacacagaugaaaaaccuguacggcgauagcaauccccaaaaguuuaccucuuccgcuaacgggguuacaacccacuaugugagccagauuggaggcuucccggaccagacggaggauggcgggcucccucagucuggacggaucguggucgacuacaugaugcaaaagcccggcaaaacagggaccauuguguaucagcgcggaguucugcuuccucagaagguguggugcgccuccggcagaagcaaagucaucaaggggucccugccccucaucggagaagcggauugucugcaugagaaauacggcggccugaacaagucuaaacccuacuauaccggggaacacgccaaggcuauuggaaauugcccuaucugggugaagacaccgcucaaacuggccaacggcaccaaguaccggcccccugcuaaacuucugaaggagcgcggguuuuucggagccauugccggcuuucucgaagggggcugggaaggaaugaucgcuggcuggcacggguauacaagccauggagcgcacggcguugccguggcugccgaccugaaauccacgcaggaggccauuaauaagaucaccaagaaccuuaauagccugucugaacucgaggucaaaaaccugcaaagacuguccggggcuauggacgaacuccauaaugagauccuggagcuugaugaaaagguggacgaucugcgggccgacacaauuagcucucagaucgagcucgcgguccugcuuagcaacgaaggaauuaucaauuccgaggaugaacaucugcucgcucuggagcgcaaacugaagaaaaugcucggccccucugccauugacaucgggaacggcuguuucgagaccaagcacaagugcaaucagacaugccuggauagaaucgccgcuggaaccuuuaacgccggcgaguucagccuuccuacguuugacucccugaauauuaccgcugccagccucaacgaugacgggcuggauaaucacacaauccugcuuuacuauucuaccgcggccuccagccucgcugugacacugaugcuggccauuuucaucguuuacauggugucucgggacaacgucuccuguagcauuugccucuga

SEQ ID NO: 219910 - RNA, 1755 nt, Artificial Sequence; identical to SEQ ID NO: 218926
  derived and/or modified CDS sequence (opt5) from hemagglutinin__InfluenzaB__AHE37993

SEQ ID NO: 219911 - RNA, 1755 nt, Artificial Sequence; identical to SEQ ID NO: 218971
  derived and/or modified CDS sequence (opt5) from hemagglutinin__InfluenzaB__AHE37994

SEQ ID NO: 219912 - RNA, 1755 nt, Artificial Sequence; identical to SEQ ID NO: 218926
  derived and/or modified CDS sequence (opt5) from hemagglutinin__InfluenzaB__AHE37995

SEQ ID NO: 219913 - RNA, 1755 nt, Artificial Sequence; identical to SEQ ID NO: 218926
  derived and/or modified CDS sequence (opt5) from hemagglutinin__InfluenzaB__AHE37996

SEQ ID NO: 219914 - RNA, 1755 nt, Artificial Sequence; identical to SEQ ID NO: 218971
  derived and/or modified CDS sequence (opt5) from hemagglutinin__InfluenzaB__AHE37997

SEQ ID NO: 219915 - RNA, 1755 nt, Artificial Sequence; identical to SEQ ID NO: 218971
  derived and/or modified CDS sequence (opt5) from hemagglutinin__InfluenzaB__AHE37998

SEQ ID NO: 219916 - RNA, 1755 nt, Artificial Sequence; identical to SEQ ID NO: 218971
  derived and/or modified CDS sequence (opt5) from hemagglutinin__InfluenzaB__AHE37999

SEQ ID NO: 219917 - RNA, 1755 nt, Artificial Sequence; identical to SEQ ID NO: 218926
  derived and/or modified CDS sequence (opt5) from hemagglutinin__InfluenzaB__AHE38000

SEQ ID NO: 219918 - RNA, 1755 nt, Artificial Sequence; identical to SEQ ID NO: 218926
  derived and/or modified CDS sequence (opt5) from hemagglutinin__InfluenzaB__AHE38001

SEQ ID NO: 219919 - RNA, 1755 nt, Artificial Sequence
  derived and/or modified CDS sequence (opt5) from hemagglutinin__InfluenzaB__AHE38002
augaaggccaucauugugcugcucauggucguuaccagcaacgcugacagaaucugcacaggcauuacguccucuaauagcccccacguggugaaaaccgccacacagggggaggucaacgugaccggaguuaucccucugacaaccacaccgaccaaguccuacuucgcgaaucuuaaaggcacgaagacccgggggaaacugugucccgauugccucaacuguacagaccuggauguggcucuuggacgcccuaugugcgucggcaccacacccucugccaaggccagcauucugcaugaagugagaccuguuaccuccggguguuuucccaucaugcacgaccggacgaagauccgccaacucgcuaaucugcugagaggauaugagaacauucggcucucuacacagaaugugaucgaugccaaaaaggcuccuggcggcccguaccgccuggggaccagcggauccugccccaacgccacaagcaaaucuggcuucuuugcgaccauggccugggcugucccuaaggacaauaacaaaaaugccaccaacccccuuacaguggaagugccuuauauuugugcugagggggaagaucagaucacggucuggggauuccauuccgacaauaagacccagaugaagaaccuguacggcgauagcaauccccaaaaauuuacaucuuccgccaacgggguuaccacacacuaugugagccagauuggaggcuucccggaccagaccgaggauggcgggcucccucagucuggaagaaucguggucgacuacaugaugcaaaagcccggcaaaacggggacaauuguguaucagcggggaguucugcuuccucagaagguguggugcgcguccggccgcagcaaagucaucaaggggucccugccccucaucggagaggccgauugucugcaugaaaaauacggcggccugaacaagucuaagcccuacuauaccggggagcacgcuaaagccauuggaaauugcccuaucugggugaagaccccgcucaaacuggcuaacggcacaaaguacagacccccugccaaacuucugaaggaacggggguuuuucggagccauugcuggcuuucucgaagggggcugggagggaaugaucgcgggcuggcacggguauaccagccauggagcccacggcguugcuguggccgccgaccugaaguccacacaggaggcuauuaauaaaaucacgaagaaccuuaauagccugucugagcucgaagucaaaaaccugcaacgccuguccggggccauggacgagcuccauaaugaaauccuggagcuugaugagaagguggacgaucugagagcggacaccauuagcucucagaucgaacucgcuguccugcuuagcaacgagggaauuaucaauuccgaagaugagcaucugcucgcccuggaacggaaacugaagaagaugcucggccccucugccguggacauugggaacggcuguuucgagacaaaacacaagugcaaucagaccugccuggaucgcaucgcugccggaacauuuaacgcuggcgaguucagccuuccuaccuuugacucccugaauaucacggccgcgagccucaacgaugacgggcuggauaaucacaccauucugcuuuacuauucuacagccgcuuccagccucgccguuacccugaugcuggcuaucuucauuguguacauggucucuagagacaacguguccuguagcaucugccucuga

SEQ ID NO: 219920 - RNA, 1755 nt, Artificial Sequence; identical to SEQ ID NO: 218926
  derived and/or modified CDS sequence (opt5) from hemagglutinin__InfluenzaB__AHE38003

SEQ ID NO: 219921 - RNA, 1755 nt, Artificial Sequence; identical to SEQ ID NO: 218926
  derived and/or modified CDS sequence (opt5) from hemagglutinin__InfluenzaB__AHE38004

SEQ ID NO: 219922 - RNA, 1755 nt, Artificial Sequence; identical to SEQ ID NO: 218926
  derived and/or modified CDS sequence (opt5) from hemagglutinin__InfluenzaB__AHE38005

SEQ ID NO: 219923 - RNA, 1755 nt, Artificial Sequence
  derived and/or modified CDS sequence (opt5) from hemagglutinin__InfluenzaB__AHE38006
augaaggccaucauugugcugcucauggucguuaccagcaacgcugacagaaucugcacaggcauuacguccucuaauagcccccacguggugaaaaccgccacacagggggaggucaacgugaccggaguuaucccucugacaaccacaccgaccaaguccuacuucgcgaaucuuaaaggcacgaagacccgggggaaacugugucccgauugccucaacuguacagaccuggauguggcucuuggacgcccuaugugcgucggcgccacccccucugccaaggcuagcauucugcaugaagugagaccuguuacauccggguguuuucccaucaugcacgaccggaccaagauccgccaacucgccaaucugcugagaggauaugagaacauucggcucucuacgcagaaugugaucgaugcugaaaaagccccuggcggcccguaccgccuggggacaagcggauccugccccaacgcgaccagcaagucuggcuucuuugccacaauggcuugggccgucccuaaagacaauaacaagaaugcuaccaacccccuuaccguggaggugccuuauauuugugccgaaggggaggaucagaucacagucuggggauuccauuccgacaauaaaacgcagaugaagaaccuguacggcgauagcaauccccaaaaguuuaccucuuccgcgaacgggguuacaacccacuaugugagccagauuggaggcuucccggaccagacagaggauggcgggcucccucagucuggaagaaucguggucgacuacaugaugcaaaaacccggcaagaccgggacgauuguguaucagcggggaguucugcuuccucagaaaguguggugcgccuccggccgcagcaaggucaucaaagggucccugccccucaucggagaagcugauugucugcaugagaaguacggcggccugaacaaaucuaagcccuacuauacaggggaacacgccaaggcuauuggaaauugcccuaucugggugaaaaccccgcucaagcuggccaacggcaccaaauacagacccccugccaaacuucugaaagagcggggguuuuucggagcuauugcgggcuuucucgaagggggcugggaaggaaugaucgccggcuggcacggguauacaagccauggagcucacggcguugccguggccgcugaccugaaguccacccaggaggccauuaauaagaucacaaagaaccuuaauagccugucugaacucgaggucaagaaccugcaacgccuguccggggcgguggacgaacuccauaaugagauccuggagcuugaugaaaaagucgacgaucugagagcugacacgauuagcucucagaucgagcucgccgugcugcuuagcaacgaaggaauuaucaauuccgaggaugaacaucugcucgcccuggagcggaagcugaaaaagaugcucggccccucugcuguugacauugggaacggcuguuucgagaccaagcacaaaugcaaucagacaugccuggaucgcaucgccgcuggaaccuuuaacgccggcgaguucagccuuccuacauuugacucccugaauaucaccgcggccagccucaacgaugacgggcuggauaaucacacgauucugcuuuacuauucuaccgcugccuccagccucgcugugacacugaugcuggccaucuucauugucuacauggugucuagagacaacguuuccuguagcaucugccucuga

SEQ ID NO: 219924 - RNA, 1755 nt, Artificial Sequence; identical to SEQ ID NO: 218926
  derived and/or modified CDS sequence (opt5) from hemagglutinin__InfluenzaB__AHE38007

SEQ ID NO: 219925 - RNA, 1755 nt, Artificial Sequence
  derived and/or modified CDS sequence (opt5) from hemagglutinin__InfluenzaB__AHE38008
augaaggccaucauugcucugcucaugguggucaccagcaacgccgacagaaucugcacaggcauuacguccucuaauagcccccacguugugaaaaccgcgacacagggggaggugaacgucaccggagugaucccucugacaaccacaccgaccaaguccuacuucgcuaaucuuaaaggcacgaagacccgggggaaacugugucccgauugccucaacuguacagaccuggauguugcccuuggacgcccuaugugcgugggcaccacacccucugccaaggcuagcauucugcaugaagucagaccugugaccuccggguguuuucccaucaugcacgaccggacgaagauccgccaacucgccaaucugcugagaggauaugagaacauucggcucucuacacagaauguuaucgaugcugaaaaagccccuggcggcccguaccgccuggggaccagcggauccugccccaacgcgacaagcaagucuggcuucuuugccaccauggcuugggccgugccuaaagacaauaacaagaaugcuaccaacccccuuacagucgaggugccuuauauuugugccgaaggggaggaucagaucgcgguguggggauuccauuccgacaauaaaacgcagaugaagaaccuguacggcgauagcaauccccaaaaguuuaccucuuccgccaacggggucacaacccacuauguuagccagauuggaggcuucccggaccagacagaggauggcgggcucccucagucuggaagaaucgugguggacuacaugaugcaaaaacccggcaagaccgggacgauugucuaucagcggggagugcugcuuccucagaaaguuuggugcgcuuccggccgcagcaaggugaucaaagggucccugccccucaucggagaagccgauugucugcaugagaaguacggcggccugaacaaaucuaagcccuacuauacaggggaacacgcuaaggccauuggaaauugcccuaucugggucaaaaccccgcucaagcuggccaacggcaccaaauacagacccccugcuaaacuucugaaagagcggggguuuuucggagcgauugccggcuuucucgaagggggcugggaaggaaugaucgcuggcuggcacggguauacaagccauggagcccacggcguggccguugcugccgaccugaaguccacccaggaggcgauuaauaagaucacaaagaaccuuaauagccugucugaacucgaggugaagaaccugcaacgccuguccggggcuauggacgaacuccauaaugagauccuggagcuugaugaaaaagucgacgaucugagagccgacacgauuagcucucagaucgagcucgccgugcugcuuagcaacgaaggaauuaucaauuccgaggaugaacaucugcucgcucuggagcggaagcugaaaaagaugcucggccccucugccgucgacauugggaacggcuguuucgagaccaagcacaaaugcaaucagacaugccuggaucgcaucgcugccggaaccuuuaacgcgggcgaguucagccuuccuacauuugacucccugaauaucaccgccgcuagccucaacgaugacgggcuggauaaucacacgauucugcuuuacuauucuaccgccgcuuccagccucgccgugacacugaugcuggcgaucuucauuguuuacauggugucuagagacaacgucuccuguagcaucugccucuga

SEQ ID NO: 219926 - RNA, 1755 nt, Artificial Sequence; identical to SEQ ID NO: 218971
  derived and/or modified CDS sequence (opt5) from hemagglutinin__InfluenzaB__AHE38009

SEQ ID NO: 219927 - RNA, 1755 nt, Artificial Sequence; identical to SEQ ID NO: 218971
  derived and/or modified CDS sequence (opt5) from hemagglutinin__InfluenzaB__AHE38010

SEQ ID NO: 219928 - RNA, 1755 nt, Artificial Sequence; identical to SEQ ID NO: 218926
  derived and/or modified CDS sequence (opt5) from hemagglutinin__InfluenzaB__AHE38012

SEQ ID NO: 219929 - RNA, 1755 nt, Artificial Sequence
  derived and/or modified CDS sequence (opt5) from hemagglutinin__InfluenzaB__AHE38013
augaaggccaucauugugcugcucauggucguuaccagcaacgcugacagaaucugcacaggcauuacguccucuaauagcccccacguggugaaaaccgccacacagggggaggucaacgugaccggaguuaucccucugacaaccacaccgaccaaguccuacuucgcgaaucuuaaaggcacgaagacccgggggaaacugugucccgauugccucaacuguacagaccuggauguggcucuuggacgcccuaugugcgucggcaccacacccucugccaaggccagcauucugcaugaagugagaccuguuaccuccggguguuuucccaucaugcacgaccggacgaagauccgccaacucgcuaaucugcugagaggauaugagaacauucggcucucuacacagaaugugaucgaugccgaaaaagcuccuggcggcccguaccgccuggggaccagcggauccugccccaacgccacaagcaagucuggcuucuuugcgaccauggccugggcugucccuaaagacaauaacaagaaugccaccaacccccuuacaguggaggugccuuauauuugugcugaaggggaggaucagaucacggucuggggauuccauuccgacaauaaaacccagaugaagaaccuguacggcgauagcaauccccaaaaguuuacaucuuccgccaacgggguuaccacacacuaugugagccagauuggaggcuucccggaccagaccgaggauggcgggcucccucagucuggaagaaucguggucgacuacaugaugcaaaaacccggcaagacggggacaauuguguaucagcggggaguucugcuuccucagaaaguguggugcgucuccggccgcagcaaggugaucaaagggucccugccccucaucggagaagcggauugucugcaugagaaguacggcggccugaacaaaucuaagcccuacuauaccggggaacacgccaaggcuauuggaaauugcccuaucuggguuaaaaccccgcucaagcuggccaacggcacaaaauacagacccccugcuaagcugcugaaagagcggggguuuuucggagccauugccggcuuucucgaagggggcugggaaggaaugaucgcuggcuggcacggguauaccagccauggagcgcacggcauggccguggcugccgaccugaaguccacacaggaggccauuaauaagaucacgaaaaaccuuaauagccugucugaacucgaggucaagaaccugcaacgccuguccggggcuauggacgaacuccauaaugagauccuggagcuugaugaaaaaguggacgaucugagagccgacaccauuagcucucagaucgagcucgcgguccugcuuagcaacgaaggaauuaucaauuccgaggaugaacaccuucucgcucuggagcggaagcugaaaaagaugcucggccccucugccguggacauugggaacggcuguuucgagacaaagcacaaaugcaaucagaccugccuggaucgcaucgccgcuggaacauuuaacgccggcgaguucagccuuccuaccuuugacucccugaauaucacggcugccagccucaacgaugacgggcuggauaaucauaccauucugcuuuacuauucuacagcggccuccagccucgcuguuacccugaugcuggccaucuucauuguguacauggucucuagagacaacguguccuguagcaucugccucuga

SEQ ID NO: 219930 - RNA, 1755 nt, Artificial Sequence; identical to SEQ ID NO: 218926
  derived and/or modified CDS sequence (opt5) from hemagglutinin__InfluenzaB__AHE38014

SEQ ID NO: 219931 - RNA, 1758 nt, Artificial Sequence; identical to SEQ ID NO: 218717
  derived and/or modified CDS sequence (opt5) from hemagglutinin__InfluenzaB__AHE38015

SEQ ID NO: 219932 - RNA, 1758 nt, Artificial Sequence
  derived and/or modified CDS sequence (opt5) from hemagglutinin__InfluenzaB__AHE38016
augaaggccaucauugugcugcucauggucguuaccagcaacgcugacagaaucugcacaggcauuacguccucuaauagcccccacguggugaaaaccgccacacagggggaggucaacgugaccggaguuaucccucugacaaccacaccgaccaagucccauuucgcgaaucuuaaaggcacggaaacccgggggaagcugugucccaaaugccucaacuguacagaucuggacguggcucuuggacgcccuaagugcaccggcaagauucccucugccagagucagcauccugcacgaggugcggccuguuacauccggguguuuucccaucaugcaugaucgcaccaaaauuagacaacucccuaaucugcugcggggauacgaacacauccgccucucuacgcauaacgugauuaaugccgagaacgcuccgggcggccccuauaagaucgggacaagcggauccugcccuaaugucaccaacggcaauggguucuuugccacaauggcuugggccgugcccaaaaacgacaagaauaaaaccgcgaccaacccucugacaauugaagugcccuacaucuguacggagggagaggaucagauuaccgucuggggcuuccacagcgacaaugaaacacagauggccaaacuuuauggggauucuaagccgcagaaauuuaccuccagcgcuaacggaguuacaacccacuacgugucucaaaucggcggcuucccuaaccagacggaggacgggggacugccccaguccggcagaaucguggucgauuauauggugcaaaagagcgggaaaacaggaaccauuaccuaccagcggggcauccuccugccucagaagguuuggugcgccucugggaaauccaaggugauuaaaggaagccuuccccugaucggcgaagcugacugucuccaugagaaguauggcgggcugaauaaguccaaacccuacuacacaggagagcacgccaaggcgauuggcaacugcccuaucugggucaaaaccccgcugaagcucgccaaugggacaaaauauagacccccugcuaagcugcuuaaggaacgcggauuuuucggcgccaucgcuggguuucuggagggcggaugggaaggcaugauugccggguggcauggauacacgucucacggcgcccacgggguggcuguugcggccgaucucaaaagcacccaggaggcuaucaacaagauuacaaagaaucugaacucccuuagcgaacuggaggugaagaaucuccagcggcugucuggagccauggacgagcugcauaacgaaauccucgagcuggaugaaaaagucgacgaccuucgcgccgauaccauuuccagccaaaucgagcuggcugugcuccugucuaaugaaggcaucauuaacagcgaggacgagcaccuucuggcccucgaaagaaagcugaagaaaaugcuggggcccuccgcggucgagaucggcaauggauguuucgaaacaaagcauaaaugcaaccagaccugccucgaucggauugcugccggcacguuugacgccggggaguucucucugccuaccuuugauagccuuaauaucacagcugccucccugaacgacgauggacucgacaaucacauuauccugcuguauuacagcaccgcugccucuucccuugcggugacacucaugauugccaucuucguuguguauauggucagccgcgauaacgugucuuguuccaucugccuguga

SEQ ID NO: 219933 - RNA, 1758 nt, Artificial Sequence; identical to SEQ ID NO: 219036
  derived and/or modified CDS sequence (opt5) from hemagglutinin__InfluenzaB__AHE38017

SEQ ID NO: 219934 - RNA, 1758 nt, Artificial Sequence; identical to SEQ ID NO: 218959
  derived and/or modified CDS sequence (opt5) from hemagglutinin__InfluenzaB__AHE38018

SEQ ID NO: 219935 - RNA, 1758 nt, Artificial Sequence; identical to SEQ ID NO: 218944
  derived and/or modified CDS sequence (opt5) from hemagglutinin__InfluenzaB__AHE38019

SEQ ID NO: 219936 - RNA, 1758 nt, Artificial Sequence
  derived and/or modified CDS sequence (opt5) from hemagglutinin__InfluenzaB__AHE38020
augaaggccaucauugugcugcucauggucguuaccagcaacgcugacagaaucugcacaggcauuacguccucuaauagcccccacguggugaaaaccgccacacagggggaggucaacgugaccggaguuaucccucugacaauuaccccgacaaagucccauuucgcgaaucuuaaaggcaccgaaacgcgggggaagcugugucccaaaugccucaacuguaccgaucuggacguggcucuuggacgcccuaagugcacaggcaagauccccucugccagagucagcauccugcacgaggugcggccuguuaccuccggguguuuucccauuaugcaugaucgcacaaaaaucagacaacucccuaaucugcugcggggauacgaacacauucgccucucuacccauaacgugaucaaugccgaggacgcuccgggcggccccuauaagauugggacgagcggauccugcccuaacgucacaaauggcaacggguucuuugccaccauggcuugggccgugcccaaaaaugauaagaacaaaacagcgaccaauccucugaccaucgaagugcccuacauuuguacagagggagaggaccagaucacggucuggggcuuccacagcgauaacgaaacccagauggccaagcuguauggggacucuaagccgcagaaauuuacauccagcgcuaauggaguuaccacacacuacgugucucaaaucggcggcuucccuaaccagaccgaggaugggggacugccccaguccggcagaauuguggucgacuauauggugcaaaagagcgggaaaacgggaacaaucaccuaccagcggggcauucuccugccucagaagguuuggugcgccucugggcgcuccaaagugaucaagggaagccuuccccugauuggcgaagcugauugucuccaugagaaauauggcgggcugaacaaguccaagcccuacuacaccggagagcacgccaaagcgaucggcaauugcccuaucugggucaagacaccgcugaaacucgccaacgggaccaaguauagacccccugcuaaacugcuuaaggaacggggauuuuucggcgccauugcuggguuucuggagggcggaugggaaggcaugaucgccggguggcauggauacacaucucacggcgcccacgggguggcuguugcggccgaccucaagagcacgcaggaggcuauuaauaaaaucaccaagaaccuuaauucccuuagcgaacuggaggugaaaaaccuccagcgccugucuggagccauggaugagcugcauaaugaaauucucgagcuggacgaaaaggucgacgaucuuagagccgacacaaucuccagccaaaucgagcuggcugugcuccugucuaacgaaggcauuaucaauagcgaggaugagcaccuucuggcccucgaacggaaacugaagaagaugcuggggcccuccgcggucgagauuggcaacggauguuucgaaaccaaacauaagugcaaucagacaugccucgaccgcaucgcugccggcaccuuugaugccggggaguucucucugccuacguuugacagccuuaacauuaccgcugccucccugaaugaugacggacucgauaaccacacaauccugcuguauuacagcaccgcugccucuucccuugcggugacacucaugauugccaucuucguuguguauauggucagcagagacaaugugucuuguuccaucugccuguga

SEQ ID NO: 219937 - RNA, 1758 nt, Artificial Sequence
  derived and/or modified CDS sequence (opt5) from hemagglutinin__InfluenzaB__AHE38021
augaaggccaucauugugcugcucauggucguuaccagcaacgcugacagaaucugcacaggcauuacguccucuaauagcccccacguggugaaaaccgccacacagggggaggucaacgugaccggaguuaucccucugacaaccacaccgaccaagucccauuucgcgaaucuuaaaggcacggaaacccgggggaagcugugucccaaaugccucaacuguacagaucuggacguggcucuuggacgcccuaagugcaccggcaagauucccucugccagagucagcauccugcacgaggugcggccuguuacauccggguguuuucccaucaugcaugaucgcaccaaaauuagacaacucccuaaucugcugcggggauacgaacacauccgccucucuacgcauaacgugauuaaugccgagaacgcuccgggcggccccuauaagaucgggacaagcggauccugcccuaaugucaccaacggcaauggguucuuugccacaauggcuugggccgugcccaaaaacgacaagaauaaaaccgcgaccaacccucugacaauugaagugcccuacaucuguacggagggagaggaucagauuaccgucuggggcuuccacagcgacaaugaaacacagauggccaaacuuuauggggauucuaacccgcagaaguuuaccuccagcgcuaacggaguuacaacccacuacgugucucaaaucggcggcuucccuaaucagacggaggacgggggacugccccaguccggcagaaucguggucgauuauauggugcagaaaagcgggaagacaggaaccauuaccuaccaacggggcauccuccugccucagaaaguuuggugcgccucugggcgcuccaaggugauuaaaggaagccuuccccugaucggcgaagcugacugucuccaugagaaguauggcgggcugaacaaauccaagcccuacuacacaggagagcacgccaaggcgauuggcaauugcccuaucugggucaaaaccccgcugaagcucgccaacgggacaaaauauagacccccugcuaagcugcuuaaagaacggggauuuuucggcgccaucgcuggguuucuggagggcggaugggaaggcaugauugccggguggcauggauacacgucucacggcgcccacgggguggcuguugcggccgaucucaagagcacccaggaggcuaucaauaagauuacaaagaaccuuaauucccugagcgaacuggaggugaagaaccuccagcgccugucuggagccauggacgagcugcauaaugaaauccucgagcuggaugaaaaagucgacgaccuuagagccgauaccauuuccagccaaaucgagcuggcugugcuccugucuaacgaaggcaucauuaauagcgaggacgagcaccuucuggcccucgaacggaagcugaaaaagaugcuggggcccuccgcggucgagaucggcaacggauguuucgaaacaaagcauaaaugcaaucagaccugccucgaucgcauugcugccggcacguuugacgccggggaguucucucugccuaccuuugauagccuuaacaucacagcugccucccugaaugacgauggacucgacaaccacaccauucugcuguauuacagcacagcugccucuucccuugcggugacccucaugaucgccauuuucguuguguauauggucagcagagauaacgugucuuguuccaucugccuguga

SEQ ID NO: 219938 - RNA, 1758 nt, Artificial Sequence; identical to SEQ ID NO: 218959
  derived and/or modified CDS sequence (opt5) from hemagglutinin__InfluenzaB__AHE38022

SEQ ID NO: 219939 - RNA, 1752 nt, Artificial Sequence
  derived and/or modified CDS sequence (opt5) from hemagglutinin__InfluenzaB__AHL91189
augaaggccaucauugugcugcucauggucgcuaccagcaacgccgacagaaucugcacaggcauuacguccucuaauagcccccacguugugaaaaccgcgacacagggggaggugaacgucaccggagugaucucccugacaaccacaccuaccaagucucauuucgcuaaucuuaaaggcacgaagacccgggggaaacuguguccgaacugccucaauuguacagaucuggacguugcccuuggacgccccauuugcaucggcaccaucccuagcgccaaggcuuccauucugcacgaagugagacccgucacaucuggguguuuuccuaucaugcaugaucggaccaagauucgccaacuccccaaccugcugagaggauacgagcacauccggcucagcacgcauaaugugauuaacgccgaacgcgcuccuggcggcccguauagacuggggacauccggaagcugccccaauguuaccucucgguccggcuucuuugccacaauggcgugggccgugccucgcgacaacaaaaccgcuaccaauccccuuacagucgaggugccuuacaucuguacgaagggggaagaucagauuaccguguggggauuccacagcgacaacaaaacacagaugaagaaucuguauggcgauucuaacccccagaaauuuaccuccagcgccaauggggucacaacccacuacguuucucaaaucggaggcuucccgaaccagacggaggacggcgggcucccucaguccggaagaaucgugguggauuauaugguccagaagcccggcaagacagggaccauuguguaccaacggggaguucugcuuccucagaaaguguggugcgcuagcggccgcuccaaggucaucaaagggucucugccccucauuggagaggccgacugucugcaugaaaaguauggcggccugaacaaaagcaagcccuacuacaccggggagcacgcgaaagccaucggaaauugcccuauuugggugaagacaccgcucaagcuggcuaacggcaccaaauauagacccccugccaagcugcugaaagaacggggguuuuucggagcuaucgccggcuuucucgaagggggcugggagggaaugaucgccggcuggcauggguacacaucccacggagcucacggcguugcgguggccgcugaucuuaagagcacgcaggaggccauuaauaaaaucaccaagaaccuuaauucucuguccgagcucgaagucaagaaccugcagcgccugagcggggccauggacgagcuccauaaugaaauucuggagcuugaugagaaaguggacgaccugagagcugauacaaucucuagccaaauugaacucgccguccugcuuuccaacgagggaaucaucaauucugaagacgagcaucugcucgcgcuggaacggaagcugaaaaagaugcucggccccagcgcuguggauauugggaacggcuguuucgagaccaaacacaagugcaaucagacaugccuggacagaaucgccgccggaaccuuuaacgcuggcgaguucucccuuccuacguuugauagccugaauauuaccgccgcuucucucaacgacgaugggcuggacaaucacacaauccugcuuuauuacuccaccgccgcgagcucucucgccguuacacugaugauugcuaucuucauuguguauauggucucccgcgauaacgugagcuguuccaucugccuguga

SEQ ID NO: 219940 - RNA, 1752 nt, Artificial Sequence
  derived and/or modified CDS sequence (opt5) from hemagglutinin__InfluenzaB__AHL91200
augaaggccaucauugugcugcucauggucguuaccagcaacgcugacagaaucugcacaggcauuacguccucuaauagcccccacguggugaaaaccgccacacagggggaggucaacgugaccggaguuaucccucugacaaccacaccgaccaagucccauuucgcgaaucuuaaaggcacgaagacccgggggaaacugugucccaacugccucaauuguacagaucuggacguggcucuuggacgcccuaugugcauuggcaccauccccucugccaaggccagcauccugcacgaagucagaccugugacauccggguguuuucccauuaugcaugaucggaccaagauccgccaacucccuaaccugcugagaggauacgagcacauucggcucucuacgcauaauguuaucaacgcugaacgcgccccgggcggccccuauagacuggggacaagcggauccugcccuaaugugaccagccggucuggcuucuuugcuacaauggccugggcggucccccgcgacaacaaaaccgccaccaauccucuuacaguggaggugcccuacauuuguacgaagggggaagaucagaucaccgucuggggauuccacuccgacaacaaaacacagaugaagaaucuguauggcgauagcaacccgcagaaauuuaccucuuccgcuaaugggguuacaacccacuacgugagccaaauuggagacuucccuaaccagacggaggauggcggccucccccagucugggagaaucguggucgacuauauggugcagaagccuggaaagacaggcaccaucguuuaccaacgcggggugcugcuuccccagaaagucuggugcgccuccggacggagcaaggugauuaaaggcucccugccccucaucggggaggcugauugucugcaugaaaaguauggaggccugaacaaaucuaagccuuacuacaccggcgagcacgccaaagcgauugggaauugcccgaucuggguuaagacaccccucaagcuggccaacggaaccaaauauagaccucccgcuaagcugcugaaagaacggggcuuuuucggggccauugcuggauuucucgagggcgggugggagggcaugaucgccggauggcauggcuacacaagccacggggcccacggaguggcugucgcggccgaccugaaguccacgcaggaagcuaucaauaaaauuaccaagaaccuuaauagccugucugagcucgaagugaagaaccugcagcgccuguccggcgccauggaugagcuccauaaugaaauccuggagcuugacgagaaagucgacgaucugagagccgacacaauuagcucucaaaucgaacucgcugugcugcuuagcaacgaggggauuaucaauuccgaagaugagcaccuucucgcccuggaacggaagcugaaaaagaugcucggaccuucugcgguugacaucggcaacggguguuucgagaccaaacauaagugcaaucagacaugccuggauagaauugcugccggcaccuuuaacgccggagaguucagccuucccacguuugacucccugaauaucaccgcugccagccucaacgaugacggccuggauaaucacacaauucugcuuuauuacucuaccgcugccuccagccucgcggugacacugaugaucgccauuuucaucgucuauauggugucucgcgacaacguuuccuguagcauuugccuguga

SEQ ID NO: 219941 - RNA, 1752 nt, Artificial Sequence
  derived and/or modified CDS sequence (opt5) from hemagglutinin__InfluenzaB__AHL91211
augaaggccaucauugugcugcucauggucgcuaccagcaacgccgacagaaucugcacaggcauuacguccucuaauagcccccacguugugaaaaccgcgacacagggggaggugaacgucaccggagugaucucccugacaaccacaccuaccaagucucauuucgcuaaucuuaaaggcacgaagacccgggggaaacuguguccgaacugccucaauuguacagaucuggacguugcccuuggacgccccaugugcauuggcaccaucccuagcgccaaggcuuccauccugcacgaagugagacccgucacaucuggguguuuuccuauuaugcaugaucggaccaagauccgccaacuccccaaccugcugagaggauacgagcacauucggcucagcacgcauaaugugaucaacgccgaacgcgcuccuggcggcccguauagacuggggacauccggaagcugccccaauguuaccucucgguccggcuucuuugccacaauggcgugggccgugccucgcgacaacaaaaccgcuaccaauccccuuacagucgaggugccuuacauuuguacgaagggggaagaucagaucaccguguggggauuccacagcgacaacaaaacacagaugaagaaucuguauggcgauucuaacccccagaaauuuaccuccagcgccaauggggucacaacccacuacguuucucaaauuggaggcuucccgaaccagacggaggacggcgggcucccucaguccggaagaaucgugguggauuauaugguccagaagcccggcaagacagggaccaucguguaccaacggggaguucugcuuccucagaaaguguggugcgcuagcggccgcuccaaggucauuaaagggucucugccccucaucggagaggccgacugucugcaugaaaaguauggcggccugaacaaaagcaagcccuacuacaccggggagcacgcgaaagccauuggaaauugcccuaucugggugaagacaccgcucaagcuggcuaacggcaccaaauauagacccccugccaagcugcugaaagaacggggguuuuucggagcuauugccggcuuucucgaagggggcugggagggaaugaucgccggcuggcauggguacacaucccacggagcucacggcguugcgguggccgcugaucuuaagagcacgcaggaggccaucaauaaaauuaccaagaaccuuaauucucuguccgagcucgaagucaagaaccugcagcgccugagcggggccauggacgagcuccauaaugaaauccuggagcuugaugagaaaguggacgaccugagagcugauacaauuucuagccaaaucgaacucgccguccugcuuuccaacgagggaauuaucaauucugaagacgagcaucugcucgcgcuggaacggaagcugaaaaagaugcucggccccagcgcuguggauaucgggaacggcuguuucgagaccaaacacaagugcaaucagacaugccuggacagaauugccgccggaaccuuuaacgcuggcgaguucucccuuccuacguuugauagccugaauaucaccgccgcuucucucaacgacgaugggcuggacaaucacacaauucugcuuuauuacuccaccgccgcgagcucucucgccguuacacugaugaucgcuauuuucaucguguauauggucucccgcgauaacgugagcuguuccauuugccuguga

SEQ ID NO: 219942 - RNA, 1755 nt, Artificial Sequence
  derived and/or modified CDS sequence (opt5) from hemagglutinin__InfluenzaB__AHL91222
augaaggccaucauugugcugcucauggucguuaccagcaacgcugacagaaucugcacaggcauuacguccucuaauagcccccacguggugaaaaccgccacacagggggaggucaacgugaccggaguuaucccucugacaaccacaccgaccaagucccauuucgcgaaucuuaaaggcacgaagacccgggggaaacugugucccaacugccucaauuguacagaucuggacguggcucuuggacgcccuaugugcgucggcaccacacccucugccaaggccagcauucugcacgaagugagaccuguuaccuccggguguuuucccaucaugcaugaucggacgaagauccgccaacucccuaaccugcugagaggauacgagaauauucggcucucuacacagaacgugaucaaugcugaaaaagccccgggcggccccuaucgccuggggaccagcggauccugcccuaacgcuacaagcagaucuggcuucuuugccaccauggcgugggccgucccccgggacaauaacaagaccgcuacaaauccucuuacgguggaggugcccuacgucuguaccgaaggggaggaucagauuacaguuuggggauuccacuccgacaacaaaacccagaugaagaaucuguauggcgauagcaacccgcaaaaauuuacaucuuccgccaacggggugaccacgcauuacgugagccagaucggaggcuucccugaccagacagaggauggcgggcucccccagucuggacgcauugucguggacuauaugguucaaaagccuggcaagaccgggaccaucguguaccagagaggaguccugcuuccccagaaaguguggugcgcuuccggccggagcaagguuauuaaagggucccugccccucaucggagaagccgauugucugcacgagaaguauggcggccugaauaaaucuaagccuuacuacacaggggaacacgcgaaagccaucggaaacugcccgauuugggugaagacaccccucaagcuggcuaauggcaccaaauaucgcccucccgccaagcugcugaaagagagaggguuuuucggagcuaucgccggcuuucucgaagggggcugggaaggaaugauugccggcuggcauggguacacgagccacggagcucauggcgucgcgguggccgcugaccugaaguccacccaggaggccaucaacaaaauuacaaagaaucuuaacagccugucugaacucgaggucaagaaucugcaacggcuguccggggccauggaugaacuccacaacgagauccuggagcuugacgaaaaaguggacgaucugcgcgcugacaccaucagcucucagauugagcucgccguucugcuuagcaaugaaggaaucauuaacuccgaggaugaacaccuucucgcgcuggagagaaagcugaaaaagaugcucggcccuucugcuguggacaucgggaauggcuguuucgagacaaaacauaagugcaaccagaccugccuggaucggauugccgccggaacguuuaaugcuggcgaguucagccuucccaccuuugacucccugaacaucacagccgcuagccucaaugaugacgggcuggauaaccacaccauccugcuuuauuacucuacagccgcguccagccucgccgucacccugaugauugcuaucuucauuguguauaugguuucuagagacaacaucuccuguagcauuugccuguga

SEQ ID NO: 219943 - RNA, 1755 nt, Artificial Sequence
  derived and/or modified CDS sequence (opt5) from hemagglutinin__InfluenzaB__AHL91244
augaaggccaucauugugcugcucauggucguuaccagcaacgcugacagaaucugcacaggcauuacguccucuaauagcccccacguggugaaaaccgccacacagggggaagucaacgugaccggaguuaucccucugacaaccacaccgaccaagucccauuucgcgaaucuuaaaggcacgaagacccgggggaaacugugucccacaugccucaacuguaccgaucuggacguggcucuuggacgcccuaugugcgucggcacaacccccucugccaaggccagcauucugcacgaagugagaccuguuacguccggguguuuucccaucaugcaugaucggacaaagauccgccaacucccuaaucugcugagaggauacgagaaaauucggcucucuacccagaacgugaucaaugcugaaaaggccccgggcggccccuaucgccuggggacaagcggauccugcccuaacgcuaccagcagaucuggcuucuuugccaccauggcgugggccgucccccgggacaauaacaaaacagcuacgaauccucuuaccguggaggugcccuacauuuguacaaaggaagaggaucagaucaccgucuggggguuccacuccgacaacaaaacacagaugaagaaucuguauggagauagcaacccgcaaaaguuuaccucuuccgccaauggcguuacgacacauuacgugagccagauugggggauucccugaccagaccgaggauggcggccucccccagucugggcgcaucguggucgacuauauggugcaaaaaccuggaaagaccggcacaauuguuuaccagagaggggugcugcuuccccagaaagucuggugcgcuuccggacggagcaaggugaucaaaggcucccugccccucaucggggaagccgauugucugcacgagaaguauggaggccugaacaaaucuaagccuuacuacaccggcgaacacgcgaaggccauugggaacugcccgaucuggguuaaaacaccccucaagcuggcuaauggaacgaaauaucgcccucccgccaagcugcugaaagagagaggcuuuuucggggcuauugccggauuucucgagggcgggugggaaggcaugaucgccggauggcauggcuacaccagccacggggcucauggaguggcggucgccgcugaccugaaguccacacaggaggccauuaacaagaucaccaaaaaucuuaacagccugucugaacucgaggugaagaaucugcaacggcuguccggcgccauggaugaacuccacaacgagauccuggagcuugacgaaaaagucgacgaucugcgcgcugacacaauuagcucucagaucgagcucgccgugcugcuuagcaaugaagggauuaucaacuccgaggaugaacaccuucucgcgcuggagagaaagcugaaaaagaugcucggaccuucugcuguugacauuggcaauggguguuucgagaccaagcauaaaugcaaccagacgugccuggaucggaucgccgccggcaccuuuaaugcuggagaguucagccuucccacauuugacucccugaacaucaccgccgcuagccucaaugaugacggccuggauaaccacacaauucugcuuuauuacucuaccgccgcguccagccucgccgugacgcugaugaucgcuauuuucaucgucuauauggugucuagagacaauguuuccuguagcauuugccuguga

SEQ ID NO: 219944 - RNA, 1755 nt, Artificial Sequence; identical to SEQ ID NO: 218573
  derived and/or modified CDS sequence (opt5) from hemagglutinin__InfluenzaB__AHL91255

SEQ ID NO: 219945 - RNA, 1755 nt, Artificial Sequence; identical to SEQ ID NO: 218573
  derived and/or modified CDS sequence (opt5) from hemagglutinin__InfluenzaB__AHL91266

SEQ ID NO: 219946 - RNA, 1752 nt, Artificial Sequence
  derived and/or modified CDS sequence (opt5) from hemagglutinin__InfluenzaB__AHL91277
augaaggccaucauugugcugcucauggucguuaccagcaacgcugacagaaucugcacaggcauuacguccucuaauagcccccacguggugaaaaccgccacacagggggaggucaacgugaccggaguuaucccucugacaaccacaccgaccaagucccauuucgcgaaucuuaaaggcacgaagacccgggggaaacugugucccaacugccucaauuguacagaucuggacguggcucuuggacgcccuaugugcauuggcaucacccccucugccaaggccagcauccugcacgaagucagaccugugacauccggguguuuucccauuaugcaugaucggaccaagauccgccaacucccuaaccugcugagaggauacgagcacauucggcucucuacgcauaauguuaucaacgcugaacgcgccccgggcggccccuauagacuggggacaagcggauccugcccuaaugugaccagccggucuggcuucuuugcuacaauggccugggcggucccccgcgacaacaaaaccgccaccaauccucuuacaguggaggugcccuacauuuguacgaagggggaagaucagaucaccgucuggggauuccacuccgacaacaaaacacagaugaagaaucuguauggcgauagcaacccgcagaaauuuaccucuuccgcuaaugggauuacaacccacuacguuagccaaaucggaggcuucccuaaccagacggaggacggcgggcucccccagucuggaagaaucgugguggauuauaugguccagaagccuggcaagacagggaccauuguguaccaacggggaguucugcuuccccagaaaguguggugcgccuccggccgcagcaaggucaucaaagggucccugccccucauuggagaggcugacugucugcaugaaaaguauggcggccugaacaaaucuaagccuuacuacaccggggagcacgccaaagcgaucggaaauugcccgauuugggugaagacaccccucaagcuggccaacggcaccaaauauagaccucccgcuaagcugcugaaagaacggggguuuuucggagccaucgcuggcuuucucgaagggggcugggagggaaugaucgccggcuggcauggguacacaagccacggagcccacggcguugcuguggcggccgaucugaaguccacgcaggaggcuauuaauaaaaucaccaagaaccuuaauagccugucugagcucgaagucaagaaccugcagcgccuguccggggccauggacgagcuccauaaugaaauucuggagcuugaugagaaaguggacgaccugagagccgauacaaucagcucucaaauugaacucgcuguccugcuuagcaacgagggaaucaucaauuccgaagacgagcaccuucucgcccuggaacggaagcugaaaaagaugcucggcccuucugcgguggauauugggaacggcuguuucgagaccaaacauaagugcaaucagacaugccuggacagaaucgcugccggaaccuuuaacgccggcgaguucagccuucccacguuugauucccugaauauuaccgcugccagccucaacgacgaugggcuggacaaucacacaauccugcuuuauuacucuaccgcugccuccagccucgcgguuacacugaugauugccaucuucauuguguauauggucucucgcgauaacguguccuguagcaucugccuguga

SEQ ID NO: 219947 - RNA, 1755 nt, Artificial Sequence
  derived and/or modified CDS sequence (opt5) from hemagglutinin__InfluenzaB__AHL91299
augaaggccaucauugugcugcucauggucguuaccagcaacgcugacagaaucugcacaggcauuacguccucuaauagcccccacguggugaaaaccgccacacagggggaagucaacgugaccggaguuaucccucugacaaccacaccgacccggucccauuucgcgaaucuuaagggcacgaaaacccgcgggaagcugugucccacaugccucaacuguaccgaucuggacguggcucuuggaagaccuaugugcgucggcacaacccccucugccaaagccagcauucugcacgaagugcggccuguuacguccggguguuuucccaucaugcaugaucgcacaaagaucagacaacucccuaaucugcugcggggauacgagaagauucgccucucuacccagaacgugaucaaugcugaaaaagccccgggcggccccuauagacuggggacaagcggauccugcccuaacgcuaccagccggucuggcuucuuugccaccauggcgugggccgucccccgcgacaauaacaagacagcuacgaauccucuuaccguggaggugcccuacauuuguacaaaagaagaggaucagaucaccgucuggggguuccacuccgacaacaagacacagaugaaaaaucuguauggagauagcaacccgcaaaaguuuaccucuuccgccaauggcguuacgacacauuacgugagccagauugggggauucccugaccagaccgaggauggcggccucccccagucugggagaaucguggucgacuauauggugcaaaagccuggaaaaaccggcacaauuguuuaccagcgggggauccugcuuccccagaagguguggugcgcuuccggacgcagcaaagucaucaagggcucccugccccucauuggggaagccgauugucugcacgagaaauauggaggccugaacaagucuaaaccuuacuacaccggcgaacacgcgaaggccaucgggaacugcccgauuugggugaagacaccccucaaacuggcuaauggaacgaaguauagaccucccgccaaacuucugaaggagcggggcuuuuucggggcuaucgccggauuucucgagggcgggugggaaggcaugauugccggauggcauggcuacaccagccacggggcucauggaguugcgguggccgcugaccugaaauccacacaggaggccaucaacaagaucaccaagaaucuuaacagccugucugaacucgaggucaaaaaucugcaacgccuguccggcgccauggaugaacuccacaacgagauucuggagcuugacgaaaagguggacgaucugagagcugacacaaucagcucucagauugagcucgccguccugcuuagcaaugaagggaucauuaacuccgaggaugaacaucugcucgcgcuggagcggaaacugaagaaaaugcucggaccuucugcuguggacaucggcaauggguguuucgagaccaagcacaagugcaaccagacgugccuggauagaaucgccgccggcaccuuuaaugcuggagaguucagccuucccacauuugacucccugaacauuaccgccgcuagccucaaugaugacggccuggauaaccacacaauccugcuuuauuacucuaccgccgcguccagccucgccguuacgcugaugauugcuaucuucauuguguauaugaucucucgcgacaaugucuccuguagcauuugccuguga

SEQ ID NO: 219948 - RNA, 1755 nt, Artificial Sequence
  derived and/or modified CDS sequence (opt5) from hemagglutinin__InfluenzaB__AHL91310
augaaggccaucauugugcugcucauggucguuaccagcaacgcugacagaaucugcacaggcauuacguccucuaauagcccccacguggugaaaaccgccacacagggggaagucaacgugaccggaguuaucccucugacaaccacaccgaccaagucccauuucgcgaaucuuaaaggcacgaagacccgggggaaacugugucccacaugccucaacuguaccgaucuggacguggcucuuggacgcccuaugugcgucggcacaacccccucugccaaggccagcauucugcacgaagugagaccuguuacguccggguguuuucccaucaugcaugaucggacaaagauccgccaacucccuaaucugcugagaggauacgagaaaauucggcucucuacccagaacgugaucaaugcugaaaaggccccgggcggccccuaucgccuggggacaagcggauccugcccuaacgcuaccagcagaucuggcuucuuugccaccauggcgugggccgucccccgggacaauaacaaaacagcuacgaauccucuuaccguggaggugcccuacauuuguacaaaggaagaggaucagaucaccgucuggggguuccacuccgacaacaaaacacagaugaagaaucuguauggagauagcaacccgcaaaaguuuaccucuuccgccaauggcguuacgacacauuacgugagccagauugggggauucccugaccagaccgaggauggcggccucccccagucugggcgcaucguggucgacuauauggugcaaaaaccuggaaagaccggcacaauuguuuaccagagagggauccugcuuccccagaaaguguggugcgcuuccggacggagcaaggucaucaaaggcucccugccccucauuggggaagccgauugucugcacgagaaguauggaggccugaacaaaucuaagccuuacuacaccggcgaacacgcgaaggccaucgggaacugcccgauuugggugaaaacaccccucaagcuggcuaauggaacgaaauaucgcccucccgccaagcugcugaaagagagaggcuuuuucggggcuaucgccggauuucucgagggcgggugggaaggcaugauugccggauggcauggcuacaccagccacggggcucauggaguugcgguggccgcugaccugaaguccacacaggaggccaucaacaagaucaccaaaaaucuuaacagccugucugaacucgaggucaagaaucugcaacggcuguccggcgccauggaugaacuccacaacgagauucuggagcuugacgaaaaaguggacgaucugcgcgcugacacaaucagcucucagauugagcucgccguccugcuuagcaaugaagggaucauuaacuccgaggaugaacaccuucucgcgcuggagagaaagcugaaaaagaugcucggaccuucugcuguggacaucggcaauggguguuucgagaccaagcauaaaugcaaccagacgugccuggaucggaucgccgccggcaccuuuaaugcuggagaguucagccuucccacauuugacucccugaacauuaccgccgcuagccucaaugaugacggccuggauaaccacacaauccugcuuuauuacucuaccgccgcguccagccucgccguuacgcugaugauugcuaucuucauuguguauaugaucucuagagacaaugucuccuguagcauuugccuguga

SEQ ID NO: 219949 - RNA, 1755 nt, Artificial Sequence
  derived and/or modified CDS sequence (opt5) from hemagglutinin__InfluenzaB__AHL91321
augaaggccaucauugugcugcucauggucguuaccagcaacgcugacagaaucugcacaggcauuacguccucuaauagcccccacguggugaaaaccgccacacagggggaagucaacgugaccggaguuaucccucugacaaccacaccgaccaagucccauuucgcgaaucuuaaaggcacgaagacccgggggaaacugugucccacaugccucaacuguaccgaucuggacguggcucuuggacgcccuaugugcgucggcacaacccccucugccaaggccagcauucugcacgaagugagaccuguuacguccggguguuuucccaucaugcaugaucggacaaagauccgccaacucccuaaucugcugagaggauacgagaaaauucggcucucuacccagaacgugaucaaugcugaaaaggccccgggcggccccuaucgccuggggacaagcggauccugcccuaacgcuaccagcagaucuggcuucuuugccaccauggcgugggccgucccccgggacaauaacaaaacagcuacgaauccucuuaccguggaggugcccuacauuuguacaaaggaagaggaucagaucaccgucuggggguuccacuccgacaacaaaacacagaugaagaaucuguauggagauagcaacccgcaaaaguuuaccucuuccgccaauggcguuacgacacauuacgugagccagauugggggauucccugaccagaccgaggauggcggccucccccagucugggcgcaucguggucgacuauauggugcaaaaaccuggaaagaccggcacaauuguuuaccagagaggggugcugcuuccccagaaagucuggugcgcuuccggacggagcaaggugaucaaaggcucccugccccucaucggggaagccgauugucugcacgagaaguauggaggccugaacaaaucuaagccuuacuacaccggcgaacacgcgaaggccauugggaacugcccgaucuggguuaaaacaccccucaagcuggcuaauggaacgaaauaucgcccucccgccaagcugcugaaagagaagggcuuuuucggggcuauugccggauuucucgagggcgggugggaaggcaugaucgccggauggcauggcuacaccagccacggggcucauggaguggcggucgccgcugaccugaaguccacacaggaggccauuaacaaaaucaccaagaaucuuaacagccugucugaacucgaggugaaaaaucugcaaagacuguccggcgccauggaugaacuccacaacgagauccuggagcuugacgaaaaggucgacgaucugcgggcugacacaauuagcucucagaucgagcucgccgugcugcuuagcaaugaagggauuaucaacuccgaggaugaacaccuucucgcgcuggagcgcaaacugaagaagaugcucggaccuucugcuguugacauuggcaauggguguuucgagaccaaacauaagugcaaccagacgugccuggauagaaucgccgccggcaccuuuaaugcuggagaguucagccuucccacauuugacucccugaacaucaccgccgcuagccucaaugaugacggccuggauaaccacacaauucugcuuuauuacucuaccgccgcguccagccucgccgugacgcugaugaucgcuauuuucaucgucuauauggugucucgggacaauguuuccuguagcauuugccuguga

SEQ ID NO: 219950 - RNA, 1755 nt, Artificial Sequence; identical to SEQ ID NO: 219948
  derived and/or modified CDS sequence (opt5) from hemagglutinin__InfluenzaB__AHL91332

SEQ ID NO: 219951 - RNA, 1755 nt, Artificial Sequence; identical to SEQ ID NO: 219948
  derived and/or modified CDS sequence (opt5) from hemagglutinin__InfluenzaB__AHL91343

SEQ ID NO: 219952 - RNA, 1755 nt, Artificial Sequence; identical to SEQ ID NO: 219948
  derived and/or modified CDS sequence (opt5) from hemagglutinin__InfluenzaB__AHL91354

SEQ ID NO: 219953 - RNA, 1755 nt, Artificial Sequence; identical to SEQ ID NO: 218551
  derived and/or modified CDS sequence (opt5) from hemagglutinin__InfluenzaB__AHL91365

SEQ ID NO: 219954 - RNA, 1755 nt, Artificial Sequence
  derived and/or modified CDS sequence (opt5) from hemagglutinin__InfluenzaB__AHL91376
augaaggccaucauugugcugcucauggucguuaccagcaacgcugacagaaucugcacaggcauuacguccucuaauagcccccacguggugaaaaccgccacacagggggaagucaacgugaccggaguuaucccucugacagcgaccccgacaaagucccauuucgcuaaucuuaaaggcaccaagacgcgggggaaacuguguccuaccugccucaacuguacagaucuggacguggcccuuggacgccccaugugcgucggcgugacccccucugccaaggcuagcauucugcacgaaguuagaccugugacauccggguguuuucccaucaugcaugaucggaccaagauccgccaacucccuaaucugcugagaggauacgagaaaauucggcucucuacgcagaacgucaucaaugccgaaaaggcuccgggcggccccuaucgccuggggacaagcggauccugcccuaacgccaccagcagaucuggcuucuuugcgacaauggccugggcugugccccgggacaauaacaaaaccgccaccaauccucuuacaguggaggucccccacauuuguacgaaggaagaggaucagaucaccguuuggggguuccauuccgacaacaaaacacagaugaagaaucuguacggagauagcaacccgcaaaaguuuaccucuuccgcuaauggcgugacaacccacuaugugagccagauugggggauucccugaccagacggaggauggcggccucccccagucugggcgcaucgucguggacuacaugguucaaaaaccuggaaagacaggcaccauuguguaucagagagggauccugcuuccccagaaagucuggugcgccuccggacggagcaaggugaucaaaggcucccugccccucauuggggaagcggauugucugcacgagaaguacggaggccugaacaaaucuaagccuuauuacaccggcgaacaugccaaggcuaucgggaacugcccgauuuggguuaaaacaccccucaagcuggccaauggaaccaaauaccgcccucccgcuaaacuucugaaggagagaggcuuuuucggggccaucgccggauuucucgagggcgggugggaaggcaugauugcuggauggcacggcuauacaagccauggggcgcacggaguggccgucgcugccgaccugaaguccacgcaggaggccaucaacaagaucaccaaaaaucuuaacagccugucugaacucgaggugaagaaucugcaacggcuguccggcgcuauggaugaacuccacaacgagauucuggagcuugacgaaaaagucgacgaucugcgcgccgacacaaucagcucucagauugagcucgcggugcugcuuagcaaugaagggaucauuaacuccgaggaugaacaucugcucgcucuggagagaaagcugaaaaagaugcucggaccuucugccguugacaucggcaauggguguuucgagaccaagcacaaaugcaaccagacaugccuggaucggaucgccgcuggcaccuuuaaugccggagaguucagccuucccacguuugacucccugaacauuaccgcugccagccucaaugaugacggccuggauaaccauacaauccugcuuuacuauucuaccgcggccuccagccucgcugugacacugaugauugccaucuucauugucuacaugaucucuagagacaauguguccuguagcauuugccuguga

SEQ ID NO: 219955 - RNA, 1755 nt, Artificial Sequence
  derived and/or modified CDS sequence (opt5) from hemagglutinin__InfluenzaB__AHL91387
augaaggccaucauugugcugcucauggucguuaccagcaacgcugacagaaucugcacaggcauuacguccucuaauagcccccacguggugaaaaccgccacacagggggaagucaacgugaccggaguuaucccucugacaaccacaccggcgaagucccauuucgcuaaucuuaaaggcaccaagacgcgggggaaacuguguccuaccugccucaacuguacagaucuggacguggcccuuggacgccccaugugcgucggcgugacccccucugccaaggcuagcauucugcacgaaguuagaccugugacauccggguguuuucccaucaugcaugaucggaccaagauccgccaacucccuaaucugcugagaggauacgagaaaauucggcucucuacgcagaacgucaucaaugccgaaaaggcuccgggcggccccuaucgccuggggacaagcggauccugcccuaacgccaccagcagaucuggcuucuuugcgacaauggccugggcugugccccgggacaauaacaaaaccgccaccaauccucuuacaguggaggucccccacauuuguacgaaggaagaggaucagaucaccguuuggggguuccauuccgacaacaaaacacagaugaagaaucuguacggagauagcaacccgcaaaaguuuaccucuuccgcuaauggcgugacaacccacuaugugagccagauugggggauucccugaccagacggaggauggcggccucccccagucugggcgcaucgucguggacuacaugguucaaaaaccuggaaagacaggcaccauuguguaucagagagggauccugcuuccccagaaagucuggugcgccuccggacggagcaaggugaucaaaggcucccugccccucauuggggaagcggauugucugcacgagaaguacggaggccugaacaaaucuaagccuuauuacaccggcgaacaugccaaggcuaucgggaacugcccgauuuggguuaaaacaccccucaagcuggccaauggaaccaaauaccgcccucccgcuaaacuucugaaggagagaggcuuuuucggggccaucgccggauuucucgagggcgggugggaaggcaugauugcuggauggcacggcuauacaagccauggggcgcacggaguggccgucgcugccgaccugaaguccacgcaggaggccaucaacaagaucaccaaaaaucuuaacagccugucugaacucgaggugaagaaucugcaacggcuguccggcgcuauggaugaacuccacaacgagauucuggagcuugacgaaaaagucgacgaucugcgcgccgacacaaucagcucucagauugagcucgcggugcugcuuagcaaugaagggaucauuaacuccgaggaugaacaucugcucgcucuggagagaaagcugaaaaagaugcucggaccuucugccguugacaucggcaauggguguuucgagaccaagcacaaaugcaaccagacaugccuggaucggaucgccgcuggcaccuuuaaugccggagaguucagccuucccacguuugacucccugaacauuaccgcugccagccucaaugaugacggccuggauaaccauacaauccugcuuuacuauucuaccgcggccuccagccucgcugugacacugaugauugccaucuucauugucuacaugaucucuagagacaauguguccuguagcauuugccuguga

SEQ ID NO: 219956 - RNA, 1755 nt, Artificial Sequence
  derived and/or modified CDS sequence (opt5) from hemagglutinin__InfluenzaB__AHL91409
augaaggccaucauugugcugcucauggucguuaccagcaacgcugacagaaucugcacaggcauuacguccucugauagcccccacguggugaaaaccgccacacagggggaagucaaugugaccggagcgaucccucugacaaccacaccgaccaaguccuacuucgcuaaccuuaaaggcacgaagacccgggggaaacugugucccacaugccucaauuguaccgaccuggauguugcccuuggacgcccuaugugcgugggcauuacacccucugccaaggcuagcauccugcaugaagucagaccugugaccuccggguguuuucccaucaugcacgaccggacgaagauucgccaacucccuaaccugcugagaggauaugagaaaauccggcucucuacacagaauguuauuaacgccgaaaaggcuccgggcggccccuaccgccuggggaccagcggauccugcccuaaugccacaagcagaucuggcuucuuugcgaccauggccugggcugugccccgggauaacaauaaaaccgccacaaacccucuuacggucgaggugccccauaucuguaccaaggaagaggaccagauuacaguguggggguuccacuccgauaauaaaacccagaugaagaaccuguauggagacagcaauccgcaaaaguuuacaucuuccgcuaacggcaucaccacgcauuacgucagccagauugggggauucccugaucagacagaggacggcggccucccccagucugggcgcaucguuguggauuauauggugcaaaaaccuggaaagaccggcaccaucgucuaccagagagggauucugcuuccccagaaaguguggugcgccuccggacggagcaagguuaucaaaggcucccugccccucauuggggaagcggacugucugcacgagaaguauggaggccugaauaaaucuaagccuuacuacacaggcgaacacgccaaggcuaucgggaacugcccgauuugggugaaaacaccccucaagcuggccaacggaacaaaauaucgcccucccgcuaagcugcugaaagagagaggcuuuuucggggccaucgccggauuucucgagggcgggugggaaggcauggucgcuggauggcauggcuacacgagccacggggcgcauggaguggccguugcugccgaucugaaguccacccaggaggccaucaauaagauuaccaaaaaccuuaauagccugucugaacucgaggugaagaaccugcaacggcuguccggcgcuauggacgaacuccacaaugagauccuggagcuugacgaaaaagucgaugaccugcgcgccgauaccauuagcucucagaucgagcucgcggugcugcuuagcaacgaagggauuaucaauuccgaggacgaacaccuucucgcucuggagagaaagcugaaaaagaugcucggaccuucugccgucgauaucggcaacggguguuucgagacaaagcauaaaugcaaucagaccugccuggaccggauugccgcuggcacguuuaacgccggagaguucagccuucccaccuuugauucccugaauaucacagcugccagccucaacgacgauggccuggacaaucacaccauucugcuuuauuacucuacagcggccuccagccucgcugugacccugaugaucgccauuuucaucguuuauaugauuucuagagauaacguguccuguagcaucugccuguga

SEQ ID NO: 219957 - RNA, 1755 nt, Artificial Sequence
  derived and/or modified CDS sequence (opt5) from hemagglutinin__InfluenzaB__AHL91431
augaaggccaucauugugcugcucauggucguuaccagcaacgcugacagaaucugcacaggcauuacguccucuaauagcccccacguggugaaaaccgccacacagggggaggucaacgugaccggagcgaucccucugacaaccacaccgaccaagucccauuucgcuaaucuuaaaggcacgaagacccgggggaaacugugucccacaugccucaacuguaccgaucuggacguugcccuuggacgcccuaugugcgugggcauuacacccucugccaaggcuagcauccugcacgaagucagaccugugaccuccggguguuuucccaucaugcaugaucggacgaagauucgccaacucccuaaucugcugagaggauacgagaaaauccggcucucuacacagaacguuauuaaugccgaaaaggcuccgggcggccccuaucgccuggggaccagcggauccugcccuaacgccacaagcaaaucuggcuucuuugcgaccauggccugggcugugcccagagacaauaacaagaccgccacaaauccucuuacggucgaggugccccacaucuguaccaaagaagaggaucagauuacaguguggggguuccauuccgacaacaagacccagaugaagaaucuguacggagauagcaacccgcaaaaauuuacaucuuccgcuaauggcaucaccacgcacuaugucagccagauugggggauucccugaccagacagaggauggcggccucccccagucugggcggaucguuguggacuacauggugcaaaagccuggaaaaaccggcaccaucgucuaucagcgcgggauucugcuuccccagaagguguggugcgccuccggaagaagcaaaguuaucaagggcucccugccccucauuggggaagcggauugucugcacgagaaauacggaggccugaacaagucuaagccuuauuacacaggcgaacaugccaaagcuaucgggaacugcccgauuugggugaagacaccccucaaacuggccaauggaaccaaguaccggccucccgcuaaacuucugaaggagcgcggcuuuuucggggccaucgccggauuucucgagggcgggugggaaggcaugaucgcuggauggcacggcuauacgagccauggggcgcacggagucgccguggcugccgaccugaaguccacccaggaggccauuaacaaaaucacaaagaaucuuaacuuccugagcgaacucgagguuaaaaaucugcaaagacugucuggcgcuauggaugaacuccacaacgagauucuggagcuugacgaaaagguggacgaucugcgggccgacaccaucuccagccagauugagcucgcgguccugcuuucuaaugaagggaucaucaacagcgaggaugaacaucugcucgcucuggagcgcaaacugaagaagaugcucggaccuuccgccguggacauuggcaauggguguuuugagacaaaacacaagugcaaccagaccugccuggauagaaucgccgcuggcacguucaaugccggagaauuuucucuucccaccuucgacagccugaacauuacagcugccucccucaaugaugacggccuggauaaccauaccauccugcuuuacuauagcacagcggccucuucccucgcugucacccugaugauugccaucuucauuguguacaugaucagccgggacaauguuucuuguuccaucugccuguga

SEQ ID NO: 219958 - RNA, 1755 nt, Artificial Sequence
  derived and/or modified CDS sequence (opt5) from hemagglutinin__InfluenzaB__AHL91442
augaaggccaucauugugcugcucauggucguuaccagcaacgcugacagaaucugcacaggcauuacguccucuaauagcccccacguggugaaaaccgccacacagggggaagucaacgugaccggagcgaucccucugacaaccacaccgaccaagucccauuucgcuaaucuuaaaggcacgaagacccgggggaaacugugucccacaugccucaacuguaccgaucuggacguugcccuuggacgcccuaugugcgugggcauuacacccucugccaaggcuagcauccugcacgaagucagaccugugaccuccggguguuuucccaucaugcaugaucggacgaagauucgccaacucccuaaucugcugagaggauacgagaaaauccggcucucuacacagaacguuauuaaugccgaaaccgcuccgggcggccccuaucgccuggggacaagcggauccugcccuaacgccaccagcaagucuggcuucuuugcgaccauggccugggcugugcccagagacaauaacaaaacagccacgaauccucuuaccgucgaggugccccacaucuguacaaaggaagaggaucagauuaccguguggggguuccauuccgacaacaaaacacagaugaagaaucuguacggagauagcaacccgcaaaaguuuaccucuuccgcuaauggcaucacgacacacuaugucagccagauugggggauucccugaccagaccgaggauggcggccucccccagucugggcggaucguuguggacuacauggugcaaaaaccuggaaagaccggcacaaucgucuaucagcgcgggauucugcuuccccagaaaguguggugcgccuccggaagaagcaagguuaucaaaggcucccugccccucauuggggaagcggauugucugcacgagaaguacggaggccugaacaaaucuaagccuuauuacaccggcgaacaugccaaggcuaucgggaacugcccgauuugggugaaaacaccccucaagcuggccaauggaacgaaauaccggccucccgcuaaacuucugaaggagcgcggcuuuuucggggccaucgccggauuucucgagggcgggugggaaggcaugaucgcuggauggcacggcuauaccagccauggggcgcacggagucgccguggcugccgaccugaaguccacacaggaggccauuaacaagaucaccaaaaaucuuaacagccugucugaacucgagguuaagaaucugcaaagacuguccggcgcuauggaugaacuccacaacgagauucuggagcuugacgaaaaaguggacgaucugcgggccgacacaaucagcucucagauugagcucgcgguccugcuuagcaaugaagggaucaucaacuccgaggaugaacaucugcucgcucuggagcgcaagcugaaaaagaugcucggaccuucugccguggacauuggcaauggguguuucgagaccaagcacaaaugcaaccagacgugccuggauagaaucgccgcuggcaccuuuaaugccggagaguucagccuucccacauuugacucccugaacauuaccgcugccagccucaaugaugacggccuggauaaccauacaauccugcuuuacuauucuaccgcggccuccagccucgcugucacgcugaugauugccaucuucauuguguacaugaucucucgggacaauguuuccuguagcaucugccuguga

SEQ ID NO: 219959 - RNA, 1755 nt, Artificial Sequence
  derived and/or modified CDS sequence (opt5) from hemagglutinin__InfluenzaB__AHL91453
augaaggccaucauugugcugcucauggucguuaccagcaacgcugacagaaucugcacaggcauuacguccucuaauagcccccacguggugaaaaccgccacacagggggaagucaacgugaccggagcgaucccucugacaaccacaccgaccaagucccauuucgcuaaucuuaaaggcacgaagacccgggggaaacugugucccacaugccucaacuguaccgaucuggacguugcccuuggacgcccuaugugcgugggcauuacacccucugccaaggcuagcauccugcacgaagucagaccugugaccuccggguguuuucccaucaugcaugaucggacgaagauucgccaacucccuaaucugcugagaggauacgagaaaauccggcucucuacacagaacguuauuaaugccgaaaaggcuccgggcggccccuaucgccuggggaccagcggauccugcccuaacgccacaagcaaaucuggcuucuuugcgaccauggccugggcugugcccagagacaauaacaagaccgccacaaauccucuuacgaucgaggucccccacguguguaccaaagaagaggaucagauuacaguguggggguuccauuccgacaacaagacccagaugaagaaucuguacggagauagcaacccgcaaaaauuuacaucuuccgcuaauggcaucaccacgcacuaugucagccagauugggggauucccugaccagacagaggauggcggccucccccagucugggcggaucguuguggacuacauggugcaaaagccuggaaaaaccggcaccaucgucuaucagcgcgggauucugcuuccccagaagguguggugcgccuccggaagaagcaaaguuaucaagggcucccugccccucauuggggaagcggauugucugcacgagaaauacggaggccugaacaagucuaagccuuauuacacaggcgaacaugccaaagcuaucgggaacugcccgauuugggugaagacaccccucaaacuggccaauggaaccaaguaccggccucccgcuaaacuucugaaggagcgcggcuuuuucggggccaucgccggauuucucgagggcgggugggaaggcaugaucgcuggauggcacggcuauacgagccauggggcgcacggagucgccguggcugccgaccugaaguccacccaggaggccauuaacaaaaucacaaagaaucuuaacagccugucugaacucgagguuaaaaaucugcaaagacuguccggcgcuauggaugaacuccacaacgagauucuggagcuugacgaaaagguggacgaucugcgggccgacaccaucagcucucagauugagcucgcgguccugcuuagcaaugaagggaucaucaacuccgaggaugaacaucugcucgcucuggagcgcaaacugaagaagaugcucggaccuucugccguggacauuggcaauggguguuucgagacaaaacacaagugcaaccagaccugccuggauagaaucgccgcuggcacguuuaaugccggagaguucagccuucccaccuuugacucccugaacauuacagcugccagccucaaugaugacggccuggauaaccauaccauccugcuuuacuauucuacagcggccuccagccucgcugucacccugaugauugccaucuucauuguguacaugaucucucgggacaauguuuccuguagcaucugccuguga

SEQ ID NO: 219960 - RNA, 1755 nt, Artificial Sequence; identical to SEQ ID NO: 218477
  derived and/or modified CDS sequence (opt5) from hemagglutinin__InfluenzaB__AHL91464

SEQ ID NO: 219961 - RNA, 1755 nt, Artificial Sequence; identical to SEQ ID NO: 218583
  derived and/or modified CDS sequence (opt5) from hemagglutinin__InfluenzaB__AHL91475

SEQ ID NO: 219962 - RNA, 1755 nt, Artificial Sequence; identical to SEQ ID NO: 219958
  derived and/or modified CDS sequence (opt5) from hemagglutinin__InfluenzaB__AHL91486

SEQ ID NO: 219963 - RNA, 1755 nt, Artificial Sequence; identical to SEQ ID NO: 219958
  derived and/or modified CDS sequence (opt5) from hemagglutinin__InfluenzaB__AHL91497

SEQ ID NO: 219964 - RNA, 1755 nt, Artificial Sequence; identical to SEQ ID NO: 219958
  derived and/or modified CDS sequence (opt5) from hemagglutinin__InfluenzaB__AHL91530

SEQ ID NO: 219965 - RNA, 1755 nt, Artificial Sequence; identical to SEQ ID NO: 218477
  derived and/or modified CDS sequence (opt5) from hemagglutinin__InfluenzaB__AHL91541

SEQ ID NO: 219966 - RNA, 1755 nt, Artificial Sequence; identical to SEQ ID NO: 219958
  derived and/or modified CDS sequence (opt5) from hemagglutinin__InfluenzaB__AHL91552

SEQ ID NO: 219967 - RNA, 1755 nt, Artificial Sequence; identical to SEQ ID NO: 219958
  derived and/or modified CDS sequence (opt5) from hemagglutinin__InfluenzaB__AHL91574

SEQ ID NO: 219968 - RNA, 1755 nt, Artificial Sequence
  derived and/or modified CDS sequence (opt5) from hemagglutinin__InfluenzaB__AHL91585
augaaggccaucauugugcugcucauggucguuaccagcaacgcugacagaaucugcacaggcauuacguccucuaauagcccccacguggugaaaaccgccacacagggggaagucaacgugaccggagcgaucccucugacaaccacaccgaccaagucccauuucgcuaaucuuaaaggcacgaagacccgggggaaacugugucccacaugccucaacuguaccgaucuggacguugcccuuggacgcccuaugugcgugggcauuacacccucugccaaggcuagcauccugcacgaagucagaccugugaccuccggguguuuucccaucaugcaugaucggacgaagauucgccaacucccuaaucugcugagaggauacgagaaaauccggcucucuacacagaacguuauuaaugccgaaaaggcuccgggcggccccuaucgccuggggaccagcggauccugcccuaacgccacaagcaaaucuggcuucuuugcgaccauggccugggcugugcccagagacaauaacaagaccgccacaaauccucuuacggucgaggugccccacaucuguaccaaagaagaggaucagauuacaguguggggguuccauuccgacaacaagacccagaugaagaaucuguacggagauagcaacccgcaaaaauuuacaucuuccgcuaauggcaugaccacgcacuaugucagccagaucgggggauucccugaccagacagaggauggcggccucccccagucugggcggauuguuguggacuacauggugcaaaagccuggaaaaaccggcaccaucgucuaucagcgcgggauccugcuuccccagaagguguggugcgccuccggaagaagcaaaguuauuaagggcucccugccccucaucggggaagcggauugucugcacgagaaauacggaggccugaacaagucuaagccuuauuacacaggcgaacaugccaaagcuauugggaacugcccgaucugggugaagacaccccucaaacuggccaauggaaccaaguaccggccucccgcuaaacuucugaaggagcgcggcuuuuucggggccauugccggauuucucgagggcgggugggaaggcaugaucgcuggauggcacggcuauacgagccauggggcgcacggagucgccguggcugccgaccugaaguccacccaggaggccaucaacaaaauuacaaagaaucuuaacagccugucugaacucgagguuaaaaaucugcaaagacuguccggcgcuauggaugaacuccacaacgagauccuggagcuugacgaaaagguggacgaucugcgggccgacaccauuagcucucagaucgagcucgcgguccugcuuagcaaugaagggauuaucaacuccgaggaugaacaucugcucgcucuggagcgcaaacugaagaagaugcucggaccuucugccguggacaucggcaauggguguuucgagacaaaacacaagugcaaccagaccugccuggauagaauugccgcuggcacguuuaaugccggagaguucagccuucccaccuuugacucccugaacaucacagcugccagccucaaugaugacggccuggauaaccauaccauucugcuuuacuauucuacagcggccuccagccucgcugucacccugaugaucgccauuuucaucguguacaugauuucucgggacaauguuuccuguagcaucugccuguga

SEQ ID NO: 219969 - RNA, 1755 nt, Artificial Sequence
  derived and/or modified CDS sequence (opt5) from hemagglutinin__InfluenzaB__AHL91596
augaaggccaucauugugcugcucauggucguuaccagcaacgcugacagaaucugcacaggcauuacguccucuaauagcccccacguggugaaaaccgccacacagggggaagucaacgugaccggagcgaucccucugacaaccacaccgaccaagucccauuucgcuaaucuuaaaggcacgaagacccgggggaaacugugucccacaugccucaacuguaccgaucuggacguugcccuuggacgcccuaugugcgugggcauuacacccucugccaaggcuagcauccugcacgaagucagaccugugaccuccggguguuuucccaucaugcaugaucggacgaagauucgccaacucccuaaucugcugagaggauacgagaaaauccggcucucuacacagaacguuauuaaugccgaaaaggcuccgggcggccccuaucgccuggggaccagcggauccugcccuaacgccacaagcaaaucuggcuucuuugcgaccauggccugggcugugcccagagacaauaacaagaccgccacaaauccucuuacggucgaggugccccacaucuguaccaaagaagaggaucagauuacaguguggggguuccauuccgacaacaagacccagaugaagaaucuguacggagauagcaacccgcaaaaauuuacaucuuccgcuaauggcaucaccacgcacuaugucagccagauugggggauucccugaccagacagaggauggcggccucccccagucugggcggaucguuguggacuacauggugcaaaagccuggaaaaaccggcaccaucgucuaucagcgcgggauucugcuuccccagaagguguggugcgccuccggaagaagcaaaguuaucaagggcucccugccccucauuggggaagcggauugucugcacgagaaauacggaggccugaacaagucuaagccuuauuacacaggcgaacaugccaaagcuaucgggaacugcccgauuugggugaagacaccccucaaacuggccaauggaaccaaguaccggccucccgcuaaaauccuuaaggagcgcggcuuuuucggggccaucgccggauuucuggagggcgggugggaaggcaugauugcuggauggcacggcuauacgagccauggggcgcacggagucgccguggcugccgaccucaaguccacccaggaggccaucaacaaaauuacaaagaaucugaacagccuuucugaacuggagguuaaaaaucuccaaagacuguccggcgcuauggaugaacugcacaacgagauccucgagcuggacgaaaagguggacgaucuucgggccgacaccauuagcucucagaucgagcuggcgguccuccugagcaaugaagggaucauuaacuccgaggaugaacaucuucuggcucucgagcgcaaacugaagaagaugcugggaccuucugccguggacaucggcaauggguguuucgagacaaaacacaagugcaaccagaccugccucgauagaauugccgcuggcacguuuaaugccggagaguucagccugcccaccuuugacucccuuaacaucacagcugccagccugaaugaugacggccucgauaaccauaccauucugcuguacuauucuacagcggccuccagccuugcugucacccucaugaucgccauuuucaucguguacaugaucucucgggacaauguuuccuguagcauuugccuguga

SEQ ID NO: 219970 - RNA, 1755 nt, Artificial Sequence; identical to SEQ ID NO: 219969
  derived and/or modified CDS sequence (opt5) from hemagglutinin__InfluenzaB__AHL91607

SEQ ID NO: 219971 - RNA, 1755 nt, Artificial Sequence
  derived and/or modified CDS sequence (opt5) from hemagglutinin__InfluenzaB__AHL91618
augaaggccaucauugugcugcucauggucguuaccagcaacgcugacagaaucugcacaggcauuacguccucuaauagcccccacguggugaaaaccgccacacagggggaagucaacgugaccggagcgaucccucugacaaccacaccgaccaagucccauuucgcuaaucuuaaaggcacgaagacccgggggaaacugugucccacaugccucaacuguaccgaucuggacguugcccuuggacgcccuaugugcgugggcauuacacccucugccaaggcuagcauccugcacgaagucagaccugugaccuccggguguuuucccaucaugcaugaucggacgaagauucgccaacucccuaaucugcugagaggauacgagaaaauccggcucucuacacagaacguuauuaaugccgaaaccgcuccgggcggccccuaucgccuggggacaagcggauccugcccuaacgccaccagcaagucuggcuucuuugcgaccauggccugggcugugcccagagacaauaacaaaacagccacgaauccucuuaccgucgaggugccccacaucuguacaaaggaagaggaucagauuaccguguggggguuccauuccgacaacaaaacacagaugaagaaucuguacggagauagcaacccgcaaaaguuuaccucuuccgcuaauggcaucacgacacacuaugucagccagauugggggauucccugaccagaccgaggauggcggccucccccagucugggcggaucguuguggacuacauggugcaaaaaccuggaaagaccggcacaaucgucuaucagcgcgggauucugcuuccccagaaaguguggugcgccuccggaagaagcaagguuaucaaaggcucccugccccucauuggggaagcggauugucugcacgagaaguacggaggccugaacaaaucuaagccuuauuacaccggcgaacaugccaaggcuaucgggaacugcccgauuugggugaaaacaccccucaagcuggccaauggaacgaaauaccggccucccgcuaaacuucugaaggagcgcggcuuuuucggggccaucgccggauuucucgagggcgggugggaaggcaugaucgcuggauggcacggcuauaccagccauggggcgcacggagucgccguggcugccgaccugaaguccacacaggaggccauuaacaagaucaccaaaaaucuuaacagccugucugaacucgagguuaagaaucugcaaagacuguccggcgcuauggaugaacuccacaacgagauucuggagcuugacgaaaaaguggacgaucugcgggccgacacaaucagcucucagauugagcucgcgguccugcuuagcaaugaagggaucaucaacuccgaggaugaacaucugcucgcucuggagcgcaagcugaaaaagaugcucggaccuucugccguggacauuggcaauggguguuucgagaccaagcacaaaugcaaccagacgugccuggauagaaucgccgcuggcaccuuuaaugucggagaguucagccuucccacauuugacucccugaacauuaccgccgcuagccucaaugaugacggccuggauaaccauacaauccugcuuuacuauucuaccgccgcguccagccucgccgugacgcugaugauugcuaucuucauuguuuacaugaucucucgggacaauguguccuguagcaucugccuguga

SEQ ID NO: 219972 - RNA, 1755 nt, Artificial Sequence
  derived and/or modified CDS sequence (opt5) from hemagglutinin__InfluenzaB__AHL91629
augaaggccaucauugugcugcucauggucguuaccagcaacgcugacagaaucugcacaggcauuacguccucuaauagcccccacguggugaaaaccgccacacagggggaggucaacgugaccggagcgaucccucugacaaccacaccgaccaagucccauuucgcuaaucuuaaaggcacgaagacccgggggaaacugugucccacaugcuuuaacuguaccgaucucgacguugcccugggacgcccuaugugcgugggcauuacacccucugccaaggcuagcauccuucacgaagucagaccugugaccuccggguguuuccccaucaugcaugaucggacgaagauucgccaacugccuaaucuccugagaggauacgagaaaauccggcugucuacacagaacguuauugacgccgaaaaggcuccgggcggccccuauaaacucgggaccagcggauccugcccuaaugccacaagcaagucuggcuuuuucgcgaccauggccugggcugugccccgcgauaacaauaaaaccgccacaaacccucugacggucgaggugccccacaucuguaccaaggaagaggaccagauuacaguguggggguuucauuccgauaauaagacccagaugaaaaaccuuuacggagacagcaauccgcaaaaguucacaucuuccgcuaacggcaucaccacgcacuaugucagccagauugggggauuuccugaucagacagaggacggcggccugccccagucugggagaaucguuguggauuacauggugcaaaaaccuggaaagaccggcaccaucgucuaucagcgggggauucuccugccccagaaaguguggugcgccuccggacgcagcaagguuaucaaaggcucccuuccccugauuggggaagcggacugucuccacgagaaguacggaggccugaauaagucuaaaccuuauuacacaggcgaacaugccaaggcuaucgggaacugcccgauuugggugaaaacaccccugaagcucgccaacggaacaaaauacagaccucccgcuaagcugcuuaaggagcggggcuucuuuggggccaucgccggauuccuggagggcgggugggaaggcaugaucgcuggauggcacggcuauacgagccauggggcgcacggagucgccguggcugccgaucucaaauccacccaggaggccauuaauaagaucaccaaaaaccugaauagccuuucugaacuggagguuaagaaccuccaacgccuguccggcgcuauggacgaacugcacaaugagauucucgagcuggacgaaaaaguggaugaccuuagagccgauaccaucagcucucagauugagcuggcgguccuccugagcaacgaagggaucaucaauuccgaggacgaacaucuucuggcucucgagcggaagcugaagaaaaugcugggaccuucugccguggauauuggcaacggguguuuugagacaaagcacaaaugcaaucagaccugccucgaccgcaucgccgcuggcacguucaacgccggagaauuuagccugcccaccuucgauucccuuaauauuacagcugccagccugaacgacgauggccucgacaaucauaccauccugcuguacuauucuacagcggccuccagccuugcugucacccucaugauugccaucuucauuguguacaugaucucuagagauaacguuuccuguagcaucugccuguga

SEQ ID NO: 219973 - RNA, 1755 nt, Artificial Sequence; identical to SEQ ID NO: 219972
  derived and/or modified CDS sequence (opt5) from hemagglutinin__InfluenzaB__AHL91640

SEQ ID NO: 219974 - RNA, 1755 nt, Artificial Sequence; identical to SEQ ID NO: 218479
  derived and/or modified CDS sequence (opt5) from hemagglutinin__InfluenzaB__AHL91651

SEQ ID NO: 219975 - RNA, 1752 nt, Artificial Sequence
  derived and/or modified CDS sequence (opt5) from hemagglutinin__InfluenzaB__AHL91662
augaaggccaucauugugcugcucauggucguuaccagcaacgcugacagaaucugcacaggcauuacguccucuaauagcccccacguggugaaaaccgccacacagggggaagucaacgugaccggagcgaucccucugacaaccacaccgaccaagucccauuucgcuaaucuuaaaggcacgaagacccgggggaaacugugucccacaugccucaacuguaccgaucuggacguugcccuuggacgcccuaugugcgugggcauuacacccucugccaaggcuagcauccugcacgaagucagaccugugaccuccggguguuuucccaucaugcaugaucggacgaagauucgccaacucccuaaucugcugagaggauacgagaaaauccggcucucuacacagaacguuauuaaugccgaaaccgcuccgggcggccccuaucgccuggggacaagcggauccugcccuaacgccaccagcaagucuggcuucuuugcgaccauggccugggcugugcccagagacaauaacaaaacagccacgaauccucuuaccgucgaggugccccacaucuguacaaaggaagaggaucagauuaccguguggggguuccauuccgacaacaaaacacagaugaagaaucuguacggagauagcaacccgcaaaaguuuaccucuuccgcuaauggcaucacgacacacuaugucagccagauugggggauucccugaccagaccgaggauggcggccucccccagucugggcggaucguuguggacuacauggugcaaaaaccuggaaagaccggcacaaucgucuaucagcgcgggauucugcuuccccagaaaguguggugcgccuccggaagaagcaagguuaucaaaggcucccugccccucauuggggaagcggauugucugcacgagaaguacggaggccugaacaaaucuaagccuuauuacaccggcgaacaugccaaggcuaucgggaacugcccgauuugggugaaaacaccccucaagcuggccaauggaacgaaauaccggccucccgcuaaacuucugaaggagcgcggcuuuuucggggccaucgccggauuucucgagggcgggugggaaggcaugaucgcuggauggcacggcuauaccagccauggggcgcacggagucgccguggcugccgaccugaaguccacacaggaggccauuaacaagaucaccaaaaaucuuaacagccugucugaacucgagguuaagaaucugcaaagacuguccggcgcuauggaugaacuccacaacgagauucuggagcuugacgaaaaaguggacgaucugcgggccgacacaaucagcucucagauugagcucgcgguccugcuuagcaaugaagggaucaucaacuccgaggaugaacaucugcucgcucuggagcgcaagcugaaaaagaugcucggaccuucugccguggacauuggcaauggguguuucgagaccaagcacaaaugcaaccagacgugccuggauagaaucgccgcuggcaccuuuaaugccggagaguucagccuucccacauuugacucccugaacauuaccgcugccagccucaaugauggccuggacaaccauacaauccugcuuuacuauucuaccgcggccuccagccucgcugucacgcugaugauugccaucuucauuguguacaugaucucucgggauaauguuuccuguagcaucugccuguga

SEQ ID NO: 219976 - RNA, 1755 nt, Artificial Sequence; identical to SEQ ID NO: 218583
  derived and/or modified CDS sequence (opt5) from hemagglutinin__InfluenzaB__AHL91673

SEQ ID NO: 219977 - RNA, 1755 nt, Artificial Sequence
  derived and/or modified CDS sequence (opt5) from hemagglutinin__InfluenzaB__AHL91684
augaaggccaucauugugcugcucauggucguuaccagcaacgcugacagaaucugcacaggcauuacguccucuaauagcccccacguggugaaaaccgccacacagggggaggucaacgugaccggagcgaucccucugacaaccacaccgaccaagucccauuucgcuaaucuuaaaggcacgaagacccgggggaaacugugucccacaugccucaacuguaccgaucuggacguugcccuuggacgcccuaugugcgugggcauuacacccucugccaaggcuagcauccugcacgaagucagaccugugaccuccggguguuuucccaucaugcaugaucggacgaagauucgccaacucccuaaucugcugagaggauacgagaaaauccggcucucuacacagaacguuauuaaugccgaaaaggcuccgggcggccccuaucgccuggggaccagcggauccugcccuaacgccacaagcaaaucuggcuucuuugcgaccauggccugggcugugcccagagacaauaacaagaccgccacaaauccucuuacgaucgaggucccccacauuuguaccaaagaagaggaucagaucacaguguggggguuccauuccgacaacaagacccagaugaagaaucuguacggagauagcaacccgcaaaaauuuacaucuuccgcuaauggcauuaccacgcacuaugugagccagaucgggggauucccugaccagacagaggauggcggccucccccagucugggcggaucgucguugacuacauggugcaaaagccuggaaaaaccggcaccauuguguaucagcgcgggauccugcuuccccagaaggucuggugcgccuccggaagaagcaaagugauuaagggcuuucugccccucaucggggaagcggauugucugcacgagaaauacggaggccugaacaaguccaagccuuauuacacaggcgaacaugccaaagcuauugggaacugcccgaucuggguuaagacaccccucaaacuggccaauggaaccaaguaccggccucccgcuaaacuucugaaggagcgcggcuucuuuggggccaucgccggauuccucgagggcgggugggaaggcaugauugcuggauggcacggcuauacgucucauggggcgcacggaguggccgucgcugccgaccuuaagagcacccaggaggccaucaacaaaauuacaaagaaucugaacucccugagcgaacucgaggugaaaaaucugcaaagacugucuggcgcuauggaugaacuccacaacgagauccuggagcuugacgaaaagguugacgaucugcgggccgacaccauuuccagccagaucgagcucgcggugcugcuuucuaaugaagggaucauuaacagcgaggaugaacaucugcucgcucuggagcgcaaacugaagaagaugcucggaccuuccgccgucgacaucggcaauggguguuuugagacaaaacacaagugcaaccagaccugccuggauagaauugccgcuggcacguucaaugccggagaauuuucucuucccaccuucgacagccugaacaucacagcugccucccucaaugaugacggccuggauaaccauaccauucugcuuuacuauagcacagcggccucuucccucgcugugacccugaugaucgccauuuucaucgucuacaugaucagccgggacaaugugucuuguuccauuugccuguga

SEQ ID NO: 219978 - RNA, 1755 nt, Artificial Sequence; identical to SEQ ID NO: 218479
  derived and/or modified CDS sequence (opt5) from hemagglutinin__InfluenzaB__AHL91695

SEQ ID NO: 219979 - RNA, 1755 nt, Artificial Sequence; identical to SEQ ID NO: 218583
  derived and/or modified CDS sequence (opt5) from hemagglutinin__InfluenzaB__AHL91706

SEQ ID NO: 219980 - RNA, 1758 nt, Artificial Sequence; identical to SEQ ID NO: 219051
  derived and/or modified CDS sequence (opt5) from hemagglutinin__InfluenzaB__AHL91717

SEQ ID NO: 219981 - RNA, 1758 nt, Artificial Sequence; identical to SEQ ID NO: 219051
  derived and/or modified CDS sequence (opt5) from hemagglutinin__InfluenzaB__AHL91728

SEQ ID NO: 219982 - RNA, 1758 nt, Artificial Sequence; identical to SEQ ID NO: 219051
  derived and/or modified CDS sequence (opt5) from hemagglutinin__InfluenzaB__AHL91739

SEQ ID NO: 219983 - RNA, 1755 nt, Artificial Sequence; identical to SEQ ID NO: 218583
  derived and/or modified CDS sequence (opt5) from hemagglutinin__InfluenzaB__AHL91750

SEQ ID NO: 219984 - RNA, 1758 nt, Artificial Sequence; identical to SEQ ID NO: 219051
  derived and/or modified CDS sequence (opt5) from hemagglutinin__InfluenzaB__AHL91761

SEQ ID NO: 219985 - RNA, 1758 nt, Artificial Sequence
  derived and/or modified CDS sequence (opt5) from hemagglutinin__InfluenzaB__AHL91772
augaaggccaucauugugcugcucauggucguuaccagcaacgcugacagaaucugcacaggcauuacguccucuaauagcccccacguggugaaaaccgccacacagggggaagucaacgugaccggaguuaucccucugacaaccacaccgaccaagucccauuucgcgaaucuuaaaggcacgaagacccgggggaaacugugucccaagugccucaacuguacagaucuggacguggcucuuggacgcccuaagugcaccggcaauauucccucugccaaagucagcauccugcacgaagugagaccuguuacauccggguguuuucccaucaugcaugaucggaccaagauucgccaacucccuaaccugcugagaggauacgagcacauccggcucucuacgcauaaugugauuaacgccgaaaaagcuccgggcggccccuauaagaucgggacaagcggauccugcccuaauauuaccaacggcaauggguucuuugccacaauggcuugggccguccccaaaaacgacaauaacaagaccgcgaccaauagccugacaaucgaggugccuuacauuuguacggaaggagaggaucagaucaccguguggggcuuccacucugacaacgagacacagauggccaaacuuuauggggauuccaaaccccagaaguuuaccagcucugcuaacggagucacaacccacuacguuucccaaaucggcggcuucccgaaucagacggaagacgggggacugccucagagcggccgcauugugguggauuauaugguccagaaaucugggaagacaggaaccaucaccuaccaaagaggcauucuccugccccagaaaguguggugcgccuccgggcggagcaagguuaucaaaggaucccuuccucugauuggcgaggcugacugucuccaugaaaaguauggcgggcugaacaagucuaaacccuacuacacaggagagcacgccaaggcgaucggcaauugccccaucugggugaaaaccccucugaagcucgccaacgggacaaaauaucgcccgcccgcuaagcugcuuaaggagagaggauuuuucggcgccauugcuggguuucuggaaggcggaugggagggcaugaucgccggguggcauggauacacgagccacggcgcccacggggucgcuguggcggccgaucucaaauccacccaggaagcuauuaauaagaucacaaagaaccugaauagccuuucugagcuggaaguuaagaaccuccagcggcuguccggagccauggacgagcugcauaaugagauucucgaacuggaugagaaaguggacgaccuucgcgccgauaccaucagcucucaaaucgaacuggcuguccuccugagcaacgagggcauuaucaauuccgaagacgagcaccuucuggcccucgagagaaagcugaagaaaaugcuggggccuucugcgguggaaauuggcaacggauguuucgagacaaagcauaaaugcaaucagaccugccucgaucggaucgcugccggcacguuugacgccggggaguucagccugcccaccuuugauucccuuaacauuacagcugccagccugaaugacgauggacucgacaaccacaccauccugcuguauuacucuacagcugccuccagccuugcggucacccucaugauugccaucuucgugguuuauauggugucucgcgauaacgucuccuguagcaucugccuguga

SEQ ID NO: 219986 - RNA, 1758 nt, Artificial Sequence; identical to SEQ ID NO: 219985
  derived and/or modified CDS sequence (opt5) from hemagglutinin__InfluenzaB__AHL91783

SEQ ID NO: 219987 - RNA, 1758 nt, Artificial Sequence; identical to SEQ ID NO: 219985
  derived and/or modified CDS sequence (opt5) from hemagglutinin__InfluenzaB__AHL91794

SEQ ID NO: 219988 - RNA, 1758 nt, Artificial Sequence
  derived and/or modified CDS sequence (opt5) from hemagglutinin__InfluenzaB__AHL91805
augaaggccaucauugugcugcucauggucguuaccagcaacgcugacagaaucugcacaggcauuacguccucuaauagcccccacguggugaaaaccgccacacagggggaggucaacgugaccggaguuaucccucugacaaccacaccgaccaagucccauuucgcgaaucuuaaaggcacgaagacccgggggaaacugugucccaagugcuuuaacuguacagaucucgacguggcucugggacgcccuaagugcaccggcaauauucccucugccgaagucagcauccuucacgaggugagaccuguuacauccggguguuuccccaucaugcaugaucggaccaaaauucgccaacugccuaaccuccugagaggauacgaacacauccggcugucuacgcauaaugugauuaacgccgagaaggcuccgggcggccccuauaaaaucgggacaagcggauccugcccuaaugucaccaacggcaauggguuuuucgccacaauggcuugggccgugcccaagaacgacaauaacaaaaccgcgaccaauagccucacaauugaagugccuuacaucuguacggagggagaggaucagauuaccgucuggggcuuucacucugacaacgaaacacagauggccaagcuguauggggauuccaagccccagaaauucaccagcucugcuaacggaguuacaacccacuacgugucccaaaucggcggcuuuccgaaucagacggaggacgggggacuuccucagagcggccgcaucguggucgauuauauggugcagaagucugggaaaacaggaaccauuaccuaccaaagaggcauccugcucccccagaagguuuggugcgccuccgggcggagcaaagugauuaagggaucccugccucuuaucggcgaagcugacugucugcaugagaaauauggcgggcucaacaagucuaagcccuacuacacaggagagcacgccaaagcgauuggcaauugccccaucugggucaagaccccucugaaacuggccaacgggacaaaguaucgcccgcccgcuaaacuccugaaggaaagaggauucuuuggcgccaucgcuggguuccuugagggcggaugggaaggcaugauugccggguggcauggauacacgagccacggcgcccacgggguggcuguugcggccgaucugaaguccacccaggaggcuaucaauaaaauuacaaagaaccucaauagccugucugaacuugaggugaaaaaccugcagcggcucuccggagccauggacgagcugcauaaugaaauccuggagcucgaugaaaaggucgacgaccugcgcgccgauaccauuagcucucaaaucgagcuugcugugcugcucagcaacgaaggcaucauuaauuccgaggacgagcaucugcuugcccuggaaagaaaacucaagaagaugcuggggccuucugcggucgagaucggcaacggauguuuugaaacaaaacacaagugcaaucagaccugccuggaucggauugcugccggcacguucgacgccggggaguuuagccuccccaccuucgauucccugaacaucacagcugccagccuuaaugacgauggacuggacaaccacaccauucuccuguauuacucuacagcugccuccagccuggcggugacccuuaugaucgccauuuucguuguguauauggucucucgcgauaacguguccuguagcaucugccucuga

SEQ ID NO: 219989 - RNA, 1758 nt, Artificial Sequence; identical to SEQ ID NO: 218491
  derived and/or modified CDS sequence (opt5) from hemagglutinin__InfluenzaB__AHL91816

SEQ ID NO: 219990 - RNA, 1758 nt, Artificial Sequence; identical to SEQ ID NO: 218491
  derived and/or modified CDS sequence (opt5) from hemagglutinin__InfluenzaB__AHL91827

SEQ ID NO: 219991 - RNA, 1755 nt, Artificial Sequence; identical to SEQ ID NO: 219098
  derived and/or modified CDS sequence (opt5) from hemagglutinin__InfluenzaB__AHL91838

SEQ ID NO: 219992 - RNA, 1755 nt, Artificial Sequence
  derived and/or modified CDS sequence (opt5) from hemagglutinin__InfluenzaB__AHL91849
augaaggccaucauugugcugcucauggucguuaccagcaacgcugacagaaucugcacaggcauuacguccucuaauagcccccacguggugaaaaccgccacacagggggaagucaacgugaccggaguuaucccucugacaaccacaccgaccaaguccuacuucgcgaaucuuaaaggcacgcggacccgcgggaagcugugucccgauugccucaacuguacagaccuggauguggcucuuggaagaccuaugugcgucggcaccacacccucugccaaagccagcauucugcaugaagcucggccugugaccuccggguguuuucccaucaugcacgaccgcacgaagaucagacaacucccuaaucugcugcggggauaugagaacauucgccucucuacacagaauguuaucgaugccgaaaacgcuccgggcggccccuacagacuggggaccagcggauccugcccuaaugccacaagcaagucuggcuucuuugcgaccauggccugggcugugcccaaagacaacaauaagaacgccaccaauccucuuacagucgaggugcccuauauuuguaaagaaggggaggaucagaucacgguguggggauuccauuccgacaacaagacccagaugaaaaaucuguacggcgauagcaacccgcaaaaguuuacaucuuccgcuaacggggucaccacacacuauguuagccagauuucuggauucccugcccagaccgaggacggcggccucccccaguccgggcggaucgugguggauuacaugguccaaaagccucgcaaaacgggaacaauuguguaucagagaggcguucugcuuccccagaagguguggugcgcgagcgggcgguccaaagucaucaagggaucucugccccucaucggcgaagccgacugucugcaugagaaauacgggggacugaauaagagcaaaccuuacuauaccggcgaacacgcuaaggccauuggcaacugcccgaucugggugaagacaccccucaaacuggcuaaugggaccaaguaccgcccucccgccaaacuucugaaggagagaggauuuuucggcgccauugcuggguuucucgagggaggcugggaagggaugaucgcgggcuggcacggauauaccucccauggcgcccacgggguugcuguggccgccgaucugaaaagcacacaggaggcuauuaacaagaucacgaagaaucuuaacucucuguccgaacucgaggucaaaaaucugcaacggcugagcggagccauggacgaacuccauaacgagauccuggagcuugacgaaaagguggaugaccugcgcgcggauaccauuucuagccagaucgagcucgcuguccugcuuuccaaugaaggcauuaucaacucugaggacgaacaucugcucgcccuggagagaaaacugaagaaaaugcucgggccuagcgccguggauauuggaaauggcuguuucgagacaaagcacaagugcaaccagaccugccuggaccggaucgcugccgggacauuuaaugcuggcgaguucucccuucccaccuuugauagccugaacaucacggccgcgucucucaaugacgauggacuggacaaccacaccauucugcuuuacuauuccacagccgcuagcucucucgccguuacccugaugcuggcuaucuucauuguguacauggucuccagagauaacgugagcuguuccaucugccucuga

SEQ ID NO: 219993 - RNA, 1755 nt, Artificial Sequence
  derived and/or modified CDS sequence (opt5) from hemagglutinin__InfluenzaB__AHL91860
augaaggccaucauugugcugcucauggucguuaccagcaacgcugacagaaucugcacaggcauuacguccucuaauagcccccacguggugaaaaccgccacacagggggaggucaacgugaccggaguuaucccucugacaaccacaccgaccaaguccuacuucgcgaaucuuaaaggcacgcggacccgcgggaagcugugucccgauugccucaacuguacagaccuggauguggcucuuggaagaccuaugugcgucggcaccacacccucugccaaagccagcauucugcaugaagugcggccuguuaccuccggguguuuucccaucaugcacgaccgcacgaagaucagacaacucccuaaucugcugcggggauaugagaacauucgccucucuacacagaaugugaucgaugcugaaaaggccccgggcggccccuacagacuggggaccagcggauccugcccuaacgcuacaagcaaaucuggcuucuuugccaccauggcgugggccguccccaaggacaauaacaaaaaugcuaccaacccucuuacaguggagauucccuauaucuguacggaaggggaggaucagauuaccguguggggauuccauuccgacaauaagacacagaugaaaaaccuguacggcgauagcaauccgcaaaaguuuaccucuuccgccaacggggucacaacccacuauguuagccagaucggaggcuucccugaccagacggaggauggcgggcucccccagucuggacggauugugguggacuacaugaugcaaaagccuggcaaaacagggaccaucgucuaucagcgcggagugcugcuuccccagaagguuuggugcgcuuccggcagaagcaaagugaucaaggggucccugccccucauuggagaagccgauugucugcaugagaaauacggcggccugaacaagucuaaaccuuacuauaccggggaacacgcgaaggccaucggaaauugcccgauuugggucaagacaccccucaaacuggcuaacggcaccaaguaccggccucccgccaaacuucugaaggagcgcggguuuuucggagcuaucgccggcuuucucgaagggggcugggagggaaugauugccggcuggcacggguauacaagccauggagcucacggcguggcgguugccgcugaccugaaauccacgcaggaggccaucaauaagaucaccaagaaccuuaauagccugucugaacucgaggugaaaaaccugcaaagacuguccggggccauggacgaacuccauaaugagauucuggagcuugaugaaaaggucgacgaucugcgggcugacacaaucagcucucagauugagcucgccgugcugcuuagcaacgaaggaaucauuaauuccgaggaugaacaucugcucgcgcuggagcgcaaacugaagaaaaugcucggcccuucugcugucgagaucgggaacggcuguuucgaaaccaagcacaagugcaaucagacaugccuggacagaaucgccgccggaaccuuuaacgcuggcgaguucagccuucccacguuugauucccugaauauuaccgccgcuagccucaacgacgaugggcuggacaaucacgccauccugcuuuacuauucuacagcggccuccagccucgcugugacccugaugcuggccauuuucaucguuuacauggugucucgggauaacgucuccuguagcauuugccucuga

SEQ ID NO: 219994 - RNA, 1755 nt, Artificial Sequence
  derived and/or modified CDS sequence (opt5) from hemagglutinin__InfluenzaB__AHL91871
augaaggccaucauugugcugcucauggucguuaccagcaacgcugacagaaucugcacaggcauuacguccucuaauagcccccacguggugaaaaccgccacacagggggaggucaacgugaccggaguuaucccucugacaaccacaccgaccaaguccuacuucgcgaaucuuaaaggcacgcggacccgcgggaagcugugucccgauugccucaacuguacagaccuggauguggcucuuggaagaccuaugugcgucggcaccacacccucugccaaagccagcauucugcaugaagugcggccuguuaccuccggguguuuucccaucaugcacgaccgcacgaagaucagacaacucccuaaucugcugcggggauaugagaacauucgccucucuacacagaaugugaucgaugcugaaaaggccccgggcggccccuacagacuggggaccagcggauccugcccuaacgcuacaagcaaaucuggcuucuuugccaccauggcgugggccguccccaaggacaauaacaaaaaugcuaccaacccucuuacaguggagauucccuauaucuguacggaaggggaggaucagauuaccguguggggauuccauuccgacaauaagacacagaugaaaaaccuguacggcgauagcaauccgcaaaaguuuaccucuuccgccaacggggucacaacccacuauguuagccagaucggaggcuucccugaccagacggaggauggcgggcucccccagucuggacggauugugguggacuacaugaugcaaaagccuggcaaaacagggaccaucgucuaucagcgcggagugcugcuuccccagaagguuuggugcgcuuccggcagaagcaaagugaucaaggggucccugccccucauuggagaagccgauugucugcaugagaaauacggcggccugaacaagucuaaaccuuacuauaccggggaacacgcgaaggccaucggaaauugcccgauuugggucaagacaccccucaaacuggcuaacggcaccaaguaccggccucccgccaaacuucugaaggagcgcggguuuuucggagcuaucgccggcuuucucgaagggggcugggagggaaugauugccggcuggcacggguauacaagccauggagcucacggcguggcgguugccgcugaccugaaauccacgcaggaggccaucaauaagaucaccaagaaccuuaauagccugucugaacucgaggugaaaaaccugcaaagacuguccggggccauggacgaacuccauaaugagauucuggagcuugaugaaaaggucgacgaucugcgggcugacacaaucagcucucagauugagcucgccgugcugcuuagcaacgaaggaaucauuaauuccgaggaugaacaucugcucgcgcuggagcgcaaacugaagaaaaugcucggcccuucugcugucgagaucgggaacggcuguuucgaaaccaagcacaagugcaaucagacaugccuggacagaaucgccgccggaaccuuuaacgcuggcgaguucagccuucccacguuugauucccugaauauuaccgccgcuagccucaacgacgaugggcuggacaaucacacaauccugcuuuacuauucuaccgccgcguccagccucgccgugacacugaugcuggcuauuuucaucguuuacauggugucucgggauaacgucuccuguagcauuugccucuga

SEQ ID NO: 219995 - RNA, 1755 nt, Artificial Sequence; identical to SEQ ID NO: 218498
  derived and/or modified CDS sequence (opt5) from hemagglutinin__InfluenzaB__AHL91882

SEQ ID NO: 219996 - RNA, 1755 nt, Artificial Sequence
  derived and/or modified CDS sequence (opt5) from hemagglutinin__InfluenzaB__AHL91904
augaaggccaucauugugcugcucauggucguuaccagcaacgcugacagaaucugcacaggcauuacguccucuaauagcccccacguggugaaaaccgccacacagggggaggucaacgugaccggaguuaucccucugacaaccacaccgaccaaguccuacuucgcgaaucuuaaaggcacgcggacccgcgggaagcugugucccgauugccucaacuguacagaccuggauguggcucuuggaagaccuaugugcgucggcaccacacccucugccaaagccagcauucugcaugaagugcggccuguuaccuccggguguuuucccaucaugcacgaccgcacgaagaucagacaacucgcuaaucugcugcggggauaugagaacauucgccucucuacacagaaugugaucgaugccgaaaaggcuccuggcggcccguacagacuggggaccagcggauccugccccaacgccacaagcaaaucuggcuucuuugcgaccauggccugggcugucccuaaggacaauaacaaaaaugccaccaacccccuuacaguggaggugccuuauauuuguacggaaggggaggaucagaucaccgucuggggauuccauuccgacaauaagacacagaugaaaaaccuguacggcgauagcaauccccaaaaguuuaccucuuccgcuaacgggguuacaacccacuaugugagccagauuggaggcuucccggaccagacggaggauggcgggcucccucagucuggacggaucguggucgacuacaugaugcaaaagcauggcaaaacagggaccauuguguaucagcgcggaguucugcuuccccagaagguguggugcgccuccggcagaagcaaagucaucaaggggucccugccucucaucggagaagcggauugucugcacgagaaauacggcggccugaacaagucuaaacccuacuauaccggggaacacgccaaggcuauuggaaauugccccaucugggugaagacaccucucaaacuggccaacggcaccaaguaccggccgcccgcuaaacuucugaaggagcgcggguuuuucggagccauugccggcuuucucgaagggggcugggaaggaaugaucgcuggcuggcauggguauacaagccacggagcgcauggcguugccguggcugccgaccugaaauccacgcaggaggccauuaauaagaucaccaagaaccuuaauagccugucugaacucgaggucaaaaaccugcaaagacuguccggggcuauggacgaacuccacaaugagauccuggagcuugaugaaaagguggacgaucugcgggccgacacaauuagcucucagaucgagcucgcgguccugcuuagcaacgaaggaauuaucaauuccgaggaugaacaucugcucgcucuggagcgcaaacugaagaaaaugcucggcccuucugccguggacauugggaacggcuguuucgagaccaagcacaagugcaaucagacaugccuggauagaaucgccgcuggaaccuuuaacgccggcgaguucagccuucccacguuugacucccugaauaucaccgcugccagccucaacgaugacgggcuggauaaucacacaauucugcuuuacuauucuaccgcggccuccagccucgcuguuacacugaugcuggccaucuucauuguguacauggucucucgggacaacguguccuguagcaucugccucuga

SEQ ID NO: 219997 - RNA, 1755 nt, Artificial Sequence
  derived and/or modified CDS sequence (opt5) from hemagglutinin__InfluenzaB__AHL91915
augaaggccaucauugugcugcucauggucguuaccagcaacgcugacagaaucugcacaggcauuacguccucuaauagcccccacguggugaaaaccgccacacagggggaggucaacgugaccggaguuaucccucugacaaccacaccgaccaaguccuacuucgcgaaucuuaaaggcacgcggacccgcgggaagcugugucccgauugccucaacuguacagaccuggauguggcucuuggaagaccuaugugcgucggcaccacacccucugccaaagccagcauucugcaugaagugcggccuguuaccuccggguguuuucccaucaugcacgaccgcacgaagaucagacaacucccuaaucugcugcggggauaugagaacauucgccucucuacacagaaugugaucgaugcugaaaaggccccgggcggccccuacagacuggggaccagcggauccugcccuaacgcuacaagcaaaucuggcuucuuugccaccauggcgugggccguccccaaggacaauuauaaaaacgcuaccaauccucuuacaguggaggugcccuacauuuguacggaaggggaggaucagaucaccgucuggggauuccauuccgacaacaagacacagaugaaaaaucuguauggcgauagcaacccgcaaaaguuuaccucuuccgccaaugggguuacaacccacuacgugagccagauuggaggcuucccugaccagacggaggauggcgggcucccccagucuggacggaucguggucgacuauaugaugcaaaagccuggcaaaacagggaccauuguguaccagcgcggaguucugcuuccccagaagguguggugcgcuuccggcagaagcaaagucaucaaggggucccugccccucaucggagaagccgauugucugcaugagaaauacggcggccugaacaagucuaaaccuuauuacaccggggaacacgcgaaggccauuggaaacugcccgaucugggugaagacaccccucaaacuggcuaauggcaccaaguaucggccucccgccaaacuucugaaggagcgcggguuuuucggagcuauugccggcuuucucgaagggggcugggaaggaaugaucgccggcuggcacggguacacaagccauggagcucacggcguugcgguggccgcugaccugaaauccacgcaggaggccauuaacaagaucaccaagaaucuuaacagccugucugaacucgaggucaaaaaucugcaaagacuguccggggccauggacgaacuccauaacgagauccuggagcuugaugaaaagguggacgaucugcgggcugacacaauuagcucucagaucgagcucgccguccugcuuagcaaugaaggaauuaucaacuccgaggaugaacaucugcucgcgcuggagcgcaaacugaagaaaaugcucggcccuucugcuguggacauugggaauggcuguuucgagaccaagcacaagugcaaccagacaugccuggauagaaucgccgccggaaccuuuaaugcuggcgaguucagccuucccacguuugacucccugaacaucaccgccgcuagccucaaugaugacgggcuggauaaccacacaauucugcuuuauuacucuaccgccgcguccagccucgccguuacacugaugcuggcuaucuucauuguguauauggucucucgggacaauguguccuguagcaucugccucuga

SEQ ID NO: 219998 - RNA, 1755 nt, Artificial Sequence; identical to SEQ ID NO: 219096
  derived and/or modified CDS sequence (opt5) from hemagglutinin__InfluenzaB__AHL91926

SEQ ID NO: 219999 - RNA, 1755 nt, Artificial Sequence; identical to SEQ ID NO: 219671
  derived and/or modified CDS sequence (opt5) from hemagglutinin__InfluenzaB__AHL91937

SEQ ID NO: 220000 - RNA, 1755 nt, Artificial Sequence; identical to SEQ ID NO: 218498
  derived and/or modified CDS sequence (opt5) from hemagglutinin__InfluenzaB__AHL91948

SEQ ID NO: 220001 - RNA, 1758 nt, Artificial Sequence
  derived and/or modified CDS sequence (opt5) from hemagglutinin__InfluenzaB__AHL91959
augaaggccaucauugugcugcucauggucguuaccagcaacgcugacagaaucugcacaggcauuacguccucuaauagcccccacguggugaaaaccgccacacagggggaggucaacgugaccggaguuaucccucugacaaccacaccgaccaagucccauuucgcgaaucuuaaaggcacgaagacccgggggaaacugugucccaagugccucaacuguacagaucuggacguggcucuuggacgcccuaagugcaccggcaauauucccucugccgaagucagcauccugcacgaggugagaccuguuacauccggguguuuucccaucaugcaugaucggaccaaaauucgccaacucccuaaccugcugagaggauacgaacacauccggcucucuacgcauaaugugauuaacgccgagaaggcuccgggcggccccuauaaaaucgggacaagcggauccugcccuaaugucaccaacggcaauggguucuuugccacaauggcuugggccgugcccaagaacgacaauaacaaaaccgcgaccaauagccugacaauugaagugccuuacaucuguacggagggagaggaucagauuaccaucuggggcuuccacucugacaacgaaacacagauggccaaacuuuauggggauuccaagccccagaaguuuaccagcucugcuaacggagucacaacccacuacguuucccaaaucggcggcuucccgaaucagacggaggacgggggacugccucagagcggccgcauugugguggauuauaugguccagaagucugggaaaacaggaaccaucaccuaccaaagaggcauucuccugccccagaagguguggugcgccuccgggcggagcaaaguuaucaagggaucccuuccucugauuggcgaagcugacugucuccaugagaaauauggcgggcugaacaagucuaagcccuacuacacaggagagcacgccaaagcgaucggcaauugccccaucugggugaagaccccucugaaacucgccaacgggacaaaguaucgcccgcccgcuaaacugcuuaaggaaagaggauuuuucggcgccauugcuggguuucuggagggcggaugggaaggcaugaucgccggguggcauggauacacgagccacggcgcccacggggucgcuguggcggccgaucucaaguccacccaggaggcuauuaauaaaaucacaaagaaccugaauagccuuucugaacuggagguuaaaaaccuccagcggcuguccggagccauggacgagcugcauaaugaaauucucgagcuggaugaaaagguggacgaccuucgcgccgauaccaucagcucucaaaucgagcuggcuguccuccugagcaacgaaggcauuaucaauuccgaggacgagcaccuucuggcccucgaaagaaaacugaagaagaugcuggggccuucugcgguggagauuggcaacggauguuucgaaacaaaacauaagugcaaucagaccugccucgaucggaucgcugccggcacguuugacgccggggaguucagccugcccaccuuugauucccuuaacauuacagcugccagcuucaaugacgauggacuggacaaccacaccauccuccuguauuacucuacagcugccuccagccuggcggucacccuuaugauugccaucuucgugguuuauauggugucucgcgauaacgucuccuguagcaucugccucuga

SEQ ID NO: 220002 - RNA, 1758 nt, Artificial Sequence; identical to SEQ ID NO: 218710
  derived and/or modified CDS sequence (opt5) from hemagglutinin__InfluenzaB__AHL91970

SEQ ID NO: 220003 - RNA, 1755 nt, Artificial Sequence
  derived and/or modified CDS sequence (opt5) from hemagglutinin__InfluenzaB__AHL91991
augaaggccaucauugugcugcucauggucguuaccagcaacgcugacagaaucugcacaggcauuacguccucuaauagcccccacguggugaaaaccgccacacagggggaggucaacgugaccggaguuaucccucugacaaccacaccgaccaaguccuacuucgcgaaucuuaaaggcacgcggacccgcgggaagcugugucccgauugccucaacuguacagaccuggauguggcucuuggaagaccuaugugcgucggcaccacacccucugccaaagccagcauucugcaugaagugcggccuguuaccuccggguguuuucccaucaugcacgaccgcacgaagaucagacaacucgcuaaucugcugcggggauaugagaacauucgccucucuacacagaaugugaucgaugccgaaaaggcuccuggcggcccguacagacuggggaccagcggauccugccccaacgccacaaauaaaagcggcuucuuugcgaccauggccugggcugucccuaaggacaacaauaaaaacgccaccaauccccuuacaguggaggugccuuauauuuguacggaaggggaggaucagaucaccgucuggggauuccauucugacaacaagacacagaugaaaaaucuguacggcgauuccaacccccaaaaguuuaccagcucugcuaacgggguuacaacccacuaugugucccagauuggaggcuucccggaccagacggaggauggcgggcucccucagagcggacggaucguggucgacuacaugaugcaaaagcccggcaaaacagggaccauuguguaucagcgcggaguucugcuuccucagaagguguggugcgccucuggcagauccaaagucaucaaggggagccugccccucaucggagaagcggauugucugcaugagaaauacggcggccugaauaaguccaaacccuacuauaccggggaacacgccaaggcuauuggaaacugcccuaucugggugaagacaccgcucaaacuggccaauggcaccaaguaccggcccccugcuaaacuucugaaggagcgcggguuuuucggagccauugccggcuuucucgaagggggcugggaaggaaugaucgcuggcuggcacggguauacaucucauggagcgcacggcguugccguggcugccgaccugaaaagcacgcaggaggccauuaacaagaucaccaagaaucuuaacucccugagcgaacucgaggucaaaaaucugcaaagacugucuggggcuauggacgaacuccauaacgagauccuggagcuugaugaaaagguggacgaucugcgggccgacacaauuuccagccagaucgagcucgcgguccugcuuucuaaugaaggaauuaucaacagcgaggaugaacaucugcucgcucuggagcgcaaacugaagaaaaugcucggccccuccgccguggacauugggaauggcuguuucgagaccaagcacaagugcaaccagacaugccuggauagaaucgccgcuggaaccuuuaaugccggcgaguucucucuuccuacguuugacagccugaacaucaccgcugccucccucaaugaugacgggcuggauaaccacacaauucugcuuuacuauagcaccgcggccucuucccucgcuguuacacugaugcuggccaucuucauuguguacauggucagccgggacaacgugucuuguuccaucugccucuga

SEQ ID NO: 220004 - RNA, 1758 nt, Artificial Sequence; identical to SEQ ID NO: 218586
  derived and/or modified CDS sequence (opt5) from hemagglutinin__InfluenzaB__AHL92002

SEQ ID NO: 220005 - RNA, 1758 nt, Artificial Sequence; identical to SEQ ID NO: 218586
  derived and/or modified CDS sequence (opt5) from hemagglutinin__InfluenzaB__AHL92013

SEQ ID NO: 220006 - RNA, 1758 nt, Artificial Sequence; identical to SEQ ID NO: 218586
  derived and/or modified CDS sequence (opt5) from hemagglutinin__InfluenzaB__AHL92024

SEQ ID NO: 220007 - RNA, 1758 nt, Artificial Sequence; identical to SEQ ID NO: 218586
  derived and/or modified CDS sequence (opt5) from hemagglutinin__InfluenzaB__AHL92035

SEQ ID NO: 220008 - RNA, 1758 nt, Artificial Sequence; identical to SEQ ID NO: 218586
  derived and/or modified CDS sequence (opt5) from hemagglutinin__InfluenzaB__AHL92046

SEQ ID NO: 220009 - RNA, 1758 nt, Artificial Sequence; identical to SEQ ID NO: 218586
  derived and/or modified CDS sequence (opt5) from hemagglutinin__InfluenzaB__AHL92057

SEQ ID NO: 220010 - RNA, 1758 nt, Artificial Sequence
  derived and/or modified CDS sequence (opt5) from hemagglutinin__InfluenzaB__AHL92068
augaaggccaucauugugcugcucauggucguuaccagcaacgcugacagaaucugcacaggcauuacguccucuaauagcccccacguggugaaaaccgccacacagggggaggucaacgugaccggaguuaucccucugacaaccacaccgaccaagucccauuucgcgaaucuuaaaggcacggaaacccgggggaagcugugucccaaaugccucaacuguacagaucuggacguggcucuuggacgcccuaagugcaccggcaauauucccucugccagagucagcauccugcacgaggugcggccuguuacauccggguguuuucccaucaugcaugaucgcaccaagauuagacaacucccuaaccugcugcggggauacgaacacauccgccucucuacgcauaaugugauuaacgccgagaaugcuccgggcggccccuauaaaaucgggacaagcggauccugcccuaacauuaccaauggcaacggguucuuugccacaauggcuugggccguccccaagaaugacaacaauaaaaccgcgaccaacagccugacaaucgaagugccuuacauuuguacggagggagaggaucagaucaccguguggggcuuccacucugacaacgaaacacagauggccaaacuuuauggggauuccaagccccagaaguuuaccagcucugcuaauggagucacaacccacuacguuucccaagugggcggcuucccgaaccagacggaggacgggggacugccucagagcggcagaaucguggucgauuauauggugcagaagucugggaaaacaggaaccauuaccuaccaacggggcauccuccugccccagaagguuuggugcgccuccgggcgcagcaaagugauuaagggaucccuuccucugaucggcgaagcugacugucuccaugagaaauauggcgggcugaauaagucuaaacccuacuacacaggagagcacgccaaggcgauuggcaacugccccaucugggucaagaccccucugaaacucgccaaugggacaaaguauagaccgcccgcuaaacugcuuaaggaacggggauuuuucggcgccaucgcuggguuucuggagggcggaugggaaggcaugauugccggguggcauggauacacgagccacggcgcccacgggguggcuguugcggccgaucucaaauccacccaggaggcuaucaacaagauuacaaagaaucugaacagccuuucugaacuggaggugaaaaaucuccagcgccuguccggagccauggacgagcugcauaacgaaauccucgagcuggaugaaaaggucgacgaccuuagagccgauaccauuagcucucaaaucgagcuggcugugcuccugagcaaugaaggcaucauuaacuccgaggacgagcaccuucuggcccucgaacggaaacugaagaaaaugcuggggccuucugcggucgagaucggcaauggauguuucgaaacaaagcauaagugcaaccagaccugccucgaucgcauugcugccggcacguuugacgccggggaguucagccugcccaccuuugauucccuuaauaucacagcugccagccugaacgacgauggacucgacaaccacaccauucugcuguauuacucuacagcugccuccagccuugcggugacccucaugaucgccauuuucguuguguauauggucucuagagauaauguguccuguagcaucugccuguga

SEQ ID NO: 220011 - RNA, 1758 nt, Artificial Sequence
  derived and/or modified CDS sequence (opt5) from hemagglutinin__InfluenzaB__AHL92079
augaaggccaucauugugcugcucauggucguuaccagcaacgcugacagaaucugcacaggcauuacguccucuaauagcccccacguggugaaaaccgccacacagggggaggucaacgugaccggaguuaucccucugacaaccacaccgaccaagucccauuucgcgaaucuuaaaggcacggaaacccgggggaagcugugucccaaaugccucaacuguacagaucuggacguggcucuuggacgcccuaagugcaccggcaauauucccucugccagagucagcauccugcacgaggugcggccuguuacauccggguguuuucccaucaugcaugaucgcaccaagauuagacaacucccuaaccugcugcggggauacgaacacauccgccucucuacgcauaaugugauuaacgccgagaaugcuccgggcggccccuauaaaaucgggacaagcggauccugcccuaacauuaccaauggcaacggguucuuugccacaauggcuugggccguccccaagaaugacaacaauaaaaccgcgaccaacagccugacaaucgaagugccuuacauuuguacggagggagaggaucagaucaccguguggggcuuccacucugacaacgaaacacagauggccaaacuuuauggggauuccaagccccagaaguuuaccagcucugcuaauggagucacaacccacuacguuucccaaaucggcggcuucccgaaccagacggaggacgggggacugccucagagcggcagaauugugguggauuauaugguccagaagucugggaaaacaggaaccaucaccuaccaacggggcauucuccugccccagaagguguggugcgccuccgggcgcagcaaaguuaucaagggaucccuuccucugauuggcgaagcugacugucuccaugagaaauauggcgggcugaauaagucuaaacccuacuacacaggagagcacgccaaggcgaucggcaacugccccaucugggugaagaccccucugaaacucgccaaugggacaaaguauagaccgcccgcuaaacugcuuaaggaacggggauuuuucggcgccauugcuggguuucuggagggcggaugggaaggcaugaucgccggguggcauggauacacgagccacggcgcccacggggucgcuguggcggccgaucucaaauccacccaggaggcuauuaacaagaucacaaagaaucugaacagccuuucugaacuggagguuaaaaaucuccagcgccuguccggagccauggacgagcugcauaacgaaauucucgagcuggaugaaaagguggacgaccuuagagccgauaccaucagcucucaaaucgagcuggcuguccuccugagcaaugaaggcauuaucaacuccgaggacgagcaccuucuggcccucgaacggaaacugaagaaaaugcuggggccuucugcgguggagauuggcaauggauguuucgaaacaaagcauaagugcaaccagaccugccucgaucgcaucgcugccggcacguuugacgccggggaguucagccugcccaccuuugauucccuuaauauuacagcugccagccugaacgacgauggacucgacaaccacaccauccugcuguauuacucuacagcugccuccagccuugcggucacccucaugauugccaucuucgugguuuauauggugucuagagauaaugucuccuguagcaucugccuguga

SEQ ID NO: 220012 - RNA, 1758 nt, Artificial Sequence; identical to SEQ ID NO: 220011
  derived and/or modified CDS sequence (opt5) from hemagglutinin__InfluenzaB__AHL92090

SEQ ID NO: 220013 - RNA, 1758 nt, Artificial Sequence; identical to SEQ ID NO: 218586
  derived and/or modified CDS sequence (opt5) from hemagglutinin__InfluenzaB__AHL92101

SEQ ID NO: 220014 - RNA, 1755 nt, Artificial Sequence; identical to SEQ ID NO: 218639
  derived and/or modified CDS sequence (opt5) from hemagglutinin__InfluenzaB__AHL92112

SEQ ID NO: 220015 - RNA, 1758 nt, Artificial Sequence; identical to SEQ ID NO: 218586
  derived and/or modified CDS sequence (opt5) from hemagglutinin__InfluenzaB__AHL92123

SEQ ID NO: 220016 - RNA, 1758 nt, Artificial Sequence; identical to SEQ ID NO: 220011
  derived and/or modified CDS sequence (opt5) from hemagglutinin__InfluenzaB__AHL92134

SEQ ID NO: 220017 - RNA, 1758 nt, Artificial Sequence; identical to SEQ ID NO: 220011
  derived and/or modified CDS sequence (opt5) from hemagglutinin__InfluenzaB__AHL92145

SEQ ID NO: 220018 - RNA, 1758 nt, Artificial Sequence; identical to SEQ ID NO: 218586
  derived and/or modified CDS sequence (opt5) from hemagglutinin__InfluenzaB__AHL92156

SEQ ID NO: 220019 - RNA, 1758 nt, Artificial Sequence; identical to SEQ ID NO: 220011
  derived and/or modified CDS sequence (opt5) from hemagglutinin__InfluenzaB__AHL92167

SEQ ID NO: 220020 - RNA, 1758 nt, Artificial Sequence; identical to SEQ ID NO: 218586
  derived and/or modified CDS sequence (opt5) from hemagglutinin__InfluenzaB__AHL92178

SEQ ID NO: 220021 - RNA, 1758 nt, Artificial Sequence; identical to SEQ ID NO: 218586
  derived and/or modified CDS sequence (opt5) from hemagglutinin__InfluenzaB__AHL92189

SEQ ID NO: 220022 - RNA, 1755 nt, Artificial Sequence; identical to SEQ ID NO: 218639
  derived and/or modified CDS sequence (opt5) from hemagglutinin__InfluenzaB__AHL92200

SEQ ID NO: 220023 - RNA, 1758 nt, Artificial Sequence; identical to SEQ ID NO: 218586
  derived and/or modified CDS sequence (opt5) from hemagglutinin__InfluenzaB__AHL92211

SEQ ID NO: 220024 - RNA, 1758 nt, Artificial Sequence; identical to SEQ ID NO: 218586
  derived and/or modified CDS sequence (opt5) from hemagglutinin__InfluenzaB__AHL92222

SEQ ID NO: 220025 - RNA, 1755 nt, Artificial Sequence; identical to SEQ ID NO: 219901
  derived and/or modified CDS sequence (opt5) from hemagglutinin__InfluenzaB__AHL92233

SEQ ID NO: 220026 - RNA, 1758 nt, Artificial Sequence; identical to SEQ ID NO: 220011
  derived and/or modified CDS sequence (opt5) from hemagglutinin__InfluenzaB__AHL92244

SEQ ID NO: 220027 - RNA, 1758 nt, Artificial Sequence; identical to SEQ ID NO: 218586
  derived and/or modified CDS sequence (opt5) from hemagglutinin__InfluenzaB__AHL92255

SEQ ID NO: 220028 - RNA, 1758 nt, Artificial Sequence; identical to SEQ ID NO: 218586
  derived and/or modified CDS sequence (opt5) from hemagglutinin__InfluenzaB__AHL92266

SEQ ID NO: 220029 - RNA, 1758 nt, Artificial Sequence
  derived and/or modified CDS sequence (opt5) from hemagglutinin__InfluenzaB__AHL92277
augaaggccaucauugugcugcucauggucguuaccagcaacgcugacagaaucugcacaggcauuacguccucuaauagcccccacguggugaaaaccgccacacagggggaggucaacgugaccggaguuaucccucugacaaccacaccgaccaagucccauuucgcgaaucuuaaaggcacggaaacccgggggaagcugugucccaaaugccucaacuguacagaucuggacguggcucuuggacgcccuaagugcaccggcaauauucccucugccagagucagcauccugcacgaggugcggccuguuacauccggguguuuucccaucaugcaugaucgcaccaagauuagacaacucccuaaccugcugcggggauacgaacacauccgccucucuacgcauaaugugauuaacgccgagaaugcuccgggcggccccuauaaaaucgggacaagcggauccugcccuaacgucaccaauggcaacggguucuuugccacaauggcuugggccgugcccaagaaugacaacaauaaaaccgcgaccaacagccugacaauugaagugccuuacaucuguacggagggagaggaucagauuaccgucuggggcuuccacucugacaacgaaacacagauggccaaacuuuauggggauuccaagccccagaaguuuaccagcucugcuaauggaguuacaacccacuacgugucccaaaucggcggcuucccgaaccagacggaggacgggggacugccucagagcggcagaaucguggucgauuauauggugcagaagucugggaaaacaggaaccauuaccuaccaacggggcauccuccugccccagaagguuuggugcgccuccgggcgcagcaaagugauuaagggaucccuuccucugaucggcgaagcugacugucuccaugagaaauauggcgggcugaauaagucuaaacccuacuacacaggagagcacgccaaggcgauuggcaacugccccaucugggucaagaccccucugaaacucgccaaugggacaaaguauagaccgcccgcuaaacugcuuaaggaacggggauuuuucggcgccaucgcuggguuucuggagggcggaugggaaggcaugauugccggguggcauggauacacgagccacggcgcccacgggguggcuguugcggccgaucucaaauccacccaggaggcuaucaacaagauuacaaagaaucugaacagccuuucugaacuggaggugaaaaaucuccagcgccuguccggagccauggacgagcugcauaacgaaauccucgagcuggaugaaaaggucgacgaccuuagagccgauaccauuagcucucaaaucgagcuggcugugcuccugagcaaugaaggcaucauuaacuccgaggacgagcaccuucuggcccucgaacggaaacugaagaaaaugcuggggccuucugcggucgagaucggcaauggauguuucgaaacaaagcauaagugcaaccagaccugccucgaucgcauugcuacgggcaccuuugacgccggggaguucagccugcccacauuugauucccuuaauaucaccgccgcuagccugaacgacgauggacucgacaaccacacaauucugcuguauuacucuaccgccgcuuccagccuugccgugacgcucaugaucgcgauuuucguuguguauauggucucuagagauaauguguccuguagcaucugccuguga

SEQ ID NO: 220030 - RNA, 1758 nt, Artificial Sequence; identical to SEQ ID NO: 218586
  derived and/or modified CDS sequence (opt5) from hemagglutinin__InfluenzaB__AHL92288

SEQ ID NO: 220031 - RNA, 1758 nt, Artificial Sequence; identical to SEQ ID NO: 218586
  derived and/or modified CDS sequence (opt5) from hemagglutinin__InfluenzaB__AHL92299

SEQ ID NO: 220032 - RNA, 1755 nt, Artificial Sequence; identical to SEQ ID NO: 219704
  derived and/or modified CDS sequence (opt5) from hemagglutinin__InfluenzaB__AHL92310

SEQ ID NO: 220033 - RNA, 1755 nt, Artificial Sequence; identical to SEQ ID NO: 218639
  derived and/or modified CDS sequence (opt5) from hemagglutinin__InfluenzaB__AHL92321

SEQ ID NO: 220034 - RNA, 1755 nt, Artificial Sequence; identical to SEQ ID NO: 218639
  derived and/or modified CDS sequence (opt5) from hemagglutinin__InfluenzaB__AHL92332

SEQ ID NO: 220035 - RNA, 1755 nt, Artificial Sequence
  derived and/or modified CDS sequence (opt5) from hemagglutinin__InfluenzaB__AHL92354
augaaggccaucauugugcugcucauggucguuaccagcaacgcugacagaaucugcacaggcauuacguccucuaauagcccccacguggugaaaaccgccacacagggggaggucaacgugaccggaguuaucccucugacaaccacaccgaccaaguccuacuucgcgaaucuuaaaggcacgcggacccgcgggaagcugugucccgauugccucaacuguacagaccuggauguggcucuuggaagaccuaugugcgucggcauuacccccucugccaaagccagcauccugcaugaagugcggccuguuacauccggguguuuucccaucaugcacgaccgcaccaagauuagacaacucgcuaaucugcugcggggauaugagaacauccgccucucuacgcagaauguggucgaugccgaaaaggcuccuggcggcccguacagacuggggacaagcggauccugccccaacgccaccagcaaaucuggcuucuuugcgacaauggccugggcugugccuaaggacaauaacaaaaaugccaccaacccccuuaccguggaggucccuuauauuuguacagaaggggaggaucagaucacgguuuggggauuccauuccgacaauaagacccagaugaaaaaccuguacggcgauagcaauccccaaaaguuuacaucuuccgcuaacggggugaccacacacuaugugagccagauuggaggcuucccggaccagaccgaggauggcgggcucccucagucuggacggaucgucguggacuacaugaugcaaaagcccggcaaaacggggacaauuguuuaucagcgcggagugcugcuuccucagaaggucuggugcgccuccggcagaagcaaagugaucaaggggucccugccccucaucggagaagcggauugucugcaugagaaauacggcggccugaacaagucuaaacccuacuauaccggggaacacgccaaggcuauuggaaauugcccuaucuggguuaagaccccgcucaaacuggccaacggcacaaaguaccggcccccugcuaaacuucugaaggagcgcggguuuuucggagccauugccggcuuucucgaagggggcugggaaggaaugaucgcuggcuggcacggguauaccagccauggagcgcacggcguggccgucgcugccgaccugaaauccacacaggaggccauuaauaagaucacgaagaaccuuaauagccugucugaacucgaggugaaaaaccugcaaagacuguccggggcuauggacgaacuccauaaugagauccuggagcuugaugaaaaggucgacgaucugcgggccgacaccauuagcucucagaucgagcucgcggugcugcuuagcaacgaaggaauuaucaauuccgaggaugaacaucugcucgcucuggagcgcaaacugaagaaaaugcucggccccucugccguugacauugggaacggcuguuucgagacaaagcacaagugcaaucagaccugccuggauagaaucgccgcuggaacauuuaacgccggcgaguucagccuuccuaccuuugacucccugaauaucacggcugccagccucaacgaugacgggcuggauaaucacaccauucugcuuuacuauucuacagcggccuccagccucgcugugacccugaugcuggccaucuucauugucuacauggugucucgggacaacguuuccuguagcaucugccucuga

SEQ ID NO: 220036 - RNA, 1755 nt, Artificial Sequence; identical to SEQ ID NO: 220035
  derived and/or modified CDS sequence (opt5) from hemagglutinin__InfluenzaB__AHL92365

SEQ ID NO: 220037 - RNA, 1755 nt, Artificial Sequence; identical to SEQ ID NO: 218892
  derived and/or modified CDS sequence (opt5) from hemagglutinin__InfluenzaB__AHL92376

SEQ ID NO: 220038 - RNA, 1755 nt, Artificial Sequence; identical to SEQ ID NO: 218892
  derived and/or modified CDS sequence (opt5) from hemagglutinin__InfluenzaB__AHL92387

SEQ ID NO: 220039 - RNA, 1755 nt, Artificial Sequence; identical to SEQ ID NO: 218892
  derived and/or modified CDS sequence (opt5) from hemagglutinin__InfluenzaB__AHL92398

SEQ ID NO: 220040 - RNA, 1755 nt, Artificial Sequence; identical to SEQ ID NO: 218892
  derived and/or modified CDS sequence (opt5) from hemagglutinin__InfluenzaB__AHL92409

SEQ ID NO: 220041 - RNA, 1755 nt, Artificial Sequence; identical to SEQ ID NO: 218892
  derived and/or modified CDS sequence (opt5) from hemagglutinin__InfluenzaB__AHL92420

SEQ ID NO: 220042 - RNA, 1755 nt, Artificial Sequence; identical to SEQ ID NO: 218639
  derived and/or modified CDS sequence (opt5) from hemagglutinin__InfluenzaB__AHL92431

SEQ ID NO: 220043 - RNA, 1755 nt, Artificial Sequence; identical to SEQ ID NO: 218892
  derived and/or modified CDS sequence (opt5) from hemagglutinin__InfluenzaB__AHL92442

SEQ ID NO: 220044 - RNA, 1755 nt, Artificial Sequence; identical to SEQ ID NO: 218892
  derived and/or modified CDS sequence (opt5) from hemagglutinin__InfluenzaB__AHL92453

SEQ ID NO: 220045 - RNA, 1755 nt, Artificial Sequence; identical to SEQ ID NO: 218892
  derived and/or modified CDS sequence (opt5) from hemagglutinin__InfluenzaB__AHL92464

SEQ ID NO: 220046 - RNA, 1755 nt, Artificial Sequence
  derived and/or modified CDS sequence (opt5) from hemagglutinin__InfluenzaB__AHL92475
augaaggccaucauugugcugcucauggucguuaccagcaacgcugacagaaucugcacaggcauuacguccucuaauagcccccacguggugaaaaccgccacacagggggaagucaacgugaccggaguuaucccucugacaaccacaccgaccaaguccuacuucgcgaaucuuaaaggcacgcggacccgcgggaagcugugucccgauugccucaacuguacagaccuggauguggcucuuggaagaccuaugugcgucggcaccacacccucugccaaagccagcauucugcaugaagugcggccuguuaccuccggguguuuucccaucaugcacgaccgcacgaagaucagacaacucccuaaucugcugcggggauaugagaacauucgccucucuacacagaaugugaucgaugcugaaaaggccccgggcggccccuacagacuggggaccagcggauccugcccuaacgcuacaagcaaaauuggcuucuuugccaccauggcgugggccguccccaaggacaauuauaaaaacgcuaccaauccucuuacaguggaggugcccuacaucuguacggaaggggaggaucagauuaccgucuggggauuccauucugacaacaagacacagaugaaaaaucuguauggcgauuccaacccgcaaaaguuuaccagcucugccaaugggguuacaacccacuacgugucccagaucggagacuucccugaucagacggaggacggcggccucccccagagcgggcggauuguggucgauuauaugaugcaaaagccuggaaaaacaggcaccaucguguaccagcgcgggguucugcuuccccagaagguguggugcgcuucuggaagauccaaagucaucaagggcagccugccccucauuggggaagccgacugucugcaugagaaauacggaggccugaacaaguccaaaccuuauuacaccggcgaacacgcgaaggccaucgggaacugcccgauuugggugaagacaccccucaaacuggcuaauggaaccaaguaucggccucccgccaaacuucugaaggagcgcggcuuuuucggggcuaucgccggauuucucgagggcgggugggaaggcaugauugccggauggcacggcuacacaucucauggggcucacggaguugcgguggccgcugaccugaaaagcacgcaggaggccaucaacaagaucaccaagaaucuuaacucccugagcgaacucgaggucaaaaaucugcaaagacugucuggcgccauggaugaacuccauaacgagauucuggagcuugacgaaaagguggaugaccugcgggcugauacaaucuccagccagauugagcucgccguccugcuuucuaaugaagggaucauuaacagcgaggacgaacaucugcucgcgcuggagcgcaaacugaagaaaaugcucggaccuuccgcuguggauaucggcaauggguguuucgagaccaagcacaagugcaaccaggccugccuggacagaaucgccgcuggcacauuuaaugccggagaguucucucuucccaccuuugauagccugaacauuacggcugccucccucaaugacgauggccuggacaaccacaccauccugcuuuauuacagcacagcggccucuucccucgcuguuacccugaugcuggccauuuucaucguguauauggucagccgggacaaugugucuuguuccauuugccucuga

SEQ ID NO: 220047 - RNA, 1755 nt, Artificial Sequence; identical to SEQ ID NO: 218639
  derived and/or modified CDS sequence (opt5) from hemagglutinin__InfluenzaB__AHL92486

SEQ ID NO: 220048 - RNA, 1755 nt, Artificial Sequence; identical to SEQ ID NO: 218892
  derived and/or modified CDS sequence (opt5) from hemagglutinin__InfluenzaB__AHL92497

SEQ ID NO: 220049 - RNA, 1755 nt, Artificial Sequence; identical to SEQ ID NO: 218892
  derived and/or modified CDS sequence (opt5) from hemagglutinin__InfluenzaB__AHL92508

SEQ ID NO: 220050 - RNA, 1755 nt, Artificial Sequence; identical to SEQ ID NO: 218892
  derived and/or modified CDS sequence (opt5) from hemagglutinin__InfluenzaB__AHL92519

SEQ ID NO: 220051 - RNA, 1755 nt, Artificial Sequence; identical to SEQ ID NO: 218892
  derived and/or modified CDS sequence (opt5) from hemagglutinin__InfluenzaB__AHL92530

SEQ ID NO: 220052 - RNA, 1755 nt, Artificial Sequence; identical to SEQ ID NO: 218639
  derived and/or modified CDS sequence (opt5) from hemagglutinin__InfluenzaB__AHL92541

SEQ ID NO: 220053 - RNA, 1752 nt, Artificial Sequence
  derived and/or modified CDS sequence (opt5) from hemagglutinin__InfluenzaB__AHL92563
augaaggccaucauugugcugcucauggucguuaccagcaacgcugacagaaucugcacaggcauuacguccucuaauagcccccacguggugaaaaccgccacacagggggaagucaacgugaccggaguuaucccucugacaaccacaccgaagaaauccuacuucgcgaaucuuaagggcacccggacgcgcgggaaacugugucccgauugccucaacuguaccgaccuggauguggcucuuggaagaccuaugugcgucggcacaacccccucugccaaggccagcauucugcaugaagugcggccuguuacauccggguguuuucccaucaugcacgaccgcaccaagaucagacaacucccuaaucugcugcggggauaugagaacauucgccucucuacgcagaaugugaucgaugcugaaaaagccccgggcggccccuacagacuggggacaagcggauccugcccuaacgcuaccagcaagauuggcuucuuugccacaauggcgugggccguccccaaagacaauuauaagaacgcuaccaauccucuuaccguggaggugcccuacaucuguacagaaggggaggaucagauuacggucuggggauuccauucugacaacaaaacccagaugaagaaucuguauggcgauuccaacccgcaaaaguuuacaagcucugccaaugggguuaccacacacuacgugucccagaucggagacuucccugaucagaccgaggacggcggccucccccagagcgggcggauuguggucgauuauaugaugcaaaaaccuggaaagacgggcacaaucguguaccagcgcgggguucugcuuccccagaaaguguggugcgcuucuggaagauccaaggucaucaaaggcagccugccccucauuggggaagccgacugucugcaugagaaguacggaggccugaacaaauccaagccuuauuacaccggcgaacacgcgaaggccaucgggaacugcccgauuugggugaaaacaccccucaagcuggcuaauggaaccaaauaucggccucccgccaagcugcugaaagagcgcggcuuuuucggggcuaucgccggauuucucgagggcgggugggaaggcaugauugccggauggcacggcuacaccucucauggggcucacggaguugcgguggccgcugaccuuaagagcacacaggaggccaucaacaagaucacgaaaaaucuuaacucccugagcgaacucgaggucaagaaucugcaaagacugucuggcgccauggaugaacuccauaacgagauucuggagcuugacgaaaaaguggaugaccugcgggcugauaccaucuccagccagauugagcucgccguccugcuuucuaaugaagggaucauuaacagcgaggacgaacaucugcucgcgcuggagcgcaagcugaaaaagaugcucggaccuuccgcuguggauaucggcaauggguguuucgagacaaagcacaaaugcaaccagaccugccuggacagaaucgccgccggcacauuuaaugcuggagaguucucucuucccaccuuugauagccugaacauuacggccgcuucccucaaugacggccuggauaaccacaccauccugcuuuauuacagcacagccgcgucuucccucgccguuacccugaugcuggcuauuuucaucguguauauggucagccgggacaaugugucuuguuccauuugccucuga

SEQ ID NO: 220054 - RNA, 1755 nt, Artificial Sequence; identical to SEQ ID NO: 218892
  derived and/or modified CDS sequence (opt5) from hemagglutinin__InfluenzaB__AHL92574

SEQ ID NO: 220055 - RNA, 1755 nt, Artificial Sequence
  derived and/or modified CDS sequence (opt5) from hemagglutinin__InfluenzaB__AHL92585
augaaggccaucauugugcugcucauggucguuaccagcaacgcugacagaaucugcacaggcauuacguccucuaauagcccccacguggugaaaaccgccacacagggggaggucaacgugaccggaguuaucccucugacaaccacaccgaccaaguccuacuucgcgaaucuuaaaggcacgcggacccgcgggaagcugugucccgauugccucaacuguacagaccuggauguggcucuuggaagaccuaugugcgucggcgccacccccucugccaaagcuagcauucugcaugaagugcggccuguuacauccggguguuuucccaucaugcacgaccgcaccaagaucagacaacucccuaaucugcugcggggauaugagaacauucgccucucuacgcagaaugugaucgaugccgaaaaggcuccgggcggccccuacagacuggggacaagcggauccugcccuaacgccaccagcaaaucuggcuucuuugcgacaauggccugggcuguccccaaggacaauaacaaaaaugccaccaacccucuuaccguggaggugcccuauauuuguacagaaggggaggaucagaucacggucuggggauuccauuccgacaauaagacccagaugaaaaaccuguacggcgauagcaauccgcaaaaguuuacaucuuccgcuaacgggguuaccacacacuaugugagccagauuggaucuuucccugaccagaccgaggauggcggccucccccaguccgggcggaucguggucgacuacaugaugcaaaagccuggaaaaacgggcacaauuguguaucagcgcgggguucugcuuccccagaagguguggugcgccagcggaagauccaaagucaucaagggcucucugccccucaucggggaagcggauugucugcaugagaaauacggaggccugaacaagagcaaaccuuacuauaccggcgaacacgccaaggcuauugggaauugcccgaucugggugaagacaccccucaaacuggccaacggaaccaaguaccggccucccgcuaaacuucugaaggagcgcggcuuuuucggggccauugccggauuucucgagggcgggugggaaggcaugaucgcuggauggcacggcuauaccucccauggggcgcacggaguugccguggcugccgaccugaaaagcacacaggaggccauuaauaagaucacgaagaaccuuaauucucuguccgaacucgaggucaaaaaccugcaaagacugagcggcgcuauggacgaacuccauaaugagauccuggagcuugaugaaaagguggacgaucugcgggccgacaccauuucuagccagaucgagcucgcgguccugcuuuccaacgaagggauuaucaauucugaggaugaacaucugcucgcucuggagcgcaaacugaagaaaaugcucggaccuagcgccguggagauuggcaacggguguuucgaaacaaagcacaagugcaaucagaccugccuggacagaaucgccgcuggcacauuuaacgccggagaguucucccuucccaccuuugauagccugaauaucacggcugccucucucaacgacgauggccuggacaaucacaccauucugcuuuacuauuccacagcggccagcucucucgcuguuacccugaugcuggccaucuucauuguguacauggucucccgggauaacgugagcuguuccaucugccucuga

SEQ ID NO: 220056 - RNA, 1755 nt, Artificial Sequence; identical to SEQ ID NO: 218892
  derived and/or modified CDS sequence (opt5) from hemagglutinin__InfluenzaB__AHL92596

SEQ ID NO: 220057 - RNA, 1755 nt, Artificial Sequence; identical to SEQ ID NO: 218639
  derived and/or modified CDS sequence (opt5) from hemagglutinin__InfluenzaB__AHL92607

SEQ ID NO: 220058 - RNA, 1755 nt, Artificial Sequence
  derived and/or modified CDS sequence (opt5) from hemagglutinin__InfluenzaB__AHL92629
augaaggccaucauugugcugcucauggucguuaccagcaacgcugacagaaucugcacaggcauuacguccucuaauagcccccacguggugaaaaccgccacacagggggaggucaacgugaccggaguuaucccucugacaaccacaccggaaaaguccuacuucgcgaaucuuaaaggcacccggacgcgcgggaagcugugucccgauugccucaacuguaccgaccuggauguggcucuuggaagaccuaugugcgucggcacaacccccucugccaaagccagcauucugcaugaggugcggccuguuacauccggguguuuucccaucaugcacgaccgcaccaagaucagacaacucccuaaucugcugcggggauaugaaaacauucgccucucuacgcagaaugugaucgaugcugagaaggccccgggcggccccuacagacuggggacaagcggauccugcccuaacgcuaccagcaaaauuggcuucuuugccacaauggcgugggccguccccaaggacaauuauaaaaacgcuaccaauccucuuaccguggaagugcccuacaucuguacagagggggaggaucagauuacggucuggggauuccauucugacaacaagacccagaugaaaaaucuguauggcgauuccaacccgcaaaaguuuacaagcucugccaaugggguuaccacacacuacgugucccagaucggagacuucccugaucagaccgaagacggcggccucccccagagcgggcggauuguggucgauuauaugaugcaaaagccuggaaaaacgggcacaaucguguaccagcgcgggguucugcuuccccagaagguguggugcgcuucuggaagauccaaagucaucaagggcagccugccccucauuggggaggccgacugucugcaugaaaaauacggaggccugaacaaguccaaaccuuauuacaccggcgagcacgcgaaggccaucgggaacugcccgauuugggugaagacaccccucaaacuggcuaauggaaccaaguaucggccucccgccaaacuucugaaggagcgcggcuuuuucggggcuaucgccggauuucucgaaggcgggugggagggcaugauugccggauggcacggcuacaccucucauggggcucacggaguugcgguggccgcugaccugaaaagcacacaggaagccaucaacaagaucacgaagaaucuuaacucccugagcgagcucgaagucaaaaaucugcaaagacugucuggcgccauggaugagcuccauaacgagauucuggaacuugacgagaagguggaugaccugcgggcugauaccaucuccagccagauugaacucgccguccugcuuucuaaugaggggaucauuaacagcgaagacgagcaucugcucgcgcuggagcgcaaacugaagaaaaugcucggaccuuccgcuguggauaucggcaauggguguuucgaaacaaagcacaagugcaaccagaccugccuggacagaaucgccgccggcacauuuaaugcuggagaguucucucuucccaccuuugauagccugaacauuacggccgcuucccucaaugacgauggccuggacaaccacaccauccugcuuuauuacagcacagccgcgucuucccucgccguuacccugaugcuggcuauuuucaucguguauauggucagccgggacaaugugucuuguuccauuugccucuga

SEQ ID NO: 220059 - RNA, 1755 nt, Artificial Sequence; identical to SEQ ID NO: 218639
  derived and/or modified CDS sequence (opt5) from hemagglutinin__InfluenzaB__AHL92640

SEQ ID NO: 220060 - RNA, 1755 nt, Artificial Sequence; identical to SEQ ID NO: 218639
  derived and/or modified CDS sequence (opt5) from hemagglutinin__InfluenzaB__AHL92651

SEQ ID NO: 220061 - RNA, 1755 nt, Artificial Sequence
  derived and/or modified CDS sequence (opt5) from hemagglutinin__InfluenzaB__AHL92684
augaaggccaucauugugcugcucauggucguuaccagcaacgcugacagaaucugcacaggcauuacguccucuaauagcccccacguggugaaaaccgccacacagggggaggucaacgugaccggaguuaucccucugacaaccacaccgaccaaguccuacuucgcgaaucuuaaaggcacgcggacccgcgggaagcugugucccgauugccucaacuguacagaccuggauguggcucuuggaagaccuaugugcgucggcaccacacccucugccaaagccagcauucugcaugaagugcggccuguuaccuccggguguuuucccaucaugcacgaccgcacgaagaucagacaacucccuaaucugcugcggggauaugagaacauucgccucucuacacagaaugugaucgaugcugaaaaggccccgggcggccccuacagacuggggaccagcggauccugcccuaacgcuacaagcaaaucuggcuucuuugccaccauggcgugggccguccccaaggacaauaacaaaaaugcuaccaacccucuuacaguggaggugcccuauauuuguacggaaggggaggaucagaucaccgucuggggauuccauuccgacaauaagacacagaugaaaaaccuguacggcgauagcaauccgcaaaaguuuaccucuuccgccaacgggguuacaacccacuaugugagccagauuggaucuuucccugaccagacggaggauggcggccucccccaguccgggcggaucguggucgacuacaugaugcaaaagccuggaaaaacaggcaccauuguguaucagcgcgggguucugcuuccccagaagguguggugcgcuagcggaagauccaaagucaucaagggcucucugccccucaucggggaagccgauugucugcaugagaaauacggaggccugaacaagagcaaaccuuacuauaccggcgaacacgcgaaggccauugggaauugcccgaucugggugaagacaccccucaaacuggcuaacggaaccaaguaccggccucccgccaaacuucugaaggagcgcggcuuuuucggggcuauugccggauuucucgagggcgggugggaaggcaugaucgccggauggcacggcuauacaucccauggggcucacggaguugcgguggccgcugaccugaaaagcacgcaggaggccauuaauaagaucaccaagaaccuuaauucucuguccgaacucgaggucaaaaaccugcaaagacugagcggcgccauggacgaacuccauaaugagauccuggagcuugaugaaaagguggacgaucugcgggcugacacaauuucuagccagaucgagcucgccguccugcuuuccaacgaagggauuaucaauucugaggaugaacaucugcucgcgcuggagcgcaaacugaagaaaaugcucggaccuagcgcuguggagauuggcaacggguguuucgaaaccaagcacaagugcaaucagacaugccuggacagaaucgccgccggcaccuuuaacgcuggagaguucucccuucccacguuugauagccugaauaucaccgccgcuucucucaacgacgauggccuggacaaucacauuauccugcuuuacuauuccacagccgcgagcucucucgccguuacccugaugcuggcuauuuucaucguguacauggucucccgggauaacgugagcuguuccauuugccucuga

SEQ ID NO: 220062 - RNA, 1755 nt, Artificial Sequence; identical to SEQ ID NO: 218892
  derived and/or modified CDS sequence (opt5) from hemagglutinin__InfluenzaB__AHL92695

SEQ ID NO: 220063 - RNA, 1755 nt, Artificial Sequence; identical to SEQ ID NO: 218892
  derived and/or modified CDS sequence (opt5) from hemagglutinin__InfluenzaB__AHL92706

SEQ ID NO: 220064 - RNA, 1755 nt, Artificial Sequence
  derived and/or modified CDS sequence (opt5) from hemagglutinin__InfluenzaB__AHL92728
augaaggccaucauugugcugcucauggucguuaccagcaacgcugacagaaucugcacaggcauuacguccucuaauagcccccacguggugaaaaccgccacacagggggaggucaacgugaccggaguuaucccucugacaaccacaccgaccaaguccuacuucgcgaaucuuaaaggcacgcggacccgcgggaagcugugucccgauugccucaacuguacagaccuggauguggcucuuggaagaccuaugugcgucggcaccacacccucugccaaagccagcauucugcaugaagugcggccuguuaccuccggguguuuucccaucaugcacgaccgcacgaagaucagacaacucccuaaucugcugcggggauaugagaacauucgccucucuacacagaaugugaucgaugcugaaaaggccccgggcggccccuacagacuggggaccagcggauccugcccuaacgcuacaagcaaaauuggcuucuuugccaccauggcgugggccguccccaaggacaauuauaaaaacgcuaccaauccucuuacaguggaggugcccuacaucuguacggaaggggaggaucagauuaccgucuggggauuccauucugacaacaagacacagaugaaaaaucuguauggcgauuccaacccgcaaaaguuuaccagcucugccaaugggguuacaacccacuacgugucccagaucggagacuucccugaucagacggaggacggcggccucccccagagcgggcggauuguggucgauuauaugaugcaaaagccuggaaaaacaggcaccaucguguaccagcgcgggguucugcuuccccagaagguguggugcgcuucuggaagauccaaagucaucaagggcagccugccccucauuggggaagccgacugucugcaugagaaauacggaggccugaacaaguccaaaccuuauuacaccggcaagcacgcgaaggccaucgggaacugcccgauuugggugaaaacaccccucaagcuggcuaauggaaccaaauaucggccucccgccaagcugcugaaagaacgcggcuuuuucggggcuaucgccggauuucucgagggcgggugggagggcaugauugccggauggcacggcuacacaucucauggggcucacggaguugcgguggccgcugaccuuaagagcacgcaggaagccaucaacaagaucaccaaaaaucuuaacucccugagcgagcucgaagucaagaaucugcaaagacugucuggcgccauggaugagcuccauaacgaaauuaucgagcuggacgagaaaguggaugaccuucgggcugauacaauuuccagccagaucgaacuggccguccuccugucuaaugaggggauuaucaacagcgaagacgagcaccuucuggcgcucgaacgcaagcugaaaaagaugcugggaccuuccgcuguggauaucggcaauggguguuucgagaccaagcacaaaugcaaccagacaugccucgacagaauugccgccggcaccuuuaaugcuggagaguucucucugcccacguuugauagccuuaacaucaccgccgcuucccugaaugacgauggccucgacaaccauacaauucugcuguauuacagcaccgccgcgucuucccuugccguuacacucaugcuggcuaucuucauuguguauauggucagccgggacaaugugucuuguuccaucugccuguga

SEQ ID NO: 220065 - RNA, 1755 nt, Artificial Sequence; identical to SEQ ID NO: 220064
  derived and/or modified CDS sequence (opt5) from hemagglutinin__InfluenzaB__AHL92739

SEQ ID NO: 220066 - RNA, 1755 nt, Artificial Sequence; identical to SEQ ID NO: 220064
  derived and/or modified CDS sequence (opt5) from hemagglutinin__InfluenzaB__AHL92750

SEQ ID NO: 220067 - RNA, 1755 nt, Artificial Sequence; identical to SEQ ID NO: 218892
  derived and/or modified CDS sequence (opt5) from hemagglutinin__InfluenzaB__AHL92761

SEQ ID NO: 220068 - RNA, 1755 nt, Artificial Sequence
  derived and/or modified CDS sequence (opt5) from hemagglutinin__InfluenzaB__AHL92772
augaaggccaucauugugcugcucauggucguuaccagcaacgcugacagaaucugcacaggcauuacguccucuaauagcccccacguggugaaaaccgccacacagggggaagucaacgugaccggaguuaucccucugacaaccacaccgaccaaguccuacuucgcgaaucuuaaaggcacgcggacccgcgggaagcugugucccgauugccucaacuguacagaccuggauguggcucuuggaagaccuaugugcaugggcaccacacccucugccaaagccagcauucugcaugaaguccggccugugaccuccggguguuuucccaucaugcacgaccgcacgaagaucagacaacucccuaaucugcugcggggauaugagaacauucgccucucuacacagaauguuaucgaugcugaaaaggccccgggcggccccuacagacuggggaccagcggauccugcccuaacgcuacaagcaaaauuggcuucuuugccaccauggcgugggccgugcccaaggacaauuauaaaaacgcuaccaauccucuuacagucgaggugcccuacaucuguacggaaggggaggaucagauuaccguguggggauuccauucugacaacaagacacagaugaaaaaucuguauggcgauuccaacccgcaaaaguuuaccagcucugccaauggggucacaacccacuacguuucccagaucggagacuucccugaucagacggaggacggcggccucccccagagcgggcggauugugguggauuauaugaugcaaaagccuggaaaaacaggcaccaucgucuaccagcgcggggugcugcuuccccagaagguuuggugcgcuucuggaagauccaaagugaucaagggcagccugccccucauuggggaagccgacugucugcaugagaaauacggaggccugaacaaguccaaaccuuauuacaccggcgaacacgcgaaggccaucgggaacugcccgauuugggucaagacaccccucaaacuggcuaauggaaccaaguaucggccucccgccaaacuucugaaggagcgcggcuuuuucggggcuaucgccggauuucucgagggcgggugggaaggcaugauugccggauggcacggcuacacaucucauggggcucacggaguggcgguugccgcugaccugaaaagcacgcaggaggccaucaacaagaucaccaagaaucuuaacucccugagcgaacucgaggugaaaaaucugcaaagacugucuggcgccauggaugaacuccauaacgagauucuggagcuugacgaaaaggucgaugaccugcgggcugauacaaucuccagccagauugagcucgccgugcugcuuucuaaugaagggaucauuaacagcgaggacgaacaucugcucgcgcuggagcgcaaacugaagaaaaugcucggaccuuccgcugucgauaucggcaauggguguuucgagaccaagcacaagugcaaccagacaugccuggacagaaucgccgccggcaccuuuaaugcuggagaguucucucuucccacguuugauagccugaacauuaccgccgcuucccucaaugacgauggccuggacaaccacacaauccugcuuuauuacagcaccgccgcgucuucccucgccgugacacugaugcuggcuauuuucaucguuuauauggugagccgggacaaugucucuuguuccauuugccucuga

SEQ ID NO: 220069 - RNA, 1755 nt, Artificial Sequence; identical to SEQ ID NO: 218892
  derived and/or modified CDS sequence (opt5) from hemagglutinin__InfluenzaB__AHL92794

SEQ ID NO: 220070 - RNA, 1755 nt, Artificial Sequence; identical to SEQ ID NO: 218892
  derived and/or modified CDS sequence (opt5) from hemagglutinin__InfluenzaB__AHL92805

SEQ ID NO: 220071 - RNA, 1755 nt, Artificial Sequence; identical to SEQ ID NO: 218892
  derived and/or modified CDS sequence (opt5) from hemagglutinin__InfluenzaB__AHL92816

SEQ ID NO: 220072 - RNA, 1755 nt, Artificial Sequence
  derived and/or modified CDS sequence (opt5) from hemagglutinin__InfluenzaB__AHL92827
augaaggccaucauugugcugcucauggucguuaccagcaacgcugacagaaucugcacaggcauuacguccucuaauagcccccacguggugaaaaccgccacacagggggaagucaacgugaccggaguuaucccucugacaaccacaccgaccaaguccuacuucgcgaaucuuaaaggcacgcggacccgcgggaagcugugucccgauugccucaacuguacagaccuggauguggcucuuggaagaccuaugugcgucggcaccacacccucugccaaagccagcauucugcaugaagugcggccuguuaccuccggguguuuucccaucaugcacgaccgcacgaagaucagacaacucccuaaucugcugcggggauaugagaacauucgccucucuacacagaaugugaucgaugcugaaaaggccccgggcggccccuacagacuggggaccagcggauccugcccuaacgcuacaagcaaaauuggcuucuuugccaccauggcgugggccguccccaaggacaauuauaaaaacgcuaccaauccucuuacaguggaggugcccuacaucuguacggaaggggaggaucagauuaccgucuggggauuccauucugacaacaagacacagaugaaaaaucuguauggcgauuccaacccgcaaaaguuuaccagcucugccaaugggguuacaacccacuacgugucccagaucggagacuucccugaucagacggaggacggcggccucccccagagcgggcggauuguggucgauuauaugaugcaaaagccuggaaaaacaggcaccaucguguaccagcgcgggguucugcuuccccagaagguguggugcgcuucuggaagauccaaagucaucaagggcagccugccccucauuggggaagccgacugucugcaugagaaauacggaggccugaacaaguccaaaccuuauuacaccggcgaacacgcgaaggccaucgggaacugcccgauuugggugaagacaccccucaaacuggcuaauggaaccaaguaucggccucccgccaaacuucugaaggagcgcggcuuuuucggggcuaucgccggauuucucgagggcgggugggaaggcaugauugccggauggcacggcuacacaucucauggggcucacggaguugcgguggccgcugaccugaaaagcacgcaggaggccaucaacaagaucaccaagaaucuuaacucccugagcgaacucgaggucaaaaaucugcaaagacugucuggcgccauggaugaacuccauaacgagauucuggagcuugacgaaaagguggaugaccugcgggcugauacaaucuccagccagauugagcucgccguccugcuuucuaaugaagggaucauuaacagcgaggacgaacaucugcucgcgcuggagcgcaaacugaagaaaaugcucggaccuuccgcuguggauaucggcaauggguguuucgagaccaagcacaagugcaaccagacaugccuggacagaaucgccgccggcaccuuuaaugcuggagaguucucucuucccacguuugauagccugaacauuaccgccgcuucccucaaugacgauggccuggacaaccacacaauccugcuuuauuacagcaccgccgcgucuucccucgccguuacacugaugcuggcuauuuucguggucuauauggugagccgggacaauguuucuuguuccaucugccucuga

SEQ ID NO: 220073 - RNA, 1755 nt, Artificial Sequence; identical to SEQ ID NO: 218892
  derived and/or modified CDS sequence (opt5) from hemagglutinin__InfluenzaB__AHL92838

SEQ ID NO: 220074 - RNA, 1755 nt, Artificial Sequence; identical to SEQ ID NO: 218892
  derived and/or modified CDS sequence (opt5) from hemagglutinin__InfluenzaB__AHL92849

SEQ ID NO: 220075 - RNA, 1755 nt, Artificial Sequence; identical to SEQ ID NO: 218892
  derived and/or modified CDS sequence (opt5) from hemagglutinin__InfluenzaB__AHL92860

SEQ ID NO: 220076 - RNA, 1758 nt, Artificial Sequence; identical to SEQ ID NO: 218710
  derived and/or modified CDS sequence (opt5) from hemagglutinin__InfluenzaB__AHL92871

SEQ ID NO: 220077 - RNA, 1755 nt, Artificial Sequence; identical to SEQ ID NO: 218498
  derived and/or modified CDS sequence (opt5) from hemagglutinin__InfluenzaB__AHL92882

SEQ ID NO: 220078 - RNA, 1758 nt, Artificial Sequence
  derived and/or modified CDS sequence (opt5) from hemagglutinin__InfluenzaB__AHL92893
augaaggccaucauugugcugcucauggucguuaccagcaacgcugacagaaucugcacaggcauuacguccucuaauagcccccacguggugaaaaccgccacacagggggaggucaacgugaccggaguuaucccucugacaaccacaccgaccaagucccauuucgcgaaucuuaaaggcacgaagacccgggggaaacugugucccaagugccucaacuguacagaucuggacguggcucuuggacgcccuaagugcaccggcaauauucccucugccgaagucagcauccugcacgaggugagaccuguuacauccggguguuuucccaucaugcaugaucggaccaaaauucgccaacucccuaaccugcugagaggauacgaacacauccggcucucuacgcauaaugugauuaacgccgagaaggcuccgggcggccccuauaaaaucgggacaagcggauccugcccuaaugucaccaacggcaauggguucuuugccacaauggcuugggccgugcccaagaacgacaauaacaaaaccgcgaccaauagccugacaauugaagugccuuacaucuguacggagggagaggaucagauuaccaucuggggcuuccacucugacaaggaaacacagauggccaaacuuuauggggauuccaaaccccagaaguuuaccagcucugcuaacggagucacaacccacuacguuucccaaaucggcggcuucccgaaccagacggaggacgggggacugccucagagcggccgcauugugguggauuauaugguccagaaaucugggaagacaggaaccaucaccuaccaaagaggcauucuccugccccagaaaguguggugcgccuccgggcggagcaagguuaucaaaggaucccuuccucugauuggcgaagcugacugucuccaugagaaguauggcgggcugaauaagucuaaacccuacuacacaggagagcacgccaaggcgaucggcaacugccccaucugggugaaaaccccucugaagcucgccaaugggacaaaauaucgcccgcccgcuaagcugcuuaaggaaagaggauuuuucggcgccauugcuggguuucuggagggcggaugggaaggcaugaucgccggguggcauggauacacgagccacggcgcccacggggucgcuguggcggccgaucucaaauccacccaggaggcuauuaacaagaucacaaagaaucugaacagccuuucugaacuggagguuaagaaucuccagcggcuguccggagccauggacgagcugcauaacgaaauucucgagcuggaugaaaaaguggacgaccuucgcgccgauaccaucagcucucaaaucgagcuggcuguccuccugagcaaugaaggcauuaucaacuccgaggacgagcaccuucuggcccucgaaagaaagcugaagaaaaugcuggggccuucugcgguggagauuggcaauggauguuucgaaacaaagcauaaaugcaaccagaccugccucgaucggaucgcugccggcacguuugacgccggggaguucagccugcccaccuuugauucccuuaauauuacagcugccagccugaacgacgauggacucgacaaucacaccauccugcuguauuacucuacagcugccuccagccuugcggucacccucaugauugccaucuucaucguguauaugguuucucgcgauaacguguccuguagcauuugccuguga

SEQ ID NO: 220079 - RNA, 1755 nt, Artificial Sequence; identical to SEQ ID NO: 219095
  derived and/or modified CDS sequence (opt5) from hemagglutinin__InfluenzaB__AHL92904

SEQ ID NO: 220080 - RNA, 1758 nt, Artificial Sequence
  derived and/or modified CDS sequence (opt5) from hemagglutinin__InfluenzaB__AHL92915
augaaggccaucauugugcugcucauggucguuaccagcaacgcugacagaaucugcacaggcauuacguccucuaauagcccccacguggugaaaaccgccacacagggggaggucaacgugaccggaguuaucccucugacaaccacaccgaccaagucccauuucgcgaaucuuaaaggcacgaagacccgggggaaacugugucccaagugccucaacuguacagaucuggacguggcucuuggacgcccuaagugcaccggcaauauucccucugccgaagucagcauccugcacgaggugagaccuguuacauccggguguuuucccaucaugcaugaucggaccaaaauucgccaacucccuaaccugcugagaggauacgaacacauccggcucucuacgcauaaugugauuaacgccgagaaggcuccgggcggccccuauaaaaucgggacaagcggauccugcccuaaugucaccaacggcaauggguucuuugccacaauggcuugggccgugcccaagaacgacaauaacaaaaccgcgaccaauagccugacaauugaagugccuuacaucuguacggagggagaggaucagauuaccaucuggggcuuccacucugacaacgaaacacagauggccaaacuuuauggggauuccaagccccagaaguuuaccagcucugcuaacggagucacaacccacuacguuucccaaaucggcggcuucccgaaucagacggaggacgggggacugccucagagcggccgcauugugguggauuauaugguccagaagucugggaaaacaggaaccaucaccuaccaaagaggcauucuccugccccagaagguguggugcgccuccgggcggagcaaaguuaucaagggaucccuuccucugauuggcgaagcugacugucuccaugagaaauauggcgggcugaacaagucuaagcccuacuacacaggagagcacgccaaagcgaucggcaauugccccaucugggugaagaccccucugaaacucgccaacgggacaaaguaucgcccgcccgcuaaacugcuuaaggaaagaggauuuuucggcgccauugcuggguuucuggagggcggaugggaaggcaugaucgccggguggcauggauacacgagccacggcgcccacggggucgcuguggcggccgaucucaaguccacccaggaggcuauuaauaaaaucacaaagaaccugaauagccuuucugaacuggagguuaaaaaccuccagcggcuguccggagccauggacgagcugcauaaugaaauucucgagcuggaugaaaagguggacgaccuucgcgccgauaccaucagcucucaaaucgagcuggcuguccuccugagcaacgaaggcauuaucaauuccgaggacgagcaccuucuggcccucgaaagaaaacugaagaagaugcuggggccuucugcgguggagauuggcaacggauguuucgaaacaaaacauaagugcaaucagaccugccucgaucggaucgcugccggcacguuugacgccggggaguucagccugcccaccuuugauucccuuaacauuacagcugccagccugaaugacgauggacucgacaaccacaccauccugcuguauuacucuacagcugccuccagccuugcggucacccucaugauugccaucuucaucguguauaugguuucucgcgauaacguguccuguagcauuugccuguga

SEQ ID NO: 220081 - RNA, 1758 nt, Artificial Sequence; identical to SEQ ID NO: 218710
  derived and/or modified CDS sequence (opt5) from hemagglutinin__InfluenzaB__AHL92926

SEQ ID NO: 220082 - RNA, 1755 nt, Artificial Sequence; identical to SEQ ID NO: 219671
  derived and/or modified CDS sequence (opt5) from hemagglutinin__InfluenzaB__AHL92937

SEQ ID NO: 220083 - RNA, 1758 nt, Artificial Sequence; identical to SEQ ID NO: 218586
  derived and/or modified CDS sequence (opt5) from hemagglutinin__InfluenzaB__AHL92948

SEQ ID NO: 220084 - RNA, 1758 nt, Artificial Sequence; identical to SEQ ID NO: 218586
  derived and/or modified CDS sequence (opt5) from hemagglutinin__InfluenzaB__AHL92959

SEQ ID NO: 220085 - RNA, 1758 nt, Artificial Sequence; identical to SEQ ID NO: 218586
  derived and/or modified CDS sequence (opt5) from hemagglutinin__InfluenzaB__AHL92970

SEQ ID NO: 220086 - RNA, 1758 nt, Artificial Sequence; identical to SEQ ID NO: 218586
  derived and/or modified CDS sequence (opt5) from hemagglutinin__InfluenzaB__AHL92981

SEQ ID NO: 220087 - RNA, 1758 nt, Artificial Sequence; identical to SEQ ID NO: 218586
  derived and/or modified CDS sequence (opt5) from hemagglutinin__InfluenzaB__AHL92992

SEQ ID NO: 220088 - RNA, 1758 nt, Artificial Sequence; identical to SEQ ID NO: 220011
  derived and/or modified CDS sequence (opt5) from hemagglutinin__InfluenzaB__AHL93004

SEQ ID NO: 220089 - RNA, 1758 nt, Artificial Sequence; identical to SEQ ID NO: 218586
  derived and/or modified CDS sequence (opt5) from hemagglutinin__InfluenzaB__AHL93015

SEQ ID NO: 220090 - RNA, 1758 nt, Artificial Sequence; identical to SEQ ID NO: 218586
  derived and/or modified CDS sequence (opt5) from hemagglutinin__InfluenzaB__AHL93026

SEQ ID NO: 220091 - RNA, 1755 nt, Artificial Sequence; identical to SEQ ID NO: 220035
  derived and/or modified CDS sequence (opt5) from hemagglutinin__InfluenzaB__AHL93037

SEQ ID NO: 220092 - RNA, 1755 nt, Artificial Sequence; identical to SEQ ID NO: 220035
  derived and/or modified CDS sequence (opt5) from hemagglutinin__InfluenzaB__AHL93048

SEQ ID NO: 220093 - RNA, 1755 nt, Artificial Sequence; identical to SEQ ID NO: 220064
  derived and/or modified CDS sequence (opt5) from hemagglutinin__InfluenzaB__AHL93059

SEQ ID NO: 220094 - RNA, 1755 nt, Artificial Sequence; identical to SEQ ID NO: 218892
  derived and/or modified CDS sequence (opt5) from hemagglutinin__InfluenzaB__AHL93070

SEQ ID NO: 220095 - RNA, 1755 nt, Artificial Sequence
  derived and/or modified CDS sequence (opt5) from hemagglutinin__InfluenzaB__AHL93081
augaaggccaucauugugcugcucauggucguuaccagcaacgcugacagaaucugcacaggcauuacguccucuaauagcccccacguggugaaaaccgccacacagggggaggucaacgugaccggaguuaucccucugacaaccacaccgaccaaguccuacuucgcgaaucuuaaaggcacgcggacccgcgggaagcugugucccgauugccucaacuguacagaccuggauguggcucuuggaagaccuaugugcgucggcaccacacccucugccaaagccagcauucugcaugaagugcggccuguuaccuccggguguuuucccaucaugcacgaccgcacgaagaucagacaacucccuaaucugcugcggggauaugagaacauucgccucucuacacagaaugugaucgaugcugaaaaggccccgggcggccccuacagacuggggaccagcggauccugcccuaacgcuacaagcaaaauuggcuucuuugccaccauggcgugggccguccccaaggacaauuauaaaaacgcuaccaauccucuuacaguggaggugcccuacaucuguacggaaggggaggaucagauuaccgucuggggauuccauucugacaacaagacacagaugaaaaaucuguauggcgauuccaacccgcaaaaguuuaccagcucugccaaugggguuacaacccacuacgugucccagaucggagacuucccugaucagacggaggacggcggccucccccagagcgggcggauuguggucgauuauaugaugcaaaagccuggaaaaacaggcaccaucguguaccagcgcgggguucugcuuccccagaagguguggugcgcuucuggaagauccaaagucaucaagggcagccugccccucauuggggaagccgacugucugcaugagaaauacggaggccugaacaaguccaaaccuuauuacaccggcgaacacgcgaaggccaucgggaacugcccgauuugggugaagacaccccucaaacuggcuaauggaaccaaguaucggccucccgccaaacuucugaaggagcgcggcuuuuucggggcuaucgccggauuucucgagggcgggugggaaggcaugauugccggauggcacggcuacacaucucauggggcucacggaguugcgguggccgcugaccugaaaagcacgcaggaggccaucaacaagaucaccaagaaucuuaacucccugagcgaacucgaggucaaaaaucugcaaagacugucuggcgccauggaugaacuccauaacgagauucuggagcuugacgggaagguggaugaccugcgggcugauacaaucuccagccagauugaacucgccguccugcuuucuaaugagggaaucauuaacagcgaagacgagcaucugcucgcgcuggaacgcaaacugaagaaaaugcucggcccuuccgcuguggauaucgggaauggcuguuucgagaccaagcacaagugcaaccagacaugccuggacagaaucgccgccggaaccuuuaaugcuggcgaguucucucuucccacguuugauagccugaacauuaccgccgcuucccucaaugacgaugggcuggacaaccacacaauccugcuuuauuacagcaccgccgcgucuucccucgccguuacacugaugcuggcuauuuucaucguguauauggucagccgggacaaugugucuuguuccauuugccucuga

SEQ ID NO: 220096 - RNA, 1755 nt, Artificial Sequence; identical to SEQ ID NO: 218892
  derived and/or modified CDS sequence (opt5) from hemagglutinin__InfluenzaB__AHL93092

SEQ ID NO: 220097 - RNA, 1755 nt, Artificial Sequence; identical to SEQ ID NO: 218892
  derived and/or modified CDS sequence (opt5) from hemagglutinin__InfluenzaB__AHL93103

SEQ ID NO: 220098 - RNA, 1755 nt, Artificial Sequence; identical to SEQ ID NO: 218892
  derived and/or modified CDS sequence (opt5) from hemagglutinin__InfluenzaB__AHL93114

SEQ ID NO: 220099 - RNA, 1755 nt, Artificial Sequence; identical to SEQ ID NO: 218639
  derived and/or modified CDS sequence (opt5) from hemagglutinin__InfluenzaB__AHL93125

SEQ ID NO: 220100 - RNA, 1755 nt, Artificial Sequence
  derived and/or modified CDS sequence (opt5) from hemagglutinin__InfluenzaB__AHL93136
augaaggccaucauugugcugcucauggucguuaccagcaacgcugacagaaucugcacaggcauuacguccucuaauagcccccacguggugaaaaccgccacacagggggaagucaacgugaccggaguuaucccucugacaaccacaccgaccaaguccuacuucgcgaaucuuaaaggcacgcggacccgcgggaagcugugucccgauugccucaacuguacagaccuggauguggcucuuggaagaccuaugugcgucggcaccacacccucugccaaagccagcauucugcaugaagugcggccuguuaccuccggguguuuucccaucaugcacgaccgcacgaagaucagacaacucccuaaucugcugcggggauaugagaacauucgccucucuacacagaaugugaucgaugcugaaaaggccccgggcggccccuacagacuggggaccagcggauccugcccuaacgcuacaagcaaaauuggcuucuuugccaccauggcgugggccguccccaaggacaauuauaaaaacgcuaccaauccucuuacaguggaggugcccuacaucuguacggaaggggaggaucagauuaccgucuggggauuccauucugacaacaagacacagaugaaaaaucuguauggcgauuccaacccgcaaaaguuuaccagcucugccaaugggguuacaacccacuacgugucccagaucggagacuucccugaucagacggaggacggcggccucccccagagcgggcggauuguggucgauuauaugaugcaaaagccuggaaaaacaggcaccaucguguaccagcgcgggguucugcuuccccagagaguguggugcgcuucuggacgguccaaggucaucaaaggcagccugccccucauuggggaagccgacugucugcaugagaaguacggaggccugaacaaauccaagccuuauuacaccggcgaacacgcgaaagccaucgggaacugcccgauuugggugaagacaccccucaagcuggcuaauggaaccaaauaucgcccucccgccaagcugcugaaagagagaggcuuuuucggggcuaucgccggauuucucgagggcgggugggaaggcaugauugccggauggcacggcuacacaucucauggggcucacggaguugcgguggccgcugaccuuaagagcacgcaggaggccaucaacaaaaucaccaagaaucuuaacucccugagcgaacucgaggucaagaaucugcaacggcugucuggcgccauggaugaacuccauaacgagauucuggagcuugacgaaaaaguggaugaccugcgcgcugauacaaucuccagccagauugagcucgccguccugcuuucuaaugaagggaucauuaacagcgaggacgaacaucugcucgcgcuggagagaaagcugaaaaagaugcucggaccuuccgcuguggauaucggcaauggguguuucgagaccaaacacaagugcaaccagacaugccuggaccggaucgccgccggcaccuuuaaugcuggagaguucucucuucccacguuugauagccugaacauuaccgccgcuucccucaaugacgauggccuggacaaccacacaauccugcuuuauuacagcaccgccgcgucuucccucgccguuacacugaugcuggcuauuuucaucguguauauggucagcagagacaaugugucuuguuccauuugccucuga

SEQ ID NO: 220101 - RNA, 1755 nt, Artificial Sequence; identical to SEQ ID NO: 218639
  derived and/or modified CDS sequence (opt5) from hemagglutinin__InfluenzaB__AHL93147

SEQ ID NO: 220102 - RNA, 1755 nt, Artificial Sequence; identical to SEQ ID NO: 218892
  derived and/or modified CDS sequence (opt5) from hemagglutinin__InfluenzaB__AHL93158

SEQ ID NO: 220103 - RNA, 1755 nt, Artificial Sequence
  derived and/or modified CDS sequence (opt5) from hemagglutinin__InfluenzaB__AHL93169
augaaggccaucauugugcugcucauggucguuaccagcaacgcugacagaaucugcacaggcauuacguccucuaauagcccccacguggugaaaaccgccacacagggggaggucaacgugaccggaguuaucccucugacaaccacaccgaccaaguccuacuucgcgaaucuuaaaggcacgcggacccgcgggaagcugugucccgauugcuuuaacuguacagaccucgauguggcucugggaagaccuaugugcgucggcaccacacccucugccaaagccagcauucuucaugaagugcggccuguuaccuccggguguuuccccaucaugcacgaccgcacgaagaucagacaacugccuaaucuccugcggggauaugagaacauucgccugucuacacagaaugugaucgaugcugaaaaggccccgggcggccccuacagacucgggaccagcggauccugcccuaacgcuacaagcaaaauuggcuuuuucgccaccauggcgugggccguccccaaggacaauuauaaaaacgcuaccaauccucugacaguggaggugcccuacaucuguacggaaggggaggaucagauuaccgucuggggauuucauucugacaacaagacacagaugaaaaaucuuuauggcgauuccaacccgcaaaaguucaccagcucugccaaugggguuacaacccacuacgugucccagaucggagacuuuccugaucagacggaggacggcggccugccccagagcgggcggauuguggucgauuauaugaugcaaaagccuggaaaaacaggcaccaucguguaccagcgcgggguucuccugccccagaagguguggugcgcuucuggaagauccaaagucaucaagggcagccuuccccugauuggggaagccgacugucuccaugagaaauacggaggccugaacaaguccaaaccuuauuacaccggcgaacacgcgaaggccaucgggaacugcccgauuugggugaagacaccccugaaacucgcuaauggaaccaaguaucggccucccgccaaacugcuuaaggagcgcggcuucuuuggggcuaucgccggauuccuggagggcgggugggaaggcaugauugccggauggcacggcuacacaucucauggggcucacggaguugcgguggccgcugaccucaaaagcacgcaggaggccaucaacaagaucaccaagaaucugaacucccuuagcgaacuggaggucaaaaaucuccaaagacugucuggcgccauggaugaacugcauaacgagauucucgagcuggacgaaaagguggaugaccuucgggcugauacaaucuccagccagauugagcuggccguccuccugucuaaugaagggaucauuaacagcgaggacgaacaccuucuggcgcucgagcgcaaacugaagaaaaugcugggaccuuccgcuguggauaucggcaauggguguuuugagaccaagcacaagugcaaccagacaugccucgacagaaucgccgccggcaccuucaaugcuggagaauuuucucugcccacguucgauagccuuaacauuaccgccgcuucccugaaugacgauggccucgacaaccauacaauccugcuguauuacagcaccgccgcgucuucccuugccguuacacucaugcuggcuauuuucaucguguauauggucagccgggacaaugugucuuguuccauuugccuguga

SEQ ID NO: 220104 - RNA, 1755 nt, Artificial Sequence
  derived and/or modified CDS sequence (opt5) from hemagglutinin__InfluenzaB__AHL93180
augaaggccaucauugugcugcucauggucguuaccagcaacgcugacagaaucugcacaggcauuacguccucuaauagcccccacguggugaaaaccgccacacagggggaggucaacgugaccggaguuaucccucugacaaccacaccgaccaaguccuacuucgcgaaucuuaaaggcacgcggacccgcgggaagcugugucccgauugccucaacuguacagaccuggauguggcucuuggaagaccuaugugcgucggcaccacacccucugccaaagccagcauucugcaugaagugcggccuguuaccuccggguguuuucccaucauccacgaccgcacgaagauuagacaacucccuaaucugcugcggggauaugagaacauccgccucucuacacagaaugugauugaugcugaaaaggccccgggcggccccuacagacuggggaccagcggauccugcccuaacgcuacaagcaaaucuggcuucuuugccaccauggcgugggccguccccaaggacaauaacaaaaaugcuaccaacccucuuacaguggaggugcccuauaucuguacggaaggggaggaucagauuaccgucuggggauuccauuccgacaauaagacacagaugaaaaaccuguacggcgauagcaauccgcaaaaguuuaccucuuccgccaacgggguuacaacccacuaugugagccagaucggaucuuucccugaccagacggaggauggcggccucccccaguccgggcggauuguggucgacuacaugaugcaaaagccuggaaaaacaggcaccaucguguaucagcgcgggguucugcuuccccagagaguguggugcgcuagcggacgguccaaggucaucaaaggcucucugccccucauuggggaagccgauugucugcaugagaaguacggaggccugaacaaaagcaagccuuacuauaccggcgaacacgcgaaagccaucgggaauugcccgauuugggugaagacaccccucaagcuggcuaacggaaccaaauaccgcccucccgccaagcugcugaaagagagaggcuuuuucggggcuaucgccggauuucucgagggcgggugggaaggcaugauugccggauggcacggcuauacaucccauggggcucacggaguugcgguggccgcugaccuuaagagcacgcaggaggccaucaauaaaaucaccaagaaccuuaauucucuguccgaacucgaggucaagaaccugcaacggcugagcggcgccauggacgaacuccauaaugagauucuggagcuugaugaaaaaguggacgaucugcgcgcugacacaaucucuagccagauugagcucgccguccugcuuuccaacgaagggaucauuaauucugaggaugaacaucugcucgcgcuggagagaaagcugaaaaagaugcucggaccuagcgcuguggagaucggcaacggguguuucgaaaccaaacacaagugcaaucagacaugccuggaccggaucgccgccggcaccuuuaacgcuggagaguucucccuucccacguuugauagccugaauauuaccgccgcuucucucaacgacgauggccuggacaaucacacaauccugcuuuacuauuccaccgccgcgagcucucucgccguuacacugaugcuggcuauuuucaucguguacauggucuccagagauaacgugagcuguuccauuugccucuga

SEQ ID NO: 220105 - RNA, 1755 nt, Artificial Sequence
  derived and/or modified CDS sequence (opt5) from hemagglutinin__InfluenzaB__AHL93191
augaaggccaucauugugcugcucauggucguuaccagcaacgcugacagaaucugcacaggcauuacguccucuaauagcccccacguggugaaaaccgccacacagggggaagucaacgugaccggaguuaucccucugacaaccacaccgaccaaguccuacuucgcgaaucuuaaaggcacgcggacccgcgggaagcugugucccgauugccucaacuguacagaccuggauguggcucuuggaagaccuaugugcgucggcaccacacccucugccaaagccagcauucugcaugaagugcggccuguuaccuccggguguuuucccaucaugcacgaccgcacgaagaucagacaacucccuaaucugcugcggggauaugagaacauucgccucucuacacagaaugugaucgaugcugaaaaggccccgggcggccccuacagacuggggaccagcggauccugcccuaacgacacaagcaaaauuggcuucuuugcuaccauggccugggcgguccccaaggauaauuauaaaaacgccaccaauccucuuacaguggaggugcccuacaucuguacggaaggggaggaccagauuaccgucuggggauuccauucugauaacaagacacagaugaaaaaucuguauggcgacuccaacccgcaaaaguuuaccagcucugcuaaugggguuacaacccacuacgugucccagaucggagauuucccugaccagacggaggauggcggccucccccagagcgggcggauuguggucgacuauaugaugcaaaagccuggaaaaacaggcaccaucguguaccagcgcgggguucugcuuccccagaagguguggugcgccucuggaagauccaaagucaucaagggcagccugccccucauuggggaagcugacugucugcaugagaaauacggaggccugaacaaguccaaaccuuauuacaccggcgaacacgccaaggcgaucgggaacugcccgauuugggugaagacaccccucaaacuggccaauggaaccaaguaucggccucccgcuaaacuucugaaggagcgcggcuuuuucggggccaucgcuggauuucucgagggcgggugggaaggcaugauugccggauggcacggcuacacaucucauggggcccacggaguugcuguggcggccgaucugaaaagcacgcaggaggcuaucaacaagaucaccaagaaucuuaacucccugagcgaacucgaggucaaaaaucugcaaagacugucuggcgccauggacgaacuccauaacgagauucuggagcuugaugaaaagguggacgaucugcgggccgacacaaucuccagccagauugagcucgcuguccugcuuucuaaugaagggaucauuaacagcgaggaugaacaucugcucgcccuggagcgcaaacugaagaaaaugcucggaccuuccgcgguggacaucggcaauggguguuucgagaccaagcacaagugcaaccagacaugccuggauagaaucgcugccggcaccuuuaaugccggagaguucucucuucccacguuugacagccugaacauuaccgcugccucccucaaugaugacggccuggacaaccacacaauccugcuuuauuacagcaccgcugccucuucccucgcgguuacacugaugcuggccauuuucaucguguauauggucagccgggauaaugugucuuguuccauuugccucuga

SEQ ID NO: 220106 - RNA, 1755 nt, Artificial Sequence
  derived and/or modified CDS sequence (opt5) from hemagglutinin__InfluenzaB__AHL93202
augaaggccaucauugugcugcucauggucguuaccagcaacgcugacagaaucugcacaggcauuacguccucuaauagcccccacguggugaaaaccgccacacagggggaggucaacgugaccggaguuaucccucugacaaccacaccgaccaaguccuacuucgcgaaucuuaaaggcacgcggacccgcgggaagcugugucccgauugccucaacuguacagaccuggauguggcucuuggaagaccuaugugcgucggcaccacacccucugccaaagccagcauucugcaugaagugcggccuguuaccuccggguguuuucccaucaugcacgaccgcacgaagaucagacaacucccuaaucugcugcggggauaugagaacauucgccucucuacacagaaugugaucgaugcugaaaaggccccgggcggccccuacagacuggggaccagcggauccugcccuaacgcuacaagcaaaauuggcuucuuugccaccauggcgugggccguccccaaggacaauuauaaaaacgcuaccaauccucuuacaguggaggugcccuacaucuguacggaaggggaggaucagauuaccgucuggggauuccauucugacaacaagacacagaugaaaaaucuguauggcgauuccaacccgcaaaaguuuaccagcucugccaaugggguuacaacccacuacgugucccagaucggagacuucccugaucagacggaggacggcggccucccccagagcgggcggauuguggucgauuauaugaugcaaaagccuggaaaaacaggcaccaucguguaccagcgcgggguucugcuuccccagaagguguggugcgcuucuggaagauccaaagucaucaagggcagccugccccucauuggggaagccgacugucugcaugagaaauacggaggccugaacaaguccaaaccuuauuacaccggcgaacacgcgaaggccaucgggaacugcccgauuugggugaagacaccccucaaacuggcuaauggaaccaaguaucggccucccgccaaacuucugaaggagcgcggcuuuuucggggcuaucgccggauuucucgagggcgggugggaaggcaugauugccggauggcacggcuacacaucucauggggcucacggaguugcgguggccgcugaccugaaaagcacgcaggaggccaucaacaagaucaccaagaaucuuaacucccugagcgaacucgaggucaaaaaucugcaaagacugucuggcgccauggaugaguuccauaacgaaauucucgagcuggacgaaaagguggaugaccuucgggcugauacaaucuccagccagauugagcuggccguccuccugucuaaugaagggaucauuaacagcgaggacgaacaccuucuggcgcucgagcgcaaacugaagaaaaugcugggaccuuccgcuguggauaucggcaauggguguuuugagaccaagcacaagugcaaccagacaugccucgacagaaucgccgccggcaccuucaaugcuggagaauuuucucugcccacguucgauagccuuaacauuaccgccgcuucccugaaugacgauggccucgacaaccauacaauccugcuguauuacagcaccgccgcgucuucccuugccguuacacucaugcuggcuauuuucaucguguauauggucagccgggacaaugugucuuguuccauuugccuguga

SEQ ID NO: 220107 - RNA, 1758 nt, Artificial Sequence; identical to SEQ ID NO: 219061
  derived and/or modified CDS sequence (opt5) from hemagglutinin__InfluenzaB__AHL93213

SEQ ID NO: 220108 - RNA, 1758 nt, Artificial Sequence; identical to SEQ ID NO: 219061
  derived and/or modified CDS sequence (opt5) from hemagglutinin__InfluenzaB__AHL93224

SEQ ID NO: 220109 - RNA, 1758 nt, Artificial Sequence
  derived and/or modified CDS sequence (opt5) from hemagglutinin__InfluenzaB__AHL93235
augaaggccaucauugugcugcucauggucguuaccagcaacgcugacagaaucugcacaggcauuacguccucuaauagcccccacguggugaaaaccgccacacagggggaggucaacgugaccggaguuaucccucugacaaccacaccgaccaagucccauuucgcgaaucuuaaaggcacggaaacccgggggaagcugugucccaaaugcccuaacuguacagaucucgacguggcucugggacgccccaagugcaccggcaagauuccuucugccagagucagcauccuucacgaggugcggcccguuacauccggguguuuuccuaucaugcaugaucgcaccaaaauuagacaacugccgaaucuccugcggggauacgaacacauccgccugucuacgcauaacgugauuaaugccgagaacgcucccggcggcccuuauaagaucgggacaagcggauccugccccaaugucaccaacggcaauggguucuuugccacaauggcuugggccgugccuaaaaacgacaagaauaaaaccgcgaccaacccccucacaauugaagugccguacaucuguacggagggagaggaucagauuaccgucuggggcuuccacagcgacaaugaaacacagauggccaagcuguauggggauucuaagccucagaaauuuaccuccagcgcuaacggaguuacaacccacuacgugucucaaaucggcggcuuccccaaccagacggaggacgggggacuuccucaguccggcagaaucguggucgauuauauggugcaaaagagcgggaaaacaggaaccauuaccuaccagcggggcauccugcucccccagaagguuuggugcgccucugggcgcuccaaagugauuaagggaagccugccccuuaucggcgaagcugacugucugcaugagaaauauggcgggcucaauaaguccaagccuuacuacacaggagagcacgccaaagcgauuggcaacugcccgaucugggucaagacaccccugaaacuggccaaugggaccaaguauagaccucccgcuaaacuccugaaggaacggggauuuuucggcgccaucgcuggguuucuugagggcggaugggaaggcaugauugccggguggcauggauacacgucucacggcgcccacgggguggcuguugcggccgaucucaagagcacccaggaggcuaucaacaaaauuacaaagaaucugaacucccugagcgaacuugaggugaaaaaucugcagcgccucucuggagccauggacgagcugcauaacgaaauccuggagcucgaugaaaaggucgacgaccugagagccgauaccauuuccagccaaaucgagcuugcugugcugcucucuaaugaaggcaucauuaacagcgaggacgagcaucugcuugcccuggaacggaaacucaagaagaugcuggggccuuccgcggucgagaucggcaauggauguuucgaaacaaaacacaagugcaaccagaccugccuggaucgcauugcugccggcacguuugacgccggggaguucucucuccccaccuuugauagccugaauaucacagcugccucccuuaacaaugacggacuggauaaccacaccauucuccuguauuacagcacagcugccucuucccuggcggugacccuuaugaucgccauuuucguuguguauauggucagcagagacaacgugucuuguuccaucugccucuga

SEQ ID NO: 220110 - RNA, 1758 nt, Artificial Sequence
  derived and/or modified CDS sequence (opt5) from hemagglutinin__InfluenzaB__AHL93246
augaaggccaucauugugcugcucauggucguuaccagcaacgcugacagaaucugcacaggcauuacguccucuaauagcccccacguggugaaaaccgccacacagggggaggucaacgugaccggaguuaucccucugacaaccacaccgaccaagucccauuucgcgaaucuuaaaggcacggaaacccgggggaagcugugucccaaaugccucaacuguacagaucuggacguggcucuuggacgcccuaagugcaccggcaauauucccucugccagagucagcauccugcacgaggugcggccuguuacauccggguguuuucccaucaugcaugaucgcaccaagauuagacaacucccuaaccugcugcggggauacgaacacauccgccucucuacgcauaaugugauuaacgccgagaaugcuccgggcggccccuauaaaaucgggacaagcggauccugcccuaacgucaccaauggcaacggguucuuugccacaauggcuugggccgugcccaagaaugacaaaaacaagaccgcgaccaauagccugacaauugaagugccuuacaucuguacggagggagaggaucagauuaccaucuggggcuuccacucugacaacgaaacacagauggccaaacuuuauggggauuccaagccccagaaguuuaccagcucugcuaacggagucacaacccacuacguuucccaaaucggcggcuucccgaaucagacggaggacgggggacugccucagagcggcagaauugugguggauuauaugguccagaaaucugggaagacaggaaccaucaccuaccaacggggcauucuccugccccagaaaguguggugcgccuccgggcgcagcaagguuaucaaaggaucccuuccucugauuggcgaagcugacugucuccaugagaaguauggcgggcugaacaaaucuaagcccuacuacacaggagagcacgccaaggcgaucggcaauugccccaucugggugaaaaccccucugaagcucgccaacgggacaaaauauagaccgcccgcuaagcugcuuaaagaacggggauuuuucggcgccauugcuggguuucuggagggcggaugggaaggcaugaucgccggguggcauggauacacgagccacggcgcccacggggucgcuguggcggccgaucucaaguccacccaggaggcuauuaauaagaucaccaaaaaccugaauagccuuggagaacuggagguuaagaaccuccagcgccugucuggcgccauggacgagcugcauaaugaaauucucgagcuggaugaaaaaguggacgaccuuagagccgauacaaucuccagccaaaucgagcuggcuguccuccugucuaacgaagggauuaucaauagcgaggacgagcaccuucuggcccucgaacggaagcugaaaaagaugcugggcccuuccgcgguggagauuggaaacggcuguuucgaaacaaagcauaaaugcaaucagaccugccucgaucgcaucgcugccgggacguuugacgccggagaguucucucugcccaccuuugauagccuuaacauuacagcugccucccugaaugacgauggccucgacaaccacaccauccugcuguauuacagcacagcugccucuucccuugcggucacccucaugauugccaucuucgugguuuauauggugagcagagauaacgucucuuguuccaucugccuguga

SEQ ID NO: 220111 - RNA, 1758 nt, Artificial Sequence; identical to SEQ ID NO: 219061
  derived and/or modified CDS sequence (opt5) from hemagglutinin__InfluenzaB__AHL93257

SEQ ID NO: 220112 - RNA, 1758 nt, Artificial Sequence; identical to SEQ ID NO: 219394
  derived and/or modified CDS sequence (opt5) from hemagglutinin__InfluenzaB__AHL93268

SEQ ID NO: 220113 - RNA, 1758 nt, Artificial Sequence
  derived and/or modified CDS sequence (opt5) from hemagglutinin__InfluenzaB__AHL93279
augaaggccaucauugugcugcucauggucguuaccagcaacgcugacagaaucugcacaggcauuacguccucuaauagcccccacguggugaaaaccgccacacagggggaggucaacgugaccggaguuaucccucugacaaccacaccgaccaagucccauuucgcgaaucuuaaaggcacggaaacccgggggaagcugugucccaaaugccucaacuguacagaucuggacguggcucuuggacgcccuaagugcaccggcaagauucccucugccagagucagcauccugcacgaggugcggccuguuacauccggguguuuucccaucaugcaugaucgcaccaaaauuagacaacucccuaaucugcugcggggauacgaacacauccgccucucuacgcauaacgugauuaaugccgagaacgcuccgggcggccccuauaagaucgggacaagcggauccugcccuaauauuaccaacggcaauggguucuuugccacaauggcuugggccguccccaaaaacgacaagaauaaaaccgcgaccaacccucugacaaucgaagugcccuacauuuguacggagggagaggaucagaucaccguguggggcuuccacagcgacaaugaaacacagauggccaaacuuuauggggauucuaagccgcagaaauuuaccuccagcgcuaacggagucacaacccacuacguuucucaaaucggcggcuucccuaaccagacggaggacgggggacugccccaguccggcagaauugugguggauuauaugguccaaaagagcgggaaaacaggaaccaucaccuaccagcggggcauucuccugccucagaagguguggugcgccucugggaaauccaagguuaucaaaggaagccuuccccugauuggcgaagcugacugucuccaugagaaguauggcgggcugaauaaguccaaacccuacuacacaggagagcacgccaaggcgaucggcaacugcccuaucugggugaaaaccccgcugaagcucgccaaugggacaaaauauagacccccugcuaagcugcuuaaggaacgcggauuuuucggcgccauugcuggguuucuggagggcggaugggaaggcaugaucgccggguggcauggauacacgucucacggcgcccacggggucgcuguggcggccgaucucaaaagcacccaggaggcuauuaacaagaucacaaagaaucugaacucccuuagcgaacuggagguuaagaaucuccagcggcugucuggagccauggacgagcugcauaacgaaauucucgagcuggaugaaaaaguggacgaccuucgcgccgauaccaucuccagccaaaucgagcuggcuguccuccugucuaaugaaggcauuaucaacagcgaggacgagcaccuucuggcccucgaaagaaagcugaagaaaaugcuggggcccuccgcgguggagauuggcaauggauguuucgaaacaaagcauaaaugcaaccagaccugccucgaucggaucgcugccggcacguuugacgccggggaguucucucugccuaccuuugauagccuuaauauuacagcugccucccugaacgacgauggacucgacaaucacaccauccugcuguauuacagcacagcugccucuucccuugcggucacccucaugauugccaucuucgugguuuauauggugagccgcgauaacgucucuuguuccaucugccuguga

SEQ ID NO: 220114 - RNA, 1758 nt, Artificial Sequence; identical to SEQ ID NO: 219061
  derived and/or modified CDS sequence (opt5) from hemagglutinin__InfluenzaB__AHL93290

SEQ ID NO: 220115 - RNA, 1758 nt, Artificial Sequence
  derived and/or modified CDS sequence (opt5) from hemagglutinin__InfluenzaB__AHL93301
augaaggccaucauugugcugcucauggucguuaccagcaacgcugacagaaucugcacaggcauuacguccucuaauagcccccacguggugaaaaccgccacacagggggaggucaacgugaccggaguuaucccucugacaaccacaccgaccaagucccauuucgcgaaucuuaaaggcacggaaacccgggggaagcugugucccaaaugccucaacuguacagaucuggacguggcucuuggacgcccuaagugcaccggcaagauucccucugccagagucagcauccugcacgaggugcggccuguuacauccggguguuuucccaucaugcaugaucgcaccaaaauuagacaacucccuaaucugcugcggggauacgaacacauccgccucucuacgcauaacgugauuaaugccgagaacgcuccgggcggccccuauaagaucgggacaagcggauccugcccuaauauuaccaacggcaauggguucuuugccacaauggcuugggccguccccaaaaacgacaagaauaaaaccgcgaccaacccucugacaaucgaagugcccuacauuuguacggagggagaggaucagaucaccguguggggcuuccacagcgacaaugaaacacagauggccaaacuuuauggggauucuaagccgcagaaguuuaccuccagcgcuaacggagucacaacccacuacguuucucaaaucggcggcuucccuaaccagacggaggacgggggacugccccaguccggcagaauugugguggauuauaugguccaaaagagcgggaaaacaggaaccaucaccuaccagcggggcauucuccugccucagaagguguggugcgccucugggcgcuccaaaguuaucaagggaagccuuccccugauuggcgaagcugacugucuccaugagaaauauggcgggcugaauaaguccaagcccuacuacacaggagagcacgccaaagcgaucggcaacugcccuaucugggugaagaccccgcugaaacucgccaaugggacaaaguauagacccccugcuaaacugcuuaaggaacggggauuuuucggcgccauugcuggguuucuggagggcggaugggaaggcaugaucgccggguggcauggauacacgucucacggcgcccacggggucgcuguggcggccgaucucaagagcacccaggaggcuauuaacaaaaucacaaagaaucugaacucccuuagcgaacuggagguuaaaaaucuccagcgccugucuggagccauggacgagcugcauaacgaaauucucgagcuggaugaaaagguggacgaccuuagagccgauaccaucuccagccaaaucgagcuggcuguccuccugucuaaugaaggcauuaucaacagcgaggacgagcaccuucuggcccucgaacggaaacugaagaagaugcuggggcccuccgcgguggagauuggcaauggauguuucgaaacaaaacauaagugcaaccagaccugccucgaucgcaucgcugccggcacguuuaaugccggggaguucucucugccuaccuuugacagccuuaacauuacagcugccucccugaaugaugacggacucgauaaccacaccauccugcuguauuacagcacagcugccucuucccuugcggucacccucaugauugccaucuucgugguuuauauggugagcagagacaacgucucuuguuccaucugccuguga

SEQ ID NO: 220116 - RNA, 1758 nt, Artificial Sequence
  derived and/or modified CDS sequence (opt5) from hemagglutinin__InfluenzaB__AHL93312
augaaggccaucauugugcugcucauggucguuaccagcaacgcugacagaaucugcacaggcauuacguccucuaauagcccccacguggugaaaaccgccacacagggggaggucaacgugaccggaguuaucccucugacaaccacaccgaccaagucccauuucgcgaaucuuaaaggcacggaaacccgggggaagcugugucccaaaugccucaacuguacagaucuggacguggcucuuggacgcccuaagugcaccggcaagauucccucugccagagucagcauccugcacgaggugcggccuguuacauccggguguuuucccaucaugcaugaucgcaccaaaauuagacaacucccuaaucugcugcggggauacgaacacauccgccucucuacgcauaacgugauuaaugccgagaacgcuccgggcggccccuauaagaucgggacaagcggauccugcccuaauauuaccaacggcaauggguucuacgccacaauggcuugggccguccccaaaaacgacaagaauaaaaccgcgaccaacccucugacaaucgaagugcccuauauuuguacggagggagaggaucagaucaccguguggggcuuucacagcgacaaugaaacacagauggccaaacuuuacggggauucuaagccgcagaaguucaccuccagcgcuaacggagucacaacccacuauguuucucaaaucggcggcuuuccuaaccagacggaggacgggggacugccccaguccggcagaauugugguggauuacaugguccaaaagagcgggaaaacaggaaccaucaccuaucagcggggcauucuccugccucagaagguguggugcgccucugggcgcuccaaaguuaucaagggaagccuuccccugauuggcgaagcugacugucuccaugagaaauacggcgggcugaauaaguccaagcccuacuauacaggagagcacgccaaagcgaucggcaacugcccuaucugggugaagaccccgcugaaacucgccaaugggacaaaguacagacccccugcuaaacugcuuaaggaacggggauucuuuggcgccauugcuggguuccuggagggcggaugggaaggcaugaucgccggguggcauggauauacgucucacggcgcccacggggucgcuguggcggccgaucucaagagcacccaggaggcuauuaacaaaaucacaaagaaucugaacucccuuagcgaacuggagguuaaaaaucuccagcgccugucuggagccauggacgagcugcauaacgaaauucucgagcuggaugaaaagguggacgaccuuagagccgauaccaucuccagccaaaucgagcuggcuguccuccugucuaaugaaggcauuaucaacagcgaggacgagcaccuucuggcccucgaacggaaacugaagaagaugcuggggcccuccgcgguggagauuggcaauggauguuuugaaacaaaacauaagugcaaccagaccugccucgaucgcaucgcugccggcacguucgacgccggggaguuuucucugccuaccuucgauagccuuaauauuacagcugccucccugaacgacgauggacucgacaaucacaccauccugcuguacuauagcacagcugccucuucccuugcggucacccucaugauugccaucuuugugguuuacauggugagcagagauaacgucucuuguuccaucugccuguga

SEQ ID NO: 220117 - RNA, 1758 nt, Artificial Sequence
  derived and/or modified CDS sequence (opt5) from hemagglutinin__InfluenzaB__AHL93323
augaaggccaucauugugcugcucauggucguuaccagcaacgcugacagaaucugcacaggcauuacguccucuaauagcccccacguggugaaaaccgccacacagggggaggucaacgugaccggaguuaucccucugacaaccacaccgaccaagucccauuucgcgaaucuuaaaggcacggaaacccgggggaagcugugucccaaaugccucaacuguacagaucuggacguggcucuuggacgcccuaagugcaccggcaagauucccucugccagagucagcauccugcacgaggugcggccuguuacauccggguguuuucccaucaugcaugaucgcaccaaaauuagacaacucccuaaucugcugcggggauacgaacacauccgccucucuacgcauaacgugauuaaugccgagaacgcuccgggcggccccuauaagaucgggacaagcggauccugcccuaauauuaccaacggcaauggguucuuugccacaauggcuugggccguccccaaaaacgacaagaauaaaaccgcgaccaacccucugacaaucgaagugcccuacauuuguacggagggagaggaucagaucaccguguggggcuuccacagcgacaaugaaacacagauggccaaacuuuauggggauucuaagccgcagaaguuuaccuccagcgcuaacggagucacaacccacuacguuucucaaaucggcggcuucccuaaccagacggaggacgggggacugccccaguccggcagaauugugguggauuauaugguccaaaagagcgggaaaacaggaaccaucaccuaccagcggggcauucuccugccucagaagguguggugcacaucugggcgcuccaaaguuaucaagggaagccuuccccugauuggcgaagccgacugucuccaugagaaauauggcgggcugaauaaguccaagcccuacuacaccggagagcacgcuaaagccaucggcaacugcccuaucugggugaagacaccgcugaaacucgcgaaugggacgaaguauagacccccugccaaacugcuuaaggaacggggauuuuucggcgcuauugccggguuucuggagggcggaugggaaggcaugaucgcuggguggcauggauacaccucucacggcgcccacggggucgccguggcugcggaucucaagagcacacaggaggccauuaacaaaaucaccaagaaucugaacucccuuagcgaacuggagguuaaaaaucuccagcgccugucuggagcuauggacgagcugcauaacgaaauucucgagcuggaugaaaagguggacgaccuuagagccgauacaaucuccagccaaaucgagcuggccguccuccugucuaaugaaggcauuaucaacagcgaggacgagcaccuucuggcucucgaacggaaacugaagaagaugcuggggcccuccgccguggagauuggcaauggauguuucgaaaccaaacauaagugcaaccagacgugccucgaucgcaucgcggcuggcaccuuugacgccggggaguucucucugccuacauuugauagccuuaauauuaccgccgcuucccugaacgacgauggacucgacaaucacacaauccugcuguauuacagcaccgccgcuucuucccuugccgucacgcucaugauugcgaucuucgugguuuauauggugagcagagauaacgucucuuguuccaucugccuguga

SEQ ID NO: 220118 - RNA, 1758 nt, Artificial Sequence
  derived and/or modified CDS sequence (opt5) from hemagglutinin__InfluenzaB__AHL93334
augaaggccaucauugugcugcucauggucguuaccagcaacgcugacagaaucugcacaggcauuacguccucuaauagcccccacguggugaaaaccgccacacagggggaggucaacgugaccggaguuaucccucugacaaccacaccgaccaagucccauuucgcgaaucuuaaaggcacggaaacccgggggaagcugugucccaaaugcccuaacuguacagaucucgacguggcucugggacgccccaagugcaccggcaagauuccuucugccagagucagcauccuucacgaggugcggcccguuacauccggguguuuuccuaucaugcaugaucgcaccaaaauuagacaacugccgaaucuccugcggggauacgaacacauccgccugucuacgcauaacgugauuaaugccgagaacgcucccggcggcccuuauaagaucgggacaagcggauccugccccaauauuaccaacggcaauggguucuuugccacaauggcuugggccgucccuaaaaacgacaagaauaaaaccgcgaccaacccccucacaaucgaagugccguacauuuguacggagggagaggaucagaucaccguguggggcuuccacagcgacaaugaaacacagauggccaagcuguauggggauucuaagccucagaaauuuaccuccagcgcuaacggagucacaacccacuacguuucucaaaucggcggcuuccccaaccagacggaggacgggggacuuccucaguccggcagaauugugguggauuauaugguccaaaagagcgggaaaacaggaaccaucaccuaccagcggggcauucugcucccccagaagguguggugcacaucugggcgcuccaaaguuaucaagggaagccugccccuuauuggcgaagccgacugucugcaugagaaauauggcgggcucaauaaguccaagccuuacuacaccggagagcacgcuaaagccaucggcaacugcccgaucugggugaagacaccccugaaacuggcgaaugggacgaaguauagaccucccgccaaacuccugaaggaacggggauuuuucggcgcuauugccggguuucuugagggcggaugggaaggcaugaucgcuggguggcauggauacaccucucacggcgcccacggggucgccguggcugcggaucucaagagcacacaggaggccauuaacaaaaucaccaagaaucugaacucccugagcgaacuugagguuaaaaaucugcagcgccucucuggagcuauggacgagcugcauaacgaaauucuggagcucgaugaaaagguggacgaccugagagccgauacaaucuccagccaaaucgagcuugccguccugcucucuaaugaaggcauuaucaacagcgaggacgagcaucugcuugcucuggaacggaaacucaagaagaugcuggggccuuccgccguggagauuggcaauggauguuucgaaaccaaacacaagugcaaccagacgugccuggaucgcaucgcggcuggcaccuuugacgccggggaguucucucuccccacauuugauagccugaauauuaccgccgcuucccuuaacgacgauggacuggacaaucacacaauccuccuguauuacagcaccgccgcuucuucccuggccgucacgcuuaugauugcgaucuucgugguuuauauggugagcagagauaacgucucuuguuccaucugccucuga

SEQ ID NO: 220119 - RNA, 1758 nt, Artificial Sequence; identical to SEQ ID NO: 219061
  derived and/or modified CDS sequence (opt5) from hemagglutinin__InfluenzaB__AHL93345

SEQ ID NO: 220120 - RNA, 1758 nt, Artificial Sequence; identical to SEQ ID NO: 219061
  derived and/or modified CDS sequence (opt5) from hemagglutinin__InfluenzaB__AHL93356

SEQ ID NO: 220121 - RNA, 1758 nt, Artificial Sequence
  derived and/or modified CDS sequence (opt5) from hemagglutinin__InfluenzaB__AHL93367
augaaggccaucauugugcugcucauggucguuaccagcaacgcugacagaaucugcacaggcauuacguccucuaauagcccccacguggugaaaaccgccacacagggggaggucaacgugaccggaguuaucccucugacaaccacaccgaccaagucccauuucgcgaaucuuaaaggcacggaaacccgggggaagcugugucccaaaugccucaacuguacagaucuggacguggcucuuggacgcccuaagugcaccggcaagauucccucugccagagucagcauccugcacgaggugcggccuguuacauccggguguuuucccaucaugcaugaucgcaccaaaauuagacaacucccuaaucugcugcggggauacgaauauauccgccucucuacgcacaacgugauuaaugccgagaacgcuccgggcggccccuacaagaucgggacaagcggauccugcccuaauauuaccaacggcaauggguucuuugccacaauggcuugggccguccccaaaaacgacaagaauaaaaccgcgaccaacccucugacaaucgaagugcccuauauuuguacggagggagaggaucagaucaccguguggggcuuccauagcgacaaugaaacacagauggccaaacuuuacggggauucuaagccgcagaaguuuaccuccagcgcuaacggagucacaacccacuauguuucucaaaucggcggcuucccuaaccagacggaggacgggggacugccccaguccggcagaauugugguggauuacaugguccaaaagagcgggaaaacaggaaccaucaccuaucagcggggcauucuccugccucagaagguguggugcgccucugggcgcuccaaaguuaucaagggaagccuuccccugauuggcgaagcugacugucuccacgagaaauacggcgggcugaauaaguccaagcccuacuauacaggagagcaugccaaagcgaucggcaacugcccuaucugggugaagaccccgcugaaacucgccaaugggacaaaguacagacccccugcuaaacugcuuaaggaacggggauuuuucggcgccauugcuggguuucuggagggcggaugggaaggcaugaucgccggguggcacggauauacgucucauggcgcccacggggucgcuguggcggccgaucucaagagcacccaggaggcuauuaacaaaaucacaaagaaucugaacucccuuagcgaacuggagguuaaaaaucuccagcgccugucuggagccauggacgagcugcacaacgaaauucucgagcuggaugaaaagguggacgaccuuagagccgauaccaucuccagccaaaucgagcuggcuguccuccugucuaaugaaggcauuaucaacagcgaggacgagcaucuucuggcccucgaacggaaacugaagaagaugcuggggcccuccgcgguggagauuggcaauggauguuucgaaacaaaacacaagugcaaccagaccugccucgaucgcaucgcugccggcacguuugacgccggggaguucucucugccuaccuuugauagccuuaauauuacagcugccucccugaacgacgauggacucgacaaucauaccauccugcuguacuauagcacagcugccucuucccuugcggucacccucaugauugccaucuucgugguuuacauggugagcagagauaacgucucuuguuccaucugccuguga

SEQ ID NO: 220122 - RNA, 1758 nt, Artificial Sequence; identical to SEQ ID NO: 219061
  derived and/or modified CDS sequence (opt5) from hemagglutinin__InfluenzaB__AHL93378

SEQ ID NO: 220123 - RNA, 1758 nt, Artificial Sequence
  derived and/or modified CDS sequence (opt5) from hemagglutinin__InfluenzaB__AHL93389
augaaggccaucauugugcugcucauggucguuaccagcaacgcugacagaaucugcacaggcauuacguccucuaauagcccccacguggugaaaaccgccacacagggggaggucaacgugaccggaguuaucccucugacaaccacaccgaccaaguccuacuucgcgaaucuuaaaggcacggaaacccgggggaagcugugucccaaaugccucaacuguacagaucuggacguggcucuuggacgcccuaagugcaccggcaagauucccucugccagagucagcauccugcaugaggugcggccuguuacauccggguguuuucccaucaugcacgaucgcaccaaaauuagacaacucccuaaucugcugcggggauaugaacauauccgccucucuacgcacaacgugauuaaugccgagaacgcuccgggcggccccuacaagaucgggacaagcggauccugcccuaauauuaccaacggcaauggguucuuugccacaauggcuugggccguccccaaaaacgacaagaauaaaaccgcgaccaacccucugacaaucgaagugcccuauauuuguacggagggagaggaucagaucaccguguggggcuuccauagcgacaaugaaacacagauggccaaacuuuacggggauucuaagccgcagaaguuuaccuccagcgcuaacggagucacaacccacuauguuucucaaaucggcggcuucccuaaccagacggaggacgggggacugccccaguccggcagaauugugguggauuacaugguccaaaagagcgggaaaacaggaaccaucaccuaucagcggggcauucuccugccucagaagguguggugcgccucugggcgcuccaaaguuaucaagggaagccuuccccugauuggcgaagcugacugucuccacgagaaauacggcgggcugaauaaguccaagcccuacuauacaggagagcaugccaaagcgaucggcaacugcccuaucugggugaagaccccgcugaaacucgccaaugggacaaaguacagacccccugcuaaacugcuuaaggaacggggauuuuucggcgccauugcuggguuucuggagggcggaugggaaggcaugaucgccggguggcacggauauacgucucauggcgcccacggggucgcuguggcggccgaucucaagagcacccaggaggcuauuaacaaaaucacaaagaaucugaacucccuuagcgaacuggagguuaaaaaucuccagcgccugucuggagccauggacgagcugcacaacgaaauucucgagcuggaugaaaagguggacgaccuuagagccgauaccaucuccagccaaaucgagcuggcuguccuccugucuaaugaaggcauuaucaacagcgaggacgagcaucuucuggcccucgaacggaaacugaagaagaugcuggggcccuccgcgguggagauuggcaauggauguuucgaaacaaaacacaagugcaaccagaccugccucgaucgcaucgcugccggcacguuugacgccggggaguucucucugccuaccuuugauagccuuaauauuacagcugccucccugaacgacgauggacucgacaaucauaccauccugcuguacuauagcacagcugccucuucccuugcggucacccucaugauugccaucuucgugguuuacauggugagcagagauaacgucucuuguuccaucugccuguga

SEQ ID NO: 220124 - RNA, 1758 nt, Artificial Sequence; identical to SEQ ID NO: 219061
  derived and/or modified CDS sequence (opt5) from hemagglutinin__InfluenzaB__AHL93400

SEQ ID NO: 220125 - RNA, 1758 nt, Artificial Sequence; identical to SEQ ID NO: 219394
  derived and/or modified CDS sequence (opt5) from hemagglutinin__InfluenzaB__AHL93411

SEQ ID NO: 220126 - RNA, 1758 nt, Artificial Sequence; identical to SEQ ID NO: 219394
  derived and/or modified CDS sequence (opt5) from hemagglutinin__InfluenzaB__AHL93422

SEQ ID NO: 220127 - RNA, 1758 nt, Artificial Sequence; identical to SEQ ID NO: 219394
  derived and/or modified CDS sequence (opt5) from hemagglutinin__InfluenzaB__AHL93433

SEQ ID NO: 220128 - RNA, 1758 nt, Artificial Sequence; identical to SEQ ID NO: 219061
  derived and/or modified CDS sequence (opt5) from hemagglutinin__InfluenzaB__AHL93444

SEQ ID NO: 220129 - RNA, 1758 nt, Artificial Sequence
  derived and/or modified CDS sequence (opt5) from hemagglutinin__InfluenzaB__AHL93455
augaaggccaucauugugcugcucauggucguuaccagcaacgcugacagaaucugcacaggcauuacguccucuaauagcccccacguggugaaaaccgccacacagggggaggucaacgugaccggaguuaucccucugacaaccacaccgaccaagucccauuucgcgaaucuuaaaggcacggaaacccgggggaagcugugucccaaaugccucaacuguacagaucuggacguggcucuuggacgcccuaagugcaccggcaagauucccucugccagagucagcauccugcacgaggugcggccuguuacauccggguguuuucccaucaugcaugaucgcaccaaaauuagacaacucccuaaucugcugcggggauacgaacacauccgccucucuacgcauaacgugauuaaugccgagaacgcuccgggcggccccuauaagaucgggacaagcggauccugcccuaauauuaccaacggcaauggguucuuugccacaauggcuugggccguccccaaaaacgacaagaauaaaaccgcgaccaacccucugacaaucgaagugcccuacauuuguacggagggagaggaucagaucaccguguggggcuuccacagcgacaaugaaacacagauggccaaacuuuauggggauucuaagccgcagaaguuuaccuccagcgcuaacggagucacaacccacuacguuucucaaaucggcggcuucccuaaccagacggaggacgggggacugccccaguccggcagaauugugguggauuauaugguccaaaagagcgggaaaacaggaaccaucaccuaccagcggggcauucuccugccucagaagguguggugcgccucugggcgcuccaaaguuaucaagggaagccuuccccugauuggcgaagcugacugucuccaugagaaauauggcgggcugaauaaguccaagcccuacuacacaggagagcacgccaaagcgaucggcaacugcccuaucugggugaagaccccgcugaaacucgccaaugggacaaaguauagacccccugcuaaacugcuuaaggaacggggauuuuucggcgccauugcuggguuucuggagggcggaugggaaggcaugaucgccggguggcauggauacacgucucacggcgcccacggggucgcuguggcggccgaucucaagagcacccaggaggcuauuaacaaaaucacaaagaaucugaacucccuuagcgaacuggagguuaaaaaucuccagcgccugucuggagccaugaacgagcugcauaaugaaauucucgagcuggacgaaaagguggaugaccuuagagccgacaccaucuccagccaaaucgagcuggcuguccuccugucuaacgaaggcauuaucaauagcgaggaugagcaccuucuggcccucgaacggaaacugaagaagaugcuggggcccuccgcgguggagauuggcaacggauguuucgaaacaaaacauaagugcaaucagaccugccucgaccgcaucgcugccggcacguuugaugccggggaguucucucugccuaccuuugacagccuuaacauuacagcugccucccugaaugaugacggacucgauaaccacaccauccugcuguauuacagcacagcugccucuucccuugcggucacccucaugauugccaucuucgugguuuauauggugagcagagacaacgucucuuguuccaucugccuguga

SEQ ID NO: 220130 - RNA, 1758 nt, Artificial Sequence; identical to SEQ ID NO: 219061
  derived and/or modified CDS sequence (opt5) from hemagglutinin__InfluenzaB__AHL93466

SEQ ID NO: 220131 - RNA, 1758 nt, Artificial Sequence; identical to SEQ ID NO: 218680
  derived and/or modified CDS sequence (opt5) from hemagglutinin__InfluenzaB__AHL93477

SEQ ID NO: 220132 - RNA, 1758 nt, Artificial Sequence; identical to SEQ ID NO: 218755
  derived and/or modified CDS sequence (opt5) from hemagglutinin__InfluenzaB__AHL93488

SEQ ID NO: 220133 - RNA, 1755 nt, Artificial Sequence
  derived and/or modified CDS sequence (opt5) from hemagglutinin__InfluenzaB__AHL93499
augaaggccaucauugugcugcucauggucguuaccagcaacgcugacagaaucugcacaggcauuacguccucuaauagcccccacguggugaaaaccgccacacagggggaagucaacgugaccggaguuaucccucugacaaccacaccgaccaaguccuacuucgcgaaucuuaaaggcacgcggacccgcgggaagcugugucccgauugccucaacuguacagaccuggauguggcucuuggaagaccuaugugcgucggcaccacacccucugccaaagccagcauucugcaugaaauccggccugugaccuccggguguuuucccaucaugcacgaccgcacgaagauuagacaacucccuaaucugcugcggggauaugagaacauccgccucucuacacagaauguuauugaugcugaaaaggccccgggcggccccuacagacuggggaccagcggauccugcccuaacgcuacaagcaaaaucggcuucuuugccaccauggcgugggccgugcccaaggacaauuauaaaaacgcuaccaauccucuuacagucgaggugcccuacauuuguacggaaggggaggaucagaucaccguguggggauuccauucugacaacaagacacagaugaaaaaucuguauggcgauuccaacccgcaaaaguuuaccagcucugccaauggggucacagcucacuacguuucccagauuggagacuucccugaucagaccgaggacggcggccucccccagagcgggcggaucgugguggauuauaugaugcaaaagccuggaaaaacgggcacaaucgucuaccagcgcggggugcugcuuccccagaagguuuggugcgccucuggaagauccaaagugauuaagggcagccugccccucaucggggaagcggacugucugcaugagaaauacggaggccugaacaaguccaaaccuuauuacaccggcgaacacgccaaggcuauugggaacugcccgaucugggucaagacaccccucaaacuggccaauggaaccaaguaucggccucccgcuaaacuucugaaggagcgcggcuuuuucggggccauugccggauuucucgagggcgggugggaaggcaugaucgcuggauggcacggcuacaccucucauggggcgcacggaguggccguugcugccgaccugaaaagcacacaggaggccaucaacaagauuacgaagaaucuuaacucccugagcgaacucgaggugaaaaaucugcaaagacugucuggcgcuauggaugaacuccauaacgagauccuggagcuugacgaaaaggucgaugaccugcgggccgauaccauuuccagccagaucgagcucgcggugcugcuuucuaaugaagggauuaucaacagcgaggacgaacaucugcucgcucuggagcgcaaacugaagaaaaugcucggaccuuccgccgucgauaucggcaauggguguuucgagacaaagcacaagugcaaccagaccugccuggacagaauugccgcuggcacauuuaaugccggagaguucucucuucccaccuuugauagccugaacaucacggcugccucccucaaugacgauggccuggacaaccacaccauucugcuuuauuacagcacagcggccucuucccucgcugugacccugaugcuggccaucuucauuguuuauauggugagccgggacaaugucucuuguuccaucugccucuga

SEQ ID NO: 220134 - RNA, 1758 nt, Artificial Sequence; identical to SEQ ID NO: 218680
  derived and/or modified CDS sequence (opt5) from hemagglutinin__InfluenzaB__AHL93510

SEQ ID NO: 220135 - RNA, 1755 nt, Artificial Sequence
  derived and/or modified CDS sequence (opt5) from hemagglutinin__InfluenzaB__AHL93521
augaaggccaucauugcucugcucaugguggucaccagcaacgccgacagaaucugcacaggcauuacguccucuaauagcccccacguugugaaaaccgcgacacagggggaagugaacgucaccggagugaucccucugacaaccacaccgaccaaguccuacuucgcuaaucuuaaaggcacgcggacccgcgggaagcugugucccgauugccucaacuguacagaccuggauguugcccuuggaagaccuaugugcgugggcaccacacccucugccaaagcuagcauucugcaugaaguccggccugugaccuccggguguuuucccaucaugcacgaccgcacgaagaucagacaacucccuaaucugcugcggggauaugagaacauucgccucucuacacagaauguuaucgaugccgaaaaggcuccgggcggccccuacagacuggggaccagcggauccugcccuaacgccacaagcaaaauuggcuucuuugcgaccauggccugggcugugcccaaggacaauuauaaaaacgccaccaauccucuuacagucgaggugcccuacaucuguacggaaggggaggaucagauuaccguguggggauuccauucugacaacaagacacagaugaaaaaucuguauggcgauuccaacccgcaacgguuuaccagcucugcuaauggggucacaacccacuacguuucccagaucggagacuucccugaucagacggaggacggcggccucccccagagcgggcgcauugugguggauuauaugguccaaaagccuggaaagacaggcaccaucguguaccagagagggguucugcuuccccagaaaguguggugcgccucuggacgguccaaggucaucaaaggcagccugccccucauuggggaagcggacugucugcaugagaaguacggaggccugaacaaauccaagccuuauuacaccggcgaacacgccaaagcuaucgggaacugcccgauuugggugaagacaccccucaagcuggccaauggaaccaaauaucgcccucccgcuaagcugcugaaagagagaggcuuuuucggggccaucgccggauuucucgagggcgggugggaaggcaugauugcuggauggcacggcuacacaucucauggggcgcacggaguugccguggcugccgaccuuaagagcacgcaggaggccaucaacaaaaucaccaagaaucuuaacucccugagcgaacucgaggucaagaaucugcaacggcugucuggcgcuauggaugaacuccauaacgagauucuggagcuugacgaaaaaguggaugaccugcgcgccgauacaaucuccagccagauugagcucgcgguccugcuuucuaaugaagggaucauuaacagcgaggacgaacaucugcucgcucuggagagaaagcugaaaaagaugcucggaccuuccgccguggauaucggcaauggguguuucgagaccaaacacaagugcaaccagacaugccuggaccggaucgccgcuggcaccuuuaaugccggagaguucucucuucccacguuugauagccugaacauuaccgcugccucccucaaugacgauggccuggacaaccacacaauccugcuuuauuacagcaccgcggccucuucccucgcuguuacacugaugcuggccauuuucaucguguauauggucagcagagacaaugugucuuguuccauuugccucuga

SEQ ID NO: 220136 - RNA, 1758 nt, Artificial Sequence; identical to SEQ ID NO: 218755
  derived and/or modified CDS sequence (opt5) from hemagglutinin__InfluenzaB__AHL93532

SEQ ID NO: 220137 - RNA, 1758 nt, Artificial Sequence; identical to SEQ ID NO: 218717
  derived and/or modified CDS sequence (opt5) from hemagglutinin__InfluenzaB__AHL93543

SEQ ID NO: 220138 - RNA, 1758 nt, Artificial Sequence; identical to SEQ ID NO: 218717
  derived and/or modified CDS sequence (opt5) from hemagglutinin__InfluenzaB__AHL93554

SEQ ID NO: 220139 - RNA, 1758 nt, Artificial Sequence; identical to SEQ ID NO: 218717
  derived and/or modified CDS sequence (opt5) from hemagglutinin__InfluenzaB__AHL93565

SEQ ID NO: 220140 - RNA, 1758 nt, Artificial Sequence; identical to SEQ ID NO: 218755
  derived and/or modified CDS sequence (opt5) from hemagglutinin__InfluenzaB__AHL93576

SEQ ID NO: 220141 - RNA, 1758 nt, Artificial Sequence; identical to SEQ ID NO: 218755
  derived and/or modified CDS sequence (opt5) from hemagglutinin__InfluenzaB__AHL93587

SEQ ID NO: 220142 - RNA, 1758 nt, Artificial Sequence
  derived and/or modified CDS sequence (opt5) from hemagglutinin__InfluenzaB__AHL93609
augaaggccaucauugugcugcucauggucguuaccagcaacgcugacagaaucugcacaggcauuacguccucuaauagcccccacguggugaaaaccgccacacagggggaggucaacgugaccggaguuaucccucugacaaccacaccgaccaagucccauuucgcgaaucuuaaaggcacggaaacccgggggaagcugugucccaaaugcccuaacuguacagaucucgacguggcucugggacgccccaagugcaccggcaagauuccuucugccagagucagcauccuucacgaggugcggcccguuacauccggguguuuuccuaucaugcaugaucgcaccaaaauuagacaacugccgaaucuccugcggggauacgaacacauccgccugucuacgcauaacgugauuaaugccgagaacgcucccggcggcccuuauaagaucgggacaagcggauccugccccaaugucaccaacggcaauggguucuuugccacaauggcuugggccgugccuaaaaacgacaagaauaaaaccgcgaccaacccccucacaauugaagugccguacaucuguacggagggagaggaucagauuaccgucuggggcuuccacagcgacaaugaaacacagauggccaagcuguauggggauucuaagccucagaaauuuaccuccagcgcuaacggaguuacaacccacuacgugucucaaaucggcggcuuccccaaccagacggaggacgggggacuuccucaguccggcagaaucguggucgauuauauggugcaaaagagcgggaaaacaggaaccauuaccuaccagcggggcauccugcucccccagaagguuuggugcgccucugggcgcuccaaagugauuaagggaagccugccccuuaucggcgaagcugacugucugcaugagaaauauggcgggcucaauaaguccaagccuuacuacacaggagagcacgccaaagcgauuggcaacugcccgaucugggucaagacaccccugaaacuggccaaugggaccaaguauagaccucccgcuaaacuccugacggaacggggauuuuucggcgccaucgcuggguuucuugagggcggaugggaaggcaugauugccggguggcauggauacaccucucacggcgcccacgggguggcuguugcggccgaucucaagagcacacaggaggcuaucaacaagauuaccaaaaaucugaacucccugagcgaacuugaggugaagaaucugcagcgccucucuggagccauggacgagcugcauaacgaaauccuggagcucgaugaaaaagucgacgaccugagagccgauacaauuuccagccaaaucgagcuugcugugcugcucucuaaugaaggcaucauuaacagcgaggacgagcaucugcuugcccuggaacggaagcucaaaaagaugcuggggccuuccgcggucgagaucggcaauggauguuucgaaaccaagcacaaaugcaaccagacgugccuggaucgcauugcugccggcaccuuugacgccggggaguucucucuccccacauuugauagccugaauaucaccgcugccucccuuaacgacgauggacuggacaaucacacaauucuccuguauuacagcaccgcugccucuucccuggcggugacgcuuaugaucgccauuuucguuguguauauggucagcagagauaacgugucuuguuccaucugccucuga

SEQ ID NO: 220143 - RNA, 1758 nt, Artificial Sequence; identical to SEQ ID NO: 218755
  derived and/or modified CDS sequence (opt5) from hemagglutinin__InfluenzaB__AHL93620

SEQ ID NO: 220144 - RNA, 1758 nt, Artificial Sequence; identical to SEQ ID NO: 220142
  derived and/or modified CDS sequence (opt5) from hemagglutinin__InfluenzaB__AHL93631

SEQ ID NO: 220145 - RNA, 1758 nt, Artificial Sequence; identical to SEQ ID NO: 220142
  derived and/or modified CDS sequence (opt5) from hemagglutinin__InfluenzaB__AHL93642

SEQ ID NO: 220146 - RNA, 1755 nt, Artificial Sequence
  derived and/or modified CDS sequence (opt5) from hemagglutinin__InfluenzaB__AHL93653
augaaggccaucauugugcugcucauggucguuaccagcaacgcugacagaaucugcacaggcauuacguccucuaauagcccccacguggugaaaaccgccacacagggggaagucaacgugaccggaguuaucccucugacaaccacaccgaccaaguccuacuucgcgaaucuuaaaggcacgcggacccgcgggaagcugugucccgauugccucaacuguacagaccuggauguggcucuuggaagaccuaugugcgucggcaccacacccucugccaaagccagcauucugcaugaagugcggccuguuaccuccggguguuuucccaucaugcacgaccgcacgaagaucagacaacucccuaaucugcugcggggauaugagaacauucgccucucuacacagaaugugaucgaugcugaaaaggccccgggcggccccuacagacuggggaccagcggauccugcccuaacgcuacaagcaaaauuggcuucuuugccaccauggcgugggccguccccaaggacaauuauaaaaacgcuaccaauccucuuacaguggaggugcccuacaucuguacggaaggggaggaucagauuaccgucuggggauuccauucugacaacaagacacagaugaaaaaucuguauggcgauuccaacccgcaaaaguuuaccagcucugccaaugggguuacaacccacuacgugucccagaucggagacuucccugaucagacggaggacggcggccucccccagagcgggcggauuguggucgauuauauggugcaaaagccuggaaaaacaggcaccaucguuuaccagcgcggggugcugcuuccccagaaggucuggugcgcuucuggaagauccaaagugaucaagggcagccugccccucauuggggaagccgacugucugcaugagaaauacggaggccugaacaaguccaaaccuuauuacaccggcgaacacgcgaaggccaucggggacugcccgauuuggguuaagacaccccucaaacuggcuaacggaaccaaguaucggccucccgccaaacuucugaaggagcgcggcuuuuucggggcuaucgccggauuucucgagggcgggugggaaggcaugauugccggauggcacggcuacacaucucauggggcucacggaguggcggucgccgcugaucugaaaagcacgcaggaggccaucaauaagaucaccaagaaccuuaauucccugagcgaacucgaggugaaaaaccugcaaagacugucuggcgccauggacgaacuccauaaugagauucuggagcuugaugaaaaggucgacgaucugcgggcugacacaaucuccagccagauugagcucgccgugcugcuuucuaacgaagggaucauuaauagcgaggaugaacaucugcucgcgcuggagcgcaaacugaagaaaaugcucggaccuuccgcuguugacaucggcaacggguguuucgagaccaagcacaagugcaaucagacaugccuggauagaaucgccgccggcaccuuuaacgcuggagaguucucucuucccacguuugacagccugaauauuaccgccgcuucccucaacgaugacggccuggacaaucacacaauccugcuuuauuacagcaccgccgcgucuucccucgccgugacacugaugcuggcuauuuucaucgucuauauggugagccgggauaacguuucuuguuccauuugccucuga

SEQ ID NO: 220147 - RNA, 1758 nt, Artificial Sequence; identical to SEQ ID NO: 218755
  derived and/or modified CDS sequence (opt5) from hemagglutinin__InfluenzaB__AHL93664

SEQ ID NO: 220148 - RNA, 1758 nt, Artificial Sequence; identical to SEQ ID NO: 218680
  derived and/or modified CDS sequence (opt5) from hemagglutinin__InfluenzaB__AHL93675

SEQ ID NO: 220149 - RNA, 1758 nt, Artificial Sequence; identical to SEQ ID NO: 220142
  derived and/or modified CDS sequence (opt5) from hemagglutinin__InfluenzaB__AHL93686

SEQ ID NO: 220150 - RNA, 1758 nt, Artificial Sequence; identical to SEQ ID NO: 220142
  derived and/or modified CDS sequence (opt5) from hemagglutinin__InfluenzaB__AHL93697

SEQ ID NO: 220151 - RNA, 1758 nt, Artificial Sequence
  derived and/or modified CDS sequence (opt5) from hemagglutinin__InfluenzaB__AHL93708
augaaggccaucauugugcugcucauggucguuaccagcaacgcugacagaaucugcacaggcauuacguccucuaauagcccccacguggugaaaaccgccacacagggggaagucaacgugaccggaguuaucccucugacaaccacaccgaccaagucccauuucgcgaaucuuaaaggcacggaaacccgggggaagcugugucccaaaugcccuaacuguacagaucucgacguggcucugggacgccccaagugcaccggcaagauuccuucugccagagucagcauccuucacgaggugcggcccguuacauccggguguuuuccuaucaugcaugaucgcaccaaaauuagacaacugccgaaucuccugcggggauacgaacacauccgccugucuacgcauaacgugauuaaugccgagaacgcucccggcggcccuuauaagaucgggacaagcggauccugccccaaugucaccaacggcaauggguucuuugccacaauggcuugggccgugccuaaaaacgacaagaauaaaaccgcgaccaacccccucacaauugaagugccguacaucuguacggagggagaggaucagauuaccgucuggggcuuccacagcgacaaugaaacacagauggccaagcuguauggggauucuaagccucagaaauuuaccuccagcgcuaacggaguuacaacccacuacgugucucaaaucggcggcuuccccaaccagacggaggacgggggacuuccucaguccggcagaaucguggucgauuauauggugcaaaagagcgggaaaacaggaaccauuaccuaccagcggggcauccugcucccccagaagguuuggugcgccucugggcgcuccaaagugauuaagggaagccugccccuuaucggcgaagcugacugucugcaugagaaauauggcgggcucaauaaguccaagccuuacuacacaggaaaacacgccaaggcgauuggcaacugcccgaucugggucaaaacaccccugaagcuggccaaugggaccaaauauagaccucccgcuaagcuccugacggagcggggauuuuucggcgccaucgcuggguuucuugaaggcggaugggagggcaugauugccggguggcauggauacaccucucacggcgcccacgggguggcuguugcggccgaucucaagagcacacaggaagcuaucaacaaaauuaccaagaaucugaacucccugagcgagcuugaagugaaaaaucugcagcgccucucuggagccauggacgagcugcauaacgagauccuggaacucgaugagaaggucgacgaccugagagccgauacaauuuccagccaaaucgaacuugcugugcugcucucuaaugagggcaucauuaacagcgaagacgagcaucugcuugcccuggagcggaaacucaagaagaugcuggggccuuccgcggucgaaaucggcaauggauguuucgagaccaaacacaagugcaaccagacgugccuggaucgcauugcugccggcaccuuugacgccggggaguucucucuccccacauuugauagccugaauaucaccgcugccucccuuaacgacgauggacuggacaaucacacaauucuccuguauuacagcaccgcugccucuucccuggcggugacgcuuaugaucgccauuuucguuguguauauggucagcagagauaacgugucuuguuccaucugccucuga

SEQ ID NO: 220152 - RNA, 1758 nt, Artificial Sequence
  derived and/or modified CDS sequence (opt5) from hemagglutinin__InfluenzaB__AHL93719
augaaggccaucauugugcugcucauggucguuaccagcaacgcugacagaaucugcacaggcauuacguccucuaauagcccccacaucgugaaaaccgccacacagggggaggugaacgucaccggagugauuccucugacaaccacaccgaccaagucccauuucgcgaaucuuaaaggcacggaaacccgggggaagcugugucccaaaugccucaacuguacagaucuggacguugcucuuggacgcccuaagugcaccggcaagauccccucugccagagugagcauccugcacgaggucauuccugugacauccggguguuuucccaucaugcaugaucggaccaaaauucgccaacucccuaaucugcugagaggauacgaacacauccggcucucuacgcauaacguuauuaaugccgagaacgcuccgggcggccccuauaagaucgggacaagcggauccugcccuaauauuaccaacggcaauggguucuuugccacaauggcuugggccgugcccaaaaacgacaagaauaaaaccgcgaccaacccucugacaaucgaaguccccuacaucuguacggagggagaggaucagauuaccguguggggcuuccacagcgacaaugaaacacagauggccaaacuuuauggggauucuaagccgcagaaguuuaccuccagcgcuaacggagugacaacccacuacgucucucaaaucggcggcuucccuaaccagacggaggacgggggacugccccaguccggccgcauuguuguggauuauauggugcaaaagagcgggaaaacaggaaccaucaccuaccagagaggcauucuccugccucagaaggucuggugcgccucugggcgguccaaagugaucaagggaagccuuccccugaucggcgaagcugacugucuccaugagaaauauggcgggcugaauaaguccaagcccuacuacacaggagagcacgccaaagcgauuggcaacugcccuaucuggguuaagaccccgcugaaacucgccaaugggacaaaguauagacccccugcuaaacugcuuaaggaacgcggauuuuucggcgccauugcuggguuucuggagggcggaugggaaggcaugaucgccggguggcauggauacacgucucacggcgcccacgggguggcugucgcggccgaucucaagagcacccaggaggcuauuaacaaaaucacaaagaaucugaacucccuuagcgaacuggaggugaaaaaucuccagcggcugucuggagccauggacgagcugcauaacgaaauccucgagcuggaugaaaagguugacgaccuucgcgccgauaccauuuccagccaaaucgagcuggcugugcuccugucuaaugaaggcauuaucaacagcgaggacgagcaccuucuggcccucgaaagaaaacugaagaagaugcuggggcccuccgcggucgagauuggcaauggauguuucgaaacaaaacauaagugcaaccagaccugccucgaucggaucgcugccggcacguuugacgccggggaguucucucugccuaccuuugauagccuuaauauuacagcugccucccugaacgacgauggacucgacaaucacaccauccugcuguauuacagcacagcugccucuucccuugcggugacccucaugaucgccauuuucgucguguauaugguuagccgcgauaacgugucuuguuccaucugccuguga

SEQ ID NO: 220153 - RNA, 1758 nt, Artificial Sequence; identical to SEQ ID NO: 218755
  derived and/or modified CDS sequence (opt5) from hemagglutinin__InfluenzaB__AHL93730

SEQ ID NO: 220154 - RNA, 1758 nt, Artificial Sequence; identical to SEQ ID NO: 218755
  derived and/or modified CDS sequence (opt5) from hemagglutinin__InfluenzaB__AHL93741

SEQ ID NO: 220155 - RNA, 1758 nt, Artificial Sequence; identical to SEQ ID NO: 218717
  derived and/or modified CDS sequence (opt5) from hemagglutinin__InfluenzaB__AHL93752

SEQ ID NO: 220156 - RNA, 1758 nt, Artificial Sequence; identical to SEQ ID NO: 220142
  derived and/or modified CDS sequence (opt5) from hemagglutinin__InfluenzaB__AHL93763

SEQ ID NO: 220157 - RNA, 1758 nt, Artificial Sequence; identical to SEQ ID NO: 218680
  derived and/or modified CDS sequence (opt5) from hemagglutinin__InfluenzaB__AHL93774

SEQ ID NO: 220158 - RNA, 1758 nt, Artificial Sequence; identical to SEQ ID NO: 220142
  derived and/or modified CDS sequence (opt5) from hemagglutinin__InfluenzaB__AHL93785

SEQ ID NO: 220159 - RNA, 1758 nt, Artificial Sequence; identical to SEQ ID NO: 218755
  derived and/or modified CDS sequence (opt5) from hemagglutinin__InfluenzaB__AHL93796

SEQ ID NO: 220160 - RNA, 1758 nt, Artificial Sequence; identical to SEQ ID NO: 218680
  derived and/or modified CDS sequence (opt5) from hemagglutinin__InfluenzaB__AHL93818

SEQ ID NO: 220161 - RNA, 1758 nt, Artificial Sequence
  derived and/or modified CDS sequence (opt5) from hemagglutinin__InfluenzaB__AHL93829
augaaggccaucauugugcugcucauggucguuaccagcaacgcugacagaaucugcacaggcauuacguccucuaauagcccccacaucgugaaaaccgccacacagggggaggugaacgucaccggagugauuccucugacaaccacaccgaccaagucccauuucgcgaaucuuaaaggcacggaaacccgggggaagcugugucccaaaugccucaacuguacagaucuggacguugcucuuggacgcccuaagugcaccggcaagauccccucugccagagugagcauccugcacgagguccggccugugacauccggguguuuucccauuaugcaugaucgcaccaaaaucagacaacucccuaaucugcugcggggauacgaacacauucgccucucuacgcauaacguuaucaauacagagaacgccccgggcggccccuauaagauugggaccagcggauccugcccuaauaucacaaacggcaauggguucuuugcuaccauggccugggcugugcccaaaaacgacaagaauaaaaccgccacaaacccucugacgauugaaguccccuacaucuguaccgagggagaggaucagaucacaguguggggcuuccacagcgacaaugaaacccagauggcgaaacuuuauggggauucuaagccgcagaaguuuacauccagcgccaacggagugaccacgcacuacgucucucaaauuggcggcuucccuaaccagacagaggacgggggacugccccaguccggcagaaucguuguggauuauauggugcaaaagagcgggaaaaccggaaccauuacauaccagcggggcauccuccugccucagaaggucuggugcgcuucugggcgcuccaaagugauuaagggaagccuuccccugaucggcgaagccgacugucuccaugagaaauauggcgggcugaauaaguccaagcccuacuacaccggagagcacgcuaaagccaucggcaacugcccuauuuggguuaagacaccgcugaaacucgcgaaugggacgaaguauagacccccugccaaacugcuuaaggaacggggauuuuucggcgcuaucgccggguuucuggagggcggaugggaaggcaugauugcuggguggcauggauacaccucucacggcgcccacgggguggccgucgcugcggaucucaagagcacacaggaggccaucaacaaaauuaccaagaaucugaacucccuuagcgaacuggaggugaaaaaucuccagcgccugucuggagcuauggacgagcugcauaacgaaauccucgagcuggaugaaaagguugacgaccuuagagccgauacaaucuccagccaaauugagcuggccgugcuccugucuaaugaaggcaucauuaacagcgaggacgagcaccuucuggcucucgaacggaaacugaagaagaugcuggggcccuccgccgucgagaucggcaauggauguuucgaaaccaaacauaagugcaaccagacgugccucgaucgcauugcggcuggcaccuuugacgccggggaguucucucugccuacauuugauagccuuaauaucaccgccgcuucccugaacgacgauggacucgacaaucacacaauucugcuguauuacagcaccgccgcuucuucccuugccgugacgcucaugaucgcgaucuucgucguguauaugguuagcagagauaacgugucuuguuccauuugccuguga

SEQ ID NO: 220162 - RNA, 1758 nt, Artificial Sequence; identical to SEQ ID NO: 219061
  derived and/or modified CDS sequence (opt5) from hemagglutinin__InfluenzaB__AHL93840

SEQ ID NO: 220163 - RNA, 1758 nt, Artificial Sequence; identical to SEQ ID NO: 218755
  derived and/or modified CDS sequence (opt5) from hemagglutinin__InfluenzaB__AHL93851

SEQ ID NO: 220164 - RNA, 1758 nt, Artificial Sequence; identical to SEQ ID NO: 218755
  derived and/or modified CDS sequence (opt5) from hemagglutinin__InfluenzaB__AHL93862

SEQ ID NO: 220165 - RNA, 1758 nt, Artificial Sequence
  derived and/or modified CDS sequence (opt5) from hemagglutinin__InfluenzaB__AHL93873
augaaggccaucauugugcugcucauggucguuaccagcaacgcugacagaaucugcacaggcauuacguccucuaauagcccccacaucgugaaaaccgccacacagggggaagugaacgucaccggagugauuccucugacaaccacaccgaccaagucccauuucgcgaaucuuaaaggcacggaaacccgcggggagcugugucccaagugccucaacuguacagaucuggacguugcucuuggacggccuaaaugcaccggcaagauccccucugccagagugagcauccugcacgaaguccggccugugacauccggguguuuucccauuaugcaugaucgcaccaagaucagacaacucccuaaucugcugcggggauacgagcacauucgccucucuacgcauaacguuaucaaugccgaaaacgcuccgggcggccccuauaaaauugggacaagcggauccugcccuaauaucaccaacggcaauggguucuuugccacaauggcuugggccgugcccaagaacgacaaaaauaagaccgcgaccaacccucugacaauugagguccccuacaucuguacggagggagaagaucagaucaccguguggggcuuccacagcgacaaugagacacagauggccaaacuuuauggggauucuaagccgcagaaguuuaccuccagcgcuaacggagugacaacccacuacgucucucaaauuggcggcuucccuaaccagacggaagacgggggacugccccaguccggcagaaucguuguggauuauauggugcagaaaagcgggaagacaggaaccauuaccuaccaacggggcauccuccugccucagaaagucuggugcgccucugggcgcuccaaggugauuaaaggaagccuuccccugaucggcgaggcugacugucuccaugagaaguauggcgggcugaauaaauccaagcccuacuacacaggagaacacgccaaggcgaucggcaacugcccuauuuggguuaaaaccccgcugaagcucgccaaugggacaaaauauagacccccugcuaagcugcuuaaagagcggggauuuuucggcgccaucgcuggguuucuggaaggcggaugggagggcaugauugccggguggcauggauacacgucucacggcgcccacgggguggcugucgcggccgaucucaagagcacccaggaagcuaucaacaagauuaccaaaaaucugaacucccuuagcgagcuggaggugaagaaucuccagcgccugucuggagccauggacgaacugcauaacgagauccucgaacuggaugagaaaguugacgaccuuagagccgauacaaucuccagccaaauugaacuggcugugcuccugucuaaugagggcaucauuaacagcgaggacgaacaccuucuggcccucgagcggaagcugaaaaagaugcuggggcccuccgcggucgaaaucggcaauggauguuucgagacaaagcauaaaugcaaccagaccugccucgaucgcauugcugccggcacguuugacgccggggaguucucucugccuaccuuugauagccuuaauaucacagcugccucccugaacgacgauggacucgacaaucacaccauucugcuguauuacagcacagcugccucuucccuugcggugacccucaugaucgccaucuucgucguguauaugguuagcagagauaacgugucuuguuccauuugccuguga

SEQ ID NO: 220166 - RNA, 1758 nt, Artificial Sequence; identical to SEQ ID NO: 218755
  derived and/or modified CDS sequence (opt5) from hemagglutinin__InfluenzaB__AHL93884

SEQ ID NO: 220167 - RNA, 1758 nt, Artificial Sequence; identical to SEQ ID NO: 218755
  derived and/or modified CDS sequence (opt5) from hemagglutinin__InfluenzaB__AHL93895

SEQ ID NO: 220168 - RNA, 1758 nt, Artificial Sequence; identical to SEQ ID NO: 218755
  derived and/or modified CDS sequence (opt5) from hemagglutinin__InfluenzaB__AHL93906

SEQ ID NO: 220169 - RNA, 1758 nt, Artificial Sequence; identical to SEQ ID NO: 218755
  derived and/or modified CDS sequence (opt5) from hemagglutinin__InfluenzaB__AHL93917

SEQ ID NO: 220170 - RNA, 1758 nt, Artificial Sequence; identical to SEQ ID NO: 218680
  derived and/or modified CDS sequence (opt5) from hemagglutinin__InfluenzaB__AHL93928

SEQ ID NO: 220171 - RNA, 1758 nt, Artificial Sequence; identical to SEQ ID NO: 218717
  derived and/or modified CDS sequence (opt5) from hemagglutinin__InfluenzaB__AHL93939

SEQ ID NO: 220172 - RNA, 1758 nt, Artificial Sequence; identical to SEQ ID NO: 218755
  derived and/or modified CDS sequence (opt5) from hemagglutinin__InfluenzaB__AHL93950

SEQ ID NO: 220173 - RNA, 1758 nt, Artificial Sequence; identical to SEQ ID NO: 218717
  derived and/or modified CDS sequence (opt5) from hemagglutinin__InfluenzaB__AHL93961

SEQ ID NO: 220174 - RNA, 1758 nt, Artificial Sequence
  derived and/or modified CDS sequence (opt5) from hemagglutinin__InfluenzaB__AHL93972
augaaggccaucauugugcugcucauggucguuaccagcacagcugacagaaucugcacgggcauuaccuccucuaacagcccccacguggugaaaacagccacccagggggaggucaaugugacaggaguuaucccucugaccacaaccccgacgaagucccauuucgcgaaccuuaaaggcaccgaaacacgggggaagcugugucccaaaugccucaauuguaccgaucuggacguggcucuuggacgcccuaagugcacaggcaagauucccucugccagagucagcauccugcacgaggugcggccuguuaccuccggguguuuucccaucaugcaugaucgcacgaaaauuagacaacucccuaaccugcugcggggauacgaacacauccgccucucuacacauaaugugauuaacgccgagaaugcuccgggcggccccuauaagaucgggaccagcggauccugcccuaacgucacaaauggcaacggguucuuugccaccauggcuugggccgugcccaaaaaugacaagaacaaaaccgcgacaaauccucugacgauugaagugcccuacaucuguaccgagggagaggaucagauuacagucuggggcuuccacagcgacaacgaaacccagauggccaagcuguauggggauucuaagccgcagaaauuuacauccagcgcuaauggaguuaccacgcacuacgugucucaaaucggcggcuucccuaaccagacagaggacgggggacugccccaguccggcagaaucguggucgauuauauggugcaaaagagcgggaaaaccggaaccauuacauaccagcggggcauccuccugccucagaagguuuggugcgccucugggcgcuccaaagugauuaagggaagccuuccccugaucggcgaagcugacugucuccaugagaaauauggcgggcugaacaaguccaagcccuacuacaccggagagcacgccaaagcggucggcaauugcccuauuugggugaagacaccgcugaaacucgccaacgggacgaaguauagacccccugcuaaacugcuuaaggaacggggauuuuucggcgccaucgcuggguuucuggagggcggaugggaaggcaugaucgccggguggcauggauacaccucucacggcgcccacgggguugcuguggcggccgaucucaagagcacacaggaggcuauuaauaaaaucaccaagaaccuuaauucccuuagcgaacuggaggucaaaaaccuccagcgccugucuggagccauggacgagcugcauaaugaaauucucgagcuggaugaaaagguggacgaccuuagagccgauacaaucuccagccaaauugagcuggcuguccuccugucuaacgaaggcaucaucaauagcgaggacgagcaccuucuggcccucgaacggaaacugaagaagaugcuggggcccuccgcgguggagauuggcaacggauguuucgaaaccaaacauaagugcaaucagacgugccucgaucgcaucgcugccggcaccuuugacgccggggaguucucucugccuacauuugauagccuuaacauuaccgcugccucccugaaugacgauggacucgacaaccacacaauccugcuguauuacagcaccgcugccucuucccuugcgguuacgcucaugauugccaucuucguggucuauauggugagcagagauaauguuucuuguuccauuugccuguga

SEQ ID NO: 220175 - RNA, 1758 nt, Artificial Sequence; identical to SEQ ID NO: 218680
  derived and/or modified CDS sequence (opt5) from hemagglutinin__InfluenzaB__AHL93983

SEQ ID NO: 220176 - RNA, 1755 nt, Artificial Sequence
  derived and/or modified CDS sequence (opt5) from hemagglutinin__InfluenzaB__AHL93994
augaaggccaucauugugcugcucauggucguuaccagcaacgcugacagaaucugcacaggcauuacguccucuaauagcccccacguggugaaaaccgccacacagggggaggucaacgugaccggaguuaucccucugacaaccacaccgaagaaauccuacuucgcgaaucuuaagggcaccaaaacgcgggggaagcugugucccgauugccucaacuguaccgaccuggauguggcucuuggacgcccuaugugcgucggcacaacccccucugccaaggccagcauucugcaugaagugagaccuguuacauccggguguuuucccaucaugcacgaccggaccaaaauccgccaacucgcuaaucugcugagaggauaugagaacauucggcucucuacgcagaaugugaucgaugccgaaaaggcuccuggcggcccguaccgccuggggacaagcggauccugccccaacgccaccagcaaaucuggcuucuuugcgacaauggccugggcugucccuaaggacaauaacaaaaaugccaccaacccccuuaccguggaggugccuuauauuugugcugaaggggaggaucagaucacagucuggggauuccauuccgacaauaagacgcagaugaagaaccuguacggcgauagcaauccccaaaaauuuaccucuuccgccaacgggguuacaacccacuaugugagccagauuggaggcuucccggaccagacagaggauggcgggcucccucagucuggaagaaucguggucgacuacaugaugcaaaagcccggcaaaaccgggacgauuguguaucagcggggaguucugcuuccucagaagguguggugcgcguccggccgcagcaaagucaucaaggggucccugccccucaucggagaagccgauugucugcaugagaaauacggcggccugaacaagucuaagcccuacuauacaggggaacacgcuaaagccauuggaaauugcccuaucugggugaagaccccgcucaaacuggcuaacggcaccaaguacagacccccugccaaacuucugaaggagcggggguuuuucggagccauugcuggcuuucucgaagggggcugggaaggaaugaucgcgggcuggcacggguauacaagccauggagcccacggcguugcuguggccgccgaccugaaguccacccaggaggcuauuaauaaaaucacaaagaaccuuaauagccugucugaacucgaggucaaaaaccugcaacgccuguccggggccauggacgaacuccauaaugagauccuggagcuugaugaaaagguggacgaucugagagcggacacgauuagcucucagaucgagcucgcuguccugcuuagcaacgaaggaauuaucaauuccgaggaugaacaucugcucgcccuggagcggaaacugaagaagaugcucggccccucugccguggacauugggaacggcuguuucgagaccaaacacaagugcaaucagacaugccuggaucgcaucgcugccggaaccuuuaacgcuggcgaguucagccuuccuacauuugacucccugaauaucaccgccgcgagccucaacgaugacgggcuggauaaucacacgauucugcuuuacuauucuaccgccgcuuccagccucgccguuacacugaugcuggcuaucuucauuguguacaugaucucuagagacaacgucuccuguagcauuugccucuga

SEQ ID NO: 220177 - RNA, 1758 nt, Artificial Sequence; identical to SEQ ID NO: 218755
  derived and/or modified CDS sequence (opt5) from hemagglutinin__InfluenzaB__AHL94005

SEQ ID NO: 220178 - RNA, 1758 nt, Artificial Sequence; identical to SEQ ID NO: 218755
  derived and/or modified CDS sequence (opt5) from hemagglutinin__InfluenzaB__AHL94016

SEQ ID NO: 220179 - RNA, 1758 nt, Artificial Sequence
  derived and/or modified CDS sequence (opt5) from hemagglutinin__InfluenzaB__AHL94027
augaaggccaucauugugcugcucauggucguuaccagcaacgcugacagaaucugcacaggcauuacguccucuaauagcccccacaucgugaaaaccgccacacagggggaggugaacgucaccggagugauuccucugacaaccacaccgaccaagucccauuucgcgaaucuuaaaggcacggaaacccgggggaagcugugucccaaaugccucaacuguacagaucuggacguugcucuuggacgcccuaagugcaccggcaagauccccucugccagagugagcauccugcacgagguccggccugugacauccggguguuuucccauuaugcaugaucgcaccaaaaucagacaacucccuaaucugcugcggggauacgaacacauucgccucucuacgcauaacguuaucaaugccgagaacgcuccgggcggccccuauaagauugggacaagcggauccugcccuaauaucaccaacggcaauggguucuuugccacaauggcuugggccgugcccaaaaacgacaagaauaaaaccgcgaccaacccucugacaauugaaguccccuacaucuguacggagggagaggaucagaucaccguguggggcuuccacagcgacaaugaaacacagauggccaaacuuuauggggauucuaagccgcagaaguuuaccuccagcgcuaacggagugacaacccacuacgucucucaaauuggcggcuucccuaaccagacggaggacgggggacugccccaguccggcagaaucguuguggauuauauggugcaaaagagcgggaaaacaggaaccauuaccuaccagaugggcguccuccugccucagaagguguggugcgccucugggcgguccaaaguuaucaagggaagccuuccccugauuggcgaagcugacugucuccaugagaaauauggcgggcugaauaaguccaagcccuacuacacaggagagcacgccaaagcgaucggcaacugcccuaucugggugaagaccccgcugaaacucgccaaugggacaaaguauagacccccugcuaaacugcuuaaggaacgcggauuuuucggcgccauugcuggguuucuggagggcggaugggaaggcaugaucgccggguggcauggauacacgucucacggcgcccacggggucgcuguggcggccgaucucaagagcacccaggaggcuauuaacaaaaucacaaagaaucugaacucccuuagcgaacuggagguuaaaaaucuccagcggcugucuggagccauggacgagcugcauaacgaaauucucgagcuggaugaaaagguggacgaccuucgcgccgauaccaucuccagccaaaucgagcuggcuguccuccugucuaaugaaggcauuaucaacagcgaggacgagcaccuucuggcccucgaaagaaaacugaagaagaugcuggggcccuccgcgguggagauuggcaauggauguuucgaaacaaaacauaagugcaaccagaccugccucgaucggaucgcugccggcacguuugacgccggggaguucucucugccuaccuuugauagccuuaauauuacagcugccucccugaacgacgauggacucgacaaucacaccauccugcuguauuacagcacagcugccucuucccuugcggucacccucaugauugccaucuucgugguuuauauggugagccgcgauaacgucucuuguuccaucugccuguga

SEQ ID NO: 220180 - RNA, 1758 nt, Artificial Sequence; identical to SEQ ID NO: 218717
  derived and/or modified CDS sequence (opt5) from hemagglutinin__InfluenzaB__AHL94038

SEQ ID NO: 220181 - RNA, 1758 nt, Artificial Sequence; identical to SEQ ID NO: 218680
  derived and/or modified CDS sequence (opt5) from hemagglutinin__InfluenzaB__AHL94049

SEQ ID NO: 220182 - RNA, 1758 nt, Artificial Sequence; identical to SEQ ID NO: 218755
  derived and/or modified CDS sequence (opt5) from hemagglutinin__InfluenzaB__AHL94060

SEQ ID NO: 220183 - RNA, 1758 nt, Artificial Sequence
  derived and/or modified CDS sequence (opt5) from hemagglutinin__InfluenzaB__AHL94071
augaaggccaucauugugcugcucauggucguuaccagcaacgcugacagaaucugcacaggcauuacguccucuaauagcccccacaucgugaaaaccgccacacagggggaggugaacgucaccggagugauuccucugacaaccacaccgaccaagucccauuucgcgaaucuuaaaggcacggaaacccgggggaagcugugucccaaaugccucaacuguacagaucuggacguugcucuuggacgcccuaagugcaccggcaagauccccucugccagagugagcauccugcacgagguccggccugugacauccggguguuuucccauuaugcaugaucgcaccaaaaucagacaacucccuaaucugcugcggggauacgaacacauucgccucucuacgcauaacguuaucaaugccgagaacgcuccgggcggccccuauaagauugggacaagcggauccugcccuaauaucaccaacggcaauggguucuuugccacaauggcuugggccgugcccaaaaacgacaagaauaaaaccgcgaccaacccucugacaauugaaguccccuacaucuguacggagggagaggaucagaucaccguguggggcuuccacagcgacaaugaaacacagauggccaaacuuuauggggauucuaagccgcagaaguuuaccuccagcgcuaacggagugacaacccacuacgucucucaaauuggcggcuucccuaaccagacggaggacgggggacugccccaguccggcagaaucguuguggauuauaugaugcaaaagagcgggaaaacaggaaccauuaccuaccagcggggcauccuccugccucagaagguguggugcgccucugggcgcuccaaagucauuaagggaagccuuccccugaucggcgaagcugacugucuccaugagaaauauggcgggcugaauaaguccaagcccuacuacacaggagagcacgccaaagcgaucggcaacugcccuauuugggugaagaccccgcugaaacucgccaaugggacaaaguauagacccccugcuaaacugcuuaaggaacggggauuuuucggcgccaucgcuggguuucuggagggcggaugggaaggcaugauugccggguggcauggauacacgucucacggcgcccacgggguugcuguggcggccgaucucaagagcacccaggaggcuaucuccaaaauuacaaagaaccugaauagccuuucugaacuggaggucaaaaaccuccagcgccuguccggagccauggacgagcugcauaaugaaauccucgagcuggaugaaaagguggacgaccuuagagccgauaccaucagcucucaaauugagcuggcuguucuccugagcaacgaaggcaucauuaauuccgaggacgagcaccuucuggcccucgaacggaaacugaagaagaugcuggggcccucugcgguggagaucggcaacggauguuucgaaacaaaacauaagugcaaucagaccugccucgaucgcauugcugccggcacguuugacgccggggaguucagccugccuaccuuugauucccuuaacaucacagcugccagccugaaugacgauggacucgacaaccacaccauucugcuguauuacucuacagcugccuccagccuugcggucacccucaugaucgccaucuucguggucuauauggugucuagagauaauguuuccuguagcauuugccuguga

SEQ ID NO: 220184 - RNA, 1755 nt, Artificial Sequence
  derived and/or modified CDS sequence (opt5) from hemagglutinin__InfluenzaB__AHL94082
augaaggccaucauugugcugcucauggucguuaccagcaacgcugacagaaucugcacaggcauuacguccucuaauagcccccacguggugaaaaccgccacacagggggaagucaacgugaccggaguuaucccucugacaaccacaccgaccaaguccuacuucgcgaaucuuaaaggcacgcggacccgcgggaagcugugucccgauugccucaacuguacagaccuggauguggcucuuggaagaccuaugugcgucggcaccacacccucugccaaagccagcauucugcaugaaauccggccugugaccuccggguguuuucccaucaugcacgaccgcacgaagauuagacaacucccuaaucugcugcggggauaugagaacauccgccucucuacacagaauguuauugaugcugaaaaggccccgggcggccccuacagacuggggaccagcggauccugcccuaacgcuacaagcaaaaucggcuucuuugccaccauggcgugggccgugcccaaggacaauuauaaaaacgcuaccaauccucuuacagucgaggugcccuacauuuguacggaaggggaggaucagaucaccguguggggauuccauucugacaacaagacacagaugaaaaaucuguauggcgauuccaacccgcaaaaguuuaccagcucugccaauggggucacaacccacuacguuucccagauuggagacuucccugaucagacggaggacggcggccucccccagagcgggcggaucgugguggauuauaugaugcaaaagccuggaaaaacaggcaccaucgucuaccagcgcggggugcugcuuccccagaagguuuggugcgcuucuggaagauccaaagugauuaagggcagccugccccucaucggggaagccgacugucugcaugagaaauacggaggccugaacaaguccaaaccuuauuacaccggcgaacacgcgaaggccauugggaacugcccgaucugggucaagacaccccucaaacuggcuaauggaaccaaguaucggccucccgccaaacuucugaaggagcgcggcuuuuucggggcuauugccggauuucucgagggcgggugggaaggcaugaucgccggauggcacggcuacacaucucauggggcucacggaguggcgguugccgcugaccugaaaagcacgcaggaggccaucaacaagauuaccaagaaucuuaacucccugagcgaacucgaggugaaaaaucugcaaagacugucuggcgccauggaugaacuccauaacgagauccuggagcuugacgaaaaggucgaugaccugcgggcugauacaauuuccagccagaucgagcucgccgugcugcuuucuaaugaagggauuaucaacagcgaggacgaacaucugcucgcgcuggagcgcaaacugaagaaaaugcucggaccuuccgcugucgauaucggcaauggguguuucgagaccaagcacaagugcaaccagacaugccuggacagaauugccgccggcaccuuuaaugcuggagaguucucucuucccacguuugauagccugaacaucaccgccgcuucccucaaugacgauggccuggacaaccacacaauucugcuuuauuacagcaccgccgcgucuucccucgccgugacacugaugcuggcuaucuucauuguuuauauggugagccgggacaaugucucuuguuccaucugccucuga

SEQ ID NO: 220185 - RNA, 1758 nt, Artificial Sequence; identical to SEQ ID NO: 218717
  derived and/or modified CDS sequence (opt5) from hemagglutinin__InfluenzaB__AHL94093

SEQ ID NO: 220186 - RNA, 1758 nt, Artificial Sequence; identical to SEQ ID NO: 218755
  derived and/or modified CDS sequence (opt5) from hemagglutinin__InfluenzaB__AHL94102

SEQ ID NO: 220187 - RNA, 1758 nt, Artificial Sequence
  derived and/or modified CDS sequence (opt5) from hemagglutinin__InfluenzaB__AHL94113
augaaggccaucauugugcugcucauggucguuaccagcaacgcugacagaaucugcacaggcauuacguccucuaauagcccccacaucgugaaaaccgccacacagggggaggugaacgucaccggagugauuccucugacaaccacaccgaccaagucccauuucgcgaaucuuaaaggcacggaaacccgggggaagcugugucccaaaugccucaacuguacagaucuggacguugcucuuggacgcccuaagugcaccggcaagauccccucugccagagugagcauccugcacgagguccggccugugacauccggguguuuucccauuaugcaugaucgcaccaaaaucagacaacucccuaaucugcugcggggauacgaacacauucgccucucuacgcauaacguuaucaaugccgagaacgcuccgggcggccccuauaagauugggacaagcggauccugccugaauaucaccaacggcaauggguucuuugccacaauggcuugggccgugccuaaaaacgacaagaauaaaaccgcgaccaacccccuuacaauugaagucccuuacaucuguacggagggagaggaucagaucaccguguggggcuuccacagcgacaaugaaacacagauggccaagcuguauggggauucuaagccccagaaauuuaccuccagcgcuaacggagugacaacccacuacgucucucaaauuggcggcuucccgaaccagacggaggacgggggacucccucaguccggcagaaucguuguggauuauauggugcaaaagagcgggaaaacaggaaccauuaccuaccagcggggcauccugcuuccccagaaggucuggugcgccucugggcgcuccaaagugauuaagggaagccugccucucaucggcgaagcugacugucugcaugagaaauauggcgggcugaauaaguccaagcccuacuacacaggagagcacgccaaagcgaucggcaacugccccauuuggguuaagaccccucucaaacuggccaaugggacaaaguauagaccgcccgcuaaacuucugaaggaacggggauuuuucggcgccaucgcuggguuucucgagggcggaugggaaggcaugauugccggguggcauggauacacgucucacggcgcccacgggguggcugucgcggccgaucuuaagagcacccaggaggcuaucaacaaaauuacaaagaaucugaacucccugagcgaacucgaggugaaaaaucugcagcgccugucuggagccauggacgagcuccauaacgaaauccuggagcuugaugaaaagguugacgaccugagagccgauaccaucuccagccaaauugagcucgcugugcugcuuucuaaugaaggcaucauuaacagcgaggacgagcaucugcucgcccuggaacggaaacugaagaagaugcucgggccuuccgcggucgagaucggcaauggauguuucgaaacaaaacacaagugcaaccagaccugccuggaucgcauugcugccggcacguuugacgccggggaguucucucuucccaccuuugauagccugaauaucacagcugccucccucaacgacgauggacuggacaaucacaccauucugcuuuauuacagcacagcugccucuucccucgcggugacccugaugaucgccaucuucgucguguauaugguuagcagagauaacgugucuuguuccauuugccuguga

SEQ ID NO: 220188 - RNA, 1758 nt, Artificial Sequence
  derived and/or modified CDS sequence (opt5) from hemagglutinin__InfluenzaB__AHL94124
augaaggccaucauugugcugcucauggucguuaccagcaacgcugacagaaucugcacaggcauuacguccucuaauagcccccacaucgugaaaaccgccacacagggggaggugaacgucaccggagugauuccucugacaaccacaccgaccaagucccauuucgcgaaucuuaaaggcacggaaacccgggggaagcugugucccaaaugccucaacuguacagaucuggacguugcucuuggacgcccuaagugcaccggcaagauccccucugccagagugagcauccugcacgagauucggccugucacauccggguguuuucccaucaugcaugaucgcaccaaaauuagacaacucccuaaucugcugcggggauacgaacacauccgccucucuacgcauaacgugauuaaugccgagaacgcuccgggcggccccuauaagaucgggacaagcggauccugcccuaauauuaccaacggcaauggguucuuugccacaauggcuugggccguucccaaaaacgacaagaauaaaaccgcgaccaacccucugacaaucgaagugcccuacaucuguacggagggagaggaucagauuaccgucuggggcuuccacagcgacaaugaaacacagauggccaaacuuuauggggauucuaagccgcagaaguuuaccuccagcgcuaacggagugacaacccacuacgugucucaaaucggcggcuucccuaaccagacggaggacgggggacugccccaguccggcagaauugucguugauuauauggugcaaaagagcgggaaaacaggaaccaucaccuaccagcggggcauucuccugccucagaagguguggugcgccucugggcgcuccaaagucaucaagggaagccuuccccugaucggcgaagcugacugucuccaugagaaauauggcgggcugaauaaguccaagcccuacuacacaggagagcacgccaaagcgauuggcaacugcccuaucugggugaagaccccgcugaaacucgccaaugggacaaaguauagacccccugcuaaacugcuuaaggaacggggauuuuucggcgccauugcuggguuucuggagggcggaugggaaggcaugaucgccggguggcauggauacacgucucacggcgcccacgggguugcuguggcggccgaucucaagagcacccaggaggcuauuaacaaaaucacaaagaaucugaacucccuuagcgaacuggaggucaaaaaucuccagcgccugucuggagccauggacgagcugcauaacgaaauccucgagcuggaugaaaagguggacgaccuuagagccgauaccauuuccagccaaaucgagcuggcuguucuccugucuaaugaaggcauuaucaacagcgaggacgagcaccuucuggcccucgaacggaaacugaagaagaugcuggggcccuccgcgguggagauuggcaauggauguuucgaaacaaaacauaagugcaaccagaccugccucgaucgcaucgcugccggcacguuugacgccggggaguucucucugccuaccuuugauagccuuaauauuacagcugccucccugaacgacgauggacucgacaaucacaccauccugcuguauuacagcacagcugccucuucccuugcggucacccucaugaucgccauuuucguggucuauauggugagcagagauaacguuucuuguuccaucugccuguga

SEQ ID NO: 220189 - RNA, 1758 nt, Artificial Sequence; identical to SEQ ID NO: 218680
  derived and/or modified CDS sequence (opt5) from hemagglutinin__InfluenzaB__AHL94135

SEQ ID NO: 220190 - RNA, 1758 nt, Artificial Sequence; identical to SEQ ID NO: 218680
  derived and/or modified CDS sequence (opt5) from hemagglutinin__InfluenzaB__AHL94146

SEQ ID NO: 220191 - RNA, 1758 nt, Artificial Sequence; identical to SEQ ID NO: 218755
  derived and/or modified CDS sequence (opt5) from hemagglutinin__InfluenzaB__AHL94157

SEQ ID NO: 220192 - RNA, 1758 nt, Artificial Sequence; identical to SEQ ID NO: 218755
  derived and/or modified CDS sequence (opt5) from hemagglutinin__InfluenzaB__AHL94168

SEQ ID NO: 220193 - RNA, 1758 nt, Artificial Sequence; identical to SEQ ID NO: 218680
  derived and/or modified CDS sequence (opt5) from hemagglutinin__InfluenzaB__AHL94179

SEQ ID NO: 220194 - RNA, 1758 nt, Artificial Sequence; identical to SEQ ID NO: 218680
  derived and/or modified CDS sequence (opt5) from hemagglutinin__InfluenzaB__AHL94190

SEQ ID NO: 220195 - RNA, 1758 nt, Artificial Sequence
  derived and/or modified CDS sequence (opt5) from hemagglutinin__InfluenzaB__AHL94201
augaaggccaucauugugcugcucauggucguuaccagcaacgcugacagaaucugcacaggcauuacguccucuaauagcccccacaucgugaaaaccgccacacagggggaagugaacgucaccggagugauuccucugacaaccacaccgaccaagucccauuucgcgaaucuuaaaggcacggaaacccgggggaagcugugucccaaaugccucaacuguacagaucuggacguugcucuuggacgcccuaagugcaccggcaagauccccucugccagagugagcauccugcacgagguccggccugugacauccggguguuuucccauuaugcaugaucgcaccaaaaucagacaacucccuaaucugcugcggggauacgaacacauucgccucucuacgcauaacguuaucaaugccgagaacgcuccgggcggccccuauaagauugggacaagcggauccugcccuaauaucaccaacggcaauggguucuuugaaacaauggccugggcugugcccaaaaacgacaagaauaaaaccgccaccaacccucugacaauugagguccccuacaucuguacggagggagaagaucagaucaccguguggggcuuccacagcgacaaugagacacagauggcgaaacuuuauggggauucuaagccgcagaaguuuaccuccagcgccaacggagugacaacccacuacgucucucaaauuggcggcuucccuaaccagacggaagacgggggacugccccaguccggcagaaucguuguggauuauauggugcaaaagagcgggaaaacaggaaccauuaccuaccagcggggcauccuccugccucagaaggucuggugcgcuucugggcgcuccaaagugauuaagggaagccuuccccugaucggcgaggccgacugucuccaugagaaauauggcgggcugaauaaguccaagcccuacuacacaggagaacacgcuaaagccaucggcaacugcccuauuuggguuaagaccccgcugaaacucgcgaaugggacaaaguauagacccccugccaaacugcuuaaggagcggggauuuuucggcgcuaucgccggguuucuggaaggcggaugggagggcaugauugcuggguggcauggauacacgucucacggcgcccacgggguggccgucgcugcggaucucaagagcacccaggaagccaucaacaaaauuacaaagaaucugaacucccuuagcgagcuggaggugaaaaaucuccagcgccugucuggagcuauggacgaacugcauaacgagauccucgaacuggaugagaagguugacgaccuuagagccgauaccaucuccagccaaauugaacuggccgugcuccugucuaaugagggcaucauuaacagcgaggacgaacaccuucuggcucucgagcggaaacugaagaagaugcuggggcccuccgccgucgaaaucggcaauggauguuucgagacaaaacauaagugcaaccagaccugccucgaucgcauugcggcuggcacguuugacgccggggaguucucucugccuaccuuugauagccuuaauaucacagccgcuucccugaacgacgauggacucgacaaucacaccauucugcuguauuacagcacagccgcuucuucccuugccgugacccucaugaucgcgaucuucgucguguauaugguuagcagaaacaacgugucuuguuccauuugccuguga

SEQ ID NO: 220196 - RNA, 1758 nt, Artificial Sequence
  derived and/or modified CDS sequence (opt5) from hemagglutinin__InfluenzaB__AHL94212
augaaggccaucauugugcugcucauggucguuaccagcaacgcugacagaaucugcacaggcauuacguccucuaauagcccccacguggugaaaaccgccacacagggggaggucaacgugaccggaguuaucccucugacaaccacaccgaccaagucccauuucgcgaaucuuaaaggcacggaaacccgggggaagcugugucccaaaugccucaacuguacagaucuggacguggcucuuggacgcccuaagugcaccggcaagauucccucugccagagucagcauccugcacgaggugcggccuguuacauccggguguuuucccaucaugcaugaucgcaccaaaauuagacaacucccuaaucugcugcggggauacgaacacauccgccucucuacgcauaacgugauuaaugccgagaacgcuccgggcggccccuauaagaucgggacaagcggauccugcccuaaugucaccaacggcaauggguucuuugccacaauggcuugggccgugcccaaaaacgacaagaauaaaaccgcgaccaacccucugacaauugaagugcccuacaucuguacggagggagaggaucaggucaccguuuggggcuuccacagcgacaaugaaacacagauggccaaacuuuauggggauucuaagccgcagaaguuuaccuccagcgcuaacggagugacaacccacuacgugucucaaauuggcggcuucccuaaccagacggaggacgggggacugccccaguccggcagaaucgucguggauuauaugguucaaaagagcgggaaaacaggaaccaucaccuaccagcggggcauucuccugccucagaagguguggugcgccucugggcgcuccaaagucaucaagggaagccuuccccugauuggcgaagcugacugucuccaugagaaauauggcgggcugaauaaguccaagcccuacuacacaggagagcacgccaaagcgaucggcaacugcccuauuugggugaagaccccgcugaaacucgccaaugggacaaaguauagacccccugcuaaacugcuuaaggaacggggauuuuucggcgccaucgcuggguuucuggagggcggaugggaaggcaugaucgccggguggcauggauacacgucucacggcgcccacgggguugcuguggcggccgaucucaagagcacccaggaggcuauuaacaaaaucacaaagaaucugaacucccuuagcgaacuggaggucaaaaaucuccagcgccugucuggagccauggacgagcugcauaacgaaauucucgagcuggaugaaaagguggacgaccuuagagccgauaccaucuccagccaaauugagcuggcuguccuccugucuaaugaaggcaucaucaacagcgaggacgagcaccuucuggcccucgaacggaaacugaagaagaugcuggggcccuccgcgguggagauuggcaauggauguuucgaaacaaaacauaagugcaaccagaccugccucgaucgcaucgcugccggcacguuugacgccggggaguucucucugccuaccuuugauagccuuaauauuacagcugccucccugaacgacgauggacucgacaaucacaccauccugcuguauuacagcacagcugccucuucccuugcgguuacccucaugauugccaucuucguggucuauauggugagcagagauaacguuucuuguuccauuugccuguga

SEQ ID NO: 220197 - RNA, 1758 nt, Artificial Sequence; identical to SEQ ID NO: 218755
  derived and/or modified CDS sequence (opt5) from hemagglutinin__InfluenzaB__AHL94220

SEQ ID NO: 220198 - RNA, 1758 nt, Artificial Sequence; identical to SEQ ID NO: 218755
  derived and/or modified CDS sequence (opt5) from hemagglutinin__InfluenzaB__AHL94231

SEQ ID NO: 220199 - RNA, 1758 nt, Artificial Sequence
  derived and/or modified CDS sequence (opt5) from hemagglutinin__InfluenzaB__AHL94242
augaaggccaucauugugcugcucauggucguuaccagcaacgcugacagaaucugcacaggcauuacguccucuaauagcccccacguggugaaaaccgccacacagggggaggucaacgugaccggaguuaucccucugacaaccacaccgaccaagucccauuucgcgaaucuuaaaggcacggaaacccgggggaagcugugucccaaaugccucaacuguacagaucuggacguggcucuuggacgcccuaagugcaccggcaagauucccucugccagagucagcauccugcacgaggugcggccuguuacauccggguguuuucccaucaugcaugaucgcaccaaaauuagacaacucccuaaucugcugcggggauacgaacacauccgccucucuacgcauaacgugauuaaugccgagaacgcuccgggcggccccuauaagaucgggacaagcggauccugcccuaaugucaccaacggcaauggguucuuugccacaauggcuugggccgugcccaaaaacgacaagaauaaaaccgcgaccaacccucugacaauugaagugcccuacaucuguacggagggagaggaucagauuaccgucuggggcuuccacagcgacaaugaaacacagauggccaaacuuuauggggauucuaagccgcagaaguuuaccuccagcgcuaacggaguuacaacccacuacgugucucaaaucggcggcuucccuaaccagacggaggacgggggacugccccaguccggcagaaucguggucgauuauauggugcaaaagagcgggaaaacaggaaccauuaccuaccagcggggcauccuccugccucagaagguuuggugcgccaaugggcgcucuaaagugauuaagggaucccuuccccugaucggcgaagcugacugucuccaugagaaauauggcgggcugaacaagagcaagcccuacuacacaggagagcacgccaaagcgauuggcaauugcccuaucugggucaagaccccgcugaaacucgccaacgggacaaaguauagacccccugcuaaacugcuuaaggaacggggauuuuucggcgccaucgcuggguuucuggagggcggaugggaaggcaugauugccggguggcauggauacacgucccacggcgcccacgggguggcuguugcggccgaucucaagucuacccaggaggcuaucaauaaaauuacaaagaaccugaauagccuuuccgaacuggaggugaaaaaccuccagcgccugagcggagccauggacgagcugcauaaugaaauccucgagcuggaugaaaaggucgacgaccuuagagccgauaccauuucuucccaaaucgagcuggcugugcuccugagcaacgaaggcaucauuaauucugaggacgagcaccuucuggcccucgaacggaaacugaagaagaugcuggggcccagcgcggucgagaucggcaacggauguuucgaaacaaaacauaagugcaaucagaccugccucgaucgcauugcugccggcacguuugacgccggggaguucucccugccuaccuuugauucucuuaacaucacagcugccagccugaaugacgauggacucgacaaccacaccauucugcuguauuacuccacagcugccagcucucuugcggugacccucaugaucgccauuuucguuguguauauggucuccagagauaacgugagcuguucuaucugccuguga

SEQ ID NO: 220200 - RNA, 1758 nt, Artificial Sequence; identical to SEQ ID NO: 218717
  derived and/or modified CDS sequence (opt5) from hemagglutinin__InfluenzaB__AHL94253

SEQ ID NO: 220201 - RNA, 1755 nt, Artificial Sequence
  derived and/or modified CDS sequence (opt5) from hemagglutinin__InfluenzaB__AHL94274
augaaggccaucauugugcugcucauggucguuaccagcaacgcugacagaaucugcacaggcauuacguccucuaauagcccccacguggugaaaaccgccacacagggggaagucaacgugaccggaguuaucccucugacaaccacaccgaccaaguccuacuucgcgaaucuuaaaggcacgcggacccgcgggaagcugugucccgauugccucaacuguacagaccuggauguggcucuuggaagaccuaugugcgucggcaccacacccucugccaaagccagcauucugcaugaagugcggccuguuaccuccggguguuuucccaucaugcacgaccgcacgaagaucagacaacucccuaaucugcugcggggauaugagaagauucgccucucuacacagaacgugaucgaugcugaaaaagccccgggcggccccuacagacuggggaccagcggauccugcccuaaugcuacaagcaagauuggcuucuuugccaccauggcgugggccguccccaaagacaacuauaagaaugcuaccaacccucuuacaguggaggugcccuacaucuguacggaaggggaggaucagauuaccgucuggggauuccauucugacaauaaaacacagaugaagucccuguauggcgauagcaacccgcaaaaguuuaccucuuccgccaaugggguuacaacccacuacgugagccagaucggagacuucccugaucagacggaggacggcggccucccccagucugggcggauuguggucgauuauaugaugcaaaaaccuggaaagacaggcaccaucguguaccagcgcgggguucugcuuccccagaaaguguggugcgcuuccggaagaagcaaggucaucaaaggcucccugccccucauuggggaagccgacugucugcaugaggaauacggaggccugaacaagucuaaaccuuauuacaccggcaagcacgcgaaggccaucgggaauugcccgauuugggugaaaacaccccucaagcuggcuaacggaaccaaauaucggccucccgccaagcugcugaaagagcgcggcuuuuucggggcuaucgccggauuucucgagggcgggugggaaggcaugauugccggauggcacggcuacacaagccauggggcucacggaguugcgguggccgcugaccugaaguccacgcaggaggccaucaacaagaucaccaaaaaucuuaacagccugucugaacucgaggucaagaaucugcaaagacuguccggcgccauggaugaacuccauaacgagauucuggagcuugacgaaaaaguggaugaccugcgggcugauacaaucagcucucagauugagcucgccguccugcuuagcaaugaagggaucauuaacuccgaggacgaacaccuucucgcgcuggagcgcaagcugaaaaagaugcucggaccuucugcuguggauaucggcaauggguguuucgagaccaagcacaaaugcaaccagacaugccuggacagaaucgccgccggcaccuuuaaugcuggagaguucagccuucccacguuugauucccugaacauuaccgccgcuagccucaaugacgauggccuggacaaccauacaauccugcuuuauuacucuaccgccgcguccagccucgccguuacacugaugcuggcuauuuucaucguguauauggucucucgggacaauguguccuguagcauuugccucuga

SEQ ID NO: 220202 - RNA, 1755 nt, Artificial Sequence; identical to SEQ ID NO: 220201
  derived and/or modified CDS sequence (opt5) from hemagglutinin__InfluenzaB__AHL94295

SEQ ID NO: 220203 - RNA, 1755 nt, Artificial Sequence
  derived and/or modified CDS sequence (opt5) from hemagglutinin__InfluenzaB__AHL94306
augaaggccaucauugugcugcucauggucguuaccagcaacgcugacagaaucugcacaggcauuacguccucuaauagcccccacguggugaaaaccgccacacagggggaagucaacgugaccggagcgaucccucugacaaccacaccgaccaaguccuacuucgcuaaucuuaaaggcacgcggacccgcgggaagcugugucccgauugccucaacuguacagaccuggauguugcccuuggaagaccuaugugcgugggcaccacacccucugccaaagcuagcauucugcaugaaguccggccugugaccuccggguguuuucccaucaugcacgaccgcacgaagaucagacaacucccuaaucugcugcggggauaugagaacauucgccucucuacacagaauguuaucgaugccgaaaaggcuccgggcggccccuacagacuggggaccagcggauccugcccuaacgccacaagcaaaauuggcuucuuugcgaccauggccugggcugugcccaaggacaauuauaaaaacgccaccaauccucagacagucgaggugcccuacaucuguacggaaggggaggaucagauuaccguguggggauuccauucugacaacaagacacaaaugaaaaaucuuuauggcgauuccaacccgcagaaguuuaccagcucugcuaauggggucacaacccacuacguuucccagaucggagacuucccugaucagacggaggacggcggccugccccaaagcgggcggauugugguggauuauaugguccagaagccuggaaaaacaggcaccaucguguaccagcgcgggguucuccugccccagaagguguggugcgccucuggaagauccaaagucaucaagggcagccuuccccugauuggggaagcggacugucuccaugagaaauacggaggccugaacaaguccaaaccuuauuacaccggcgaacacgccaaggcuaucgggaacugcccgauuugggugaagacaccccugaaacucgccaauggaaccaaguaucggccucccgcuaaacugcuuaaggagcgcggcuuuuucggggccaucgccggauuucuggagggcgggugggaaggcaugauugcuggauggcacggcuacacaucucauggggcgcacggaguugccguggcugccgaccucaaaagcacgcaagaggccaucaacaagaucaccaagaaucugaacucccuuagcgaacuggaggucaaaaaucuccagagacugucuggcgcuauggaugaacugcauaacgagauucucgagcuggacgaaaagguggaugaccuucgggccgauacaaucuccagccagauugagcuggcgguccuccugucuaaugaagggaucauuaacagcgaggacgaacaccuucuggcucucgagcgcaaacugaagaaaaugcugggaccuuccgccguggauaucggcaauggguguuucgagaccaagcacaagugcaaccaaacaugccucgacagaaucgccgcuggcaccuuuaaugccggagaguucucucugcccacguuugauagccuuaacauuaccgcugccucccugaaugacgauggccucgacaaccauacaauccugcuguauuacagcaccgcggccucuucccuugcuguuacacucaugcuggccauuuucaucguguauauggucagccgggacaaugugucuuguuccauuugccuguga

SEQ ID NO: 220204 - RNA, 1755 nt, Artificial Sequence
  derived and/or modified CDS sequence (opt5) from hemagglutinin__InfluenzaB__AHL94317
augaaggccaucauugugcugcucauggucguuaccagcaacgcugacagaaucugcacaggcauuacguccucuaauagcccccacguggugaaaaccgccacacagggggaagucaacgugaccggagcgaucccucugacaaccacaccgaccaaguccuacuucgcuaaucuuaaaggcauucggacgcgcgggaagcugugucccgauugccucaacuguaccgaccuggauguugcccuuggaagaccuaugugcgugggcacaacccccucugccaaagcuagcauccugcaugaaguccggccugugacauccggguguuuucccaucaugcacgaccgcaccaagauuagacaacucccuaaucugcugcggggauaugagaacauccgccucucuacgcagaauguuauugaugccgaaaaggcuccgggcggccccuacagacuggggacaagcggauccugcccuaacgccaccagcaaaaucggcuucuuugcgacaauggccugggcugugccccgggacaauuauaagaacgccaccaauccucagaccgucgaggugcccuacauuuguacagaaggggaggaucagaucacgguguggggauuccauucugacaacaaaacccaaaugaagaaucuuuauggcgauuccaacccgcagaaauuuacaagcucugcuaauggggucaccacacacuacguuucccagauuggagacuucccugaucagaccgaggacggcggccugccccaaagcgggcgcaucgugguggauuauaugguccagaagccuggaaagacgggcacaaucguguaccagagagggguucuccugccccagaaaguguggugcgccucuggacgguccaaggucauuaaaggcagccuuccccugaucggggaagcggacugucuccaugagaaguacggaggccugaacaaauccaagccuuauuacaccggcgaacacgccaaagcuauugggaacugcccgaucugggugaagacaccccugaagcucgccaauggaaccaaauaucgcccucccgcuaagcugcuuaaagagagaggcuuuuucggggccauugccggauuucuggagggcgggugggaaggcaugaucgcuggauggcacggcuacaccucucauggggcgcacggaguugccguggcugccgaccucaagagcacacaagaggccaucaacaaaauuacgaagaaucugaacucccuuagcgaacuggaggucaagaaucuccagcggcugucuggcgcuauggaugaacugcauaacgagauccucgagcuggacgaaaaaguggaugaccuucgcgccgauaccauuuccagccagaucgagcuggcgguccuccugucuaaugaagggauuaucaacagcgaggacgaacaccuucuggcucucgagagaaagcugaaaaagaugcugggaccuuccgccguggauaucggcaauggguguuucgagacaaaacacaagugcaaccaaaccugccucgaccggauugccgcuggcacauuuaaugccggagaguucucucugcccaccuuugauagccuuaacaucacggcugccucccugaaugacgauggccucgacaaccauaccauucugcuguauuacagcacagcggccucuucccuugcuguuacccucaugcuggccaucuucauuguguauauggucagcagagacaaugugucuuguuccaucugccuguga

SEQ ID NO: 220205 - RNA, 1755 nt, Artificial Sequence; identical to SEQ ID NO: 220203
  derived and/or modified CDS sequence (opt5) from hemagglutinin__InfluenzaB__AHL94328

SEQ ID NO: 220206 - RNA, 1755 nt, Artificial Sequence; identical to SEQ ID NO: 220201
  derived and/or modified CDS sequence (opt5) from hemagglutinin__InfluenzaB__AHL94339

SEQ ID NO: 220207 - RNA, 1758 nt, Artificial Sequence
  derived and/or modified CDS sequence (opt5) from hemagglutinin__InfluenzaB__AHL94350
augaaggccaucauugugcugcucauggucguuaccagcaacgcugacagaaucugcacaggcauuacguccucuaauagcccccacguggugaaaaccgccacacagggggaggucaacgugaccggaguuaucccucugacaaccacaccgaccaagucccauuucgcgaaucuuaaaggcacggaaacccgggggaagcugugucccaaaugccucaacuguacagaucuggacguggcucuuggacgcccuaagugcaccggcaagauucccucugccagagucagcauccugcacgaggugcggccuguuacauccggguguuuucccaucaugcaugaucgcaccaaaauuagacaacucccuaaucugcugcggggauacgaacacauccgccucucuacgcauaacgugauuaaugccgagaacgcuccgggcggccccuauaagaucgggacaagcggauccugcccuaaugucaccaacggcaauggguucuuugccacaauggcuugggccgugcccaaaaacgacaagaauaaaaccgcgaccaacccucugacaauugaagugcccuacaucuguacggagggagaggaucagauuaccgucuggggcuuccacagcgacaaugaaacacagauggccaaacuuuauggggauucuaacccgcagaaguuuaccuccagcgcuaacggaguuacaacccacuacgugucucaaaucggcggcuucccuaaucagacggaggacgggggacugccccaguccggcagaaucguggucgauuauauggugcagaaaagcgggaagacaggaaccauuaccuaccaacggggcauccuccugccucagaaaguuuggugcgccucugggcgcuccaaggugauuaaaggaagccuuccccugaucggcgaagcugacugucuccaugagaaguauggcgggcugaacaaauccaagcccuacuacacaggagagcacgccaaggcgauuggcaauugcccuaucugggucaaaaccccgcugaagcucgccaacgggacaaaauauagacccccugcuaagcugcuuaaagaacggggauuuuucggcgccaucgcuggguuucuggagggcggaugggaaggcaugauugccggguggcauggauacacgucucacggcgcccacgggguggcuguugcggccgaucucaagagcacccaggaggcuaucaauaagauuacaaagaaccuuaauucccugagcgaacuggaggugaagaaccuccagcgccugucuggagccauggacgagcugcauaaugaaauccucgagcuggaugaaaaagucgacgaccuuagagccgauaccauuuccagccaaaucgagcuggcugugcuccugucuaacgaaggcaucauuaauagcgaggacgagcaccuucuggcccucgaacggaagcugaaaaagaugcuggggcccuccgcggucgagaucggcaacggauguuucgaaacaaagcauaaaugcaaucagaccugccucgaucgcauugcugccggcacguuugacgccggggaguucucucugccuaccuuugauagccuuaacaucacagcugccucccugaaugacgauggacucgacaaccacaccauucugcuguauuacagcacagcugccucuucccuugcggugacccucaugaucgccauuuucguuguguauauggucagcaaggauaacgugucuuguuccaucugccuguga

SEQ ID NO: 220208 - RNA, 1758 nt, Artificial Sequence
  derived and/or modified CDS sequence (opt5) from hemagglutinin__InfluenzaB__AHL94361
augaaggccaucauugugcugcucauggucguuaccagcaacgcugacagaaucugcacaggcauuacguccucuaauagcccccacguggugaaaaccgccacacagggggaggucaacgugaccggaguuaucccucugacaaccacaccgaccaagucccauuucgcgaaucuuaaaggcacggaaacccgggggaagcugugucccaaaugccucaacuguacagaucuggacguggcucuuggacgcccuaagugcaccggcaagauucccucugccagagucagcauccugcacgaggugcggccuguuacauccggguguuuucccaucaugcaugaucgcaccaaaauuagacaacucccuaaucugcugcggggauacgaacacauccgccucucuacgcauaacgugauuaaugccgagaacgcuccgggcggccccuauaagaucgggacaagcggauccugcccuaaugucaccaacggcaauggguucuuugccacaauggcuugggccgugcccaaaaacgacaagaauaaaaccgcgaccaacccucugacaauugaagugcccuacaucuguacggagggagaggaucagauuaccgucuggggcuuccacagcgacaaugaaacacagauggccaagcuguauggggauucuaacccgcagaaguuuaccuccagcgcuaacggaguuacaacccacuacgugucucaaaucggcggcuucccuaaucagacggaggacgggggacugccccaguccggcagaaucguggucgauuauauggugcagaaaagcgggaagacaggaaccauugccuaccaacggggcauccuccugccucagaaaguuuggugcgcuucugggcgcuccaaggugauuaaaggaagccuuccccugaucggcgaagccgacugucuccaugagaaguauggcgggcugaacaaauccaagcccuacuacaccggagagcacgcgaaggccauuggcaauugcccuaucugggucaaaacaccgcugaagcucgcuaacgggaccaaauauagacccccugccaagcugcuuaaagaacggggauuuuucggcgcuaucgccggguuucuggagggcggaugggaaggcaugauugccggguggcauggauacacaucucacggcgcucacgggguggcgguugccgcugaucucaagagcacgcaggaggccaucaauaagauuaccaaaaaccuuaauucccuuagcgaacuggaggugaagaaccuccagcgccugucuggagccauggacgagcugcauaaugaaauccucgagcuggaugaaaaagucgacgaccuuagagcugauacaauuuccagccaaaucgagcuggccgugcuccugucuaacgaaggcaucauuaauagcgaggacgagcaccuucuggcgcucgaacggaagcugaaaaagaugcuggggcccuccgcugucgagaucggcaacggauguuucgaaaccaagcauaaaugcaaucagacaugccucgaucgcauugccgccggcaccuuugacgcuggggaguucucucugccuacguuugauagccuuaacaucaccgccgcuucccugaaugacgauggacucgacaaccacacaauucugcuguauuacagcaccgccgcgucuucccuugccgugacacucaugaucgcuauuuucguuguguauauggucagcagagauucuguguccuguagcaucugccuguga

SEQ ID NO: 220209 - RNA, 1758 nt, Artificial Sequence
  derived and/or modified CDS sequence (opt5) from hemagglutinin__InfluenzaB__AHL94383
augaaggccaucauugugcugcucauggucguuaccagcaacgcugacagaaucugcacaggcauuacguccucuaauagcccccacguggugaaaaccgccacacagggggaagucaacgugaccggaguuaucccucugacaaccacaccgaccaagucccauuucgcgaaucuuaaaggcacggaaacccgggggaagcugugucccaaaugccucaacuguacagaucuggacguggcucuuggacgcccuaagugcaccggcaagauucccucugccagagucagcauccugcacgaggugcggccuguuacauccggguguuuucccaucaugcaugaucgcaccaaaauuagacaacucccuaaucugcugcggggauacgaacacauccgccucucuacgcauaacgugauuaaugccgagaacgcuccgggcggccccuauaagaucgggacaagcggauccugcccuaaugucaccaacggcaauggguucuuugccacaauggcuugggccgugcccaaaaacgacaagaauaaaaccgcgaccaacccucugacaauugaagugcccuacaucuguacggagggagaggaucagauuaccgucuggggcuuccacagcgacaaugaaacacagauggagaaacuuuauggggauucuaagccgcagaaguuuaccuccagcgccaacggaguuacaacccacuacgugucucaaaucggcggcuucccuaaccagacggaagacgggggacugccccaguccggcagaaucguggucgauuauauggugcaaaagagcgggaaaacaggaaccauuaccuaccagcggggcauccuccugccucagaagguuuggugcgcuucugggcgcuccaaagugauuaagggaagccuuccccugaucggcgaggccgacugucuccaugagaaauauggcgggcugaauaaguccaagcccuacuacacaggagaacacgcuaaagccauuggcaacugcccuaucugggucaagaccccgcugaaacucgcgaaugggacaaaguauagacccccugccaaacugcuuaaggagcggggauuuuucggcgcuaucgccggguuucuggaaggcggaugggagggcaugauugcuggguggcauggauacacgucucacggcgcccacgggguggccguugcugcggaucucaagagcacccaggaagccaucaacaaaauuacaaagaaucugaacucccuuagcgagcuggaggugaaaaaucuccagcgccugucuggagcuauggacgaacugcauaacgagauccucgaacuggaugagaaggucgacgaccuuagagccgauaccauuuccagccaaaucgaacuggccgugcuccugucuaaugagggcaucauuaacagcgaggacgaacaccuucuggcucucgagcggaaacugaagaagaugcuggggcccuccgccgucgaaaucggcaauggauguuucgagacaaaacauaagugcaaccagaccugccucgaucgcauugcggcuggcacguuugacgccggggaguucucucugccuaccuuugauagccuuaauaucacagccgcuucccugaacgacgauggacucgacaaucacaccauucugcuguauuacagcacagccgcuucuucccuugccgugacccucaugaucgcgauuuucguuguguauauggucagcagagauaacgugucuuguuccaucugccuguga

SEQ ID NO: 220210 - RNA, 1758 nt, Artificial Sequence; identical to SEQ ID NO: 218717
  derived and/or modified CDS sequence (opt5) from hemagglutinin__InfluenzaB__AHL94394

SEQ ID NO: 220211 - RNA, 1758 nt, Artificial Sequence
  derived and/or modified CDS sequence (opt5) from hemagglutinin__InfluenzaB__AHL94405
augaaggccaucauugugcugcucauggucguuaccagcaacgcugacagaaucugcacaggcauuacguccucuaauagcccccacguggugaaaaccgccacacagggggaggucaacgugaccggaguuaucccucugacaaccacaccgaccaagucccauuucgcgaaucuuaaaggcacggaaacccgggggaagcugugucccaaaugccucaacuguacagaucuggacguggcucuuggacgcccuaagugcaccggcaagauucccucugccagagucagcauccugcacgaggugcggccuguuacauccggguguuuucccaucaugcaugaucgcaccaaaauuagacaacucccuaaucugcugcggggauacgaacacauccgccucucuacgcauaacgugauuaaugccgagaacgcuccgggcggccccuauaagaucgggacaagcggauccugcccuaaugucaccaacggcaauggguucuuugccacaauggcuugggccgugcccaaaaacgacaagaauaaaaccgcgaccaacccucugacaauugaagugcccuacaucuguacggagggagaggaucagauuaccgucuggggcuuccacagcgacaaugaaacacagauggccaaacuuuauggggauucuaagccgcagaaguuuaccuccagcgcuaacggaguuacaacccacuacgugucucaaaucggcggcuucccuaaccagacggaggacgggggacugccccaguccggcagaaucguggucgauuauauggugcaaaagagcgggaaaacaggaaccauuaccuaccagcggggcauccuccugccucagaagguuuggugcgccucugggcgcuccaaagugauuaagggaagccuuccccugaucggcgaagcugacugucuccaugagaaauauggcgggcugaauaaguccaagcccuacuacacaggagagcacgccaaagcgauuggcaacugcccuaucugggucaagaccccgcugaaacucgccaaugggacaaaguauagacccccugcuaaacugcuuaaggaacggggauuuuucggcgccaucgcuggguuucuggagggcggaugggaaggcaugauugccggguggcauggauacacgucucacggcgcccacgggguggcuguugcggccgaucucaagagcacccaggaggcuaucaacaaaauuacaaagaaucugaacucccuuagcgaacuggaggugaaaaaucuccagcgccugucuggagccauggacgagcugcauaacgaaauccucgagcuggaugaaaaggucgacgaccuuagagccgauaccauuuccagccaaaucgagcuggcugugcuccugucuaaugaaggcaucauuaacagcgaggacgagcaccuucuggcccucgaacggaaacugaagaagaugcuggggcccuccgcggucgagaucggcaauggauguuucgaaacaaaacauaagugcaaccagaccugccucgaucgcauugcugccggcacguuuaaugccggggaguucucucugccuaccuuugacagccuuaacaucacagcugccucccugaaugaugacggacucgauaaccacaccauucugcuguauuacagcacagcugccucuucccuugcggugacccucaugaucgccauuuucguuguguauauggucagcagagacaacgugucuuguuccaucugccuguga

SEQ ID NO: 220212 - RNA, 1758 nt, Artificial Sequence; identical to SEQ ID NO: 218717
  derived and/or modified CDS sequence (opt5) from hemagglutinin__InfluenzaB__AHL94416

SEQ ID NO: 220213 - RNA, 1755 nt, Artificial Sequence; identical to SEQ ID NO: 218926
  derived and/or modified CDS sequence (opt5) from hemagglutinin__InfluenzaB__AHL94427

SEQ ID NO: 220214 - RNA, 1755 nt, Artificial Sequence
  derived and/or modified CDS sequence (opt5) from hemagglutinin__InfluenzaB__AHL94438
augaaggccaucauugugcugcucauggucguuaccagcaacgcugacagaaucugcacaggcauuacguccucuaauagcccccacguggugaaaaccgccacacagggggaggucaacgugaccggagcgaucccucugacaaccacaccgaccaaguccuacuucgcuaaucuuaaaggcacgcggacccgcgggaagcugugucccgauugccucaacuguacagaccuggauguugcccuuggaagaccuaugugcgugggcaccacacccucugccaaagcuagcauucugcaugaaguccggccugugaccuccggguguuuucccaucaugcacgaccgcacgaagaucagacaacucccuaaucugcugcggggauaugagaacauucgccucucuacacagaauguuaucgaugccgaaaaggcuccgggcggccccuacagacuggggaccagcggauccugcccuaacgccacaagcaaaauuggcuucuuugagaccauggcgugggccgugcccaaggacaauuauaaaaacgcuaccaauccucagacagucgaagugcccuacaucuguacggagggggaggaucagauuaccguguggggauuccauucugacaacaagacacaaaugaaaaaucuuuauggcgauuccaacccgcagaaguuuaccagcucugccaauggggucacaacccacuacguuucccagaucggagacuucccugaucagacggaagacggcggccugccccaaagcgggcggauugugguggauuauaugguccagaagccuggaaaaacaggcaccaucguguaccagcgcgggguucuccugccccagaagguguggugcgcuucuggaagauccaaagucaucaagggcagccuuccccugauuggggaggccgacugucuccaugaaaaauacggaggccugaacaaguccaaaccuuauuacaccggcgagcacgcgaaggccaucgggaacugcccgauuugggugaagacaccccugaaacucgcuaauggaaccaaguaucggccucccgccaaacugcuuaaggagcgcggcuuuuucggggcuaucgccggauuucuggaaggcgggugggagggcaugauugccggauggcacggcuacacaucucauggggcucacggaguugcgguggccgcugaccucaaaagcacgcaagaagccaucaacaagaucaccaagaaucugaacucccuuagcgagcuggaagucaaaaaucuccagagacugucuggcgccauggaugagcugcauaacgagauucucgaacuggacgagaagguggaugaccuucgggcugauacaaucuccagccagauugaacuggccguccuccugucuaaugaggggaucauuaacagcgaagacgagcaccuucuggcgcucgagcgcaaacugaagaaaaugcugggaccuuccgcuguggauaucggcaauggguguuucgaaaccaagcacaagugcaaccaaacaugccucgacagaaucgccgccggcaccuuuaaugcuggagaguucucucugcccacguuugauagccuuaacauuaccgccgcuucccugaaugacgauggccucgacaaccauacaauccugcuguauuacagcaccgccgcgucuucccuugccguuacacucaugcuggcuauuuucaucguguauauggucagccgggacaaugugucuuguuccauuugccuguga

SEQ ID NO: 220215 - RNA, 1755 nt, Artificial Sequence
  derived and/or modified CDS sequence (opt5) from hemagglutinin__InfluenzaB__AHL94460
augaaggccaucauugugcugcucauggucguuaccagcaacgcugacagaaucugcacaggcauuacguccucuaauagcccccacguggugaaaaccgccacacagggggaggucaacgugaccggagcgaucccucugacaaccacaccgaccaaguccuacuucgcuaaucuuaaaggcacgcggacccgcgggaagcugugucccgauugccucaacuguacagaccuggauguugcccuuggaagaccuaugugcgugggcaccacacccucugccaaagcuagcauucugcaugaaguccggccugugaccuccggguguuuucccaucaugcacgaccgcacgaagaucagacaacucccuaaucugcugcggggauaugagaacauucgccucucuacacagaauguuaucgaugccgaaaaggcuccgggcggccccuacagacuggggaccagcggauccugcccuaacgccacaagcaaaauuggcuucuuugcgaccauggccugggcugugcccaaggacaauuauaaaaacgccaccaauccucagacagucgaggugcccuacaucuguacggaagaggaggaucagauuaccguguggggguuccauucugacaacaagacacaaaugaaaaaucuuuauggagauuccaacccgcagaaguuuaccagcucugcuaauggcgucacaacccacuacguuucccagaucggggacuucccugaucagacggaagacggaggccugccccaaagcggccggauugugguggauuauaugguccagaagccugggaaaacaggaaccaucguguaccagcgcggcguucuccugccccagaagguguggugcgccucugggagauccaaagucaucaagggaagccuuccccugauuggcgaggcggacugucuccaugaaaaauacgggggacugaacaaguccaaaccuuauuacaccggcgagcacgccaaggcuaucggcaacugcccgauuugggugaagacaccccugaaacucgccaaugggaccaaguaucggccucccgcuaaacugcuuaaggagcgcggauuuuucggcgccaucgccggguuucuggaaggaggcugggaggggaugauugcuggcuggcacggauacacaucucauggcgcgcacgggguugccguggcugccgaccucaaaagcacgcaagaagccaucaacaagaucaccaagaaucugaacucccuuagcgagcuggaagucaaaaaucuccagagacugucuggagcuauggaugagcugcauaacgagauucucgaacuggacgagaagguggaugaccuucgggccgauacaaucuccagccagauugaacuggcgguccuccugucuaaugagggcaucauuaacagcgaagacgagcaccuucuggcucucgagcgcaaacugaagaaaaugcuggggccuuccgccguggauaucggaaauggcuguuucgaaaccaagcacaagugcaaccaaacaugccucgacagaaucgccgcugggaccuuuaaugccggcgaguucucucugcccacguuugauagccuuaacauuaccgcugccucccugaaugacgauggacucgacaaccauacaauccugcuguauuacagcaccgcggccucuucccuugcuguuacacucaugcuggccauuuucaucguguauauggucagccgggacaaugugucuuguuccauuugccuguga

SEQ ID NO: 220216 - RNA, 1755 nt, Artificial Sequence
  derived and/or modified CDS sequence (opt5) from hemagglutinin__InfluenzaB__AHL94471
augaaggccaucauugugcugcucauggucguuaccagcaacgcugacagaaucugcacaggcauuacguccucuaauagcccccacguggugaaaaccgccacacagggggaagucaacgugaccggaguuaucccucugacaaccacaccgaccaaguccuacuucgcgaaucuuaaaggcacgcggacccgcgggaagcugugucccgauugccucaacuguacagaccuggauguggcucuuggaagaccuaugugcgucggcaccacacccucugccaaagccagcauucugcaugaagugcggccuguuaccuccggguguuuucccaucaugcacgaccgcacgaagaucagacaacucccuaaucugcugcggggauaugagaagauucgccucucuacacagaacgugaucgaugcugaaaaagccccgggcggccccuacagacuggggaccagcggauccugcccuaaugcuacaagcaagauuggcuucuuugccaccauggcgugggccguccccaaagacaacuauaagaaugcuaccaacccucuuacaguggaggugcccuacaucuguacggaaggggaggaucagauuaccgucuggggauuccauucugacaauaaaacacagaugaagucccuguauggcgauagcaacccgcaaaaguuuaccucuuccgccaaugggguuacaacccacuacgugagccagaucggagacuucccugaucagacggaggacggcggccucccccagucugggcggauuguggucgauuauaugaugcaaaaaccuggaaagacaggcaccaucguguaccagcgcgggguucugcuuccccagaaaguguggugcgcuuccggaagaagcaaggucaucaaaggcucccugccccucauuggggaagccgacugucugcaugaggaauacggaggccugaacaagucuaaaccuuauuacaccggcaagcacgcgaaggccaucgggaauugcccgauuugggugaaaacaccccucaagcuggcuaacggaaccaaauaucggccucccgccaagcugcugaaagagcgcggcuuuuucggggcuaucgccggauuucucgagggcgggugggaaggcaugauugccggauggcacggcuacacaagccauggggcucacggaguugcgguggccgcugaccugaaguccacgcaggaggccaucaacaagaucaccaaaaaucuuaacagccugucugaacucgaggucaagaaucugcaaagacuguccggcgccauggaugaacuccauaacgagauucuggagcuugacgaaaaaguggaugaccugcgggcugauacaaucagcucucagauugagcucgccguccugcuuagcaaugaagggaucauuaacuccgaggacgaacaccuucucgcgcuggagcgcaagcugaaaaagaugcucggaccuucugcuguggauaucggcaauggguguuucgagaccaagcacaaaugcaaccagacaugccuggacagaaucgccgccggcaccuuuaaugcuggagaguucagccuucccacguuugauucccugaacauuaccgccgcuagccucaaugacgauggccuggacaaccauacaauccugcuuuauuacucuaccgccgcguccagccucgccguuacacugaugcuggcuauuuucaucguguauauggucucucgggacaauauuuccuguagcaucugccucuga

SEQ ID NO: 220217 - RNA, 1758 nt, Artificial Sequence
  derived and/or modified CDS sequence (opt5) from hemagglutinin__InfluenzaB__AHL94482
augaaggccaucauugugcugcucauggucguuaccagcaacgcugacagaaucugcacaggcauuacguccucuaauagcccccacguggugaaaaccgccacacagggggaggucaacgugaccggaguuaucccucugacaaccacaccgaccaagucccauuucgcgaaucuuaaaggcacggaaacccgggggaagcugugucccaaaugccucaacuguacagaucuggacguggcucuuggacgcccuaagugcaccggcaagauucccucugccagagucagcauccugcacgaggugcggccuguuacauccggguguuuucccaucaugcaugaucgcaccaaaauuagacaacucccuaaucugcugcggggauacgaacacauccgccucucuacgcauaacgugauuaaugccgagaacgcuccgggcggccccuauaagaucgggacaagcggauccugcccuaaugucaccaacggcaauggguucuuuacaaccauggccugggcugugcccaaaaacgacaagaauaaaaccgccacaaacccucugacgauugaagugcccuacaucuguaccgagggagaggaucagauuacagucuggggcuuccacagcgacaaugaaacccagauggcgaaacuuuauggggauucuaagccgcagaaguuuacauccagcgccaacggaguuaccacgcacuacgugucucaaaucggcggcuucccuaaccagacagaggacgggggacugccccaguccggcagaaucguggucgauuauauggugcaaaagagcgggaaaaccggaaccauuacauaccagcggggcauccuccugccucagaagguuuggugcgcuucugggcgcuccaaagugauuaagggaagccuuccccugaucggcgaagccgacugucuccaugagaaauauggcgggcugaauaaguccaagcccuacuacaccggagagcacgcuaaagccauuggcaacugcccuaucugggucaagacaccgcugaaacucgcgaaugggacgaaguauagacccccugccaaacugcuuaaggaacggggauuuuucggcgcuaucgccggguuucuggagggcggaugggaaggcaugauugcuggguggcauggauacaccucucacggcgcccacgggguggccguugcugcggaucucaagagcacacaggaggccaucaacaaaauuaccaagaaucugaacucccuuagcgaacuggaggugaaaaaucuccagcgccugucuggagcuauggacgagcugcauaacgaaauccucgagcuggaugaaaaggucgacgaccuuagagccgauacaauuuccagccaaaucgagcuggccgugcuccugucuaaugaaggcaucauuaacagcgaggacgagcaccuucuggcucucgaacggaaacugaagaagaugcuggggcccuccgccgucgagaucggcaauggauguuucgaaaccaaacauaagugcaaccagacgugccucgaucgcauugcggcuggcaccuuugacgccggggaguucucucugccuacauuugauagccuuaauaucaccgccgcuucccugaacgacgauggacucgacaaucacacaauucugcuguauuacagcaccgccgcuucuucccuugccgugacgcucaugaucgcgauuuucguuguguauauggucagcagagauaacgugucuuguuccaucugccuguga

SEQ ID NO: 220218 - RNA, 1755 nt, Artificial Sequence; identical to SEQ ID NO: 220201
  derived and/or modified CDS sequence (opt5) from hemagglutinin__InfluenzaB__AHL94493

SEQ ID NO: 220219 - RNA, 1755 nt, Artificial Sequence; identical to SEQ ID NO: 220203
  derived and/or modified CDS sequence (opt5) from hemagglutinin__InfluenzaB__AHL94504

SEQ ID NO: 220220 - RNA, 1758 nt, Artificial Sequence
  derived and/or modified CDS sequence (opt5) from hemagglutinin__InfluenzaB__AHL94515
augaaggccaucauugugcugcucauggucguuaccagcaacgcugacagaaucugcacaggcauuacguccucuaauagcccccacguggugaaaaccgccacacagggggaagucaacgugaccggaguuaucccucugacaaccacaccgaccaagucccauuucgcgaaucuuaaaggcacggaaacccgggggaagcugugucccaaaugccucaacuguacagaucuggacguggcucuuggacgcccuaagugcaccggcaagauucccucugccagagucagcauccugcacgaggugcggccuguuacauccggguguuuucccaucaugcaugaucgcaccaaaauuagacaacucccuaaucugcugcggggauacgaacacauccgccucucuacguauaacgugauuaaugccgaggacgcuccgggcggccccuacaagaucgggacaagcggauccugcccuaacgucaccaauggcaacggguucuuugccacaauggcuugggccgugcccaaaaaugauaagaacaaaaccgcgaccaauccucugacaauugaagugcccuauaucuguacggagggagaggaccagauuaccgucuggggcuuccauagcgauaacgaaacacagauggagaagcuguacggggacucuaagccgcagaaauuuaccuccagcgccaauggaguuacaacccacuaugugucucaaaucggcggcuucccuaaccagacggaagaugggggacugccccaguccggcagaaucguggucgacuacauggugcaaaagagcgggaaaacaggaaccauuaccuaucagcggggcauccuccugccucagaagguuuggugcgcuucugggcgcuccaaagugauuaagggaagccuuccccugaucggcgaggccgauugucuccacgagaaauacggcgggcugaacaaguccaagcccuacuauacaggagaacaugcuaaagccauuggcaauugcccuaucugggucaagaccccgcugaaacucgcgaacgggacaaaguacagacccccugccaaacugcuuaaggagcggggauuuuucggcgcuaucgccggguuucuggaaggcggaugggagggcaugauugcuggguggcacggauauacgucucauggcgcccacgggguggccguugcugcggaccucaagagcacccaggaagccaucaauaaaauuacaaagaaccuuaauucccuuagcgagcuggaggugaaaaaccuccagcgccugucuggagcuauggaugaacugcacaaugagauccucgaacuggacgagaaggucgacgaucuuagagccgacaccauuuccagccaaaucgaacuggccgugcuccugucuaacgagggcaucauuaauagcgaggaugaacaucuucuggcucucgagcggaaacugaagaagaugcuggggcccuccgccgucgaaaucggcaacggauguuucgagacaaaacacaagugcaaucagaccugccucgaccgcauugcggcuggcacguuugaugccggggaguucucucugccuaccuuugacagccuuaacaucacagccgcuucccugaaugaugacggacucgauaaccauaccauucugcuguacuauagcacagccgcuucuucccuugccgugacccucaugaucgcgauuuucguuguguacauggucagcagagacaaugugucuuguuccaucugccuguga

SEQ ID NO: 220221 - RNA, 1755 nt, Artificial Sequence; identical to SEQ ID NO: 220203
  derived and/or modified CDS sequence (opt5) from hemagglutinin__InfluenzaB__AHL94526

SEQ ID NO: 220222 - RNA, 1758 nt, Artificial Sequence
  derived and/or modified CDS sequence (opt5) from hemagglutinin__InfluenzaB__AHL94537
augaaggccaucauugugcugcucauggucguuaccagcaacgcugacagaaucugcacaggcauuacguccucuaauagcccccacguggugaaaaccgccacacagggggaggucaacgugaccggaguuaucccucugacaaccacaccgaccaagucccauuucgcgaaucuuaaaggcacggaaacccgggggaagcugugucccaaaugccucaacuguacagaucuggacguggcucuuggacgcccuaagugcaccggcaagauucccucugccagagucagcauccugcacgaggugcggccuguuacauccggguguuuucccaucaugcaugaucgcaccaaaauuagacaacucccuaaucugcugcggggauacgaacacauccgccucucuacgcauaacgugauuaaugccgagaacgcuccgggcggccccuauaagaucgggacaagcggauccugcccuaaugucaccaacggcaauggguucuuugccacaauggcuugggccgugcccaaaaacgacaagaauaaaaccgcgaccaacccucugacaauugaagugcccuacaucuguacggagggagaggaucagauuaccgucuggggcuuccacagcgacaaugaaacacagauggccaaacuuuauggggauucuaacccgcagaaguuuaccuccagcgcuaacggaguuacaacccacuacaucucucaaaucggcggcuucccuaaucagacggaggacgggggacugccccaguccggcagaauugugguggauuauaugguccagaaaagcgggaagacaggaaccaucaccuaccaacggggcauucuccugccucagaaaguguggugcgccucugggcgcuccaagguuaucaaaggaagccuuccccugauuggcgaagcugacugucuccaugagaaguauggcgggcugaacaaauccaagcccuacuacacaggagagcacgccaaggcgaucggcaauugcccuaucugggugaaaaccccgcugaagcucgccaacgggacaaaauauagacccccugcuaagcugcuuaaagaacggggauuuuucggcgccauugcuggguuucuggagggcggaugggaaggcaugaucgccggguggcauggauacacgucucacggcgcccacggggucgcuguggcggccgaucucaagagcacccaggaggcuauuaauaagaucacaaagaaccuuaauucccugagcgaacuggagguuaagaaccuccagcgccugucuggagccauggacgagcugcauaaugaaauucucgagcuggaugaaaaaguggacgaccuuagagccgauaccaucuccagccaaaucgagcuggcuguccuccugucuaacgaaggcauuaucaauagcgaggacgagcaccuucuggcccucgaacggaagcugaaaaagaugcuggggcccuccgcgguggagauuggcaacggauguuucgaaacaaagcauaaaugcaaucagaccugccucgaucgcaucgcugccggcacguuugacgccggggaguucucucugccuaccuuugauagccuuaacauuacagcugccucccugaaugacgauggacucgacaaccacaccauccugcuguauuacagcacagcugccucuucccuugcggucacccucaugauugccaucuucgugguuuauauggugagcagagauaacgucucuuguuccaucugccuguga

SEQ ID NO: 220223 - RNA, 1755 nt, Artificial Sequence
  derived and/or modified CDS sequence (opt5) from hemagglutinin__InfluenzaB__AHL94548
augaaggccaucauugugcugcucauggucguuaccagcaacgcugacagaaucugcacaggcauuacguccucuaauagcccccacguggugaaaaccgccacacagggggaggucaacgugaccggaguuaucccucugacaaccacaccgauuaaguccuacuucgcgaaucuuaaaggcaccaagacgcgggggaaacugugucccgauugccucaacuguaccgaccuggauguggcucuuggacgcccuaugugcgucggcacaacccccucugccaaggccagcauccugcaugaagugagaccuguuacauccggguguuuucccaucaugcacgaccggaccaagauucgccaacucgcuaaucugcugagaggauaugagaacauccggcucucuacgcagaaugugauugaugccgaacgcgcuccuggcggcccguacagacuggggacaagcggauccugccccaacgccaccagcaaaucuggcuucuuugcgacaauggccugggcugucccuaaggacaauaacaaaaaugccaccaacccccuuaccguggaggugccuuauaucugugcugaaggggaggaucagauuacagucuggggauuccauuccgacaauaagacgcagaugaaaaaccuguacggcgauagcaauccccaaaaguuuaccucuuccgccaacgggguuacaacccacuaugugagccagaucggaggcuucccggaccagacagaggauggcgggcucccucagucuggacggauuguggucgacuacaugaugcaaaagcccggcaaaaccgggacgaucguguaucagcgcggaguucugcuuccucagaagguguggugcgcguccggcagaagcaaagucaucaaggggucccugccccucauuggagaagccgauugucugcaugagaaauacggcggccugaacaagucuaaacccuacuauacaggggaacacgcuaaggccaucggaaauugcccuauuugggugaagaccccgcucaaacuggcuaacggcaccaaguaccggcccccugccaaacuucugaaggagcgcggguuuuucggagccaucgcuggcuuucucgaagggggcugggaaggaaugauugcgggcuggcacggguauacaagccauggagcccacggcguugcuguggccgccgaccugaaauccacccaggaggcuaucaauaagaucacaaagaaccuuaauagccugucugaacucgaggucaaaaaccugcaaagacuguccggggccauggacgaacuccauaaugagauucuggagcuugaugaaaagguggacgaucugcgggcggacacgaucagcucucagauugagcucgcuguccugcuuagcaacgaaggaaucauuaauuccgaggaugaacaucugcucgcccuggagcgcaaacugaagaaaaugcucggccccucugccguggacaucgggaacggcuguuucgagaccaagcacaagugcaaucagacaugccuggauagaaucgcugccggaaccuuuaacgcuggcgaguucagccuuccuacauuugacucccugaauauuaccgccgcgagccucaacgaugacgggcuggauaaucacacgauccugcuuuacuauucuaccgccgcuuccagccucgccguuacacugaugcuggcuauuuucaucguguacauggucucucgggacaacguguccuguagcauuugccucuga

SEQ ID NO: 220224 - RNA, 1755 nt, Artificial Sequence; identical to SEQ ID NO: 220201
  derived and/or modified CDS sequence (opt5) from hemagglutinin__InfluenzaB__AHL94559

SEQ ID NO: 220225 - RNA, 1755 nt, Artificial Sequence; identical to SEQ ID NO: 218926
  derived and/or modified CDS sequence (opt5) from hemagglutinin__InfluenzaB__AHL94570

SEQ ID NO: 220226 - RNA, 1755 nt, Artificial Sequence; identical to SEQ ID NO: 218926
  derived and/or modified CDS sequence (opt5) from hemagglutinin__InfluenzaB__AHL94581

SEQ ID NO: 220227 - RNA, 1755 nt, Artificial Sequence; identical to SEQ ID NO: 218926
  derived and/or modified CDS sequence (opt5) from hemagglutinin__InfluenzaB__AHL94592

SEQ ID NO: 220228 - RNA, 1758 nt, Artificial Sequence
  derived and/or modified CDS sequence (opt5) from hemagglutinin__InfluenzaB__AHL94603
augaaggccaucauugugcugcucauggucguuaccagcaacgcugacagaaucugcacaggcauuacguccucuaauagcccccacguggugaaaaccgccacacagggggaggucaacgugaccggaguuaucccucugacaaccacaccgaccaagucccauuucgcgaaucuuaaaggcacggaaacccgggggaagcugugucccaaaugccucaacuguacagaucuggacguggcucuuggacgcccuaagugcaccggcaagauucccucugccagagucagcauccugcacgaggugcggccuguuacauccggguguuuucccaucaugcaugaucgcaccaaaauuagacaacucccuaaucugcugcggggauacgaaaacauccgccucucuacgcacaaugugauuaacgccgagaaugcuccgggcggccccuauaagaucgggacaagcggauccugcccuaacgucaccaauggcaacggguucuuugccacaauggcuugggccgugcccaaaaaugacaagaacaaaaccgcgaccaauccucugacaauugaagugcccuacaucuguacggagggagaggaucagauuaccgucuggggcuuccauagcgacaacgaaacacagauggccaagcuguauggggauucuaagccgcagaaauuuaccuccagcgcuaacggaguuacaacccacuacgugucucaaaucggcggcuucccuaaucagacggaggacgggggacugccccaguccggcagaaucguggucgauuauauggugcaaaagagcgggaaaacaggaaccauuaccuaccagcggggcauccuccugccucagaagguuuggugcgccucugggcgcuccaaagugauuaagggaagccuuccccugaucggcgaagcugacugucuccacgagaaauauggcgggcugaacaaguccaagcccuacuacacaggagagcaugccaaagcgauuggcaauugcccuaucugggucaagaccccgcugaaacucgccaacgggacaaaguauagacccccugcuaaacugcuuaaggaacggggauuuuucggcgccaucgcuggguuucuggagggcggaugggaaggcaugauugccggguggcacggauacacgucucauggcgcccacgggguggcuguugcggccgaucucaagagcacccaggaggcuaucaauaaaauuacaaagaaccuuaauucccuuagcgaacuggaggugaaaaaccuccagcgccugucuggagccauggacgagcugcacaaugaaauccucgagcuggaugaaaaggucgacgaccuuagagccgauaccauuuccagccaaaucgagcuggcugugcuccugucuaacgaaggcaucauuaauagcgaggacgagcaucuucuggcccucgaacggaaacugaagaagaugcuggggcccuccgcggucgagaucggcaacggauguuucgaaacaaaacacaagugcaaucagaccugccucgaucgcauugcugccggcacguuugacgccggggaguucucucugccuaccuuugauagccuuaacaucacagcugccucccugaaugacgauggacucgacaaccauaccauucugcuguauuacagcacagcugccucuucccuugcggugacccucaugaucgccauuuucguuguguauauggucagcagagauaacgugucuuguuccaucugccuguga

SEQ ID NO: 220229 - RNA, 1758 nt, Artificial Sequence
  derived and/or modified CDS sequence (opt5) from hemagglutinin__InfluenzaB__AHL94614
augaaggccaucauugugcugcucauggucguuaccagcaacgcugacagaaucugcacaggcauuacguccucuaauagcccccacguggugaaaaccgccacacagggggaggucaacgugaccggaguuaucccucugacaaccacaccgaccaagucccauuucgcgaaucuuaaaggcacggaaacccgggggaagcugugucccaaaugccucaacuguacagaucuggacguggcucuuggacgcccuaagugcaccggcaagauucccucugccagagucagcauccugcacgaggugcggccuguuacauccggguguuuucccaucaugcaugaucgcaccaaaauuagacaacucccuaaucugcugcggggauacgaacacauccgccucucuacgcauaacgugauuaaugccgagaacgcuccgggcggccccuauaagaucgggacaagcggauccugcccuaaugucaccaacggcaauggguucuuugccacaauggcuugggccgugcccaaaaacgacaagaauaaaaccgcgaccaacccucugacaauugaagugcccuacaucuguacggagggagaggaucagauuaccgucuggggcuuccacagcgacaaugaaacacagauggccaaacuuuauggggauucuaagccgcagaaguuuaccuccagcgcuaacggaguuacaacccacuacgugucucaaaucggcggcuucccuaaccagacggaggacgggggacugccccaguccggcagaaucguggucgauuauauggugcaaaagagcgggaaaacaggaaccauuaccuaccagcggggcauccuccugccucagaagguuuggugcgccucugggcgcuccaaagugauuaagggaagccuuccccugaucggcgaagcugacugucuccaugagaaauauggcgggcugaauaaguccaagcccuacuacacaggagagcacgccaaagcgauuggcaacugcccuaucugggucaagaccccgcugaaacucgccaaugggacaaaguauagacccccugcuaaacugcuuaaggaacggggauuuuucggcgccaucgcuggguuucuggagggcggaugggaaggcaugauugccggguggcauggauacaucucucacggcgcccacgggguggcuguugcggccgaucucaagagcacgcaggaggcuauuaacaaaaucaccaagaaucugaacucccuuagcgaacuggaggugaaaaaucuccagcgccugucuggagccauggacgagcugcauaacgaaauucucgagcuggaugaaaaggucgacgaccuuagagccgauacaaucuccagccaaaucgagcuggcugugcuccugucuaaugaaggcauuaucaacagcgaggacgagcaccuucuggcccucgaacggaaacugaagaagaugcuggggcccuccgcggucgagauuggcaauggauguuucgaaaccaaacauaagugcaaccagacaugccucgaucgcaucgcugccggcaccuuugacgccggggaguucucucugccuacguuugauagccuuaauauuaccgcugccucccugaacgacgauggacucgacaaucacacaauccugcuguauuacagcaccgcugccucuucccuugcggugacacucaugauugccaucuucguuguguauauggucagcagagauaacgugucuuguuccaucugccuguga

SEQ ID NO: 220230 - RNA, 1755 nt, Artificial Sequence; identical to SEQ ID NO: 220203
  derived and/or modified CDS sequence (opt5) from hemagglutinin__InfluenzaB__AHL94624

SEQ ID NO: 220231 - RNA, 1758 nt, Artificial Sequence
  derived and/or modified CDS sequence (opt5) from hemagglutinin__InfluenzaB__AHL94646
augaaggccaucauugugcugcucauggucguuaccagcaacgcugacagaaucugcacaggcauuacguccucuaauagcccccacguggugaaaaccgccacacagggggaggucaacgugaccggaguuaucccucugacaaccacaccgaccaagucccauuucgcgaaucuuaaaggcacggaaacccgggggaagcugugucccaaaugccucaacuguacagaucuggacguggcucuuggacgcccuaagugcaccggcaagauucccucugccagagucagcauccugcacgaggugcggccuguuacauccggguguuuucccaucaugcaugaucgcaccaaaauuagacaacucccuaaucugcugcggggauacgaacacauccgccucucuacgcauaacgugauuaaugccgagaacgcuccgggcggccccuauaagaucgggacaagcggauccugccugaaugucaccaacggcaauggguucuuugccacaauggcuugggccgugccuaaaaacgacaagaauaaaaccgcgaccaacccccuuacaauugaagugccuuacaucuguacggagggagaggaucagauuaccgucuggggcuuccacagcgacaaugaaacacagauggccaagcuguauggggauucuaagccccagaaauuuaccuccagcgcuaacggaguuacaacccacuacgugucucaaaucggcggcuucccgaaccagacggaggacgggggacucccucaguccggcagaaucguggucgauuauauggugcaaaagagcgggaaaacaggaaccauuaccuaccagcggggcauccugcuuccccagaagguuuggugcgccucugggcgcuccaaagugauuaagggaagccugccucucaucggcgaagcugacugucugcaugagaaauauggcgggcugaauaaguccaagcccuacuacacaggagagcacgccaaagcgauuggcaacugccccaucugggucaagaccccucucaaacuggccaaugggacaaaguauagaccgcccgcuaaacuucugaaggaacggggauuuuucggcgccaucgcuggguuucucgagggcggaugggaaggcaugauugccggguggcauggauacacgucucacggcgcccacgggguggcuguugcggccgaucuuaagagcacccaggaggcuaucaacaaaauuacaaagaaucugaacucccugagcgaacucgaggugaaaaaucugcagcgccugucuggagccauggacgagcuccauaacgaaauccuggagcuugaugaaaaggucgacgaccugagagccgauaccauuuccagccaaaucgagcucgcugugcugcuuucuaaugaaggcaucauuaacagcgaggacgagcaucugcucgcccuggaacggaaacugaagaagaugcucgggccuuccgcggucgagaucggcaauggauguuucgaaacaaaacacaagugcaaccagaccugccuggaucgcauugcugccggcacguuugacgccggggaguucucucuucccaccuuugauagccugaauaucacagcugccucccucaacgacgauggacuggacaaucacaccauucugcuuuauuacagcacagcugccucuucccucgcggugacccugaugaucgccauuuucguuguguauauggucagcagagauaacgugucuuguuccaucugccuguga

SEQ ID NO: 220232 - RNA, 1758 nt, Artificial Sequence
  derived and/or modified CDS sequence (opt5) from hemagglutinin__InfluenzaB__AHL94657
augaaggccaucauugugcugcucauggucguuaccagcaacgcugacagaaucugcacaggcauuacguccucuaauagcccccacguggugaaaaccgccacacagggggaggucaacgugaccggaguuaucccucugacaaccacaccgaccaagucccauuucgcgaaucuuaaaggcacggaaacccgggggaagcugugucccaaaugcccuaacuguacagaucucgacguggcucugggacgccccaagugcaccggcaagauuccuucugccagagucagcauccuucacgaggugcggcccguuacauccggguguuuuccuaucaugcaugaucgcaccaaaauuagacaacugccgaaucuccugcggggauacgaacacauccgccugucuacgcauaacgugauuaaugccgagagcgcucccggcggcccuuauaagaucgggacauccggaagcugccccaacgucaccaauggcaacggguucuuugccacaauggcuugggccgugccuaaaaaugacaagaacaaaaccgcgaccgauccccucacaauugaagugccguacaucuguacggagggagaggaccagauuaccgucuggggcuuccacucugauaaugaaacacagauggccaagcuguauggggacuccaagccucagaaauuuaccagcucugcuaacggaguuacaacccacuacgugucccaaaucggcggcuuccccaaucagacggaggaugggggacuuccucagagcggcagaaucguggucgacuauauggugcagaagucugggaaaacaggaaccauuaccuaccaacggggcauccugcucccccagaagguuuggugcgccuccgggcgcagcaaagugauuaagggaucccugccccuuaucggcgaagcugauugucugcaugagaaauauggcgggcucaacaagucuaagccuuacuacacaggagagcacgccaaagcgauuggcaacugcccgaucugggucaagacaccccugaaacuggccaaugggaccaaguauagaccucccgcuaaacuccugaaggaacggggauuuuucggcgccaucgcuggguuucuugagggcggaugggaaggcaugauugccggguggcauggauacacgagccacggcgcccacgggguggcuguugcggccgaccugaaguccacccaggaggcuaucaacaaaauuacaaagaaucucaacagccugucugaacuugaggugaaaaaucugcagcgccucuccggagccauggaugagcugcauaacgaaauccuggagcucgacgaaaaggucgacgaucugagagccgacaccauuagcucucaaaucgagcuugcugugcugcucagcaaugaaggcaucauuaacuccgaggaugagcaucugcuugcccuggaacggaaacucaagaagaugcuggggccuucugcggucgagaucggcaauggauguuucgaaacaaaacacaagugcaaccagaccugccuggaccgcauugcugccggcacguuugaugccggggaguucagccuccccaccuuugacucccugaauaucacagcugccagccuuaacgaugacggacuggauaaucacaccauucuccuguauuacucuacagcugccuccagccuggcggugacccuuaugaucgccauuuucguuguguauauggucucuagagacaacguguccuguagcaucugccucuga

SEQ ID NO: 220233 - RNA, 1755 nt, Artificial Sequence; identical to SEQ ID NO: 220203
  derived and/or modified CDS sequence (opt5) from hemagglutinin__InfluenzaB__AHL94668

SEQ ID NO: 220234 - RNA, 1755 nt, Artificial Sequence; identical to SEQ ID NO: 220203
  derived and/or modified CDS sequence (opt5) from hemagglutinin__InfluenzaB__AHL94679

SEQ ID NO: 220235 - RNA, 1758 nt, Artificial Sequence; identical to SEQ ID NO: 220228
  derived and/or modified CDS sequence (opt5) from hemagglutinin__InfluenzaB__AHL94690

SEQ ID NO: 220236 - RNA, 1758 nt, Artificial Sequence
  derived and/or modified CDS sequence (opt5) from hemagglutinin__InfluenzaB__AHL94701
augaaggccaucauugugcugcucauggucguuaccagcaacgcugacagaaucugcacaggcauuacguccucuaauagcccccacguggugaaaaccgccacacagggggaggucaacgugaccggaguuaucccucugacaaccacacuuaccaagucccauuucgcgaaucugaaaggcacggaaacccgggggaagcucuguccgaaaugccugaacuguacagaucuugacguggcucugggacgccccaagugcaccggcaagauuccuucugccagagucagcauccuccacgaggugcggcccguuacauccggguguuuuccuaucaugcaugaucgcaccaaaauuagacaacugcccaaucugcuccggggauacgaacacauccgccugucuacgcauaacgugauuaaugccgagaacgcuccuggcggcccguauaagaucgggacaagcggauccugccuuaaugucaccaacggcaauggguucuuugccacaauggcuugggccgugcccaaaaacgacaagaauaaaaccgcgaccaacccucugacaauugaagugcccuacaucuguacggagggagaggaucagauuaccgucuggggcuuccacagcgacaaugaaacacagauggccaagcucuauggggauucuaagccucagaaauuuaccuccagcgcuaacggaguuacaacccacuacgugucucaaaucggcggcuuccccaaccagacggaggacgggggacugccgcaguccggcagaaucguggucgauuauauggugcaaaagagcgggaaaacaggaaccauuaccuaccagcggggcauccuucugccucagaagguuuggugcgccucugggcgcuccaaagugauuaagggaagccucccccugaucggcgaagcugacugucugcaugagaaauauggcgggcucaauaaguccaagccuuacuacacaggagagcacgccaaagcgauuggcaacugccccaucugggucaagacaccccugaaacuugccaaugggaccaaguauagaccuccggcuaaacugcucaaggaacggggauuuuucggcgccaucgcuggguuucuggagggcggaugggaaggcaugauugccggguggcauggauacacgucucacggcgcccacgggguggcuguugcggccgaucuuaagagcacccaggaggcuaucaacaaaauuacaaagaaucugaacucccucagcgaacuggaggugaaaaaucugcagcgccucucuggagccauggacgagcugcauaacgaaauccuugagcuggaugaaaaggucgacgaccucagagccgauaccauuuccagccaaaucgagcuggcugugcuucugucuaaugaaggcaucauuaacagcgaggacgagcaccuccuggcccuggaacggaaacucaagaagaugcuggggcccuccgcggucgagaucggcaauggauguuucgaaacaaaacauaagugcaaccagaccugccuugaucgcauugcugccggcacguuugacgccggggaguucucucugccuaccuuugauagccucaauaucacagcugccucccugaacgacgauggacuggacaaucacaccauucuucucuauuacagcacagcugccucuucccuggcggugacccugaugaucgccauuuucguuguguauauggucagcagagauaacgugucuuguuccaucugccucuga

SEQ ID NO: 220237 - RNA, 1755 nt, Artificial Sequence; identical to SEQ ID NO: 220201
  derived and/or modified CDS sequence (opt5) from hemagglutinin__InfluenzaB__AHL94712

SEQ ID NO: 220238 - RNA, 1758 nt, Artificial Sequence; identical to SEQ ID NO: 220232
  derived and/or modified CDS sequence (opt5) from hemagglutinin__InfluenzaB__AHL94723

SEQ ID NO: 220239 - RNA, 1755 nt, Artificial Sequence; identical to SEQ ID NO: 220201
  derived and/or modified CDS sequence (opt5) from hemagglutinin__InfluenzaB__AHL94734

SEQ ID NO: 220240 - RNA, 1758 nt, Artificial Sequence
  derived and/or modified CDS sequence (opt5) from hemagglutinin__InfluenzaB__AHL94745
augaaggccaucauugugcugcucauggucguuaccagcaacgcugacagaaucugcacaggcauuacguccucuaauagcccccacguggugaaaaccgccacacagggggaggucaacgugaccggaguuaucccucugacaaccacaccgaccaagucccauuucgcgaaucuuaaaggcacggaaacccgggggaagcugugucccaaaugccucaacuguacagaucuggacguggcucuuggacgcccuaagugcaccggcaagauucccucugccagagucagcauccugcacgaggugcggccuguuacauccggguguuuucccaucaugcaugaucgcaccaaaauuagacaacucccuaaucugcugcggggauacgaacacauccgccucucuacgcauaacgugauuaaugccgagaacgcuccgggcggccccuauaagaucgggacaagcggauccugccugaaugucaccaacggcaauggguucuuugccacaauggcuugggccgugccuaaaaacgacaagaauaaaaccgcgaccaacccccuuacaauugaagugccuuacaucuguacggagggagaggaucagauuaccgucuggggcuuccacagcgacaaugaaacacagauggccaagcuguauggggauucuaagccccagaaauuuaccuccagcgcuaacggaguuacaacccacuacgugucucaaaucggcggcuucccgaaccagacggaggacgggggacucccucaguccggcagaaucguggucgauuauauggugcaaaagagcgggaaaacaggaaccauuaccuaccagcggggcauccugcuuccccagaagguuuggugcgccucugggcgcuccaaagugauuaagggaagccugccucucaucggcgaagcugacugucugcaugagaaauauggcgggcugaauaaguccaagcccuacuacacaggagagcacgccaaagcgauuggcaacugccccaucugggucaagaccccucucaaacuggccaaugggacaaaguauagaccgcccgcuaaacuucugaaggaacggggauuuuucggcgccaucgcuggguuucucgagggcggaugggaaggcaugauugccggguggcauggauacacgucucacggcgcccacgggguggcuguugcggccgaucuuaagagcacccaggaggcuaucaacaaaauuacaaagaaucugaacucccugagcgaacucgaggugaaaaaucugcagcgccugucuggagccauggacgagcuccauaacgaaauccuggagcuugaugaaaaggucgacgaccugagagccgauaccauuuccagccaaaucgagcucgcugugcugcuuucuaaugaaggcaucauuaacagcgaggacgagcaucugcucgcccuggaacggaaacugaagaagaugcucgggccuuccgcggucgagaucggcaauggauguuucgaaacaaaacacaagugcaaccagaccugccuggaucgcauugcugccggcacguuugacgccggggaguucucucuucccaccuuugauagccugaauaucacagcugccucccucaacggagacggccuggauaaucacaccauucugcuuuauuacagcacagcugccucuucccucgcggugacccugaugaucgccauuuucguuguguauauggucagcagagacaacgugucuuguuccaucugccuguga

SEQ ID NO: 220241 - RNA, 1755 nt, Artificial Sequence; identical to SEQ ID NO: 218926
  derived and/or modified CDS sequence (opt5) from hemagglutinin__InfluenzaB__AHL94756

SEQ ID NO: 220242 - RNA, 1758 nt, Artificial Sequence; identical to SEQ ID NO: 220231
  derived and/or modified CDS sequence (opt5) from hemagglutinin__InfluenzaB__AHL94766

SEQ ID NO: 220243 - RNA, 1755 nt, Artificial Sequence
  derived and/or modified CDS sequence (opt5) from hemagglutinin__InfluenzaB__AHL94777
augaaggccaucauugugcugcucauggucguuaccagcaacgcugacagaaucugcacaggcauuacguccucuaauagcccccacguggugaaaaccgccacacagggggaggucaacgugaccggagcgaucccucugacaaccacaccgaccaaguccuacuucgcuaaucuuaaaggcacgcggacccgcgggaagcugugucccgauugcuuuaacuguacagaccucgauguugcccugggaagaccuaugugcgugggcaccacacccucugccaaagcuagcauucuucaugaaguccggccugugaccuccggguguuuccccaucaugcacgaccgcacgaagaucagacaacugccuaaucuccugcggggauaugagaacauucgccugucuacacagaaugccaucgaugcugaaaaggccccgggcggccccuacagacucgggaccagcggauccugcccuaacgcgacaagcaaaauuggcuuuuucgccaccauggcuugggccguucccaaggacaauuauaaaaacgcuaccaauccucagacaguggagguccccuacaucuguacggaaggggaggaucagauuaccguguggggauuucauucugacaacaagacacaaaugaaaaaucuguauggcgauuccaacccgcagaaguucaccagcucugccaauggggugacaacccacuacgucucccagaucggagacuuuccugaucagacggaggacggcggccuuccccaaagcgggcggauuguuguggauuauauggugcagaagccuggaaaaacaggcaccaucgucuaccagcgcggggugcugcucccccagaagguuuggugcgcgucuggaagauccaaagugaucaagggcagccugccccuuauuggggaagccgacugucugcaugagaaauacggaggccucaacaaguccaaaccuuauuacaccggcgaacacgcuaaggccaucgggaacugcccgauuugggucaagacaccccugaaacuggcuaauggaaccaaguaucggccucccgccaaacuccugaaggagcgcggcuucuuuggggccaucgcuggauuccuugagggcgggugggaaggcaugauugcgggauggcacggcuacacaucucauggggcccacggaguggcuguugccgccgaccugaaaagcacgcaagaggcuaucaacaagaucaccaagaaucucaacucccugagcgaacuugaggugaaaaaucugcagagacucucuggcgccauggaugaacugcauaacgagauucuggagcucgacgaaaaggucgaugaccugcgggcggauacaaucuccagccagauugagcuugcugugcugcucucuaaugaagggaucauuaacagcgaggacgaacaucugcuugcccuggagcgcaaacucaagaaaaugcugggaccuuccgccgucgauaucggcaauggguguuuugagaccaagcacaagugcaaccaaacaugccuggacagaaucgcugccggcaccuucaaugcuggagaauuuucucuccccacguucgauagccugaacauuaccgccgcgucccuuaaugacgauggccuggacaaccacacaauccuccuguauuacagcaccgccgcuucuucccuggccgugacacuuaugcucgcuauuuucaucguuuauauggugagccgggacaaugucucuuguuccauuugccuguga

SEQ ID NO: 220244 - RNA, 1758 nt, Artificial Sequence; identical to SEQ ID NO: 220228
  derived and/or modified CDS sequence (opt5) from hemagglutinin__InfluenzaB__AHL94797

SEQ ID NO: 220245 - RNA, 1755 nt, Artificial Sequence
  derived and/or modified CDS sequence (opt5) from hemagglutinin__InfluenzaB__AHL94808
augaaggccaucauugugcugcucauggucguuaccagcaacgcugacagaaucugcacaggcauuacguccucuaauagcccccacguggugaaaaccgccacacagggggaagucaacgugaccggagcgaucccucugacaaccacaccgaccaaguccuacuucgcuaaucuuaaaggcauucggacgcgcgggaagcugugucccgauugccucaacuguaccgaccuggauguugcccuuggaagaccuaugugcgugggcacaacccccucugccaaagcuagcauccugcaugaaguccggccugugacauccggguguuuucccaucaugcacgaccgcaccaagauuagacaacucccuaaucugcugcggggauaugagaacauccgccucucuacgcagaauguuauugaugccgaaaaggcuccgggcggccccuacagacuggggacaagcggauccugcccuaacgccaccagcaaaaucggcuucuuugcgacaauggccugggcugugcccaaggacaauuauaaaaacgccaccaauccucagaccgucgaggugcccuacauuuguacagaaggggaggaucagaucacgguguggggauuccauucugacaacaagacccaaaugaaaaaucuuuauggcgauuccaacccgcagaaguuuacaagcucugcuaauggggucaccacacacuacguuucccagauuggagacuucccugaucagaccgaggacggcggccugccccaaagcgggcggaucgugguggauuauaugguccagaagccuggaaaaacgggcacaaucguguaccagcgcgggguucuccugccccagaagguguggugcgccucuggaagauccaaagucauuaagggcagccuuccccugaucggggaagcggacugucuccaugagaaauacggaggccugaacaaguccaaaccuuauuacaccggcgaacacgccaaggcuauugggaacugcccgaucugggugaagacaccccugaaacucgccaauggaaccaaguaucggccucccgcuaaacugcuuaaggagcgcggcuuuuucggggccauugccggauuucuggagggcgggugggaaggcaugaucgcuggauggcacggcuacaccucucauggggcgcacggaguugccguggcugccgaccucaaaagcacacaagaggccaucaacaagauuacgaagaaucugaacucccuuagcgaacuggaggucaaaaaucuccagagacugucuggcgcuauggaugaacugcauaacgagauccucgagcuggacgaaaagguggaugaccuucgggccgauaccauuuccagccagaucgagcuggcgguccuccugucuaaugaagggauuaucaacagcgaggacgaacaccuucuggcucucgagcgcaaacugaagaaaaugcugggaccuuccgccguggauaucggcaauggguguuucgagacaaagcacaagugcaaccaaaccugccucgacagaauugccgcuggcacauuuaaugccggagaguucucucugcccaccuuugauagccuuaacaucacggcugccucccugaaugacgauggccucgacaaccauaccauucugcuguauuacagcacagcggccucuucccuugcuguuacccucaugcuggccaucuucauuguguauauggucagccgggacaaugugucuuguuccaucugccuguga

SEQ ID NO: 220246 - RNA, 1755 nt, Artificial Sequence
  derived and/or modified CDS sequence (opt5) from hemagglutinin__InfluenzaB__AHL94817
augaaggccaucauugugcugcucauggucguuaccagcaacgcugacagaaucugcacaggcauuacguccucuaauagcccccacguggugaaaaccgccacacagggggaagucaacgugaccggagcgaucccucugacaaccacaccgaccaaguccuacuucgcuaaucuuaaaggcacgcggacccgcgggaagcugugucccgauugccucaacuguacagaccuggauguugcccuuggaagaccuaugugcgugggcaccacacccucugccaaagcuagcauucugcaugaaguccggccugugaccuccggguguuuucccaucaugcacgaccgcacgaagaucagacaacucccuaaucugcugcggggauaugagaacauucgccucucuacacagaauguuaucgaugccgaaaaggcuccgggcggccccuacagacuggggaccagcggauccugcccuaacgccacaagcaaaauuggcuucuuugcgaccauggccugggcugugcccaaggacaauuauaaaaacgccaccaauccucagacagucgaggugcccuacaucuguacggaaggggaggaucagauuaccguguggggauuccauucugacaacaagacacaaaugaaaaaucuuuauggcgauuccaacccgcagaaguuuaccagcucugcuaauggggucacaacccacuacguuucccagaucggagacuucccugaucagacggaggacggcggccugccccaaagcgggcggauugugguggauuauaugguccagaagccuggaaaaacaggcaccaucguguaccagcgcgggguucuccugccccagaagguguggugcgccucuggaagauccaaagucaucaagggcagccuuccccugauuggggaagcggacugucuccaugagaaauacggaggccugaacaaguccaaaccuuauuacaccggcgaacacgccaaggcuaucgggaacugcccgauuugggugaagacaccccugaaacucgccaauggaaccaaguaucggccucccgcuaaacugcuuaaggagcgcggcuuuuucggggccaucgccggauuucuggagggcgggugggaaggcaugauugcuggauggcacggcuacacaucucauggggcgcacggaguugccguggcugccgaccucaaaagcacgcaagaggccaucaacaagaucaccaagaaucugaacucccuuagcgaacuggaggucaaaaaucuccagagacugucuggcgcuauggaugaacugcauaacgagauuaucgagcucgacgaaaagguggaugaccugcgggccgauacaauuuccagccagaucgagcuugcgguccugcucucuaaugaagggauuaucaacagcgaggacgaacaucugcuugcucuggagcgcaaacucaagaaaaugcugggaccuuccgccguggauaucggcaauggguguuucgagaccaagcacaagugcaaccaaacaugccuggacagaauugccgcuggcaccuuuaaugccggagaguucucucuccccacguuugauagccugaacaucaccgcugccucccuuaaugacgauggccuggacaaccacacaauucuccuguauuacagcaccgcggccucuucccuggcuguuacacuuaugcucgccaucuucauuguguauauggucagccgggacaaugugucuuguuccaucugccuguga

SEQ ID NO: 220247 - RNA, 1758 nt, Artificial Sequence; identical to SEQ ID NO: 219937
  derived and/or modified CDS sequence (opt5) from hemagglutinin__InfluenzaB__AHL94827

SEQ ID NO: 220248 - RNA, 1755 nt, Artificial Sequence
  derived and/or modified CDS sequence (opt5) from hemagglutinin__InfluenzaB__AHL94837
augaaggccaucauugugcugcucauggucguuaccagcaacgcugacagaaucugcacaggcauuacguccucuaauagcccccacguggugaaaaccgccacacagggggaagucaacgugaccggaguuaucccucugacaaccacaccggcgaaguccuacuucgcuaaucuuaaaggcacccggacgcgcgggaagcugugucccgauugccucaacuguaccgaccuggauguggcccuuggaagaccuaugugcgucggcacaacccccucugccaaagcuagcauucugcaugaagugcggccuguuacauccggguguuuucccaucaugcacgaccgcaccaagaucagacaacucccuaaucugcugcggggauaugagaacauucgccucucuacgcagaaugugaucgaugccgaaaaggcuccgggcggccccuacaaacuggggacaagcggauccugcccuaacgccaccagcaagauuggcuucuuugcgacaauggccugggcuguccccaaagacaauuauaagaacgccaccaauccucuuaccguggaggugcccuacaucuguaaagaaggggaggaucagauuacagucuggggauuccauucugacaacaagacgcagaugaagaaucuguauggcgauuccaacccgcaaaaauuuaccagcucugcuaaugggguuacaacccacuacgugucccagaucggagacuucccugaucagacagaggacggcggccucccccagagcgggagaauuguggucgauuauaugaugcaaaagccuggaaaaaccggcacgaucguguaccagcgcgggguucugcuuccccagaagguguggugcgccucuggacgguccaaagucaucaagggcagccugccccucauuggggaagcggacugucugcaugaggaauacggaggccugaacaaauccaagccuuauuacacaggcaagcacgccaaagcuaucgggaacugcccgauuugggugaagacaccccucaaacuggccaauggaaccaaguauagaccucccgcuaaacuucugaaggagcggggcuuuuucggggccaucgccggauuucucgagggcgggugggaaggcaugauugcuggauggcacggcuacaccucucauggggcgcacggaguugccguggcugccgaccuuaagagcacccaggaggccaucaacaaaaucacaaagaaucugaacucccugagcgaacucgaggucaaaaaucugcaacgccugucuggcgcuauggaugaacuccauaacgagauucuggagcuugacgaaaagguggaugaccugagagccgauacgaucuccagccagauugagcucgcgguccugcuuucuaaugaagggaucauuaacagcgaggacgaacaucugcucgcucuggagcggaaacugaagaagaugcucggaccuuccgccguggauaucggcaauggguguuucgagaccaaacacaagugcaaccagacaugccuggaccgcaucgccgcuggcaccuuuaaugccggagaguucucucuucccacauuugauagccugaacauuaccgcugccucccucaaugacgauggccuggacaaccacacgauccugcuuuauuacagcaccgcggccucuucccucgcuguuacacugaugcuggccauuuucaucguguauauggucagcagagacaaugugucuuguuccauuugccucuga

SEQ ID NO: 220249 - RNA, 1755 nt, Artificial Sequence; identical to SEQ ID NO: 218926
  derived and/or modified CDS sequence (opt5) from hemagglutinin__InfluenzaB__AHL94847

SEQ ID NO: 220250 - RNA, 1758 nt, Artificial Sequence
  derived and/or modified CDS sequence (opt5) from hemagglutinin__InfluenzaB__AHL94858
augaaggccaucauugugcugcucauggucguuaccagcaacgcugacagaaucugcacaggcauuacguccucuaauagcccccacguggugaaaaccgccacacagggggaggucaacgugaccggaguuaucccucugacaaccacaccgaccaagucccauuucgcgaaucuuaaaggcacggaaacccgggggaagcugugucccaaaugccucaacuguacagaucuggacguggcucuuggacgcccuaagugcaccggcaauauucccucugccagagucagcauccugcacgaggugcggccuguuacauccggguguuuucccaucaugcaugaucgcaccaagauuagacaacucccuaaccugcugcggggauacgaacacauccgccucucuacgcauaaugugauuaacgccgagaaugcuccgggcggccccuauaaaaucgggacaagcggauccugcccuaacgucaccaauggcaacggguucuuugccacaauggcuugggccgugcccaagaaugacaacaauaaaaccgcgaccaacagccugacaauugaagugccuuacaucuguacggagggagaggaucagauuaccgucuggggcuuccacucugacaacgaaacacagauggccaaacuuuauggggauuccaagccccagaaguuuaccagcucugcuaauggaguuacaacccacuacgugucccaaaucggcggcuucccgaaccagacggaggacgggggacugccucagagcggcagaaucguggucgauuauauggugcagaagucugggaaagccggaacaauuaccuaccaacggggcauccuccugccccagaagguuuggugcgcuuccgggcgcagcaaagugauuaagggaucccuuccucugaucggcgaagccgacugucuccaugagaaauauggcgggcugaauaagucuaaacccuacuacaccggagagcacgcgaaggccauuggcaacugccccaucugggucaagacaccucugaaacucgcuaaugggaccaaguauagaccgcccgccaaacugcuuaaggaacggggauuuuucggcgcuaucgccggguuucuggagggcggaugggaaggcaugauugccggguggcauggauacacaagccacggcgcucacgggguggcgguugccgcugaucucaaauccacgcaggaggccaucaacaagauuaccaagaaucugaacagccuuucugaacuggaggugaaaaaucuccagcgccuguccggagccauggacgagcugcauaacgaaauccucgagcuggaugaaaaggucgacgaccuuagagcugauacaauuagcucucaaaucgagcuggccgugcuccugagcaaugaaggcaucauuaacuccgaggacgagcaccuucuggcgcucgaacggaaacugaagaaaaugcuggggccuucugcugucgagaucggcaauggauguuucgaaaccaagcauaagugcaaccagacaugccucgaucgcauugccgccggcaccuuugacgcuggggaguucagccugcccacguuugauucccuuaauaucaccgccgcuagccugaacgacgauggacucgacaaccacacaauucugcuguauuacucuaccgccgcguccagccuugccgugacacucaugaucgcuauuuucguuguguauauggucucuagagauaauguguccuguagcaucugccuguga

SEQ ID NO: 220251 - RNA, 1755 nt, Artificial Sequence; identical to SEQ ID NO: 218892
  derived and/or modified CDS sequence (opt5) from hemagglutinin__InfluenzaB__AHL94869

SEQ ID NO: 220252 - RNA, 1758 nt, Artificial Sequence; identical to SEQ ID NO: 219061
  derived and/or modified CDS sequence (opt5) from hemagglutinin__InfluenzaB__AHL94880

SEQ ID NO: 220253 - RNA, 1758 nt, Artificial Sequence; identical to SEQ ID NO: 219394
  derived and/or modified CDS sequence (opt5) from hemagglutinin__InfluenzaB__AHL94889

SEQ ID NO: 220254 - RNA, 1758 nt, Artificial Sequence; identical to SEQ ID NO: 219061
  derived and/or modified CDS sequence (opt5) from hemagglutinin__InfluenzaB__AHL94900

SEQ ID NO: 220255 - RNA, 1758 nt, Artificial Sequence
  derived and/or modified CDS sequence (opt5) from hemagglutinin__InfluenzaB__AHL94911
augaaggccaucauugugcugcucauggucguuaccagcaacgcugacagaaucugcacaggcauuacguccucuaauagcccccacguggugaaaaccgccacacagggggaggucaacgugaccggaguuaucccucugacaaccacaccgaccaagucccauuucgcgaaucuuaaaggcacggaaacccgggggaagcugugucccaaaugcccuaacuguacagaucucgacguggcucugggacgccccaagugcaccggcaagauuccuucugccagagucagcauccuucacgaggugcggcccguuacauccggguguuuuccuaucaugcaugaucgcaccaaaauuagacaacugccgaaucuccugcggggauacgaacacauccgccugucuacgcauaacgugauuaaugccgagaacgcucccggcggcccuuauaagaucgggacaagcggauccugccccaaugucaccaacggcaauggguucuuugccacaauggcuugggccgugccuaaaaacgacaagaauaaaaccgcgaccaacccccucacaauugaagugccguacaucuguacggagggagaggaucagauuaccgucuggggcuuccacagcgacaaugaaacacagauggccaagcuguauggggauucuaagccucagaaauuuaccuccagcgcuaacggaguuacaacccacuacgugucucaaaucggcggcuuccccaaccagacggaggacgggggacuuccucaguccggcagaaucguggucgauuauauggugcaaaagagcgggcggacaggaaccauuaccuaccagcgcggcauccugcucccccagaaaguuuggugcgccucugggagauccaaggugauuaaaggaagccugccccuuaucggcgaagcugacugucugcaugagaaguauggcgggcucaauaaauccaagccuuacuacacaggagagcacgccaaggcgauuggcaacugcccgaucugggucaaaacaccccugaagcuggccaaugggacaaaauaucggccucccgcuaagcuccugaaagaacgcggauuuuucggcgccaucgcuggguuucuugagggcggaugggaaggcaugauugccggguggcauggauacacgucucacggcgcccacgggguggcuguugcggccgaucucaagagcacccaggaggcuaucaacaagauuaccaaaaaucugaacucccugagcgaacuugaggugaagaaucugcagagacucucuggagccauggacgagcugcauaacgaaauccuggagcucgaugaaaaagucgacgaccugcgggccgauaccauuuccagccaaaucgagcuugcugugcugcucucuaaugaaggcaucauuaacagcgaggacgagcaucugcuugcccuggaacgcaagcucaaaaagaugcuggggccuuccgcggucgagaucggcaauggauguuucgaaacaaagcacaaaugcaaccagaccugccuggauagaauugcugccggcacguuugacgccggggaguucucucuccccaccuuugauagccugaauaucacagcugccucccuuaacgacgauggacuggacaaucacaccauucuccuguauuacagcacagcugccucuucccuggcggugacccuuaugaucgccauuuucguuguguauauggucagccgggauaacgugucuuguuccaucugccucuga

SEQ ID NO: 220256 - RNA, 1758 nt, Artificial Sequence; identical to SEQ ID NO: 219061
  derived and/or modified CDS sequence (opt5) from hemagglutinin__InfluenzaB__AHL94922

SEQ ID NO: 220257 - RNA, 1758 nt, Artificial Sequence
  derived and/or modified CDS sequence (opt5) from hemagglutinin__InfluenzaB__AHL94933
augaaggccaucauugugcugcucauggucguuaccagcaacgcugacagaaucugcacaggcauuacguccucuaauagcccccacguggugaaaaccgccacacagggggaggucaacgugaccggaguuaucccucugacaaccacaccgaccaagucccauuucgcgaaucuuaaaggcacggaaacccgggggaagcugugucccaaaugccucaacuguacagaucuggacguggcucuuggacgcccuaagugcaccggcaagauucccucugccagagucagcauccugcacgaggugcggccuguuacauccggguguuuucccaucaugcaugaucgcaccaaaauuagacaacucccuaaucugcugcggggauacgaacacauccgccucucuacgcauaacgugauuaaugccgagaacgcuccgggcggccccuauaagaucgggacaagcggauccugcccuaauauuaccaacggcaauggguucuuugccacaauggcuugggccguccccaaaaacgacaagaauaaaaccgcgaccaacccucugacaaucgaagugcccuacauuuguacggagggagaggaucagaucaccguguggggcuuccacagcgacaaugaaacacagauggccaaacuuuauggggauucuaagccgcagaaguuuaccuccagcgcuaacggagucacaacccacuacguuucucaaaucggcggcuucccuaaccagacggaggacgggggacugccccaguccggcagaauugugguggauuauaugguccaaaagagcgggaaagccggaacaaucaccuaccagcggggcauucuccugccucagaagguguggugcgcuucugggcgcuccaaaguuaucaagggaagccuuccccugauuggcgaagccgacugucuccaugagaaauauggcgggcugaauaaguccaagcccuacuacaccggagagcacgcgaaagccaucggcaacugcccuaucugggugaagacaccgcugaaacucgcuaaugggaccaaguauagacccccugccaaacugcuuaaggaacggggauuuuucggcgcuauugccggguuucuggagggcggaugggaaggcaugaucgccggguggcauggauacacaucucacggcgcucacggggucgcgguggccgcugaucucaagagcacgcaggaggccauuaacaaaaucaccaagaaucugaacucccuuagcgaacuggagguuaaaaaucuccagcgccugucuggagccauggacgagcugcauaacgaaauucucgagcuggaugaaaagguggacgaccuuagagcugauacaaucuccagccaaaucgagcuggccguccuccugucuaaugaaggcauuaucaacagcgaggacgagcaccuucuggcgcucgaacggaaacugaagaagaugcuggggcccuccgcuguggagauuggcaauggauguuucgaaaccaaacauaagugcaaccagacaugccucgaucgcaucgccgccggcaccuuugacgcuggggaguucucucugccuacguuugauagccuuaauauuaccgccgcuucccugaacgacgauggacucgacaaucacacaauccugcuguauuacagcaccgccgcgucuucccuugccgucacacucaugauugcuaucuucgugguuuauauggugagcagagauaacgucucuuguuccaucugccuguga

SEQ ID NO: 220258 - RNA, 1758 nt, Artificial Sequence; identical to SEQ ID NO: 220142
  derived and/or modified CDS sequence (opt5) from hemagglutinin__InfluenzaB__AHL94944

SEQ ID NO: 220259 - RNA, 1758 nt, Artificial Sequence; identical to SEQ ID NO: 218755
  derived and/or modified CDS sequence (opt5) from hemagglutinin__InfluenzaB__AHL94955

SEQ ID NO: 220260 - RNA, 1758 nt, Artificial Sequence; identical to SEQ ID NO: 218755
  derived and/or modified CDS sequence (opt5) from hemagglutinin__InfluenzaB__AHL94965

SEQ ID NO: 220261 - RNA, 1758 nt, Artificial Sequence; identical to SEQ ID NO: 218755
  derived and/or modified CDS sequence (opt5) from hemagglutinin__InfluenzaB__AHL94975

SEQ ID NO: 220262 - RNA, 1755 nt, Artificial Sequence; identical to SEQ ID NO: 218926
  derived and/or modified CDS sequence (opt5) from hemagglutinin__InfluenzaB__AHM00986

SEQ ID NO: 220263 - RNA, 1758 nt, Artificial Sequence; identical to SEQ ID NO: 218959
  derived and/or modified CDS sequence (opt5) from hemagglutinin__InfluenzaB__AHM00997

SEQ ID NO: 220264 - RNA, 1758 nt, Artificial Sequence
  derived and/or modified CDS sequence (opt5) from hemagglutinin__InfluenzaB__AHM01008
augaaggccaucauugugcugcucauggucguuaccagcaacgcugacagaaucugcacaggcauuacguccucuaauagcccccacguggugaaaaccgccacacagggggaggucaacgugaccggaguuaucccucugacaaccacaccgaccaagucccauuucgcgaaucuuaaaggcacggaaacccgggggaagcugugucccaaaugccucaacuguacagaucuggacguggcucuuggacgcccuaagugcaccggcaagauucccucugccagagucagcauccugcacgaggugcggccuguuacauccggguguuuucccaucaugcaugaucgcaccaaaauuagacaacucccuaaucugcugcggggauacgaacacauccgccucucuacgcauaacgugauuaaugccgaggacgcuccgggcggccccuauaagaucgggacaagcggauccugcccuaacgucaccaauggcaacggguucuuugccacaauggcuuggaccgugcccaaaaaugauaagaacaaaaccgccacaaauccucugacgauugaagugcccuacaucuguaccgagggagaggaccagauuacagucuggggcuuccacagcgauaacgaaacccagauggcgaagcuguauggggacucuaagccgcagaaauuuacauccagcgccaauggaguuaccacgcacuacgugucucaaaucggcggcuucccuaaccagacagaggaugggggacugccccaguccggcagaaucguggucgacuauauggugcaaaagagcgggaaaaccggaaccauuacauaccagcggggcauccuccugccucagaagguuuggugcgcuucugggcgcuccaaagugauuaagggaagccuuccccugaucggcgaagccgauugucuccaugagaaauauggcgggcugaacaaguccaagcccuacuacaccggagagcacgcuaaagccauuggcaauugcccuaucugggucaagacaccgcugaaacucgcgaacgggacgaaguauagacccccugccaaacugcuuaaggaacggggauuuuucggcgcuaucgccggguuucuggagggcggaugggaaggcaugauugcuggguggcauggauacaccucucacggcgcccacgggguggccguugcugcggaccucaagagcacacaggaggccaucaauaaaauuaccaagaaccuuaauucccuuagcgaacuggaggugaaaaaccuccagcgccugucuggagcuauggaugagcugcauaaugaaauccucgagcuggacgaaaaggucgacgaucuuagagccgacacaauuuccagccaaaucgagcuggccgugcuccugucuaacgaaggcaucauuaauagcgaggaugagcaccuucuggcucucgaacggaaacugaagaagaugcuggggcccuccgccgucgagaucggcaacggauguuucgaaaccaaacauaagugcaaucagacgugccucgaccgcauugcggcuggcaccuuugaugccggggaguucucucugccuacauuugacagccuuaacaucaccgccgcuucccugaaugaugacggacucgauaaccacacaauucugcuguauuacagcaccgccgcuucuucccuugccgugacgcucaugaucgcgauuuucguuguguauauggucagcagagacaaugugucuuguuccaucugccuguga

SEQ ID NO: 220265 - RNA, 1758 nt, Artificial Sequence; identical to SEQ ID NO: 218959
  derived and/or modified CDS sequence (opt5) from hemagglutinin__InfluenzaB__AHM01019

SEQ ID NO: 220266 - RNA, 1758 nt, Artificial Sequence; identical to SEQ ID NO: 218959
  derived and/or modified CDS sequence (opt5) from hemagglutinin__InfluenzaB__AHM01030

SEQ ID NO: 220267 - RNA, 1758 nt, Artificial Sequence
  derived and/or modified CDS sequence (opt5) from hemagglutinin__InfluenzaB__AHM01041
augaaggccaucauugugcugcucauggucguuaccagcaacgcugacagaaucugcacaggcauuacguccucuaauagcccccacguggugaaaaccgccacacagggggaagucaacgugaccggaguuaucccucugacaaccacaccgaccaagucccauuucgcgaaucuuaaaggcacggaaacccgggggaagcugugucccaaaugccucaacuguacagaucuggacguggcucuuggacgcccuaagugcaccggcaagauucccucugccagagucagcauccugcacgaggugcggccuguuacauccggguguuuucccaucaugcaugaucgcaccaaaauuagacaacucccuaaucugcugcggggauacgaacacauccgccucucuacgcauaacgugauuaaugccgaggacgcuccgggcggccccuauaagaucgggacaagcggauccugcccuaacgucaccaauggcaacggguucuuugccacaauggcuugggccgugcccaaaaaugauaagaacaaaaccgcgaccaauccucugacaauugaagugcccuacaucuguacggagggagaggaccagauuaccgucuggggcuuccacagcgauaacgaaacacagauggccaagcuguauggggacucuaagccgcagaaauuuaccuccagcgcuaauggaguuacaacccacuacgugucucaaaucggcggcuucccuaaccagacggaggaugggggacugccccaguccggcagaaucguggucgacuauauggugcagaaaagcgaaaagacagggaccauuaccuaccaacggggaauccuccugccucagaagguuuggugcgccucuggccgcuccaaagugauuaaggggagccuuccccugaucggagaggcugauugucuccaugagaaauauggcggccugaacaaguccaagcccuacuacacaggggaacacgccaaagcgauuggaaauugcccuaucugggucaagaccccgcugaaacucgccaacggcacaaaguauagacccccugcuaaacugcuuaaggagcggggguuuuucggagccaucgcuggcuuucuggaagggggcugggagggaaugauugccggcuggcauggguacacgucucacggagcccacggcguggcuguugcggccgaccucaagagcacccaggaagcuaucaauaaaauuacaaagaaccuuaauucccuuagcgagcuggaggugaaaaaccuccagcgccugucuggggccauggaugaacugcauaaugagauccucgaacuggacgagaaggucgacgaucuuagagccgacaccauuuccagccaaaucgaacuggcugugcuccugucuaacgagggaaucauuaauagcgaggaugaacaccuucuggcccucgagcggaaacugaagaagaugcugggccccuccgcggucgaaaucgggaacggcuguuucgagacaaaacauaagugcaaucagaccugccucgaccgcauugcugccggaacguuugaugccggcgaguucucucugccuaccuuugacagccuuaacaucacagcugccucccugaaugaugacgggcucgauaaccacaccauucugcuguauuacagcacagcugccucuucccuugcggugacccucaugaucgccauuuucguuguguauauggucagcagagacaaugugucuuguuccaucugccuguga

SEQ ID NO: 220268 - RNA, 1758 nt, Artificial Sequence
  derived and/or modified CDS sequence (opt5) from hemagglutinin__InfluenzaB__AHM01052
augaaggccaucauugugcugcucauggucguuaccagcaacgcugacagaaucugcacaggcauuacguccucuaauagcccccacguggugaaaaccgccacacagggggaggucaacgugaccggaguuaucccucugacaaccacaccgaccaagucccauuucgcgaaucuuaaaggcacggaaacccgggggaagcugugucccaaaugccucaacuguacagaucuggacguggcucuuggacgcccuaagugcaccggcaagauucccucugccagagucagcauccugcacgaggugcggccuguuacauccggguguuuucccaucaugcaugaucgcaccaaaauuagacaacucccuaaucugcugcggggauacgaacacauccgccucucuacgcauaacgugauuaaugccgagaacgcuccgggcggccccuauaagaucgggacaagcggauccugcccuaaugucaccaacggcaauggguucuuugccacaauggcuugggccgugcccaaaaacgacaagaauaaaaccgcgaccaacccucugacaauugaagugcccuacaucuguacggagggagaggaucagauuaccgucuggggcuuccacagcgacaaugaaacacagauggccaaacuuuauggggauucuaagccgcagaaguuuaccuccagcgcuaacggaguuacaacccacuacgugucucaaaucggcggcuucccuaaccagacggaggacgggggacugccccaguccggcagaaucguggucgauuauauggugcaaaagagcgggaaaacaggaaccauuaccuaccagcggggcauccuccugccucagaagguuuggugcgccucugggcgcuccaaagugauuaagggaagccuuccccugaucggcgaagcugacugucuccaugagaaauauggcgggcugaauaaguccaagcccuacuacacaggagagcacgccaaagcgauuggcaacugcccuaucugggucaagaccccgcugaaacucgccaaugggacaaaguauagacccccugcuaaacugcuuaaggaacggggauuuuucggcgccaucgcuggguuucuggagggcggaugggaaggcaugauugccggguggcauggauacacgucucacggcgcccacgggguggcuguugcggccgaucucaagagcacccaggaggcuaucaacaaaauuacaaagaaucugaacucccuuagcgaacuggaggugaaaaaucuccagcgccugucuggagccauggacgagcugcauaacgaaauccucgagcuggaugaaaaggucgacgaccuuagagccgauaccauuuccagccaaaucgagcuggcugugcuccugucuaaugaaggcaucauuaacagcgaggacgagcaccuucuggcccucgaacggaaacugaagaagaugcuggggcccuccgcggucgagaucggcaauggauguuucgaaacaaaacauaagugcaaccagaccugccucgaucgcauugcugccggcacguuugacgccggggaguucucucugccuaccuuugauagccuuaauaucacagcugccucccugaacgacgauggacucgacaaucacaccauuaugcuguauuacagcacagcugccucuucccuggcggugacccuuaugaucgccauuuucguuguguauauggucagcagagauaacgugucuuguuccaucugccucuga

SEQ ID NO: 220269 - RNA, 1758 nt, Artificial Sequence; identical to SEQ ID NO: 218959
  derived and/or modified CDS sequence (opt5) from hemagglutinin__InfluenzaB__AHM01063

SEQ ID NO: 220270 - RNA, 1755 nt, Artificial Sequence; identical to SEQ ID NO: 218926
  derived and/or modified CDS sequence (opt5) from hemagglutinin__InfluenzaB__AHM01074

SEQ ID NO: 220271 - RNA, 1755 nt, Artificial Sequence
  derived and/or modified CDS sequence (opt5) from hemagglutinin__InfluenzaB__AHM01096
augaaggccaucauugugcugcucauggucguuaccagcaacgcugacagaaucugcacaggcauuacguccucuaauagcccccacguggugaaaaccgccacacagggggaggucaacgugaccggaguuaucccucugacaaccacaccgaccaaguccuacuucgcgaaucuuaaaggcacgaagacccgggggaaacugugucccgauugccucaacuguacagaccuggauguggcucuuggacgcccuaugugcgucggcaccacacccucugccaaggccagcauucugcaugaagugagaccuguuaccuccggguguuuucccaucaugcacgaccggacgaagauccgccaacucgcuaaucugcugagaggauaugagaacauucggcucucuacacagaaugugaucgaugccgaaaaagcuccuggcggcccguaccgccuggggaccagcggauccugccccaacgccacaagcaagucuggcuucuuugcgaccauggccugggcugucccuaaagacaauaacaagaaugccaccaacccccuuacaguggaggugccuuauauuugugcugaaggggaggaucagaucacggucuggggauuccauuccgacaauaaaacccagaugaagaaccuguacggcgauagcaauccccaaaaguuuacaucuuccgccaacgggguuaccacacacuaugugagccagauuggaggcuucccggaccagaccgaggauggcgggcucccucagucuggaagaaucguggucgacuacaugaugcaaaaacccggcaagacggggacaauuguguaucagcggggaauccugcuuccucagaaaguuuggugcgcguccggccgcagcaaggugaucaaagggucccugccccucauuggagaagccgauugucugcaugagaaguacggcggccugaacaaaucuaagcccuacuauaccggggaacacgcuaaggccaucggaaauugcccuauuugggucaaaaccccgcucaagcuggcuaacggcacaaaauacagacccccugccaagcugcugaaagagcggggguuuuucggagccaucgcuggcuuucucgaagggggcugggaaggaaugauugcgggcuggcacggguauaccagccauggagcccacggcguggcuguugccgccgaccugaaguccacacaggaggcuaucaauaagaucacgaaaaaccuuaauagccugucugaacucgaggugaagaaccugcaacgccuguccggggccauggacgaacuccauaaugagauucuggagcuugaugaaaaagucgacgaucugagagcggacaccaucagcucucagauugagcucgcugugcugcuuagcaacgaaggaaucauuaauuccgaggaugaacaccuucucgcccuggagcggaagcugaaaaagaugcucggccccucugccgucgacaucgggaacggcuguuucgagacaaagcacaaaugcaaucagaccugccuggaucgcaucgcugccggaacauuuaacgcuggcgaguucagccuuccuaccuuugacucccugaauauuacggccgcgagccucaacgaugacgggcuggauaaucauaccauccugcuuuacuauucuacagccgcuuccagccucgccgugacccugaugcuggcuauuuucaucguuuacauggugucuagagacaacgucuccuguagcauuugccucuga

SEQ ID NO: 220272 - RNA, 1758 nt, Artificial Sequence; identical to SEQ ID NO: 218959
  derived and/or modified CDS sequence (opt5) from hemagglutinin__InfluenzaB__AHM01107

SEQ ID NO: 220273 - RNA, 1758 nt, Artificial Sequence
  derived and/or modified CDS sequence (opt5) from hemagglutinin__InfluenzaB__AHM01118
augaaggccaucauugugcugcucauggucguuaccagcaacgcugacagaaucugcacaggcauuacguccucuaauagcccccacguggugaaaaccgccacacagggggaggucaacgugaccggaguuaucccucugacaaccacaccgaccaagucccauuucgcgaaucuuaaaggcacggaaacccgggggaagcugugucccaaaugccucaacuguacagaucuggacguggcucuuggacgcccuaagugcaccggcaagauucccucugccagagucagcauccugcacgaggugcggccuguuacauccggguguuuucccaucaugcaugaucgcaccaaaauuagacaacucccuaaucugcugcggggauacgaacacauccgccucucuacgcauaacgugauuaaugccgaggacgcuccgggcggccccuauaagaucgggacaagcggauccugcccuaacgucaccaauggcaacggguucuuugccacaauggcuugggccgugcccaaaaaugauaagaacaaaaccgcgaccaauccucugacaauugaagugcccuacaucuguacggagggagaggaccagauuaccgucuggggcuuccacagcgauaacgaaacacagauggccaagcuguauggggacucuaagccgcagaaauuuaccuccagcgcuaauggaguuacaacccacuacgugucucaaaucggcggcuucccuaaccagacggaggaugggggacugccccaguccggcagaaucguggucgacuauauggugcaaaagagcgggaaaacaggaaccauuaccuaccagcggggcauccuccugccucagaagguuuggugcgccucugggcgcuccaaagugauuaagggaagccuuccccugaucggcgaagcugauugucuccaugagaaauauggcgggcugaacaaguccaagcccuacuacacaggagagcacgccaaagcgauuggcaauugcccuaucugggucaagaccccgcugaaacucgccaacgggacaaaguauagacccccugcuaaacugcuuaaggaacggggauuuuucggcgccaucgcuggguuucuggagggcggaugggaaggcaugauugccggguggcauggauacacgucucacggcgcccacgggguggcuguugcggccgaccucaagagcacccaggaggcuaucaauaaaauuacaaagaaccuuaauucccuuagcgaacuggaggugaaaaaccuccagcgccugucuggagccauggaugagcugcauaaugaaauccucgagcuggacgaaaaggucgacgaucuuagagccgacaccauuuccagccaaaucgagcuggcugugcuccugucuaacgaaggcaucauuaauagcgaggaugagcaccuucuggcccucgaacggaaacugaagaagaugcuggggcccuccgcggucgagaucggcaacggauguuucgaaacaaaacauaagugcaaucagaccugccucgaccgcauugcugccggcacguuugaugccggggaguucucucugccuaccuuugacagccuuaacaucacagcugugucccugaaugaugacggacucgauaaccacaccauucugcuguauuacagcacagccgcuucuucccuugccguuacccucaugaucgcgauuuucguggucuauauggugagcagagacaauguuucuuguuccaucugccuguga

SEQ ID NO: 220274 - RNA, 1758 nt, Artificial Sequence; identical to SEQ ID NO: 218959
  derived and/or modified CDS sequence (opt5) from hemagglutinin__InfluenzaB__AHM01129

SEQ ID NO: 220275 - RNA, 1758 nt, Artificial Sequence
  derived and/or modified CDS sequence (opt5) from hemagglutinin__InfluenzaB__AHM01140
augaaggccaucauugugcugcucauggucguuaccagcaacgcugacagaaucugcacaggcauuacguccucuaauagcccccacguggugaaaaccgccacacagggggaggucaacgugaccggaguuaucccucugacaaccacaccgaccaagucccauuucgcgaaucuuaaaggcacggaaacccgggggaagcugugucccaaaugccucaacuguacagaucuggacguggcucuuggacgcccuaagugcaccggcaagauucccucugccagagucagcauccugcacgaggugcggccuguuacauccggguguuuucccaucaugcaugaucgcaccaaaauuagacaacucccuaaucugcugcggggauacgaacacauccgccucucugcccauaacgugauuaaugcugagaacgccccgggcggccccuauaagaucgggacgagcggauccugcccuaaugucacaaacggcaauggguucuuugcuaccauggccugggcggugcccaaaaacgacaagaauaaaacagccaccaacccucugaccauugaagugcccuacaucuguacagagggagaggaucagauuacggucuggggcuuccacagcgacaaugaaacccagauggcuaaacuuuauggggauucuaagccgcagaaguuuacauccagcgccaacggaguuaccacacacuacgugucucaaaucggcggcuucccuaaccagaccgaggacgggggacugccccaguccggcagaaucguggucgauuauauggugcaaaagagcgggaaaacgggaacaauuaccuaccagcggggcauccuccugccucagaagguuuggugcgcuucugggcgcuccaaagugauuaagggaagccuuccccugaucggcgaagccgacugucuccaugagaaauauggcgggcugaauaaguccaagcccuacuacaccggagagcacgcgaaagccauuggcaacugcccuaucugggucaagacaccgcugaaacucgcuaaugggaccaaguauagacccccugccaaacugcuuaaggaacggggauuuuucggcgcuaucgccggguuucuggagggcggaugggaaggcaugauugccggguggcauggauacacaucucacggcgcucacgggguggcgguugccgcugaucucaagagcacgcaggaggccaucaacaaaauuaccaagaaucugaacucccuuagcgaacuggaggugaaaaaucuccagcgccugucuggagccauggacgagcugcauaacgaaauccucgagcuggaugaaaaggucgacgaccuuagagcugauacaauuuccagccaaaucgagcuggccgugcuccugucuaaugaaggcaucauuaacagcgaggacgagcaccuucuggcgcucgaacggaaacugaagaagaugcuggggcccuccgcugucgagaucggcaauggauguuucgaaaccaaacauaagugcaaccagacaugccucgaucgcauugccgccggcaccuuugacgcuggggaguucucucugccuacguuugauagccuuaauaucaccgccgcuucccugaacgacgauggacucgacaaucacacaauucugcuguauuacagcaccgccgcgucuucccuugccgugacacucaugaucgcuauuuucguuguguauauggucagcagagauaacgugucuuguuccaucugccuguga

SEQ ID NO: 220276 - RNA, 1758 nt, Artificial Sequence; identical to SEQ ID NO: 218944
  derived and/or modified CDS sequence (opt5) from hemagglutinin__InfluenzaB__AHM01151

SEQ ID NO: 220277 - RNA, 1758 nt, Artificial Sequence
  derived and/or modified CDS sequence (opt5) from hemagglutinin__InfluenzaB__AHM01162
augaaggccaucauugugcugcucauggucguuaccagcaacgcugacagaaucugcacaggcauuacguccucuaauagcccccacguggugaaaaccgccacacagggggaagucaacgugaccggaguuaucccucugacaaccacaccgaccaagucccauuucgcgaaucuuaaaggcacggaaacccgggggaagcugugucccaaaugccucaacuguacagaucuggacguggcucuuggacgcccuaagugcaccggcaagauucccucugccagagucagcauccugcacgaggugcggccuguuacauccggguguuuucccaucaugcaugaucgcaccaaaauuagacaacucccuaaucugcugcggggauacgaacacauccgccucucuacgcauaacgugauuaaugccaaggacgcuccgggcggccccuauaaaaucgggacaagcggauccugcccuaacgucaccaauggcaacggguucuuugccacaauggcuugggccgugcccaagaaugauaaaaacaagaccgcgaccaauccucugacaauugaggugcccuacaucuguacggaaggagaggaccagauuaccgucuggggcuuccacagcgauaacgagacacagauggccaaacuuuauggggacucuaaaccgcagaaguuuaccuccagcgcuaauggaguuacaacccacuacgugucucaaaucggcggcuucccuaaccagacggaagaugggggacugccccaguccggcagaaucguggucgacuauauggugcagaaaagcgggaagacaggaaccauuaccuaccaacggggcauccuccugccucagaaaguuuggugcgccucugggcgcuccaaggugauuaaaggaagccuuccccugaucggcgaggcugauugucuccaugaaaaguauggcgggcugaacaaguccaaacccuacuacacaggagagcacgccaaggcgauuggcaauugcccuaucugggucaaaaccccgcugaagcucgccaacgggacaaaauauagacccccugcuaagcugcuuaaggagcggggauuuuucggcgccaucgcuggguuucuggaaggcggaugggagggcaugauugccggguggcauggauacacgucucacggcgcccacgggguggcuguugcggccgaccucaaaagcacccaggaagcuaucaauaagauuacaaagaaccuuaauucccugagcgagcuggaagugaagaaccuccagcgccugucuggagccauggaugagcugcauaaugagauccucgaacuggacgagaaagucgacgaucuuagagccgacaccauuuccagccaaaucgaacuggcugugcuccugucuaacgagggcaucauuaauagcgaagaugagcaccuucuggcccucgagcggaagcugaagaaaaugcuggggcccuccgcggucgaaaucggcaacggauguuucgagacaaagcauaaaugcaaucagaccugccucgaccgcauugcugccggcacguuugaugccggggaguucucucugccuaccuuugacagccuuaacaucacagcugccucccugaaugaugacggacucgauaaccacaccauucugcuguauuacagcacagcugccucuucccuugcggugacccucaugaucgccauuuucguuguguauauggucagcagagacaaugugucuuguuccaucugccuguga

SEQ ID NO: 220278 - RNA, 1755 nt, Artificial Sequence; identical to SEQ ID NO: 218926
  derived and/or modified CDS sequence (opt5) from hemagglutinin__InfluenzaB__AHM01173

SEQ ID NO: 220279 - RNA, 1758 nt, Artificial Sequence
  derived and/or modified CDS sequence (opt5) from hemagglutinin__InfluenzaB__AHM01184
augaaggccaucauugugcugcucauggucguuaccagcaacgcugacagaaucugcacaggcauuacguccucuaauagcccccacguggugaaaaccgccacacagggggaggucaacgugaccggaguuaucacacugaccacaaccccuacgaagucccauuucgcgaaucuuaaaggcaccgaaacacgggggaagcuguguccgaaaugccucaacuguaccgaucuggacguggcucuuggacgccccaagugcacaggcaagauuccuucugccagagucagcauccugcacgaggugcggcccguuaccuccggguguuuuccuaucaugcaugaucgcacgaaaauuagacaacuccccaaucugcugcggggauacgaacacauccgccucucuacacauaacgugauuaaugccgaggacgcuccuggcggcccguauaagaucgggaccagcggauccugccccaacgucacaaauggcaacggguucuuugccaccauggcuugggccgugccuaaaaaugauaagaacaaaaccgcgacaaauccccugacgauugaagugccuuacaucuguaccgagggagaggaccagauuacagucuggggcuuccacagcgauaacgaaacccagauggccaagcuguauggggacucuaagccccagaaauuuacauccagcgcuaauggaguuaccacgcacuacgugucucaaaucggcggcuucccgaaccagacagaggaugggggacugccucaguccggcagaaucguggucgacuauauggugcaaaagagcgggaaaaccggaaccauuacauaccagcggggcauccuccugccccagaagguuuggugcgccucugggcgcuccaaagugauuaagggaagccuuccucugaucggcgaagcugauugucuccaugagaaauauggcgggcugaacaaguccaagcccuacuacaccggagagcacgccaaagcgauuggcaauugccccaucugggucaagacaccucugaaacucgccaacgggacgaaguauagaccgcccgcuaaacugcuuaaggaacggggauuuuucggcgccaucgcuggguuucuggagggcggaugggaaggcaugauugccggguggcauggauacaccucucacggcgcccacgggguggcuguugcggccgaccucaagagcacacaggaggcuaucaauaaaauuaccaagaaccuuaauucccuuagcgaacuggaggugaaaaaccuccagcgccugucuggagccauggaugagcugcauaaugaaauccucgagcuggacgaaaaggucgacgaucuuagagccgacacaauuuccagccaaaucgagcuggcugugcuccugucuaacgaaggcaucauuaauagcgaggaugagcaccuucuggcccucgaacggaaacugaagaagaugcuggggccuuccgcggucgagaucggcaacggauguuucgaaaccaaacauaagugcaaucagacgugccucgaccgcauugcugccggcaccuuugaugccggggaguucucucugcccacauuugacagccuuaacaucaccgcugccucccugaaugaugacggacucgauaaccacacaauucugcuguauuacagcaccgcugccucuucccuugcggugacgcucaugaucgccauuuucguuguguauauggucagcagagacaaugugucuuguuccaucugccuguga

SEQ ID NO: 220280 - RNA, 1758 nt, Artificial Sequence; identical to SEQ ID NO: 220275
  derived and/or modified CDS sequence (opt5) from hemagglutinin__InfluenzaB__AHM01195

SEQ ID NO: 220281 - RNA, 1758 nt, Artificial Sequence
  derived and/or modified CDS sequence (opt5) from hemagglutinin__InfluenzaB__AHM01206
augaaggccaucauugugcugcucauggucguuaccagcaacgcugacagaaucugcacaggcauuacguccucuaauagcccccacguggugaaaaccgccacacagggggaagucaacgugaccggaguuaucccucugacaaccacaccgaccaagucccauuucgcgaaucuuaaaggcacggaaacccgggggaagcugugucccaaaugccucaacuguacagaucuggacguggcucuuggacgcccuaagugcaccggcaagauucccucugccagagucagcauccugcacgaggugcggccuguuacauccggguguuuucccaucaugcaugaucgcaccaaaauuagacaacucccuaaucugcugcggggauacgaacacauccgccucucuacgcauaacgugauuaaugccgaggacgcuccgggcggccccuauaagaucgggacaagcggauccugcccuaacgucaccaauggcaacggguucuuugccacaauggcuugggccgugcccaaaaaugauaagaacaaaaccgcgaccaauccucugacaauugaagugcccuacaucuguacggagggagaggaccagauuaccgucuggggcuuccacagcgauaacgaaacacagauggccaagcuguauggggacucuaagccgcagaaauuuaccuccagcgcuaauggaguuacaacccacuacgugucucaaaucggcggcuucccuaaccagacggaggaugggggacugccccaguccggcagaaucguggucgacuauauggugcagaaaagcgaaaagacagggaccauuaccuaccaacggggaauccuccugccucagaagguuuggugcgccucuggccgcuccaaagugauuaaggggagccuuccccugaucggagaggcugauugucuccaugagaaauauggcggccugaacaaguccaagcccuacuacacaggggaacacgccaaagcgauuggaaauugcccuaucugggucaagaccccgcugaaacucgccaacggcacaaaguauagacccccugcuaaacugcuuaaggagcggggguuuuucggagccaucgcuggcuuucuggaagggggcugggagggaaugauugccggcuggcauggguacacgucucacggagcccacggcguggcuguugcggccgaccucaagagcacccaggaagcuaucaauaaaauuacaaagaaccuuaauucccuuagcgagcuggaggugaaaaaccuccagcgccugucuggggccauggaugaacugcauaaugagauccucgaacuggacgagaaggucgacgaucuuagagccgacaccauuuccagccaaaucgaacuggcugugcuccugucuaacgagggaaucauuaauagcgaggaugaacaccuucuggcccucgagcggaaacugaagaagaugcugggccccuccgcggucgaaaucgggaacggcuguuucgagacaaaacauaagugcaaucagaccugccucgaccgcauugcugccggaacguuugaugccggcgaguucucucugccuaccuuugacagccuuaacaucacagcugccucccugaaugaugacgggcucggaaaccacaccauucugcuguauuacagcacagcugccucuucccuugcggugacccucaugaucgccauuuucguuguguauauggucagcagagauaaugugucuuguuccaucugccuguga

SEQ ID NO: 220282 - RNA, 1758 nt, Artificial Sequence; identical to SEQ ID NO: 218944
  derived and/or modified CDS sequence (opt5) from hemagglutinin__InfluenzaB__AHM01217

SEQ ID NO: 220283 - RNA, 1755 nt, Artificial Sequence; identical to SEQ ID NO: 218926
  derived and/or modified CDS sequence (opt5) from hemagglutinin__InfluenzaB__AHM01228

SEQ ID NO: 220284 - RNA, 1758 nt, Artificial Sequence; identical to SEQ ID NO: 218959
  derived and/or modified CDS sequence (opt5) from hemagglutinin__InfluenzaB__AHM01239

SEQ ID NO: 220285 - RNA, 1758 nt, Artificial Sequence; identical to SEQ ID NO: 218959
  derived and/or modified CDS sequence (opt5) from hemagglutinin__InfluenzaB__AHM01250

SEQ ID NO: 220286 - RNA, 1758 nt, Artificial Sequence
  derived and/or modified CDS sequence (opt5) from hemagglutinin__InfluenzaB__AHM01261
augaaggccaucauugugcugcucauggucguuaccagcaacgcugacagaaucugcacaggcauuacguccucuaauagcccccacguggugaaaaccgccacacagggggaggucaacgugaccggaguuaucccucugacaaccacaccgaccaagucccauuucgcgaaucuuaaaggcacggaaacccgggggaagcugugucccaaaugccucaacuguacagaucuggacguggcucuuggacgcccuaagugcaccggcaagauucccucugccagagucagcauccugcacgaggugcggccuguuacauccggguguuuucccaucaugcaugaucgcaccaaaauuagacaacucccuaaucugcugcggggauacgaacacauccgccucucuacgcauaacgugauuaaugccgagaacgcuccgggcggccccuauaagaucgggacaagcggauccugcccuaaugucaccaacggcaauggguucuuugccacaauggcuugggccgugcccaaaaacgacaagaauaaaaccgcgaccaacccucugacaauugaagugcccuacaucuguacggagggagaggaucagauuaccaucuggggcuuccacagcgacaaugaaacacagauggccaaacuuuauggggauucuaacccgcagaaguuuaccuccagcgcuaacggagucacaacccacuacguuucucaaaucggcggcuucccuaaucagacggaggacgggggacugccccaguccggcagaauugugguggauuauaugguccagaaaagcgggaagacaggaaccaucaccuaccaacggggcauucuccugccucagaaaguguggugcgccgggggacgcucuaagguuaucaaaggcucccuuccccugauuggcgaagcugacugucuccaugagaaguaugggggacugaacaaaagcaagcccuacuacacaggcgagcacgccaaggcgaucgggaauugcccuaucugggugaaaaccccgcugaagcucgccaacggaacaaaauauagacccccugcuaagcugcuuaaagaacggggcuuuuucggggccauugcuggcuuucuggagggaggcugggaagggaugaucgccggauggcauggcuacacgucccacggggcccacggagucgcuguggcggccgaucucaagucuacccaggaggcuauuaauaagaucacaaagaaccugaauagccuuuccgaacuggagguuaagaaccuccagcgccugagcggcgccauggacgagcugcauaaugaaauucucgagcuggaugaaaaaguggacgaccuuagagccgauaccaucucuucccaaaucgagcuggcuguccuccugagcaacgaagggauuaucaauucugaggacgagcaccuucuggcccucgaacggaagcugaaaaagaugcugggccccagcgcgguggagauuggaaacggcuguuucgaaacaaagcauaaaugcaaucagaccugccucgaucgcaucgcugccgggacguuugacgccggagaguucucccugccuaccuuugauucucuuaacauuacagcugccagccugaaugacgauggccucgacaaccacaccauccugcuguauuacuccacagcugccagcucucuugcggucacccucaugauugccaucuucgugguuuauaugguguccagagauaacgucagcuguucuaucugccuguga

SEQ ID NO: 220287 - RNA, 1755 nt, Artificial Sequence; identical to SEQ ID NO: 218926
  derived and/or modified CDS sequence (opt5) from hemagglutinin__InfluenzaB__AHM01272

SEQ ID NO: 220288 - RNA, 1758 nt, Artificial Sequence; identical to SEQ ID NO: 220275
  derived and/or modified CDS sequence (opt5) from hemagglutinin__InfluenzaB__AHM01283

SEQ ID NO: 220289 - RNA, 1758 nt, Artificial Sequence; identical to SEQ ID NO: 220275
  derived and/or modified CDS sequence (opt5) from hemagglutinin__InfluenzaB__AHM01294

SEQ ID NO: 220290 - RNA, 1755 nt, Artificial Sequence; identical to SEQ ID NO: 218926
  derived and/or modified CDS sequence (opt5) from hemagglutinin__InfluenzaB__AHM01305

SEQ ID NO: 220291 - RNA, 1758 nt, Artificial Sequence; identical to SEQ ID NO: 218959
  derived and/or modified CDS sequence (opt5) from hemagglutinin__InfluenzaB__AHM01316

SEQ ID NO: 220292 - RNA, 1758 nt, Artificial Sequence; identical to SEQ ID NO: 220275
  derived and/or modified CDS sequence (opt5) from hemagglutinin__InfluenzaB__AHM01327

SEQ ID NO: 220293 - RNA, 1758 nt, Artificial Sequence; identical to SEQ ID NO: 218959
  derived and/or modified CDS sequence (opt5) from hemagglutinin__InfluenzaB__AHM01338

SEQ ID NO: 220294 - RNA, 1758 nt, Artificial Sequence; identical to SEQ ID NO: 218959
  derived and/or modified CDS sequence (opt5) from hemagglutinin__InfluenzaB__AHM01349

SEQ ID NO: 220295 - RNA, 1758 nt, Artificial Sequence
  derived and/or modified CDS sequence (opt5) from hemagglutinin__InfluenzaB__AHM01360
augaaggccaucauugugcugcucauggucguuaccagcaacgcugacagaaucugcacaggcauuacguccucuaauagcccccacguggugaaaaccgccacacagggggaagucaacgugaccggaguuaucccucugacaaccacaccgaccaagucccauuucgcgaaucuuaaaggcacggaaacccgggggaagcugugucccaaaugccucaacuguacagaucuggacguggcucuuggacgcccuaagugcaccggcaagauucccucugccagagucagcauccugcacgaggugcggccuguuacauccggguguuuucccaucaugcaugaucgcaccaaaauuagacaacucccuaaucugcugcggggauacgaacacauccgccucucuacgcauaacgugauuaaugccgagaacgcuccgggcggccccuauaagaucgggacaagcggauccugcccuaaugucaccaacggcaauggguucuuugccacaauggcuugggccgugcccaaaaacgacaagaauaaaaccgcgaccaacccucugacaauugaagugcccuacaucuguacgaagggagaggaucagauuaccgucuggggcuuccacagcgacaaugagacacagauggccaagcuguauggggauucuaacccgcagaaauuuaccuccagcgcuaacggaguuacaacccacuacgugucucaaaucggcggcuucccuaaucagacggaagacgggggacugccccaguccggcagaaucguggucgauuauauggugcaaaagagcgggaaaacaggaaccauuaccuaccagcggggcauccuccugccucagaagguuuggugcgccucugggcgcuccaaagugauuaagggaagccuuccccugaucggcgaggcugacugucuccaugaaaaauauggcgggcugaacaaguccaagcccuacuacacaggagagcacgccaaagcgauuggcaauugcccuaucugggucaagaccccgcugaaacucgccaacgggacaaaguauagacccccugcuaaacugcuuaaggagcggggauuuuucggcgccaucgcuggguuucuggaaggcggaugggagggcaugauugccggguggcauggauacacgucucacggcgcccacgggguggcuguugcggccgaucucaagagcacccaggaagcuaucaauaaaauuacaaagaaccuuaauucccuuagcgagcuggaagugaaaaaccuccagcgccugucuggagccauggacgagcugcauaaugagauccucgaacuggaugagaaggucgacgaccuuagagccgauaccauuuccagccaaaucgaacuggcugugcuccugucuaacgagggcaucauuaauagcgaagacgagcaccuucuggcccucgagcggaaacugaagaagaugcuggggcccuccgcggucgaaaucggcaacggauguuucgagacaaaacauaagugcaaucagaccugccucgaucgcauugcugccggcacguuugacgccggggaguucucucugccuaccuuugauagccuuaacaucacagcugccucccugaaugacgauggacucgacaaccacaccauucugcuguauuacagcacagcugccucuucccuugcggugacccucaugaucgccauuuucguuguguauauggucagcagagauaacgugucuuguuccaucugccuguga

SEQ ID NO: 220296 - RNA, 1755 nt, Artificial Sequence
  derived and/or modified CDS sequence (opt5) from hemagglutinin__InfluenzaB__AHM01371
augaaggccaucauugugcugcucauggucguuaccagcaacgcugacagaaucugcacaggcauuacguccucuaauagcccccacguggugaaaaccgccacacagggggaggucaacgugaccggaguuaucccucugacaaccacaccgaccaaguccuacuucgcgaaucuuaaaggcacgaagacccgggggaaacugugucccgauugccucaacuguacagaccuggauguggcucuuggacgcccuaugugcgucggcaccacacccucugccaaggccagcauucugcaugaagugagaccuguuaccuccggguguuuucccaucaugcacgaccggacgaagauccgccaacucgcuaaucugcugagaggauaugagaacauucggcucucuacacagaaugugaucgaugccgaaaaagcuccuggcggcccguaccgccuggggaccagcggauccugccccaacgccacaagcaagaauggcuucuuugcgaccauggccugggcugucccuaaagacaacaauaagaacgccaccaauccccuuacaguggaggugccuuauauuugugcugaaggggaggaucagaucgccgucuggggauuccauucugacaacaaaacgcagaugaagaaucuguacggcgauuccaacccccaaaaguuuaccagcucugcgaacgggguuacaacccacuaugugucccagauuggaggcuucccggaccagacagaggauggcgggcucccucagagcggaagaaucguggucgacuacaugaugcaaaaacccggcaagaccgggacgauuguguaucagcggggaguucugcuuccucagaaaguguggugcgccucuggccgcuccaaggucaucaaagggagccugccccucaucggagaagcugauugucugcaugagaaguacggcggccugaauaaauccaagcccuacuauacaggggaacacgccaaggcuauuggaaacugcccuaucugggugaaaaccccgcucaagcuggccaauggcaccaaauacagacccccugccaagcugcugaaagagcggggguuuuucggagcuauugcgggcuuucucgaagggggcugggaaggaaugaucgccggcuggcacggguauacaucucauggagcucacggcguugccguggccgcugaccugaaaagcacccaggaggccauuaacaagaucacaaagaaucuuaacucccugagcgaacucgaggucaagaaucugcaacgccugucuggggcgauggacgaacuccauaacgagauccuggagcuugaugaaaaaguggacgaucugagagcugacacgauuuccagccagaucgagcucgccguccugcuuucuaaugaaggaauuaucaacagcgaggaugaacaccuucucgcccuggagcggaagcugaaaaagaugcucggccccuccgcuguggacauugggaauggcuguuucgagaccaagcacaaaugcaaccagacaugccuggaucgcaucgccgcuggaaccuuuaaugccggcgaguucucucuuccuacauuugacagccugaacaucaccgcggccucccucaaugaugacgggcuggauaaccauacgauucugcuuuacuauagcaccgcugccucuucccucgcuguuacacugaugcuggccaucuucauuguguacauggucagcagagacaacgugucuuguuccaucugccucuga

SEQ ID NO: 220297 - RNA, 1755 nt, Artificial Sequence; identical to SEQ ID NO: 218926
  derived and/or modified CDS sequence (opt5) from hemagglutinin__InfluenzaB__AHM01382

SEQ ID NO: 220298 - RNA, 1758 nt, Artificial Sequence
  derived and/or modified CDS sequence (opt5) from hemagglutinin__InfluenzaB__AHM01393
augaaggccaucauugugcugcucauggucguuaccagcaacgcugacagaaucugcacaggcauuacguccucuaauagcccccacaucgugaaaaccgccacacagggggaggugaacgucaccggagugauuccucugacaaccacaccgaccaagucccauuucgcgaaucuuaaaggcacggaaacccgggggaagcugugucccaaaugccucaacuguacagaucuggacguugcucuuggacgcccuaagugcaccggcaagauccccucugccagagugagcauccugcacgagguccggccugugacauccggguguuuucccauuaugcaugaucgcaccaaaaucagacaacucccuaaucugcugcggggauacgaacacauucgccucucuacgcauaacguuaucaaugccgagaacgcuccgggcggccccuauaagauugggacaagcggauccugcccuaaugugaccaacggcaauggguucuuugccacaauggcuugggccguccccaaaaacgacaagaauaaaaccgcgaccaacccucugacaaucgaagugcccuacauuuguacggagggagaggaucagaucaccguguggggcuuccacagcgacaaugaaacacagauggccaaacuuuauggggauucuaagccgcagaaguuuaccuccagcgcuaacggagucacaacccacuacguuucucaaaucggcggcuucccuaaccagacggaggacgggggacugccccaguccggcagaauugugguggauuauaugguccaaaagagcgggaaaacaggaaccaucaccuaccagcggggcauucuccugccucagaagguguggugcgccucugggcgcuccaaaguuaucaagggaagccuuccccugauuggcgaagcugacugucuccaugagaaauauggcgggcugaauaaguccaagcccuacuacacaggagagcacgccaaagcgaucggcaacugcccuaucugggugaagaccccgcugaaacucgccaaugggacaaaguauagacccccugcuaaacugcuuaaggaacggggauuuuucggcgccauugcuggguuucuggagggcggaugggaaggcaugaucgccggguggcauggauacacgucucacggcgcccacggggucgcuguggcggccgaucucaagagcacccaggaggcuauuaacaaaaucacaaagaaucugaacucccuuagcgaacuggagguuaaaaaucuccagcgccugucuggagccauggacgagcugcauaacgaaauucucgagcuggaugaaaagguggacgaccuuagagccgauaccaucuccagccaaaucgagcuggcuguccuccugucuaaugaaggcauuaucaacagcgaggacgagcaccuucuggcccucgaacggaaacugaagaagaugcuggggcccuccgcgguggagauuggcaauggauguuucgaaacaaaacauaagugcaaccagaccugccucgaucgcaucgcugccggcacguuugacgccggggaguucucucugccuaccuuugauagccuuaauauuacagcugccucccugaacgacgauggacucgacaaucacaccauccugcuguauuacagcacagcugccucuucccuugcggucacccucaugauugccaucuucgugguuuauauggugagcagagauaacgucucuuguuccaucugccuguga

SEQ ID NO: 220299 - RNA, 1758 nt, Artificial Sequence; identical to SEQ ID NO: 218959
  derived and/or modified CDS sequence (opt5) from hemagglutinin__InfluenzaB__AHM01404

SEQ ID NO: 220300 - RNA, 1758 nt, Artificial Sequence
  derived and/or modified CDS sequence (opt5) from hemagglutinin__InfluenzaB__AHM01415
augaaggccaucauugugcugcucauggucguuaccagcaacgcugacagaaucugcacaggcauuacguccucuaauagcccccacguggugaaaaccgccacacagggggaggucaacgugaccggaguuaucccucugacaaccacaccgaccaagucccauuucgcgaaucuuaaaggcacggaaacccgggggaagcugugucccaaaugccucaacuguacagaucuggacguggcucuuggacgcccuaagugcaccggcaagauucccucugccagagucagcauccugcacgaggugcggccuguuacauccggguguuuucccaucaugcaugaucgcaccaaaauuagacaacucccuaaucugcugcggggauacgaacacauccgccucucuacgcauaacgugauuaaugccgaggacgcuccgggcggccccuauaagaucgggacaagcggauccugcccuaacgucaccaauggcaacggguucuuugccacaauggcuugggccgugcccaaaaaugauaagaacaaaaccgcgaccaauccucugacaauugaagugcccuacaucuguacggagggagaggaccagauuaccgucuggggcuuccacagcgauaacgaaacacagauggccaagcuguauggggacucuaagccgcagaaauuuaccuccagcgcuaauggaguuacaacccacuacgugucucaaaucggcggcuucccuaaccagacggaggaugggggacugccccaguccggcagaaucgugauugacuauaugguccaaaagagcgggaaaacaggaaccaucaccuaccagcggggcauucuccugccucagaagguguggugcgccucugggcgcuccaaaguuaucaagggaagccuuccccugauuggcgaagcugauugucuccaugagaaauauggcgggcugaacaaguccaagcccuacuacacaggagagcacgccaaagcgaucggcaauugcccuaucugggugaagaccccgcugaaacucgccaacgggacaaaguauagacccccugcuaaacugcuuaaggaacggggauuuuucggcgccauugcuggguuucuggagggcggaugggaaggcaugaucgccggguggcauggauacacgucucacggcgcccacggggucgcuguggcggccgaccucaagagcacccaggaggcuauuaauaaaaucacaaagaaccuuaauucccuuagcgaacuggagguuaaaaaccuccagcgccugucuggagccauggaugagcugcauaaugaaauucucgagcuggacgaaaagguggacgaucuuagagccgacaccaucuccagccaaaucgagcuggcuguccuccugucuaacgaaggcauuaucaauagcgaggaugagcaccuucuggcccucgaacggaaacugaagaagaugcuggggcccuccgcgguggagauuggcaacggauguuucgaaacaaaacauaagugcaaucagaccugccucgaccgcaucgcugccggcacguuugaugccggggaguucucucugccuaccuuugacagccuuaacauuacagcugccucccugaaugaugacggacucgauaaccacaccauccugcuguauuacagcacagcugccucuucccuugcggucacccucaugauugccaucuucgugguuuauauggugagcagagacaaugucucuuguuccaucugccuguga

SEQ ID NO: 220301 - RNA, 1758 nt, Artificial Sequence
  derived and/or modified CDS sequence (opt5) from hemagglutinin__InfluenzaB__AHM01426
augaaggccaucauugugcugcucauggucguuaccagcaacgcugacagaaucugcacaggcauuacguccucuaauagcccccacguggugaaaaccgccacacagggggaggucaacgugaccggaguuaucccucugacaaccacaccgaccaagucccauuucgcgaaucuuaaaggcacggaaacccgggggaagcugugucccaaaugccucaacuguacagaucuggacguggcucuuggacgcccuaagugcaccggcaagauucccucugccagagucagcauccugcacgaggugcggccuguuacauccggguguuuucccaucaugcaugaucgcaccaaaauuagacaacucccuaaucugcugcggggauacgaacacauccgccucucuacgcauaacgugauuaaugccgagaacgcuccgggcggccccuauaagaucgggacaagcggauccugcccuaaugucaccaacggcaauggguucuuugccacaauggcuugggccgugcccaaaaacgacaagaauaaaaccgcgaccaacccucugacaauugaagugcccuacaucuguacggagggagaggaucagauuaccaucuggggcuuccacagcgacaaugaaacacagauggccaaacuuuauggggauucuaacccgcagaaguuuaccuccagcgcuaacggagucacaacccacuacguuucucaaaucggcggcuucccuaaucagacggaggacgggggacugccccaguccggcagaauugugguggauuauaugguccagaaaagcgggaagacaggaaccaucaccuaccaacggggcauucuccugccucagaaaguguggugcgccucugggcgcuccaagguuaucaaaggaagccuuccccugauuggcgaagcugacugucuccaugagaaguauggcgggcugaacaaauccaagcccuacuacacaggagagcacgccaaggcgaucggcaauugcccuaucugggugaaaaccccgcugaagcucgccaacgggacaaaauauagacccccugcuaagcugcuuaaagaacggggauuuuucggcgccauugcuggguuucuggagggcggaugggaaggcaugaucgccggguggcauggauacacgucucacggcgcccacggggucgcuguggcggccgaucucaagagcacccaggaggcuauuaauaagaucacaaagaaccuuaauucccugagcgaacuggagguuaagaaccuccagcgccugucuggagccauggacgagcugcauaaugaaauucucgagcuggaugaaaaaguggacgaccuuagagccgauaccaucuccagccaaaucgagcuggcuguccuccugucuaacgaaggcauuaucaauagcgaggacgagcaccuucuggcccucgaacggaagcugaaaaagaugcuggggcccuccgcgguggagauuggcaacggauguuucgaaacaaagcauaaaugcaaucagaccugccucgaucgcaucgcugccggcacguuugacgccggggaguucucucugccuaccuuugauagccuuaacauuacagcugccucccugaaugacgauggacucgacaaccacaccauccugcuguauuacagcacagcugccucuucccuugcggucacccucaugauugccaucuucgugguuuauauggugagcagagauaacgucucuuguuccaucugccuguga

SEQ ID NO: 220302 - RNA, 1755 nt, Artificial Sequence
  derived and/or modified CDS sequence (opt5) from hemagglutinin__InfluenzaB__AHM01437
augaaggccgugaucguccugcucaugguugugaccagcaacgcugacagaauuugcacaggcaucacguccucuaauagcccccacguggucaaaaccgccacacagggggaggugaacguuaccggagugauuccucugacaaccacaccgaccaaguccuacuucgcgaaucuuaaaggcacgaagacccgggggaaacugugucccgauugccucaacuguacagaccuggaugucgcucuuggacgcccuaugugcgugggcaccacacccucugccaaggccagcauccugcaugaaguuagaccugugaccuccggguguuuucccauuaugcacgaccggacgaagauccgccaacucgcuaaucugcugagaggauaugagaacauccggcucucuacacagaaugucauugaugccgaaaaagcuccuggcggcccguaccgccuggggaccagcggauccugccccaacgccacaagcaagucuggcuucuuugcgaccauggccugggcugugccuaaagacaauaacaagaaugccaccaacccccuuacaguggaggucccuuauaucugugcugaagaggaggaucagauuacgguuuggggguuccauuccgacaauaaaacccagaugaagaaccuguacggagauagcaauccccaaaaguuuacaucuuccgccaacggcgugaccacacacuaugugagccagaucgggggauucccggaccagaccgaagauggcggccucccucagucugggagaauugucguggacuacaugaugcaaaaacccggaaagacgggcacaaucguuuaucagcgcggggugcugcuuccucagaaagucuggugcgcguccggacggagcaaggugauuaaaggcucccugccccucaucggggaggccgauugucugcaugaaaaguacggaggccugaacaaaucuaagcccuacuauaccggcgagcacgcuaaggccaucgggaauugcccuauuuggguuaaaaccccgcucaagcuggcuaacggaacaaaauacagacccccugccaagcugcugaaagagcggggcuuuuucggggccaucgcuggauuucucgaaggcgggugggagggcaugauugcgggauggcacggcuauaccagccauggggcccacggaguggcugucgccgccgaccugaaguccacacaggaagcuaucaauaagauuacgaaaaaccuuaauagccugucugagcucgaagugaagaaccugcaacgccuguccggcgccauggacgagcuccauaaugagauccuggaacuugaugagaaagucgacgaucugagagcggacaccaucagcucucagauugaacucgcugugcugcuuagcaacgaggggaucauuaauuccgaagaugagcaccuucucgcccuggagcggaagcugaaaaagaugcucggacccucugccguugacaucggcaacggguguuucgaaacaaagcacaaaugcaaucagaccugccuggaucgcauugcugccggcacauuuaacgcuggagaguucagccuuccuaccuuugacucccugaauaucacggccgcgagccucaacgaugacggccuggauaaucauaccauccugcuuuacuauucuacagccgcuuccagccucgccgugacccugaugcuggcuauuuucaucgucuacauggugucuagagacaacguuuccuguagcauuugccucuga

SEQ ID NO: 220303 - RNA, 1755 nt, Artificial Sequence
  derived and/or modified CDS sequence (opt5) from hemagglutinin__InfluenzaB__AHM01448
augaaggccaucauugugcugcucauggucguuaccagcaacgcugacagaaucugcacaggcauuacguccucuaauagcccccacguggugaaaaccgccacacagggggaggucaacgugaccggaguuaucccucugacaaccacaccgaccaaguccuacuucgcgaaucuuaaaggcacgaagacccgggggaaacugugucccgauugccucaacuguacagaccuggauguggcucuuggacgcccuaugugcgucggcaccacacccucugccaaggccagcauucugcaugaagugagaccuguuaccuccggguguuuucccaucaugcacgaccggacgaagauccgccaacucgcuaaucugcugagaggauaugagaacauucggcucucuacacagaaugugaucgaugccgaaaaagcuccuggcggcccguaccgccuggggaccagcggauccugccccaacgccacaagcaagucuggcuucuuugcgaccauggccugggcugucccuaaagacaauaacaagaaugccaccaacccccuuacagcugaggugccuuauauuugugccgaaggggaggaucagaucacgguguggggauuccauuccgacaauaaaacccagaugaagaaccuguacggcgauagcaauccccaaaaguuuacaucuuccgcgaacggggucaccacacacuauguuagccagauuggaggcuucccggaccagaccgaggauggcgggcucccucagucuggaagaaucgugguggacuacaugaugcaaaaacccggcaagacggggacaauugucuaucagcggggagugcugcuuccucagaaaguuuggugcgccuccggccgcagcaaggugaucaaagggucccugccccucaucggagaagcugauugucugcaugagaaguacggcggccugaacaaaucuaagcccuacuauaccggggaacacgccaaggcuauuggaaauugcccuaucugggucaaaaccccgcucaagcuggccaacggcacaaaauacagacccccugccaagcugcugaaagagcggggguuuuucggagcuauugcgggcuuucucgaagggggcugggaaggaaugaucgccggcuggcacggguauaccagccauggagcucacggcguggccguugccgcugaccugaaguccacacaggaggccauuaauaagaucacgaaaaaccuuaauagccugucugaacucgaggugaagaaccugcaacgccuguccggggcgauggacgaacuccauaaugagauccuggagcuugaugaaaaagucgacgaucugagagcugacaccauuagcucucagaucgagcucgccgugcugcuuagcaacgaaggaauuaucaauuccgaggaugaacaccuucucgcccuggagcggaagcugaaaaagaugcucggccccucugcugucgacauugggaacggcuguuucgagacaaagcacaaaugcaaucagaccugccuggaucgcaucgccgcuggaacauuuaacgccggcgaguucagccuuccuaccuuugacucccugaauaucacggcggccagccucaacgaugacgggcuggauaaucauaccauucugcuuuacuauucuacagcugccuccagccucgcugugacccugaugcuggccaucuucauuguuuacauggugucuagagacaacgucuccuguagcaucugccucuga

SEQ ID NO: 220304 - RNA, 1758 nt, Artificial Sequence; identical to SEQ ID NO: 218717
  derived and/or modified CDS sequence (opt5) from hemagglutinin__InfluenzaB__AHM01459

SEQ ID NO: 220305 - RNA, 1755 nt, Artificial Sequence
  derived and/or modified CDS sequence (opt5) from hemagglutinin__InfluenzaB__AHM01470
augaaggccaucauugugcugcucauggucguuaccagcaacgcugacagaaucugcacaggcauuacguccucuaauagcccccacguggugaaaaccgccacacagggggaggucaacgugaccggaguuaucccucugacaaccacaccgaccaaguccuacuucgcgaaucuuaaaggcacgaagacccgggggaaacugugucccgauugccucaacuguacagaccuggauguggcucuuggacgcccuaugugcgucggcaccacacccucugccaaggccagcauucugcaugaagugagaccuguuaccuccggguguuuucccaucaugcacgaccggacgaagauccgccaacucgcuaaucugcugagaggauaugagaacauucggcucucuacacagaaugugaucgaugccgaaaaagcuccuggcggcccguaccgccuggggaccagcggauccugccccaacgccacaagcaagucuggcuucuuugcgaccauggccugggcugucccuaaagacaauaacaagaaugccaccaacccccuuacaguggaggugccuuauauuuguacggaaggggaggaucagaucgcugucuggggauuccauuccgacaauaaaacccagaugaagaaccuguacggcgauagcaauccccaaaaguuuacaucuuccgccaacgggguuaccacacacuaugugagccagauuggaggcuucccggaccagaccgaggauggcgggcucccucagucuggaagaaucguggucgacuacaugaugcaaaaacccggcaagacggggacaauuguguaucagcggggaguucugcuuccucagaaaguguggugcgcguccggccgcagcaaggucaucaaagggucccugccccucaucggagaagccgauugucugcaugagaaguacggcggccugaacaaaucuaagcccuacuauaccggggaacacgcuaaggccauuggaaauugcccuaucugggugaaaaccccgcucaagcuggcuaacggcacaaaauacagacccccugccaagcugcugaaagagcggggguuuuucggagccauugcuggcuuucucgaagggggcugggaaggaaugaucgcgggcuggcacggguauaccagccauggagcccacggcguugcuguggccgccgaccugaaguccacacaggaggcugucaauaagauuacgaaaaaccuuaauagccugucugaacucgaggugaagaaccugcaacgccuguccggggccauggacgaacuccauaaugagauccuggagcuugaugaaaaagucgacgaucugagagcggacaccaucagcucucagauugagcucgcugugcugcuuagcaacgaaggaaucauuaauuccgaggaugaacaccuucucgcccuggagcggaagcugaaaaagaugcucggccccucugccguugacaucgggaacggcuguuucgagacaaagcacaaaugcaaucagaccugccuggaucgcauugcugccggaacauuuaacgcuggcgaguucagccuuccuaccuuugacucccugaauaucacggccgcgagccucaacgaugacgggcuggauaaucauaccauccugcuuuacuauucuacagccgcuuccagccucgccgugacccugaugcuggcuauuuucaucgucuacauggugucuagagacaacguuuccuguagcauuugccucuga

SEQ ID NO: 220306 - RNA, 1755 nt, Artificial Sequence
  derived and/or modified CDS sequence (opt5) from hemagglutinin__InfluenzaB__AHM01481
augaaggccaucauugugcugcucauggucguuaccagcaacgcugacagaaucugcacaggcauuacguccucuaauagcccccacguggugaaaaccgccacacagggggaggucaacgugaccggaguuaucccucugacaaccacaccgaccaaguccuacuucgcgaaucuuaaaggcacgaagacccgggggaaacugugucccgauugccucaacuguacagaccuggauguggcucuuggacgcccuaugugcgucggcaccacacccucugccaaggccagcauucugcaugaagugagaccuguuaccuccggguguuuucccaucaugcacgaccggacgaagauccgccaacucgcuaaucugcugagaggauaugagaacauucggcucucuacacagaaugugaucgaugccgaaaaagcuccuggcggcccguaccgccuggggaccagcggauccugccccaacgccacaagcaagucuggcuucuuugcgaccauggccugggcugucccuaaagacaauaacaagaaugccaccaacccccuuacaguggaggugccuuauauuugugcugaaggggaggaucagaucacggucuggggauuccauuccgacaauaaaacccagaugaagaaccuguacggcgauagcaauccccaaaaguuuacaucuuccgccaacgggguuaccacacacuaugugagccagauuggaggcuucccggaccagaccgaggauggcgggcucccucagucuggaagaaucguggucgacuacaugaugcaaaaacccggcaagacggggacaauuguguaucagcggggaguucugcuuccucagcgcguguggugcgcguccggcagaagcaaagucaucaaggggucccugccccucaucggagaagccgauugucugcaugagaaauacggcggccugaacaagucuaaacccuacuauaccggggaacacgcuaaggccauuggaaauugcccuaucugggugaagaccccgcucaaacuggcuaacggcacaaaguaccggcccccugccaaacuucugaaggagcgcggguuuuucggagccauugcuggcuuucucgaagggggcugggaaggaaugaucgcgggcuggcacggguauaccagccauggagcccacggcguugcuguggccgccgaccugaaauccacacaggaggcuauuaauaagaucacgaagaaccuuaauagccugucugaacucgaggucaaaaaccugcaaagacuguccggggccauggacgaacuccauaaugagauccuggagcuugaugaaaagguggacgaucugcgggcggacaccauuagcucucagaucgagcucgcuguccugcuuagcaacgaaggaauuaucaauuccgaggaugaacaucugcucgcccuggagcgcaaacugaagaaaaugcucggccccucugccguggacauugggaacggcuguuucgagacaaagcacaagugcaaucagaccugccuggauagaaucgcugccggaacauuuaacgcuggcgaguucagccuuccuaccuuugacucccugaauaucacggccgcgagccucaacgaugacgggcuggauaaucacaccauucugcuuuacuauucuacagccgcuuccagccucgccguuacccugaugcuggcuaucuucauuguguacauggucucucgggacaacguguccuguagcaucugccucuga

SEQ ID NO: 220307 - RNA, 1755 nt, Artificial Sequence; identical to SEQ ID NO: 218971
  derived and/or modified CDS sequence (opt5) from hemagglutinin__InfluenzaB__AHM01492

SEQ ID NO: 220308 - RNA, 1755 nt, Artificial Sequence; identical to SEQ ID NO: 218926
  derived and/or modified CDS sequence (opt5) from hemagglutinin__InfluenzaB__AHM01503

SEQ ID NO: 220309 - RNA, 1755 nt, Artificial Sequence; identical to SEQ ID NO: 218926
  derived and/or modified CDS sequence (opt5) from hemagglutinin__InfluenzaB__AHM01514

SEQ ID NO: 220310 - RNA, 1755 nt, Artificial Sequence
  derived and/or modified CDS sequence (opt5) from hemagglutinin__InfluenzaB__AHM01525
augaaggccaucauugugcugcucauggucguuaccagcaacgcugacagaaucugcacaggcauuacguccucuaauagcccccacguggugaaaaccgccacacagggggaggucaacgugaccggaguuaucccucugacaaccacaccgaccaaguccuacuucgcgaaucuuaaaggcacgaagacccgggggaaacugugucccgauugccucaacuguacagaccuggauguggcucuuggacgcccuaugugcgucggcaccacacccucugccaaggccagcauucugcaugaagugagaccuguuaccuccggguguuuucccaucaugcacgaccggacgaagauccgccaacucgcuaaucugcugagaggauaugagaacauucggcucucuacacagaaugugaucgaugccgaaaaagcuccuggcggcccguaccgccuggggaccagcggauccugccccaacgccacaagcaagucuggcuucuuugcgaccauggccugggcugucccuaaagacaauaacaagaaugccaccaacccccuuacaguggaggugccuuauauuugugcugaaggggaggaucagaucacggucuggggauuccauuccgacaauaaaacccagaugaagaaccuguacggcgauagcaauccccaaaaguuuacaucuuccgccaacgggguuaccacacacuaugugagccagauuggaggcuucccggaccagaccgaggauggcgggcucccucagucuggaagaaucguggucgacuacaugauucaaaaacccggcaagacggggacaaucguguaucagcggggaguucugcuuccucagaaaguguggugcgcguccggccgcagcaaggucaucaaagggucccugccccucauuggagaagccgauugucugcaugagaaguacggcggccugaacaaaucuaagcccuacuauaccggggaacacgcuaaggccaucggaaauugcccuauuugggugaaaaccccgcucaagcuggcuaacggcacaaaauacagacccccugccaagcugcugaaagagcggggguuuuucggagccaucgcuggcuuucucgaagggggcugggaaggaaugauugcgggcuggcacggguauaccagccauggagcccacggcguugcuguggccgccgaccugaaguccacacaggaggcuaucaauaagaucacgaaaaaccuuaauagccugucugaacucgaggucaagaaccugcaacgccuguccggggccauggacgaacuccauaaugagauucuggagcuugaugaaaaaguggacgaucugagagcggacaccaucagcucucagauugagcucgcuguccugcuuagcaacgaaggaaucauuaauuccgaggaugaacaccuucucgcccuggagcggaagcugaaaaagaugcucggccccucugccguggacaucgggaacggcuguuucgagacaaagcacaaaugcaaucagaccugccuggaucgcaucgcugccggaacauuuaacgcuggcgaguucagccuuccuaccuuugacucccugaauauuacggccgcgagccucaacgaugacgggcuggauaaucauaccauccugcuuuacuauucuacagccgcuuccagccucgccguuacccugaugcuggcuauuuucaucguguacauggucucuagagacaacguguccuguagcauuugccucuga

SEQ ID NO: 220311 - RNA, 1755 nt, Artificial Sequence
  derived and/or modified CDS sequence (opt5) from hemagglutinin__InfluenzaB__AHM01536
augaaggccaucauugugcugcucauggucguuaccagcaacgcugacagaaucugcacaggcauuacguccucuaauagcccccacguggugaaaaccgccacacagggggaggucaacgugaccggaguuaucccucugacaaccacaccgaccaaguccuacuucgcgaaucuuaaaggcacgaagacccgggggaaacugugucccgauugccucaacuguacagaccuggauguggcucuuggacgcccuaugugcgucggcaccacacccucugccaaggccagcauucugcaugaagugagaccuguuaccuccggguguuuucccaucaugcacgaccggacgaagauccgccaacucgcuaaucugcugagaggauaugagaacauucggcucucuacacagaaugugaucgaugccgaaaaagcuccuggcggcccguaccgccuggggaccagcggauccugccccaacgccacaagcaagucuggcuucuuugcgaccauggccugggcugucccuaaagacaauaacaagaaugccaccaacccccuuacaguggaggugccuuauauuugugcugaaggggaggaucagaucacggucuggggauuccauuccgacaauaaaacccagaugaagaaccuguacggcgauagcaauccccaaaaguuuacaucuuccgccaacgggguuaccacacacuaugugagccagauuggaggcuucccggaccagaccgaggauggcgggcucccucagucuggaagaaucguggucgacuacaugaugcaaaaacccggcaagacggggacaauuguguaucagcggggaguucugcuuccucagaaaguguggugcgcguccggccgcagcaaggucaucaaagggucccugccccucaucggagaagccgauugucugcaugagaaguacggcggccugaacaaaucuaagcccuacuauaccggggaacacgcuaaggccauuggaaauugcccuaucugggugaaaaccccgcucaagcuggcuaacggcacaaaauacagacccccugccaagcugcugaaagagcggggguuuuucggagccauugcuggcuuucucgaagggggcugggaaggaaugaucgcgggcuggcacggguauaccagccauggaguucacggcguggccgucgcugccgaccugaaguccacacaggaggccauuaauaagaucacgaaaaaccuuaauagccugucugaacucgaggugaagaaccugcaacgccuguccggggcuauggacgaacuccauaaugagauccuggagcuugaugaaaaagucgacgaucugagagccgacaccauuagcucucagaucgagcucgcggugcugcuuagcaacgaaggaauuaucaauuccgaggaugaacaccuucucgcucuggagcggaagcugaaaaagaugcucggccccucugccguugacauugggaacggcuguuucgagacaaagcacaaaugcaaucagaccugccuggaucgcaucgccgcuggaacauuuaacgccggcgaguucagccuuccuaccuuugacucccugaauaucacggcugccagccucaacgaugacgggcuggauaaucauaccauucugcuuuacuauucuacagcggccuccagccucgcugugacccugaugcuggccaucuucauugucuacauggugucuagagacaacguuuccuguagcaucugccucuga

SEQ ID NO: 220312 - RNA, 1755 nt, Artificial Sequence; identical to SEQ ID NO: 218926
  derived and/or modified CDS sequence (opt5) from hemagglutinin__InfluenzaB__AHM01547

SEQ ID NO: 220313 - RNA, 1755 nt, Artificial Sequence; identical to SEQ ID NO: 218971
  derived and/or modified CDS sequence (opt5) from hemagglutinin__InfluenzaB__AHM01558

SEQ ID NO: 220314 - RNA, 1758 nt, Artificial Sequence; identical to SEQ ID NO: 218812
  derived and/or modified CDS sequence (opt5) from hemagglutinin__InfluenzaB__AHV83951

SEQ ID NO: 220315 - RNA, 1755 nt, Artificial Sequence; identical to SEQ ID NO: 220201
  derived and/or modified CDS sequence (opt5) from hemagglutinin__InfluenzaB__AHV83952

SEQ ID NO: 220316 - RNA, 1758 nt, Artificial Sequence; identical to SEQ ID NO: 218755
  derived and/or modified CDS sequence (opt5) from hemagglutinin__InfluenzaB__AHZ36697

SEQ ID NO: 220317 - RNA, 1758 nt, Artificial Sequence
  derived and/or modified CDS sequence (opt5) from hemagglutinin__InfluenzaB__AHZ36708
augaaggccaucauugugcugcucauggucguuaccagcaacgcugacagaaucugcacaggcauuacguccucuaauagcccccacguggugaaaaccgccacacagggggaggucaacgugaccggaguuaucccucugacaaccacaccgaccaagucccauuucgcgaaucuuaaaggcacggaaacccgggggaagcugugucccaaaugccucaacuguacagaucuggacguggcucuuggacgcccuaagugcaccggcaagauucccucugccagagucagcauccugcacgaggugcggccuguuacauccggguguuuucccaucaugcaugaucgcaccaaaauuagacaacucccuaaucugcugcggggauacgaacacauccgccucucuacgcauaacgugauuaaugccgagaacgcuccgggcggccccuauaagaucgggacaagcggauccugccugaaugucaccaacggcaauggguucuuugccacaauggcuugggccgugccuaaaaacgacaagaauaaaaccgcgaccaacccccuuacaauugaagugccuuacaucuguacggagggagaggaucagauuaccgucuggggcuuccacagcgacaaugaaacacagauggccaagcuguauggggauucuaagccccagaaauuuaccuccagcgcuaacggaguuacaacccacuacgugucucaaaucggcggcuucccgaaccagacggaggacgggggacucccucaguccggcagaaucguggucgauuauauggugcaaaagagcgggaaaacaggaaccauuaccuaccagcggggcauccugcuuccccagaagguuuggugcacaucugggcgcuccaaagugauuaagggaagccugccucucaucggcgaagccgacugucugcaugagaaauauggcgggcugaauaaguccaagcccuacuacaccggagagcacgcuaaagccauuggcaacugccccaucugggucaagacaccucucaaacuggcgaaugggacgaaguauagaccgcccgccaaacuucugaaggaacggggauuuuucggcgcuaucgccggguuucucgagggcggaugggaaggcaugauugcuggguggcauggauacaccucucacggcgcccacgggguggccguugcugcggaucuuaagagcacacaggaggccaucaacaaaauuaccaagaaucugaacucccugagcgaacucgaggugaaaaaucugcagcgccugucuggagcuauggacgagcuccauaacgaaauccuggagcuugaugaaaaggucgacgaccugagagccgauacaauuuccagccaaaucgagcucgccgugcugcuuucuaaugaaggcaucauuaacagcgaggacgagcaucugcucgcucuggaacggaaacugaagaagaugcucgggccuuccgccgucgagaucggcaauggauguuucgaaaccaaacacaagugcaaccagacgugccuggaucgcauugcggcuggcaccuuugacgccggggaguucucucuucccacauuugauagccugaauaucaccgccgcuucccucaacgacgauggacuggacaaucacacaauucugcuuuauuacagcaccgccgcuucuucccucgccgugacgcugaugaucgcgauuuucguuguguauauggucagcagagauaacgugucuuguuccaucugccuguga

SEQ ID NO: 220318 - RNA, 1758 nt, Artificial Sequence
  derived and/or modified CDS sequence (opt5) from hemagglutinin__InfluenzaB__AHZ36719
augaaggccaucauugugcugcucauggucguuaccagcaacgcugacagaaucugcacaggcauuacguccucuaauagcccccacguggugaaaaccgccacacagggggaggucaacgugaccggaguuaucccucugacaaccacaccgaccaagucccauuucgcgaaucuuaaaggcacggaaacccgggggaagcugugucccaaaugccucaacuguacagaucuggacguggcucuuggacgcccuaagugcaccggcaagauucccucugccagagucagcauccugcacgaggugcggccuguuacauccggguguuuucccaucaugcaugaucgcaccaaaauuagacaacucccuaaucugcugcggggauacgaacacauccgccucucuacgcauaacgugauuaaugccgagaacgcuccgggcggccccuauaagaucgggacaagcggauccugcccuaaugucaccaacggcaauggguucuuugccacaauggcuugggccgugcccaaaaacgacaagaauaaaaccgcgaccaacccucugacaauugaagugcccuacgucuguacggagggagaggaucagaucaccguuuggggcuuccacagcgacaaugaaacacagauggccaaacuuuauggggauucuaagccgcagaaguuuaccuccagcgcuaacggagugacaacccacuacgugucucaaauuggcggcuucccuaaccagacggaggacgggggacugccccaguccggcagaaucgucguggauuauaugguucaaaagagcgggaaaacaggaaccaucaccuaccagcggggcauucuccugccucagaagguguggugcgccucugggcgcuccaaagucaucaagggaagccuuccccugauuggcgaagcugacugucuccaugagaaauauggcgggcugaauaaguccaagcccuacuacacaggagagcacgccaaagcgaucggcaacugcccuauuugggugaagaccccgcugaaacucgccaaugggacaaaguauagacccccugcuaaacugcuuaaggaacggggauuuuucggcgccaucgcuggguuucuggagggcggaugggaaggcaugaucgccggguggcauggauacacgucucacggcgcccacgggguugcuguggcggccgaucucaagagcacccaggaggcuauuaacaaaaucacaaagaaucugaacucccuuagcgaacuggaggucaaaaaucuccagcgccugucuggagccauggacgagcugcauaacgaaauucucgagcuggaugaaaagguggacgaccuuagagccgauaccaucuccagccaaauugagcuggcuguccuccugucuaaugaaggcaucaucaacagcgaggacgagcaccuucuggcccucgaacggaaacugaagaagaugcuggggcccuccgcgguggagauuggcaauggauguuucgaaacaaaacauaagugcaaccagaccugccucgaucgcaucgcugccggcacguuugacgccggggaguucucucugccuaccuuugauagccuuaauauuacagcugccucccugaacgacgauggacucgacaaucacaccauccugcuguauuacagcacagcugccucuucccuugcgguuacccucaugauugccaucuucguggucuauauggugagcagagauaacguuucuuguuccauuugccuguga

SEQ ID NO: 220319 - RNA, 1758 nt, Artificial Sequence; identical to SEQ ID NO: 218755
  derived and/or modified CDS sequence (opt5) from hemagglutinin__InfluenzaB__AHZ36730

SEQ ID NO: 220320 - RNA, 1758 nt, Artificial Sequence; identical to SEQ ID NO: 218755
  derived and/or modified CDS sequence (opt5) from hemagglutinin__InfluenzaB__AHZ36752

SEQ ID NO: 220321 - RNA, 1758 nt, Artificial Sequence; identical to SEQ ID NO: 218717
  derived and/or modified CDS sequence (opt5) from hemagglutinin__InfluenzaB__AHZ36763

SEQ ID NO: 220322 - RNA, 1758 nt, Artificial Sequence
  derived and/or modified CDS sequence (opt5) from hemagglutinin__InfluenzaB__AHZ36774
augaaggccaucauugugcugcucauggucguuaccagcaacgcugacagaaucugcacaggcauuacguccucuaauagcccccacguggugaaaaccgccacacagggggaagucaacgugaccggaguuaucccucugacaaccacaccgaccaagucccauuucgcgaaucuuaaaggcacggaaacccgggggaagcugugucccaaaugcccuaacuguacagaucucgacguggcucugggacgccccaagugcaccggcaagauuccuucugccagagucagcauccuucacgaggugcggcccguuacauccggguguuuuccuaucaugcaugaucgcaccaaaauuagacaacugccgaaucuccugcggggauacgaacacauccgccugucuacgcauaacgugauuaaugccgagagcgcucccggcggcccuuauaagaucgggacauccggaagcugccccaacgucaccaauggcaacggguucuuugccacaauggcuugggccgugccuaaaaaugacaagaacaaaaccgcgaccgauccccucacaauugaagugccguacaucuguacggaggaggaagaccagauuaccgucuggggauuccacucugauaaugagacacagauggccaagcuguauggcgacuccaagccucagaaauuuaccagcucugcuaacgggguuacaacccacuacgugucccaaaucggaggcuuccccaaucagacggaagauggcgggcuuccucagagcggaagaaucguggucgacuauauggugcagaagucuggcaaaacagggaccauuaccuaccaacggggaauccugcucccccagaagguuuggugcgccuccggccgcagcaaagugauuaaggggucccugccccuuaucggagaggcugauugucugcaugagaaauauggcggccucaacaagucuaagccuuacuacacaggggaacacgccaaagcgauuggaaacugcccgaucugggucaagacaccccugaaacuggccaauggcaccaaguauagaccucccgcuaaacuccugaaggagcggggguuuuucggagccaucgcuggcuuucuugaagggggcugggagggaaugauugccggcuggcauggguacacgagccacggagcccacggcguggcuguugcggccgaccugaaguccacccaggaagcuaucaacaaagugacaaagaaucucaacagccugucugagcuugaggucaaaaaucugcagcgccucuccggggccauggaugaacugcauaacgagauucuggaacucgacgagaagguggacgaucugagagccgacaccaucagcucucaaauugaacuugcuguccugcucagcaaugagggaaucaucaacuccgaggaugaacaucugcuugcccuggagcggaaacucaagaagaugcugggcccuucugcgguggaaauugggaauggcuguuucgagacaaaacacaagugcaaccagaccugccuggaccgcaucgcugccggaacguuugaugccggcgaguucagccuccccaccuuugacucccugaauauuacagcugccagccuuaacgaugacgggcuggauaaucacaccauccuccuguauuacucuacagcugccuccagccuggcgguuacccuuaugauugccaucuucguggucuauauggugucuagagacaacguuuccuguagcauuugccucuga

SEQ ID NO: 220323 - RNA, 1758 nt, Artificial Sequence; identical to SEQ ID NO: 220231
  derived and/or modified CDS sequence (opt5) from hemagglutinin__InfluenzaB__AHZ36785

SEQ ID NO: 220324 - RNA, 1758 nt, Artificial Sequence; identical to SEQ ID NO: 220231
  derived and/or modified CDS sequence (opt5) from hemagglutinin__InfluenzaB__AHZ36796

SEQ ID NO: 220325 - RNA, 1755 nt, Artificial Sequence
  derived and/or modified CDS sequence (opt5) from hemagglutinin__InfluenzaB__AHZ36807
augaaggccaucauugugcugcucauggucguuaccagcaacgcugacagaaucugcacaggcauuacguccucuaauagcccccacguggugaaaaccgccacacagggggaggucaacgugaccggaguuaucccucugacaaccacaccgaccaaguccuacuucgcgaaucuuaaaggcacgaagacccgggggaaacugugucccgauugccucaacuguacagaccuggauguggcucuuggacgcccuaugugcgucggcaccacacccucugccaaggccagcauucugcaugaagugagaccuguuaccuccggguguuuucccaucaugcacgaccggacgaagauccgccaacucgcuaaucugcugagaggauaugagaacauucggcucucuacacagaaugugaucgaugccgaaaaagcuccuggcggcccguaccgccuggggaccagcggauccugccccaacgccacaagcaagucuggcuucuuugcgaccauggccugggcugucccuaaagacaauaacaagaaugccaccaacccccuuacaguggaggugccuuauauuugugcugaaggggaggaucagaucacggucuggggauuccauuccgacaauaaaacccagaugaagaaccuguacggcgauagcaauccccaaaaguuuacaucuuccgccaacgggguuaccacacacuaugugagccagauuggaggcuucccggaccagaccgaggauggcgggcucccucagucuggaagaaucguggucgacuacaugaugcaaaaacccgaaaagacgggcacaauuguguaucagcgcgggguucugcuuccucagaaaguguggugcgcguccggacggagcaaggucaucaaaggcucccugccccucaucggggaggccgauugucugcaugaaaaguacggaggccugaacaaaucuaagcccuacuauaccggcgagcacgcuaaggccauugggaauugcccuaucugggugaaaaccccgcucaagcuggcuaacggaacaaaauacagacccccugccaagcugcugaaagagcggggcuuuuucggggccauugcuggauuucucgaaggcgggugggagggcaugaucgcgggauggcacggcuauaccagccauggggcccacggaguugcuguggccgccgaccugaaguccacacaggaagcuauuaauaagaucacgaaaaaccuuaauagccugucugagcucgaagucaagaaccugcaacgccuguccggcgccauggacgagcuccauaaugagauccuggaacuugaugagaaaguggacgaucugagagcggacaccauuagcucucagaucgaacucgcuguccugcuuagcaacgaggggauuaucaauuccgaagaugagcaccuucucgcccuggagcggaagcugaaaaagaugcucggacccucugccguggacauuggcaacggguguuucgaaacaaagcacaaaugcaaucagaccugccuggaucgcaucgcugccggcacauuuaacgcuggagaguucagccuuccuaccuuugacucccugaauaucacggccgcgagccucaacgaugacggccuggauaaucauaccauucugcuuuacuauucuacagccgcuuccagccucgccguuacccugaugcuggcuaucuucauuguguacauggucucuagagacaacguguccuguagcaucugccucuga

SEQ ID NO: 220326 - RNA, 1758 nt, Artificial Sequence; identical to SEQ ID NO: 218755
  derived and/or modified CDS sequence (opt5) from hemagglutinin__InfluenzaB__AHZ36818

SEQ ID NO: 220327 - RNA, 1758 nt, Artificial Sequence; identical to SEQ ID NO: 218717
  derived and/or modified CDS sequence (opt5) from hemagglutinin__InfluenzaB__AHZ36829

SEQ ID NO: 220328 - RNA, 1758 nt, Artificial Sequence; identical to SEQ ID NO: 218717
  derived and/or modified CDS sequence (opt5) from hemagglutinin__InfluenzaB__AHZ36840

SEQ ID NO: 220329 - RNA, 1758 nt, Artificial Sequence; identical to SEQ ID NO: 220231
  derived and/or modified CDS sequence (opt5) from hemagglutinin__InfluenzaB__AHZ36851

SEQ ID NO: 220330 - RNA, 1758 nt, Artificial Sequence; identical to SEQ ID NO: 218755
  derived and/or modified CDS sequence (opt5) from hemagglutinin__InfluenzaB__AHZ36862

SEQ ID NO: 220331 - RNA, 1758 nt, Artificial Sequence; identical to SEQ ID NO: 218717
  derived and/or modified CDS sequence (opt5) from hemagglutinin__InfluenzaB__AHZ36873

SEQ ID NO: 220332 - RNA, 1758 nt, Artificial Sequence
  derived and/or modified CDS sequence (opt5) from hemagglutinin__InfluenzaB__AHZ36884
augaaggccaucauugugcugcucauggucguuaccagcaacgcugacagaaucugcacaggcauuacguccucuaauagcccccacaucgugaaaaccgccacacagggggaagugaacgucaccggagugauuccucugacaaccacaccgaccaagucccauuucgcgaaucuuaaaggcacggaaacccgggggaagcugugucccaaaugccucaacuguacagaucuggacguugcucuuggacgcccuaagugcaccggcaagauccccucugccagagugagcauccugcacgagguccggccugugacauccggguguuuucccauuaugcaugaucgcaccaaaaucagacaacucccuaaucugcugcggggauacgaacacauucgccucucuacgcauaacguuaucaaugccgagaacgcuccgggcggccccuauaagauugggacaagcggauccugcccuaauaucaccaacggcaauggguucuuugaaacaauggccugggcugugcccaaaaacgacaagaauaaaaccgccaccaacccucugacaauugagguccccuacaucuguacggagggagaagaucagaucaccguguggggcuuccacagcgacaaugagacacagauggcgaaacuuuauggggauucuaagccgcagaaguuuaccuccagcgccaacggagugacaacccacuacgucucucaaauuggcggcuucccuaaccagacggaagacgggggacugccccaguccggcagaaucguuguggauuauauggugcaaaagagcgggaaaacaggaaccauuaccuaccagcggggcauccuccugccucagaaggucuggugcgcuucugggcgcuccaaagugauuaagggaagccuuccccugaucggcgaggccgacugucuccaugagaaauauggcgggcugaauaaguccaagcccuacuacacaggagaacacgcuaaagccaucggcaacugcccuauuuggguuaagaccccgcugaaacucgcgaaugggacaaaguauagacccccugccaaacugcuuaaggagcggggauuuuucggcgcuaucgccggguuucuggaaggcggaugggagggcaugauugcuggguggcauggauacacgucucacggcgcccacgggguggccgucgcugcggaucucaagagcacccaggaagccaucaacaaaauuacaaagaaucugaacucccuuagcgagcuggaggugaaaaaucuccagcgccugucuggagcuauggacgaacugcauaacgagauccucgaacuggaugagaagguugacgaccuuagagccgauaccaucuccagccaaauugaacuggccgugcuccugucuaaugagggcaucauuaacagcgaggacgaacaccuucuggcucucgagcggaaacugaagaagaugcuggggcccuccgccgucgaaaucggcaauggauguuucgagacaaaacauaagugcaaccagaccugccucgaucgcauugcggcuggcacguuugacgccggggaguucucucugccuaccuuugauagccuuaauaucacagccgcuucccugaacgacgauggacucgacaaucacaccauucugcuguauuacagcacagccgcuucuucccuugccgugacccucaugaucgcgaucuucgucguguauaugguuagcagagauaacgugucuuguuccauuugccuguga

SEQ ID NO: 220333 - RNA, 1758 nt, Artificial Sequence; identical to SEQ ID NO: 218755
  derived and/or modified CDS sequence (opt5) from hemagglutinin__InfluenzaB__AHZ36895

SEQ ID NO: 220334 - RNA, 1758 nt, Artificial Sequence; identical to SEQ ID NO: 218755
  derived and/or modified CDS sequence (opt5) from hemagglutinin__InfluenzaB__AHZ36906

SEQ ID NO: 220335 - RNA, 1758 nt, Artificial Sequence
  derived and/or modified CDS sequence (opt5) from hemagglutinin__InfluenzaB__AHZ36928
augaaggccaucauugugcugcucauggucguuaccagcaacgcugacagaaucugcacaggcauuacguccucuaauagcccccacguggugaaaaccgccacacagggggaagucaacgugaccggaguuaucccucugacaaccacaccgaccaagucccauuucgcgaaucuuaaaggcacgaagacccgggggaaacugugucccaagugccucaacuguacagaucuggacguggcucuuggacgcccuaagugcaccggcaaaauucccucugccagagucagcauccugcacgaagugcggccuguuacauccggguguuuucccaucaugcaugaucgcaccaagauuagacaacucccuaaucugcugcggggauacgagcacauccgccucucuacgcauaacgugauuaaugccgaaaacgcuccgggcggccccuauaaaaucgggacaagcggauccugccugaaugucaccaacggcaauggguucuuugccacaauggcuugggccgugccuaagaacgacaaaaauaagaccgcgaccaacccccuuacaauugaggugccuuacaucuguacggaaggagaggaucagauuaccgucuggggcuuccacagcgacaaugagacacagauggccaagcuguauggggauucuaaaccccagaaguuuaccuccagcgcuaacggaguuacaacccacuacgugucucaaaucggcggcuucccgaaccagacggaagacgggggacucccucaguccggcagaaucguggucgauuauauggugcagaaaagcgggaagacaggaaccauuaccuaccaacggggcauccugcuuccccagaaaguuuggugcgccucugggcgcuccaaggugauuaaaggaagccugccucucaucggcgaggcugacugucugcaugaaaaguauggcgggcugaauaaguccaaacccuacuacacaggagagcacgccaaggcgauuggcaacugccccaucugggucaaaaccccucucaagcuggccaaugggacaaaauauagaccgcccgcuaaacuucugaaggagcggggauuuuucggcgccaucgcuggguuucucgaaggcggaugggagggcaugauugccggguggcauggauacacgucucacggcgcccacgggguggcuguugcggccgaucugaaaagcacccaggaagcuaucaacaagauuacaaagaaucuuaacucccugagcgagcucgaagugaagaaucugcagcgccugucuggagccauggacgagcuccauaacgagauccuggaacuugaugagaaagucgacgaccugagagccgauaccauuuccagccaaaucgaacucgcugugcugcuuucuaaugagggcaucauuaacagcgaagacgagcaucugcucgcccuggagcggaagcugaagaaaaugcucgggccuuccgcggucgaaaucggcaauggauguuucgagacaaagcacaaaugcaaccagaccugccuggaucgcauugcugccggcacguuugacgccggggaguucucucuucccaccuuugauagccugaauaucacagcugccucccucaacgacgauggacuggacaaucacaccauucugcuuuauuacagcacagcugccucuucccucgcggugacccugaugaucgccauuuucguuguguauauggucagcagagauaacgugucuuguuccaucugccuguga

SEQ ID NO: 220336 - RNA, 1758 nt, Artificial Sequence; identical to SEQ ID NO: 220231
  derived and/or modified CDS sequence (opt5) from hemagglutinin__InfluenzaB__AHZ36939

SEQ ID NO: 220337 - RNA, 1758 nt, Artificial Sequence
  derived and/or modified CDS sequence (opt5) from hemagglutinin__InfluenzaB__AHZ36950
augaaggccaucauugugcugcucauggucguuaccagcaacgcugacagaaucugcacaggcauuacguccucuaauagcccccacaucgugaaaaccgccacacagggggaggugaacgucaccggagugauuccucugacaaccacaccgaccaagucccauuucgcgaaucuuaaaggcacggaaacccgggggaagcugugucccaaaugccucaacuguacagaucuggacguugcucuuggacgcccuaagugcaccggcaagauccccucugccagagugagcauccugcacgagguccggccuauuacauccggguguuuucccaucaugcaugaucgcaccaaaauuagacaacucccuaaucugcugcggggauacgaacacauccgccucucuacgcauaacgugauuaaugccgagaacgcuccgggcggccccuauaagaucgggacaagcggauccugcccuaauauuaccaacggcaauggguucuuugccacaauggcuugggccguucccaaaaacgacaagaauaaaaccgcgaccaacccucugacaaucgaagugcccuacaucuguacggagggagaggaucagauuaccgucuggggcuuccacagcgacaaugaaacacagauggccaaacuuuauggggauucuaagccgcagaaguuuaccuccagcgcuaacggagugacaacccacuacgugucucaaaucggcggcuucccuaaccagacggaggacgggggacugccccaguccggcagaauugucguugauuauauggugcaaaagagcgggaaaacaggaaccaucaccuaccagcggggcauucuccugccucagaagguguggugcgccucugggcgcuccaaagucaucaagggaagccuuccccugaucggcgaagcugacugucuccaugagaaauauggcgggcugaauaaguccaagcccuacuacacaggagagcacgccaaagcgauuggcaacugcccuaucugggugaagaccccgcugaaacucgccaaugggacaaaguauagacccccugcuaaacugcuuaaggaacggggauuuuucggcgccauugcuggguuucuggagggcggaugggaaggcaugaucgccggguggcauggauacacgucucacggcgcccacgggguugcuguggcggccgaucucaagagcacccaggaggcuauuaacaaaaucacaaagaaucugaacucccuuagcgaacuggaggucaaaaaucuccagcgccugucuggagccauggacgagcugcauaacgaaauccucgagcuggaugaaaagguggacgaccuuagagccgauaccauuuccagccaaaucgagcuggcuguucuccugucuaaugaaggcauuaucaacagcgaggacgagcaccuucuggcccucgaacggaaacugaagaagaugcuggggcccuccgcgguggagauuggcaauggauguuucgaaacaaaacauaagugcaaccagaccugccucgaucgcaucgcugccggcacguuugacgccggggaguucucucugccuaccuuugauagccuuaauauuacagcugccucccugaacgacgauggacucgacaaucacaccauccugcuguauuacagcacagcugccucuucccuugcggucacccucaugaucgccauuuucguggucuauauggugagcagagauaacguuucuuguuccaucugccuguga

SEQ ID NO: 220338 - RNA, 1758 nt, Artificial Sequence
  derived and/or modified CDS sequence (opt5) from hemagglutinin__InfluenzaB__AHZ36961
augaaggccaucauugugcugcucauggucguuaccagcaacgcugacagaaucugcacaggcauuacguccucuaauagcccccacguggugaaaaccgccacacagggggaggucaacgugaccggaguuaucccucugacaaccacaccgaccaagucccauuucgcgaaucuuaaaggcacggaaacccgggggaagcugugucccaaaugccucaacuguacagaucuggacguggcucuuggacgcccuaagugcaccggcaagauucccucugccagagucagcauccugcacgaggugcggccuguuacauccggguguuuucccaucaugcaugaucgcaccaaaauuagacaacucccuaaucugcugcggggauacgaacacauccgccucucuacgcauaacgugauuaaugccgagaacgcuccgggcggccccuauaagaucgggacaagcggauccugcccuaaugucaccaacggcaauggguucuuugccacaauggcuugggccgugcccaaaaacgacaagaauaaaaccgcgaccaacccucugacaauugaagugcccuacaucuguacggagggagaggaucagauuaccgucuggggcuuccacagcgacaaugaaacacagauggccaaacuuuauggggauucuaagccgcagaaguuuaccuccagcgcuaacggaguuacaacccacuacgugucucaaaucggcggcuucccuaaccagacggaggacgggggacugccccaguccggcagaaucguggucgauuauauggugcaaaagagcgggaaaacaggaaccauuaccuaccagcggggcauccuccugccucagaagguuuggugcgccucugggggauccaaagugauuaagggcagccuuccccugaucggcgaagcugacugucuccaugagaaauaugggggacugaauaaguccaagcccuacuacacaggcgagcacgccaaagcgauugggaacugcccuaucugggucaagaccccgcugaaacucgccaauggaacaaaguauagacccccugcuaaacugcuuaaggaacgcggcuuuuucggggccaucgcuggcuuucuggagggaggcugggaagggaugauugccggauggcauggcuacacgucucacggggcccacggaguggcuguugcggccgaucucaagagcacccaggaggcuaucaacaaaauuacaaagaaucugaacucccuuagcgaacuggaggugaaaaaucuccagcggcugucuggcgccauggacgagcugcauaacgaaauccucgagcuggaugaaaaggucgacgaccuucgcgccgauaccauuuccagccaaaucgagcuggcugugcuccugucuaaugaagggaucauuaacagcgaggacgagcaccuucuggcccucgaaagaaaacugaagaagaugcugggccccuccgcggucgagaucggaaauggcuguuucgaaacaaaacauaagugcaaccagaccugccucgaucggauugcugccgggacguuugacgccggagaguucucucugccuaccuuugauagccuuaauaucacagcugccucccugaacgacgauggccucgacaaucacaccauucugcuguauuacagcacagcugccucuucccuugcggugacccucaugaucgccauuuucguuguguauauggucagccgcgauaacgugucuuguuccaucugccuguga

SEQ ID NO: 220339 - RNA, 1758 nt, Artificial Sequence; identical to SEQ ID NO: 218755
  derived and/or modified CDS sequence (opt5) from hemagglutinin__InfluenzaB__AHZ36972

SEQ ID NO: 220340 - RNA, 1758 nt, Artificial Sequence
  derived and/or modified CDS sequence (opt5) from hemagglutinin__InfluenzaB__AHZ36983
augaaggccaucauugugcugcucauggucguuaccagcaacgcugacagaaucugcacaggcauuacguccucuaauagcccccacaucgugaaaaccgccacacagggggaggugaacgucaccggagugauuccucugacaaccacaccgaccaagucccauuucgcgaaucuuaaaggcacggaaacccgggggaagcugugucccaaaugccucaacuguacagaucuggacguugcucuuggacgcccuaagugcaccggcaagauccccucugccagagugagcauccugcacgagguccggccugugacauccggguguuuucccauuaugcaugaucgcaccaaaaucagacaacucccuaaucugcugcggggauacgaacacauucgccucucuacgcauaacguuaucaaugccgagaacgcuccgggcggccccuauaagauugggacaagcggauccugcccuaauaucaccaacggcaauggguucuuugccacaauggcuugggccgugcccaaaaacgacaagaauaaaaccgcgaccaacccucugacaauugaaguccccuacaucuguacggagggagaggaucagaucaccguguggggcuuccacagcgacaaugaaacacagauggccaaacuuuauggggauucuaagccgcagaaguuuaccuccagcgcuaacggagugacagcccacuacgucucucaaauuggcggcuucccuaaccagaccgaggacgggggacugccccaguccggcagaaucguuguggauuauauggugcaaaagagcgggaaaacgggaacaauuaccuaccagcggggcauccuccugccucagaaggucuggugcgcuucugggcgcuccaaagugauuaagggaagccuuccccugaucggcgaagccgacugucuccaugagaaauauggcgggcugaauaaguccaagcccuacuacaccggagagcacgcgaaagccaucggcaacugcccuauuuggguuaagacaccgcugaaacucgcuaaugggaccaaguauagacccccugccaaacugcuuaaggaacggggauuuuucggcgcuaucgccggguuucuggagggcggaugggaaggcaugauugccggguggcauggauacacaucucacggcgcucacgggguggcggucgccgcugaucucaagagcacgcaggaggccaucaacaaaauuaccaagaaucugaacucccuuagcgaacuggaggugaaaaaucuccagcgccugucuggagccauggacgagcugcauaacgaaauccucgagcuggaugaaaagguugacgaccuuagagcugauacaaucuccagccaaauugagcuggccgugcuccugucuaaugaaggcaucauuaacagcgaggacgagcaccuucuggcgcucgaacggaaacugaagaagaugcuggggcccuccgcugucgagaucggcaauggauguuucgaaaccaaacauaagugcaaccagacaugccucgaucgcauugccgccggcaccuuugacgcuggggaguucucucugccuacguuugauagccuuaauaucaccgccgcuucccugaacgacgauggacucgacaaucacacaauucugcuguauuacagcaccgccgcgucuucccuugccgugacacucaugaucgcuaucuucgucguguauaugguuagcagagauaacgugucuuguuccauuugccuguga

SEQ ID NO: 220341 - RNA, 1758 nt, Artificial Sequence
  derived and/or modified CDS sequence (opt5) from hemagglutinin__InfluenzaB__AHZ37005
augaaggccaucauugugcugcucauggucguuaccagcaacgcugacagaaucugcacaggcauuacguccucuaauagcccccacguggugaaaaccgccacacagggggaagucaacgugaccggaguuaucccucugacaaccacaccgaccaagucccauuucgcgaaucuuaaaggcacggaaacccgggggaagcugugucccaaaugcccuaacuguacagaucucgacguggcucugggacgccccaagugcaccggcaagauuccuucugccagagucagcauccuucacgaggugcggcccguuacauccggguguuuuccuaucaugcaugaucgcaccaaaauuagacaacugccgaaucuccugcggggauacgaacacauccgccugucuacgcauaacgugauuaaugccgagagcgcucccggcggcccuuauaagaucgggacauccggaagcugccccaacgucaccaauggcaacggguucuuugccacaauggcuugggccgugccuaaaaaugacaagaacaaaaccgcgaccgauccccucacaauugaagugccguacaucuguacggaggaggaagaccagauuaccgucuggggauuccacucugauaaugagacacagauggccaagcuguauggcgacuccaagccucagaaauuuaccagcucugcuaacgggguuacaacccacuacgugucccaaaucggaggcuuccccaaucagacggaagauggcgggcuuccucagagcggaagaaucguggucgacuauauggugcagaagucuggcaaaacagggaccauuaccuaccaacggggaauccugcucccccagaagguuuggugcgccuccggccgcagcaaagugauuaaggggucccugccccuuaucggagaggcugauugucugcaugagaaauauggcggccucaacaagucuaagccuuacuacacaggggaacacgccaaagcgauuggaaacugcccgaucugggucaagacaccccugaaacuggccaauggcaccaaguauagaccucccgcuaaacuccugaaggagcggggguuuuucggagccaucgcuggcuuucuugaagggggcugggagggaaugauugccggcuggcauggguacacgagccacggagcccacggcguggcuguugcggccgaccugaaguccacccaggaagcuaucaacaaaauuacaaagaaucucaacagccugucugagcuugaggugaaaaaucugcagcgccucuccggggccauggaugaacugcauaacgagauccuggaacucgacgagaaggucgacgaucugagagccgacaccauuagcucucaaaucgaacuugcugugcugcucagcaaugagggaaucauuaacuccgaggaugaacaucugcuugcccuggagcggaaacucaagaagaugcugggcccuucugcggucgaaaucgggaauggcuguuucgagacaaaacacaagugcaaccagaccugccuggaccgcauugcugccggaacguuugaugccggcgaguucagccuccccaccuuugacucccugaauaucacagcugccagccuuaacgaugacgggcuggauaaucacaccauucuccuguauuacucuacagcugccuccagccuggcggugacccuuaugaucgccauuuucguuguguauauggucucuagagacaacguguccuguagcaucugccucuga

SEQ ID NO: 220342 - RNA, 1758 nt, Artificial Sequence; identical to SEQ ID NO: 218717
  derived and/or modified CDS sequence (opt5) from hemagglutinin__InfluenzaB__AHZ37016

SEQ ID NO: 220343 - RNA, 1758 nt, Artificial Sequence
  derived and/or modified CDS sequence (opt5) from hemagglutinin__InfluenzaB__AHZ37027
augaaggccaucauugugcugcucauggucguuaccagcaacgcugacagaaucugcacaggcauuacguccucuaauagcccccacguggugaaaaccgccacacagggggaggucaacgugaccggaguuaucccucugacaaccacaccgaccaagucccauuucgcgaaucuuaaaggcacggaaacccgggggaagcugugucccaaaugccucaacuguacagaucuggacguggcucuuggacgcccuaagugcaccggcaagauucccucugccagagucagcaucauccacgaggugcggccuguuacauccggguguuuucccauuaugcaugaucgcaccaaaaucagacaacugccuaaucuccugcggggauacgaacacauucgccugucuacgcauaacgugaucaaugccgagaacgcuccgggcggccccuauaagauugggacaagcggauccugccucaaugucaccaacggcaauggguucuuugccacaauggcuugggccgugccuaaaaacgacaagaauaaaaccgcgaccaacccccugacaaucgaagugccuuacauuuguacggagggagaggaucagaucaccgucuggggcuuccacagcgacaaugaaacacagauggccaaacuuuauggggauucuaagccccagaaguuuaccuccagcgcuaacggaguuacaacccacuacgugucucaaaucggcggcuucccgaaccagacggaggacgggggacugccucaguccggcagaauuguggucgauuauauggugcaaaagagcgggaaaacaggaaccaucaccuaccagcggggcauucuccugccccagaagguuuggugcgccucugggcgcuccaaagugaucaagggaagccuuccucugauuggcgaagcugacugucuccaugagaaauauggcgggcugaauaaguccaagcccuacuacacaggagagcacgccaaagcgaucggcaacugccccaucugggucaagaccccucugaaacucgccaaugggacaaaguauagaccgcccgcuaaacugcuuaaggaacggggauuuuucggcgccauugcuggguuucuggagggcggaugggaaggcaugaucgccggguggcauggauacacgucucacggcgcccacgggguggcuguugcggccgaucucaagagcacccaggaggcuauuaacaaaaucacaaagaaucugaacucccuuagcgaacuggaggugaaaaaucuccagcgccugucuggagccauggacgagcugcauaacgaaauucucgagcuggaugaaaaggucgacgaccuuagagccgauaccaucuccagccaaaucgagcuggcugugcuccugucuaaugaaggcauuaucaacagcgaggacgagcaccuucuggcccucgaacggaaacugaagaagaugcuggggccuuccgcggucgagauuggcaauggauguuucgaaacaaaacauaagugcaaccagaccugccucgaucgcaucgcugccggcacguuugacgccggggaguucucucugcccaccuuugauagccuuaauauuacagcugccucccugaacgacgauggacucgacaaucacaccauccugcuguauuacagcacagcugccucuucccuugcggugacccucaugauugccaucuucguuguguauauggucagcagagauaacgugucuuguuccaucugccuguga

SEQ ID NO: 220344 - RNA, 1758 nt, Artificial Sequence; identical to SEQ ID NO: 218717
  derived and/or modified CDS sequence (opt5) from hemagglutinin__InfluenzaB__AHZ37038

SEQ ID NO: 220345 - RNA, 1758 nt, Artificial Sequence; identical to SEQ ID NO: 220231
  derived and/or modified CDS sequence (opt5) from hemagglutinin__InfluenzaB__AHZ37049

SEQ ID NO: 220346 - RNA, 1758 nt, Artificial Sequence; identical to SEQ ID NO: 220231
  derived and/or modified CDS sequence (opt5) from hemagglutinin__InfluenzaB__AHZ37060

SEQ ID NO: 220347 - RNA, 1758 nt, Artificial Sequence; identical to SEQ ID NO: 218717
  derived and/or modified CDS sequence (opt5) from hemagglutinin__InfluenzaB__AHZ37071

SEQ ID NO: 220348 - RNA, 1758 nt, Artificial Sequence; identical to SEQ ID NO: 218717
  derived and/or modified CDS sequence (opt5) from hemagglutinin__InfluenzaB__AHZ37082

SEQ ID NO: 220349 - RNA, 1758 nt, Artificial Sequence; identical to SEQ ID NO: 220231
  derived and/or modified CDS sequence (opt5) from hemagglutinin__InfluenzaB__AHZ37093

SEQ ID NO: 220350 - RNA, 1758 nt, Artificial Sequence
  derived and/or modified CDS sequence (opt5) from hemagglutinin__InfluenzaB__AHZ37104
augaaggccaucauugugcugcucauggucguuaccagcaacgcugacagaaucugcacaggcauuacguccucuaauagcccccacguggugaaaaccgccacacagggggaggucaacgugaccggaguuaucccucugacaaccacaccgaccaagucccauuucgcgaaucuuaaaggcacggaaacccgggggaagcugugucccaaaugccucaacuguacagaucuggacguggcucuuggacgcccuaagugcaccggcaagauucccucugccagagucagcauccugcacgaggugcggccuguuacauccggguguuuucccaucaugcaugaucgcaccaaaauuagacaacucccuaaucugcugcggggauacgaacacauccgccucucuacgcauaacgugauuaaugccgagaacgcuccgggcggccccuauaagaucgggacaagcggauccugcccuaaugucaccaacggcaauggguucuuugccacaauggcuugggccgugcccaaaaacgacaagaauaaaaccgcgaccaacccucugacaauugaagugcccuacaucuguacggagggagaggaucagauuaccgucuggggcuuccacagcgacaaugaaacacagauggccaaacuuuauggggauucuaagccgcagaaguuuaccuccagcgcuaacggaguuacaacccacuacgugucucaaaucggcggcuucccuaaccagacggaggacgggggacugccccaguccggcagaaucguggucgaucauauggugcaaaagagcgggaaaacaggaaccauuaccuaucagcggggcauccuccugccucagaagguuuggugcgccucugggcgcuccaaagugauuaagggaagccuuccccugaucggcgaagcugacugucuccacgagaaauacggcgggcugaauaaguccaagcccuauuacacaggagagcaugccaaagcgauuggcaacugcccuaucugggucaagaccccgcugaaacucgccaaugggacaaaguacagacccccugcuaaacugcuuaaggaacggggauuuuucggcgccaucgcuggguuucuggagggcggaugggaaggcaugauugccggguggcacggauauacgucucacggcgcccaugggguggcuguugcggccgaucucaagagcacccaggaggcuaucaacaaaauuacaaagaaucugaacucccuuagcgaacuggaggugaaaaaucuccagcgccugucuggagccauggacgagcugcacaacgaaauccucgagcuggaugaaaaggucgacgaccuuagagccgauaccauuuccagccaaaucgagcuggcugugcuccugucuaaugaaggcaucauuaacagcgaggacgagcaucuucuggcccucgaacggaaacugaagaagaugcuggggcccuccgcggucgagaucggcaauggauguuucgaaacaaaacacaagugcaaccagaccugccucgaucgcauugcugccggcacguuugacgccggggaguucucucugccuaccuuugauagccuuaauaucacagcugccucccugaacgacgauggacucgacaaucauaccauucugcuguacuauagcacagcugccucuucccuugcggugacccucaugaucgccauuuucguuguguacauggucagcagagauaacgugucuuguuccaucugccuguga

SEQ ID NO: 220351 - RNA, 1758 nt, Artificial Sequence
  derived and/or modified CDS sequence (opt5) from hemagglutinin__InfluenzaB__AHZ41770
augaaggccaucauugugcugcucauggucguuaccagcaacgcugacagaaucugcacaggcauuacguccucuaauagcccccacaucgugaaaaccgccacacagggggaagugaacgucaccggagugauuccucugacaaccacaccgaccaagucccauuucgcgaaucuuaaaggcacggaaacccgggggaagcugugucccaaaugccucaacuguacagaucuggacguugcucuuggacgcccuaagugcaccggcaagauccccucugccagagugagcauccugcacgagguccggccugugacauccggguguuuucccauuaugcaugaucgcaccaaaaucagacaacucccuaaucugcugcggggauacgaacacauucgccucucuacgcauaacguuaucaaugccgagaacgcuccgggcggccccuauaagauugggacaagcggauccugcccuaauaucaccaacggcaauggguucuuugccacaauggcuugggccgugcccaaaaacgacaagaauaaaaccgcgauuaacccucugaccaucgaaguccccuacaucuguacagagggagaggaucagauuacgguguggggcuuccacagcgacaaugaaacccagauggccaagcuguauggggauucugagccgcagaaguuuacauccagcgcuaacggagugaccacacacuacgucucucaaaucggcggcuucccuaaccagaccgaagacgggggacuuccccaguccggcagaauuguuguggauuauauggugcagaaaagcgggaagacgggaacaaucaccuaccaacggggcauucuccugccucagaaagucuggugcgccucugggcgcuccaaggugaucaaaggaagccuuccccugaucggcgaggcugacugucuccaugagaaguauggcgggcugaauaaauccaagcccuacuacaccggagaacacgccaaggcgauuggcaacugcccuaucuggguuaaaacaccgcugaagcucgccaaugggaccaaauauagacccccugcuaagcugcuuaaagagcggggauuuuucggcgccauugcuggguuucuggaaggcggaugggagggcaugaucgccggguggcauggauacacaucucacggcgcccacgggguggcugucgcggccgaucucaagagcacgcaggaagcuauuaacaagaucaccaaaaaucugaacucccuuagcgagcuggaggugaagaaucuccagcgccugucuggagccauggacgaacugcauaacgagauccucgaacuggaugagaaaguugacgaccuuagagccgauacaauuuccagccaaaucgaacuggcugugcuccugucuaaugagggcauuaucaacagcgaggacgaacaccuucuggcccucgagcggaagcugaaaaagaugcuggggcccuccgcggucgaaauuggcaauggauguuucgagaccaagcauaaaugcaaccagacaugccucgaucgcaucgcugccggcaccuuugacgccggggaguucucucugccuacguuugauagccuuaauauuaccgcugccucccugaacgacgauggacucgacaaucacacaauccugcuguauuacagcaccgcugccucuucccuugcggugacacucaugaucgccauuuucgucguguauaugguuagcagagauaacgugucuuguuccaucugccuguga

SEQ ID NO: 220352 - RNA, 1758 nt, Artificial Sequence; identical to SEQ ID NO: 218755
  derived and/or modified CDS sequence (opt5) from hemagglutinin__InfluenzaB__AHZ41781

SEQ ID NO: 220353 - RNA, 1758 nt, Artificial Sequence; identical to SEQ ID NO: 218755
  derived and/or modified CDS sequence (opt5) from hemagglutinin__InfluenzaB__AHZ41792

SEQ ID NO: 220354 - RNA, 1758 nt, Artificial Sequence; identical to SEQ ID NO: 218755
  derived and/or modified CDS sequence (opt5) from hemagglutinin__InfluenzaB__AHZ41803

SEQ ID NO: 220355 - RNA, 1758 nt, Artificial Sequence
  derived and/or modified CDS sequence (opt5) from hemagglutinin__InfluenzaB__AHZ41814
augaaggccaucauugugcugcucauggucguuaccagcaacgcugacagaaucugcacaggcauuacguccucuaauagcccccacguggugaaaaccgccacacagggggaggucaacgugaccggaguuaucccucugacaaccacaccgaccaagucccauuucgcgaaucuuaaaggcacggaaacccgggggaagcugugucccaaaugcccuaacuguacagaucucgacguggcucugggacgccccaagugcaccggcaagauuccuucugccagagucagcauccuucacgaggugcggcccguuacauccggguguuuuccuaucaugcaugaucgcaccaaaauuagacaacugccgaaucuccugcggggauacgaacacauccgccugucuacgcauaacgugauuaaugccgagaacgcucccggcggcccuuauaagaucgggacaagcggauccugccccaaugucaccaacggcaauggguucuuugccacaauggcuugggccgugccuaaaaacgacaagaauaaaaccgcgaccaacccccucacaauugaagugccguacaucuguacggagggagaggaucagauuaccgucuggggcuuccacagcgacaaugaaacacagauggccaagcuguauggggauucuaagccucagaaauuuaccuccagcgcuaacggaguuacaacccacuacgugucucaaaucggcggcuuccccaaccagacggaggacgggggacuuccucaguccggcagaaucguggucgauuauauggugcaaaagagcgggaaaacaggaaccguuaccuaccagcggggcauucugcucccccagaagguguggugcgccucugggcgcuccaaagucaucaagggaagccugccccuuauuggcgaagcugacugucugcaugagaaauauggcgggcucaauaaguccaagccuuacuacacaggagagcacgccaaagcgaucggcaacugcccgauuugggugaagacaccccugaaacuggccaaugggaccaaguauagaccucccgcuaaacuccugaaggaacggggauuuuucggcgccaucgcuggguuucuugagggcggaugggaaggcaugaucgccggguggcauggauacacgucucacggcgcccacgggguugcuguggcggccgaucucaagagcacccaggaggcuauuaacaaaaucacaaagaaucugaacucccugagcgaacuugaggucaaaaaucugcagcgccucucuggagccauggacgagcugcauaacgaaauucuggagcucgaugaaaagguggacgaccugagagccgauaccaucuccagccaaauugagcuugcuguccugcucucuaaugaaggcaucaucaacagcgaggacgagcaucugcuugcccuggaacggaaacucaagaagaugcuggggccuuccgcgguggagauuggcaauggauguuucgaaacaaaacacaagugcaaccagaccugccuggaucgcaucgcugccggcacguuugacgccggggaguucucucuccccaccuuugauagccugaauauuacagcugccucccuuaacgacgauggacuggacaaucacaccauccuccuguauuacagcacagcugccucuucccuggcgguuacccuuaugauugccaucuucguggucuauauggugagcagagauaacguuucuuguuccauuugccucuga

SEQ ID NO: 220356 - RNA, 1758 nt, Artificial Sequence; identical to SEQ ID NO: 218755
  derived and/or modified CDS sequence (opt5) from hemagglutinin__InfluenzaB__AHZ41825

SEQ ID NO: 220357 - RNA, 1758 nt, Artificial Sequence; identical to SEQ ID NO: 218755
  derived and/or modified CDS sequence (opt5) from hemagglutinin__InfluenzaB__AHZ41836

SEQ ID NO: 220358 - RNA, 1758 nt, Artificial Sequence; identical to SEQ ID NO: 218755
  derived and/or modified CDS sequence (opt5) from hemagglutinin__InfluenzaB__AHZ41847

SEQ ID NO: 220359 - RNA, 1755 nt, Artificial Sequence; identical to SEQ ID NO: 220203
  derived and/or modified CDS sequence (opt5) from hemagglutinin__InfluenzaB__AHZ41858

SEQ ID NO: 220360 - RNA, 1758 nt, Artificial Sequence; identical to SEQ ID NO: 220228
  derived and/or modified CDS sequence (opt5) from hemagglutinin__InfluenzaB__AHZ41869

SEQ ID NO: 220361 - RNA, 1755 nt, Artificial Sequence
  derived and/or modified CDS sequence (opt5) from hemagglutinin__InfluenzaB__AIC73844
augaaggccaucauugugcugcucauggucguuaccagcaacgcugacagaaucugcacaggcauuacguccucuaauagcccccacguggugaaaaccgccacacagggggaagucaacgugaccggaguuaucccucugacaaccacaccgaccaaguccuacuucgcgaaucuuaaaggcacgcggacccgcgggaagcugugucccgauugccucaacuguacagaccuggauguggcucuuggaagaccuaugugcgucggcaccacacccucugccaaagccagcauucugcaugaagugcggccuguuaccuccggguguuuucccaucaugcacgaccgcacgaagaucagacaacucccuaaucugcugcggggauaugagaagauucgccucucuacacagaacgugaucgaugcugaaaaagccccgggcggccccuacagacuggggaccagcggauccugcccuaaugcuacaagcaagauuggcuucuuugccaccauggcgugggccguccccaaagacaacuauaagaaugcuaccaacccucagacaguggaggugcccuacaucuguacggaaggggaggaucagauuaccgucuggggauuccauucugacaauaaaacacaaaugaagucccuuuauggcgauagcaacccgcagaaguuuaccucuuccgccaaugggguuacaacccacuacgugagccagaucggagacuucccugaucagacggaggacggcggccugccccaaucugggcggauuguggucgauuauaugaugcagaaaccuggaaagacaggcaccaucguguaccagcgcgggguucuccugccccagaaaguguggugcgcuuccggaagaagcaaggucaucaaaggcucccuuccccugauuggggaagccgacugucuccaugaggaauacggaggccugaacaagucuaaaccuuauuacaccggcaagcacgcgaaggccaucgggaauugcccgauuugggugaaaacaccccugaagcucgcuaacggaaccaaauaucggccucccgccaagcugcuuaaagagcgcggcuuuuucggggcuaucgccggauuucuggagggcgggugggaaggcaugauugccggauggcacggcuacacaagccauggggcucacggaguugcgguggccgcugaccucaaguccacgcaagaggccaucaacaagaucaccaaaaaucugaacagccuuucugaacuggaggucaagaaucuccagagacuguccggcgccauggaugaacugcauaacgagauucucgagcuggacgaaaaaguggaugaccuucgggcugauacaaucagcucucagauugagcuggccguccuccugagcaaugaagggaucauuaacuccgaggacgaacaccuucuggcgcucgagcgcaagcugaaaaagaugcugggaccuucugcuguggauaucggcaauggguguuucgagaccaagcacaaaugcaaccaaacaugccucgacagaaucgccgccggcaccuuuaaugcuggagaguucagccugcccacguuugauucccuuaacauuaccgccgcuagccugaaugacgauggccucgacaaccauacaauccugcuguauuacucuaccgccgcguccagccuugccguuacacucaugcuggcuauuuucaucguguauauggucucucgggacaauguguccuguagcauuugccuguga

SEQ ID NO: 220362 - RNA, 1758 nt, Artificial Sequence; identical to SEQ ID NO: 219937
  derived and/or modified CDS sequence (opt5) from hemagglutinin__InfluenzaB__AIC73845

SEQ ID NO: 220363 - RNA, 1758 nt, Artificial Sequence; identical to SEQ ID NO: 219937
  derived and/or modified CDS sequence (opt5) from hemagglutinin__InfluenzaB__AIC73846

SEQ ID NO: 220364 - RNA, 1758 nt, Artificial Sequence
  derived and/or modified CDS sequence (opt5) from hemagglutinin__InfluenzaB__AIC73847
augaaggccaucauugugcugcucauggucguuaccagcaacgcugacagaaucugcacaggcauuacguccucuaauagcccccacguggugaaaaccgccacacagggggaggucaacgugaccggaguuaucccucugacaaccacaccgaccaagucccauuucgcgaaucuuaaaggcacggaaacccgggggaagcugugucccaaaugccucgauuguacagaccuggauguggcucuuggacgcccuaagugcaccggcaagauucccucugccagagucagcauccugcacgaggugcggccuguuacauccggguguuuucccaucaugcaugaccgcaccaaaauuagacaacucccuaaccugcugcggggauacgaacacauccgccucucuacgcauaaugugauuaacgccgaggaugcuccgggcggccccuauaagaucgggacaagcggauccugcccuaaugucaccaacggcaauggguucuuugccacaauggcuugggccgugcccaaaaacgacaagaauaaaaccgcgaccaacccucugacaauugaagugcccuacaucuguacggagggagaggaucagauuaccgucuggggcuuccacagcgacaaugaaacacagauggccaaacuuuauggggauucuaagccgcagaaguuuaccuccagcgcuaacggaguuacaacccacuacgugucucaaaucggcggcuucccuaaucagacggaggacgggggacugccccaguccggcagaaucguggucgauuauauggugcaaaagagcgggaaaacaggaaccauuaccuaccagcggggcauccuccugccucagaagguuuggugcgccucugggcgcuccaaagugauuaagggaagccuuccccugaucggcgaagcugacugucuccaugagaaauauggcgggcugaacaaguccaagcccuacuacacaggagagcacgccaaagcgauuggcaacugcccuaucugggucaagaccccgcugaaacucgccaaugggacaaaguauagacccccugcuaaacugcuuaaggaacggggauuuuucggcgccaucgcuggguuucuggagggcggaugggaaggcaugauugccggguggcauggauacacgucucacggcgcccacgggguggcuguugcggccgaucucaagagcacccaggaggcuaucaacaaaauuacaaagaaucugaacucccuuagcgaacuggaggugaaaaaucuccagcgccugucuggagccauggacgagcugcauaacgaaauccucgagcuggacgaaaaggucgaugaccuuagagccgauaccauuuccagccaaaucgagcuggcugugcuccugucuaaugaaggcaucauuaacagcgaggacgagcaccuucuggcccucgaacggaaacugaagaagaugcuggggcccuccgcggucgagaucggcaauggauguuucgaaacaaaacauaagugcaaccagaccugccucgaucgcauugcugccggcacguuugacgccggggaguucucucugccuaccuuugauagccuuaauaucacagcugccucccugaacgacgauggacucgacaaucacaccauucugcuguauuacagcacagcugccucuucccuugcggugacccucaugaucgccauuuucguuguguauauggucagcagagauaacgugucuuguuccaucugccuguga

SEQ ID NO: 220365 - RNA, 1758 nt, Artificial Sequence; identical to SEQ ID NO: 219937
  derived and/or modified CDS sequence (opt5) from hemagglutinin__InfluenzaB__AIC73848

SEQ ID NO: 220366 - RNA, 1755 nt, Artificial Sequence; identical to SEQ ID NO: 220201
  derived and/or modified CDS sequence (opt5) from hemagglutinin__InfluenzaB__AIC73849

SEQ ID NO: 220367 - RNA, 1758 nt, Artificial Sequence
  derived and/or modified CDS sequence (opt5) from hemagglutinin__InfluenzaB__AIC73850
augaaggccaucauugugcugcucauggucgcuaccagcaacgccgacagaaucugcacaggcauuacguccucuaauagcccccacguugugaaaaccgcgacacagggggaggugaacgucaccggagugaucccucugacaaccacaccgaccaagucccauuucgcuaaucuuaaaggcacggaaacccgggggaagcugugucccaaaugccucaacuguacagaucuggacguugcccuuggacgcccuaagugcaccggcaagauucccucugccagagugagcauccugcacgagguccggccugugacauccggguguuuucccaucaugcaugaucgcaccaaaauuagacaacucccuaaucugcugcggggauacgaacacauccgccucucuacgcauaacguuauuaaugcugaggacgccccgggcggccccuauaagaucgggacaagcggauccugcccuaacgugaccaauggcaacggguucuuugcuacaauggccugggcgguccccaaaaaugauaagaacaaaaccgccaccaauccucugacaauugaagugcccuacaucuguacggagggagaggaccagauuaccguguggggcuuccacagcgauaacgaaacacagauggcuaagcuguauggggacucuaagccgcagaaauuuaccuccagcgccaauggagucacaacccacuacguuucucaaaucggcggcuucccuaaccagacggaggaugggggacugccccaguccggcagaaucgugguggacuauaugguccaaaagagcgggaaaacaggaaccauuaccuaccagcggggcauccuccugccucagaagguguggugcgcuucugggcgcuccaaaguuauuaagggaagccuuccccugaucggcgaagccgauugucuccaugagaaauauggcgggcugaacaaguccaagcccuacuacacaggagagcacgcgaaagccauuggcaauugcccuaucugggugaagaccccgcugaaacucgcuaacgggacaaaguauagacccccugccaaacugcuuaaggaacggggauuuuucggcgcuaucgccggguuucuggagggcggaugggaaggcaugauugccggguggcauggauacacgucucacggcgcucacggggucgcgguggccgcugaccucaagagcacccaggaggccaucaauaaaauuacaaagaaccuuaauucccuuagcgaacuggagguuaaaaaccuccagcgccugucuggagccauggaugagcugcauaaugaaauccucgagcuggacgaaaagguggacgaucuuagagcugacaccauuuccagccaaaucgagcuggccguccuccugucuaacgaaggcaucauuaauagcgaggaugagcaccuucuggcgcucgaacggaaacugaagaagaugcuggggcccuccgcuguggagaucggcaacggauguuucgaaacaaaacauaagugcaaucagaccugccucgaccgcauugccgccggcacguuugaugcuggggaguucucucugccuaccuuugacagccuuaacaucacagccgcuucccugaaugaugacggacucgauaaccacaccauucugcuguauuacagcacagccgcgucuucccuugccgucacccucaugaucgcuauuuucgugguuuauauggugagcagagacaaugucucuuguuccaucugccuguga

SEQ ID NO: 220368 - RNA, 1758 nt, Artificial Sequence; identical to SEQ ID NO: 218959
  derived and/or modified CDS sequence (opt5) from hemagglutinin__InfluenzaB__AIC73851

SEQ ID NO: 220369 - RNA, 1755 nt, Artificial Sequence; identical to SEQ ID NO: 220361
  derived and/or modified CDS sequence (opt5) from hemagglutinin__InfluenzaB__AIC73852

SEQ ID NO: 220370 - RNA, 1755 nt, Artificial Sequence; identical to SEQ ID NO: 220361
  derived and/or modified CDS sequence (opt5) from hemagglutinin__InfluenzaB__AIC73853

SEQ ID NO: 220371 - RNA, 1758 nt, Artificial Sequence
  derived and/or modified CDS sequence (opt5) from hemagglutinin__InfluenzaB__AIC73855
augaaggccaucauugugcugcucauggucguuaccagcaacgcugacagaaucugcacaggcauuacguccucuaauagcccccacguggugaaaaccgccacacagggggaggucaacgugaccggaguuaucccucugacaaccacaccgaccaagucccauuucgcgaaucuuaaaggcacggaaacccgggggaagcugugucccaaaugccucaacuguacagaucuggacguggcucuuggacgcccuaagugcaccggcaagauucccucugccagagucagcauccugcacgaggugcggccuguuacauccggguguuuucccaucaugcaugaucgcaccaaaauuagacaacucccuaaucugcugcggggauacgaacacauccgccucucuacgcauaacgugauuaaugccgagaacgcuccgggcggccccuauaucauugggacaagcggauccugcccuaaugucaccaacggcaauggguucuuugccacaauggcuugggccgugcccaagaacgacaaaaauaagaccgcgaccaacccucugacaaucgaagugcccuacauuuguacggagggagaggaucagaucaccgucuggggcuuccacagcgacaaugaaacacagauggccaaacuuuauggggauucuaacccgcagaaguuuaccuccagcgcuaacggaguuacaacccacuacgugucucaaaucggcggcuucccuaaucagacggaggacgggggacugccccaguccggcagaauuguggucgauuauauggugcagaaguccgggaaaacaggaaccaucaccuaccaacggggcauucuccugccucagaagguuuggugcgccucugggcgcuccaaagugaucaagggaagccuuccccugauuggcgaagcugacugucuccaugagaaauauggcgggcugaacaaguccaaacccuacuacacaggagagcacgccaaggcgaucggcaauugcccuaucugggucaagaccccgcugaaacucgccaacgggacaaaguauagacccccugcuaaacugcuuaaggaacggggauuuuucggcgccauugcuggguuucuggagggcggaugggaaggcaugaucgccggguggcauggauacacgucucacggcgcccacgggguggcuguugcggccgaucucaaaagcacccaggaggcuauuaauaagaucacaaagaaccugaauagccuuagcgaacuggaggugaaaaaccuccagcgccugucuggagccauggacgagcugcauaaugaaauucucgagcuggaugaaaaggucgacgaccuuagagccgauaccaucuccagccaaaucgagcuggcugugcuccugucuaacgaaggcauuaucaauagcgaggacgagcaccuucuggcccucgaacggaaacugaagaaaaugcuggggcccuccgcggucgagauuggcaacggauguuucgaaacaaagcauaagugcaaucagaccugccucgaucgcaucgcugccggcacguuugacgccggggaguucucucugccuaccuuugauagccuuaacauuacagcugccucccugaaugacgauggacucgacaaccacaccauccugcuguauuacagcacagcugccucuucccuugcggugacccucaugauugccaucuucguuguguauauggucagcagagauaacgugucuuguuccaucugccuguga

SEQ ID NO: 220372 - RNA, 1758 nt, Artificial Sequence; identical to SEQ ID NO: 219937
  derived and/or modified CDS sequence (opt5) from hemagglutinin__InfluenzaB__AIC73856

SEQ ID NO: 220373 - RNA, 1758 nt, Artificial Sequence; identical to SEQ ID NO: 219937
  derived and/or modified CDS sequence (opt5) from hemagglutinin__InfluenzaB__AIC73857

SEQ ID NO: 220374 - RNA, 1758 nt, Artificial Sequence; identical to SEQ ID NO: 219937
  derived and/or modified CDS sequence (opt5) from hemagglutinin__InfluenzaB__AIC73859

SEQ ID NO: 220375 - RNA, 1758 nt, Artificial Sequence
  derived and/or modified CDS sequence (opt5) from hemagglutinin__InfluenzaB__AIC73860
augaaggccaucauugugcugcucauggucguuaccagcaacgcugacagaaucugcacaggcauuacguccucuaauagcccccacguggugaaaaccgccacacagggggaggucaacgugaccggaguuaucccucugacaaccacaccgaccaagucccauuucgcgaaucuuaaaggcacggaaacccgggggaagcugugucccaaaugccucaacuguacagaucuggacguggcucuuggacgcccuaagugcaccggcaagauucccucugccagagucagcauccugcacgaggugcggccuguuacauccggguguuuucccaucaugcaugaucgcaccaaaauuagacaacucccuaaucugcugcggggauacgaacacauccgccucucuacgcauaacgugauuaaugccgagaacgcuccgggcggccccuauaagaucgggacaagcggauccugcccuaaugucaccaacggcaauggguucuuugccacaauggcuugggccgugcccaaaaacgacaagaauaaaaccgcgaccaacccucugacaauugaagugcccuacaucuguacggagggagaggaucagauuaccgucuggggcuuccacagcgacaaugaaacacagauggccaaacuuuauggggauucuaacccgcagaaguuuaccuccagcgcuaacggaguuacaacccacuacgugucucaaaucggcggcuucccuaaucagacggaggacgggggacugccccaguccggcagaaucguggucgauuauauggugcagaaaagcgggaagacaggaaccauuaccuaccaacggggcauccuccugccucagaaaguuuggugcgccucugggcgcuccaaggugauuaaaggaagccuuccccugaucggcgaagcugacugucuccaugagaaguauggcgggcugaacaaauccaagcccuacuacacaggagagcacgccaaggcgauuggcaauugcccuaucugggucaaaaccccgcugaagcucgccaacgggacaaaauauagacccccugcuaagcugcuuaaagaacggggauuuuucggcgccaucgcuggguuucuggagggcggaugggaaggcaugauugccggguggcauggauacacgucucacggcgcccacgggguggcuguugcggccgaucucaagagcacccaggaggcuaucaauaagauuacaaagaaccuuaauucccugagcgaacuggaggugaagaaccuccagcgccugucuggagccauggacgagcugcauaaugaaauccucgagcuggaugaaaaagucgacgaccuuagagccgauaccauguccagccaaauugagcuggcugugcuccugucuaacgaaggcaucaucaauagcgaggacgagcaccuucuggcccucgaacggaagcugaaaaagaugcuggggcccuccgcggucgagauuggcaacggauguuucgaaacaaagcauaaaugcaaucagaccugccucgaucgcaucgcugccggcacguuugacgccggggaguucucucugccuaccuuugauagccuuaacauuacagcugccucccugaaugacgauggacucgacaaccacaccauccugcuguauuacagcacagcugccucuucccuugcggugacccucaugauugccaucuucguuguguauauggucagcagagauaacgugucuuguuccauuugccuguga

SEQ ID NO: 220376 - RNA, 1758 nt, Artificial Sequence
  derived and/or modified CDS sequence (opt5) from hemagglutinin__InfluenzaB__AIC73861
augaaggccaucauugugcugcucauggucguuaccagcaacgcugacagaaucugcacaggcauuacguccucuaauagcccccacguggugaaaaccgccacacagggggaggucaacgugaccggaguuaucccucugacaaccacaccgaccaagucccauuucgcgaaucuuaaaggcacggaaacccgggggaagcugugucccaaaugccucaacuguacagaucuggacguggcucuuggacgcccuaagugcaccggcaagauucccucugccagagucagcauccugcacgaggugcggccuguuacauccggguguuuucccaucaugcaugaucgcaccaaaauuagacaacucccuaaucugcugcggggauacgaacacauccgccucucuacgcauaacgugauuaauacagagaacgccccgggcggccccuauaagaucgggaccagcggauccugcccuaaugucacaaacggcaauggguucuuugcuaccauggccugggcugugcccaaaaacgacaagaauaaaaccgccacaaacccucugacgauugaagugcccuacaucuguaccgagggagaggaucagauuacagucuggggcuuccacagcgacaaugaaacccagauggcgaaacuuuauggggauucuaacccgcagaaguuuacauccagcgccaacggaguuaccauccacuacgugucucaaaucggcggcuucccuaaucagacggaggacgggggacugccccaguccggcagaauuguggucgauuauauggugcagaaaagcgggaagacaggaaccaucaccuaccaacggggcauucuccugccucagaaaguuuggugcgcuucugggcgcuccaaggugaucaaaggaagccuuccccugauuggcgaagccgacugucuccaugagaaguauggcgggcugaacaaauccaagcccuacuacacaggagagcacgcuaaggccaucggcaauugcccuaucugggucaaaaccccgcugaagcucgcgaacgggacaaaauauagacccccugccaagcugcuuaaagaacggggauuuuucggcgcuauugccggguuucuggagggcggaugggaaggcaugaucgcuggguggcauggauacacgucucacggcgcccacgggguggccguugcugcggaucucaagagcacccaggaggccauuaauaagaucacaaagaaccuuaauucccugagcgaacuggaggugaagaaccuccagcgccugucuggagcuauggacgagcugcauaaugaaauucucgagcuggaugaaaaagucgacgaccuuagagccgauaccaucuccagccaaaucgagcuggccgugcuccugucuaacgaaggcauuaucaauagcgaggacgagcaccuucuggcucucgaacggaagcugaaaaagaugcuggggcccuccgccgucgagauuggcaacggauguuucgaaacaaagcauaaaugcaaucagaccugccucgaucgcaucgcggcuggcacguuugacgccggggaguucucucugccuaccuuugauagccuuaacauuacagccgcuucccugaaugacgauggacucgacaaccacaccauccugcuguauuacagcacagccgcuucuucccuugccgugacccucaugauugcgaucuucguuguguauauggucagcagagauaacgugucuuguuccaucugccuguga

SEQ ID NO: 220377 - RNA, 1758 nt, Artificial Sequence; identical to SEQ ID NO: 220375
  derived and/or modified CDS sequence (opt5) from hemagglutinin__InfluenzaB__AIC73862

SEQ ID NO: 220378 - RNA, 1758 nt, Artificial Sequence; identical to SEQ ID NO: 220375
  derived and/or modified CDS sequence (opt5) from hemagglutinin__InfluenzaB__AIC73863

SEQ ID NO: 220379 - RNA, 1758 nt, Artificial Sequence; identical to SEQ ID NO: 220375
  derived and/or modified CDS sequence (opt5) from hemagglutinin__InfluenzaB__AIC73864

SEQ ID NO: 220380 - RNA, 1755 nt, Artificial Sequence
  derived and/or modified CDS sequence (opt5) from hemagglutinin__InfluenzaB__AIC73865
augaaggccaucauugugcugcucauggucguuaccagcaacgcugacagaaucugcacaggcauuacguccucuaauagcccccacguggugaaaaccgccacacagggggaggucaacgugaccggaguuaucccucugacaaccacaccgaccaaguccuacuucgcgaaucuuaaaggcacgaagacccgggggaaacugugucccgauugccucaacuguacagaccuggauguggcucuuggacgcccuaugugcgucggcaccacacccucugccaaggccagcauucugcaugaagugagaccuguuaccuccggguguuuucccaucaugcacgaccggacgaagauccgccaacucgcuaaucugcugagaggauaugagaacauucggcucucuacacagaaugugaucgaugccgaaaaagcuccuggcggcccguaccgccuggggaccagcggauccugccccaacgccacaagcaagucuggcuucuuugcgaccauggccugggcugucccuaaagacaauaacaagaaugccaccaacccccuuacaguggaggugccuuauauuugugcugaaggggaggaucagaucacggucuggggauuccauuccgacaauaaaacccagaugaagaaccuguacggcgauagcaauccccaaaaguuuacaucuuccgccaacgggguuaccacacacuaugugagccagauuggaggcuucccggaccagagagaggauggcgggcucccucagucuggacggaucguggucgacuacaugaugcaaaaacccggcaagaccgggacgauuguguaucagcgcggaguucugcuuccucagaaaguguggugcgcguccggcagaagcaaggucaucaaagggucccugccccucaucggagaagccgauugucugcaugagaaguacggcggccugaacaaaucuaagcccuacuauacaggggaacacgcuaaggccauuggaaauugcccuaucugggugaaaaccccgcucaagcuggcuaacggcaccaaauaccggcccccugccaaacuucugaaagagcgcggguuuuucggagccauugcuggcuuucucgaagggggcugggaaggaaugaucgcgggcuggcacggguauacaagccauggagcccacggcguugcuguggccgccgaccugaaguccacccaggaggcuauuaauaagaucacaaagaaccuuaauagccugucugaacucgaggucaagaaccugcaaagacuguccggggccauggacgaacuccauaaugagauccuggagcuugaugaaaaaguggacgaucugcgggcggacacgauuagcucucagaucgagcucgcuguccugcuuagcaacgaaggaauuaucaauuccgaggaugaacaucugcucgcccuggagcgcaagcugaaaaagaugcucggccccucugccguggacauugggaacggcuguuucgagaccaagcacaaaugcaaucagacaugccuggauagaaucgcugccggaaccuuuaacgcuggcgaguucagccuuccuacauuugacucccugaauaucaccgccgcgagccucaacgaugacgggcuggauaaucacacgauucugcuuuacuauucuaccgccgcuuccagccucgccguuacacugaugcuggcuaucuucauuguguacauggucucucgggacaacguguccuguagcaucugccucuga

SEQ ID NO: 220381 - RNA, 1758 nt, Artificial Sequence
  derived and/or modified CDS sequence (opt5) from hemagglutinin__InfluenzaB__AIC73867
augaaggccaucauugugcugcucauggucguuaccagcaacgcugacagaaucugcacaggcauuacguccucuaauagcccccacguggugaaaaccgccacacagggggaggucaacgugaccggaguuaucccucugacaaccacaccgaccaagucccauuucgcgaaucuuaaaggcacggaaacccgggggaagcugugucccaaaugccucaacuguacagaucuggacguggcucuuggacgcccuaagugcaccggcaagauucccucugccagagucagcauccugcacgaggugcggccuguuacauccggguguuuucccaucaugcaugaucgcaccaaaauuagacaacucccuaaucugcugcggggauacgaacacauccgccucucuacgcauaacgugauugacgccgagaaugcuccgggcggccccuauaagaucgggacaagcggauccugcccuaacgucaccaauggcaacggguucuuugccacaauggcuugggccgugcccaaaaaugauaagaacaaaaccgcgaccaauccucugacaauugaagugcccuacaucuguacggagggagaggaccagauuaccgucuggggcuuccacagcgauaacgaaacacagauggccaaacuuuauggggacucuaauccgcagaaguuuaccuccagcgcuaacggaguuacaacccacuacgugucucaaaucggcggcuucccuaaccagacggaggaugggggacugccccaguccggcagaaucguggucgacuauauggugcagaaaagcgggaagacaggaaccauuaccuaccaacggggcauccuccugccucagaaaguuuggugcgccucugggcgcuccaaggugauuaaaggaagccuuccccugaucggcgaagcugauugucuccaugagaaguauggcgggcugaauaaauccaagcccuacuacacaggagagcacgccaaggcgauuggcaacugcccuaucugggucaaaaccccgcugaagcucgccaaugggacaaaauauagacccccugcuaagcugcuuaaagaacggggauuuuucggcgccaucgcuggguuucuggagggcggaugggaaggcaugauugccggguggcauggauacacgucucacggcgcccacgggguggcuguugcggccgaccucaagagcacccaggaggcuaucaacaagauuacaaagaaucugaacucccuuagcgaacuggaggugaagaaucuccagcgccugucuggagccauggaugagcugcauaacgaaauccucgagcuggacgaaaaagucgacgaucuuagagccgacaccauuuccagccaaaucgagcuggcugugcuccugucuaaugaaggcaucauuaacagcgaggaugagcaccuucuggcccucgaacggaagcugaaaaagaugcuggggcccuccgcggucgagaucggcaauggauguuucgaaacaaagcauaaaugcaaccagaccugccucgaccgcauugcugccggcacguuugaugccggggaguucucucugccuaccuuugacagccuuaauaucacagcugccucccugaacgaugacggacucgauaaucacaccauucugcuguauuacagcacagcugccucuucccuugcggugacccucaugaucgccauuuucguuguguauauggucagcagagacaacgugucuuguuccaucugccuguga

SEQ ID NO: 220382 - RNA, 1758 nt, Artificial Sequence; identical to SEQ ID NO: 218959
  derived and/or modified CDS sequence (opt5) from hemagglutinin__InfluenzaB__AIC73868

SEQ ID NO: 220383 - RNA, 1758 nt, Artificial Sequence; identical to SEQ ID NO: 220375
  derived and/or modified CDS sequence (opt5) from hemagglutinin__InfluenzaB__AIC73869

SEQ ID NO: 220384 - RNA, 1758 nt, Artificial Sequence; identical to SEQ ID NO: 220375
  derived and/or modified CDS sequence (opt5) from hemagglutinin__InfluenzaB__AIC73870

SEQ ID NO: 220385 - RNA, 1758 nt, Artificial Sequence; identical to SEQ ID NO: 219937
  derived and/or modified CDS sequence (opt5) from hemagglutinin__InfluenzaB__AIC73871

SEQ ID NO: 220386 - RNA, 1755 nt, Artificial Sequence; identical to SEQ ID NO: 220361
  derived and/or modified CDS sequence (opt5) from hemagglutinin__InfluenzaB__AIC73872

SEQ ID NO: 220387 - RNA, 1755 nt, Artificial Sequence; identical to SEQ ID NO: 220201
  derived and/or modified CDS sequence (opt5) from hemagglutinin__InfluenzaB__AIC73873

SEQ ID NO: 220388 - RNA, 1755 nt, Artificial Sequence; identical to SEQ ID NO: 220361
  derived and/or modified CDS sequence (opt5) from hemagglutinin__InfluenzaB__AIC73874

SEQ ID NO: 220389 - RNA, 1755 nt, Artificial Sequence; identical to SEQ ID NO: 220380
  derived and/or modified CDS sequence (opt5) from hemagglutinin__InfluenzaB__AIC73875

SEQ ID NO: 220390 - RNA, 1755 nt, Artificial Sequence
  derived and/or modified CDS sequence (opt5) from hemagglutinin__InfluenzaB__AIC73876
augaaggccaucauugugcugcucauggucguuaccagcaacgcugacagaaucugcacaggcauuacguccucuaauagcccccacguggugaaaaccgccacacagggggaggucaacgugaccggaguuaucccucugacaaccacaccgaccaaguccuacuucgcgaaucuuaaaggcacgaagacccgggggaaacugugucccgauugccucaacuguacagaccuggauguggcucuuggacgcccuaugugcgucggcaccacacccucugccaaggccagcauucugcaugaagugagaccuguuaccuccggguguuuucccaucaugcacgaccggacgaagauccgccaacucgcuaaucugcugagaggauaugagaacauucggcucucuacacagaaugugaucgaugccgaaaaagcuccuggcggcccguaccgccuggggaccagcggauccugccccaacgccacaagcaagucuggcuucuuugcgaccauggccugggcugucccuaaagacaauaacaagaaugccaccaacccccuuacaguggaggugccuuauauuugugcugaaggggaggaucagaucacggucuggggauuccauuccgacaauaaaacccagaugaagaaccuguacggcgauagcaauccccaaaaguuuacaucuuccgccaacgggguuaccacacacuaugugagccagauuggaggcuucccggaccagagagaggauggcgggcucccucagucuggacggaucguggucgacuacaugaugcaaaaacccggcaagaccgggacgauuguguaucagcgcggaguucugcuuccucagaaaguguggugcgcguccggcagaagcaaggucaucaaagggucccugccccucaucggagaagccgauugucugcaugagaaguacggcggccugaacaaaucuaagcccuacuauacaggggaacacgcuaaggccauuggaaauugcccuaucugggugaaaaccccgcucaagcuggcuaacggcaccaaauaccggcccccugccaaacuucugaaagagcgcggguuuuucggagccauugcuggcuuucucgaagggggcugggaaggaaugaucgcgggcuggcacggguauacaagccauggagcccacggcguugcuguggccgccgaccugaaguccacccaggaggcuauuaauaagaucacaaagaaccuuaauagccugucugaacucgaggucaagaaccugcaaagacuguccggggccauggacgaacuccauaaugagauccuggagcuugaugaaaaaguggacgaucugcgggcggacacgauuagcucucagaucgagcucgcuguccugcuuagcaacgaaggaauuaucaauuccgaggaugaacaucugcucgcccuggagcgcaagcugaaaaagaugcucggccccucugccguggacauugggaacggcuguuucgagaccaagcacaaaugcaaucagacaugccugaacagaaucgcugccggaaccuuuaaugcuggcgaguucagccuuccuacauuugauucccugaacaucaccgccgcgagccucaaugacgaugggcuggacaaccacacgauucugcuuuacuauucuaccgccgcuuccagccucgccguuacacugaugcuggcuaucuucauuguguacauggucucucgggauaacguguccuguagcaucugccucuga

SEQ ID NO: 220391 - RNA, 1755 nt, Artificial Sequence; identical to SEQ ID NO: 220380
  derived and/or modified CDS sequence (opt5) from hemagglutinin__InfluenzaB__AIC73877

SEQ ID NO: 220392 - RNA, 1755 nt, Artificial Sequence; identical to SEQ ID NO: 220380
  derived and/or modified CDS sequence (opt5) from hemagglutinin__InfluenzaB__AIC73878

SEQ ID NO: 220393 - RNA, 1755 nt, Artificial Sequence; identical to SEQ ID NO: 220380
  derived and/or modified CDS sequence (opt5) from hemagglutinin__InfluenzaB__AIC73879

SEQ ID NO: 220394 - RNA, 1755 nt, Artificial Sequence; identical to SEQ ID NO: 220380
  derived and/or modified CDS sequence (opt5) from hemagglutinin__InfluenzaB__AIC73880

SEQ ID NO: 220395 - RNA, 1755 nt, Artificial Sequence; identical to SEQ ID NO: 220380
  derived and/or modified CDS sequence (opt5) from hemagglutinin__InfluenzaB__AIC73881

SEQ ID NO: 220396 - RNA, 1755 nt, Artificial Sequence; identical to SEQ ID NO: 220380
  derived and/or modified CDS sequence (opt5) from hemagglutinin__InfluenzaB__AIC73882

SEQ ID NO: 220397 - RNA, 1755 nt, Artificial Sequence; identical to SEQ ID NO: 220201
  derived and/or modified CDS sequence (opt5) from hemagglutinin__InfluenzaB__AIC73883

SEQ ID NO: 220398 - RNA, 1755 nt, Artificial Sequence; identical to SEQ ID NO: 220380
  derived and/or modified CDS sequence (opt5) from hemagglutinin__InfluenzaB__AIC73884

SEQ ID NO: 220399 - RNA, 1758 nt, Artificial Sequence
  derived and/or modified CDS sequence (opt5) from hemagglutinin__InfluenzaB__AIC73885
auggaagccaucauugugcugcucauggucguuaccagcaacgcugacagaaucugcacaggcauuacguccucuaauagcccccacguggugaagaccgccacacagggggaagucaacgugaccggaguuaucccucugacaaccacaccgaccaaaucccauuucgcgaaucuuaagggcacggagacccgggggaaacugugucccaagugccucaacuguacagaucuggacguggcucuuggacgcccuaaaugcaccggcaagauucccucugccagagucagcauccugcacgaagugcggccuguuacauccggguguuuucccaucaugcaugaucgcaccaagauuagacaacucccuaaucugcugcggggauacgagcacauccgccucucuacgcauaacgugauuaaugccgaagacgcuccgggcggccccuauaaaaucgggacaagcggauccugcccuaacgucaccaauggcaacggguucuuugccacaauggcuugggccgugcccaagaaugauaaaaacaagaccgcgaccaauccucugacaauugaggugcccuacaucuguacggagggagaagaccagauuaccgucuggggcuuccacagcgauaacgagacacagauggccaaacuuuauggggacucuaagccgcagaaguuuaccuccagcgcuaauggaguuacaacccacuacgugucucaaaucggcggcuucccuaaccagacggaagaugggggacugccccaguccggcagaaucguggucgacuauauggugcagaaaagcgggaagacaggaaccauuaccuaccaacggggcauccuccugccucagaaaguuuggugcgccucugggcgcuccaaggugauuaaaggaagccuuccccugaucggcgaggcugauugucuccaugagaaguauggcgggcugaacaaauccaagcccuacuacacaggagaacacgccaaggcgauuggcaauugcccuaucugggucaaaaccccgcugaagcucgccaacgggacaaaauauagacccccugcuaagcugcuuaaagagcggggauuuuucggcgccaucgcuggguuucuggaaggcggaugggagggcaugauugccggguggcauggauacacgucucacggcgcccacgggguggcuguugcggccgaccucaagagcacccaggaagcuaucaauaagauuaccaaaaaccuuaauucccugagcgagcuggaggugaagaaccuccagcgccugucuggagccauggaugaacugcauaaugagauccucgaacuggacgagaaagucgacgaucuuagagccgacacaauuuccagccaaaucgaacuggcugugcuccugucuaacgagggcaucauuaauagcgaggaugaacaccuucuggcccucgagcggaagcugaaaaagaugcuggggcccuccgcggucgaaaucggcaacggauguuucgagacaaagcauaaaugcaaucagaccugccucgaccgcauugcugccggcacguuugaugccggggaguucucucugccuaccuuugacagccuuaacaucacagcugccucccugaaugaugacggacucgauaaccacaccauucugcuguauuacagcacagcugccucuucccuugcggugacccucaugaucgccauuuucguuguguauauggucagcagagacaaugugucuuguuccaucugccuguga

SEQ ID NO: 220400 - RNA, 1758 nt, Artificial Sequence; identical to SEQ ID NO: 219937
  derived and/or modified CDS sequence (opt5) from hemagglutinin__InfluenzaB__AIC73886

SEQ ID NO: 220401 - RNA, 1758 nt, Artificial Sequence; identical to SEQ ID NO: 220381
  derived and/or modified CDS sequence (opt5) from hemagglutinin__InfluenzaB__AIC73887

SEQ ID NO: 220402 - RNA, 1755 nt, Artificial Sequence; identical to SEQ ID NO: 220201
  derived and/or modified CDS sequence (opt5) from hemagglutinin__InfluenzaB__AIC73888

SEQ ID NO: 220403 - RNA, 1755 nt, Artificial Sequence; identical to SEQ ID NO: 220361
  derived and/or modified CDS sequence (opt5) from hemagglutinin__InfluenzaB__AIC73889

SEQ ID NO: 220404 - RNA, 1755 nt, Artificial Sequence; identical to SEQ ID NO: 220361
  derived and/or modified CDS sequence (opt5) from hemagglutinin__InfluenzaB__AIC73890

SEQ ID NO: 220405 - RNA, 1758 nt, Artificial Sequence
  derived and/or modified CDS sequence (opt5) from hemagglutinin__InfluenzaB__AIC73892
augaaggccaucauugugcugcucauggucguuaccagcaacgcugacagaaucugcacaggcauuacguccucuaauagcccccacguggugaaaaccgccacacagggggaggucaacgugaccggaguuaucccucugacaaccacaccgaccaagucccauuucgcgaaucuuaaaggcacggaaacccgggggaagcugugucccaaaugccucaacuguacagaucuggacguggcucuuggacgcccuaagugcaccggcaagauucccucugccagagucagcauccugcacgaggugcggccuguuacauccggguguuuucccaucaugcaugaucgcaccaaaauuagacaacucccuaaucugcugcggggauacgaacacauccgccucucuacgcauaacgugauuaaugccgaggacgcuccgggcggccccuauaagaucgggacaagcggauccugcccuaacgucaccaauggcaacggguucuuugccacaauggcuugggccgugcccaaaaaugauaagaacaaaaccgcgaccaauccucugacaauugaagugcccuacaucuguacggagggagaggaccagauuaccgucuggggcuuccacagcgauaacgaaacacagauggccaaacuuuauggggacucuaagccgcagaaguuuaccuccagcgcuaauggaguuacaacccacuacgugucucaaaucggcggcuucccuaaccagacggaggaugggggacugccccaguccggcagaaucguggucgacuauauggugcaaaagagcgggaaaacaggaaccauuaccuaccagcggggcauccuccugccucagaagguuuggugcgccucugggcgcuccaaagugauuaagggaagccuuccccugaucggcgaagcugauugucuccaugagaaauauggcgggcugaacaaguccaagcccuacuacacaggagagcacgccaaagcgauuggcaauugcccuaucugggucaagaccucucugaaacucgccaacgggacaaaguauagaccgcccgcuaaacugcuuaaggaacggggauuuuucggcgccaucgcuggguuucuggagggcggaugggaaggcaugauugccggguggcauggauacacgagccacggcgcccacgggguggcuguugcggccgaccucaaguccacccaggaggcuaucaauaaaauuacaaagaaccugaauagccuuucugaacuggaggugaaaaaccuccagcgccuguccggagccauggaugagcugcauaaugaaauccucgagcuggacgaaaaggucgacgaucuuagagccgacaccauuagcucucaaaucgagcuggcugugcuccugagcaacgaaggcaucauuaauuccgaggaugagcaccuucuggcccucgaacggaaacugaagaagaugcuggggccuucugcggucgagaucggcaacggauguuucgaaacaaaacauaagugcaaucagaccugccucgaccgcauugcugccggcacguuugaugccggggaguucagccugcccaccuuugacucccuuaacaucacagcugccagccugaaugaugacggacucgauaaccacaccauucugcuguauuacucuacagcugccuccagccuugcggugacccucaugaucgccauuuucguuguguauauggucucuagagacaauguguccuguagcaucugccuguga

SEQ ID NO: 220406 - RNA, 1755 nt, Artificial Sequence; identical to SEQ ID NO: 220201
  derived and/or modified CDS sequence (opt5) from hemagglutinin__InfluenzaB__AIC73893

SEQ ID NO: 220407 - RNA, 1755 nt, Artificial Sequence; identical to SEQ ID NO: 220361
  derived and/or modified CDS sequence (opt5) from hemagglutinin__InfluenzaB__AIC73894

SEQ ID NO: 220408 - RNA, 1755 nt, Artificial Sequence; identical to SEQ ID NO: 220361
  derived and/or modified CDS sequence (opt5) from hemagglutinin__InfluenzaB__AIC73895

SEQ ID NO: 220409 - RNA, 1755 nt, Artificial Sequence; identical to SEQ ID NO: 220361
  derived and/or modified CDS sequence (opt5) from hemagglutinin__InfluenzaB__AIC73896

SEQ ID NO: 220410 - RNA, 1755 nt, Artificial Sequence; identical to SEQ ID NO: 220361
  derived and/or modified CDS sequence (opt5) from hemagglutinin__InfluenzaB__AIC73897

SEQ ID NO: 220411 - RNA, 1755 nt, Artificial Sequence; identical to SEQ ID NO: 220361
  derived and/or modified CDS sequence (opt5) from hemagglutinin__InfluenzaB__AIC73898

SEQ ID NO: 220412 - RNA, 1755 nt, Artificial Sequence; identical to SEQ ID NO: 220361
  derived and/or modified CDS sequence (opt5) from hemagglutinin__InfluenzaB__AIC73899

SEQ ID NO: 220413 - RNA, 1755 nt, Artificial Sequence; identical to SEQ ID NO: 220361
  derived and/or modified CDS sequence (opt5) from hemagglutinin__InfluenzaB__AIC73900

SEQ ID NO: 220414 - RNA, 1755 nt, Artificial Sequence; identical to SEQ ID NO: 220361
  derived and/or modified CDS sequence (opt5) from hemagglutinin__InfluenzaB__AIC73902

SEQ ID NO: 220415 - RNA, 1755 nt, Artificial Sequence
  derived and/or modified CDS sequence (opt5) from hemagglutinin__InfluenzaB__AIC73903
augaaggccaucauugugcugcucauggucguuaccagcaacgcugacagaaucugcacaggcauuacguccucuaauagcccccacguggugaaaaccgccacacagggggaagucaacgugaccggaguuaucccucugacaaccacaccgaccaaguccuacuucgcgaaucuuaaaggcacgcggacccgcgggaagcugugucccgauugccucaacuguacagaccuggauguggcucuuggaagaccuaugugcgucggcaccacacccucugccaaagccagcauucugcaugaagugcggccuguuaccuccggguguuuucccaucaugcacgaccgcacgaagaucagacaacucccuaaucugcugcggggauaugagaagauucgccucucuacacagaacgugaucgaugcugaaaaagccccgggcggccccuacagacuggggaccagcggauccugcccuaaugcuacaagcaagauuggcuucuuugccaccauggcgugggccguccccaaagacaacuauaagaaugcuaccaacccucagacaguggaggugcccuacaucuguacggaaggggaggaucagauuaccgucuggggauuccauucugacaauaaaacacaaaugaagucccuuuauggcgauagcaacccgcagaaguuuaccucuuccgccaaugggaucacaacccacuacguuagccagauuggagacuucccugaucagacggaggacggcggccugccccaaucugggcggaucgugguggauuauaugaugcagaaaccuggaaagacaggcaccaucgucuaccagcgcggggugcuccugccccagaaaguuuggugcgcuuccggaagaagcaaggugauuaaaggcucccuuccccugaucggggaagccgacugucuccaugaggaauacggaggccugaacaagucuaaaccuuauuacaccggcaagcacgcgaaggccauugggaauugcccgaucugggucaaaacaccccugaagcucgcuaacggaaccaaauaucggccucccgccaagcugcuuaaagagcgcggcuuuuucggggcuauugccggauuucuggagggcgggugggaaggcaugaucgccggauggcacggcuacacaagccauggggcucacggaguggcgguugccgcugaccucaaguccacgcaagaggccaucaacaagauuaccaaaaaucugaacagccuuucugaacuggaggugaagaaucuccagagacuguccggcgccauggaugaacugcauaacgagauccucgagcuggacgaaaaagucgaugaccuucgggcugauacaauuagcucucagaucgagcuggccgugcuccugagcaaugaagggauuaucaacuccgaggacgaacaccuucuggcgcucgagcgcaagcugaaaaagaugcugggaccuucugcugucgauaucggcaauggguguuucgagaccaagcacaaaugcaaccaaacaugccucgacagaauugccgccggcaccuuuaaugcuggagaguucagccugcccacguuugauucccuuaacaucaccgccgcuagccugaaugacgauggccucgacaaccauacaauucugcuguauuacucuaccgccgcguccagccuugccgugacacucaugcuggcuaucuucauuguuuauauggugucucgggacaaugucuccuguagcaucugccuguga

SEQ ID NO: 220416 - RNA, 1755 nt, Artificial Sequence
  derived and/or modified CDS sequence (opt5) from hemagglutinin__InfluenzaB__AIC73904
augaaggccaucauugugcugcucauggucguuaccagcaacgcugacagaaucugcacaggcauuacguccucuaauagcccccacguggugaaaaccgccacacagggggaagucaacgugaccggaguuaucccucugacaaccacaccgaccaaguccuacuucgcgaaucuuaaaggcacgcggacccgcgggaagcugugucccgauugccucaacuguacagaccuggauguggcucuuggaagaccuaugugcgucggcauuacccccucugccaaagccagcauccugcaugaagugcggccuguuacauccggguguuuucccaucaugcacgaccgcaccaagauuagacaacucccuaaucugcugcggggauaugagaagauccgccucucuacgcagaacgugauugaugcugaaaaagccccgggcggccccuacagacuggggacaagcggauccugcccuaaugcuaccagcaagaucggcuucuuugccacaauggcgugggccguccccaaagacaacuauaagaaugcuaccaacccucagaccguggaggugcccuacauuuguacagaaggggaggaucagaucacggucuggggauuccauucugacaauaaaacccaaaugaagucccuuuauggcgauagcaacccgcagaaguuuacaucuuccgccaaugggguuaccacacacuacgugagccagauuggagacuucccugaucagaccgaggacggcggccugccccaaucugggcggaucguggucgauuauaugaugcagaaaccuggaaagacgggcacaaucguguaccagcgcgggguucuccugccccagaaaguguggugcgcuuccggaagaagcaaggucauuaaaggcucccuuccccugaucggggaagccgacugucuccaugaggaauacggaggccugaacaagucuaaaccuuauuacaccggcaagcacgcgaaggccauugggaauugcccgaucugggugaaaacaccccugaagcucgcuaacggaaccaaauaucggccucccgccaagcugcuuaaagagcgcggcuuuuucggggcuauugccggauuucuggagggcgggugggaaggcaugaucgccggauggcacggcuacaccagccauggggcucacggaguugcgguggccgcugaccucaaguccacacaagaggccaucaacaagauuacgaaaaaucugaacagccuuucugaacuggaggucaagaaucuccagagacuguccggcgccauggaugaacugcauaacgagauccucgagcuggacgaaaaaguggaugaccuucgggcugauaccauuagcucucagaucgagcuggccguccuccugagcaaugaagggauuaucaacuccgaggacgaacaccuucuggcgcucgagcgcaagcugaaaaagaugcugggaccuucugcuguggauaucggcaauggguguuucgagacaaagcacaaaugcaaccaaaccugccucgacagaauugccgccggcacauuuaaugcuggagaguucagccugcccaccuuugauucccuuaacaucacggccgcuagccugaaugacgauggccucgacaaccauaccauucugcuguauuacucuacagccgcguccagccuugccguuacccucaugcuggcuaucuucauuguguauauggucucucgggacaauguguccuguagcaucugccuguga

SEQ ID NO: 220417 - RNA, 1755 nt, Artificial Sequence; identical to SEQ ID NO: 220361
  derived and/or modified CDS sequence (opt5) from hemagglutinin__InfluenzaB__AIC73905

SEQ ID NO: 220418 - RNA, 1755 nt, Artificial Sequence; identical to SEQ ID NO: 220361
  derived and/or modified CDS sequence (opt5) from hemagglutinin__InfluenzaB__AIC73906

SEQ ID NO: 220419 - RNA, 1755 nt, Artificial Sequence; identical to SEQ ID NO: 220361
  derived and/or modified CDS sequence (opt5) from hemagglutinin__InfluenzaB__AIC73907

SEQ ID NO: 220420 - RNA, 1755 nt, Artificial Sequence; identical to SEQ ID NO: 220361
  derived and/or modified CDS sequence (opt5) from hemagglutinin__InfluenzaB__AIC73908

SEQ ID NO: 220421 - RNA, 1755 nt, Artificial Sequence; identical to SEQ ID NO: 220361
  derived and/or modified CDS sequence (opt5) from hemagglutinin__InfluenzaB__AIC73909

SEQ ID NO: 220422 - RNA, 1755 nt, Artificial Sequence; identical to SEQ ID NO: 220361
  derived and/or modified CDS sequence (opt5) from hemagglutinin__InfluenzaB__AIC73910

SEQ ID NO: 220423 - RNA, 1755 nt, Artificial Sequence; identical to SEQ ID NO: 220361
  derived and/or modified CDS sequence (opt5) from hemagglutinin__InfluenzaB__AIC73911

SEQ ID NO: 220424 - RNA, 1755 nt, Artificial Sequence; identical to SEQ ID NO: 220361
  derived and/or modified CDS sequence (opt5) from hemagglutinin__InfluenzaB__AIC73912

SEQ ID NO: 220425 - RNA, 1755 nt, Artificial Sequence; identical to SEQ ID NO: 220361
  derived and/or modified CDS sequence (opt5) from hemagglutinin__InfluenzaB__AIC73913

SEQ ID NO: 220426 - RNA, 1755 nt, Artificial Sequence; identical to SEQ ID NO: 220361
  derived and/or modified CDS sequence (opt5) from hemagglutinin__InfluenzaB__AIC73914

SEQ ID NO: 220427 - RNA, 1755 nt, Artificial Sequence; identical to SEQ ID NO: 220361
  derived and/or modified CDS sequence (opt5) from hemagglutinin__InfluenzaB__AIC73915

SEQ ID NO: 220428 - RNA, 1755 nt, Artificial Sequence; identical to SEQ ID NO: 220361
  derived and/or modified CDS sequence (opt5) from hemagglutinin__InfluenzaB__AIC73916

SEQ ID NO: 220429 - RNA, 1755 nt, Artificial Sequence; identical to SEQ ID NO: 220361
  derived and/or modified CDS sequence (opt5) from hemagglutinin__InfluenzaB__AIC73917

SEQ ID NO: 220430 - RNA, 1755 nt, Artificial Sequence; identical to SEQ ID NO: 220361
  derived and/or modified CDS sequence (opt5) from hemagglutinin__InfluenzaB__AIC73918

SEQ ID NO: 220431 - RNA, 1755 nt, Artificial Sequence; identical to SEQ ID NO: 220201
  derived and/or modified CDS sequence (opt5) from hemagglutinin__InfluenzaB__AIC73919

SEQ ID NO: 220432 - RNA, 1755 nt, Artificial Sequence; identical to SEQ ID NO: 220361
  derived and/or modified CDS sequence (opt5) from hemagglutinin__InfluenzaB__AIC73920

SEQ ID NO: 220433 - RNA, 1758 nt, Artificial Sequence; identical to SEQ ID NO: 219937
  derived and/or modified CDS sequence (opt5) from hemagglutinin__InfluenzaB__AIC73921

SEQ ID NO: 220434 - RNA, 1755 nt, Artificial Sequence; identical to SEQ ID NO: 220361
  derived and/or modified CDS sequence (opt5) from hemagglutinin__InfluenzaB__AIC73922

SEQ ID NO: 220435 - RNA, 1758 nt, Artificial Sequence; identical to SEQ ID NO: 218959
  derived and/or modified CDS sequence (opt5) from hemagglutinin__InfluenzaB__AIC73924

SEQ ID NO: 220436 - RNA, 1758 nt, Artificial Sequence
  derived and/or modified CDS sequence (opt5) from hemagglutinin__InfluenzaB__AIC73925
augaaggccaccaucgugcugcucauggucguuacaagcaacgcugacagaauuugcacgggcaucaccuccucuaauagcccccacguggugaaaacagccacccagggggaggucaacgugacaggaguuauuccucugaccacaaccccgacgaagucccauuucgcgaaucuuaaaggcaccgaaacacgggggaagcugugucccaaaugccucaacuguaccgaucuggacguggcucuuggacgcccuaagugcacaggcaagauccccucugccagagucagcauucugcacgaggugcggccuguuaccuccggguguuuucccaucaugcaugaucgcacgaaaaucagacaacucccuaaucugcugcggggauacgaacacauucgccucucuacacauaacgugaucaaugccgaggacgcuccgggcggccccuauaagauugggaccagcggauccugcccuaacgucacaaauggcaacggguucuuugccaccauggcuugggccgugcccaaaaaugauaagaacaaaaccgcgacaaauccucugacgaucgaagugcccuacauuuguaccgagggagaggaccagaucacagucuggggcuuccacagcgauaacgaaacccagauggccaagcuguauggggacucuaagccgcagaaauuuacauccagcgcuaauggaguuaccacgcacuacgugucucaaauuggcggcuucccuaaccagacagaggaugggggacugccccaguccggcagaaucguggucgacuauauggugcaaaagagcgggaaaaccggaaccaucacauaccagcggggcauucuccugccucagaagguuuggugcgccucugggcgcuccaaagugaucaagggaagccuuccccugauuggcgaagcugauugucuccaugagaaauauggcgggcugaacaaguccaagcccuacuacaccggagagcacgccaaagcgaucggcaauugcccuauuugggucaagacaccgcugaaacucgccaacgggacgaaguauagacccccugcuaaacugcuuaaggaacggggauuuuucggcgccaucgcuggguuucuggagggcggaugggaaggcaugaucgccggguggcauggauacaccucucacggcgcccacgggguggcuguugcggccgaccucaagagcacacaggaggcuauuaauaaaaucaccaagaaccuuaauucccuuagcgaacuggaggugaaaaaccuccagcgccugucuggagccauggaugagcugcauaaugaaauucucgagcuggacgaaaaggucgacgaucuuagagccgacacaaucuccagccaaauugagcuggcugugcuccugucuaacgaaggcaucaucaauagcgaggaugagcaccuucuggcccucgaacggaaacugaagaagaugcuggggcccuccgcggucgagauuggcaacggauguuucgaaaccaaacauaagugcaaucagacgugccucgaccgcaucgcugccggcaccuuugaugccggggaguucucucugccuacauuugacagccuuaacauuaccgcugccucccugaaugaugacggacucgauaaccacacaauccugcuguauuacagcaccgcugccucuucccuugcggugacgcucaugauugccaucuucguuguguauauggucagcagagacaaugugucuuguuccauuugccuguga

SEQ ID NO: 220437 - RNA, 1755 nt, Artificial Sequence; identical to SEQ ID NO: 220361
  derived and/or modified CDS sequence (opt5) from hemagglutinin__InfluenzaB__AIC73926

SEQ ID NO: 220438 - RNA, 1755 nt, Artificial Sequence; identical to SEQ ID NO: 218639
  derived and/or modified CDS sequence (opt5) from hemagglutinin__InfluenzaB__AIL94977

SEQ ID NO: 220439 - RNA, 1755 nt, Artificial Sequence; identical to SEQ ID NO: 218639
  derived and/or modified CDS sequence (opt5) from hemagglutinin__InfluenzaB__AIL94988

SEQ ID NO: 220440 - RNA, 1755 nt, Artificial Sequence
  derived and/or modified CDS sequence (opt5) from hemagglutinin__InfluenzaB__AIL94999
augaaggccaucauugugcugcucauggucguuaccagcaacgcugacagaaucugcacaggcauuacguccucuaauagcccccacguggugaaaaccgccacacagggggaagucaacgugaccggaguuaucccucugacaaccacaccgaccaaguccuacuucgcgaaucuuaaaggcacgcggacccgcgggaagcugugucccgauugccucaacuguacagaccuggauguggcucuuggaagaccuaugugcgucggcaccacacccucugccaaagccagcauucugcaugaagugcggccuguuaccuccggguguuuucccaucaugcacgaccgcacgaagaucagacaacucccuaaucugcugcggggauaugagaacauucgccucucuacacagaaugugaucgaugcugaaaaggccccgggcggccccuacagacuggggaccagcggauccugcccuaacgcuacaagcaaaaccggcuucuuugccaccauggcgugggccguccccaaggacaauuauaaaaacgcuacaaauccucuuacgguggaggugcccuacauuuguaccgaaggggaggaucagaucacagucuggggauuccauucugacaacaagacccagaugaaaaaucuguauggcgauuccaacccgcaaaaguuuacaagcucugccaaugggguuaccacgcacuacgugucccagauuggagacuucccugaucagacagaggacggcggccucccccagagcgggcggaucguggucgauuauaugaugcaaaagccuggaaaaaccggcaccauuguguaccagcgcgggguucugcuuccccagaagguguggugcgcuucuggaagauccaaagucaucaagggcagccugccccucaucggggaagccgacugucugcaugagaaauacggaggccugaacaaguccaaaccuuauuacacaggcgaacacgcgaaggccauugggaacugcccgaucugggugaagacaccccucaaacuggcuaauggaaccaaguaucggccucccgccaaacuucugaaggagcgcggcuuuuucggggcuauugccggauuucucgagggcgggugggaaggcaugaucgccggauggcacggcuacacgucucauggggcucacggaguugcgguggccgcugaccugaaaagcacccaggaggccauuaacaagaucacaaagaaucuuaacucccugagcgaacucgaggucaaaaaucugcaaagacugucuggcgccauggaugaacuccauaacgagauccuggagcuugacgaaaagguggaugaccugcgggcugauaccauuuccagccagaucgagcucgccguccugcuuucuaaugaagggauuaucaacagcgaggacgaacaucugcucgcgcuggagcgcaaacugaagaaaaugcucggaccuuccgcuguggauauuggcaauggguguuucgagacaaagcacaagugcaaccagaccugccuggacagaaucgccgccggcacguuuaaugcuggagaguucucucuucccaccuuugauagccugaacaucacagccgcuucccucaaugacgauggccuggacaaccacaccauucugcuuuauuacagcacagccgcgucuucccucgccguuacccugaugcuggcuaucuucauuguguauauggucagccgggacaaugugucuuguuccaucugccucuga

SEQ ID NO: 220441 - RNA, 1755 nt, Artificial Sequence; identical to SEQ ID NO: 218639
  derived and/or modified CDS sequence (opt5) from hemagglutinin__InfluenzaB__AIL95010

SEQ ID NO: 220442 - RNA, 1755 nt, Artificial Sequence; identical to SEQ ID NO: 218892
  derived and/or modified CDS sequence (opt5) from hemagglutinin__InfluenzaB__AIL95021

SEQ ID NO: 220443 - RNA, 1758 nt, Artificial Sequence; identical to SEQ ID NO: 218720
  derived and/or modified CDS sequence (opt5) from hemagglutinin__InfluenzaB__AIL95032

SEQ ID NO: 220444 - RNA, 1755 nt, Artificial Sequence; identical to SEQ ID NO: 218892
  derived and/or modified CDS sequence (opt5) from hemagglutinin__InfluenzaB__AIL95043

SEQ ID NO: 220445 - RNA, 1758 nt, Artificial Sequence; identical to SEQ ID NO: 218766
  derived and/or modified CDS sequence (opt5) from hemagglutinin__InfluenzaB__AIL95054

SEQ ID NO: 220446 - RNA, 1758 nt, Artificial Sequence; identical to SEQ ID NO: 218720
  derived and/or modified CDS sequence (opt5) from hemagglutinin__InfluenzaB__AIL95065

SEQ ID NO: 220447 - RNA, 1758 nt, Artificial Sequence; identical to SEQ ID NO: 218717
  derived and/or modified CDS sequence (opt5) from hemagglutinin__InfluenzaB__AIL95076

SEQ ID NO: 220448 - RNA, 1758 nt, Artificial Sequence; identical to SEQ ID NO: 218720
  derived and/or modified CDS sequence (opt5) from hemagglutinin__InfluenzaB__AIL95087

SEQ ID NO: 220449 - RNA, 1755 nt, Artificial Sequence; identical to SEQ ID NO: 218892
  derived and/or modified CDS sequence (opt5) from hemagglutinin__InfluenzaB__AIL95098

SEQ ID NO: 220450 - RNA, 1758 nt, Artificial Sequence; identical to SEQ ID NO: 220231
  derived and/or modified CDS sequence (opt5) from hemagglutinin__InfluenzaB__AIL95109

SEQ ID NO: 220451 - RNA, 1758 nt, Artificial Sequence
  derived and/or modified CDS sequence (opt5) from hemagglutinin__InfluenzaB__AIL95120
augaaggccaucauugugcugcucauggucguuaccagcaacgcugacagaaucugcacaggcauuacguccucuaauagcccccacguggugaaaaccgccacacagggggaggucaacgugaccggaguuaucccucugacaaccacaccgaccaagucccauuucgcgaaucuuaaaggcacggaaacccgggggaagcugugucccaaaugccucaacuguacagaucuggacguggcucuuggacgcccuaagugcaccggcaagauucccucugccagagucagcauccugcacgaggugcggccuguuacauccggguguuuucccaucaugcaugaucgcaccaaaauuagacaacucccuaaucugcugcggggauacgaacacauccgccucucuacgcauaacgugauuaaugccgagaacgcuccgggcggccccuauaagaucgggacaagcggauccugcccuaaugucaccaacggcaauggguucuuugccacaauggcuugggccgugcccaaaaacgacaagaauaaaaccgcgaccaacccucugacaauugaagugcccuacaucuguacggagggagaggaucagauuaccgucuggggcuuccacagcgacaaugaaacacagauggccaaacuuuauggggauucuaagccgcagaaguuuaccuccagcgcuaacggaguuacaacccacuacgugucucaaaucggcggcuucccuaaccagacggaggacgggggacugccccaguccggcagaaucguggucgauuauauggugcaaaagagcgggaaaacaggaaccauuaccuaccagcggggcauccuccugccucagaagguuuggugcgccucugggcgcuccaaagugauuaagggaagccuuccccugaucggcgaagcugacugucuccaugagaaauauggcgggcugaauaaguccaagcccuacuacacaggagagcacgccaaagcgauuggcaacugcccuaucugggucaagaccccgcugaaacucgccaaugggacaaaguauagacccccugcuaaacugcuuaaggaacggggauuuuucggcgccaucgcuggguuucuggagggcggaugggaaggcaugauugccggguggcauggauacacgucucacggcgcccacgggguggcuguugcggccgaucucaagagcacccaggaggcuaucaacaaaauuacaaagaaucugaacucccuuagcgaacuggaggugaaaaaucuccagcgccugucuggagccauggacgagcugcauaacgaaauccucgagcuggaugaaaaggucgacgaccuuagagccgauaccauuuccagccaaaucgagcuggcugugcuccugucuaaugaaggcaucauuaacagcgaggacgagcaccuucuggcccucgaacggaaacugaagaagaugcuggggcccuccgcggucgagaucggcaauggauguuucgaaacaaaacauaagugcaaccagaccugccucgauaaaauugcugccggcacguuugacgccggggaguucucucugccuaccuuugauagccuuaauaucacagcugccucccugaacgacgauggacucgacaaucacaccauucugcuguauuacagcacagcugccucuucccuugcggugacccucaugaucgccauuuucguuguguauauggucagccgcgauaacgugucuuguuccaucugccuguga

SEQ ID NO: 220452 - RNA, 1755 nt, Artificial Sequence; identical to SEQ ID NO: 220361
  derived and/or modified CDS sequence (opt5) from hemagglutinin__InfluenzaB__AKA54644

SEQ ID NO: 220453 - RNA, 1755 nt, Artificial Sequence
  derived and/or modified CDS sequence (opt5) from hemagglutinin__InfluenzaB__AKA54645
augaaggccaucaccgugcugcucauggucguuacaagcaacgcugacagaauuugcacgggcaucaccuccucuaauagcccccacguggugaaaacagccacccagggggaagucaacgugacaggaguuauuccucugaccacaaccccgacgaaguccuacuucgcgaaucuuaaaggcacccggacacgcgggaagcugugucccgauugccucaacuguaccgaccuggauguggcucuuggaagaccuaugugcgucggcacaacccccucugccaaagccagcauccugcaugaagugcggccuguuacguccggguguuuucccauuaugcacgaccgcacaaagaucagacaacucccuaaucugcugcggggauaugagaagauccgccucucuacccagaacgugauugaugcugaaaaagccccgggcggccccuacagacuggggacaagcggauccugcccuaaugcuaccagcaagaucggcuucuuugccaccauggcgugggccguccccaaagacaacuauaagaaugcuacaaacccucuuacgguggaggugcccuacauuuguaccgaaggggaggaucagaucacagucuggggauuccauucugacaauaaaacccagaugaagucccuguauggcgauagcaacccgcaaaaguuuacaucuuccgccgacgggguuaccacgcacuacgugagccagauuggagauuucccugaccagacagaggauggcggccucccccagucugggcggaucguggucgacuauaugaugcaaaaaccuggaaagaccggcaccauuguguaccagcgcgggguucugcuuccccagaaaguguggugcgcuuccggaagaagcaaggucaucaaaggcucccugccccucaucggggaagccgacugucugcaugaggaauacggaggccugaauaagucuaaaccuuauuacacaggcaagcacgcgaaggccauugggaacugcccgaucugggugaaaacaccccucaagcuggcuaauggaacaaaauaucggccucccgccaagcugcugaaagagcgcggcuuuuucggggcuauugccggauuucucgagggcgggugggaaggcaugaucgccggauggcacggcuacacgagccauggggcucacggaguugcgguggccgcugaucugaaguccacccaggaggccauuaacaagaucaccaaaaaccuuaauagccugucugaacucgaggucaagaaccugcaaagacuguccggcgccauggacgaacuccauaaugagauccuggagcuugaugaaaaaguggacgaucugcgggcugacaccauuagcucucagaucgagcucgccguccugcuuagcaacgaagggauuaucaauuccgaggaugaacaccuucucgcgcuggagcgcaagcugaaaaagaugcucggaccuucugcuguggacauuggcaacggguguuucgagacaaagcacaaaugcaaucagaccugccuggauagaaucgccgccggcacguuuaacgcuggagaguucagccuucccaccuuugacucccugaauaucacagccgcuagccucaacgaugacggccuggacaaucauaccauucugcuuuauuacucuacagccgcguccagccucgccguuacccugaugcuggcuaucuucauuguguauauggucucucgggauaacguguccuguagcaucugccucuga

SEQ ID NO: 220454 - RNA, 1755 nt, Artificial Sequence; identical to SEQ ID NO: 220361
  derived and/or modified CDS sequence (opt5) from hemagglutinin__InfluenzaB__AKA54646

SEQ ID NO: 220455 - RNA, 1755 nt, Artificial Sequence; identical to SEQ ID NO: 220361
  derived and/or modified CDS sequence (opt5) from hemagglutinin__InfluenzaB__AKA54647

SEQ ID NO: 220456 - RNA, 1758 nt, Artificial Sequence; identical to SEQ ID NO: 218959
  derived and/or modified CDS sequence (opt5) from hemagglutinin__InfluenzaB__AKA54648

SEQ ID NO: 220457 - RNA, 1755 nt, Artificial Sequence
  derived and/or modified CDS sequence (opt5) from hemagglutinin__InfluenzaB__AKA54649
augaaggccaucauugugcugcucauggucguuaccagcaacgcugacagaaucugcacaggcauuacguccucuaauagcccccacguggugaaaaccgccacacagggggaagucaacgugaccggaguuaucccucugacaaccacaccgaccaaguccuacuucgcgaaucuuaaaggcacgcggacccgcgggaagcugugucccgauugccucaacuguacagaccuggauguggcucuuggaagaccuaugugcgucggcaccacacccucugccaaagccagcauucugcaugaagugcggccuguuaccuccggguguuuucccaucaugcacgaccgcacgaagaucagacaacucccuaaucugcugcggggauaugagaagauucgccucucuacacagaacgugaucgaugcugaaaaagccccgggcggccccuacagacuggggaccagcggauccugcccuaauacaaccagcaagauuggcuucuuugcuaccauggccugggcgguccccaaagacaacuauaagaaugccacaaacccucuuacgguggaggugcccuacaucuguaccgaaggggaggaucagauuacagucuggggauuccauucugacaauaaaacccagaugaagucccuguauggcgauagcaacccgcaaaaguuuacaucuuccgcuaaugggguuaccacgcacuacgugagccagaucggagacuucccugaucagacagaggacggcggccucccccagucugggcggauuguggucgauuauaugaugcaaaaaccuggaaagaccggcaccaucguguaccagcgcgggguucugcuuccccagaaaguguggugcgccuccggaagaagcaaggucaucaaaggcucccugccccucauuggggaagcugacugucugcaugaggaauacggaggccugaacaagucuaaaccuuauuacacaggcaagcacgccaaggcgaucgggaauugcccgauuugggugaaaacaccccucaagcuggccaacggaacaaaauaucggccucccgcuaagcugcugaaagagcgcggcuuuuucggggccaucgcuggauuucucgagggcgggugggaaggcaugauugccggauggcacggcuacacgagccauggggcccacggaguugcuguggcggccgaccugaaguccacccaggaggcuaucaacaagaucaccaaaaaucuuaacagccugucugaacucgaggucaagaaucugcaaagacuguccggcgccauggaugaacuccauaacgagauucuggagcuugacgaaaaaguggaugaccugcgggccgauaccaucagcucucagauugagcucgcuguccugcuuagcaaugaagggaucauuaacuccgaggacgaacaccuucucgcccuggagcgcaagcugaaaaagaugcucggaccuucugcgguggauaucggcaauggguguuucgagacaaagcacaaaugcaaccagaccugccuggacagaaucgcugccggcacguuuaaugccggagaguucagccuucccaccuuugauucccugaacauuacagcugccagccucaaugacgauggccuggacaaccauaccauccugcuuuauuacucuacagcugccuccagccucgcgguuacccugaugcuggccauuuucaucguguauauggucucucgggacaauguguccuguagcauuugccucuga

SEQ ID NO: 220458 - RNA, 1755 nt, Artificial Sequence; identical to SEQ ID NO: 220361
  derived and/or modified CDS sequence (opt5) from hemagglutinin__InfluenzaB__AKU40581

SEQ ID NO: 220459 - RNA, 1755 nt, Artificial Sequence; identical to SEQ ID NO: 220361
  derived and/or modified CDS sequence (opt5) from hemagglutinin__InfluenzaB__AKU40592

SEQ ID NO: 220460 - RNA, 1755 nt, Artificial Sequence; identical to SEQ ID NO: 220201
  derived and/or modified CDS sequence (opt5) from hemagglutinin__InfluenzaB__AKU40603

SEQ ID NO: 220461 - RNA, 1755 nt, Artificial Sequence; identical to SEQ ID NO: 220361
  derived and/or modified CDS sequence (opt5) from hemagglutinin__InfluenzaB__AKU40614

SEQ ID NO: 220462 - RNA, 1755 nt, Artificial Sequence; identical to SEQ ID NO: 220201
  derived and/or modified CDS sequence (opt5) from hemagglutinin__InfluenzaB__AKU40625

SEQ ID NO: 220463 - RNA, 1755 nt, Artificial Sequence
  derived and/or modified CDS sequence (opt5) from hemagglutinin__InfluenzaB__AKU40636
augaaggccaucauugugcugcucauggucguuaccagcaacgcugacagaaucugcacaggcauuacguccucuaauagcccccacguggugaaaaccgccacacagggggaagucaacgugaccggaguuaucccucugacaaccacaccggcgaaguccuacuucgcuaaucuuaaaggcacccggacgcgcgggaagcugugucccgauugccucaacuguaccgaccuggauguggcccuuggaagaccuaugugcgucggcacaacccccucugccaaagcuagcauucugcaugaagugcggccuguuacauccggguguuuucccaucaugcacgaccgcaccaagaucagacaacucccuaaucugcugcggggauaugagaacauucgccucucuacgaagaaugugaucgaugccgaaaaagcuccgggcggccccuacagacuggggacaagcggauccugcccuaacgccaccagcaagauuggcuucuuugcgacaauggccugggcuguccccaaagacaauuauaagaacgccaccaauccucuuaccguggaggugcccuacaucuguaaagaaggggaggaucagauuacagucuggggauuccauucugacaacaagacgcagaugaagaaucuguauggcgauuccaacccgcagaaauuuaccagcucugcuaaugggguuacaacccacuacgugucccaaaucggagacuucccugaucagacagaggacggcggccucccccagagcgggcggauuguggucgauuauaugaugcagaagccuggaaaaaccggcacgaucguguaccaacgcgggguucugcuuccccagaagguguggugcgccucuggaagauccaaagucaucaagggcagccugccccucauuggggaagcggacugucugcaugaggaauacggaggccugaacaaauccaagccuuauuacacaggcaagcacgccaaagcuaucgggaacugcccgauuugggugaagacaccccucaaacuggccaauggaaccaaguaucggccucccgcuaaacuucugaaggagcgcggcuuuuucggggccaucgccggauuucucgagggcgggugggaaggcaugauugcuggauggcacggcuacaccucucauggggcgcacggaguugccguggcugccgaccuuaagagcacccaggaggccaucaacaaaaucacaaagaaucugaacucccugagcgaacucgaggucaaaaaucugcagagacugucuggcgcuauggaugaacuccauaacgagauucuggagcuugacgaaaagguggaugaccugcgggccgauacgaucuccagccaaauugagcucgcgguccugcuuucuaaugaagggaucauuaacagcgaggacgaacaucugcucgcucuggagcgcaaacugaagaagaugcucggaccuuccgccguggauaucggcaauggguguuucgagaccaaacacaagugcaaccagacaugccuggacagaaucgccgcuggcaccuuuaaugccggagaguucucucuucccacauuugauagccugaacauuaccgcugccucccucaaugacgauggccuggacaaccacacgauccugcuuuauuacagcaccgcggccucuucccucgcuguuacacugaugcuggccauuuucaucguguauauggucagccgggacaaugugucuuguuccauuugccucuga

SEQ ID NO: 220464 - RNA, 1755 nt, Artificial Sequence
  derived and/or modified CDS sequence (opt5) from hemagglutinin__InfluenzaB__AKU40647
augaaggccaucauugugcugcucauggucguuaccagcaacgcugacagaaucugcacaggcauuacguccucuaauagcccccacguggugaaaaccgccacacagggggaagucaacgugaccggaguuaucccucugacaaccacaccgaccaaguccuacuucgcgaaucuuaaaggcacgcggacccgcgggaagcugugucccgauugccucaacuguacagaccuggauguggcucuuggaagaccuaugugcgucggcaccacacccucugccaaagccagcauucugcaugaagugcggccuguuaccuccggguguuuucccaucaugcacgaccgcacgaagaucagacaacucccuaaucugcugcggggauaugagaagauucgccucucuacacagaacgugaucgaugcugaaaaagccccgggcggccccuacagacuggggaccagcggauccugcccuaaugcuacaagcaagauuggcuucuuugccaccauggcgugggccguccccaaagacaacuauaagaaugcuaccaacccucagacaguggagauccccuacauuuguacggaaggggaggaucagaucaccguguggggauuccauucugacaauaaaacacaaaugaagucccuuuauggcgauagcaacccgcagaaguuuaccucuuccgccaauggggucacaacccacuacguuagccagauuggagacuucccugaucagacggaggacggcggccugccccaaucugggcggaucgugguggauuauaugaugcagaaaccuggaaagacaggcaccaucgucuaccagcgcggggugcuccugccccagaaaguuuggugcgcuuccggaagaagcaaggugauuaaaggcucccuuccccugaucggggaagccgacugucuccaugaggaauacggaggccugaacaagucuaaaccuuauuacaccggcaagcacgcgaaggccauugggaauugcccgaucugggucaaaacaccccugaagcucgcuaacggaaccaaauaucggccucccgccaagcugcuuaaagagcgcggcuuuuucggggcuauugccggauuucuggagggcgggugggaaggcaugaucgccggauggcacggcuacacaagccauggggcucacggaguggcgguugccgcugaccucaaguccacgcaagaggccaucaacaagauuaccaaaaaucugaacagccuuucugaacuggaggugaagaaucuccagagacuguccggcgccauggaugaacugcauaacgagauccucgagcuggacgaaaaagucgaugaccuucgggcugauacaauuagcucucagaucgagcuggccgugcuccugagcaaugaagggauuaucaacuccgaggacgaacaccuucuggcgcucgagcgcaagcugaaaaagaugcugggaccuucugcugucgauaucggcaauggguguuucgagaccaagcacaaaugcaaccaaacaugccucgacagaauugccgccggcaccuuuaaugcuggagaguucagccugcccacguuugauucccuuaacaucaccgccgcuagccugaaugacgauggccucgacaaccauacaauucugcuguauuacucuaccgccgcguccagccuugccgugacacucaugcuggcuaucuucauuguuuauauggugucucgggacaaugucuccuguagcaucugccuguga

SEQ ID NO: 220465 - RNA, 1755 nt, Artificial Sequence; identical to SEQ ID NO: 220361
  derived and/or modified CDS sequence (opt5) from hemagglutinin__InfluenzaB__AKU40658

SEQ ID NO: 220466 - RNA, 1755 nt, Artificial Sequence; identical to SEQ ID NO: 220361
  derived and/or modified CDS sequence (opt5) from hemagglutinin__InfluenzaB__AKU40669

SEQ ID NO: 220467 - RNA, 1755 nt, Artificial Sequence; identical to SEQ ID NO: 220361
  derived and/or modified CDS sequence (opt5) from hemagglutinin__InfluenzaB__AKU40680

SEQ ID NO: 220468 - RNA, 1755 nt, Artificial Sequence
  derived and/or modified CDS sequence (opt5) from hemagglutinin__InfluenzaB__AKU40691
augaaggccaucauugugcugcucauggucguuaccagcaacgcugacagaaucugcacaggcauuacguccucuaauagcccccacguggugaaaaccgccacacagggggaggucaacgugaccggaguuaucccucugacaaccacaccgaccaaguccuacuucgcgaaucuuaaaggcacgcggacccgcgggaagcugugucccgauugccucaacuguacagaccuggauguggcucuuggaagaccuaugugcgucggcaccacacccucugccaaagccagcauucugcaugaagugcggccuguuaccuccggguguuuucccaucaugcacgaccgcacgaagaucagacaacucccuaaucugcugcggggauaugagaagauucgccucucuacacagaacgugaucgaugcugaaaaagccccgggcggccccuacagacuggggaccagcggauccugcccuaaugcuacaagcaagauuggcuucuuugccaccauggcgugggccguccccaaagacaacuauaagaaugcuaccaacccucagacaguggaggugcccuacaucuguacggaaggggaggaucagauuaccgucuggggauuccauucugacaauaaaacacaaaugaagucccuuuauggcgauagcaacccgcagaaguuuaccucuuccgccaaugggguuacaacccacuacgugagccagaucggagacuucccugaucagacggaggacggcggccugccccaaucugggcggauuguggucgauuauaugaugcagaaaccuggaaagacaggcaccaucguguaccagcgcgggguucuccugccccagaaaguguggugcgcuuccggaagaagcaaggucaucaaaggcucccuuccccugauuggggaagccgacugucuccaugaggaauacggaggccugaacaagucuaaaccuuauuacaccggcaagcacgcgaaggccaucgggaauugcccgauuugggugaaaacaccccugaagcucgcuaacggaaccaaauaucggccucccgccaagcugcuuaaagagcgcggcuuuuucggggcuaucgccggauuucuggagggcgggugggaaggcaugauugccggauggcacggcuacacaagccauggggcucacggaguugcgguggccgcugaccucaaguccacgcaagaggccaucaacaagaucaccaaaaaucugaacagccuuucugaacuggaggucaagaaucuccagagacuguccggcgccauggaugaguuccauaacgaaauucuggagcucgacgaaaaaguggaugaccugcgggcugauacaaucagcucucagauugagcuugccguccugcucagcaaugaagggaucauuaacuccgaggacgaacaucugcuugcgcuggagcgcaagcucaaaaagaugcugggaccuucugcuguggauaucggcaauggguguuuugagaccaagcacaaaugcaaccaaacaugccuggacagaaucgccgccggcaccuucaaugcuggagaauuuagccuccccacguucgauucccugaacauuaccgccgcuagccuuaaugacgauggccuggacaaccacacaauccuccuguauuacucuaccgccgcguccagccuggccguuacacuuaugcucgcuauuuucaucguguauauggucucucgggacaauguguccuguagcauuugccuguga

SEQ ID NO: 220469 - RNA, 1755 nt, Artificial Sequence; identical to SEQ ID NO: 220361
  derived and/or modified CDS sequence (opt5) from hemagglutinin__InfluenzaB__AKU40702

SEQ ID NO: 220470 - RNA, 1755 nt, Artificial Sequence; identical to SEQ ID NO: 220361
  derived and/or modified CDS sequence (opt5) from hemagglutinin__InfluenzaB__AKU40713

SEQ ID NO: 220471 - RNA, 1755 nt, Artificial Sequence; identical to SEQ ID NO: 220201
  derived and/or modified CDS sequence (opt5) from hemagglutinin__InfluenzaB__AKU40724

SEQ ID NO: 220472 - RNA, 1755 nt, Artificial Sequence; identical to SEQ ID NO: 220464
  derived and/or modified CDS sequence (opt5) from hemagglutinin__InfluenzaB__AKU40735

SEQ ID NO: 220473 - RNA, 1755 nt, Artificial Sequence; identical to SEQ ID NO: 220361
  derived and/or modified CDS sequence (opt5) from hemagglutinin__InfluenzaB__AKU40746

SEQ ID NO: 220474 - RNA, 1755 nt, Artificial Sequence; identical to SEQ ID NO: 220361
  derived and/or modified CDS sequence (opt5) from hemagglutinin__InfluenzaB__AKU40757

SEQ ID NO: 220475 - RNA, 1755 nt, Artificial Sequence; identical to SEQ ID NO: 220361
  derived and/or modified CDS sequence (opt5) from hemagglutinin__InfluenzaB__AKU40768

SEQ ID NO: 220476 - RNA, 1755 nt, Artificial Sequence; identical to SEQ ID NO: 220361
  derived and/or modified CDS sequence (opt5) from hemagglutinin__InfluenzaB__AKU40779

SEQ ID NO: 220477 - RNA, 1755 nt, Artificial Sequence; identical to SEQ ID NO: 220201
  derived and/or modified CDS sequence (opt5) from hemagglutinin__InfluenzaB__AKU40790

SEQ ID NO: 220478 - RNA, 1755 nt, Artificial Sequence; identical to SEQ ID NO: 220361
  derived and/or modified CDS sequence (opt5) from hemagglutinin__InfluenzaB__AKU40801

SEQ ID NO: 220479 - RNA, 1755 nt, Artificial Sequence
  derived and/or modified CDS sequence (opt5) from hemagglutinin__InfluenzaB__AKU40812
augaaggccaucauugugcugcucauggucguuaccagcaacgcugacagaaucugcacaggcauuacguccucuaauagcccccacguggugaaaaccgccacacagggggaagucaacgugaccggaguuaucccucugacaaccacaccgaccaaguccuacuucgcgaaucuuaaaggcacgcggacccgcgggaagcugugucccgauugccucaacuguacagaccuggauguggcucuuggaagaccuaugugcgucggcaccacacccucugccaaagccagcauucugcaugaagugcggccuguuaccuccggguguuuucccaucaugcacgaccgcacgaagaucagacaacucccuaaucugcugcggggauaugagaagauucgccucucuacacagaacgugaucgaugcugaaaaagccccgggcggccccuacagacuggggaccagcggauccugcccuaaugcuacaagcaagauuggcuucuuugccaccauggcgugggccguccccaaagacaacuauaagaaugcuaccaacccucagacaguggaggugcccuacaucuguacggaaggggaggaucagauuaccgucuggggauuccauucugacaauaaaacacaaaugaagucccuuuauggcgauagcaacccgcagaaguuuaccucuuccgccaaugggguuacaacccacuacgugagccagaucggagacuucccugaucagacggaggacggcggccugccccaaucugggcggauuguggucgauuauaugaugcagaaaccuggaaagacaggcaccaucguguaccagcgcgggguucuccugccccagaaaguguggugcgcuuccggaagaagcaaggucaucaaaggcucccuuccccugauuggggaagccgacugucuccaugaggaauacggaggccugaacaagucuaaaccuuauuacaccggcaagcacgcgaaggccaucgggaauugcccgauuugggugaaaacaccccugaagcucgcuaacggaaccaaauaucggccucccgccaagcugcuuaaagagcgcggcuuuuucggggcuaucgccggauuucuggagggcgggugggaaggcaugauugccggauggcacggcuacacaagccauggggcucacggaguugcgguggccgcugaccucaaguccacgcaagaggccaucaacaagaucaccaaaaaucugaacagccuuucugaacuggaggucaagaaucuccagagacuguccggcgccauggaugaacugcauaacgagauucucgagcuggacgaaaaaguggaugaccuucgggcugauacaaucagcucucagauugagcuggccguccuccugagcaaugaagggaucauuaacuccgaggacgaacaccuucuggcgcucgagcgcaagcugaaaaagaugcugggaccuucugcuguggauaucggcaauggguguuucgagaccaagcacaaaugcaaccaaacaugccucgacagaaucgccgccggcaccuuuaaugcuggagaguucagccugcccacguuugauucccuuaacauuaccgccgcuagccugaaugacgauggccucgacucucauacaauccugcuguauuacuccaccgccgcgagcucucuugccguuacacucaugcuggcuauuuucaucguguauauggucucccgggacaacgugagcuguuccauuugccuguga

SEQ ID NO: 220480 - RNA, 1755 nt, Artificial Sequence; identical to SEQ ID NO: 220361
  derived and/or modified CDS sequence (opt5) from hemagglutinin__InfluenzaB__AKU40823

SEQ ID NO: 220481 - RNA, 1755 nt, Artificial Sequence; identical to SEQ ID NO: 220361
  derived and/or modified CDS sequence (opt5) from hemagglutinin__InfluenzaB__AKU40834

SEQ ID NO: 220482 - RNA, 1755 nt, Artificial Sequence; identical to SEQ ID NO: 220361
  derived and/or modified CDS sequence (opt5) from hemagglutinin__InfluenzaB__AKU40845

SEQ ID NO: 220483 - RNA, 1755 nt, Artificial Sequence; identical to SEQ ID NO: 220361
  derived and/or modified CDS sequence (opt5) from hemagglutinin__InfluenzaB__AKU40856

SEQ ID NO: 220484 - RNA, 1755 nt, Artificial Sequence; identical to SEQ ID NO: 220361
  derived and/or modified CDS sequence (opt5) from hemagglutinin__InfluenzaB__AKU40867

SEQ ID NO: 220485 - RNA, 1755 nt, Artificial Sequence; identical to SEQ ID NO: 220361
  derived and/or modified CDS sequence (opt5) from hemagglutinin__InfluenzaB__AKU40878

SEQ ID NO: 220486 - RNA, 1758 nt, Artificial Sequence
  derived and/or modified CDS sequence (opt5) from hemagglutinin__InfluenzaB__AKU40889
augaaggccaucauugugcugcucauggucguuaccagcaacgcugacagaaucugcacaggcauuacguccucuaauagcccccacguggugaaaaccgccacacagggggaggucaacgugaccggaguuaucccucugacaaccacaccgaccaagucccauuucgcgaaucuuaaaggcacggaaacccgggggaagcugugucccaaaugccucaacuguacagaucuggacguggcucuuggacgcccuaagugcaccggcaagauucccucugccagagucagcauccugcacgaggugcggccuguuacauccggguguuuucccaucaugcaugaucgcaccaaaauuagacaacucccuaaucugcugcggggauacgaacacauccgccucucuacgcauaacgugauuaaugccgaggacgcuccgggcggccccuauaagaucgggacaagcggauccugcccuaacgucaccaauggcaacggguucuuugccacaauggcuugggccgugcccaaaaaugauaagaacaaaaccgcgaccaauccucugacaacggaagugcccuacauuuguaccgagggagaggaccagaucacagucuggggcuuccacagcgauaacgaaacccagauggccaagcuguauggggacucuaagccgcagaaauuuacauccagcgcuaauggaguuaccacgcacuacgugucucaaauuggcggcuucccuaaccagacagaggaugggggacugccccaguccggcagaaucguggucgacuauauggugcaaaagagcgggaaaaccggaaccaucacauaccagcggggcauucuccugccucagaagguuuggugcgccucugggcgcuccaaagugaucaagggaagccuuccccugauuggcgaagcugauugucuccaugagaaauauggcgggcugaacaaguccaagcccuacuacaccggagagcacgccaaagcgaucggcaauugcccuauuugggucaagacaccgcugaaacucgccaacgggacgaaguauagacccccugcuaaacugcuuaaggaacggggauuuuucggcgccaucgcuggguuucuggagggcggaugggaaggcaugaucgccggguggcauggauacaccucucacggcgcccacgggguggcuguugcggccgaccucaagagcacacaggaggcuauuaauaaaaucaccaagaaccuuaauucccuuagcgaacuggaggugaaaaaccuccagcgccugucuggagccauggaugagcugcauaaugaaauucucgagcuggacgaaaaggucgacgaucuuagagccgacacaaucuccagccaaauugagcuggcugugcuccugucuaacgaaggcaucaucaauagcgaggaugagcaccuucuggcccucgaacggaaacugaagaagaugcuggggcccuccgcggucgagauuggcaacggauguuucgaaaccaaacauaagugcaaucagacgugccucgaccgcaucgcugccggcaccuuugaugccggggaguucucucugccuacauuugacagccuuaacauuaccgcugccucccugaaugaugacggacucgauaaccacacaauccugcuguauuacagcaccgcugccucuucccuugcggugacgcucaugauugccaucuucguuguguauauggucagcagagacaaugugucuuguuccauuugccuguga

SEQ ID NO: 220487 - RNA, 1755 nt, Artificial Sequence; identical to SEQ ID NO: 220361
  derived and/or modified CDS sequence (opt5) from hemagglutinin__InfluenzaB__AKU40900

SEQ ID NO: 220488 - RNA, 1755 nt, Artificial Sequence; identical to SEQ ID NO: 220201
  derived and/or modified CDS sequence (opt5) from hemagglutinin__InfluenzaB__AKU40911

SEQ ID NO: 220489 - RNA, 1755 nt, Artificial Sequence
  derived and/or modified CDS sequence (opt5) from hemagglutinin__InfluenzaB__AKU40922
augaaggccaucauugugcugcucauggucguuaccagcaacgcugacagaaucugcacaggcauuacguccucuaauagcccccacguggugaaaaccgucacacagggggaagugaacguuaccggagugaucccucugacaaccacaccgaccaaguccuacuucgccaaucuuaaaggcacgcggacccgcgggaagcugugucccgauugccucaacuguacagaccuggaugucgcgcuuggaagaccuaugugcgugggcaccacacccucugcuaaagccagcauucugcaugaaguucggccugugaccuccggguguuuucccaucaugcacgaccgcacgaagaucagacaacucccuaaucugcugcggggauaugagaagauucgccucucuacacagaacgucaucgaugccgaaaaagcuccgggcggccccuacagacuggggaccagcggauccugcccuaaugccacaagcaagauuggcuucuuugcuaccauggccugggcggugcccaaagacaacuauaagaaugccaccaacccucagacaguggagguccccuacaucuguacggaaggggaggaucagauuaccguuuggggauuccauucugacaauaaaacacaaaugaagucccuuuauggcgauagcaacccgcagaaguuuaccucuuccgcuaauggggugacaacccacuacgugagccagaucggagacuucccugaucagacggaggacggcggccugccccaaucugggcggauugucguggauuauaugaugcagaaaccuggaaagacaggcaccaucguuuaccagcgcggggugcuccugccccagaaagucuggugcgccuccggaagaagcaaggugaucaaaggcucccuuccccugauuggggaagcugacugucuccaugaggaauacggaggccugaacaagucuaaaccuuauuacaccggcaagcacgccaaggcgaucgggaauugcccgauuuggguuaaaacaccccugaagcucgccaacggaaccaaauaucggccucccgcuaagcugcuuaaagagcgcggcuuuuucggggccaucgcuggauuucuggagggcgggugggaaggcaugauugccggauggcacggcuacacaagccauggggcccacggaguggcugucgcggccgaccucaaguccacgcaagaggcuaucaacaagaucaccaaaaaucugaacagccuuucugaacuggaggugaagaaucuccagagacuguccggcgccauggaugaacugcauaacgagauucucgagcuggacgaaaaagucgaugaccuucgggccgauacaaucagcucucagauugagcuggcugugcuccugagcaaugaagggaucauuaacuccgaggacgaacaccuucuggcccucgagcgcaagcugaaaaagaugcugggaccuucugcgguugauaucggcaauggguguuucgagaccaagcacaaaugcaaccaaacaugccucgacagaaucgcugccggcaccuuuaaugccggagaguucagccugcccacguuugauucccuuaacauuaccgcugccagccugaaugacgauggccucgacaaccauacaauccugcuguauuacucuaccgcugccuccagccuugcggugacacucaugcuggccauuuucaucgucuauauggugucucgggacaauguuuccuguagcauuugccuguga

SEQ ID NO: 220490 - RNA, 1755 nt, Artificial Sequence; identical to SEQ ID NO: 220464
  derived and/or modified CDS sequence (opt5) from hemagglutinin__InfluenzaB__AKU40933

SEQ ID NO: 220491 - RNA, 1755 nt, Artificial Sequence; identical to SEQ ID NO: 220361
  derived and/or modified CDS sequence (opt5) from hemagglutinin__InfluenzaB__AKU40944

SEQ ID NO: 220492 - RNA, 1755 nt, Artificial Sequence; identical to SEQ ID NO: 220361
  derived and/or modified CDS sequence (opt5) from hemagglutinin__InfluenzaB__AKU40955

SEQ ID NO: 220493 - RNA, 1755 nt, Artificial Sequence; identical to SEQ ID NO: 220361
  derived and/or modified CDS sequence (opt5) from hemagglutinin__InfluenzaB__AKU40966

SEQ ID NO: 220494 - RNA, 1755 nt, Artificial Sequence; identical to SEQ ID NO: 220361
  derived and/or modified CDS sequence (opt5) from hemagglutinin__InfluenzaB__AKU40977

SEQ ID NO: 220495 - RNA, 1755 nt, Artificial Sequence; identical to SEQ ID NO: 220361
  derived and/or modified CDS sequence (opt5) from hemagglutinin__InfluenzaB__AKU40987

SEQ ID NO: 220496 - RNA, 1755 nt, Artificial Sequence; identical to SEQ ID NO: 220361
  derived and/or modified CDS sequence (opt5) from hemagglutinin__InfluenzaB__AKU40998

SEQ ID NO: 220497 - RNA, 1755 nt, Artificial Sequence; identical to SEQ ID NO: 220361
  derived and/or modified CDS sequence (opt5) from hemagglutinin__InfluenzaB__AKU41009

SEQ ID NO: 220498 - RNA, 1755 nt, Artificial Sequence; identical to SEQ ID NO: 220361
  derived and/or modified CDS sequence (opt5) from hemagglutinin__InfluenzaB__AKU41020

SEQ ID NO: 220499 - RNA, 1755 nt, Artificial Sequence; identical to SEQ ID NO: 220361
  derived and/or modified CDS sequence (opt5) from hemagglutinin__InfluenzaB__ALA08485

SEQ ID NO: 220500 - RNA, 1755 nt, Artificial Sequence; identical to SEQ ID NO: 220361
  derived and/or modified CDS sequence (opt5) from hemagglutinin__InfluenzaB__ALA08486

SEQ ID NO: 220501 - RNA, 1755 nt, Artificial Sequence; identical to SEQ ID NO: 220361
  derived and/or modified CDS sequence (opt5) from hemagglutinin__InfluenzaB__ALA08487

SEQ ID NO: 220502 - RNA, 1755 nt, Artificial Sequence; identical to SEQ ID NO: 220361
  derived and/or modified CDS sequence (opt5) from hemagglutinin__InfluenzaB__ALA08564

SEQ ID NO: 220503 - RNA, 1755 nt, Artificial Sequence; identical to SEQ ID NO: 220361
  derived and/or modified CDS sequence (opt5) from hemagglutinin__InfluenzaB__ALA08565

SEQ ID NO: 220504 - RNA, 1755 nt, Artificial Sequence; identical to SEQ ID NO: 220361
  derived and/or modified CDS sequence (opt5) from hemagglutinin__InfluenzaB__ALA08566

SEQ ID NO: 220505 - RNA, 1755 nt, Artificial Sequence; identical to SEQ ID NO: 220361
  derived and/or modified CDS sequence (opt5) from hemagglutinin__InfluenzaB__ALA08567

SEQ ID NO: 220506 - RNA, 1755 nt, Artificial Sequence; identical to SEQ ID NO: 220361
  derived and/or modified CDS sequence (opt5) from hemagglutinin__InfluenzaB__ALA08568

SEQ ID NO: 220507 - RNA, 1755 nt, Artificial Sequence; identical to SEQ ID NO: 220361
  derived and/or modified CDS sequence (opt5) from hemagglutinin__InfluenzaB__ALA08569

SEQ ID NO: 220508 - RNA, 1758 nt, Artificial Sequence
  derived and/or modified CDS sequence (opt5) from hemagglutinin__InfluenzaB__ALA08689
augaaggccaucauugugcugcucauggucguuaccagcaacgcugacagaaucugcacaggcauuacguccucuaauagcccccacguggugaaaaccgccacacagggggaggucaacgugaccggaguuaucccucugacaaccacaccgaccaagucccauuucgcgaaucuuaaaggcacggaaacccgggggaagcugugucccaaaugcccuaacuguacagaucucgacguggcucugggacgccccaagugcaccggcaagauuccuucugccagagucagcauccuucacgaggugcggcccguuacauccggguguuuuccuaucaugcaugaucgcaccaaaauuagacaacugccgaaucuccugcggggauacgaacacauccgccugucuacgcauaacgugauuaaugccgagaacgcucccggcggcccuuauaagaucgggacaagcggauccugccccaaugucaccaacggcaauggguucuuugccacaauggcuugggccgugccuaaaaacgacaagaauaaaaccgcgaccaacccccucacaauugaagugccguacaucuguacggagggagaggaucagauuaccgucuggggcuuccacagcgacaaugaaacacagauggccaagcuguauggggauucuaacccucagaaguuuaccuccagcgcuaacggaguuacaacccacuacgugucucaaaucggcggcuuccccaaucagacggaggacgggggacuuccucaguccggcagaaucguggucgauuauauggugcagaaaagcgggaagacaggaaccauuaccuaccaacggggcauccugcucccccagaaaguuuggugcgccucugggcgcuccaaggugauuaaaggaagccugccccuuaucggcgaagcugacugucugcaugagaaguauggcgggcucaacaaauccaagccuuacuacacaggagagcacgccaaggcgauuggcaauugcccgaucugggucaaaacaccccugaagcuggccaacgggacaaaauauagaccucccgcuaagcuccugaaagaacggggauuuuucggcgccaucgcuggguuucuugagggcggaugggaaggcaugauugccggguggcauggauacacgucucacggcgcccacgggguggcuguugcggccgaucugaaaagcacccaggaggcuaucaauaagauuaccaagaaccucaauucccugagcgaacuugaggugaagaaccugcagcgccucucuggagccauggacgagcugcauaaugaaauccuggagcucgaugaaaaagucgacgaccugagagccgauaccauuuccagccaaaucgagcuugcugugcugcucucuaacgaaggcaucauuaauagcgaggacgagcaucugcuugcccuggaacggaagcucaaaaagaugcuggggccuuccgcggucgagaucggcaacggauguuucgaaacaaagcacaaaugcaaucagaccugccuggaucgcauugcugccggcacguuugacgccggggaguucucucuccccaccuuugauagccugaacaucacagcugccucccuuaaugacgauggacuggacaaccacaccauucuccuguauuacagcacagcugccucuucccuggcggugacccuuaugaucgccauuuucguuguguauauggucagcagagauaacgugucuuguuccaucugccucuga

SEQ ID NO: 220509 - RNA, 1758 nt, Artificial Sequence
  derived and/or modified CDS sequence (opt5) from hemagglutinin__InfluenzaB__ALA08690
augaaggccaucauugugcugcucauggucguuaccagcaacgcugacagaaucugcacaggcauuacguccucuaauagcccccacguggugaaaaccgccacacagggggaggucaacgugaccggaguuaucccucugacaaccacaccgaccaagucccauuucgcgaaucuuaaaggcacggaaacccgggggaagcugugucccaaaugccucaacuguacagaucuggacguggcucuuggacgcccuaagugcaccggcaagauucccucugccagagucagcauccugcacgaggugcggccuguuacauccggguguuuucccaucaugcaugaucgcaccaaaauuagacaacucccuaaucugcugcggggauacgaacacauccgccucucuacgcauaacgugauuaaugccgaggacgcuccgggcggccccuauaagaucgggacaagcggauccugcccuaacauuaccaauggcaacggguucuuugccacaauggcuugggccguccagaaaaaugauaagaacaaaaccgcgaccaauccccugacaaucgaagugccuuacauuuguacggagggagaggaccagaucaccguguggggcuuccacagcgauaacgaaacacagauggccaagcuguauggggacucuaagccccaaaaauuuaccuccagcgcuaauggagucacaacccacuacguuucucagaucggcggcuucccgaaccagacggaggaugggggacugccucaguccggcagaauugugguggacuauaugguccaaaagagcgggaaaacaggaaccaucaccuaccagcggggcauucuccugccccagaagguguggugcgccucugggcgcuccaaaguuaucaagggaagccuuccucugauuggcgaagcugauugucuccaugagaaauauggcgggcugaacaaguccaagcccuacuacacaggagagcacgccaaagcgaucggcaauugccccaucugggugaagaccccucugaaacucgccaacgggacaaaguauagaccgcccgcuaaacugcuuaaggaacggggauuuuucggcgccauugcuggguuucuggagggcggaugggaaggcaugaucgccggguggcauggauacacgucucacggcgcccacggggucgcuguggcggccgaccucaagagcacccaggaggcuauuaauaaaaucacaaagaaccuuaauucccuuagcgaacuggagguuaaaaaccuccaacgccugucuggagccauggaugagcugcauaaugaaauucucgagcuggacgaaaagguggacgaucuuagagccgacaccaucuccagccagaucgagcuggcuguccuccugucuaacgaaggcauuaucaauagcgaggaugagcaccuucuggcccucgaacggaaacugaagaagaugcuggggccuuccgcgguggagauuggcaacggauguuucgaaacaaaacauaagugcaaucagaccugccucgaccgcaucgcugccggcacguuugaugccggggaguucucucugcccaccuuugacagccuuaacauuacagcugccucccugaaugaugacggacucgaugaccacaccauccugcuguauuacagcacagcugccucuucccuugcggucacccucaugauugccaucuucgugguuuauauggugagcagagauaacgucucuuguuccaucugccuguga

SEQ ID NO: 220510 - RNA, 1755 nt, Artificial Sequence; identical to SEQ ID NO: 220361
  derived and/or modified CDS sequence (opt5) from hemagglutinin__InfluenzaB__ALE31766

SEQ ID NO: 220511 - RNA, 1758 nt, Artificial Sequence
  derived and/or modified CDS sequence (opt5) from hemagglutinin__InfluenzaB__ALE31768
augaaggccaucauugugcugcucauggucguuaccagcaacgcugacagaaucugcacaggcauuacguccucuaauagcccccacguggugaaaaccgccacacagggggaggucaacgugaccggaguuaucccucugacaaccacaccgaccaagucccauuucgcgaaucuuaaaggcacggaaacccgggggaagcugugucccaaaugccucaacuguacagaucuggacguggcucuuggacgcccuaagugcaccggcaagauucccucugccagagucagcauccugcacgaggugcggccuguuacauccggguguuuucccaucaugcaugaucgcaccaaaauuagacaacucccuaaucugcugcggggauacgaacacauccgccucucuacgcauaacgugauuaaugccgaggacgcuccgggcggccccuauaagaucgggacaagcggauccugcccuaacauuaccaauggcaacggguucuuugccacaauggcuugggccguccccaaaaaugauaagaacaaaaccgcgaccaauccucugacaaucgaagugcccuacauuuguacggagggagaggaccagaucaccguguggggcuuccacagcgauaacgaaacacagauggccaagcuguauggggacucuaagccgcagaaauuuaccuccagcgcuaauggagucacaacccacuacguuucucaaaucggcggcuucccuaaccagacggaggaugggggacugccccaguccggcagaauugugguggacuauaugguccaaaagagcgggaaaacaggaaccaucaccuaccagcggggcauucuccugccucagaagguguggugcgccucugggcgcuccaaaguuaucaagggaagccuuccccugauuggcgaagcugauugucuccaugagaaauauggcgggcugaacaaguccaagcccuacuacacaggagagcacgccaaagcgaucggcaauugcccuaucugggugaagaccccgcugaaacucgccaacgggacaaaguauagacccccugcuaaacugcuuaaggaacggggauuuuucggcgccauugcuggguuucuggagggcggaugggaaggcaugaucgccggguggcauggauacacgucucacggcgcccacggggucgcuguggcggccgaccucaagagcacccaggaggcuauuaauaaaaucacaaagaaccuuaauucccuuagcgaacuggagguuaaaaaccuccagcgccugucuggagccauggaugagcugcauaaugaaauucucgagcuggacgaaaagguggacgaucuuagagccgacaccaucuccagccaaaucgagcuggcuguccuccugucuaacgaaggcauuaucaauagcgaggaugagcaccuucuggcccucgaacggaaacugaagaagaugcuggggcccuccgcgguggagauuggcaacggauguuucgaaacaaaacauaagugcaaucagaccugccucgaccgcaucgcugccggcacguuugaugccggggaguucucucugccuaccuuugacagccuuaacauuacagcugccucccugaaugaugacggacucgauaaccacaccauccugcuguauuacagcacagcugccucuucccuugcggucacccucaugauugccaucuucgugguuuauauggugagcagagacaaugucucuuguuccaucugccuguga

SEQ ID NO: 220512 - RNA, 1758 nt, Artificial Sequence
  derived and/or modified CDS sequence (opt5) from hemagglutinin__InfluenzaB__ALE31770
augaaggccaucauugugcugcucauggucguuaccagcaacgcugacagaaucugcacaggcauuacguccucuaauagcccccacguggugaaaaccgccacacagggggaggucaacgugaccggaguuaucccucugacaaccacaccgaccaagucccauuucgcgaaucuuaaaggcacggaaacccgggggaagcugugucccaaaugccucaacuguacagaucuggacguggcucuuggacgcccuaagugcaccggcaagauucccucugccagagucagcauccugcacgaggugcggccuguuacauccggguguuuucccaucaugcaugaucgcaccaaaauuagacaacucccuaaucugcugcggggauacgaacacaucucucucagcacgcauaacgugauuaaugccgaggacgcuccgggcggccccuauaagaucgggacauccggaagcugcccuaacgucaccaauggcaacggguucuuugccacaauggcuugggccgugcccaaaaaugauaagaacaaaaccgcgaccaauccucugacaauugaagugcccuacaucuguacggagggagaggaccagauuaccgucuggggcuuccacucugauaacgaaacacagauggccaaacuuuauggggacuccaagccgcagaaguuuaccagcucugcuaauggaguuacaacccacuacgugucccaaaucggcggcuucccuaaccagacggaggaugggggacugccccagagcggccgcaucguggucgacuauauggugcagaagucugggaaaacaggaaccauuaccuaccaaagaggcauccuccugccucagaagguuuggugcgccuccgggcggagcaaagugauuaagggaucccuuccccugaucggcgaagcugauugucuccaugagaaauauggcgggcugaacaagucuaagcccuacuacacaggagagcacgccaaagcgauuggcaauugcccuaucugggucaagaccccgcugaaacucgccaacgggacaaaguauagacccccugcuaaacugcuuaaggaacgcggauuuuucggcgccaucgcuggguuucuggagggcggaugggaaggcaugauugccggguggcauggauacacgagccacggcgcccacgggguggcuguugcggccgaccucaaguccacccaggaggcuaucaauaaaauuacaaagaaccugaauagccuuucugaacuggaggugaaaaaccuccagcggcuguccggagccauggaugagcugcauaaugaaauccucgagcuggacgaaaaggucgacgaucuucgcgccgacaccauuagcucucaaaucgagcuggcugugcuccugagcaacgaaggcaucauuaauuccgaggaugagcaccuucuggcccucgaaagaaaacugaagaagaugcuggggcccucugcggucgagaucggcaacggauguuucgaaacaaaacauaagugcaaucagaccugccucgaccggauugcugccggcacguuugaugccggggaguucagccugccuaccuuugacucccuuaacaucacagcugccagccugaaugaugacggacucgauaaccacaccauucugcuguauuacucuacagcugccuccagccuugcggugacccucaugaucgccauuuucguuguguauauggucucucgcgacaauguguccuguagcaucugccuguga

SEQ ID NO: 220513 - RNA, 1755 nt, Artificial Sequence; identical to SEQ ID NO: 220361
  derived and/or modified CDS sequence (opt5) from hemagglutinin__InfluenzaB__ALE31772

SEQ ID NO: 220514 - RNA, 1755 nt, Artificial Sequence; identical to SEQ ID NO: 220361
  derived and/or modified CDS sequence (opt5) from hemagglutinin__InfluenzaB__ALE31773

SEQ ID NO: 220515 - RNA, 1755 nt, Artificial Sequence
  derived and/or modified CDS sequence (opt5) from hemagglutinin__InfluenzaB__ALE31884
augaaggccaucauugugcugcucauggucguuaccagcaacgcugacagaaucugcacaggcauuacguccucuaauagcccccacguggugaaaaccgccacacagggggaagucaacgugaccggaguuaucccucugacaaccacaccgaccaaguccuacuucgcgaaucuuaaaggcacgcggacccgcgggaagcugugucccgauugccucaacuguacagaccuggauguggcucuuggaagaccuaugugcgucggcaccacacccucugccaaagccagcauucugcaugaagugcggccuguuaccuccggguguuuucccaucaugcacgaccgcacgaagaucagacaacucccuaaucugcugcggggauaugagaagauucgccucucuacacagaacgugaucgaugcugaaaaagccccgggcggccccuacagacuggggaccagcggauccugcccuaaugcuacaagcaagauuggcuucuuugccaccauggcgugggccguccccaaagacaacuauaagaaugcuaccaacccucagacaguggaggugcccuacaucuguacggaaggggaggaucagauuaccgucuggggauuccauucugacaauaaaacacaaaugaagucccuuuauggcgauagcaacccgcagaaguuuaccucuuccgccaaugggguuacaacccacuacgugagccagaucggagacuucccugaucagacggaggacggcggccugccccaaucugggcggauuguggucgauuauaugaugcagaaaccuggaaagacaggcaccaucguguaccagcgcgggguucuccugccccagaaaguguggugcgcuuccggaagaagcaaggucaucaaaggcucccuuccccugauuggggaagccgacugucuccaugaggaauacggaggccugaacaagucuaaaccuuauuacaccggcaagcacgcgaaggccaucgggaauugcccgauuugggugaaaacaccccugaagcucgcuaacggaaccaaauaucggccucccgccaagcugcuuaaagagcgcggcuuuuucggggcuaucgccggauuucuggagggcgggugggaaggcaugauugccggauggcacggcuacacaagccauggggcucacggaguugcgguggccgcugaccucaaguccacgcaagaggccaucaacaagaucaccaaaaaucugaacagccuuucugaacuggaggucaagaaucuccagagacuguccggcgccauggaugaacugcauaacgagauucucgagcuggacgaaaaaguggaugaccuucgggcugauacaaucagcucucagauugagcuggccguccuccugagcaaugaagggaucauuaacuccgaggacgaacaccuucuggcgcucgagcgcaagcugaaaaagaugcugggaccuucugcuguggauaucggcaauggguguuucgagaccaagcacaaaugcaaccaaacaugccucgacagaaucgccgccggcaccuuuaaugcuggagaguucagccugcccacguuugauucccuuaacauuaccgccgcuagccugaaugacgauggccucgacaaccauacaauccugcuguauuacucuaccgccgcguccagccuugccguuacacucaugcuggcuauuuucaucguguauauggucucucgggacaauguguccuguagcguuugccuguga

SEQ ID NO: 220516 - RNA, 1755 nt, Artificial Sequence
  derived and/or modified CDS sequence (opt5) from hemagglutinin__InfluenzaB__ALE31885
augaaggccaucauugugcugcucauggucguuaccagcaacgcugacagaaucugcacaggcauuacguccucuaauagcccccacguggugaaaaccgccacacagggggaagucaacgugaccggaguuaucccucugacaaccacaccgaccaaguccuacuucgcgaaucuuaaaggcacgcggacccgcgggaagcugugucccgauugccucaacuguacagaccuggauguggcucuuggaagaccuaugugcgucggcaccacacccucugccaaagccagcauucugcaugaagugcggccuguuaccuccggguguuuucccaucaugcacgaccgcacgaagaucagacaacucccuaaucugcugcggggauaugagaagauucgccucucuacacagaacgugaucgaugcugaaaaagccccgggcggccccuacagacuggggaccagcggauccugcccuaaugcuacaagcaagauuggcuucuuugccaccauggcgugggccguccccaaagacaacuauaagaaugcuaccaacccucagacaguggaggugcccuacaucuguacggaaggggaggaucagauuaccgucuggggauuccauucugacaauaaaacacaaaugaagucccuuuauggcgauagcaacccgcagaaguuuaccucuuccgccaaugggguuacaacccacuacgugagccagaucggagacuucccugaucagacggaggacggcggccugccccaaucugggcggauuguggucgauuauaugaugcagaaaccuggaaagacaggcaccaucguguaccagcgcgggguucuccugccccagaaaguguggugcgcuuccggaagaagcaaggucaucaaaggcucccuuccccugauuggggaagccgacugucuccaugaggaauacggaggccugaacaagucuaaaccuuauuacaccggcaagcacgcgaaggccaucgggaauugcccgauuugggugaaaacaccccugaagcucgcuaacggaaccaaauaucggccucccgccaagcugcuuaaagagcgcggcuuuuucggggcuaucgccggauuucuggagggcgggugggaaggcaugauugccggauggcacggcuacacaagccauggggcucacggaguugcgguggccgcugaccucaaguccacgcaagaggccaucaacaagaucaccaaaaaucugaacagccuuucugaacuggaggucaagaaucuccagagacuguccggcgccauggaugaacugcauaacgagauucucgagcuggacgaaaaaguggaugaccuucgggcugauacaaucagcucucagauugagcuggccguccuccugagcaaugaagggaucauuaacuccgaggacgaacaccuucuggcgcucgagcgcaagcugaaaaagaugcugggaccuucugcuguggauaucggcaauggguguuucgagaccaagcacaaaugcaaccaaacaugccucgacagaaucgccgccggcaccuuuaaugcuggagaguucagccugcccacguuugauucccuuaacauuaccgccgcuagccugaaugacgauggccucgacaaccauacaauccugcuguauuacucuaccgccgcguccagccuugccguuacacucaugcuggcuauuuucguggucuauauggugucucgggacaauguuuccuguagcaucugccuguga

SEQ ID NO: 220517 - RNA, 1755 nt, Artificial Sequence; identical to SEQ ID NO: 220361
  derived and/or modified CDS sequence (opt5) from hemagglutinin__InfluenzaB__ALE31886

SEQ ID NO: 220518 - RNA, 1755 nt, Artificial Sequence
  derived and/or modified CDS sequence (opt5) from hemagglutinin__InfluenzaB__ALE31887
augaaggccaucauugugcugcucauggucguuaccagcaacgcugacagaaucugcacaggcauuacguccucuaauagcccccacguggugaaaaccgccacacagggggaaaucaacgucaccggagugauuccucugacaaccacaccgaccaaguccuacuucgcgaaucuuaaaggcacgcggacccgcgggaagcugugucccgauugccucaacuguacagaccuggauguugcucuuggaagaccuaugugcgugggcaccacacccucugccaaagccagcauccugcaugaaguccggccugugaccuccggguguuuucccaucaugcacgaccgcacgaagauuagacaacucccuaaucugcugcggggauaugagaagauccgccucucuacacagaacguuauugaugcugaaaaagccccgggcggccccuacagacuggggaccagcggauccugcccuaaugcuacaagcaagaucggcuucuuugccaccauggcgugggccgugcccaaagacaacuauaagaaugcuaccaacccucagacagucgaggugcccuacauuuguacggaaggggaggaucagaucaccguguggggauuccauucugacaauaaaacacaaaugaagucccuuuauggcgauagcaacccgcagaaguuuaccucuuccgccaauggggucacaacccacuacguuagccagauuggagacuucccugaucagacggaggacggcggccugccccaaucugggcggaucgugguggauuauaugaugcagaaaccuggaaagacaggcaccaucgucuaccagcgcggggugcuccugccccagaaaguuuggugcgcuuccggaagaagcaaggugauuaaaggcucccuuccccugaucggggaagccgacugucuccaugaggaauacggaggccugaacaagucuaaaccuuauuacaccggcaagcacgcgaaggccauugggaauugcccgaucugggucaaaacaccccugaagcucgcuaacggaaccaaauaucggccucccgccaagcugcuuaaagagcgcggcuuuuucggggcuauugccggauuucuggagggcgggugggaaggcaugaucgccggauggcacggcuacacaagccauggggcucacggaguggcgguugccgcugaccucaaguccacgcaagaggccaucaacaagauuaccaaaaaucugaacagccuuucugaacuggaggugaagaaucuccagagacuguccggcgccauggaugaacugcauaacgagauccucgagcuggacgaaaaagucgaugaccuucgggcugauacaauuagcucucagaucgagcuggccgugcuccugagcaaugaagggauuaucaacuccgaggacgaacaccuucuggcgcucgagcgcaagcugaaaaagaugcugggaccuucugcugucgauaucggcaauggguguuucgagaccaagcacaaaugcaaccaaacaugccucgacagaauugccgccggcaccuuuaaugcuggagaguucagccugcccacguuugauucccuuaacaucaccgccgcuagccugaaugacgauggccucgacaaccauacaauucugcuguauuacucuaccgccgcguccagccuugccgugacacucaugcuggcuaucuucauuguuuauauggugucucgggacaaugucuccuguagcaucugccuguga

SEQ ID NO: 220519 - RNA, 1755 nt, Artificial Sequence; identical to SEQ ID NO: 220361
  derived and/or modified CDS sequence (opt5) from hemagglutinin__InfluenzaB__ALE31982

SEQ ID NO: 220520 - RNA, 1755 nt, Artificial Sequence
  derived and/or modified CDS sequence (opt5) from hemagglutinin__InfluenzaB__ALE31983
augaaggccaucauugugcugcucauggucguuaccagcaacgcugacagaaucugcacaggcauuacguccucuaauagcccccacguggugaaaaccgccacacagggggaagucaacgugaccggaguuaucccucugacaaccacaccgaccaaguccuacuucgcgaaucuuaaaggcacgcggacccgcgggaagcugugucccgauugccucaacuguacagaccuggauguggcucuuggaagaccuaugugcgucggcaccacacccucugccaaagccagcauucugcaugaagugcggccuguuaccuccggguguuuucccaucaugcacgaccgcacgaagaucagacaacucccuaaucugcugcggggauaugagaagauucgccucucuacacagaacgugaucgaugcugaaaaagccccgggcggccccuacagacuggggaccagcggauccugcccuaaugcuacaagcaagauuggcuucuuugccaccauggcgugggccguccccaaagacaacuauaagaaugcuaccaacccucagacaguggaggugcccuacaucuguacggaaggggaggaucagauuaccgucuggggauuccauucugacaauaaaacacaaaugaagucccuuuauggcgauagcaacccgcagaaguuuaccucuuccgccaaugggguuacaacccacuacgugagccagaucggagacuucccugaucagacggaggacggcggccugccccaaucugggcggauuguggucgauuauaugaugcagaaaccuggaaagacaggcaccaucguguaccagcgcgggguucuccugccccagaaaguguggugcgcuuccggaagaagcaaggucaucaaaggcucccuuccccugauuggggaagccgacugucuccaugaggaauacggaggccugaacaagucuaaaccuuauuacaccggcaagcacgcgaaggccaucgggaauugcccgauuugggugaaaacaccccugaagcucgcuaacggaaccaaauaucggccucccgccaagcugcuuaaagagcgcggcuuuuucggggcuaucgccggauuucuggagggcgggugggaaggcaugauugccggauggcacggcuacacaagccauggggcucacggaguugcgguggccgcugaccucaaguccacgcaagaggccaucaacaagaucaccaaaaaucugaacagccuuucugaacuggaggucaagaaucuccagagacuguccggcgccauggaugaacugcauaacgagauucucgagcuggacgaaaaaguggaugaccuucgggcugauacaaucagcucucagauugagcuggccguccuccugagcaaugaagggaucauuaacuccgaggacgaacaccuucuggcgcucgagcgcaagcugaaaaagaugcugggaccuucugcuguggauaucggcaauggguguuucgagaccaagcacaaaugcaaccaaacaugccucgacagaaucgccgccggcaccuuuaaugcuggagaguucagccugcccacguuugauucccuuaacauuaccgccgcuagccugaaugacgauggccucgacaaccauacaauccugcuguauuacucuaccgccgcguccagccuugccguuacacucaugcuggcucuguucauuguguauauggucucucgggacaauguguccuguagcaucugccucuga

SEQ ID NO: 220521 - RNA, 1755 nt, Artificial Sequence
  derived and/or modified CDS sequence (opt5) from hemagglutinin__InfluenzaB__ALE31984
augaaggccaucauugugcugcucauggucguuaccagcaacgcugacagaaucugcacaggcauuacguccucuaauagcccccacguggugaaaaccgccacacagggggaggucaacgugaccggaguuaucccucugacaaccacaccgaccaaguccuacuucgcgaaucuuaaaggcacgcggacccgcgggaagcugugucccgauugccucaacuguacagaccuggauguggcucuuggaagaccuaugugcgucggcaccacacccucugccaaagccagcauucugcaugaagugcggccuguuaccuccggguguuuucccaucaugcacgaccgcacgaagaucagacaacucccuaaucugcugcggggauaugagaagauucgccucucuacacagaacgugaucgaugcugaaaaagccccgggcggccccuacagacuggggaccagcggauccugcccuaaugcuacaagcaagauuggcuucuuugccaccauggcgugggccguccccaaagacaacuauaagaaugcuaccaacccucagacaguggaggugcccuacaucuguacggaagaggaggaucagauuaccgucuggggguuccauucugacaauaaaacacaaaugaagucccuuuauggagauagcaacccgcagaaguuuaccucuuccgccaauggcguuacaacccacuacgugagccagaucggggacuucccugaucagacggaagacggaggccugccccaaucuggccggauuguggucgauuauauggugcagaaaccugggaagacaggaaccaucguuuaccagcgcggcgugcuccugccccagaaagucuggugcgcuuccgggagaagcaaggugaucaaaggaucccuuccccugauuggcgaggccgacugucuccaugaagaguacgggggacugaacaagucuaaaccuuauuacaccggcaagcacgcgaaggccaucggcaauugcccgauuuggguuaaaacaccccugaagcucgcuaacgggaccaaauaucggccucccgccaagcugcuuaaagagcgcggauuuuucggcgcuaucgccggguuucuggaaggaggcugggaggggaugauugccggcuggcacggauacacaagccauggcgcucacgggguggcggucgccgcugaccucaaguccacgcaagaagccaucaacaagaucaccaaaaaucugaacagccuuucugagcuggaagugaagaaucuccagagacuguccggagccauggaugagcugcauaacgagauucucgaacuggacgagaaagucgaugaccuucgggcugauacaaucagcucucagauugaacuggccgugcuccugagcaaugagggcaucauuaacuccgaagacgagcaccuucuggcgcucgagcgcaagcugaaaaagaugcuggggccuucugcuguugauaucggaaauggcuguuucgaaaccaagcacaaaugcaaccaaacaugccucgacagaaucgccgccgggaccuuuaaugcuggcgaguucagccugcccacguuugauucccuuaacauuaccgccgcuagccugaaugacgauggacucgacaaccauacaauccugcuguauuacucuaccgccgcguccagccuugccgugacacucaugcuggcuauuuucaucgucuauauggugucucgggacaauguuuccuguagcauuugccuguga

SEQ ID NO: 220522 - RNA, 1755 nt, Artificial Sequence; identical to SEQ ID NO: 220361
  derived and/or modified CDS sequence (opt5) from hemagglutinin__InfluenzaB__ALE31985

SEQ ID NO: 220523 - RNA, 1758 nt, Artificial Sequence
  derived and/or modified CDS sequence (opt5) from hemagglutinin__InfluenzaB__ALE31986
augaaggccaucauugugcugcucauggucguuaccagcaacgcugacagaaucugcacaggcauuacguccucuaauagcccccacguggugaaaaccgccacacagggggaggucaacgugaccggaguuaucccucugacaaccacaccgaccaagucccauuucgcgaaucuuaaaggcacggaaacccgggggaagcugugucccaaaugccucaacuguacagaucuggacguggcucuuggacgcccuaagugcaccggcaagauucccucugccagagucagcauccugcacgaggugcggccuguuacauccggguguuuucccaucaugcaugaucgcaccaaaauuagacaacucccuaaucugcugcggggauacgaacacauccgccucucuacgcauaacgugauuaaugccgaggacgcuccgggcggccccuauaagaucgggacaagcggauccugcccuaacauuaccaauggcaacggguucuuugccacaauggcuugggccguccccaaaaaugauaagaacaaaaccgcgaccaauccucugacaaucgaagugcccuacauuuguacggagggagaggaccagaucaccguguggggcuuccacagcgauaacgaaacacagauggccaagcuguauggggacucuaagccgcagaaauuuaccuccagcgcuaauggagucacaacccacuacguuucucaaaucggcggcuucccuaaccagacggaggaugggggacugccccaguccggcagaauugugaucgacuauauggugcaaaagagcgggaaaacaggaaccauuaccuaccagcggggcauccuccugccucagaaggucuggugcgccucugggcgcuccaaagugauuaagggaagccuuccccugaucggcgaagcugauugucuccaugagaaauauggcgggcugaacaaguccaagcccuacuacacaggagagcacgccaaagcgguuggcaauugcccuaucugggugaagaccccgcugaaacucgccaacgggacaaaguauagacccccugcuaaacugcuuaaggaacggggauuuuucggcgccauugcuggguuucuggagggcggaugggaaggcaugaucgccggguggcauggauacacgucucacggcgcccacggggucgcuguggcggccgaccucaagagcacccaggaggcuauuaauaaaaucacaaagaaccuuaauucccuuagcgaacuggagguuaaaaaccuccagcgccugucuggagccauggaugagcugcauaaugaaauucucgagcuggacgaaaagguggacgaucuuagagccgacaccaucuccagccaaaucgagcuggcuguccuccugucuaacgaaggcauuaucaauagcgaggaugagcaccuucuggcccucgaacggaaacugaagaagaugcuggggcccuccgcgguggagauuggcaacggauguuucgaaacaaaacauaagugcaaucagaccugccucgaccgcaucgcugccggcacguuugaugccggggaguucucucugccuaccuuugacagccuuaacauuacagcugccucccugaaugaugacggacucgauaaccacaccauccugcuguauuacagcacagcugccucuucccuugcggucacccucaugauugccaucuucgugguuuauauggugagcagagacaaugucucuuguuccaucugccuguga

SEQ ID NO: 220524 - RNA, 1755 nt, Artificial Sequence
  derived and/or modified CDS sequence (opt5) from hemagglutinin__InfluenzaB__ALE31988
augaaggccaucauugugcugcucauggucguuaccagcaacgcugacagaaucugcacaggcauuacguccucuaauagcccccacguggugaaaaccgccacacagggggaagucaacgugaccggaguuaucccucugacaaccacaccgaccaaguccuacuucgcgaaucuuaaaggcacgcggacccgcgggaagcugugucccgauugccucaacuguacagaccuggauguggcucuuggaagaccuaugugcgucggcaccacacccucugccaaagccagcauucugcaugaagugcggccuguuaccuccggguguuuucccaucaugcacgaccgcacgaagaucagacaacucccuaaucugcugcggggauaugagaagauucgccucucuacacagaacgugaucgaugcugaaaaagccccgggcggccccuacagacuggggaccagcggauccugcccuaaugcuacaagcaagauuggcuucuuugccaccauggcgugggccguccccaaagacaacuauaagaaugcuaccaacccucagacaguggaggugcccuacaucuguacggaaggggaggaucagauuaccgucuggggauuccauucugacaauaaaacacaaaugaagucccuuuauggcgauagcaacccgcagaaguuuaccucuuccgccaaugggguuacaacccacuacgugagccagaucggagacuucccugaucagacggaggacggcggccugccccaaucugggcggauuguggucgauuauauggugcagaaaccuggaaagacaggcaccaucguuuaccagcgcggggugcuccugccccagaaagucuggugcgcuuccggaagaagcaaggugaucaaaggcucccuuccccugauuggggaagccgacugucuccaugaggaauacggaggccugaacaagucuaaaccuuauuacaccggcaagcacgcgaaggccaucgggaauugcccgauuuggguuaaaacaccccugaagcucgcuaacggaaccaaauaucggccucccgccaagcugcuuaaagagcgcggcuuuuucggggcuaucgccggauuucuggagggcgggugggaaggcaugauugccggauggcacggcuacacaagccauggggcucacggaguggcggucgccgcugaccucaaguccacgcaagaggccaucaacaagaucaccaaaaaucugaacagccuuucugaacuggaggugaagaaucuccagagacuguccggcgccauggaugaacugcauaacgagauucucgagcuggacgaaaaagucgaugaccuucgggcugauacaaucagcucucagauugagcuggccgugcuccugagcaaugaagggaucauuaacuccgaggacgaacaccuucuggcgcucgagcgcaagcugaaaaagaugcugggaccuucugcuguugauaucggcaauggguguuucgagaccaagcacaaaugcaaccaaacaugccucgacagaaucgccgccggcaccuuuaaugcuggagaguucagccugcccacguuugauucccuuaacauuaccgccgcuagccugaaugacgauggccucgacaaccauacaauccugcuguauuacucuaccgccgcguccagccuugccgugacacucaugcuggcuauuuucaucgucuauauggugucucgggacaauguuuccuguagcauuugccuguga

SEQ ID NO: 220525 - RNA, 1758 nt, Artificial Sequence; identical to SEQ ID NO: 220523
  derived and/or modified CDS sequence (opt5) from hemagglutinin__InfluenzaB__ALE31989

SEQ ID NO: 220526 - RNA, 1758 nt, Artificial Sequence; identical to SEQ ID NO: 220523
  derived and/or modified CDS sequence (opt5) from hemagglutinin__InfluenzaB__ALE31990

SEQ ID NO: 220527 - RNA, 1755 nt, Artificial Sequence; identical to SEQ ID NO: 220361
  derived and/or modified CDS sequence (opt5) from hemagglutinin__InfluenzaB__ALE31991

SEQ ID NO: 220528 - RNA, 1758 nt, Artificial Sequence
  derived and/or modified CDS sequence (opt5) from hemagglutinin__InfluenzaB__ALE31992
augaaggccaucauugugcugcucauggucguuaccagcaacgcugacagaaucugcacaggcauuacguccucuaauagcccccacguggugaaaaccgccacacagggggaggucaacgugaccggaguuaucccucugacaaccacaccgaccaagucccauuucgcgaaucuuaaaggcacggaaacccgggggaagcugugucccaaaugccucaacuguacagaucuggacguggcucuuggacgcccuaagugcaccggcaagauucccucugccagagucagcauccugcacgaggugcggccuguuacauccggguguuuucccaucaugcaugaucgcaccaaaauuagacaacucccuaaucugcugcggggauacgaacacgugcgccucucuacgcauaacgucaucaaugccgaggacgcuccgggcggccccuauaagauugggacaagcggauccugcccuaacaucaccaauggcaacggguucuuugccacaauggcuugggccgugcccaaaaaugauaagaacaaaaccgcgaccaauccucugacaauugaagugcccuacaucuguacggagagagaggaccagauuaccgucuggggauuccacagcgauaacgaaacacagauggccaagcuguauggcgacucuaagccgcagaaauuuaccuccagcgcuaaugggguuacaacccacuacgugucucaaaucggaggcuucccuaaccagacggaggauggcgggcugccccaguccggacggaucguggucgacuauauggugcaaaagagcggcaaaacagggaccauuaccuaccagcgcggaauccuccugccucagaagguuuggugcgccucuggcagauccaaagugauuaaggggagccuuccccugaucggagaagcugauugucuccaugagaaauauggcggccugaacaaguccaagcccuacuacacaggggagcacgccaaagcgauuggaaauugcccuaucugggucaagaccccgcugaaacucgccaacggcacaaaguaucggcccccugcuaaacugcuuaaggaacgcggguuuuucggagccaucgcuggcuuucuggaagggggcugggagggaaugauugccggcuggcauggguacacgucucacggagcccacggcguggcuguugcggccgaccucaagagcacccaggaggcuaucaauaaaauuacaaagaaccuuaauucccuuagcgaacuggaggugaaaaaccuccagagacugucuggggccauggaugagcugcauaaugaaauccucgagcuggacgaaaaggucgacgaucuucgggccgacaccauuuccagccaaaucgagcuggcugugcuccugucuaacgaaggaaucauuaauagcgaggaugagcaccuucuggcccucgaacgcaaacugaagaagaugcugggccccuccgcggucgagaucgggaacggcuguuucgaaacaaaacauaagugcaaucagaccugccucgacagaauugcugccggaacguuugaugccggcgaguucucucugccuaccuuugacagccuuaacaucacagcugccucccugaaugaugacgggcucgauaaccacaccauucugcuguauuacagcacagcugccucuucccuugcggugacccucaugaucgccauuuucguuguguauauggucagccgggacaaugugucuuguuccaucugccuguga

SEQ ID NO: 220529 - RNA, 1758 nt, Artificial Sequence; identical to SEQ ID NO: 219937
  derived and/or modified CDS sequence (opt5) from hemagglutinin__InfluenzaB__ALE31993

SEQ ID NO: 220530 - RNA, 1758 nt, Artificial Sequence
  derived and/or modified CDS sequence (opt5) from hemagglutinin__InfluenzaB__ALE31994
augaaggccaucauugugcugcucauggucguuaccagcaacgcugacagaaucugcacaggcauuacguccucuaauagcccccacguggugaaaaccgccacacagggggaggucaacgugaccggaguuaucccucugacaaccacaccgaccaagucccauuucgcgaaucuuaaaggcacggaaacccgggggaagcugugucccaaaugccucaacuguacagaucuggacguggcucuuggacgcccuaagugcaccggcaagauucccucugccagagucagcauccugcacgaggugcggccuguuacauccggguguuuucccaucaugcaugaucgcaccaaaauuagacaacucccuaaucugcugcggggauacgaacacgugcgccucucuacgcauaacgucaucaaugccgaggacgcuccgggcggccccuauaagauugggacaagcggauccugcccuaacaucaccaauggcaacggguucuuugccacaauggcuugggccgugcccaaaaaugauaagaacaaaaccgcgaccaauccucugacaauugaagugcccuacaucuguacggagggagaggaccagauuaccgucuggggcuuccacagcgauaacgaaacacagauggccaagcuguauggggacucuaagccgcagaaauuuaccuccagcgcuaauggaguuacaacccacuacgugucucaaaucggcggcuucccuaaccagacggaggaugggggacugccccaguccggcagaaucguggucgacuauauggugcagaaaagcgggaaaacaggaaccauuaccuaccaacggggcauccuccugccucagaagguuuggugcgccucugggcgcuccaaagugauuaagggaagccuuccccugaucggcgaagcugauugucuccaugagaaauauggcgggcugaacaaguccaagcccuacuacacaggagagcacgccaaagcgauuggcaauugcccuaucugggucagaaccccgcugaagcucgccaacgggacaaaauaucggcccccugcuaagcugcuuaaagaacgcggauuuuucggcgccaucgcuggguuucuggagggcggaugggaaggcaugauugccggguggcauggauacacgucucacggcgcccacgggguggcuguugcggccgaccucaagagcacccaggaggcuaucaauaagauuacaaagaaccuuaauucccuuagcgaacuggaggugaagaaccuccagagacugucuggagccauggaugagcugcauaaugaaauccucgagcuggacgaaaaagucgacgaucuucgggccgacaccauuuccagccaaaucgagcuggcugugcuccugucuaacgaaggcaucauuaauagcgaggaugagcaccuucuggcccucgaacgcaagcugaaaaagaugcuggggcccuccgcggucgagaucggcaacggauguuucgaaacaaagcauaaaugcaaucagaccugccucgacagaauugcugccggcacguuugaugccggggaguucucucugccuaccuuugacagccuuaacaucacagcugccucccugaaugaugacggacucgauaaccacaccauucugcuguauuacagcacagcugccucuucccuugcggugacccucaugaucgccauuuucguuguguauauggucagccgggacaaugugucuuguuccaucugccuguga

SEQ ID NO: 220531 - RNA, 1755 nt, Artificial Sequence; identical to SEQ ID NO: 220520
  derived and/or modified CDS sequence (opt5) from hemagglutinin__InfluenzaB__ALN39719

SEQ ID NO: 220532 - RNA, 1755 nt, Artificial Sequence; identical to SEQ ID NO: 220361
  derived and/or modified CDS sequence (opt5) from hemagglutinin__InfluenzaB__ALN39720

SEQ ID NO: 220533 - RNA, 1755 nt, Artificial Sequence; identical to SEQ ID NO: 220361
  derived and/or modified CDS sequence (opt5) from hemagglutinin__InfluenzaB__ALN39721

SEQ ID NO: 220534 - RNA, 1755 nt, Artificial Sequence; identical to SEQ ID NO: 220361
  derived and/or modified CDS sequence (opt5) from hemagglutinin__InfluenzaB__ALN39723

SEQ ID NO: 220535 - RNA, 1755 nt, Artificial Sequence; identical to SEQ ID NO: 220361
  derived and/or modified CDS sequence (opt5) from hemagglutinin__InfluenzaB__ALN39724

SEQ ID NO: 220536 - RNA, 1755 nt, Artificial Sequence; identical to SEQ ID NO: 220524
  derived and/or modified CDS sequence (opt5) from hemagglutinin__InfluenzaB__ALN39725

SEQ ID NO: 220537 - RNA, 1755 nt, Artificial Sequence
  derived and/or modified CDS sequence (opt5) from hemagglutinin__InfluenzaB__ALN39726
augaaggccaucauugugcugcucauggucguuaccagcaacgcugacagaaucugcacaggcauuacguccucuaauagcccccacguggugaaaaccgccacacagggggaagucaacgugaccggaguuaucccucugacaaccacaccgaccaaguccuacuucgcgaaucuuaaaggcacgcggacccgcgggaagcugugucccgauugccucaacuguacagaccuggauguggcucuuggaagaccuaugugcgucggcaccacacccucugccaaagccagcauucugcaugaagugcggccuguuaccuccggguguuuucccaucaugcacgaccgcacgaagaucagacaacucccuaaucugcugcggggauaugagaagauucgccucucuacacagaacgugaucgaugcugaaaaagccccgggcggccccuacagacuggggaccagcggauccugcccuaaugcuacaagcaagauuggcuucuuugccaccauggcgugggccguccccaaagacaacuauaagaaugcuaccaacccucagacaguggaggugcccuacaucuguacggaaggggaggaucagauuaccgucuggggauuccauucugacaauaaaacacaaaugaagucccuuuauggcgauagcaacccgcagaaguuuaccucuuccgccgacgggguuacaacccacuacgugagccagaucggagauuucccugaccagacggaggauggcggccugccccaaucugggcggauuguggucgacuauaugaugcagaaaccuggaaagacaggcaccaucguguaccagcgcgggguucuccugccccagaaaguguggugcgcuuccggaagaagcaaggucaucaaaggcucccuuccccugauuggggaagccgacugucuccaugaggaauacggaggccugaauaagucuaaaccuuauuacaccggcaagcacgcgaaggccaucgggaacugcccgauuugggugaaaacaccccugaagcucgcuaauggaaccaaauaucggccucccgccaagcugcuuaaagagcgcggcuuuuucggggcuaucgccggauuucuggagggcgggugggaaggcaugauugccggauggcacggcuacacaagccauggggcucacggaguugcgguggccgcugaucucaaguccacgcaagaggccaucaacaagaucaccaaaaaccugaauagccuuucugaacuggaggucaagaaccuccagagacuguccggcgccauggacgaacugcauaaugagauucucgagcuggaugaaaaaguggacgaucuucgggcugacacaaucagcucucagauugagcuggccguccuccugagcaacgaagggaucauuaauuccgaggaugaacaccuucuggcgcucgagcgcaagcugaaaaagaugcugggaccuucugcuguggacaucggcaacggguguuucgagaccaagcacaaaugcaaucaaacaugccucgauagaaucgccgccggcaccuuuaacgcuggagaguucagccugcccacguuugacucccuuaauauuaccgccgcuagccugaacgaugacggccucgacaaucauacaauccugcuguauuacucuaccgccgcguccagccuugccguuacacucaugcuggcuauuuucaucguguauauggucucucgggauaacguguccuguagcauuugccuguga

SEQ ID NO: 220538 - RNA, 1755 nt, Artificial Sequence; identical to SEQ ID NO: 220524
  derived and/or modified CDS sequence (opt5) from hemagglutinin__InfluenzaB__ALN39727

SEQ ID NO: 220539 - RNA, 1755 nt, Artificial Sequence; identical to SEQ ID NO: 220361
  derived and/or modified CDS sequence (opt5) from hemagglutinin__InfluenzaB__ALN39728

SEQ ID NO: 220540 - RNA, 1755 nt, Artificial Sequence; identical to SEQ ID NO: 220361
  derived and/or modified CDS sequence (opt5) from hemagglutinin__InfluenzaB__ALN39729

SEQ ID NO: 220541 - RNA, 1758 nt, Artificial Sequence
  derived and/or modified CDS sequence (opt5) from hemagglutinin__InfluenzaB__ALN39730
augaaggccaucauugugcugcucauggucguuaccagcaacgcugacagaaucugcacaggcauuacguccucuaauagcccccacguggugaaaaccgccacacagggggaggucaacgugaccggaguuaucccucugacaaccacaccgaccaagucccauuucgcgaaucuuaaaggcacggaaacccgggggaagcugugucccaaaugccucaacuguacagaucuggacguggcucuuggacgcccuaagugcaccggcaagauucccucugccagagucagcauccugcacgaggugcggccuguuacauccggguguuuucccaucaugcaugaucgcaccaaaauuagacaacucccuaaucugcugcggggauacgaacacgugcgccucucuacgcauaacgucaucaaugccgaggacgcuccgggcggccccuauaagauugggacaagcggauccugcccuaacaucaccaauggcaacggguucuuugccacaauggcuugggccgugcccaaaaaugauaagaacaaaaccgcgaccaauccucugacaauugaagugcccuacaucuguacggagggagaggaccagauuaccgucuggggcuuccacagcgauaacgaaacacagauggccaagcuguauggggacucuaagccgcagaaauuuaccuccagcgcuaauggaguuacaacccacuacgugucucaaaucggcggcuucccuaaccagacggaggaugggggacugccccaguccggcagaaucguggucgacuauauggugcaaaagagcgggaaaacaggaaccauuaccuaccagcggggcauccuccugccucagaagguuuggugcgccucugggcgcuccaaagugauuaagggaagccuuccccugaucggcgaagcugauugucuccaugagaaauauggcgggcugaacaaguccaagcccuacuacacaggagagcacgccaaagcgauuggcaauugcccuaucugggucaagaccccgcugaaacucgccaacgggacaaaguauagacccccugcuaaacugcuuaaggaacggggauuuuucggcgccaucgcuggguuucuggagggcggaugggaaggcaugauugccggguggcauggauacacgucucacggcgcccacgggguggcuguugcggccgaccucaagagcacccaggaggcuaucaauaaaauuacaaagaaccuuaauucccuuagcgaacuggaggugaaaaaccuccagcgccugucuggagccauggaugagcugcauaaugaaauccucgagcuggacgaaaaggucgacgaucuuagagccgacaccauuuccagccaaaucgagcuggcugugcuccugucuaacgaaggcaucauuaauagcgaggaugagcaccuucuggcccucgaacggaaacugaagaagaugcuggggcccuccgcggucgagaucggcaacggauguuucgaaacaaaacauaagugcaaucagaccugccucgaccgcauugcugccggcacguuugaugccggggaguucuuucugccuaccuucgacucucuuaacaucacagcugccagccugaaugaugacggacucgauaaccacaccauucugcuguauuacuccacagcugccagcucucuugcggugacccucaugaucgccauuuucguuguguauauggucuccagagacaaugugagcuguucuaucugccuguga

SEQ ID NO: 220542 - RNA, 1755 nt, Artificial Sequence; identical to SEQ ID NO: 220361
  derived and/or modified CDS sequence (opt5) from hemagglutinin__InfluenzaB__ALN39732

SEQ ID NO: 220543 - RNA, 1755 nt, Artificial Sequence
  derived and/or modified CDS sequence (opt5) from hemagglutinin__InfluenzaB__ALN39733
augaaggccaucauugugcugcucauggucguuaccagcaacgcugacagaaucugcacaggcauuacguccucuaauagcccccacguggugaaaaccgccacacagggggaagucaacgugaccggaguuaucccucugacaaccacaccgaccaaguccuacuucgcgaaucuuaaaggcacgcggacccgcgggaagcugugucccgauugccucaacuguacagaccuggauguggcucuuggaagaccuaugugcgucggcaccacacccucugccaaagccagcauucugcaugaagugcggccuguuaccuccggguguuuucccaucaugcacgaccgcacgaagaucagacaacucccuaaucugcugcggggauaugagaagauucgccucucuacacagaacgugaucgaugcugaaaaagccccgggcggccccuacagacuggggaccagcggauccugcccuaaugcuacaagcaagauuggcuucuuugccaccauggcgugggccguccccaaagacaacuauaagaaugcuaccaacccucagacaguggaggugcccuacaucuguacggaaggggaggaucagauuaccgucuggggauuccauucugacaauaaaacacaaaugaagucccuuuauggcgauagcaacccgcagaaguuuaccucuuccgccaaugggguuacaacccacuacgugagccagaucggagacuucccugaucagacggaggacggcggccugccccaaucugggcggauuguggucgauuauaugaugcagaaaccuggaaagacaggcaccaucguguaccagcgcgggguucuccugccccagaaaguguggugcgcuuccggaagaagcaaggucaucaaaggcucccuuccccugauuggggaagccgacugucuccaugaggaauacggaggccugaacaagucuaaaccuuauuacaccggcaagcacgcgaaggccaucgggaauugcccgauuugggugaaaacaccccugaagcucgcuaacggaaccaaauaucggccucccgccaagcugcuuaaagagcgcggcuuuuucggggcuaucgccggauuucuggagggcgggugggaaggcaugauugccggauggcacggcuacacaagccauggggcucacggaguugcgguggccgcugaccucaaguccacgcaagaggccaucaacaagaucaccaaaaaucugaacagccuuucugaacuggaggucaagaaucuccagagacuguccggcgccauggaugaacugcauaacgagauucucgagcuggacgaaaaaguggaugaccuucgggcugauacaaucagcucucagauugagcuggccguccuccugagcaaugaagggaucauuaacuccgaggacgaacaccuucuggcgcucgagcgcaagcugaaaaagaugcugggaccuucugcuguggauaucggcaauggguguuucgagaccaagcacagaugcaaccaaacaugccucgaccggaucgccgccggcaccuuuaaugcuggagaguucagccugcccacguuugauucccuuaacauuaccgccgcuagccugaaugacgauggccucgacaaccauacaauccugcuguauuacucuaccgccgcguccagccuugccguuacacucaugcuggcuauuuucaucguguauauggucucuagagacaauguguccuguagcauuugccuguga

SEQ ID NO: 220544 - RNA, 1755 nt, Artificial Sequence
  derived and/or modified CDS sequence (opt5) from hemagglutinin__InfluenzaB__ALN39751
augaaggccaucauugugcugcucauggucguuaccagcaacgcugacagaaucugcacaggcauuacguccucuaauagcccccacguggugaaaaccgccacacagggggaagucaacgugaccggaguuaucccucugacaaccacaccgaccaaguccuacuucgcgaaucuuaaaggcacgcggacccgcgggaagcugugucccgauugccucaacuguacagaccuggauguggcucuuggaagaccuaugugcgucggcaccacacccucugccaaagccagcauucugcaugaagugcggccuguuaccuccggguguuuucccaucaugcacgaccgcacgaagaucagacaacucccuaaucugcugcggggauaugagaagauucgccucucuacacagaacgugaucgaugcugaaaaagccccgggcggccccuacagacuggggaccagcggauccugcccuaaugcuacaagcaagauuggcuucuuugccaccauggcgugggccguccccaaagacaacuauaagaaugcuaccaacccucagacaguggaggugcccuacaucuguacggaaggggaggaucagauuaccgucuggggauuccauucugacaauaaaacacaaaugaagucccuuuauggcgauagcaacccgcagaaguuuaccucuuccgccaaugggguuacaacccacuacgugagccagaucggagacuucccugaucagacggaggacggcggccugccccaaucugggcggauuguggucgauuauaugaugcagaaaccuggaaagacaggcaccaucguguaccagcgcgggguucuccugccccagaaaguguggugcgcuuccggaagaagcaaggucaucaaaggcucccuuccccugauuggggaagccgacugucuccaugaggaauacggaggccugaacaagucuaaaccuuauuacaccggcaagcacgcgaaggccaucgggaauugcccgauuugggugaaaacaccccugaagcucgcuaacggaaccaaauaucggccucccgccaagcugcuuaaagagcgcggcuuuuucggggcuaucgccggauuucuggagggcgggugggaaggcaugguugccggauggcacggcuacacaagccauggggcucacggaguggcggucgccgcugaccucaaguccacgcaagaggccauuaacaagaucaccaaaaaucugaacagccuuucugaacuggaggugaagaaucuccagagacuguccggcgccauggaugaacugcauaacgagauccucgagcuggacgaaaaagucgaugaccuucgggcugauacaauuagcucucagaucgagcuggccgugcuccugagcaaugaagggauuaucaacuccgaggacgaacaccuucuggcgcucgagcgcaagcugaaaaagaugcugggaccuucugcuguugauauuggcaauggguguuucgagaccaagcacaaaugcaaccaaacaugccucgacagaaucgccgccggcaccuuuaaugcuggagaguucagccugcccacguuugauucccuuaacaucaccgccgcuagccugaaugacgauggccucgacaaccauacaauucugcuguauuacucuaccgccgcguccagccuugccgugacacucaugcuggcucuguucaucgucuauauggugucucgggacaauguuuccuguagcauuugccucuga

SEQ ID NO: 220545 - RNA, 1755 nt, Artificial Sequence; identical to SEQ ID NO: 220520
  derived and/or modified CDS sequence (opt5) from hemagglutinin__InfluenzaB__ALN39752

SEQ ID NO: 220546 - RNA, 1755 nt, Artificial Sequence; identical to SEQ ID NO: 220361
  derived and/or modified CDS sequence (opt5) from hemagglutinin__InfluenzaB__ALN39753

SEQ ID NO: 220547 - RNA, 1758 nt, Artificial Sequence
  derived and/or modified CDS sequence (opt5) from hemagglutinin__InfluenzaB__ALN39754
augaaggccaucauugugcugcucauggucguuaccagcaacgcugacagaaucugcacaggcauuacguccucuaauagcccccacguggugaaaaccgccacacagggggaggucaacgugaccggaguuaucccucugacaaccacaccgaccaagucccauuucgcgaaucuuaaaggcacggaaacccgggggaagcugugucccaaaugccucaacuguacagaucuggacguggcucuuggacgcccuaagugcaccggcaagauucccucugccagagucagcauccugcacgaggugcggccuguuacauccggguguuuucccaucaugcaugaucgcaccaaaauuagacaacucccuaaucugcugcggggauacgaacacgugcgccucucuacgcauaacgucaucaaugccgaggacgcuccgggcggccccuauaagauugggacaagcggauccugcccuaacaucaccaauggcaacggguucuuugccacaauggcuugggccgugcccaaaaaugauaagaacaaaaccgcgaccaauccucugacaauugaagugcccuacaucuguacggagggagaggaccagauuaccgucuggggcuuccacagcgauaacgaaacacagauggccaagcuguauggggacucuaagccgcagaaauuuaccuccagcgcuaauggaguuacaacccacuacgugucucaaaucggcggcuucccuaaccagacggaggaugggggacugccccaguccggcagaaucguggucgacuauauggugcaaaagagcgggaaaacaggaaccauuaccuaccagcggggcauccuccugccucagaagguuuggugcgccucugggcgcuccaaagugauuaagggaagccuuccccugaucggcgaagcugauugucuccaugagaaauauggcgggcugaacaaguccaagcccuacuacacaggagagcacgccaaagcgauuggcaauugcccuaucugggucaagaccccgcugaaacucgccaacgggacaaaguauagacccccugcuaaacugcuuaaggaacggggauuuuucggcgccaucgcuggguuucuggagggcggaugggaaggcaugauugccggguggcauggauacacgucucacggcgcccacgggguggcuguugcggccgaccucaagagcacccaggaggcuaucaauaaaauuacaaagaaccuuaauucccuuagcgaacuggaggugaaaaaccuccagcgccugucuggagccauggaugagcugcauaaugaaauccucgagcuggacgaaaaggucgacgaucuuagagccgacaccauuuccagccaaaucgagcuggcugugcuccugucuaacgaaggcaucauuaauagcgaggaugagcaccuucuggcccucgaacggaaacugaagaagaugcuggggcccuccgcggucgagaucggcaacggauguuucgaaacaaaacauaagugcaaucagaccugccucgaccgcauugcugccggcacguuugaugccggggaguucucucugccuaccuuugacagccuuaacaucacagcugccucccugaaugaugacggacucgauaaccacaccauucugcuguauuacagcacagcugccucuucccuugcggugacccucaugaucgccauuuucguuguguauauggucagcagagacaaugugucuuguuccaucugccuguga

SEQ ID NO: 220548 - RNA, 1758 nt, Artificial Sequence
  derived and/or modified CDS sequence (opt5) from hemagglutinin__InfluenzaB__ALN39755
augaaggccaucauugugcugcuccuggucguuaccagcaacgcugacagaaucugcacaggcauuacguccucuaauagcccccacguggugaaaaccgccacacagggggaggucaacgugaccggaguuaucccucuuacaaccacaccgaccaagucccauuucgcgaaucugaaaggcacggaaacccgggggaagcucugucccaaaugccugaacuguacagaucuugacguggcucugggacgcccuaagugcaccggcaagauucccucugccagagucagcauccuccacgaggugcggccuguuacauccggguguuuucccaucaugcaugaucgcaccaaaauuagacaacugccuaaucugcuccggggauacgaacacgugcgccugucuacgcauaacgucaucaaugccgaggacgcuccgggcggccccuauaagauugggacaagcggauccugcccuaacaucaccaauggcaacggguucuuugccacaauggcuugggccgugcccaaaaaugauaagaacaaaaccgcgaccaauccucuuacaauugaagugcccuacaucuguacggagggagaggaccagauuaccgucuggggcuuccacagcgauaacgaaacacagauggccaagcuguauggggacucuaagccgcagaaauuuaccuccagcgcuaauggaguuacaacccacuacgugucucaaaucggcggcuucccuaaccagacggaggaugggggacucccccaguccggcagaaucguggucgacuauauggugcaaaagagcgggaaaacaggaaccauuaccuaccagcggggcauccugcuuccucagaagguuuggugcgccucugggcgcuccaaagugauuaagggaagccugccccucaucggcgaagcugauugucugcaugagaaauauggcgggcugaacaaguccaagcccuacuacacaggagagcacgccaaagcgauuggcaauugcccuaucugggucaagaccccgcucaaacuggccaacgggacaaaguauagacccccugcuaaacuucugaaggaacggggauuuuucggcgccaucgcuggguuucucgagggcggaugggaaggcaugauugccggguggcauggauacacgucucacggcgcccacgggguggcuguugcggccgaccugaaaagcacccaggaggcuaucaauaagauuacaaagaaccuuaauucccugagcgaacucgaggugaaaaaccugcagcgccugucuggagccauggaugagcuccauaaugaaauccuggagcuugacgaaaaggucgacgaucugagagccgacaccauuuccagccaaaucgagcucgcugugcugcuuucuaacgaaggcaucauuaauagcgaggaugagcaucugcucgcccuggaacggaaacugaagaagaugcucgggcccuccgcggucgagaucggcaacggauguuucgaaacaaaacacaagugcaaucagaccugccuggaccgcauugcugccggcacguuugaugccggggaguucucucuuccuaccuuugacagccugaacaucacagcugccucccucaaugaugacggacuggauaaccacaccauucugcuuuauuacagcacagcugccucuucccucgcggugacccugaugaucgccauuuucguuguguauauggucagcagagacaaugugucuuguuccaucugccuguga

SEQ ID NO: 220549 - RNA, 1755 nt, Artificial Sequence
  derived and/or modified CDS sequence (opt5) from hemagglutinin__InfluenzaB__ALN39756
augaaggccaucauugugcugcucauggucguuaccagcaacgcugacagaaucugcacaggcauuacguccucuaauagcccccacguggugaaaaccgccacacagggggaagucaacgugaccggaguuaucccucugacaaccacaccgaccaaguccuacuucgcgaaucuuaaaggcacgcggacccgcgggaagcugugucccgauugccucaacuguacagaccuggauguggcucuuggaagaccuaugugcgucggcaccacacccucugccaaagccagcauucugcaugaagugcggccuguuaccuccggguguuuucccaucaugcacgaccgcacgaagaucagacaacucccuaaucugcugcggggauaugagaagauucgccucucuacacagaacgugaucgaugcugaaaaagccccgggcggccccuacagacuggggaccagcggauccugcccuaaugcuacaagcaagauuggcuucuuugccaccauggcgugggccguccccaaagacaacuauaagaaugcuaccaacccucagacaguggaggugcccuacaucuguacggaaggggaggaucagauuaccgucuggggauuccauucugacaauaaaacacaaaugaagucccuuuauggcgauagcaacccgcagaaguuuaccucuuccgccaaugggguuacaacccacuacgugagccagaucggagacuucccugaucagacggaggacggcggccugccccaaucugggcggauuguggucgauuauaugaugcagaaaccuggaaagacaggcaccaucguguaccagcgcgggguucuccugccccagaaaguguggugcgcuuccggaagaagcaaggucaucaaaggcucccuuccccugauuggggaagccgacugucuccaugaggaauacggaggccugaacaagucuaaaccuuauuacaccggcaagcacgcgaaggccaucgggaauugcccgauuugggugaaaacaccccugaagcucgcuaacggaaccaaauaucggccucccgccaagcugcuuaaagagcgcggcuuuuucggggcuaucgccggauuucuggagggcgggugggaaggcaugauugccggauggcacggcuacacaagccauggggcucacggaguugcgguggccgcugaccucaaguccacgcaagaggccaucaacaagaucaccaaaaaucugaacagccuuucugaacuggaggucaagaaucuccagagacuguccggcgccauggaugaacugcauaacgagauucucgagcuggacgaaaaaguggaugaccuucgggcugauacaaucagcucucagauugagcuggccguccuccugagcaaugaagggaucauuaacuccgaggacgaacaccuucuggcgcucgagcgcaagcugaaaaagaugcugggaccuucugcuguggauaucggcaauggguguuucgagaccaagcacaaaugcaaccaaacaugccucgacagaaucgccgccggcaccuuuaauguuggagaguucagccugcccacguuugauucccuuaacauuaccgcugccagccugaaugacgauggccucgacaaccauacaauccugcuguauuacucuaccgcugccuccagccuugcggugacacucaugcuggccauuuucaucgucuauauggugucucgggacaauguuuccuguagcauuugccuguga

SEQ ID NO: 220550 - RNA, 1758 nt, Artificial Sequence; identical to SEQ ID NO: 220547
  derived and/or modified CDS sequence (opt5) from hemagglutinin__InfluenzaB__ALN39757

SEQ ID NO: 220551 - RNA, 1755 nt, Artificial Sequence; identical to SEQ ID NO: 220361
  derived and/or modified CDS sequence (opt5) from hemagglutinin__InfluenzaB__ALN39758

SEQ ID NO: 220552 - RNA, 1755 nt, Artificial Sequence
  derived and/or modified CDS sequence (opt5) from hemagglutinin__InfluenzaB__ALN39759
augaagaccaucauugugcugcucauggucguuacaagcaacgccgacagaaucugcacgggcauuaccuccucuaauagcccccacguggugaaaacagcuacccagggggaagucaacgugacaggaguuaucccucugaccacaaccccgacgaaguccuacuucgccaaucuuaaaggcacccggacacgcgggaagcugugucccgauugccucaacuguaccgaccuggauguggcgcuuggaagaccuaugugcgucggcacaacccccucugcuaaagccagcauucugcaugaagugcggccuguuacguccggguguuuucccaucaugcacgaccgcacaaagaucagacaacucccuaaucugcugcggggauaugagaagauucgccucucuacccagaacgugaucgaugccgaaaaagcuccgggcggccccuacagacuggggacaagcggauccugcccuaaugccaccagcaagauuggcuucuuugcuaccauggccugggcgguccccaaagacaacuauaagaaugccacaaacccucagacgguggaggugcccuacaucuguaccgaaggggaggaucagauuacagucuggggauuccauucugacaauaaaacccaaaugaagucccuuuauggcgauagcaacccgcagaaguuuacaucuuccgcuaaugggguuaccacgcacuacgugagccagaucggagacuucccugaucagacagaggacggcggccugccccaaucugggcggauuguggucgauuauaugaugcagaaaccuggaaagaccggcaccaucguguaccagcgcgggguucuccugccccagaaaguguggugcgccuccggaagaagcaaggucaucaaaggcucccuuccccugauuggggaagcugacugucuccaugaggaauacggaggccugaacaagucuaaaccuuauuacacaggcaagcacgccaaggcgaucgggaauugcccgauuugggugaaaacaccccugaagcucgccaacggaacaaaauaucggccucccgcuaagcugcuuaaagagcgcggcuuuuucggggccaucgcuggauuucuggagggcgggugggaaggcaugauugccggauggcacggcuacacgagccauggggcccacggaguugcuguggcggccgaccucaaguccacccaagaggcuaucaacaagaucaccaaaaaucugaacagccuuucugaacuggaggucaagaaucuccagagacuguccggcgccauggaugaacugcauaacgagauucucgagcuggacgaaaaaguggaugaccuucgggccgauaccaucagcucucagauugagcuggcuguccuccugagcaaugaagggaucauuaacuccgaggacgaacaccuucuggcccucgagcgcaagcugaaaaagaugcugggaccuucugcgguggauaucggcaauggguguuucgagacaaagcacaaaugcaaccaaaccugccucgacagaaucgcugccggcacguuuaaugccggagaguucagccugcccaccuuugauucccuuaacauuacagcugccagccugaaugacgauggccucgacaaccauaccauccugcuguauuacucuacagcugccuccagccuugcgguuacccucaugcuggccauuuucaucguguauauggucucucgggacaauguguccuguagcauuugccuguga

SEQ ID NO: 220553 - RNA, 1758 nt, Artificial Sequence; identical to SEQ ID NO: 220511
  derived and/or modified CDS sequence (opt5) from hemagglutinin__InfluenzaB__ALN39760

SEQ ID NO: 220554 - RNA, 1755 nt, Artificial Sequence; identical to SEQ ID NO: 220361
  derived and/or modified CDS sequence (opt5) from hemagglutinin__InfluenzaB__ALN39761

SEQ ID NO: 220555 - RNA, 1755 nt, Artificial Sequence; identical to SEQ ID NO: 220361
  derived and/or modified CDS sequence (opt5) from hemagglutinin__InfluenzaB__ALN39762

SEQ ID NO: 220556 - RNA, 1755 nt, Artificial Sequence; identical to SEQ ID NO: 220361
  derived and/or modified CDS sequence (opt5) from hemagglutinin__InfluenzaB__ALN39763

SEQ ID NO: 220557 - RNA, 1758 nt, Artificial Sequence; identical to SEQ ID NO: 220547
  derived and/or modified CDS sequence (opt5) from hemagglutinin__InfluenzaB__ALN39764

SEQ ID NO: 220558 - RNA, 1755 nt, Artificial Sequence
  derived and/or modified CDS sequence (opt5) from hemagglutinin__InfluenzaB__ALN39765
augaaggccaucauugugcugcucauggucguuaccagcaacgcugacagaaucugcacaggcauuacguccucuaauagcccccacguggugaaaaccgccacacagggggaagucaacgugaccggaguuaucccucugacaaccacaccgaccaaguccuacuucgcgaaucuuaaaggcacgcggacccgcgggaagcugugucccgauugccucaacuguacagaccuggauguggcucuuggaagaccuaugugcgucggcaccacacccucugccaaagccagcauucugcaugaagugcggccuguuaccuccggguguuuucccaucaugcacgaccgcacgaagaucagacaacucccuaaucugcugcggggauaugagaagauucgccucucuacacagaacgugaucgaugcugaaaaagccccgggcggccccuacagacuggggaccagcggauccugcccuaaugcuacaagcaagauuggcuucuuugccaccauggcgugggccguccccaaagacaacuauaagaaugcuaccaacccucagacaguggaggugcccuacaucuguacggaaggggaggaucagauuaccgucuggggauuccauucugacaauaaaacacaaaugaagucccuuuauggcgauagcaacccgcagaaguuuaccucuuccgccaaugggguuacaacccacuacgugagccagaucggagacuucccugaucagacggaggacggcggccugccccaaucugggcggauuguggucgauuauaugaugcagaaaccuggaaagacaggcaccaucguguaccagcgcgggguucuccugccccagaaaguguggugcgcuuccggaagaagcaaggucaucaaaggcucccuuccccugauuggggaagccgacugucuccaugaggaauacggaggccugaacaagucuaaaccuuauuacaccggcaagcacgcgaaggccaucgggaauugcccgauuugggugaaaacaccccugaagcucgcuaacggaaccaaauaucggccucccgccaagcugcuuaaagagcgcggcuuuuucggggcuaucgccggauuucuggagggcgggugggaaggcaugauugccggauggcacggcuacacaagccauggggcucacggaguugcgguggccgcugaccucaaguccacgcaagaggccaucaacaagaucaccaaaaaucugaacagccuuucugaacuggaggucaauaaccuccagagacuguccggcgccauggaugaacugcauaaugagauucucgagcuggacgaaaagguggaugaccuucgggcugauacaaucagcucucagauugagcuggccguccuccugagcaacgaagggaucauuaauuccgaggacgaacaccuucuggcgcucgagcgcaaacugaagaaaaugcugggaccuucugcuguggauaucggcaacggguguuucgagaccaagcacaagugcaaucaaacaugccucgacagaaucgccgccggcaccuuuaacgcuggagaguucagccugcccacguuugauucccuuaauauuaccgccgcuagccugaacgacgauggccucgacaaucauacaauccugcuguauuacucuaccgccgcguccagccuugccguuacacucaugcuggcucuguucauuguguauauggucucucgggacaacguguccuguagcaucugccucuga

SEQ ID NO: 220559 - RNA, 1755 nt, Artificial Sequence; identical to SEQ ID NO: 220524
  derived and/or modified CDS sequence (opt5) from hemagglutinin__InfluenzaB__ALN39766

SEQ ID NO: 220560 - RNA, 1755 nt, Artificial Sequence; identical to SEQ ID NO: 220361
  derived and/or modified CDS sequence (opt5) from hemagglutinin__InfluenzaB__ALN39767

SEQ ID NO: 220561 - RNA, 1755 nt, Artificial Sequence; identical to SEQ ID NO: 220524
  derived and/or modified CDS sequence (opt5) from hemagglutinin__InfluenzaB__ALN39768

SEQ ID NO: 220562 - RNA, 1755 nt, Artificial Sequence
  derived and/or modified CDS sequence (opt5) from hemagglutinin__InfluenzaB__ALN39769
augaaggccaucauugugcugcucauggucguuaccagcaacgcugacagaaucugcacaggcauuacguccucuaauagcccccacguggugaaaaccgccacacagggggaggucaacgugaccggaguuaucccucugacaaccacaccgaccaaguccuacuucgcgaaucuuaaaggcacgcggacccgcgggaagcugugucccgauugccucaacuguacagaccuggauguggcucuuggaagaccuaugugcgucggcaccacacccucugccaaagccagcauucugcaugaagugcggccuguuaccuccggguguuuucccaucaugcacggacgcacgaagaucagacaacucccuaaucugcugcggggcuaugagaagauucgccucucuacacagaacgugaucgacgcugaaaaagccccgggcgggcccuacagacugggaaccagcggcuccugcccuaaugcuacaagcaagauuggguucuuugccaccauggcgugggccguccccaaagauaacuauaagaaugcuaccaacccucagacaguggaggugcccuacaucuguacggaaggagaggaccagauuaccgucuggggcuuccauucugauaauaaaacacaaaugaagucccuuuauggggacagcaacccgcagaaguuuaccucuuccgccaauggaguuacaacccacuacgugagccagaucggcgauuucccugaccagacggaggauggcgggcugccccaaucuggacggauuguggucgacuauaugaugcagaaaccuggcaagacagggaccaucguguaccagcgcggaguucuccugccccagaaaguguggugcgcuuccggcagaagcaaggucaucaaagggucccuuccccugauuggagaagccgauugucuccaugaggaauacggcggccugaacaagucuaaaccuuauuacaccgggaagcacgcgaaggccaucggaaauugcccgauuugggugaaaacaccccugaagcucgcuaacggcaccaaauaucggccucccgccaagcugcuuaaagagcgcggguuuuucggagcuaucgccggcuuucuggaagggggcugggaaggaaugauugccggcuggcacggguacacaagccauggagcucacggcguugcgguggccgcugaccucaaguccacgcaagaggccaucaacaagaucaccaaaaaucugaacagccuuucugaacuggaggucaagaaucuccagagacuguccggggccauggacgaacugcauaacgagauucucgagcuggaugaaaaaguggacgaucuucgggcugacacaaucagcucucagauugagcuggccguccuccugagcaaugaaggaaucauuaacuccgaggaugaacaccuucuggcgcucgagcgcaagcugaaaaagaugcugggcccuucugcuguggacaucgggaauggcuguuucgagaccaagcacaaaugcaaccaaacaugccucgauagaaucgccgccggaaccuuuaaugcuggcgaguucagccugcccacguuugacucccuuaacauuaccgccgcuagccugaaugaugacgggcucgauaaccauacaauccugcuguauuacucuaccgccgcguccagccuugccguuacacucaugcuggcuauuuucaucguguauauggucucucgggacaauguguccuguagcauuugccuguga

SEQ ID NO: 220563 - RNA, 1755 nt, Artificial Sequence; identical to SEQ ID NO: 220520
  derived and/or modified CDS sequence (opt5) from hemagglutinin__InfluenzaB__ALN39770

SEQ ID NO: 220564 - RNA, 1755 nt, Artificial Sequence; identical to SEQ ID NO: 220520
  derived and/or modified CDS sequence (opt5) from hemagglutinin__InfluenzaB__ALN39771

SEQ ID NO: 220565 - RNA, 1755 nt, Artificial Sequence; identical to SEQ ID NO: 220361
  derived and/or modified CDS sequence (opt5) from hemagglutinin__InfluenzaB__ALN39773

SEQ ID NO: 220566 - RNA, 1755 nt, Artificial Sequence; identical to SEQ ID NO: 220361
  derived and/or modified CDS sequence (opt5) from hemagglutinin__InfluenzaB__ALN39774

SEQ ID NO: 220567 - RNA, 1758 nt, Artificial Sequence
  derived and/or modified CDS sequence (opt5) from hemagglutinin__InfluenzaB__ALN39775
augcaggccaucauugugcugcucauggucguuaccagcaacgcugacagaaucugcacaggcauuacguccucuaauagcccccacguggugaagaccgccacacaaggggaggucaacgugaccggaguuaucccucugacaaccacaccgaccaaaucccauuucgcgaaucuuaagggcacggaaacccgggggaaacugugucccaagugccucaacuguacagaucuggacguggcucuuggacgcccuaaaugcaccggcaagauucccucugccagagucagcauccugcacgaggugcggccuguuacauccggguguuuucccaucaugcaugaucgcaccaagauuagacagcucccuaaucugcugcggggauacgaacacauccgccucucuacgcauaacgugauuaaugccgaggacgcuccgggcggccccuauaaaaucgggacaagcggauccugcccuaacauuaccaauggcaacggguucuuugccacaauggcuugggccguccccaagaaugauaaaaacaagaccgcgaccaauccucugacaaucgaagugcccuacauuuguacggagggagaggaccagaucaccguguggggcuuccacagcgauaacgaaacacagauggccaaacuuuauggggacucuaagccgcaaaaguuuaccuccagcgcuaauggagucacaacccacuacguuucucagaucggcggcuucccuaaccagacggaggaugggggacugccccaguccggcagaauugugaucgacuauauggugcaaaaauccgggaagacaggaaccauuaccuaccagcggggcauccuccugccucagaaagucuggugcgugucugggcgcuccaagguuauuaaaggaagccuuccccugaucggcgaagccgauugucuccaugagaaguauggcgggcugaacaaauccaagcccuacuacacaggagagcacgcuaaggccgugggcaauugcccuaucugggucaaaaccccgcugaagcucgcgaacgggacaaaauauagacccccugccaagcugcuuaaagaacggggauuuuucggcgcuauugccggguuucuggagggcggaugggaaggcaugaucgcuggguggcauggauacacgucucacggcgcccacgggguggccguugcugcggaccucaagagcacccaggaggccauuaauaagaucaccaaaaaccugaauagccuuagcgaacuggaggugaagaaccuccaacgccugucuggagcuauggaugagcugcauaaugaaauucucgagcuggacgaaaaagucgacgaucuuagagccgacacaaucuccagccagaucgagcuggccgugcuccugucuaacgaaggcauuaucaauagcgaggaugagcaccuucuggcucucgaacggaagcugaaaaagaugcuggggcccuccgccgucgagauuggcaacggauguuucgaaacaaagcauaaaugcaaucagaccugccucgaccgcaucgcggcuggcacguuugaugccggggaguucucucugccuaccuuugacagccuuaacauuacagccgcuucccugaaugaugacggacucgauaaccacaccauccugcuguauuacagcacagccgcuucuucccuugccgugacccucaugauugcgaucuucguuguguauauggucagcagagacaaugugucuuguuccaucugccuguga

SEQ ID NO: 220568 - RNA, 1755 nt, Artificial Sequence
  derived and/or modified CDS sequence (opt5) from hemagglutinin__InfluenzaB__ALN39776
augaaggccaucauuauccugcucaugguggucaccagcaacgcugacagaauuugcacaggcaucacguccucuaauagcccccacguugugaaaaccgccacacagggggaagugaacgucaccggagugauuccucugacaaccacaccgaccaaguccuacuucgcgaaucuuaaaggcacgcggacccgcgggaagcugugucccgauugccucaacuguacagaccuggauguugcucuuggaagaccuaugugcgugggcaccacacccucugccaaagccagcauccugcaugaaguccggccugugaccuccggguguuuucccaucaugcacgaccgcacgaagauuagacaacucccuaaucugcugcggggauaugagaagauccgccucucuacacagaacguuauugaugcugaaaaagccccgggcggccccuacagacuggggaccagcggauccugcccuaaugcuacaagcaagaucggcuucuuugccaccauggcgugggccgugcccaaagacaacuauaagaaugcuaccaacccucagacagucgaggugcccuacauuuguacggaaggggaggaucagaucaccguguggggauuccauucugacaauaaaacacaaaugaagucccuuuauggcgauagcaacccgcagaaguuuaccucuuccgccaauggggucacaacccacuacguuagccagauuggagacuucccugaucagacggaggacggcggccugccccaaucugggcggaucgugguggauuauaugaugcagaaaccuggaaagacaggcaccaucgucuaccagcgcggggugcuccugccccagaaaguuuggugcgcuuccggaagaagcaaggugauuaaaggcucccuuccccugaucggggaagccgacugucuccaugaggaauacggaggccugaacaagucuaaaccuuauuacaccggcaagcacgcgaaggccauugggaauugcccgaucugggucaaaacaccccugaagcucgcuaacggaaccaaauaucggccucccgccaagcugcuuaaagagcgcggcuuuuucggggcuauugccggauuucuggagggcgggugggaaggcaugaucgccggauggcacggcuacacaagccauggggcucacggaguggcgguugccgcugaccucaaguccacgcaagaggccaucaacaagauuaccaaaaaucugaacagccuuucugaacuggaggugaagaaucuccagagacuguccggcgccauggaugaacugcauaacgagauccucgagcuggacgaaaaagucgaugaccuucgggcugauacaauuagcucucagaucgagcuggccgugcuccugagcaaugaagggauuaucaacuccgaggacgaacaccuucuggcgcucgagcgcaagcugaaaaagaugcugggaccuucugcugucgauaucggcaauggguguuucgagaccaagcacaaaugcaaccaaacaugccucgacagaauugccgccggcaccuuuaaugcuggagaguucagccugcccacguuugauucccuuaacaucaccgccgcuagccugaaugacgauggccucgacaaccauacaauucugcuguauuacucuaccgccgcguccagccuugccgugacacucaugcuggcuaucuucauuguuuauauggugucucgggacaaugucuccuguagcaucugccuguga

SEQ ID NO: 220569 - RNA, 1755 nt, Artificial Sequence; identical to SEQ ID NO: 220524
  derived and/or modified CDS sequence (opt5) from hemagglutinin__InfluenzaB__ALN39778

SEQ ID NO: 220570 - RNA, 1758 nt, Artificial Sequence; identical to SEQ ID NO: 220547
  derived and/or modified CDS sequence (opt5) from hemagglutinin__InfluenzaB__ALN39779

SEQ ID NO: 220571 - RNA, 1755 nt, Artificial Sequence; identical to SEQ ID NO: 220361
  derived and/or modified CDS sequence (opt5) from hemagglutinin__InfluenzaB__ALN39780

SEQ ID NO: 220572 - RNA, 1758 nt, Artificial Sequence; identical to SEQ ID NO: 220547
  derived and/or modified CDS sequence (opt5) from hemagglutinin__InfluenzaB__ALN39781

SEQ ID NO: 220573 - RNA, 1758 nt, Artificial Sequence; identical to SEQ ID NO: 220511
  derived and/or modified CDS sequence (opt5) from hemagglutinin__InfluenzaB__ALN39782

SEQ ID NO: 220574 - RNA, 1755 nt, Artificial Sequence
  derived and/or modified CDS sequence (opt5) from hemagglutinin__InfluenzaB__ALN39783
augaaggccaucauugugcugcucauggucguuaccagcaacgcugacagaaucugcacaggcauuacguccucuaauagcccccacguggugaaaaccgccacacagggggaagucaacgugaccggaguuaucccucugacaaccacaccgaccaaguccuacuucgcgaaucuuaaaggcacgcggacccgcgggaagcugugucccgauugccucaacuguacagaccuggauguggcucuuggaagaccuaugugcgucggcaccacacccucugccaaagccagcauucugcaugaagugcggccuguuaccuccggguguuuucccaucaugcacgaccgcacgaagaucagacaacucccuaaucugcugcggggauaugagaagauucgccucucuacacagaacgugaucgaugcugaaaaagccccgggcggccccuacagacuggggaccagcggauccugcccuaaugcuacaagcaagauuggcuucuuugccaccauggcgugggccguccccaaagacaacuauaagaaugcuaccaaccuucagacaguggaggugccuuacaucuguacggaaggggaggaucagauuaccgucuggggauuccauucugacaauaaaacacaaaugaagucccuguauggcgauagcaacccccagaaguuuaccucuuccgccaaugggguuacaacccacuacgugagccagaucggagacuucccggaucagacggaggacggcggccucccucaaucugggcggauuguggucgauuauauggugcagaaacccggaaagacaggcaccaucguuuaccagcgcggggugcugcuuccucagaaagucuggugcgcuuccggaagaagcaaggugaucaaaggcucccugccccucauuggggaagccgacugucugcaugaggaauacggaggccugaacaagucuaaacccuauuacaccggcaagcacgcgaaggccaucgggaauugcccuauuuggguuaaaacaccgcucaagcuggcuaacggaaccaaauaucggcccccugccaagcugcugaaagagcgcggcuuuuucggggcuaucgccggauuucucgagggcgggugggaaggcaugauugccggauggcacggcuacacaagccauggggcucacggaguggcggucgccgcugaccugaaguccacgcaagaggccaucaacaagaucaccaaaaaucuuaacagccugucugaacucgaggugaagaaucugcagagacuguccggcgccauggaugaacuccauaacgagauucuggagcuugacgaaaaagucgaugaccugcgggcugauacaaucagcucucagauugagcucgccgugcugcuuagcaaugaagggaucauuaacuccgaggacgaacaccuucucgcgcuggagcgcaagcugaaaaagaugcucggacccucugcuguugauaucggcaauggguguuucgagaccaagcacaaaugcaaccaaacaugccuggacagaaucgccgccggcaccuuuaaugcuggagaguucagccuuccuacguuugauucccugaacauuaccgccgcuagccucaaugacgauggccuggacaaccauacaauccugcuuuauuacucuaccgccgcguccagccucgccgugacacugaugcuggcuauuuucaucgucuauauggugucucgggacaauguuuccuguagcauuugccucuga

SEQ ID NO: 220575 - RNA, 1758 nt, Artificial Sequence; identical to SEQ ID NO: 220523
  derived and/or modified CDS sequence (opt5) from hemagglutinin__InfluenzaB__ALN39784

SEQ ID NO: 220576 - RNA, 1758 nt, Artificial Sequence; identical to SEQ ID NO: 220547
  derived and/or modified CDS sequence (opt5) from hemagglutinin__InfluenzaB__ALN39785

SEQ ID NO: 220577 - RNA, 1755 nt, Artificial Sequence; identical to SEQ ID NO: 220361
  derived and/or modified CDS sequence (opt5) from hemagglutinin__InfluenzaB__ALN39786

SEQ ID NO: 220578 - RNA, 1758 nt, Artificial Sequence; identical to SEQ ID NO: 220547
  derived and/or modified CDS sequence (opt5) from hemagglutinin__InfluenzaB__ALN39787

SEQ ID NO: 220579 - RNA, 1758 nt, Artificial Sequence; identical to SEQ ID NO: 220547
  derived and/or modified CDS sequence (opt5) from hemagglutinin__InfluenzaB__ALN39788

SEQ ID NO: 220580 - RNA, 1755 nt, Artificial Sequence
  derived and/or modified CDS sequence (opt5) from hemagglutinin__InfluenzaB__ALN39790
augaaggccaucauugugcugcucauggucguuaccagcgacgcugauagaaucugcacaggcauuacguccucuaacagcccccacguggugaaaaccgccacacagggggaagucaaugugaccggaguuaucccucugacaaccacaccgaccaaguccuacuucgcgaaccuuaaaggcacgcggacccgcgggaagcugugucccgacugccucaauuguacagaucuggacguggcucuuggaagaccuaugugcgucggcaccacacccucugccaaagccagcauucugcaugaagugcggccuguuaccuccggguguuuucccaucaugcacgaucgcacgaagaucagacaacucccuaaccugcugcggggauaugagaagauucgccucucuacacagaaugugaucgacgcugaaaaagccccgggcggccccuacagacuggggaccagcggauccugcccuaacgcuacaagcaagauuggcuucuuugccaccauggcgugggccguccccaaagauaauuauaagaacgcuaccaauccucagacaguggaggugcccuacaucuguacggaaggggaggaccagauuaccgucuggggauuccauucugauaacaaaacacaaaugaagucccuuuauggcgacagcaauccgcagcgguuuaccucuuccgccaacgggguuacaacccacuacgugagccagaucggagauuucccugaccagacggaggauggcggccugccccaaucugggcgcauuguggucgacuauauggugcagaagccuggaaaaacaggcaccaucguuuaccagagaggggugcuccugccccagaaggucuggugcgcuuccggacggagcaaagugaucaagggcucccuuccccugauuggggaagccgacugucuccaugaggaauacggaggccugaauaaaucuaagccuuauuacaccggcaaacacgcgaaggccaucgggaacugcccgauuuggguuaagacaccccugaaacucgcuaauggaaccaaguaucgcccucccgccaaacugcuuaaggagagaggcuuuuucggggcuaucgccggauuucuggagggcgggugggaaggcaugauugccggauggcacggcuacacaagccauggggcucacggaguggcggucgccgcugaucucaaauccacgcaagaggccaucaacaagaucaccaagaaccugaauagccuuucugaacuggaggugaaaaaccuccagcggcuguccggcgccauggacgaacugcauaaugagauucucgagcuggaugaaaaggucgacgaucuucgcgcugacacaaucagcucucagauugagcuggccgugcuccugagcaacgaagggaucauuaauuccgaggaugaacaccuucuggcgcucgagagaaaacugaagaaaaugcugggaccuucugcuguugacaucggcaacggguguuucgagaccaagcacaagugcaaucaaacaugccucgaucggaucgccgccggcaccuuuaacgcuggagaguucagccugcccacguuugacucccuuaauauuaccgccgcuagccugaacgaugacggccucgacaaucauacaauccugcuguauuacucuaccgccgcguccagccuugccgugacacucaugcuggcuauuuucaucgucuauauggugucuagagauaacguuuccuguagcauuugccuguga

SEQ ID NO: 220581 - RNA, 1755 nt, Artificial Sequence
  derived and/or modified CDS sequence (opt5) from hemagglutinin__InfluenzaB__ALN39791
augaaggccaucauugugcugcucauggucguuaugagcaacgcugacagaaucugcaccggcauuacauccucuaauagcccccacguggugaaaacggccacccagggggaagucaacgugacaggaguuaucccucugaccacaaccccgacaaaguccuacuucgcgaaucuuaaaggcacccggacgcgcgggaagcugugucccgauugccucaacuguaccgaccuggauguggcucuuggaagaccuaugugcgucggcacaacccccucugccaaagccagcauucugcaugaagugcggccuguuacauccggguguuuucccaucaugcacgaccgcaccaagaucagacaacucccuaaucugcugcggggauaugagaagauucgccucucuacgcagaacgugaucgaugcugaaaaagccccgggcggccccuacagacuggggacaagcggauccugcccuaaugcuaccagcaagauuggcuucuuugccacaauggcgugggccguccccaaagacaacuauaagaaugcuaccaacccucagaccguggaggugcccuacaucuguacagaaggggaggaucagauuacggucuggggauuccauucugacaauaaaacccaaaugaagucccuuuauggcgauagcaacccgcagaaguuuacaucuuccgccaaugggguuaccacacacuacgugagccagaucggagacuucccugaucagaccgaggacggcggccugccccaaucugggcggauuguggucgauuauauggugcagaaaccuggaaagacgggcacaaucguuuaccagcgcggggugcuccugccccagaaagucuggugcgcuuccggaagaagcaaggugaucaaaggcucccuuccccugauuggggaagccgacugucuccaugaggaauacggaggccugaacaagucuaaaccuuauuacaccggcaagcacgcgaaggccaucgggaauugcccgauuuggguuaaaacaccccugaagcucgcuaacggaaccaaauaucggccucccgccaagcugcuuaaagagcgcggcuuuuucggggcuaucgccggauuucuggagggcgggugggaaggcaugauugccggauggcacggcuacaccagccauggggcucacggaguggcggucgccgcugaccucaaguccacacaagaggccaucaacaagaucacgaaaaaucugaacagccuuucugaacuggaggugaagaaucuccagagacuguccggcgccauggaugaacugcauaacgagauucucgagcuggacgaaaaagucgaugaccuucgggcugauaccaucagcucucagauugagcuggccgugcuccugagcaaugaagggaucauuaacuccgaggacgaacaccuucuggcgcucgagcgcaagcugaaaaagaugcugggaccuucugcuguugauaucggcaauggguguuucgagacaaagcacaaaugcaaccaaaccugccucgacagaaucgccgccggcacauuuaaugcuggagaguucagccugcccaccuuugauucccuuaacauuacggccgcuagccugaaugacgauggccucgacaaccauaccauccugcuguauuacucuacagccgcguccagccuugccgugacccucaugcuggcuauuuucaucgucuauauggugucucgggacaauguuuccuguagcauuugccuguga

SEQ ID NO: 220582 - RNA, 1758 nt, Artificial Sequence; identical to SEQ ID NO: 220547
  derived and/or modified CDS sequence (opt5) from hemagglutinin__InfluenzaB__ALN39792

SEQ ID NO: 220583 - RNA, 1758 nt, Artificial Sequence; identical to SEQ ID NO: 220547
  derived and/or modified CDS sequence (opt5) from hemagglutinin__InfluenzaB__ALN39793

SEQ ID NO: 220584 - RNA, 1755 nt, Artificial Sequence
  derived and/or modified CDS sequence (opt5) from hemagglutinin__InfluenzaB__ALN39794
augaaggccaucauuauccugcucaugguggucaccagcaacgcugacagaauuugcacaggcaucacguccucuaauagcccccacguugugaaaaccgccacacagggggaagugaacgucaccggagugauuccucugacaaccacaccgaccaaguccuacuucgcgaaucuuaaaggcacgcggacccgcgggaagcugugucccgauugccucaacuguacagaccuggauguugcucuuggaagaccuaugugcgugggcaccacacccucugccaaagccagcauccugcaugaaguccggccugugaccuccggguguuuucccaucaugcacgaccgcacgaagauuagacaacucccuaaucugcugcggggauaugagaagauccgccucucuacacagaacguuauugaugcugaaaaagccccgggcggccccuacagacuggggaccagcggauccugcccuaaugcuacaagcaagaucggcuucuuugccaccauggcgugggccgugcccaaagacaacuauaagaaugcuaccaacccucagacagucgaggugcccuacauuuguacggaaggggaggaucagaucaccguguggggauuccauucugacaauaaaacacaaaugaagucccuuuauggcgauagcaacccgcagaaguuuaccucuuccgccgacggggucacaacccacuacguuagccagauuggagauuucccugaccagacggaggauggcggccugccccaaucugggcggaucgugguggacuauaugaugcagaaaccuggaaagacaggcaccaucgucuaccagcgcggggugcuccugccccagaaaguuuggugcgcuuccggaagaagcaaggugauuaaaggcucccuuccccugaucggggaagccgacugucuccaugaggaauacggaggccugaauaagucuaaaccuuauuacaccggcaagcacgcgaaggccauugggaacugcccgaucugggucaaaacaccccugaagcucgcuaauggaaccaaauaucggccucccgccaagcugcuuaaagagcgcggcuuuuucggggcuauugccggauuucuggagggcgggugggaaggcaugaucgccggauggcacggcuacacaagccauggggcucacggaguggcgguugccgcugaucucaaguccacgcaagaggccaucaacaagauuaccaaaaaccugaauagccuuucugaacuggaggugaagaaccuccagagacuguccggcgccauggacgaacugcauaaugagauccucgagcuggaugaaaaagucgacgaucuucgggcugacacaauuagcucucagaucgagcuggccgugcuccugagcaacgaagggauuaucaauuccgaggaugaacaccuucuggcgcucgagcgcaagcugaaaaagaugcugggaccuucugcugucgacaucggcaacggguguuucgagaccaagcacaaaugcaaucaaacaugccucgauagaauugccgccggcaccuuuaacgcuggagaguucagccugcccacguuugacucccuuaauaucaccgccgcuagccugaacgaugacggccucgacaaucauacaauucugcuguauuacucuaccgccgcguccagccuugccgugacacucaugcuggcuaucuucauuguuuauauggugucucgggauaacgucuccuguagcaucugccuguga

SEQ ID NO: 220585 - RNA, 1755 nt, Artificial Sequence; identical to SEQ ID NO: 220524
  derived and/or modified CDS sequence (opt5) from hemagglutinin__InfluenzaB__ALN39795

SEQ ID NO: 220586 - RNA, 1758 nt, Artificial Sequence
  derived and/or modified CDS sequence (opt5) from hemagglutinin__InfluenzaB__ALN39796
augaaggccaucauugugcugcucauggucguuaccagcaacgcugacagaaucugcacaggcauuacguccucuaauagcccccacguggugaaaaccgccacacagggggaggucaacgugaccggaguuaucccucugacaaccacaccgaccaagucccauuucgcgaaucuuaaaggcacggaaacccgggggaagcugugucccaaaugccucaacuguacagaucuggacguggcucuuggacgcccuaagugcaccggcaagauucccucugccagagucagcauccugcacgaggugcggccuguuacauccggguguuuucccaucaugcaugaucgcaccaaaauuagacaacucccuaaucugcugcggggauacgaacacauccgccucucuacgcauaacgugauuaaugccgaggacgcuccgggcggccccuauaagaucgggacaagcggauccugcccuaacgccaccaauggcaacggguucuuugcuacaauggccugggcgguccccaaaaaugauaagaacaaaaccgccaccaauccucugacaauugaagugcccuacaucuguacggagggagaggaccagauuaccguguggggcuuccacagcgauaacgaaacacagauggcuaagcuguauggggacucuaagccgcagaaauuuaccuccagcgccaauggagucacaacccacuacguuucucaaaucggcggcuucccuaaccagacggaggaugggggacugccccaguccggcagaaucgugguggacuauaugguccaaaagagcgggaaaacaggaaccauuaccuaccagcggggcauccuccugccucagaagguguggugcgcuucugggcgcuccaaaguuauuaagggaagccuuccccugaucggcgaagccgauugucuccaugagaaauauggcgggcugaacaaguccaagcccuacuacacaggagagcacgcgaaagccauuggcaauugcccuaucugggugaagaccccgcugaaacucgcuaacgggacaaaguauagacccccugccaaacugcuuaaggaacggggauuuuucggcgcuaucgccggguuucuggagggcggaugggaaggcaugauugccggguggcauggauacacgucucacggcgcucacggggucgcgguggccgcugaccucaagagcacccaggaggccaucaauaaaauuacaaagaaccuuaauucccuuagcgaacuggagguuaaaaaccuccagcgccugucuggagccauggaugagcugcauaaugaaauccucgagcuggacgaaaagguggacgaucuuagagcugacaccauuuccagccaaaucgagcuggccguccuccugucuaacgaaggcaucauuaauagcgaggaugagcaccuucuggcgcucgaacggaaacugaagaagaugcuggggcccuccgcuguggagaucggcaacggauguuucgaaacaaaacauaagugcaaucagaccugccucgaccgcauugccgccggcacguuugaugcuggggaguucucucugccuaccuuugacagccuuaacaucacagccgcuucccugaaugaugacggacucgauaaccacaccauucugcuguauuacagcacagccgcgucuucccuugccgucacccucaugaucgcuauuuucgugguuuauauggugagcagagacaaugucucuuguuccaucugccuguga

SEQ ID NO: 220587 - RNA, 1755 nt, Artificial Sequence; identical to SEQ ID NO: 220524
  derived and/or modified CDS sequence (opt5) from hemagglutinin__InfluenzaB__ALN39797

SEQ ID NO: 220588 - RNA, 1755 nt, Artificial Sequence
  derived and/or modified CDS sequence (opt5) from hemagglutinin__InfluenzaB__ALN39798
augaaggccaucauugugcugcucauggucguuaccagcaacgcugacagaaucugcacaggcauuacguccucuagcagcccccacguggugaaaaccgccacacagggggaagucaaugugaccggaguuaucccucugacaaccacaccgaccaagucuuacuucgcgaaccuuaaaggcacgcggacccgcgggaagcugugucccgauugccucaauuguacagaccuggauguggcucuuggaagaccuaugugcgucggcaccacacccagcgccaaagccuccauucugcaugaagugcggccuguuaccucuggguguuuucccaucaugcacgaccgcacgaagaucagacaacucccuaaccugcugcggggauaugagaagauucgccucagcacacagaaugugaucgaugcugaaaaagccccgggcggccccuacagacuggggaccuccggaagcugcccuaacgcuacaucuaagauuggcuucuuugccaccauggcgugggccguccccaaagacaauuauaagaacgcuaccaauccucagacaguggaggugcccuacaucuguacggaaggggaggaucagauuaccgucuggggauuccauuccgacaacaaaacacaaaugaagucccuuuauggcgauucuaauccgcagaaguuuaccuccagcgccaacgggguuacaacccacuacgugucucagaucggagacuucccugaucagacggaggacggcggccugccccaauccgggcggauuguggucgauuauaugaugcagaaaccuggaaagacaggcaccaucguguaccagcgcgggguucuccugccccagaaaguguggugcgcuagcggaagauccaaggucaucaaaggcucucuuccccugauuggggaagccgacugucuccaugaggaauacggaggccugaauaagagcaaaccuuauuacaccggcaagcacgcgaaggccaucgggaacugcccgauuugggugaaaacaccccugaagcucgcuaauggaaccaaauaucggccucccgccaagcugcuuaaagagcgcggcuuuuucggggcuaucgccggauuucuggagggcgggugggaaggcaugauugccggauggcacggcuacacaucccauggggcucacggaguugcgguggccgcugaccucaagagcacgcaagaggccaucaacaagaucaccaaaaaccuuaauucucuguccgaacuggaggucaagaaccuccagagacugagcggcgccauggaugaacugcauaaugagauucucgagcuggacgaaaaaguggaugaccuucgggcugauacaaucucuagccagauugagcuggccguccuccuguccaacgaagggaucauuaauucugaggacgaacaccuucuggcgcucgagcgcaagcugaaaaagaugcugggaccuagcgcuguggauaucggcaacggguguuucgagaccaagcacaaaugcaaucaaacaugccucgacagaaucgccgccggcaccuuuaacgcuggagaguucucccugcccacguuugauagccuuaauauuaccgccgcuucucugaacgacgauggccucgacaaucauacaauccugcuguauuacuccaccgccgcgagcucucuugccguuacacucaugcuggcuauuuucaucguguauauggucucccgggacaacgugagcuguuccauuugccuguga

SEQ ID NO: 220589 - RNA, 1755 nt, Artificial Sequence; identical to SEQ ID NO: 220361
  derived and/or modified CDS sequence (opt5) from hemagglutinin__InfluenzaB__ALN39799

SEQ ID NO: 220590 - RNA, 1755 nt, Artificial Sequence
  derived and/or modified CDS sequence (opt5) from hemagglutinin__InfluenzaB__ALN39800
augaaggccaucauugugcugcucauggucguuaccagcaacgcugacagaaucugcacaggcauuacguccucuaauagcccccacguggugaaaaccgccacacagggggaagucaacgugaccggaguuaucccucugacaaccacaccgaccaaguccuacuucgcgaaucuuaaaggcacgcggacccgcgggaagcugugucccgauugccucaacuguacagaccuggauguggcucuuggaagaccuaugugcgucggcaccacacccucugccaaagccagcauucugcaugaagugcggccuguuaccuccggguguuuucccaucaugcacgaccgcacgaagaucagacaacucccuaaucugcugcggggauaugagaagauucgccucucuacacagaacgugaucgaugcugaaaaagccccgggcggccccuacagacuggggaccagcggauccugcccuaaugcuacaagcaagauuggcuucuuugccaccauggcgugggccguccccaaagacaacuauaagaaugcuaccaacccucagacaguggaggugcccuacaucuguacggaaggggaggaucagauuaccgucuggggauuccauucugacaauaaaacacaaaugaagucccuuuauggcgauagcaacccgcagaaguuuaccucuuccgccaaugggguuacaacccacuacgugagccagaucggagacuucccugaucagacggaggacggcggccugccccaaucugggcggauuguggucgauuauaugaugcagaaaccuggaaagacaggcaccaucguguaccagcgcgggguucuccugccccagaaaguguggugcgcuuccggaagaagcaaggucaucaaaggcucccuuccccugauuggggaagccgacugucuccaugaggaauacggaggccugaacaagucuaaaccuuauuacaccggcaagcacgcgaaggccaucgggaauugcccgauuugggugaaaacaccccugaagcucgcuaacggaaccaaauaucggccucccgccaagcugcuuaaagagcgcggcuuuuucggggcuaucgccggauuucuggagggcgggugggaaggcaugauugccggauggcacggcuacacaagccauggggcucacggaguugcgguggccgcugaccucaaguccacgcaagaggccaucaacaagaucaccaaaaaucugaacagccuuucugaacuggaggucaagaaucuccagagacuguccggcgccauggaugaacugcauaacgagauucucgagcuggacgaaaaaguggaugaccuucgggcugauacaaucagcucucagauugagcuggccguccuccugagcaaugaagggaucauuaacuccgaggacgaacaccuucuggcgcucgagaagaaacugaagaagaugcugggaccuucugcuguggauaucggcaauggguguuucgagaccaaacacaagugcaaccaaacaugccucgaccgcaucgccgccggcaccuuuaaugcuggagaguucagccugcccacguuugauucccuuaacauuaccgccgcuagccugaaugacgauggccucgacaaccauacaauccugcuguauuacucuaccgccgcguccagccuugccguuacacucaugcuggcuauuuucaucguguauauggucucuagagacaauguguccuguagcauuugccuguga

SEQ ID NO: 220591 - RNA, 1755 nt, Artificial Sequence; identical to SEQ ID NO: 220581
  derived and/or modified CDS sequence (opt5) from hemagglutinin__InfluenzaB__ALN39801

SEQ ID NO: 220592 - RNA, 1755 nt, Artificial Sequence; identical to SEQ ID NO: 220524
  derived and/or modified CDS sequence (opt5) from hemagglutinin__InfluenzaB__ALN39802

SEQ ID NO: 220593 - RNA, 1755 nt, Artificial Sequence; identical to SEQ ID NO: 220581
  derived and/or modified CDS sequence (opt5) from hemagglutinin__InfluenzaB__ALN39803

SEQ ID NO: 220594 - RNA, 1755 nt, Artificial Sequence; identical to SEQ ID NO: 220520
  derived and/or modified CDS sequence (opt5) from hemagglutinin__InfluenzaB__ALN39804

SEQ ID NO: 220595 - RNA, 1758 nt, Artificial Sequence; identical to SEQ ID NO: 220547
  derived and/or modified CDS sequence (opt5) from hemagglutinin__InfluenzaB__ALN39805

SEQ ID NO: 220596 - RNA, 1758 nt, Artificial Sequence; identical to SEQ ID NO: 219061
  derived and/or modified CDS sequence (opt5) from hemagglutinin__InfluenzaB__ACN29380

SEQ ID NO: 220597 - RNA, 1758 nt, Artificial Sequence; identical to SEQ ID NO: 219393
  derived and/or modified CDS sequence (opt5) from hemagglutinin__InfluenzaB__EPI498048

SEQ ID NO: 220598 - RNA, 1758 nt, Artificial Sequence
  derived and/or modified CDS sequence (opt5) from hemagglutinin__InfluenzaB__ANC28539
augaaggccaucauugugcugcucauggucguuaccagcaacgcugacagaaucugcacaggcauuacguccucuaauagcccccacguggugaaaaccgccacacagggggaggucaacgugaccggaguuaucccucugacaaccacaccgaccaagucccauuucgcgaaucuuaaaggcacggaaacccgggggaagcugugucccaaaugccucaacuguacagaucuggacguggcucuuggacgcccuaagugcaccggcaagauucccucugccagagucagcauccugcacgaggugcggccuguuacauccggguguuuucccaucaugcaugaucgcaccaaaauuagacaacucccuaaucugcugcggggauacgaacacauccgccucucuacgcauaacgugauuaaugccgagaacgcuccgggcggccccuauaagaucgggacaagcggauccugcccuaauauuaccaacggcaauggguucuuugccacaauggcuugggccguccccaaaaacgacaagaauaaaaccgcgaccaacccucugacaaucgaagugcccuacauuuguacggagggagaggaucagaucaccguguggggcuuccacagcgacaaugaagcccagauggcuaaacuuuauggggauucuaagccgcagaaguuuacauccagcgccaacggagucaccacacacuacguuucucaaaucggcggcuucccuaaccagaccgaggacgggggacugccccaguccggcagaauugugguggauuauaugguccaaaagagcgggaaaacgggaacaaucaccuaccagcggggcauucuccugccucagaagguguggugcgcuucugggcgcuccaaaguuaucaagggaagccuuccccugauuggcgaagccgacugucuccaugagaaauauggcgggcugaauaaguccaagcccuacuacaccggagagcacgcgaaagccaucggcaacugcccuaucugggugaagacaccgcugaaacucgcuaaugggaccaaguauagacccccugccaaacugcuuaaggaacggggauuuuucggcgcuauugccggguuucuggagggcggaugggaaggcaugaucgccggguggcauggauacacaucucacggcgcucacggggucgcgguggccgcugaucucaagagcacgcaggaggccauuaacaaaaucaccaagaaucugaacucccuuagcgaacuggagguuaaaaaucuccagcgccugucuggagccauggacgagcugcauaacgaaauucucgagcuggaugaaaagguggacgaccuuagagcugauacaaucuccagccaaaucgagcuggccguccuccugucuaaugaaggcauuaucaacagcgaggacgagcaccuucuggcgcucgaacggaaacugaagaagaugcuggggcccuccgcuguggagauuggcaauggauguuucgaaaccaaacauaagugcaaccagacaugccucgaucgcaucgccgccggcaccuuugacgcuggggaguucucucugccuacguuugauagccuuaauauuaccgccgcuucccugaacgacgauggacucgacaaucacacaauccugcuguauuacagcaccgccgcgucuucccuugccgucacacucaugauugcuaucuucgugguuuauauggugagcagagauaacgucucuuguuccaucugccuguga

SEQ ID NO: 220599 - RNA, 1758 nt, Artificial Sequence
  derived and/or modified CDS sequence (opt5) from hemagglutinin__InfluenzaB__EPI827073
augaaggccaucauugugcugcucauggucguuaccagcaacgcugacagaaucugcacaggcauuacguccucuaauagcccccacguggugaaaaccgccacacagggggaggucaacgugaccggaguuaucccucugacaaccacaccgaccaagucccauuucgcgaaucuuaaaggcacggaaacccgggggaagcugugucccaaaugccucaacuguacagaucuggacguggcucuuggacgcccuaagugcaccggcaagauucccucugccagagucagcauccugcacgaggugcggccuguuacauccggguguuuucccaucaugcaugaucgcaccaaaauuagacaacucccuaaucugcugcggggauacgaacacauccgccucucuacgcauaacgugauuaaugccgagaacgcuccgggcggccccuauaagaucgggacaagcggauccugcccuaauauuaccaacggcaauggguucuuugccacaauggcuugggccguccccaaaaacgacaagaauaaaaccgcgaccaacccucugacaaucgaagugcccuacauuuguacggagggagaggaucagaucaccguguggggccuucacagcgacaaugaaauccagauggccaagcuguauggggauucuaagccgcagaaauucacauccagcgcuaacggagucaccacacacuacguuucucaaauuggcggcuuuccuaaccagaccgaggacgggggacucccccaguccggcagaaucgugguggauuauaugguccaaaagagcgggaaaacgggaacaauuaccuaccagcggggcauccugcuuccucagaagguguggugcgccucugggcgcuccaaaguuauuaagggaagccugccccucaucggcgaagcugacugucugcaugagaaauauggcgggcugaauaaguccaagcccuacuacaccggagagcacgccaaagcgaucggcaacugcccuauuugggugaagacaccgcucaaacuggccaaugggaccaaguauagacccccugcuaaacuucugaaggaacggggauucuuuggcgccaucgcuggguuccucgagggcggaugggaaggcaugauugccggguggcauggauacacaucucacggcgcccacggggucgcuguggcggccgaucuuaagagcacgcaggaggcuaucaacaaaauuaccaagaaucugaacucccugagcgaacucgagguuaaaaaucugcagcgccugucuggagccauggacgagcuccauaacgaaauccuggagcuugaugaaaagguggacgaccugagagccgauacaaucuccagccaaauugagcucgcuguccugcuuucuaaugaaggcaucauuaacagcgaggacgagcaucugcucgcccuggaacggaaacugaagaagaugcucgggcccuccgcgguggagaucggcaauggauguuuugaaaccaaacacaagugcaaccagacaugccuggaucgcauugcugccggcaccuucgacgccggggaguuuucucuuccuacguucgauagccugaauaucaccgcugccucccucaacgacgauggacuggacaaucacacaauucugcuuuauuacagcaccgcugccucuucccucgcggucacacugaugaucgccaucuuugugguuuauauggugagcagagauaacgucucuuguuccauuugccuguga

SEQ ID NO: 220600 - RNA, 1758 nt, Artificial Sequence; identical to SEQ ID NO: 218819
  derived and/or modified CDS sequence (opt5) from hemagglutinin__InfluenzaB__EPI244699

SEQ ID NO: 220601 - RNA, 1758 nt, Artificial Sequence; identical to SEQ ID NO: 218812
  derived and/or modified CDS sequence (opt5) from hemagglutinin__InfluenzaB__EPI244702

SEQ ID NO: 220602 - RNA, 1755 nt, Artificial Sequence; identical to SEQ ID NO: 220201
  derived and/or modified CDS sequence (opt5) from hemagglutinin__InfluenzaB__EPI540671

SEQ ID NO: 220603 - RNA, 1755 nt, Artificial Sequence
  derived and/or modified CDS sequence (opt5) from hemagglutinin__InfluenzaB__EPI573303
augaaggccaucauugugcugcucauggucguuaccagcaacgcugacagaaucugcacaggcauuacguccucuaauagcccccacguggugaaaaccgccacacagggggaagucaacgugaccggaguuaucccucugacaaccacaccgaccaaguccuacuucgcgaaucuuaaaggcacgcggacccgcgggaagcugugucccgauugccucaacuguacagaccuggauguggcucuuggaagaccuaugugcgucggcaccacacccucugccaaagccagcauucugcaugaagugcggccuguuaccuccggguguuuucccaucaugcacgaccgcacgaagaucagacaacucccuaaucugcugcggggauaugagaagauucgccucucuacacagaacgugaucgaugcugaaaaagccccgggcggccccuacagacuggggaccagcggauccugcccuaaugcuacaagcaagauuggcuucuuugccaccauggcgugggccguccccaaagacaacuauaagaaugcuaccaacccucuuacaguggaggugcccuacaucuguacggaaggggaggaucagauuaccgucuggggauuccauucugacgauaaaacacagaugaagucccuguauggcgacagcaauccgcaaaaguuuaccucuuccgccaacgggguuacaacccacuacgugagccagaucggagauuucccugaccagacggaggauggcggccucccccagucugggcggauuguggucgacuauaugaugcaaaaaccuggaaagacaggcaccaucguguaccagcgcgggguucugcuuccccagaaaguguggugcgcuuccggaagaagcaaggucaucaaaggcucccugccccucauuggggaagccgacugucugcaugaggaauacggaggccugaauaagucuaaaccuuauuacaccggcaagcacgcgaaggccaucgggaacugcccgauuugggugaaaacaccccucaagcuggcuaauggaaccaaauaucggccucccgccaagcugcugaaagagcgcggcuuuuucggggcuaucgccggauuucucgagggcgggugggaaggcaugauugccggauggcacggcuacacaagccauggggcucacggaguugcgguggccgcugaucugaaguccacgcaggaggccaucaacaagaucaccaaaaaccuuaauagccugucugaacucgaggucaagaaccugcaaagacuguccggcgccauggacgaacuccauaaugagauucuggagcuugaugaaaaaguggacgaucugcgggcugacacaaucagcucucagauugagcucgccguccugcuuagcaacgaagggaucauuaauuccgaggaugaacaccuucucgcgcuggagcgcaagcugaaaaagaugcucggaccuucugcuguggacaucggcaacggguguuucgagaccaagcacaaaugcaaucagacaugccuggauagaaucgccgccggcaccuuuaacgcuggagaguucagccuucccacguuugacucccugaauauuaccgccgcuagccucaacgaugacggccuggacaaucauacaauccugcuuuauuacucuaccgccgcguccagccucgccguuacacugaugcuggcuauuuucaucguguauauggucucucgggauaacguguccuguagcauuugccucuga

SEQ ID NO: 220604 - RNA, 1755 nt, Artificial Sequence
  derived and/or modified CDS sequence (opt5) from hemagglutinin__InfluenzaB__EPI829466
augaaggccaucauugugcugcucauggucguuaccagcaacgcugacagaaucugcacaggcauuacguccucuaauagcccccacguggugaaaaccgccacacagggggaggucaacgugaccggaguuaucccucugacaaccacaccgaccaaguccuacuucgcgaaucuuaaaggcacgcggacccgcgggaagcugugucccgauugccucaacuguacagaccuggauguggcucuuggaagaccuaugugcgucggcaccacacccucugccaaagccagcauucugcaugaagugcggccuguuaccuccggguguuuucccaucaugcacgaccgcacgaagaucagacaacucccuaaucugcugcggggauaugagaagauucgccucucuacacagaacgugaucgaugcugaaaaagccccgggcggccccuacagacuggggaccagcggauccugcccuaaugcuacaagcaagauuggcuucuuugccaccauggcgugggccguccccaaagacaacuauaagaaugcuaccaacccucuuacaguggaggugcccuacaucuguacggaaggggaggaucagauuaccgucuggggauuccauucugacgauaaaacacagaugaagucccuguauggcgacagcaauccgcaaaaguuuaccucuuccgccaacgggguuacaacccacuacgugagccagaucggagauuucccugaccagacggaggaugaaggccucccccagucuggccggauuguggucgacuauaugaugcaaaaaccugggaagacaggaaccaucguguaccagcgcggcguucugcuuccccagaaaguguggugcgcuuccgggagaagcaaggucaucaaaggaucccugccccucauuggcgaggccgacugucugcaugaagaguacgggggacugaauaagucuaaaccuuauuacaccggcaagcacgcgaaggccaucggcaacugcccgauuugggugaaaacaccccucaagcuggcuaaugggaccaaauaucggccucccgccaagcugcugaaagagcgcggauuuuucggcgcuaucgccggguuucucgaaggaggcugggaggggaugauugccggcuggcacggauacacaagccauggcgcucacgggguugcgguggccgcugaucugaaguccacgcaggaagccaucaacaagaucaccaaaaaccuuaauagccugucugagcucgaagucaagaaccugcaaagacuguccggagccauggacgagcuccauaaugagauucuggaacuugaugagaaaguggacgaucugcgggcugacacaaucagcucucagauugaacucgccguccugcuuagcaacgagggcaucauuaauuccgaagaugagcaccuucucgcgcuggagcgcaagcugaaaaagaugcucgggccuucugcuguggacaucggaaacggcuguuucgaaaccaagcacaaaugcaaucagacaugccuggauagaaucgccgccgggaccuuuaacgcuggcgaguucagccuucccacguuugacucccugaauauuaccgccgcuagccucaacgaugacggacuggacaaucauacaauccugcuuuauuacucuaccgccgcguccagccucgccguuacacugaugcuggcuauuuucaucguguauauggucucucgggauaacguguccuguagcauuugccucuga

SEQ ID NO: 220605 - RNA, 1755 nt, Artificial Sequence
  derived and/or modified CDS sequence (opt5) from hemagglutinin__InfluenzaB__EPI684429
augaaggccaucauugugcugcucauggucguuaugagcaacgcugacagaaucugcaccggcauuacauccucuaauagcccccacguggugaaaacggccacccagggggaagucaacgugacaggaguuaucccucugaccacaaccccgacaaaguccuacuucgcgaaucuuaaaggcacccggacgcgcgggaagcugugucccgauugccucaacuguaccgaccuggauguggcucuuggaagaccuaugugcgucggcacaacccccucugccaaagccagcauucugcaugaagugcggccuguuacauccggguguuuucccaucaugcacgaccgcaccaagaucagacaacucccuaaucugcugcggggauaugagaagauucgccucucuacgcagaacgugaucgaugcugaaaaagccccgggcggccccuacagacuggggacaagcggauccugcccuaaugcuaccagcaagauuggcuucuuugccacaauggcgugggccguccccaaagacaacuauaagaaugcuaccaacccucagaccguggaggugcccuacaucuguacagaaggggaggaucagauuacggucuggggauuccauucugacaauaaaacccaaaugaagucccuuuauggcgauagcaacccgcagaaguuuacaucuuccgccaaugggguuaccacacacuacgugagccagaucggagacuucccugaucagaccgaggacggcggccugccccaaucugggcggauuguggucgauuauauggugcagaaaccuggaaagacgggcacaaucguuuaccagcgcggggugcuccugccccagaaagucuggugcguguccggaagaagcaagguuaucaaaggcucccuuccccugauuggggaagcugacugucuccaugaggaauacggaggccugaacaagucuaaaccuuauuacaccggcaagcacgccaaggcgaucgggaauugcccgauuugggugaaaacaccccugaagcucgccaacggaaccaaauaucggccucccgcuaagcugcuuaaagagcgcggcuuuuucggggccaucgcuggauuucuggagggcgggugggaaggcaugauugccggauggcacggcuacaccagccauggggcccacggagucgcuguggcggccgaccucaaguccacacaagaggcuaucaacaagaucacgaaaaaucugaacagccuuucugaacuggaggucaagaaucuccagagacuguccggcgccauggaugaacugcauaacgagauucucgagcuggacgaaaaaguggaugaccuucgggccgauaccaucagcucucagauugagcuggcuguucuccugagcaaugaagggaucauuaacuccgaggacgaacaccuucuggcccucgagcgcaagcugaaaaagaugcugggaccuucugcgguggauaucggcaauggguguuucgagacaaagcacaaaugcaaccaaaccugccucgacagaaucgcugccggcacauuuaaugccggagaguucagccugcccaccuuugauucccuuaacauuacggcugccagccugaaugacgauggccucgacaaccauaccauccugcuguauuacucuacagcugccuccagccuugcggucacccucaugcuggccauuuucaucguguauaugguuucucgggacaauguguccuguagcauuugccuguga

SEQ ID NO: 220606 - RNA, 1758 nt, Artificial Sequence; identical to SEQ ID NO: 218824
  derived and/or modified CDS sequence (opt5) from hemagglutinin__InfluenzaB__AFH58447

SEQ ID NO: 220607 - RNA, 1758 nt, Artificial Sequence
  derived and/or modified CDS sequence (opt5) from hemagglutinin__InfluenzaB__EPI173279
augaaggccaucauugugauccugauggucguuaccagcaacgcugacagaauuugcacaggcaucacguccucuaauagcccccacguggugaaaaccgccacacagggggaggucaacgugaccggaguuauuccucucacaaccacaccgaccaagucccauuucgcgaaucugaaaggcacggaaacccgggggaagcugugucccaaaugccugaacuguacagaucucgacguggcucugggacgcccuaagugcaccggcaagauccccucugccagagucagcauccuucacgaggugcggccuguuacauccggguguuuucccauuaugcaugaucgcaccaaaaucagacaacugccuaaucuccugcggggauacgaacacauucgccugucuacgcauaacgugaucaaugccgagaacgcuccgggcggccccuauaagauugggacaagcggauccugcccuaauaucaccaacggcaauggguucuuugccacaauggcuugggccguccccaaaaacgacaagaauaaaaccgcgaccaacccucucacaauugaagugcccuacaucuguacggagggagaggaucagaucaccguguggggcuuccacagcgacucugaaacacagauggccaagcuguauggggauuccaagccgcagaaauuuaccagcucugcuaauggagucacaacccacuacguuucccaaauuggcggcuucccuaaccagacggaggacgggggacuuccccagagcggcagaaucgugguggauuauaugguccagaagucugggaaaacaggaaccauuaccuaccaacggggcauccugcucccucagaagguguggugcgccuccgggcgcagcaaaguuauuaagggaucccugccccuuaucggcgaagcugacugucugcaugagaaauauggcgggcucaacaagucuaagcccuacuacacaggagagcacgccaaagcgaucggcaauugcccuauuugggugaagaccccgcugaaacuggccaacgggacaaaguauagacccccugcuaaacuccugaaggaacggggauuuuucggcgccaucgcuggguuucuugagggcggaugggaaggcaugauugccggguggcauggauacacgagccacggcgcccacggggucgcuguggcggccgaucugaaguccacccaggaggcuaucaauaaaauuacaaagaaccucaauagccugucugaacuugagguuaaaaaccugcagcgccucuccggagccauggacgagcugcauaaugaaauccuggagcucgaugaaaagguggacgaccugagagccgauaccaucagcucucaaauugagcuugcuguccugcucagcaacgaaggcaucauuaauuccgaggacgagcaccuucuugcccuggaacggaaacucaagaagaugcuggggcccucugcgguggagaucggcaacggauguuucgaaacaaaacauaagugcaaucagaccugccuggaucgcauugcugccggcacguuugacgccggggaguucagccucccuaccuuugauucccugaacaucacagcugccagccuuaaugacgauggacuggacaaccacaccauucuccuguauuacucuacagcugccuccagccuggcggucacccuuaugaucgccaucuucgugguuuauauggugucuagagauaaugucuccuguagcauuugccucuga

SEQ ID NO: 220608 - RNA, 1758 nt, Artificial Sequence; identical to SEQ ID NO: 219393
  derived and/or modified CDS sequence (opt5) from hemagglutinin__InfluenzaB__EPI163726

SEQ ID NO: 220609 - RNA, 1758 nt, Artificial Sequence; identical to SEQ ID NO: 220547
  derived and/or modified CDS sequence (opt5) from hemagglutinin__InfluenzaB__EPI636340

SEQ ID NO: 220610 - RNA, 1758 nt, Artificial Sequence
  derived and/or modified CDS sequence (opt5) from hemagglutinin__InfluenzaB__EPI645995
augaaggccaucauugugcugcucauggucguuaccagcaacgcugacagaaucugcacaggcauuacguccucuaauagcccccacguggugaaaaccgccacacagggggaggucaacgugaccggaguuaucccucugacaaccacaccgaccaagucccauuucgcgaaucuuaaaggcacggaaacccgggggaagcugugucccaaaugccucaacuguacagaucuggacguggcucuuggacgcccuaagugcaccggcaagauucccucugccagagucagcauccugcacgaggugcggccuguuacauccggguguuuucccaucaugcaugaucgcaccaaaauuagacaacucccuaaucugcugcggggauacgaacacgugcgccucucuacgcauaacgucaucaaugccgaggacgcuccgggcggccccuauaagauugggacaagcggauccugcccuaacaucaccaauggcaacggguucuuugccacaauggcuugggccgugcccaaaaaugauaagaacaaaaccgcgaccaauccucugacaauugaagugcccuacaucuguacggagggagaggaccagauuaccgucuggggcuuccacagcgaugacgaaacacagauggccaaacuuuauggggauucuaagccgcagaaguuuaccuccagcgcuaacggaguuacaacccacuacgugucucaaaucggcggcuucccuaaucagacggaggacgggggacugccccaguccggcagaaucguggucgauuauauggugcaaaagagcgggaaaacaggaaccauuaccuaccagcggggcauccuccugccucagaagguuuggugcgccucugggcgcuccaaagugauuaagggaagccuuccccugaucggcgaagcugacugucuccaugagaaauauggcgggcugaacaaguccaagcccuacuacacaggagagcacgccaaagcgauuggcaacugcccuaucugggucaagaccccgcugaaacucgccaaugggacaaaguauagacccccugcuaaacugcuuaaggaacggggauuuuucggcgccaucgcuggguuucuggagggcggaugggaaggcaugauugccggguggcauggauacacgucucacggcgcccacgggguggcuguugcggccgaucucaagagcacccaggaggcuaucaacaaaauuacaaagaaucugaacucccuuagcgaacuggaggugaaaaaucuccagcgccugucuggagccauggacgagcugcauaacgaaauccucgagcuggacgaaaaggucgaugaccuuagagccgauaccauuuccagccaaaucgagcuggcugugcuccugucuaaugaaggcaucauuaacagcgaggacgagcaccuucuggcccucgaacggaaacugaagaagaugcuggggcccuccgcggucgagaucggcaauggauguuucgaaacaaaacauaagugcaaccagaccugccucgaucgcauugcugccggcacguuugacgccggggaguucucucugccuaccuuugauagccuuaauaucacagcugccucccugaacgacgauggacucgacaaucacaccauucugcuguauuacagcacagcugccucuucccuugcggugacccucaugaucgccauuuucguuguguauauggucagcagagauaacgugucuuguuccaucugccuguga

SEQ ID NO: 220611 - RNA, 1755 nt, Artificial Sequence; identical to SEQ ID NO: 220201
  derived and/or modified CDS sequence (opt5) from hemagglutinin__InfluenzaB__EPI539769

SEQ ID NO: 220612 - RNA, 1755 nt, Artificial Sequence; identical to SEQ ID NO: 220603
  derived and/or modified CDS sequence (opt5) from hemagglutinin__InfluenzaB__EPI551249

SEQ ID NO: 220613 - RNA, 1755 nt, Artificial Sequence
  derived and/or modified CDS sequence (opt5) from hemagglutinin__InfluenzaB__EPI544259
augaaggccaucauugugcugcucauggucguuaccagcaacgcugacagaaucugcacaggcauuacguccucuaauagcccccacguggugaaaaccgccacacagggggaagucaacgugaccggaguuaucccucugacaaccacaccgaccaaguccuacuucgcgaaucuuaaaggcacgcggacccgcgggaagcugugucccgauugccucaacuguacagaccuggauguggcucuuggaagaccuaugugcgucggcaccacacccucugccaaagccagcauucugcaugaagugcggccuguuaccuccggguguuuucccaucaugcacgaccgcacgaagaucagacaacucccuaaucugcugcggggauaugagaagauucgccucucuacacagaacgugaucgaugcugaaaaagccccgggcggccccuacagacuggggaccagcggauccugcccuaaugcuacaagcaagauuggcuucuuugccaccauggcgugggccguccccaaagacaacuauaagaaugcuaccaacccucuuacaguggaggugcccuacaucuguacggaaggggaggaucagauuaccgucuggggauuccauucugacaauaaaaaccagaugaagucccuguauggcgauagcaauccgcaaaaguuuacaucuuccgccaacgggguuaccacacacuacgugagccagaucggagacuucccugaucagaccgaggacggcggccucccccagucugggcggauuguggucgauuauaugaugcaaaaaccuggaaagacgggcacaaucguguaccagcgcgggguucugcuuccccagaaaguguggugcgcuuccggaagaagcaaggucaucaaaggcucccugccccucauuggggaagccgacugucugcaugaggaauacggaggccugaauaagucuaaaccuuauuacaccggcaagcacgcgaaggccaucgggaacugcccgauuugggugaaaacaccccucaagcuggcuaacggaaccaaauaucggccucccgccaagcugcugaaagagcgcggcuuuuucggggcuaucgccggauuucucgagggcgggugggaaggcaugauugccggauggcacggcuacaccagccauggggcucacggaguugcgguggccgcugaccugaaguccacacaggaggccaucaauaagaucacgaaaaaccuuaauagccugucugaacucgaggucaagaaccugcaaagacuguccggcgccauggaugaacuccauaaugagauucuggagcuugacgaaaaaguggaugaccugcgggcugauaccaucagcucucagauugagcucgccguccugcuuagcaacgaagggaucauuaauuccgaggacgaacaccuucucgcgcuggagcgcaagcugaaaaagaugcucggaccuucugcuguggauaucggcaacggguguuucgagacaaagcacaaaugcaaucagaccugccuggacagaaucgccgccggcacauuuaacgcuggagaguucagccuucccaccuuugauucccugaauauuacggccgcuagccucaacgacgauggccuggacaaucauaccauccugcuuuauuacucuacagccgcguccagccucgccguuacccugaugcuggcuauuuucaucguguauauggucucucgggacaacguguccuguagcauuugccucuga

SEQ ID NO: 220614 - RNA, 1755 nt, Artificial Sequence
  derived and/or modified CDS sequence (opt5) from hemagglutinin__InfluenzaB__EPI592699
augaaggccaucauugugcugcucauggucguuaccagcaacgcugacagaaucugcacaggcauuacguccucuaauagcccccacguggugaaaaccgccacacagggggaagucaacgugaccggaguuaucccucugacaaccacaccgaccaaguccuacuucgcgaaucuuaaaggcacgcggacccgcgggaagcugugucccgauugccucaacuguacagaccuggauguggcucuuggaagaccuaugugcgucggcaccacacccucugccaaagccagcauucugcaugaagugcggccuguuaccuccggguguuuucccaucaugcacgaccgcacgaagaucagacaacucccuaaucugcugcggggauaugagaagauucgccucucuacacagaacgugaucgaugcugaaaaagccccgggcggccccuacagacuggggaccagcggauccugcccuaaugcuacaagcaagauuggcuucuuugccaccauggcgugggccguccccaaagacaacuauaagaaugcuaccaacccucagacaguggaggugcccuacaucuguacggaaggggaggaucagauuaccgucuggggauuccauucugacaauaaaauccaaaugaagucccuuuauggcgauagcaacccgcagaaguuuacaucuuccgccaaugggguuaccacacacuacgugagccagauuggagacuucccugaucagaccgaggacggcggccugccccaaucugggcggaucguggucgauuauauggugcagaaaccuggaaagacgggcacaaucguuuaccagcgcggggugcuccugccccagaaagucuggugcgcuuccggaagaagcaaggugauuaaaggcucccuuccccugaucggggaagccgacugucuccaugaggaauacggaggccugaacaagucuaaaccuuauuacaccggcaagcacgcgaaggccauugggaauugcccgaucuggguuaaaacaccccugaagcucgcuaacggaaccaaauaucggccucccgccaagcugcuuaaagagcgcggcuuuuucggggcuauugccggauuucuggagggcgggugggaaggcaugaucgccggauggcacggcuacaccagccauggggcucacggaguggcggucgccgcugaccucaaguccacacaagaggccaucaacaagauuacgaaaaaucugaacagccuuucugaacuggaggugaagaaucuccagagacuguccggcgccauggaugaacugcauaacgagauccucgagcuggacgaaaaagucgaugaccuucgggcugauaccauuagcucucagaucgagcuggccgugcuccugagcaaugaagggauuaucaacuccgaggacgaacaccuucuggcgcucgagcgcaagcugaaaaagaugcugggaccuucugcuguugauaucggcaauggguguuucgagacaaagcacaaaugcaaccaaaccugccucgacagaauugccgccggcacauuuaaugcuggagaguucagccugcccaccuuugauucccuuaacaucacggccgcuagccugaaugacgauggccucgacaaccauaccauucugcuguauuacucuacagccgcguccagccuugccgugacccucaugcuggcuaucuucauugucuauauggugucucgggacaauguuuccuguagcaucugccuguga

SEQ ID NO: 220615 - RNA, 1755 nt, Artificial Sequence; identical to SEQ ID NO: 220524
  derived and/or modified CDS sequence (opt5) from hemagglutinin__InfluenzaB__EPI592707

SEQ ID NO: 220616 - RNA, 1755 nt, Artificial Sequence
  derived and/or modified CDS sequence (opt5) from hemagglutinin__InfluenzaB__EPI693094
augaaggccaucauugugcugcucauggucguuaccagcaacgcugacagaaucugcacaggcauuacguccucuaauagcccccacguggugaaaaccgccacacagggggaggucaacgugaccggaguuaucccucugacaaccacaccgaccaaguccuacuucgcgaaucuuaaaggcacgcggacccgcgggaagcugugucccgauugccucaacuguacagaccuggauguggcucuuggaagaccuaugugcgucggcaccacacccucugccaaagccagcauucugcaugaagugcggccuguuaccuccggguguuuucccaucaugcacgaccgcacgaagaucagacaacucccuaaucugcugcggggauaugagaagauucgccucucuacacagaacgugaucgaugcugaaaaagccccgggcggccccuacagacuggggaccagcgaguccugcccuaaugcuacaagcaagauuggauucuuugccaccauggcgugggccguccccaaagacaacuauaagaaugcuaccaacccucagacaguggaagugcccuacaucuguacggagggcgaggaucagauuaccgucuggggguuccauucugacaauaaaauccaaaugaagucccuuuauggagauagcaacccgcagaaguuuacaucuuccgccaauggcguuaccacacacuacgugagccagauuggggacuucccugaucagaccgaagacggaggccugccccaaucuggccggaucguggucgauuauauggugcagaaaccugggaagacgggaacaaucguuuaccagcgcggcgugcuccugccccagaaagucuggugcgcuuccgggagaagcaaggugauuaaaggaucccuuccccugaucggcgaggccgacugucuccaugaagaguacgggggacugaacaagucuaaaccuuauuacaccggcaagcacgcgaaggccauuggcaauugcccgaucuggguuaaaacaccccugaagcucgcuaacgggaccaaauaucggccucccgccaagcugcuuaaagagcgcggauuuuucggcgcuauugccggguuucuggaaggaggcugggaggggaugaucgccggcuggcacggauacaccagccauggcgcucacgggguggcggucgccgcugaccucaaguccacacaagaagccaucaacaagauuacgaaaaaucugaacagccuuucugagcuggaagugaagaaucuccagagacuguccggagccauggaugagcugcauaacgagauccucgaacuggacgagaaagucgaugaccuucgggcugauaccauuagcucucagaucgaacuggccgugcuccugagcaaugagggcauuaucaacuccgaagacgagcaccuucuggcgcucgagcgcaagcugaaaaagaugcuggggccuucugcuguugauaucggaaauggcuguuucgaaacaaagcacaaaugcaaccaaaccugccucgacagaauugccgccgggacauuuaaugcuggcgaguucagccugcccaccuuugauucccuuaacaucacggccgcuagccugaaugacgauggacucgacaaccauaccauucugcuguauuacucuacagccgcguccagccuugccgugacccucaugcuggcuaucuucauugucuauauggugucucgggacaauguuuccuguagcaucugccuguga

SEQ ID NO: 220617 - RNA, 1758 nt, Artificial Sequence; identical to SEQ ID NO: 220547
  derived and/or modified CDS sequence (opt5) from hemagglutinin__InfluenzaB__EPI678796

SEQ ID NO: 220618 - RNA, 1758 nt, Artificial Sequence
  derived and/or modified CDS sequence (opt5) from hemagglutinin__InfluenzaB__EPI721064
augaaggccaucauugugcugcucauggucguuaccagcaacgcugacagaaucugcacaggcauuacguccucuaauagcccccacguggugaaaaccgccacacagggggaggucaacgugaccggaguuaucccucugacaaccacaccgaccaagucccauuucgcgaaucuuaaaggcacggaaacccgggggaagcugugucccaaaugccucaacuguacagaucuggacguggcucuuggacgcccuaagugcaccggcaagauucccucugccagagucagcauccugcacgaggugcggccuguuacauccggguguuuucccaucaugcaugaucgcaccaaaauuagacaacucccuaaucugcugcggggauacgaacacgugcgccucucuacgcauaacgucaucaaugccgaggacgcuccgggcggccccuauaagauugggacaagcagauccugcccuaacaucaccaauggaaacggcuucuuugccacaauggcuugggccgugcccaaaaaugauaagaacaaaaccgcgaccaauccucugacaauugaagugcccuacaucuguacggagggggaggaccagauuaccgucuggggauuccacagcgauaacgaaacacagauggccaagcuguauggcgacucuaagccgcagaaauuuaccuccagcgcuaaugggguuacaacccacuacgugucucaaaucggaggcuucccuaaccagacggaggauggcgggcugccccaguccggacggaucguggucgacuauauggugcaaaagagcggcaaaacagggaccauuaccuaccagcgcggaauccuccugccucagaagguuuggugcgccucuggcagauccaaagugauuaaggggagccuuccccugaucggagaagcugauugucuccaugagaaauauggcggccugaacaaguccaagcccuacuacacaggggagcacgccaaagcgauuggaaauugcccuaucugggucaagaccccgcugaaacucgccaacggcacaaaguaucggcccccugcuaaacugcuuaaggaacgcggguuuuucggagccaucgcuggcuuucuggaagggggcugggagggaaugauugccggcuggcauggguacacgucucacggagcccacggcguggcuguugcggccgaccucaagagcacccaggaggcuaucaauaaaauuacaaagaaccuuaauucccuuagcgaacuggaggugaaaaaccuccagagacugucuggggccauggaugagcugcauaaugaaauccucgagcuggacgaaaaggucgacgaucuucgggccgacaccauuuccagccaaaucgagcuggcugugcuccugucuaacgaaggaaucauuaauagcgaggaugagcaccuucuggcccucgaacgcaaacugaagaagaugcugggccccuccgcggucgagaucgggaacggcuguuucgaaacaaaacauaagugcaaucagaccugccucgacagaauugcugccggaacguuugaugccggcgaguucucucugccuaccuuugacagccuuaacaucacagcugccucccugaaugaugacgggcucgauaaccacaccauucugcuguauuacagcacagcugccucuucccuugcggugacccucaugaucgccauuuucguuguguauauggucagccgggacaaugugucuuguuccaucugccuguga

SEQ ID NO: 220619 - RNA, 1758 nt, Artificial Sequence; identical to SEQ ID NO: 218828
  derived and/or modified CDS sequence (opt5) from hemagglutinin__InfluenzaB__EPI328904

SEQ ID NO: 220620 - RNA, 1755 nt, Artificial Sequence
  derived and/or modified CDS sequence (opt5) from hemagglutinin__InfluenzaB__EPI543191
augaaggccaucauugugcugcucauggucguuaccagcaacgcugacagaaucugcacaggcauuacguccucuaauagcccccacguggugaaaaccgccacacagggggaagucaacgugaccggaguuaucccucugacaaccacaccgaccaaguccuacuucgcgaaucuuaaaggcacgcggacccgcgggaagcugugucccgauugccucaacuguacagaccuggauguggcucuuggaagaccuaugugcgucggcaccacacccucugccaaagccagcauucugcaugaagugcggccuguuaccuccggguguuuucccaucaugcacgaccgcacgaagaucagacaacucccuaaucugcugcggggauaugagaagauucgccucucuacacagaacgugaucgaugcugaaaaagccccgggcggccccuacagacuggggaccagcggauccugcccuaaugcuacaagcaagauuggcuucuuugccaccauggcgugggccguccccaaagacaacuauaagaaugcuaccaacccucuuacaguggaggugcccuacaucuguacggaaggggaggaucagauuaccgucuggggauuccauucugacaaaaagacacagaugaagucccuguauggcgauagcaauccgcaaaaauuuaccucuuccgccaacgggguuacaacccacuacgugagccagaucggagacuucccugaucagacggaggacggcggccucccccagucugggcggauuguggucgauuauaugaugcaaaagccuggaaaaacaggcaccaucguguaccagcgcgggguucugcuuccccagaagguguggugcgcuuccggaagaagcaaagucaucaagggcucccugccccucauuggggaagccgacugucugcaugaggaauacggaggccugaauaaaucuaagccuuauuacaccggcaagcacgcgaaagccaucgggaacugcccgauuugggugaagacaccccucaaacuggcuaauggaaccaaguaucggccucccgccaaacuucugaaggagcgcggcuuuuucggggcuaucgccggauuucucgagggcgggugggaaggcaugauugccggauggcacggcuacacaagccauggggcucacggaguugcgguggccgcugaccugaaguccacgcaggaggccaucaacaaaaucaccaagaaccuuaauagccugucugaacucgaggucaaaaaccugcaaagacuguccggcgccauggaugaacuccauaaugagauucuggagcuugacgaaaagguggaugaccugcgggcugauacaaucagcucucagauugagcucgccguccugcuuagcaacgaagggaucauuaauuccgaggacgaacaucugcucgcgcuggagcgcaaacugaagaagaugcucggaccuucugcuguggauaucggcaacggguguuucgagaccaaacacaagugcaaucagacaugccuggacagaaucgccgccggcaccuuuaacgcuggagaguucagccuucccacguuugauucccugaauauuaccgccgcuagccucaacgacgauggccuggacaaucacacaauccugcuuuauuacucuaccgccgcguccagccucgccguuacacugaugcuggcuauuuucaucguguauauggucucucgggacaacguguccuguagcauuugccucuga

SEQ ID NO: 220621 - RNA, 1755 nt, Artificial Sequence; identical to SEQ ID NO: 220201
  derived and/or modified CDS sequence (opt5) from hemagglutinin__InfluenzaB__EPI500359

SEQ ID NO: 220622 - RNA, 1755 nt, Artificial Sequence
  derived and/or modified CDS sequence (opt5) from hemagglutinin__InfluenzaB__EPI543185
augaaggccaucauugugcugcucauggucguuaccagcaacgcugacagaaucugcacaggcauuacguccucuaauagcccccacguggugaaaaccgccacacagggggaagucaacgugaccggaguuaucccucugacaaccacaccgaccaaguccuacuucgcgaaucuuaaaggcacgcggacccgcgggaagcugugucccgauugccucaacuguacagaccuggauguggcucuuggaagaccuaugugcgucggcaccacacccucugccaaagccagcauucugcaugaagugcggccuguuaccuccggguguuuucccaucaugcacgaccgcacgaagaucagacaacucccuaaucugcugcggggauaugagaagauucgccucucuacacagaacgugaucgaugcugaaaaagccccgggcggccccuacagacuggggaccagcggauccugcccuaaugcuacaagcaagauuggcuucuuugccaccauggcgugggccguccccaaagacaacuauaagaaugcuaccaacccucagacaguggaggugcccuacaucuguacggaaggggaggaucagauuaccgucuggggauuccauucugacaauaaaaaccaaaugaagucccuuuauggcgauagcaauccgcagaaguuuacaucuuccgccaacgggguuaccacacacuacgugagccagaucggagacuucccugaucagaccgaggacggcggccugccccaaucugggcggauuguggucgauuauaugaugcagaaaccuggaaagacgggcacaaucguguaccagcgcgggguucuccugccccagaaaguguggugcgcuuccggaagaagcaaggucaucaaaggcucccuuccccugauuggggaagccgacugucuccaugaggaauacggaggccugaauaagucuaaaccuuauuacaccggcaagcacgcgaaggccaucgggaacugcccgauuugggugaaaacaccccugaagcucgcuaacggaaccaaauaucggccucccgccaagcugcuuaaagagcgcggcuuuuucggggcuaucgccggauuucuggagggcgggugggaaggcaugauugccggauggcacggcuacaccagccauggggcucacggaguugcgguggccgcugaccucaaguccacacaagaggccaucaauaagaucacgaaaaaccugaauagccuuucugaacuggaggucaagaaccuccagagacuguccggcgccauggaugaacugcauaaugagauucucgagcuggacgaaaaaguggaugaccuucgggcugauaccaucagcucucagauugagcuggccguccuccugagcaacgaagggaucauuaauuccgaggacgaacaccuucuggcgcucgagcgcaagcugaaaaagaugcugggaccuucugcuguggauaucggcaacggguguuucgagacaaagcacaaaugcaaucaaaccugccucgacagaaucgccgccggcacauuuaacgcuggagaguucagccugcccaccuuugauucccuuaauauuacggccgcuagccugaacgacgauggccucgacaaucauaccauccugcuguauuacucuacagccgcguccagccuugccguuacccucaugcuggcuauuuucaucguguauauggucucucgggacaacguguccuguagcauuugccuguga

SEQ ID NO: 220623 - RNA, 1755 nt, Artificial Sequence; identical to SEQ ID NO: 220361
  derived and/or modified CDS sequence (opt5) from hemagglutinin__InfluenzaB__EPI536447

SEQ ID NO: 220624 - RNA, 1755 nt, Artificial Sequence; identical to SEQ ID NO: 218830
  derived and/or modified CDS sequence (opt5) from hemagglutinin__InfluenzaB__NP_056660

SEQ ID NO: 220625 - RNA, 1755 nt, Artificial Sequence
  derived and/or modified CDS sequence (opt5) from hemagglutinin__InfluenzaB__ABG85167
augaaggccaucauugugcugcucauggucguuaccagcaacgcugacagaaucugcacaggcauuacguccucuaauagcccccacguggugaaaaccgccacacagggggaggucaacgugaccggaguuaucccucugacaaccacaccgacccggucccauuucgcgaaucuuaagggcacgcaaacccgcgggaaacugugucccaacugcuuuaauuguacagaucucgacguggcucugggaagaccuaagugcaugggcaacauucccucugccaaagucagcauccuucacgaagugaagccuguuaccuccggguguuuccccaucaugcaugaucggacaaagauucgccagcugccuaaucuccugagaggauacgagaacauccggcugucuaccagcaaugugauuaacgccgaaacggcuccgggcggccccuauaaagucgggacauccggaagcugcccuaauguggccaaccgcaauggcuuuuucaacaccauggcuugggugauccccaaggacaauaacaaaacagccauuaacccugucaccguugaggugcccuacaucuguucugaaggggaggaucagauuaccguguggggauuucacuccgacgauaagacacagauggagagacucuauggcgacagcaauccgcaaaaauucacgucuuccgcgaacggggucaccacacauuacgugagccagaucggaggcuuuccuaaucagaccgaagaugagggccugaagcagucugggcggaucguuguggacuauaugguccaaaagcccggaaaaacaggcaccauuguguaccagcgcgggauccuucugccucagaagguuuggugcgccuccggaagaagcaaagugauuaagggcucccucccccugaucggggaagcugauugucuucacgagaaauauggaggccugaacaagucuaaacccuacuacacgggcgagcacgccaaggcuauugggaauugcccuaucugggucaagacaccgcucaaacuggccaacggaaccaaguaucggcccccugcgaaacugcucaaggaacgcggcuucuuuggggccaucgcuggauuccuggagggcgggugggaaggcaugauugccggauggcauggcuacaccagccacggggcucauggaguggccgucgccgcugaccuuaaauccacacaggaggcgaucaauaagauuaccaagaaccugaauagccucucugaacuggaggugaaaaaccuucaaagacuguccggcgccaugaaugggcuccacgaugagauccuggaacuggacgagaagguugacgaucuccgggcugacacaauuagcucucagaucgaacuggccgugcuucugagcaacgagggaaucauuaauuccgaagaugagcaccuccuggcccuugagcgcaaacugaagaaaaugcucggccccucugcugucgaaaucgggaacggcuguuuugagacgaagcauaagugcaaucagaccugccuggacagaauugccgcgggaacauucaacgcuggcgauuuuagccugccuaccuucgacucccucaacaucacagccgccagccugaaugaugacgaucuugacaaccacaccauucugcucuauuacucuacggcugccuccagccuggcugugacccugaugaucgccauuuucaucguuuauauggugucucgggauaaugucuccuguagcaucugccuuuga

SEQ ID NO: 220626 - RNA, 1755 nt, Artificial Sequence
  derived and/or modified CDS sequence (opt5) from hemagglutinin__InfluenzaB__EPI376346
augaaggccaucauugugcugcucauggucguuaccagcaacgcugacagaaucugcacaggcauuacguccucuaauagcccccacguggugaaaaccgccacacagggggaggucaacgugaccggaguuaucccucugacaaccacaccgaccaaguccuacuucgcgaaucuuaaaggcacgaagacccgggggaaacugugucccgauugccucaacuguacagaccuggauguggcucuuggacgcccuaugugcgucggcaccacacccucugccaaggccagcauucugcaugaagugagaccuguuaccuccggguguuuucccaucaugcacgaccggacgaagauccgccaacucgcuaaucugcugagaggauaugagaacauucggcucucuacacagaaugugaucgaugccgaaaaagcuccuggcggcccguaccgccuggggaccagcggauccugccccaacgccacaagcaagucuggcuucuuugcgaccauggccugggcugucccuaaagacaauaacaagaaugccaccaacccccuuacaguggaggugccuuauauuugugcugaaggggaggaucagaucacggucuggggauuccauuccgacgauaaaacccagaugaagaaucuguacggcgacagcaacccccaaaaguuuacaucuuccgccaaugggguuaccacacacuaugugagccagauuggaggcuucccggaucagaccgaggacggcgggcucccucagucuggaagaaucguggucgauuacaugaugcaaaaacccggcaagacggggacaauuguguaucagcggggaguucugcuuccucagaaaguguggugcgcguccggccgcagcaaggucaucaaagggucccugccccucaucggagaagccgacugucugcaugagaaguacggcggccugaacaaaucuaagcccuacuauaccggggaacacgcuaaggccauuggaaacugcccuaucugggugaaaaccccgcucaagcuggcuaauggcacaaaauacagacccccugccaagcugcugaaagagcggggguuuuucggagccauugcuggcuuucucgaagggggcugggaaggaaugaucgcgggcuggcacggguauaccagccauggagcccacggcguugcuguggccgccgaccugaaguccacacaggaggcuauuaacaagaucacgaaaaaucuuaacagccugucugaacucgaggucaagaaucugcaacgccuguccggggccauggaugaacuccauaacgagauccuggagcuugacgaaaaaguggaugaccugagagcggauaccauuagcucucagaucgagcucgcuguccugcuuagcaaugaaggaauuaucaacuccgaggacgaacaccuucucgcccuggagcggaagcugaaaaagaugcucggccccucugccguggauauugggaauggcuguuucgagacaaagcacaaaugcaaccagaccugccuggaccgcaucgcugccggaacauuuaaugcuggcgaguucagccuuccuaccuuugauucccugaacaucacggccgcgagccucaaugacgaugggcuggacaaccauaccauucugcuuuacuauucuacagccgcuuccagccucgccguuacccugaugcuggcuaucuucauuguguacauggucucuagagacaauguguccuguagcaucugccucuga

SEQ ID NO: 220627 - RNA, 1755 nt, Artificial Sequence; identical to SEQ ID NO: 218926
  derived and/or modified CDS sequence (opt5) from hemagglutinin__InfluenzaB__EPI368425

SEQ ID NO: 220628 - RNA, 1755 nt, Artificial Sequence; identical to SEQ ID NO: 218892
  derived and/or modified CDS sequence (opt5) from hemagglutinin__InfluenzaB__ACH53430

SEQ ID NO: 220629 - RNA, 1758 nt, Artificial Sequence; identical to SEQ ID NO: 218717
  derived and/or modified CDS sequence (opt5) from hemagglutinin__InfluenzaB__EPI331151

SEQ ID NO: 220630 - RNA, 1758 nt, Artificial Sequence
  derived and/or modified CDS sequence (opt5) from hemagglutinin__InfluenzaB__EPI356777
augaaggccaucauugugcugcucauggucguuaccagcaacgcugacagaaucugcacaggcauuacguccucuaauagcccccacguggugaaaaccgccacacagggggaggucaacgugaccggaguuaucccucugacaaccacaccgaccaagucccauuucgcgaaucuuaaaggcacggaaacccgggggaagcugugucccaaaugccucaacuguacagaucuggacguggcucuuggacgcccuaagugcaccggcaagauucccucugccagagucagcauccugcacgaggugcggccuguuacauccggguguuuucccaucaugcaugaucgcaccaaaauuagacaacucccuaaucugcugcggggauacgaacacauccgccucucuacgcauaacgugauuaaugccgagaacgcuccgggcggccccuauaagaucgggacaagcggauccugcccuaaugucaccaacggcaauggguucuuugccacaauggcuugggccgugcccaaaaacgacaagaauaaaaccgcgaccaacccucugacaauugaagugcccuacaucuguacggagggagaggaucagauuaccgucuggggcuuccacagcgacgaugaaacacagauggccaagcuguauggggacucuaagccgcagaaauuuaccuccagcgcuaauggaguuacaacccacuacgugucucaaaucggcggcuucccuaaccagacggaggaugggggacugccccaguccggcagaaucguggucgacuauauggugcaaaagagcgggaaaacaggaaccauuaccuaccagcggggcauccuccugccucagaagguuuggugcgccucugggcgcuccaaagugauuaagggaagccuuccccugaucggcgaagcugauugucuccaugagaaauauggcgggcugaacaaguccaagcccuacuacacaggagagcacgccaaagcgauuggcaauugcccuaucugggucaagaccccgcugaaacucgccaacgggacaaaguauagacccccugcuaaacugcuuaaggaacggggauuuuucggcgccaucgcuggguuucuggagggcggaugggaaggcaugauugccggguggcauggauacacgucucacggcgcccacgggguggcuguugcggccgaccucaagagcacccaggaggcuaucaauaaaauuacaaagaaccuuaauucccuuagcgaacuggaggugaaaaaccuccagcgccugucuggagccauggaugagcugcauaaugaaauccucgagcuggacgaaaaggucgacgaucuuagagccgacaccauuuccagccaaaucgagcuggcugugcuccugucuaacgaaggcaucauuaauagcgaggaugagcaccuucuggcccucgaacggaaacugaagaagaugcuggggcccuccgcggucgagaucggcaacggauguuucgaaacaaaacauaagugcaaucagaccugccucgaccgcauugcugccggcacguuugaugccggggaguucucucugccuaccuuugacagccuuaacaucacagcugccucccugaaugaugacggacucgauaaccacaccauucugcuguauuacagcacagcugccucuucccuugcggugacccucaugaucgccauuuucguuguguauauggucagcagagacaaugugucuuguuccaucugccuguga

SEQ ID NO: 220631 - RNA, 1752 nt, Artificial Sequence; identical to SEQ ID NO: 218499
  derived and/or modified CDS sequence (opt5) from hemagglutinin__InfluenzaB__CY018349

SEQ ID NO: 220632 - RNA, 1752 nt, Artificial Sequence
  derived and/or modified CDS sequence (opt5) from hemagglutinin__InfluenzaB__AY581945
augaaggccaucauugugcugcucauggucguuaccagcaacgcugacagaaucugcacaggcauuacguccucuaauagcccccacguggugaaaaccgccacacagggggaggucaacgugaccggaguuaucccucugacaaccacaccgaccaagucccauuucgcgaaucuuaaaggcacgaagacccgggggaaacugugucccaacugccucaauuguacagaucuggacguggcucuugcccgcccuaugugcgucggaaccacacccucugccaaggcuagcauucugcacgaagugagaccuguuaccuccggcuguuuucccaucaugcaugaucggacgaagauccgccaacucccuaaccugcugagaggguacgagaauauucggcucucuacacagaacgugaucaaugccgaacgcgcuccgggaggccccuauagacugggcaccagcggguccugcccuaacgucacaagccgggacggauucuuugccaccauggcgugggccgugccccgcgauaauaaaaccgcuacaaacccucuuacgguggagguccccuacauuuguaccaagggcgaagaccagaucacaguuuggggguuccacucugauaauaaaacccagaugaagaaccuguauggagacuccaauccgcaaaaauuuacaagcucugccaacggcgugaccacgcauuacgugucccagauugggggauucccuaaccagacagaggauggcggccucccccagagcgggagaaucgucguggacuauaugguucaaaagccuggaaagaccggcaccauuguguaccagcgcgggguccugcuuccccagaaaguguggugcgcuucuggacgguccaagguuaucaaaggcagccugccccucaucggggaggccgauugucugcacgaaaaguauggaggccugaauaaauccaagccuuacuacacaggcgagcacgcgaaagccauugggaacugcccgaucugggugaagacaccccucaagcuggcuaauggaaccaaauauagaccucccgccaagcugcugaaagaacggggcuuuuucggggcuauugccggauuucucgagggcgggugggagggcaugaucgccggauggcauggcuacacgucucacggggcucauggagucgcgguggccgcugaccuuaagagcacccaggaagccauuaacaaaaucacaaagaaucuuaacucccugagcgagcucgaagucaagaaucugcaacgccugucuggcgccauggaugagcuccacaacgaaauccuggagcuugacgagaaaguggacgaucugagagcugacaccauuuccagccagaucgaacucgccguucugcuuucuaaugaggggauuaucaacagcgaagaugagcaucugcucgcgcuggaacggaagcugaaaaagaugcucggaccuuccgcuguggacauuggcaauggguguuucgagacaaaacacaagugcaaccagaccugccuggauagaaucgccgccggcacguuuaaugcuggagaguucucucuucccaccuuugacagccugaacaucacagccgcuucccucaaugaugacggccuggauaaccacaccauucugcuuuauuacagcacagccgcgucuucccucgccgucacccugaugaucgcuauuuucaucguguauaugguuagccgcgacaacgugucuuguuccauuugccuguga

SEQ ID NO: 220633 - RNA, 1755 nt, Artificial Sequence; identical to SEQ ID NO: 220380
  derived and/or modified CDS sequence (opt5) from hemagglutinin__InfluenzaB__EPI541351

SEQ ID NO: 220634 - RNA, 1755 nt, Artificial Sequence
  derived and/or modified CDS sequence (opt5) from hemagglutinin__InfluenzaB__EPI541760
augaaggccgugaucguccugcucaugguugugaccagcaacgcugacagaauuugcacaggcaucacguccucuaauagcccccacguggucaaaaccgccacacagggggaagugaacguuaccggagugauuccucugacaaccacaccgaccaaguccuacuucgcgaaucuuaaaggcacgcggacccgcgggaagcugugucccgauugccucaacuguacagaccuggaugucgcucuuggaagaccuaugugcgugggcaccacacccucugccaaagccagcauccugcaugaaguucggccugugaccuccggguguuuucccauuaugcacgaccgcacgaagaucagacaacucccuaaucugcugcggggauaugagaagauccgccucucuacacagaacgucauugaugcugaaaaagccccgggcggccccuacagacuggggaccagcggauccugcccuaaugcuacaagcaagaucggcuucuuugccaccauggcgugggccgugcccaaagacaacuauaagaaugcuaccaacccucuuacaguggagguccccuacauuuguacggaaggggaggaucagaucaccguuuggggauuccauucugacaauaaaacacagaugaagucccuguauggcgauagcaacccgcaaaaguuuaccucuuccgccaauggggugacaacccacuacgugagccagauuggagacuucccugaucagacggaggacggcggccucccccagucugggcggaucgucguggauuauaugaugcaaaaaccuggaaagacaggcaccauuguuuaccagcgcggggugcugcuuccccagaaagucuggugcgcuuccggaagaagcaaggugaucaaaggcucccugccccucaucggggaagccgacugucugcaugaggaauacggaggccugaacaagucuaaaccuuauuacaccggcaagcacgcgaaggccauugggaauugcccgaucuggguuaaaacaccccucaagcuggcuaacggaaccaaauaucggccucccgccaagcugcugaaagagcgcggcuuuuucggggcuauugccggauuucucgagggcgggugggaaggcaugaucgccggauggcacggcuacacaagccauggggcucacggaguggcggucgccgcugaccugaaguccacgcaggaggccauuaacaagaucaccaaaaaucuuaacagccugucugaacucgaggugaagaaucugcaaagacuguccggcgccauggaugaacuccauaacgagauccuggagcuugacgaaaaagucgaugaccugcgggcugauacaauuagcucucagaucgagcucgccgugcugcuuagcaaugaagggauuaucaacuccgaggacgaacaccuucucgcgcuggagcgcaagcugaaaaagaugcucggaccuucugcuguugauauuggcaauggguguuucgagaccaagcacaaaugcaaccagacaugccuggacagaaucgccgccggcaccuuuaaugcuggagaguucagccuucccacguuugauucccugaacaucaccgccgcuagccucaaugacgauggccuggacaaccauacaauucugcuuuauuacucuaccgccgcguccagccucgccgugacacugaugcuggcuaucuucauugucuauauggugucucgggacaauguuuccuguagcaucugccucuga

SEQ ID NO: 220635 - RNA, 1758 nt, Artificial Sequence; identical to SEQ ID NO: 218959
  derived and/or modified CDS sequence (opt5) from hemagglutinin__InfluenzaB__EPI477397

SEQ ID NO: 220636 - RNA, 1758 nt, Artificial Sequence
  derived and/or modified CDS sequence (opt5) from hemagglutinin__InfluenzaB__EPI492571
augaaggccaucauugugcugcucauggucguuaccagcaacgcugacagaaucugcacaggcauuacguccucuaauagcccccacguggugaaaaccgccacacagggggaggucaacgugaccggaguuaucccucugacaaccacaccgaccaagucccauuucgcgaaucuuaaaggcacggaaacccgggggaagcugugucccaaaugccucaacuguacagaucuggacguggcucuuggacgcccuaagugcaccggcaagauucccucugccagagucagcauccugcacgaggugcggccuguuacauccggguguuuucccaucaugcaugaucgcaccaaaauuagacaacucccuaaucugcugcggggauacgaacacauccgccucucuacgcauaacgugauuaaugccgaggacgcuccgggcggccccuauaagaucgggacaagcggauccugcccuaacgucaccaauggcaacggguucuuugccacaauggcuugggccgugcccaaaaaugauaagaacaaaaccgcgaccaauccucugacaauugaagugcccuacaucuguacggagggagaggaccagauuaccgucuggggcuuccacagcgauaucgaaacacagauggccaaacuuuauggggacucuaagccgcagaaguuuaccuccagcgcuaacggaguuacaacccacuacgugucucaaaucggcggcuucccuaaucagacggaggaugggggacugccccaguccggcagaauuguggucgacuauauggugcaaaagagcgggaaaacaggaaccaucaccuaccagcggggcauucuccugccucagaagguuuggugcgccucugggcgcuccaaagugaucaagggaagccuuccccugauuggcgaagcugauugucuccaugagaaauauggcgggcugaacaaguccaagcccuacuacacaggagagcacgccaaagcgaucggcaacugcccuaucugggucaagaccccgcugaaacucgccaaugggacaaaguauagacccccugcuaaacugcuuaaggaacggggauuuuucggcgccauugcuggguuucuggagggcggaugggaaggcaugaucgccggguggcauggauacacgucucacggcgcccacgggguggcuguugcggccgaccucaagagcacccaggaggcuauuaacaaaaucacaaagaaucugaacucccuuagcgaacuggaggugaaaaaucuccagcgccugucuggagccauggaugagcugcauaacgaaauucucgagcuggacgaaaaggucgacgaucuuagagccgacaccaucuccagccaaaucgagcuggcugugcuccugucuaaugaaggcauuaucaacagcgaggaugagcaccuucuggcccucgaacggaaacugaagaagaugcuggggcccuccgcggucgagauuggcaauggauguuucgaaacaaaacauaagugcaaccagaccugccucgaccgcaucgcugccggcacguuugaugccggggaguucucucugccuaccuuugacagccuuaauauuacagcugccucccugaacgaugacggacucgauaaucacaccauccugcuguauuacagcacagcugccucuucccuugcggugacccucaugauugccaucuucguuguguauauggucagcagagacaacgugucuuguuccaucugccuguga

SEQ ID NO: 220637 - RNA, 1758 nt, Artificial Sequence
  derived and/or modified CDS sequence (opt5) from hemagglutinin__InfluenzaB__EPI498340
augaaggccaucauugugcugcucauggucguuaccagcaacgcugacagaaucugcacaggcauuacguccucuaauagcccccacguggugaaaaccgccacacagggggaggucaacgugaccggaguuaucccucugacaaccacaccgaccaagucccauuucgcgaaucuuaaaggcacggaaacccgggggaagcugugucccaaaugccucaacuguacagaucuggacguggcucuuggacgcccuaagugcaccggcaagauucccucugccagagucagcauccugcacgaggugcggccuguuacauccggguguuuucccaucaugcaugaucgcaccaaaauuagacaacucccuaaucugcugcggggauacgaacacauccgccucucuacgcauaacgugauuaauacagaggacgccccgggcggccccuauaagaucgggaccagcggauccugcccuaacgucacaaauggcaacggguucuuugcuaccauggccugggcugugcccaaaaaugauaagaacaaaaccgccacaaauccucugacgauugaagugcccuacaucuguaccgagggagaggaccagauuacagucuggggcuuccacagcgauaucgaaacccagauggcgaaacuuuauggggacucuaagccgcagaaguuuacauccagcgccaacggaguuaccacgcacuacgugucucaaaucggcggcuucccuaaucagacagaggaugggggacugccccaguccggcagaauuguggucgacuauauggugcaaaagagcgggaaaaccggaaccaucacauaccagcggggcauucuccugccucagaagguuuggugcgcuucugggcgcuccaaagugaucaagggaagccuuccccugauuggcgaagccgauugucuccaugagaaauauggcgggcugaacaaguccaagcccuacuacaccggagagcacgcuaaagccaucggcaacugcccuaucugggucaagacaccgcugaaacucgcgaaugggacgaaguauagacccccugccaaacugcuuaaggaacggggauuuuucggcgcuauugccggguuucuggagggcggaugggaaggcaugaucgcuggguggcauggauacaccucucacggcgcccacgggguggccguugcugcggaccucaagagcacacaggaggccauuaacaaaaucaccaagaaucugaacucccuuagcgaacuggaggugaaaaaucuccagcgccugucuggagcuauggaugagcugcauaacgaaauucucgagcuggacgaaaaggucgacgaucuuagagccgacacaaucuccagccaaaucgagcuggccgugcuccugucuaaugaaggcauuaucaacagcgaggaugagcaccuucuggcucucgaacggaaacugaagaagaugcuggggcccuccgccgucgagauuggcaauggauguuucgaaaccaaacauaagugcaaccagacgugccucgaccgcaucgcggcuggcaccuuugaugccggggaguucucucugccuacauuugacagccuuaauauuaccgccgcuucccugaacgaugacggacucgauaaucacacaauccugcuguauuacagcaccgccgcuucuucccuugccgugacgcucaugauugcgaucuucguuguguauauggucagcagagacaacgugucuuguuccaucugccuguga

SEQ ID NO: 220638 - RNA, 1758 nt, Artificial Sequence
  derived and/or modified CDS sequence (opt5) from hemagglutinin__InfluenzaB__EPI516490
augaaggccaucauugugcugcucauggucguuaccagcaacgcugacagaaucugcacaggcauuacguccucuaauagcccccacguggugaaaaccgccacacagggggaggucaacgugaccggaguuaucccucugacaaccacaccgaccaagucccauuucgcgaaucuuaaaggcacggaaacccgggggaagcugugucccaaaugccucaacuguacagaucuggacguggcucuuggacgcccuaagugcaccggcaagauucccucugccagagucagcauccugcacgaggugcggccuguuacauccggguguuuucccaucaugcaugaucgcaccaaaauuagacaacucccuaaucugcugcggggauacgaacacauccgccucucuacgcauaacgugauuaaugccgaggacgcuccgggcggccccuauaagaucgggacaagcggauccugcccuaacgucaccaauggcaacggguucuuugccacaauggcuugggccgugcccaaaaaugauaagaacaaaaccgcgaccaauccucugacaauugaagugcccuacaucuguacggagggagaggaccagauuaccgucuggggcuuccacagcgauaacgaaauccagauggccaagcuguauggggacucuaagccgcagaaauuuacauccagcgcuaauggaguuaccacacacuacgugucucaaaucggcggcuucccuaaccagaccgaggaugggggacugccccaguccggcagaauuguggucgacuauauggugcaaaagagcgggaaaacgggaacaaucaccuaccagcggggcauucuccugccucagaagguuuggugcgccucugggcgcuccaaagugaucaagggaagccuuccccugauuggcgaagcugauugucuccaugagaaauauggcgggcugaacaaguccaagcccuacuacaccggagagcacgccaaagcgaucggcaauugcccuaucugggucaagacaccgcugaaacucgccaacgggaccaaguauagacccccugcuaaacugcuuaaggaacggggauuuuucggcgccauugcuggguuucuggagggcggaugggaaggcaugaucgccggguggcauggauacacaucucacggcgcccacgggguggcuguugcggccgaccucaagagcacgcaggaggcuauuaauaaaaucaccaagaaccuuaauucccuuagcgaacuggaggugaaaaaccuccagcgccugucuggagccauggaugagcugcauaaugaaauucucgagcuggacgaaaaggucgacgaucuuagagccgacacaaucuccagccaaaucgagcuggcugugcuccugucuaacgaaggcauuaucaauagcgaggaugagcaccuucuggcccucgaacggaaacugaagaagaugcuggggcccuccgcggucgagauuggcaacggauguuucgaaaccaaacauaagugcaaucagacaugccucgaccgcaucgcugccggcaccuuugaugccggggaguucucucugccuacguuugacagccuuaacauuaccgcugccucccugaaugaugacggacucgauaaccacacaauccugcuguauuacagcaccgcugccucuucccuugcggugacacucaugauugccaucuucguuguguauauggucagcagagacaaugugucuuguuccaucugccuguga

SEQ ID NO: 220639 - RNA, 1755 nt, Artificial Sequence; identical to SEQ ID NO: 220201
  derived and/or modified CDS sequence (opt5) from hemagglutinin__InfluenzaB__EPI538119

SEQ ID NO: 220640 - RNA, 1755 nt, Artificial Sequence; identical to SEQ ID NO: 220620
  derived and/or modified CDS sequence (opt5) from hemagglutinin__InfluenzaB__EPI538125

SEQ ID NO: 220641 - RNA, 1755 nt, Artificial Sequence
  derived and/or modified CDS sequence (opt5) from hemagglutinin__InfluenzaB__EPI556422
augaaggccaucauugugcugcucauggucguuaccagcaacgcugacagaaucugcacaggcauuacguccucuaauagcccccacguggugaaaaccgccacacagggggaagucaacgugaccggaguuaucccucugacaaccacaccgaccaaguccuacuucgcgaaucuuaaaggcacgcggacccgcgggaagcugugucccgauugccucaacuguacagaccuggauguggcucuuggaagaccuaugugcgucggcaccacacccucugccaaagccagcauucugcaugaagugcggccuguuaccuccggguguuuucccaucaugcacgaccgcacgaagaucagacaacucccuaaucugcugcggggauaugagaagauucgccucucuacacagaacgugaucgaugcugaaaaagccccgggcggccccuacagacuggggaccagcggauccugcccuaaugcuacaagcaagauuggcuucuuugccaccauggcgugggccguccccaaagacaacuauaagaaugcuaccaacccucuuacaguggaggugcccuacaucuguacggaaggggaggaucagauuaccgucuggggauuccauucugacaucaaaacacagaugaagucccuguauggcgauagcaauccgcaaaaguuuaccucuuccgccaacgggguuacaacccacuacgugagccagauuggagacuucccugaucagacggaggacggcggccucccccagucugggcggaucguggucgauuauaugaugcaaaaaccuggaaagacaggcaccaucguguaccagcgcgggguucugcuuccccagaaaguguggugcgcuuccggaagaagcaaggucauuaaaggcucccugccccucaucggggaagccgacugucugcaugaggaauacggaggccugaauaagucuaaaccuuauuacaccggcaagcacgcgaaggccauugggaacugcccgaucugggugaaaacaccccucaagcuggcuaauggaaccaaauaucggccucccgccaagcugcugaaagagcgcggcuuuuucggggcuauugccggauuucucgagggcgggugggaaggcaugaucgccggauggcacggcuacacaagccauggggcucacggaguugcgguggccgcugaccugaaguccacgcaggaggccaucaacaagauuaccaaaaaccuuaauagccugucugaacucgaggucaagaaccugcaaagacuguccggcgccauggaugaacuccauaaugagauccuggagcuugacgaaaaaguggaugaccugcgggcugauacaauuagcucucagaucgagcucgccguccugcuuagcaacgaagggauuaucaauuccgaggacgaacaccuucucgcgcuggagcgcaagcugaaaaagaugcucggaccuucugcuguggauaucggcaacggguguuucgagaccaagcacaaaugcaaucagacaugccuggacagaauugccgccggcaccuuuaacgcuggagaguucagccuucccacguuugauucccugaauaucaccgccgcuagccucaacgacgauggccuggacaaucauacaauucugcuuuauuacucuaccgccgcguccagccucgccguuacacugaugcuggcuaucuucauuguguauauggucucucgggacaacguguccuguagcaucugccucuga

SEQ ID NO: 220642 - RNA, 1755 nt, Artificial Sequence
  derived and/or modified CDS sequence (opt5) from hemagglutinin__InfluenzaB__EPI614608
augaaggccaucauugugcugcucauggucguuaccagcaacgcugacagaaucugcacaggcauuacguccucuaauagcccccacguggugaaaaccgccacacagggggaggucaacgugaccggaguuaucccucugacaaccacaccgaccaaguccuacuucgcgaaucuuaaaggcacgcggacccgcgggaagcugugucccgauugccucaacuguacagaccuggauguggcucuuggaagaccuaugugcgucggcaccacacccucugccaaagccagcauucugcaugaagugcggccuaucaccuccggguguuuucccaucaugcacgaccgcacgaagauuagacaacucccuaaucugcugcggggauaugagaagauccgccucucuacacagaacguuauugaugcugaaaaagccccgggcggccccuacagacuggggaccagcggauccugcccuaaugcuacaagcaagaucggcuucuuugccaccauggcgugggccgugcccaaagacaacuauaagaaugcuaccaacccucuuacagucgaggugcccuacauuuguacggaaggggaggaucagaucaccguguggggauuccauucugacgagaaaacacagaugaagucccuguauggcgauagcaauccgcaaaaguuuaccucuuccgccaacggggucacaacccacuacguuagccagauuggagacuucccugaucagacggaagacggcggccucccccagucugggcggaucgugguggauuauaugaugcaaaaaccuggaaagacaggcaccaucgucuaccagcgcggggugcugcuuccccagaaaguuuggugcgcuuccggaagaagcaaggugauuaaaggcucccugccccucaucggggaggccgacugucugcaugaagaguacggaggccugaauaagucuaaaccuuauuacaccggcaagcacgcgaaggccauugggaacugcccgaucugggucaaaacaccccucaagcuggcuaauggaaccaaauaucggccucccgccaagcugcugaaagagcgcggcuuuuucggggcuauugccggauuucucgaaggcgggugggagggcaugaucgccggauggcacggcuacacaagccauggggcucacggaguggcgguugccgcugaccugaaguccacgcaggaagccaucaacaagauuaccaaaaaccuuaauagccugucugagcucgaagugaagaaccugcaaagacuguccggcgccauggaugagcuccauaaugagauccuggaacuugacgagaaagucgaugaccugcgggcugauacaauuagcucucagaucgaacucgccgugcugcuuagcaacgaggggauuaucaauuccgaagacgagcaccuucucgcgcuggagcgcaagcugaaaaagaugcucggaccuucugcugucgauaucggcaacggguguuucgaaaccaagcacaaaugcaaucagacaugccuggacagaauugccgccggcaccuuuaacgcuggagaguucagccuucccacguuugauucccugaauaucaccgccgcuagccucaacgacgauggccuggacaaucauacaauucugcuuuauuacucuaccgccgcguccagccucgccgugacacugaugcuggcuaucuucauuguuuauauggugucucgggacaacgucuccuguagcaucugccucuga

SEQ ID NO: 220643 - RNA, 1755 nt, Artificial Sequence
  derived and/or modified CDS sequence (opt5) from hemagglutinin__InfluenzaB__EPI614610
augaaggccaucauugugcugcucauggucguuaccagcaacgcugacagaaucugcacaggcauuacguccucuaauagcccccacguggugaaaaccgccacacagggggaggucaacgugaccggaguuaucccucugacaaccacaccgaccaaguccuacuucgcgaaucuuaaaggcacgcggacccgcgggaagcugugucccgauugccucaacuguacagaccuggauguggcucuuggaagaccuaugugcgucggcaccacacccucugccaaagccagcauucugcaugaagugcggccuguuaccuccggguguuuucccaucaugcacgaccgcacgaagaucagacaacucccuaaucugcugcggggauaugagaagauucgccucucuacacagaacgugaucgaugcugaaaaagccccgggcggccccuacagacuggggaccagcggauccugcccuaaugcuacaagcaagauuggcuucuuugccaccauggcgugggccguccccaaagacaacuauaagaaugcuaccaacccucuuacaguggaggugcccuacaucuguacggaaggggaggaucagauuaccgucuggggauuccauucugacgagaaaacacagaugaagucccuguauggcgauagcaauccgcaaaaguuuaccucuuccgccaacgggguuacaacccacuacgugagccagaucggagacuucccugaucagacggaagacggcggccucccccagucugggcggauuguggucgauuauaugaugcaaaaaccuggaaagacaggcaccaucguguaccagcgcgggguucugcuuccccagaaaguguggugcgcuuccggaagaagcaaggucaucaaaggcucccugccccucauuggggaggccgacugucugcaugaagaguacggaggccugaauaagucuaaaccuuauuacaccggcaagcacgcgaaggccaucgggaacugcccgauuugggugaaaacaccccucaagcuggcuaauggaaccaaauaucggccucccgccaagcugcugaaagagcgcggcuuuuucggggcuaucgccggauuucucgaaggcgggugggagggcaugauugccggauggcacggcuacacaagccauggggcucacggaguugcgguggccgcugaccugaaguccacgcaggaagccaucaacaagaucaccaaaaaccuuaauagccugucugagcucgaagucaagaaccugcaaagacuguccggcgccauggaugagcuccauaaugagauucuggaacuugacgagaaaguggaugaccugcgggcugauacaaucagcucucagauugaacucgccguccugcuuagcaacgaggggaucauuaauuccgaagacgagcaccuucucgcgcuggagcgcaagcugaaaaagaugcucggaccuucugcuguggauaucggcaacggguguuucgaaaccaagcacaaaugcaaucagacaugccuggacagaaucgccgccggcaccuuuaacgcuggagaguucagccuucccacguuugauucccugaauauuaccgccgcuagccucaacgacgauggccuggacaaucauacaauccugcuuuauuacucuaccgccgcguccagccucgccguuacacugaugcuggcuauuuucaucguguauauggucucucgggacaacguguccuguagcauuugccucuga

SEQ ID NO: 220644 - RNA, 1758 nt, Artificial Sequence
  derived and/or modified CDS sequence (opt5) from hemagglutinin__InfluenzaB__AAA43697
augaaggccaucauugugcugcucauggucguuaccagcaacgcugacagaaucugcacaggcauuacguccucuaauagcccccacguggugaaaaccgccacacagggggaagucaacgugaccggaguuaucccucugacaaccacaccgaccaagucccauuucgcgaaucuuaaaggcacgaagacccgggggaaacugugucccaagugccucaacuguacagaucuggacguggcucuugcccgcccuaagugcaugggaaccauucccucugccaaagcuagcauccugcacgaagucaagccugugacauccggcuguuuucccaucaugcaugauagaaccaaaauucggcaacucccuaaucugcugcgcggguacgagcacaucagacucucuacgcauaacguuauuaaugccgaaacagcuccgggaggccccuauaaggugggcaccagcggguccugcccuaacgucacaaauggaaacggcuucuuugccaccauggcgugggccgugcccaaaaaugacaacaauaagaccgcuacaaacccucugacgguggagguccccuacaucuguaccgaaggggaggaucagauuacaguuuggggauuccacagcgacucugagacccagauggugaaacuuuauggcgauuccaaaccgcagaaguuuacaagcucugccaauggggugaccacgcacuacgucucccaaaucggaggcuucccuaaccaggcugaagacggcgggcugccccagagcggacggauugugguugauuauauggugcagaaaucuggcaagacagggaccaucaccuaccaacgcggaauccuccugccucagaaagucuggugcgccuccggcagaagcaaggugauuaaagggucccuuccccugaucggagaggcggacugucuccaugaaaaguauggcggccugaacaagucuaaacccuacuacacaggggagcacgccaaggcuauuggaaauugcccuaucuggguuaaaaccccgcugaagcucgccaacggcacaaaauaucggcccccugcuaagcugcuuaaggagcgcggguuuuucggagccauugccggcuuucuggaagggggcugggagggaaugaucgcuggcuggcauggguacacgagccacggagcgcacggcguggccgucgcugccgaucucaaauccacccaggaagccaucaauaagauuacaaagaaccugaauagccuuucugagcuggaagugaagaaccuccagagacuguccggggcuauggacgagcugcauaaugagauccucgaacuggaugagaaagucgacgaccuucgggccgauaccauuagcucucaaaucgaacuggcggugcuccugagcaacgagggaauuaucaauuccgaagacgagcaccuucuggcucucgagcgcaagcugaagaaaaugcugggccccucugccguugaaaucgggaacggcuguuucgagacaaagcauaaaugcaaucagaccugccucgauagaauugccgcuggaacguuuaacgccggcgaguucagccugccuaccuuugacucccuuaauaucacagcugccagccugaacgaugacgggcucgauaaucacaccauucugcuguauuacucuacagcggccuccagccuugcugugacccucaugaucgccauuuucaucgucuauauggugucucgggacaacguuuccuguagcauuugccuguga

SEQ ID NO: 220645 - RNA, 1755 nt, Artificial Sequence
  derived and/or modified CDS sequence (opt5) from hemagglutinin__InfluenzaB__EPI271545
augaaggccaucauugugcugcucauggucguuaccagcaacgcugacagaaucugcacaggcauuacguccucuaauagcccccacguggugaaaaccgccacacagggggaagucaacgugaccggaguuaucccucugacaaccacaccgaccaaguccuacuucgcgaaucuuaaaggcacgcggacccgcgggaagcugugucccgauugccucaacuguacagaccuggauguggcucuuggaagaccuaugugcgucggcaccacacccucugccaaagccagcauucugcaugaagugcggccuguuaccuccggguguuuucccaucaugcacgaccgcacgaagaucagacaacucccuaaucugcugcggggauaugagaacauucgccucucuacacagaaugugaucgaugcugaaaaggccccgggcggccccuacagacuggggaccagcggauccugcccuaacgcuacaagcaaaauuggcuucuuugccaccauggcgugggccguccccaaggacaauuauaaaaacgcuaccaauccucuuacaguggaggugcccuacaucuguacggaaggggaggaucagauuaccgucuggggauuccauucugacaacaagacacagaugaaaucccuguauggcgauagcaauccgcaaaaguuuaccucuuccgccaacgggguuacaacccacuacgugagccagaucggagacuucccugaucagacggaggacggcggccucccccagucugggcggauuguggucgauuauaugaugcaaaagccuggaaaaacaggcaccaucguguaccagcgcgggguucugcuuccccagaagguguggugcgcuuccggaagaagcaaagucaucaagggcucccugccccucauuggggaagccgacugucugcaugagaaauacggaggccugaauaagucuaaaccuuauuacaccggcgaacacgcgaaggccaucgggaacugcccgauuugggugaagacaccccucaaacuggcuaacggaaccaaguaucggccucccgccaaacuucugaaggagcgcggcuuuuucggggcuaucgccggauuucucgagggcgggugggaaggcaugauugccggauggcacggcuacacaagccauggggcucacggaguugcgguggccgcugaccugaaauccacgcaggaggccaucaauaagaucaccaagaaccuuaauagccugucugaacucgaggucaaaaaccugcaaagacuguccggcgccauggaugaacuccauaaugagauucuggagcuugacgaaaagguggaugaccugcgggcugauacaaucagcucucagauugagcucgccguccugcuuagcaacgaagggaucauuaauuccgaggacgaacaucugcucgcgcuggagcgcaaacugaagaaaaugcucggaccuucugcuguggauaucggcaacggguguuucgagaccaagcacaagugcaaucagacaugccuggacagaaucgccgccggcaccuuuaacgcuggagaguucagccuucccacguuugauucccugaauauuaccgccgcuagccucaacgacgauggccuggacaaucacacaauccugcuuuauuacucuaccgccgcguccagccucgccguuacacugaugcuggcuauuuucaucguguauauggucucucgggacaacguguccuguagcauuugccucuga

SEQ ID NO: 220646 - RNA, 1755 nt, Artificial Sequence
  derived and/or modified CDS sequence (opt5) from hemagglutinin__InfluenzaB__AGB08329
augaaggccaucauugugcugcucauggucguuaccagcaacgcugacagaaucugcacaggcauuacguccucuaauagcccccacguggugaaaaccgccacacagggggaagucaacgugaccggaguuaucccucugacaaccacaccgaccaaguccuacuucgcgaaucuuaaaggcacgcggacccgcgggaagcugugucccgauugccucaacuguacagaccuggauguggcucuuggaagaccuaugugcgucggcaccacacccucugccaaagccagcauucugcaugaagugcggccuguuaccuccggguguuuucccaucaugcacgaccgcacgaagaucagacaacucccuaaucugcugcggggauaugagaacauucgccucucuacacagaaugugaucgaugcugaaaaggccccgggcggccccuacagacuggggaccagcggauccugcccuaacgcuacaagcaaaauuggcuucuuugccaccauggcgugggccguccccaaggacaauuauaaaaacgcuaccaauccucuuacaguggaggugcccuacaucuguacggaaggggaggaucagauuaccgucuggggauuccauucugacaacaagauccagaugaaaucccuguauggcgauagcaauccgcaaaaguuuacaucuuccgccaacgggguuaccacacacuacgugagccagauuggagacuucccugaucagaccgaggacggcggccucccccagucugggcggaucguggucgauuauaugaugcaaaagccuggaaaaacgggcacaaucguguaccagcgcgggguucugcuuccccagaagguguggugcgcuuccggaagaagcaaagucauuaagggcucccugccccucaucggggaagccgacugucugcaugagaaauacggaggccugaauaagucuaaaccuuauuacaccggcgaacacgcgaaggccauugggaacugcccgaucugggugaagacaccccucaaacuggcuaacggaaccaaguaucggccucccgccaaacuucugaaggagcgcggcuuuuucggggcuauugccggauuucucgagggcgggugggaaggcaugaucgccggauggcacggcuacaccagccauggggcucacggaguugcgguggccgcugaccugaaauccacacaggaggccaucaauaagauuacgaagaaccuuaauagccugucugaacucgaggucaaaaaccugcaaagacuguccggcgccauggaugaacuccauaaugagauccuggagcuugacgaaaagguggaugaccugcgggcugauaccauuagcucucagaucgagcucgccguccugcuuagcaacgaagggauuaucaauuccgaggacgaacaucugcucgcgcuggagcgcaaacugaagaaaaugcucggaccuucugcuguggauaucggcaacggguguuucgagacaaagcacaagugcaaucagaccugccuggacagaauugccgccggcacauuuaacgcuggagaguucagccuucccaccuuugauucccugaauaucacggccgcuagccucaacgacgauggccuggacaaucacaccauucugcuuuauuacucuacagccgcguccagccucgccguuacccugaugcuggcuaucuucauuguguauauggucucucgggacaacguguccuguagcaucugccucuga

SEQ ID NO: 220647 - RNA, 1755 nt, Artificial Sequence; identical to SEQ ID NO: 218827
  derived and/or modified CDS sequence (opt5) from hemagglutinin__InfluenzaB__EPI294880

SEQ ID NO: 220648 - RNA, 1752 nt, Artificial Sequence; identical to SEQ ID NO: 218538
  derived and/or modified CDS sequence (opt5) from hemagglutinin__InfluenzaB__CY018765

SEQ ID NO: 220649 - RNA, 1401 nt, Artificial Sequence
  derived and/or modified CDS sequence (opt5) from neuraminidase__InfluenzaB__AAN39743
augcugcccagcaccauccagacacucacgcuguuccuuaccuccggcggggugcugcucucucuguacgucagcgcccuucuguccuaucuccuguacucugacauucugcucaaguuuagcccuacaaaaguuaucgcuccgaccaugucccuggauugcgccaacgcgucuaaugugcaagcugugaaccacagcgccacagaggaaaugaccuuccuucugcccgagccugaauggacauaucccagacucuccugucagggaagcaccuuucagaaggcccugcuuauuucuccucaucgguucggcgaggcuaaaggaaauuccgcuccccugaucauucgcgaaccuuuuaucgccugcgggccgaaggaguguauccacuucgcccucacgcauuacgcggcccagcccggcggguauuacaacggaaccagagaggaccggaauaaacugcgccaccugauuagcgucaaccucggcaagaucccuacaguggaaaauucuauuuuucauauggcugccugguccggcagcgcuugccacgaugggagagaguggaccuauaucggaguugacggccccgauucuaacgcccugauuaagaucaaauacggggaagcguacacagacaccuaucacuccuacgccaauaacauucuucggacgcaagagagcgcuuguaauugcaucggaggcgauuguuaucugaugaucacagacggguccgccucuggaauuagccgcugcagauuccucaagauccgggagggccgcauuaucaaagaaauuuuuccuaccggcagaguggagcauacagaagaguguaccugcggguucgcuuccaacaagaccaucgaaugugucugccgggauaauagcuacacagccaaacgccccuuugugaagcugaacguugagacggacaccgccgagaucagacuuaugugcacagaaaccuaucuggauacaccgcggccugacgauggaucuauuaccggccccugugaguccaauggggacaagggaaacggcgggaucaaaggaggcuucgugcaccagcgcauggcuagcagaauuggccggugguacucuagaacgaugagcaagacaaaacgcauggggauggaacucuaugucaaguacgacggagauccuuggaccgacuccgaugcgcuggcccccucuggcgugauggugagcauggaggaacccgggugguacuccuuuggauucgagaucaaagacaagaaaugcgaugucccuuguauuggcaucgagaugguucaugacgggggcaagaagaccuggcacagcgcugccacagccaucuauugccugaugggaucuggccagcuccugugggauaccgugacagggguggacauggcucuuuga

SEQ ID NO: 220650 - RNA, 1401 nt, Artificial Sequence
  derived and/or modified CDS sequence (opt5) from neuraminidase__InfluenzaB__AAN39747
augcugcccagcaccauccagacacucauucuguuccuuacguccggcggggugcugcucucucuguacgucagcgcccuucuguccuaucuccuguacucugacauccugcucaaguuuagcccuaccaaaauuaucgcuccgacaaugucccuggauugcgccaacgcgucuaauguucaagcugugaaccacagcgccaccaaggagaugacauuccuucugcccgaaccugaguggaccuaucccagacucuccugucagggaagcacauuucagaaagcccugcuuauuucuccucaucgguucggcgaagcuaagggaaauuccgcuccccugaucauccgcgagccuuuuauugccugcgggccgaaagaauguaagcacuucgcccucacccauuacgcggcccagcccggcggguauuacaacggaacgagagaggaccggaauaagcugcgccaccugaucagcgugaaccucggcaaaauuccuaccgucgaaaauucuaucuuucauauggcugccugguccggcagcgcuugccacgaugggagagaguggacauauauuggaguggacggccccgauucuaacgcccugaucaagauuaaauacggggaggcguacaccgacacauaucacuccuacgccaauaacauccuucggacccaagaaagcgcuuguaauugcaucggaggcgauuguuaucugaugauuacggacggguccgccucuggaaucagcaagugccgcuuccucaaaauuagagagggccggaucauuaaggagaucuuuccuacaggccgcguugaacauaccgaggaauguacaugcggguucgcuuccaacaagaccaucgagugugccugcagagauaauagcuacaccgccaaacggcccuuugugaagcugaacgucgaaacagacacggcugagauucgccuuaugugcaccaaaacauaucuggauaccccgagaccugacgauggaucuaucacaggccccugugaguccaauggggacaagggaagcggcgggauuaaaggaggcuucgugcaccagcggauggcgucuaagaucggccgcugguacagcagaaccauguccaaaacgaagcggauggggauggaacucuauguuaaguacgacggagauccuuggacagacucugaugcccuggcucccagcggcgugauggucuccauugaggaacccgggugguacagcuuuggauucgagaucaaagacaagaaaugcgaugugccuuguaucggcauugaaauggugcaugacgggggcaagaaaaccuggcacucugccgccaccgcuaucuauugccugaugggauccggccagcuccugugggauacagucaccgggguugacauggcccuuuga

SEQ ID NO: 220651 - RNA, 1401 nt, Artificial Sequence
  derived and/or modified CDS sequence (opt5) from neuraminidase__InfluenzaB__AAN39749
augcugcccagcaccauccagacacucacgcuguuccuuaccuccggcggggugcugcucucucuguacgucagcgcccuucuguccuaucuccuguacucugacauucugcucaaguuuagcccuacaaaaguuaucgcuccgaccaugucccuggauugcgccaacgcgucuaaugugcaagcugugaaccacagcgccacagaggaaaugaccuuccuucugcccgagccugaauggacauaucccagacucuccugucagggaagcaccuuucagaaggcccugcuuauuucuccucaucgguucggcgaggcuaaaggaaauuccgcuccccugaucauucgcgaaccuuuuaucgccugcgggccgaaggaguguaaacacuucgcccucacgcauuacgcggcccagcccggcggguauuacaacggaaccagagaggaccggaauaagcugcgccaccugaucagcgucaaccucggcaagauuccuacaguggaaaauucuaucuuucauauggcugccugguccggcagcgcuugccacgaugggagagaguggaccuauauuggaguugacggccccgauucuaacgcccugaucaaaauuaaguacggggaagcguacacagacaccuaucacuccuacgccaauaacauccuucggacgcaagagagcgcuuguaauugcauuggaggcgauuguuaucugaugaucacagacggguccgccucuggaaucagccgcugcagauuccucaaaauucgggagggccgcaucauuaaggaaaucuuuccuaccggcagaguggagcauacagaagaguguaccugcggguucgcuuccaacaaaaccauugaaugugccugccgggauaauagcuacacagccaagcgccccuuugucaagcugaacguggagacggacaccgcugagaucagacuuaugugcacagaaaccuaucuggauacaccgcggccugacgauggaucuaucaccggccccugugaguccaauggggacaaaggaaacggcgggauuaagggaggcuucguucaccagcgcauggcgagcagaaucggccggugguacucuagaacgaugagcaaaacaaagcgcauggggauggaacucuaugugaaauacgacggagauccuuggaccgacuccgaugcccuggcucccucuggcgucauggugagcauggaggaacccgggugguacuccuuuggauucgagauuaaggacaaaaagugcgaugugccuuguaucggcauugagaugguccaugacgggggcaagaaaaccuggcacagcgccgccacagcuaucuauugccugaugggaucuggccagcuccugugggauaccguuacagggguggacauggcccuuuga

SEQ ID NO: 220652 - RNA, 1401 nt, Artificial Sequence
  derived and/or modified CDS sequence (opt5) from neuraminidase__InfluenzaB__AAN39751
augcugcccagcaccauccagacacucacgcuguuccuuaccuccggcggggugcugcucucucuguacgucagcgcccuucuguccuaucuccuguacucugacauucugcucaaguuuagcccuacaaaaguuaucgcuccgaccaugucccuggauugcgccaacgcgucuaaugugcaagcugugaaccacagcgccacagaggaaaugaccuuccuucugcccgagccugaauggacauaucccagacucuccugucagggaagcaccuuucagaaggcccugcuuauuucuccucaucgguucggcgaggcuaaaggaaauuccgcuccccugaucauucgcgaaccuuuuaucgccugcgggccgaaggaguguaaacacuucgcccucacgcauuacgcggcccagcccggcggguauuacaacggaaccagagaggaccggaauaagcugcgccaccugaucagcgucaaccucggcaagauuccuacaguggaaaauucuaucuuucauauggcugccugguccggcagcgcuugccacgaugggagagaguggaccuauauuggaguugacggccccgauucuaacgcccugaucaaaauuaaguacggggaagcguacacagacaccuaucacuccuacgccaauaacauccuucggacgcaagagagcgcuuguaauugcauuggaggcgauuguuaucugaugaucacagacggguccgccucuggaaucagccgcugcagauuccucaaaauucgggagggccgcauccugaaggaaauuuuuccuaccggcagaguggagcauacagaagaguguaccugcggguucgcuuccaacaaaaccaucgaaugugccugccgggauaauagcuacacagccaagcgccccuuuguccagcuuaacguggagacggacaccgcugagauuagacugaugugcacagaaaccuaucucgauacaccgcggccugacgauggaucuaucaccggccccugugaguccaauggggacaagggaaacggcgggaucaaaggaggcuucguucaccagcgcauggcgagcagaauuggccggugguacucuagaacgaugagcaagacaaaacgcauggggauggaccuguaugugaaguacgauggagacccuuggaccgauuccgacgcccuggcucccucuggcgucauggugagcauggaggaacccgggugguacuccuuuggauucgaaaucaaagauaagaaaugcgacgugccuuguauuggcaucgagaugguccaugaugggggcaagaagaccuggcacagcgccgccacagcuauuuauugccucaugggaucuggccagcugcuuugggacaccguuacagggguggauauggcccuguga

SEQ ID NO: 220653 - RNA, 1401 nt, Artificial Sequence
  derived and/or modified CDS sequence (opt5) from neuraminidase__InfluenzaB__AAN39753
augcugcccagcaccauccagacacucacgcuguuccuuaccuccggcggggugcugcucucucuguacgucagcgcccuucuguccuaucuccuguacucugacauucugcucaaguuuagcccuacaaaaguuaucgcuccgaccaugucccuggauugcgccaacgcgucuaaugugcaagcugugaaccacagcgccacagaggaaaugaccuuccuucugcccgagccugaauggacauaucccagacucuccugucagggaagcaccuuucagaaggcccugcuuauuucuccucaucgguucggcgaggcuaaaggaaauuccgcuccccugaucauucgcgaaccuuuuaucgccugcgggccgaaggaguguaaacacuucgcccucacgcauuacgcggcccagcccggcgaguauuacaacgggaccagagaagaccggaauaagcugcgccaccugaucagcgucaaccucggaaagauuccuacaguggaaaauucuaucuuucauauggcugccugguccggcagcgcuugccacgauggcagagaauggaccuauauugggguugacggacccgauucuaacgcccugaucaaaauuaaguacggcgaggcguacacagacaccuaucacuccuacgccaauaacauccuucggacgcaagagagcgcuuguaauugcauugggggagauuguuaucugaugaucacagacggcuccgccucugggaucagccgcugcagauuccucaaaauucgggaaggacgcaucauuaaggagaucuuuccuaccggcagaguggaacauacagaggaauguaccugcggcuucgcuuccaacaaaaccauugagugugccugccgggauaauagcuacacagccaagcgccccuuugucaagcugaacguggagacggacaccgcugaaaucagacuuaugugcacagagaccuaucuggauacaccgcggccugacgaugggucuaucaccggacccugugaauccaauggcgacaaagggaacggaggcauuaaagggggauucguucaccagcgcauggcgagcagaaucggccggugguacucuagaacgaugagcaagacaaagcgcaugggcauggagcucuaugugaaauacgacggggauccuuggaccgacuccgaugcccuggcucccucuggagucauggugagcauggaggagcccggcugguacuccuuuggguucgagauuaaggacaaaaagugcgaugugccuuguaucggaauugaaaugguccaugacggcgggaagaaaaccuggcacagcgccgccacagcuaucuauugccugaugggcucuggacagcuccugugggauaccguuacaggcguggacauggcccuuuga

SEQ ID NO: 220654 - RNA, 1401 nt, Artificial Sequence
  derived and/or modified CDS sequence (opt5) from neuraminidase__InfluenzaB__AAN39759
augcugcccagcaccauccagacacucacgcuguuccuuaccuccggcggggugcugcucucucuguacgucagcgccucccuuucuuaucugcucuacagcgacauucugcugaagcucuccccuacagagaucaccgcuccgacaaugccccuggauugcgccaacgcgucuaauguucaagcugugaacagaagcgccaccaaaggagugacacuucugcucccugaacccgaguggaccuauccucggcuguccugucccggcagcacguuucagaaggcccuucugauuucuccucaccgcuucggggaaaccaaaggaaauuccgcuccgcucaucauuagagagcccuuuaucgccugcggcccuaaggaauguaaacauuucgcucugacacacuacgccgcgcagcccgggggauauuacaacggcacccgggaggaccgcaauaagcugagacaucucaucagcgucaagcugggcaaaauuccuacaguggagaacucuaucuuucacauggccgcuugguccgggagcgccugccaugauggaaaggaauggaccuauauuggcguugacgggcccgauucuaaugcccuucugaaaaucaaguacggagaggcuuacacggacacauaucacuccuacgcgaacaauauucuccggacccaggaaagcgccuguaacugcaucggcgggaauuguuaucugaugauuacagauggauccgcuucuggcaucagcgagugccgcuuccuuaaaaucagagagggccggauuaucaaggaaauuuuuccgaccgggcgcgugaagcacaccgaggaauguacaugcggauucgccuccaacaaaacgaucgagugugcuugcagagacaauagcuacaccgccaagcggccuuuugucaaacugaacguggaaacagauaccgccgagauucgccucaugugcacagagaccuaucuggacacgcccagaccugaugacggcucuaucacagggcccugugaauccaauggagauaagggcagcgggggaaucaaaggcggcuucguucaucaacggauggagucuaagauugggcgcugguacagcagaaccauguccaaaaccaagcggaugggaaugggccuguaugugaaguacgacggggaccccuggacagauucugacgcucucgcgcugagcggagucaugguguccaucgaggaaccuggcugguacagcuuuggguucgaaauuaaagauaagaaaugcgacgugccguguaucggcauugagaugguccacgauggaggcaaggagaccuggcauucugccgcuacagccaucuauugccuuaugggguccggacagcugcucugggacacgguuaccggcguggauauggcccuguga

SEQ ID NO: 220655 - RNA, 1401 nt, Artificial Sequence
  derived and/or modified CDS sequence (opt5) from neuraminidase__InfluenzaB__AAN39761
augcugcccagcaccauccagacacucacgcuguuccuuaccuccggcggggugcugcucucucuguacgucagcgccucccuuucuuaucugcucuacagcgacauucugcugaaguuuucccaaacagagaucaccgcuccuacaaugccgcucgauugcgccaacgcgucuaauguucaggcugugaacagaagcgccaccaaaggagugacacugcuucugcccgaaccugaguggaccuauccccggcucuccuguccuggcagcacguuccagaaggcccugcuuauuucuccccaccgcuuuggggaaaccaaaggaaauuccgcuccucugaucauuagagagccguucaucgccugcggccccaaggaauguaaacauuuugcucucacacacuacgccgcgcagccugggggauauuacaacggcacccgggaggaccgcaauaagcugagacaucugaucagcgucaagcucggcaaaauucccacaguggagaacucuaucuuccacauggccgcuugguccgggagcgccugccaugauggacgggaauggaccuauauuggcguugacgggccugauucuaaugcucugcuuaagaucaaauacggagaggccuacacggacacauaucacuccuacgcgaagaacauucugcgcacccaagaaagcgccuguaauugcaucggcggggauuguuaucucaugauuacagacggauccgcuucuggcaucagcgagugcagauuucugaaaauccgggagggccgcauuaucaaggaaauuuuccccaccgggagaaucaagcacaccgaggaauguacaugcggauuugccuccaacaaaacgauugagugugcuugccgggauaauagcuacaccgccaagcgcccguucgugaaacuuaacgucgaaacagacaccgccgagaucagacugaugugcacagagaccuaucucgauacgccucggcccgacgauggcucuaucacagggccuugugaauccaauggagacaagggcagcgggggaauuaaaggcggcuuugugcaucagcgcauggcuucuaagaucgggagaugguacagccggaccauguccaaaaccaagagaaugggaaugggccuguauguuaaguacgacggggaucccuggacagacucugaggcgcuggcccucagcggagugauggucuccauggaggaacccggcugguacagcuucggguuugaaauuaaagauaagaaaugcgacgugccuuguaucggcauugagauggugcacgauggaggcaagaccacauggcauucugcugccacggccaucuauugccugaugggguccggacagcuucugugggacaccgucacaggcguugauauggcucucuga

SEQ ID NO: 220656 - RNA, 1401 nt, Artificial Sequence
  derived and/or modified CDS sequence (opt5) from neuraminidase__InfluenzaB__AAN39769
augcugcccagcaccauccagacacucacgcuguuccuuaccuccggcggggugcugcucucucuguacgucagcgcccuucuguccuaucuccuguacucugacauucugcucaaguuuagcccuacaaaaaucauugcuccgaccacaucccuggauucugccaacgcgagcaauuuccaagcuguuaaccacuccgccaccaaggagaugacauuucuucugcccgaaccugaguggaccuaucccagacucagcugccagggaucuacguuccagaaagcccugcuuaucuccccucaucgguuuggcgaagcuaaggggaauagcgcuccccugauuauccgcgagccuuucaucgccuguggaccgaaagaaugcaagcacuuugcccucacccauuacgcggcccagcccggcggguauuacaacggaacaagagaggaccggaauaagcugcgccaccugauuucugugaaccucggcaaaaucccuaccguggaaaauuccauuuuccauauggcugccuggagcggcucugcuugucacgaugggagagaauggacauauaucggagucgacggccccgauuccaacgcccugauuaagaucaaauacggggaggcguacaccgacacguaucacagcuacgccaauaacauucuucggacacaagaauccgcuugcaauuguaucggaggcgauugcuaucugaugaucaccgacgggucugccagcggaauuuccaagugucgcuuucucaaaaucagagagggccggauuaucaaggagauuuucccuacaggccgcguggaacauaccgaggaaugcaccuguggguuugcuagcaacaagacaaucgagugcgccuguagagauaauucuuacacggccaaacggcccuucguuaagcugaacguggaaaccgacacagcugagauccgccuuaugugcaccgagacauaucuggauaccccgagaccugacgauggauccauuacgggccccugcgaaagcaauggggacaaaggaucuggcgggaucaagggaggcuuuguccaccagcggauggcgagcaaaauuggccgcugguacuccagaacaaugucuaagaccaaacggauggggauggagcucuaugugaaguacgacggagauccuuggaccgacagcgaugcccuggcucccuccggcguuauggugagcaucgaggagcccgggugguacucuuucggauucgaaauuaaggacaaaaagugugaugucccuugcaucggcaucgagauggugcaugacgggggcaaaacaaccuggcacuccgccgccacagcuauuuauugucugaugggaagcggccagcuccugugggauacggugaccggggucgacauggcccuuuga

SEQ ID NO: 220657 - RNA, 1401 nt, Artificial Sequence
  derived and/or modified CDS sequence (opt5) from neuraminidase__InfluenzaB__AAN39771
augcugcccagcaccauccagacacucacgcuguuccuuaccuccggcggggugcugcucucucuguacgucagcgcccuucuguccuaucuccuguacucugacauucugcucaaguuuagcccuacaaaaaucauugcuccgaccacaucccuggauucugccaacgcgagcaauuuccaagcuguuaaccacuccgccaccaaggagaugacauuucuucugcccgaaccugaguggaccuaucccagacucagcugccagggaucuacguuccagaaagcccugcuuaucuccccucaucgguuuggcgaagcuaaggggaauagcgcuccccugauuauccgcgagccuuucaucgccuguggaccgaaagaaugcaagcacuuugcccucacccauuacgcggcccagcccggcggguauuacaacggaacaagagaggaccggaauaagcugcgccaccugauuucugugaaccucggcaaaaucccuaccguggaaaauuccauuuuccauauggcugccuggagcggcucugcuugucacgaugggagagaauggacauauaucggagucgacggccccgauuccaacgcccugauuaagaucaaauacggggaggcguacaccgacacguaucacagcuacgccaauaacauucuucggacacaagaauccgcuugcaauuguaucggaggcgauugcuaucugaugaucaccgacgggucugccagcggaauuuccaagugucgcuuucucaaaaucagagagggccggauugugaaggagaucuucccuacaggccgcguugaacauaccgaggaaugcaccuguggguuugcuagcaacaagacaauugagugcgccuguagagauaauucuuacacggccaaacggcccuucgugaagcugaacgucgaaaccgacacagcugagauccgccuuaugugcaccgagacauaucuggauaccccgagaccugacgauggauccaucacgggccccugcgaaagcaauggggacaaaggaucuggcgggauuaagggaggcuuugugcaccagcggauggcgagcaaaaucggccgcugguacuccagaacaaugucuaagaccaaacggauggggauggagcucuauguuaaguacgacggagauccuuggaccgacagcgaugcccuggaccccuccggcgugauggucagcauugaggagcccgggugguacucuuucggauucgaaaucaaggauaaaaagugugacgugccuugcauuggcaucgagauggugcaugaugggggcaaaacaaccuggcacuccgcugccacagccaucuauugucugaugggaagcggccagcuccugugggacacgauuaccggggucgauauggcucuuuga

SEQ ID NO: 220658 - RNA, 1401 nt, Artificial Sequence
  derived and/or modified CDS sequence (opt5) from neuraminidase__InfluenzaB__AAN39773
augcugcccagcaccauccagacacucacgcuguuccuuaccuccggcggggugcugcucucucuguacgucagcgcccuucuguccuaucuccuguacucugacauucugcucaaguuuagcccuacaaaaaucauugcuccgaccacaucccuggauucugccaacgcgagcaauuuccaagcuguuaaccacuccgccaccaaggagaugacauuucuucugcccgaaccugaguggaccuaucccagacucagcugccagggaucuacguuccagaaagcccugcuuaucuccccucaucgguuuggcgaagcuaaggggaauagcgcuccccugauuauccgcgagccuuucaucgccuguggaccgaaagaaugcaagcacuuugcccucacccauuacgcggcccagcccggcggguauuacaacggaacaagagaggaccggaauaagcugcgccaccugauuucugugaacuucggcaaaaucccuaccguggaaaauuccauuuuucauauggcugccuggagcggcucugcuugucacgaugggagagaauggacauauaucggagucgacggccccgauuccaacgcccucauuaagaucaaauacggggaggcguacaccgacacguaucacagcuacgccaauaacauucugcggacacaagaauccgcuugcaauuguaucggaggcgauugcuaucuuaugaucaccgacgggucugccagcggaauuuccaagugucgcuuccugaaaaucagagagggccggauugugaaggagaucuuuccuacaggccgcguugaacauaccgaggaaugcaccuguggguucgcuagcaacaagacaauugagugcgccuguagagauaauucuuacacggccaaacggcccuuugugaagcucaacgucgaaaccgacacagcugagauccgccugaugugcaccgagacauaucuugauaccccgagaccugacgauggauccaucacgggccccugcgaaagcaauggggacaaaggaucuggcgggauuaagggaggcuucgugcaccagcggauggcgagcaaaaucggccgcugguacuccagaacaaugucuaagaccaaacggauggggauggagcuguauguuaaguacgacggagauccuuggaccgacagcgaugcccucgcucccuccggcgugauggucagcauugaggagcccgggugguacucuuucggauuugaaaucaaggacaaaaagugugaugugccuugcauuggcaucgagauggugcaugacgggggcaaaacaaccuggcacuccgccgccacagcuaucuauugucugaugggaagcggccagcugcucugggauacgauuaccggggucgacauggcccuguga

SEQ ID NO: 220659 - RNA, 1401 nt, Artificial Sequence
  derived and/or modified CDS sequence (opt5) from neuraminidase__InfluenzaB__AAN39775
augcugcccagcaccauccagacacucacgcuguuccuuaccuccggcggggugcugcucucucuguacgucagcgcccuucuguccuaucuccuguacucugacauucugcucaaguuuagcccuacaaaaaucauugcuccgaccacaucccuggauucugccaacgcgagcaauuuccaagcuguuaaccacuccgccaccaaggagaugacauuucuucugcccgaaccugaguggaccuaucccagacucagcugccagggaucuacguuccagaaagcccugcuuaucuccccucaucgguuuggcgaagcuaaggggaauagcgcuccccugauuauccgcgagccuuucaucgccuguggaccgaaagaaugcaagcacuuugcccucacccauuacgcggcccagcccggcggguauuacaacggaacaagagaggaccggaauaagcugcgccaccugauuucugugaaccucggcaaaaucccuaccguggaaaauuccauuuuccauauggcugccuggagcggcucugcuugucacgaugggaaggaauggacauauaucggagucgacggccccgauuccaacgcccugauuaaaaucaaguacggggaggcguacaccgacacguaucacagcuacgccaauaacauucuuagaacacaagaauccgcuugcaauuguaucggaggcgauugcuaucugaugaucaccgacgggucugccagcggaauuuccaaaugucgguuucucaagauccgcgagggcagaauuaucaaggagauuuucccuacaggccggguggaacauaccgaggaaugcaccuguggguuugcuagcaacaaaacaaucgagugcgccugucgcgauaauucuuacacggccaagagacccuucguuaaacugaacguggaaaccgacacagcugagauccggcuuaugugcaccgagacauaucuggauaccccgcgcccugacgauggauccauuacgggccccugcgaaagcaauggggacaagggaucuggcgggaucaaaggaggcuuuguccaccagagaauggcgagcaagauuggccggugguacucccgcacaaugucuaaaaccaagagaauggggauggagcucuaugugaaguacgacggagauccuuggaccgacagcgaugcccuggcucccuccggcguuauggugagcaucgaggagcccgggugguacucuuucggauucgaaauuaaagacaagaaaugugaugucccuugcaucggcaucgagauggugcaugacgggggcaagacaaccuggcacuccgccgccacagcuauuuauugucugaugggaagcggccagcuccugugggauacggugaccggggucgacauggcccuuuga

SEQ ID NO: 220660 - RNA, 1401 nt, Artificial Sequence
  derived and/or modified CDS sequence (opt5) from neuraminidase__InfluenzaB__AAN39777
augcugcccagcaccauccagacacucacgcuguuccuuaccuccggcggggugcugcucucucuguacgucagcgccucccuuucuuaucugcucuacagcgacauucugcugaaguuuucccaaacagagaucaccgcuccuacaaugccgcucgauugcgccaacgcgucuaauguucaggcugugaacagaagcgccaccaaaggagugacacugcuucccccugaacccgaguggaccuauccucggcuguccugucccggcagcacguuccagaaggcccuccugauuucuccucaccgcuuuggggaaaccaaaggaaauuccgcuccgcuuaucauuagagagcccuucaucgccugcggcccuaaggaauguaaacauuuugcucugacacacuacgccgcgcagcccgggggauauuacaacggcacccgggaggaccgcaauaagcucagacaucugaucagcgucaagcugggcaaaauuccuacaguggagaacucuaucuuccacauggccgcuugguccgggagcgccugccaugauggacgggaauggaccuauauuggcguugacgggcccgauucuaaugcucuccugaagaucaaauacggagaggccuacacggacacauaucacuccuacgcgaagaacauucuucgcacccaagaaagcgccuguaauugcaucggcggggauuguuaucugaugauuacagacggauccgcuucuggcaucagcgagugcagauuucucaaaauccgggagggccgcauuaucaaggaaauuuucccgaccgggagagugaagcacaccgaggaauguacaugcggauuugccuccaacaaaacgaucgagugugcuugccgggauaauagcuacaccgccaagcgcccuuucgucaaacugaacguggaaacagacaccgccgagauuagacuuaugugcacagagaccuaucuggauacgccccggccugacgauggcucuaucacagggcccugugaauccaauggaaacaagggcagcgggggaaucaaaggcggcuuuguucaucagcgcauggcuucuaagauugggagaugguacagccggaccauguccaaaaccaagagaaugggaaugggccucuaugugaaguacgacggggaccccuggacagauucugaggcgcuggcccugagcggagucaugguguccauggaggaaccuggcugguacagcuucggguuugaaaucaaagacaagaaaugcgaugugccguguauuggcaucgagaugguccacgacggaggcaagaccacauggcauucugcugccacggccauuuauugccucaugggguccggacagcugcuuugggauaccguuacaggcguggacauggcucuguga

SEQ ID NO: 220661 - RNA, 1401 nt, Artificial Sequence; identical to SEQ ID NO: 220656
  derived and/or modified CDS sequence (opt5) from neuraminidase__InfluenzaB__AAN39779

SEQ ID NO: 220662 - RNA, 1401 nt, Artificial Sequence
  derived and/or modified CDS sequence (opt5) from neuraminidase__InfluenzaB__AAN39781
augcugcccagcaccauccagacacucacgcuguuccuuaccuccggcggggugcugcucucucuguacgucagcgccucccuuucuuaucugcucuacagcgacauucugcugaaguuuuccucuacagagaucaccgcuccuacaaugccgcucaacugcgccaaugcgagcaacguucaagcugugaaucacuccgccaccaaaggagugacacugccccuuccugaacccgaguggaccuauccuagacugagcugucccggcucuacguuccagaaggcccuccugauuuccccucaucgguuuggggaaaccaaaggaaacagcgcuccgcuuaucauucgcgagcccuucaucgccugcggcccuaaggaauguaaacacuuugcucugacacauuacgccgcgcagcccgggggauauuacaauggcaccagagaggaucggaacaagcuccgccaccugaucucugucaagcugggcaaaauuccuacaguggaaaauuccaucuuccauauggccgcuuggagcgggucugccugccacgacggaagagaauggaccuauauuggcguugaugggcccgacuccaacgcucuccugaagaucaaauacggagaggccuacacggauacauaucacagcuacgcgaauaacauucuucggacccaggaauccgccuguaauugcaucggcggggacuguuaucugaugauuacagauggaucugcuagcggcguguccgagugccgcuuucucaagaucagagagggccggaucauuaaagaaaucuucccgaccgggcgcgucgagcauaccgaagaguguacaugcggauuugccagcaacaagacgauugaaugugcuugcagagacaauucuuacaccgccaagcggccuuucgugaaacugaacguugagacagauaccgccgagauccgccuuaugugcacagaaaccuaucuggacacgcccagaccugaugacggcuccauuacagggcccugugagagcaauggagauaagggcucugggggaaucaaaggcggcuuugugcaccaacggauggcuagcaagaucgggcgcugguacuccagaaccaugucuaaaaacaagcggaugggaaugggccucuaugucaaauacgacggggaccccuggauugauagcgacgcgcugacccuguccggagugauggugagcauggaggagccuggcugguacucuuucggguuugaaaucaaggauaagaaaugcgacgucccguguauuggcaucgagaugguucaugauggaggcaaggagacauggcacuccgccgcuaccgccauuuauugccucauggggagcggacagcugcuuugggacacagugacgggcgugaacauggcccuguga

SEQ ID NO: 220663 - RNA, 1401 nt, Artificial Sequence
  derived and/or modified CDS sequence (opt5) from neuraminidase__InfluenzaB__AAN39783
augcugcccagcaccauccagacacucacgcuguuccuuaccuccggcggggugcugcucucucuguacgucagcgccucccuuucuuaucugcucuacagcgacauucugcugaaguuuucccaaacagagaucaccgcuccuacaaugccgcucgauugcgccaacgcgucuaauguucaggcugugaacagaagcgccaccaaaggagugacacugcuucugcccgaaccugaguggaccuauccccggcucuccuguccuggcagcacguuccagaaggcccugcuuauuucuccccaccgcuuuggggaaaccaaaggaaauuccgcuccucugaucauuagagagccguucaucgccugcggccccaaggaauguaaacauuuugcucucacacacuacgccgcgcagccugggggauauuacaacggcacccgggaggaccgcaauaagcugagacaucugaucagcgucaagcucggcaaaauucccacaguggagaacucuaucuuccacauggccgcuugguccgggagcgccugccaugauggacgggaauggaccuauauuggcguugacgggccugauucuaaugcucugcuuaagaucaaauacggagaggccuacacggacacauaucacuccuacgcgaagaacauucugcgcacccaagaaagcgccuguaauugcaucggcggggauuguuaucucaugauuacagacggauccgcuucuggcaucagcgagugcagauuucugaaaauccgggagggccgcauuaucaaggaaauuuuccccaccgggagagugaagcacaccgaggaauguacaugcggauuugccuccaacaaaacgaucgagugugcuugccgggauaauagcuacaccgccaagcgcccguucgucaaacuuaacguggaaacagacaccgccgagauuagacugaugugcacagagaccuaucucgauacgccucggcccaaugacggcucuaucacagggccuugugaauccaacggagauaagggcagcgggggaaucaaaggcggcuuuguucaucagcgcauggcuucuaagauugggagaugguacagccggaccauguccaaaaccaagagaaugggaaugggccuguaugugaaguacgacggggaccccuggacagauucugaggcgcuggcccucagcggagucaugguguccauggaggaacccggcugguacagcuucggguuugaaaucaaagacaagaaaugcgaugugccuuguauuggcaucgagaugguccacgacggaggcaagaccacauggcauucugcugccacggccauuuauugccugaugggguccggacagcuucugugggauaccguuacaggcguggacauggcucucuga

SEQ ID NO: 220664 - RNA, 1401 nt, Artificial Sequence
  derived and/or modified CDS sequence (opt5) from neuraminidase__InfluenzaB__AAN39785
augcugcccagcaccauccagacacucacgcuguuccuuaccuccggcggggugcugcucucucuguacgucagcgcccuucuguccuaucuccuguacucugacauucugcucaaguuuagcccuacaaaaguuaucgcuccgaccaugucccuggauuaugccaacgcgucuaaugugcaagcugugaaccacagcgccacagaggaaaugaccuuccuucugcccgagccugaauggacauaccccagacucuccugccagggaagcaccuuucagaaggcccugcuuauuucuccucaucgguucggcgaggcuaaaggaaauuccgcuccccugaucauucgcgaaccuuuuaucgccugugggccgaaggagugcaaacacuucgcccucacgcauuaugcggcccagcccggcggguacuauaacggaaccagagaggaccggaauaagcugcgccaccugaucagcgucaaccucggcaagauuccuacaguggaaaauucuaucuuucauauggcugccugguccggcagcgcuugucacgaugggagagaguggaccuacauuggaguugacggccccgauucuaacgcccugaucaaaauuaaguacggggaagcguauacagacaccuaccacuccuaugccaauaacauccuucggacgcaagagagcgcuugcaauuguauuggaggcgauugcuaccugaugaucacagacggguccgccucuggaaucagccgcuguagauuccucaaaauucgggagggccgcaucauuaaggaaaucuuuccuaccggcagaguggagcauacagaagagugcaccuguggguucgcuuccaacaaaaccauugaaugcgccugucgggauaauagcuauacagccaagcgccccuuugucaagcugaacguggagacggacaccgcugagaucagacuuaugugcacagaaaccuaccuggauacaccgcggccugacgauggaucuaucaccggccccugcgaguccaauggggacaaaggaagcggcgggauuaagggaggcuucguucaccagcgcaugacgucuagaaucggccggugguauagcagaacaauguccaaaaccaagcgcauggggauggaacucuacgugaaauacgacggagauccuuggaccgacucugaugcgcuggcccccagcggcgucaugguguccauggaggaacccgggugguauagcuuuggauucgagauuaaggacaaaaagugugaugugccuugcaucggcauugagaugguccaugacgggggcaagaaaacauggcacucugcugccaccgccaucuacugucugaugggauccggccagcuccugugggauacaguuacggggguggacauggcucuuuga

SEQ ID NO: 220665 - RNA, 1401 nt, Artificial Sequence
  derived and/or modified CDS sequence (opt5) from neuraminidase__InfluenzaB__AAN39787
augcugcccagcaccauccagacacucacgcuguuccuuaccuccggcggggugcugcucucucuguacgucagcgcccuucuguccuaucuccuguacucugacauucugcucaaguuuagcccuacaaaaguuaucgcuccgaccaugucccuggauuaugccaacgcgucuaaugugcaagcugugaaccacagcgccacagaggaaaugaccuuccuucugcccgagccugaauggacauaccccagacucuccugccagggaagcaccuuucagaaggcccugcuuauuucuccucaucgguucggcgaggcuaaaggaaauuccgcuccccugaucauucgcgaaccuuuuaucgccugugggccgaaggagugcaaacacuucgcccucacgcauuaugcggcccagcccggcggguacuauaacggaaccagagaggaccggaauaagcugcgccaccugaucagcgucaaccucggcaagauuccuacaguggaaaauucuaucuuucauauggcugccugguccggcagcgcuugucacgaugggagagaguggaccuacauuggaguugacggccccgauucuaacgcccugaucaaaauuaaguacggggaagcguauacagacaccuaccacuccuaugccaauaacauccuucggacgcaagagagcgcuugcaauuguauuggaggcgauugcuaccugaugaucacagacggguccgccucuggaaucagccgcuguagauuccucaaaauucgggagggccgcaucauuaaggaaaucuuuccuaccggcagaguggagcauacagaagagugcaccuguggguucgcuuccaacaaaaccauugaaugcgccugucgggauaauagcuauacagccaagcgccccuuugucaagcugaacguggagacggacaccgcugagaucagacuuaugugcacagaaaccuaccuggauacaccgcggccugacgauggaucuaucaccggccccugcgaguccaauggggacaaaggaaacggcgggauuaagggaggcuucguucaccagcgcauggcgagcagaaucggccggugguauucuagaacgaugagcaaaacaaagcgcauggggauggaacucuacgugaaauacgacggagauccuuggaccgacuccgaugcccuggcucccucuggcgucauggugagcauggaggaacccgggugguauuccuuuggauucgagauuaaggacaaaaagugugaugugccuugcaucggcauugagaugguccaugacgggggcaagaaaaccuggcacagcgccgccacagcuaucuacugucugaugggaucuggccagcuccugugggauaccguuacagggguggacauggcccuuuga

SEQ ID NO: 220666 - RNA, 1401 nt, Artificial Sequence
  derived and/or modified CDS sequence (opt5) from neuraminidase__InfluenzaB__AAN39795
augcugcccagcaccauccagacacucacgcuguuccuuaccuccggcggggugcugcucucucuguacgucagcgccucccuuucuuaucugcucuacagcgacauucugcugaaguuuuccccuacagagaucaccgcuccgacaaugccccucgauugcgccaacgcgucuaauguucaagcugugaacagaagcgccaccaaaggagugacacugcuucugccugaacccgaguggaccuauccucggcucuccugucccggcagcacguuccagaaggcccugcuuauuucuccucaccgcuuuggggaaaccagaggaaauuccgcuccgcugaucauucgggagcccuucaucgccugcggcccuaaagaauguaagcauuuugcucucacacacuacgccgcgcagcccgggggauauuacaacggcacccgcgaggacagaaauaaacugcggcaucugaucagcgucaagcucggcaagauuccuacaguggagaacucuaucuuccacauggccgcuugguccgggagcgccugccaugauggacgcgaauggaccuauauuggcguugacgggcccgauucuaaugcucugcuuaaaaucaaguacggagaggccuacacggacacauaucacuccuacgcgaacaauauucugagaacccaggaaagcgccuguaacugcaucggcggggauuguuaucucaugauuacagacggauccgcuucuggcaccagcaaaugccgguuucugaagauccgcgagggcagaaucauuaaagagaucuucccgaccgggcggguggaacacacagaggaauguacgugcggauuugccuccaauaagaccauugagugugcuugccgcgauaacaauuacacagccaagagaccuuucgucaaacuuaacguggaaaccgacgccgcugagauccggcugaugugcacagagaccuaucucgauacgccccgcccugacgauggcagcauuacagggcccugugaaucuaauggagacaagggcagagggggaaucaaaggcggcuuuguucaucaacggauggcguccaagaucgggagaugguacagccgcaccaugucuaaaaccgagcggaugggaauggaacuguaugugaaguacgacggcgaucccuggacagacagcgaugcccuggcucucuccggggucauggugucuauggaggaaccuggaugguacagcuucggcuuugagauuaaagacaagaagugcgaugugccguguaucgggauugagaugguccacgacggcggcaaaaagaccuggcauuccgccgccacagcuaucuauugccugaugggaagcgggcagcuucugugggauacgguuaccggaguggacauggcccucuga

SEQ ID NO: 220667 - RNA, 1401 nt, Artificial Sequence; identical to SEQ ID NO: 220651
  derived and/or modified CDS sequence (opt5) from neuraminidase__InfluenzaB__AAN39797

SEQ ID NO: 220668 - RNA, 1401 nt, Artificial Sequence
  derived and/or modified CDS sequence (opt5) from neuraminidase__InfluenzaB__AAN39799
augcugcccagcaccauccagacacucacgcuguuccuuaccuccggcggggugcugcucucucuguacgucagcgcccuucuguccuaucuccuguacucugacguucugcucaaguuuagcccuacaaaaauuaucgcuccgaccaugucccuggauugcgccaacgcgucuaaugugcaagcugugaaccacagcgccacagaggaaaugaccuuccuucugcccgagccugaauggacauaucccagacucuccugucagggaagcaccuuucagaaggcccugcuuauuucuccucaucgguucggcgaggcuaaaggaaauuccgcuccccugaucauucgcgaaccuuuuaucgccugcgggccgaaggaguguaaacacuucgcccucacgcauuacgcggcccagcccggcggguauuacaacggaaccagagaggaccggaauaagcugcgccaccugaucagcgucaaccucggcaagauuccuacaguggaaaauucuaucuuucauauggcugccugguccggcagcgcuugccacgaugggagagaguggaccuauauuggaguugacggccccgauucuaacgcccugaucaaaauugaauacggggaggcguacacagacaccuaucacuccuacgccuauaauauccuucggacgcaagagagcgcuuguaacugcauuggaggcgauuguuaccugaugaucacagacggguccgccucuggaaucagcaagugccgcuuccucaaaauuagagaaggccggaucauuaaggagaucuuuccuaccggccgcguggaacauacagaggaauguaccugcggguucgcuuccaauaaaaccauugagugugccugcagagauaacagcuauacagccaagcggcccuuugucaagcugaauguggagacggacaccgcugaaauccgccuuaugugcacagagaccuaccuggauacaccgagaccugacgauggaucuaucaccggccccugugaauccaacggggacaaaggaagcggcgggauuaagggaggcuucguucaccagcggauggcgucuaaaaucggccgcugguauagcagaacgauguccaagacaaaacggauggggauggagcucuacgugaaguacgacggagauccuuggaccgacucugaugcccuggcucccagcggcgucaugguguccauggaggaacccgggugguauagcuuuggauucgagauuaaagacaagaagugcgaugugccuuguaucggcauugaaaugguccaugacgggggcaaaaagaccuggcacucugccgccacagcuaucuacugccugaugggauccggccagcuccugugggauaccguuacagggguggacauggcccuuuga

SEQ ID NO: 220669 - RNA, 1401 nt, Artificial Sequence
  derived and/or modified CDS sequence (opt5) from neuraminidase__InfluenzaB__AAN39801
augcugcccagcaccauccagacacucacgcuguuccuuaccuccggcggggugcugcucucucuguacgucagcgccucccuuucuuaucugcucuacagcgacauucugcugaaguuuuccccuacagagaucaccgcuccgacaaugccccucgauugcgccaacgcgucuaaugcucaagccguuaacagaagcgccaccaaaggagugacacugcuucugccugaacccgaguggaccuauccucggcucuccugucccggcagcacguuccagaaggcucugcuuauuucuccucaccgcuuuggggaaaccaaaggaaauuccgccccgcugaucauuagagagcccuucaucgcuugcggcccuaaggaauguaaacauuuugcccucacacacuacgcggcccagcccgggggauauuacaacggcacccgggaggaccgcaauaagcugagacaucugaucagcgugaagcucggcaaaauuccuacagucgagaacucuaucuuccacauggcugccugguccgggagcgcuugccaugauggaaaggaauggaccuauauuggcguggacgggcccgauucuaaugcccugcuuaaaaucaaguacggagaggcguacacggacacauaucacuccuacgccaacaauauucugcggacccaggaaagcgcuuguaacugcaucggcgggaauuguuaucucaugauuacagauggauccgccucuggcaucagcgagugccgcuuucugaaaaucagagagggccggauuaucaaggaaauuuucccgaccgggcgcguuaagcacaccgaggaauguacaugcggauuugcuuccaacaaaacgaucgagugugccugcagagacaauagcuacaccgccaagcggccuuucgugaaacuuaacgucgaaacagauaccgcugagauucgccugaugugcacagagaccuaucucgacacgcccagaccugaugacggcucuaucacagggcccugugaauccaauggagauaagggcagcgggggaaucaaaggcggcuuugugcaucaacggauggcgucuaagauugggcgcugguacagcagaaccauguccaaaaccaagcggaugggaaugggccuguauguuaaguacgacggggaccccuggacagauucugacgcccuggcucucagcggagugauggucuccauggaggaaccuggcugguacagcuucggguuugagaucaaagauaagaaaugcgacgugccguguauuggcaucgaaauggugcacgauggaggcaaggagaccuggcauucugccgccacagcuauuuauugccugaugggguccggacagcuucugugggacacggucaccggcguugauauggcccucuga

SEQ ID NO: 220670 - RNA, 1401 nt, Artificial Sequence
  derived and/or modified CDS sequence (opt5) from neuraminidase__InfluenzaB__AAN39803
augcugcccagcaccauccagacacucacgcuguuccuuaccuccggcggggugcugcucucucuguacgucagcgccucccuuucuuaucugcucuacagcgacauucugcugaaguuuuccccuacagagaucaccgcuccgaaaguuccccucgauugcgccaacgcgucuaaugugcaagcugugaacagaagcgccacaaagggaaugacccugcuucuguccgaaccugaguggacauauccccggcucagcugucagggcucuaccuuccagaaagcccugcuuauuuccccucaccgcuuuggggaaacgagaggaaauagcgcuccccugaucauucgggagccuuucaucgccugcggcccgaaggaauguaaacauuuugcucucacccacuacgccgcgcagcccgggggauauuacaacggcacacgcgaggacagaaauaagcugcggcaucugaucucugucaagcucggcaaaauuccuaccguggagaacuccaucuuccacauggccgcuuggagcgggucugccugccaugauggacgcgaauggacauauauuggccuggacgggcccgauuccaaugcucuuaucaagauuaaauacggagaggccuacaccgacacguaucacagcuacgcgaacaauauccugagaacacaagaauccgccuguaacugcauuggcggggauuguuaucucaugaucaccgacggaucugcuagcggcaucuccaagugccgguuucugaaaauucgcgagggcagaaucauuaaggagaucuucccuacagggcggguugaacacaccgaggaauguaccugcggauuugccagcaauaagacaauugagugugcuugccgcgauaacucuuacacggccaaaagacccuucgugaaacuuaaugucgaaaccgacacagccgagauccggcugaugugcaccgagacauaucucgauaccccgcgcccugacgauggcuccaucacggggcccugugaaagcaacggagacaagggcagagggggaauuaagggcggcuuugugcaucagcggauggcuucuaaaaucgggagaugguacagccgcacaauguccaagaccgagcggaugggaauggaacuguauguuaaauacgacggcgauccuuggaccgacucugaugcgcuggcccccagcggggugauggucuccaugaaggagcccggaugguacagcuucggcuuugaaauuaaggacaaaaagugcgaugugccuuguaucgggauugagauggugcacgacggcggaaaagagacauggcauucugcugccaccgccaucuauugccucaugggcuccgggcagcugcuuugggauacagucacgggaguugacauggcucuguga

SEQ ID NO: 220671 - RNA, 1401 nt, Artificial Sequence
  derived and/or modified CDS sequence (opt5) from neuraminidase__InfluenzaB__ABA02232
augcugcccagcaccauccagacacucacgcuguuccuuaccuccggcggggugcugcucucucuguacgucagcgccucccuuucuuaucugcucuacagcgacauucugcugaaguuuuccccuacagagaucaccgcuccgacaaugccccucgauugcgccaacgcgucuaauguucaagcugugaacagaagcgccaccaaaggagugacacugcuucugccugaacccgaguggaccuauccucggcucuccugucccggcagcacguuccagaaggcccugcuuauuucuccucaccgcuuuggggaaaccaaaggaaauuccgcuccgcugaucauuagagagcccuucaucgccugcggcccuaaggaauguaaacauuuugcucucacacacuacgccgcgcagcccgggggauauuacaacggcacccggggcgaccgcaauaagcugagacaucugaucagcgucaagcucgggaaaauuccuacaguggagaacucuaucuuccacauggccgcuugguccggaagcgccugccaugauggcaaggaguggaccuauauugggguugacggacccgaaaauaacgcucugcuuaaaaucaaguacggcgaggccuacacggauacauaucacucuuacgcgaauaacauucugcggacccaggaauccgccuguaauugcaucgggggaaacuguuaucucaugauuacagacggcagcgcuuccggcaucucugagugccgcuuucugaaaaucagagaggggcggauuaucaaggaaauuuucccgaccggacgcgugaagcacaccgaggaauguacaugcggcuuugccagcaauaaaacgaucgagugugcuugcagagauaacuccuacaccgccaagcggccuuucgucaaacuuaauguggaaacagacaccgccgagauucgccugaugugcacagagaccuaucucgauacgcccagaccugacgaugggagcaucacaggacccugugaaucuaacggcgacaagggguccggaggcaucaaaggcggguuuguucaucaacggauggcuagcaagauuggacgcugguacucuagaaccaugagcaaaaccaagcggaugggcauggggcuguaugugaaguacgauggagaccccuggacagacuccgaugcgcuggcccucucuggcgucauggugagcauggaggaaccugggugguacuccuucggcuuugagaucaaagacaagaaaugcgaugugccguguauuggaaucgaaaugguccacgacggcgggaaggagaccuggcauagcgcugccacagccauuuauugccugaugggaucuggccagcuucugugggauacgguuaccgggguggacauggcucucuga

SEQ ID NO: 220672 - RNA, 1401 nt, Artificial Sequence
  derived and/or modified CDS sequence (opt5) from neuraminidase__InfluenzaB__ABI84039
augcugcccagcaccauccagacacucacgcuguuccuuaccuccggcggggugcugcucucucuguacgucagcgccucccuuucuuaucugcucuacagcgacauucugcugaaguuuuccccuacagagaucaccgcuccgacaaugccccucgauugcgccaacgcgucuaauguucaagcugugaacagaagcgccaccaaaggagugacacugcuucugccugaacccgaguggaccuauccucggcucuccugucccggcagcacguuccagaaggcccugcuuauuucuccucaccgcuuuggggaaaccaaaggaaauuccgcuccgcugaucauuagagagcccuucaucgccugcggcccuaacgaauguaagcauuuugcucucacacacuacgccgcgcagcccgggggauauuacaauggcacccggggcgaccgcaacaaacugagacaucugaucagcgucaagcucgggaagauuccuacaguggaaaauucuaucuuccacauggccgcuugguccggaagcgccugccaugauggcaaagaguggaccuauauugggguugacggacccgauaacaaugcucugcuuaagaucaaauacggcgaggccuacacggacacauaucacucuuacgcgaacaauauucugcggacccaggaguccgccuguaacugcaucgggggaaauuguuaucucaugauuacagauggcagcgcuuccggcgugucugaaugccgcuuucugaagaucagagaggggcggaucauuaaagagaucuucccgaccggacgcgucaaguacaccgaagaguguacaugcggcuuugccagcaacaagacgauugaaugugcuugcagagacaauuccuauaccgccaaacggccuuucgugaaacuuaacguugagacagauaccgccgaaauccgccugaugugcacagacaccuaccucgauacgcccagaccugacgaugggagcauuacaggacccugugagucuaacggcgacaagggguccggaggcaucaagggcggguuugugcaccaacggauggcuagcaaaaucggacgcugguauucuagaaccaugagcaagaccgagcggaugggcauggggcuguacgucaaauacgacggagaucccugggcggacuccgaugcccuggcuuucucuggcgugauggugagcaugaaggaaccugggugguauuccuuuggcuucgagauuaaggacaaaaagugcgaugucccguguaucggaauugaaaugguucaugacggcgggaaagagacauggcacagcgccgccaccgcuaucuacugccucaugggaucuggccagcugcuuugggauacagugacggggguggacauggcccuguga

SEQ ID NO: 220673 - RNA, 1401 nt, Artificial Sequence
  derived and/or modified CDS sequence (opt5) from neuraminidase__InfluenzaB__ABI84051
augcugcccagcaccauccagacacucacgcuguuccuuaccuccggcggggugcugcucucucuguacgucagcgccucccuuucuuaucugcucuacagcgacauucugcugagauuuucccaaacagagaucaccgcuccuauuaugccgcucgauugcgccaacgcgucuaauguucaggcugugaaccacagcgccacaaagggagugacccugcuucugcccgaaccugaguggacauauccccggcucuccuguccuggcagcaccuuccagaaagcccugcuuaucucuccccaucgcuuuggggaaacgaagggaaauuccgcuccucugauuaucagagagccguucaucgccugcggccccaaagaauguaagcacuuugcucucacccauuacgccgcgcagccugggggauauuacaacggcacacgggaggaccgcaauaaacugagacaccugauuagcgucaagcucggcaagauccccaccguggagaacucuauuuuccauauggccgcuugguccgggagcgccugccacgauggacgggaauggacauauaucggcguugacgggccugauucuaaugcucugcuuaaaauuaaguacggagaggccuacaccgacacguaucacuccuacgcgaaaaacauccugcgcacacaagaaagcgccuguaauugcauuggcggggauuguuaucucaugaucaccgacggacccgcuuccggcaucucugagugcagauuucugaagauucgggagggccgcaucauuaaagaaaucuucccgacagggagagugaagcauaccgaggaauguaccugcggauuugccagcaacaagacaauugagugugcuugccgggauaauuccuacacggccaaacgcccuuucgucaaacuuaacguggaaaccgacacagccgagaucagacugaugugcaccgagacauaucucgauacgccccggccuaaugacggcagcaucaccgggcccugugaaucuaacggagauaagggcuccgggggaauuaagggcggcuuuguucaccagcgcauggcuagcaaaaucgggagaugguacucucggacaaugagcaagaccaaaagaaugggaaugggccuguaugugaaguacgacggggaccccuggaccgauuccgaggcgcuggcccucucuggagucauggugagcauggaggaaccuggcugguacuccuucggguuugaaauuaaggacaaaaagugcgaugugccguguaucggcauugagaugguccaugacggaggcaaaacaaccuggcacagcgcugccacagccaucuauugccugauggggucuggacagcuucugugggauacgguuaccggcguggacauggcucucuga

SEQ ID NO: 220674 - RNA, 1401 nt, Artificial Sequence
  derived and/or modified CDS sequence (opt5) from neuraminidase__InfluenzaB__ABI84062
augcugcccagcaccauccagacacucacgcuguuccuuaccuccggcggggugcugcucucucuguacgucagcgccucccuuucuuaucugcucuacagcgacauucugcugaaguuuuccccuacagagaucauugcuccgaucaugccccucgauugcgccaacgcgucuaauguucaagcugugaacagaagcaccacaaaaggagugacccugcuucugccugaacccgaguggacauauccucggcucuccugucccggcagcaccuuccagaaggcccugcuuauuucuccucaccgcuuuggggaaacgaaaggaaauuccgccccgcugaucaucagagagcccuucauugcuugcggcccuaaggaauguaaacauuuugcccucacccacuacgcugcccagcccgggggauauuacaacggcacacggggcgaccgcaauaagcugagacaucugaucagcgucaagcucgggaaaauuccuaccguggagaacucuaucuuccacauggcggccugguccggaagcgcuugccaugauggcaaggaguggacauauauugggguugacggacccgauaauaacgcccugcuuaaaaucaaguacggcgaggcuuacaccgacacguaucacucuuacgccaauaacauucugcggacacaggaauccgcguguaauugcaucgggggaaacuguuaucucaugaucaccgauggcccggccagcggcauuuccgaaugccgcuuucugaaaaucagagaggggcggauuaucaaggagauuuucccuacaggacgcgugaagcacaccgaagaguguaccugcggcuuugcuucuaauaaaacaaucgaaugugccugcagagacaacagcuacacggcuaagcggcccuucgucaaacuuaauguggagaccgauacagccgaaauccgccugaugugcaccgagacauaucucgacaccccuagacccgaugacggguccauuacgggacccugugagagcaacggcgauaaggggucuggaggcaucaaaggcggguuuguucaucaacggauggccuccaagauuggacgcugguacagcagaacaaugucuaaaaccgaacggaugggcauggggcuguaugugaaguacgacggagacccuugggcugauagcgacgcgcuggcccucuccggcgucauggugucuauggaggaaccggggugguacagcuucggcuuugagaucaaggauaaaaagugcgacgugcccuguauuggaaucgaaaugguccacgauggcgggaaagagaccuggcauuccgcugccacagccaucuauugccugaugggaagcggccagcuucugugggacaccguuacagggguggauauggcucucuga

SEQ ID NO: 220675 - RNA, 1401 nt, Artificial Sequence
  derived and/or modified CDS sequence (opt5) from neuraminidase__InfluenzaB__ABL76280
augcugcccagcaccauccagacacucacgcuguuccuuaccuccggcggggugcugcucucucuguacgucagcgccucccuuucuuaucugcucuacagcgacauucugcugaaguuuuccccuacagagaucaccgcuccgacaaugccccucaacugcgccaaugcgucuaacguucaagcugugaauagaagcgccaccaaaggagugacacugcuucugccugaacccgaguggaccuauccucggcucuccugucccggcagcacguuccagaaggcccugcuuauuucuccucaccgcuuuggggaaaccaaaggaaacuccgcuccgcugaucauuagagagcccuucaucgccugcggcccuaaggaauguaaacauuuugcucucacacacuacgccgcgcagcccgggggauauuacaauggcacccgggaggaucgcaacaagcugagacaucugaucagcgucaagcucggcaaaauuccuacaguggaaaauucuaucuuccacauggccgcuugguccgggagcgccugccaugacggacgggaauggaccuauauuggcguugaugggcccgacucuaacgcucugcuuaagaucaaauacggagaggccuacacggauacauaucacuccuacgcgaauaacauucugcgcacccaggaaagcgccuguaauugcaucggcggggacuguuaucucaugauuacagauggauccgcuucuggcaucagcgagugcagauuucugaagauccgggagggccgcauuaucaaagaaauuuucccgaccgggagaguggagcacaccgaagaguguacaugcggauuugccuccaacaagacgaucgaaugugcuugccgggacaauagcuacaccgccaagcgcccuuucgucaaacuuaacguggagacagauaccgccgagauuagacugaugugcacagaaaccuaucucgacacgccccggccugaugacggcucuaucacagggcccugugaguccaauggagauaagggcagcgggggaaucaaaggcggcuuuguucaucaacgcauggcuucuaagauugggagaugguacagccggaccauguccaaaaccaagagaaugggaaugggccuguaugugaaauacgacggggaccccuggaucgauucugacgcgcugacacucagcggagucaugguguccauggaggagccuggcugguacagcuucggguuugaaauuaaggauaagaaaugcgacgugccguguaucggcauugagaugguccacgauggaggcaagaaaaccuggcauucugccgcuacagccaucuauugccugaugggguccggacagcuucugugggacacgguuaccggcguggauauggcccucuga

SEQ ID NO: 220676 - RNA, 1401 nt, Artificial Sequence
  derived and/or modified CDS sequence (opt5) from neuraminidase__InfluenzaB__ABL76302
augcugcccagcaccauccagacacucacgcuguuccuuaccuccggcggggugcugcucucucuguacgucagcgccucccuuucuuaucugcucuacagcgacauucugcugaaguuuccuccgacagagaucaccgcucccacaaugccucucgauugcgccaacgcguccaauguucaagcugugaacagaucugccaccaaaggagugacacugcuucugcccgaaccugaguggaccuauccccggcucagcuguccuggcuccacguuccagaaggcccugcuuauuagcccgcaccgcuuuggggaaaccaaaggaaauucugcuccccugaucauuagagagccuuucaucgccugcggccccaaggaauguaaacauuuugcucucacacacuacgccgcgcagccugggggauauuacaacggcacccgggaggaccgcaauaagcugagacaucugaucuccgucaagcucggcaaaauucccacaguggagaacagcaucuuccacauggccgcuuggucuggguccgccugccaugauggacgggaauggaccuauauuggcguugacgggccggauagcaaugcucugcuuaagaucaaauacggagaggccuacacggacacauaucacucuuacgcgaacaauauucugcgcacccaggaauccgccuguaacugcaucggcgggaauuguuaucucaugauuacagauggaagcgcuuccggcaucucugagugcagauuucugaagauccgggagggccgcauuaucaaagaaauuuucccuaccgggagagugaagcacaccgaggaauguacaugcggauuugccagcaacaagacgaucgagugugcuugccgggacaauuccuacaccgccaaacgccccuucgucaaacuuaacguggaaacagauaccgccgagauuagacugaugugcacagagaccuaucucgacacgccucggcccgaugacggcagcaucacagggcccugugaaucuaauggagauaagggcuccgggggaaucaagggcggcuuuguucaucaacgcauggcuagcaaaauugggagaugguacucucggaccaugagcaagaccaaaagaaugggaaugggccuguaugugaaguacgacggggacccuuggacagauuccgacccgcuggcgcucucuggagucauggugagcauggaggaacccggcugguacuccuucggguuugagaucaaggauaaaaagugcgacgugccuuguauuggcaucgaaaugguccacgauggaggcaaagagaccuggcauagcgccgcuacagccauuuauugccugauggggucuggacagaugcuuugggacacgguuaccggcguggauauggcccuguga

SEQ ID NO: 220677 - RNA, 1401 nt, Artificial Sequence
  derived and/or modified CDS sequence (opt5) from neuraminidase__InfluenzaB__ABL76313
augcugcccagcaccauccagacacucacgcuguuccuuaccuccggcggggugcugcucucucuguacgucagcgccucccuuucuuaucugcucuacagcgacauucugcugaaguuuuccccuaaagagaucacagcuccgaccaugccccucaacugcgccaaugcgucuaacguucaagcugugaauagaagcgccacaaagggagugaccuucccucugcccgaaccugaguggacauauccccggcuuuccuguccuggcagcaccuuucagaaagcccugcucauuucuccgcaccgcuucggggaaacgaagggaaacuccgcuccccugaucauuagagagccuuuuaucgccugcggccccaaagaauguaagcauuucgcucuuacccacuacgccgcgcagccugggggauauuacaauggcacacgggaggaucgcaacaagcugagacaucucaucagcgucaaacugggcaagauucccaccguggaaaauucuaucuuucacauggccgcuugguccgggagcgccugccaugacggacgggaauggacauauauuggcguugaugggccggacucuaacgcucugcucaaaaucaaguacggagaggccuacaccgauacguaucacuccuacgcgaauaacauucugcgcacacaggaaagcgccuguaauugcaucggcggggacuguuaucuuaugauuaccgauggauccgcuucuggcaucagcgagugcagauuccugaaaauccgggagggccgcauuaucaaggaaauuuuuccuacagggagaguggagcacaccgaagaguguaccugcggauucgccuccaacaagacaaucgaaugugcuugccgggacaauagcuacacggccaaacgccccuuugucaagcucaacguggagaccgauacagccgagauuagacugaugugcaccgaaacauaucuugacaccccucggcccgaugacggcucuaucacggggcccugugaguccaauggagauaaaggcagcgggggaaucaagggcggcuucguucaucaacgcauggcuucuaaaauugggagaugguacagccggacaauguccaagaccaaaagaaugggaaugggccuguaugugaaguacgacggggacccuuggaucgauucugacgcgcucacccugagcggagucaugguguccguggaggagccgggcugguacagcuuuggguucgaaauuaaggauaaaaagugcgacguccccuguaucggcauugagaugguucacgauggaggcaaaacaaccuggcauucugccgcuacagccaucuauugccugaugggguccggacagcuccugugggacacggugaccggcguggauauggcccuuuga

SEQ ID NO: 220678 - RNA, 1401 nt, Artificial Sequence
  derived and/or modified CDS sequence (opt5) from neuraminidase__InfluenzaB__ABL76335
augcugcccagcaccauccagacacucacgcuguuccuuaccuccggcggggugcugcucucucuguacgucagcgccucccuuucuuaucugcucuacagcgacauucugcugaaguuuuccccuacagagaucaccgcuccgacaaugccccucaacugcgccaaugcgucuaacguucaagcugugaauagaagcgccaccaaaggagugacacugccucuucccgaaccugaguggaccuauccccggcuguccuguccuggcagcacguuccagaaggcccuccugauuucuccgcaccgcuuuggggaaaccaaaggaaacuccgcuccccuuaucauuagagagccuuucaucgccugcggccccaaggaauguaaacauuuugcucugacacacuacgccgcgcagccugggggauauuacaauggcacccgggaggaucgcaacaagcucagacaucugaucagcgucaagcugggcaaaauucccacaguggaaaauucuaucuuccacauggccgcuugguccgggagcgccugccaugacggacgggaauggaccuauauuggcguugaugggccggacucuaacgcucuccugaagaucaaauacggagaggccuacacggauacauaucacuccuacgcgaauaacauucuucgcacccaggaaagcgccuguaauugcaucggcggggacuguuaucugaugauuacagauggauccgcuucuggcaucagcgagugcagauuucucaagauccgggagggccgcauuaucaaagaaauuuucccuaccgggagaguggagcacaccgaagaguguacaugcggauuugccuccaacaagacgaucgaaugugcuugccgggacaauagcuacaccgccaagcgccccuucgucaaacugaacguggagacagauaccgccgagauuagacuuaugugcacagaaaccuaucuggacacgccucggcccgaugacggcucuaucacagggcccugugaguccaauggagauaagggcagcgggggaaucaaaggcggcuuuguucaucaacgcauggcuucuaagauugggagaugguacagccggaccauguccaaaaccaagagaaugggaaugggccucuaugugaaauacgacggggacccuuggaucgauucugacgcgcugacacugagcggagucaugguguccauggaggagccgggcugguacagcuucggguuugaaauuaaggauaagaaaugcgacgugcccuguaucggcauugagaugguccacgauggaggcaagaccacauggcauucugccgcuacggccaucuauugccucaugggguccggacagcugcuuugggacaccguuacaggcguggauauggcccuguga

SEQ ID NO: 220679 - RNA, 1401 nt, Artificial Sequence
  derived and/or modified CDS sequence (opt5) from neuraminidase__InfluenzaB__ABL76346
augcugcccagcaccauccagacacucacgcuguuccuuaccuccggcggggugcugcucucucuguacgucagcgccucccuuucuuaucugcucuacagcgacauucugcugaaguuuuccccuaaagagaucacaaccccgacaaugccccucaacugcgcuaaugccucuaacguucaagcggugaauagaagcgcuaccaagggagugacacugcuucugccugaacccgaguggaccuauccucggcucuccugucccggcagcacguuccagaaagcccugcuuauuucuccucaccgcuuuggggaaaccaagggaaacuccgccccgcugaucauuagagagcccuucaucgcuugcggcccuaaagaauguaagcauuuugcccucacacacuacgcugcccagcccgggggauauuacaauggcacccgggaggaucgcaacaagcugagacaucugaucagcgucaaacucggcaagauuccuacaguggaaaauucuaucuuccacauggcggccugguccgggagcgcuugccaugacggacgggaauggaccuauauuggcguugaugggcccgacucuaacgcccugcuuaaaaucaaguacggagaggcuuacacggauacauaucacuccuacgccaauaacauucugcgcacccaggaaagcgcguguaauugcaucggcggggacuguuaucucaugauuacagauggauccgccucuggcaucagcgagugcagauuucugaaaauccgggagggccgcauuaucaaggaaauuuucccgaccgggagaguggagcacaccgaagaguguacaugcggauuugcuuccaacaagacgaucgaaugugccugccgggacaauagcuacaccgcuaaacgcccuuucgucaaacuuaacguggagacagauaccgccgagauuagacugaugugcacagaaaccuaucucgacacgccccggccugaugacggcucuaucacagggcccugugaguccaauggagauaagggcagcgggggaaucaagggcggcuuuguucaucaacgcauggccucuaaaauugggagaugguacagccggaccauguccaagaccaaaagaaugggaaugggccuguaugugaaguacgacggggaccccuggaucgauucugacgcucugacacucagcggagucaugguguccauggaggagccuggcugguacagcuucggguuugaaauuaaggauaaaaagugcgacgugccguguaucggcauugagaugguccacgauggaggcaaaaccacauggcauucugcggccacggcuaucuauugccugaugggguccggacagcuucugugggacaccguuacaggcguggauauggcccucuga

SEQ ID NO: 220680 - RNA, 1401 nt, Artificial Sequence; identical to SEQ ID NO: 220679
  derived and/or modified CDS sequence (opt5) from neuraminidase__InfluenzaB__ABL76357

SEQ ID NO: 220681 - RNA, 1401 nt, Artificial Sequence
  derived and/or modified CDS sequence (opt5) from neuraminidase__InfluenzaB__ABL76368
augcugcccagcaccauccagacacucacgcuguuccuuaccuccggcggggugcugcucucucuguacgucagcgccucccuuucuuaucugcucuacagcgacauucugcugaaguuuuccccuacagagaucaccgcuccgacaaugccccucgauugcgccaacgcgucuaauguucaagcugugaacagaagcgccaccaaaggagugacacugcuucugccugaacccgaguggaccuauccucggcucuccugucccggcagcacguuccagaaggcccugcuuauuucuccucaccgcuuuggggaaaccaaaggaaauuccgcuccgcugaucauuagagagcccuucaucgccugcggcccuaaggaauguaaacauuuugcucucacacacuacgccgcgcagcccgggggauauuacaacggcacccgggaggaccgcaauaagcugagacaucugaucagcgucaagcucggcaaaauuccuacaguggagaacucuaucuuccacauggccgcuugguccgggagcgccugccaugauggaaaggaauggaccuauauuggcguugacgggcccgauucuaaugcucugcuuaaaaucaaguacggagaggccuacacggacacauaucacuccuacgcgaacaauauucugcggacccaggaaagcgccuguaacugcaucggcgggaauuguuaucucaugauuacagauggauccgcuucuggcaucagcgagugccgcuuucugaaaaucagagagggccggauuaucaaggaaauuuucccgaccgggcgcgugaagcacaccgaggaauguacaugcggauuugccuccaacaaaacgaucgagugugcuugcagagacaauagcuacaccgccaagcggccuuucgucaaacuuaacguggaaacagauaccgccgagauucgccugaugugcacagagaccuaucucgacacgcccagaccugaugacggcucuaucacagggcccugugaauccaauggagauaagggcagcgggggaaucaaaggcggcuuuguucaucaacggauggcuucuaagauugggcgcugguacagcagaaccauguccaaaaccaagcggaugggaaugggccuguaugugaaguacgacggggaccccuggacagauucuggagcgcuggcccucagcggcgucaugguguccauggaggaaccugggugguacagcuucggcuuugagaucaaagacaagaaaugcgaugugccguguauuggaaucgaaaugguccacgacggcgggaaggagaccuggcauucugcugccacagccauuuauugccugaugggauccggccagcuucugugggauacgguuaccgggguggacauggcucucuga

SEQ ID NO: 220682 - RNA, 1404 nt, Artificial Sequence
  derived and/or modified CDS sequence (opt5) from neuraminidase__InfluenzaB__ABL76379
augcugcccagcaccauccagacacucacgcuguuccuuaccuccggcggggugcugcucucucuguacgucagcgccucccuuucuuaucugcucuacagcgacauucugcugaaguuuuccccuacagagaucaccgcuccgacaaugccccucgauugcgccaacgcgucuaauguucaagcugugaacagaagcgccaccaaaggagugacauuccugcuucugccugaacccgaguggaccuauccucggcucuccugucccggcagcacguuucagaaggcccugcuuauuucuccucaccgcuucggggaaaccaaaggaaauuccgcuccgcugaucauuagagagcccuuuaucgccugcggcccuaaggaauguaaacauuucgcucucacacacuacgccgcgcagcccgggggauauuacaacggcacccggggcgaccgcaauaagcugagacaucugaucagcgucaagcucgggaaaauuccuacaguggagaacucuaucuuucacauggccgcuugguccggaagcgccugccaugauggcaaggaguggaccuauauugggguugacggacccgauucuaaugcucugcuuaaaaucaaguacggcgaagccuacacggacacauaucacuccuacgcgaacaauauucugcggacccaggagagcgccuguaacugcaucgggggaaauuguuaucucaugauuacagauggcuccgcuucuggcaucagcgaaugccgcuuccugaaaaucagagaggggcggauuaucaaggagauuuuuccgaccggacgcgugaagcacaccgaagaguguacaugcggcuucgccuccaacaaaacgaucgaaugugcuugcagagacaauagcuacaccgccaagcggccuuuugucaaacuuaacguggagacagauaccgccgaaauucgccugaugugcacagagaccuaucucgacacgcccagaccugaugacgggucuaucacaggacccugugaguccaauggcgauaaggggagcggaggcaucaaaggcggguucguucaucaacggauggcuucuaagauuggacgcugguacagcagaaccauguccaaaaccaagcggaugggcauggggcuguaugugaaguacgacggagaccccuggacagauucugacgcgcuggcccucagcggcgucaugguguccauggaggaaccugggugguacagcuuuggcuucgaaaucaaagauaagaaaugcgacgugccguguauuggaaucgagaugguccacgauggcgggaaggaaaccuggcauucugcugccacagccauuuauugccugaugggauccggccagcuucugugggacacgguuaccgggguggauauggcucucuga

SEQ ID NO: 220683 - RNA, 1401 nt, Artificial Sequence
  derived and/or modified CDS sequence (opt5) from neuraminidase__InfluenzaB__ABL76390
augcugcccagcaccauccagacacucacgcuguuccuuaccuccggcggggugcugcucucucuguacgucagcgccucccuuucuuaucugcucuacagcgacauucugcugaaguuuuccccuacagagaucaccgcuccgacaaugccccucgauugcgccaacgcgucuaauguucaagcugugaacagaagcuccaccaaaggagugacauuccugcuuccugaacccgaguggaccuauccucggcugagcugucccggcucuacguuucagaaggcccuccugauuuccccucaccgcuucggggaaaccaaaggaaauagcgccccgcuuaucauuagagagcccuuuaucgcuugcggcccuaaggaauguaaacauuucgcccugacacacuacgcugcccagcccgggggauauuacaacggcacccgggaggaccgcaauaagcucagacaucugaucucugucaagcugggcaaaauuccuacaguggagaacuccaucuuucacauggcggccuggagcgggucugcuugccaugauggaaaggaauggaccuauauuggcguugacgggcccgauuccaaugcccuccugaaaaucaaguacggagaggcuuacacggacacauaucacagcuacgccaacaauauucuucggacccaggaauccgcguguaacugcaucggcgggaauuguuaucugaugauuacagauggaucugccagcggcaucuccgagugccgcuuccucaaaaucagagagggccggauuaucaaggaaauuuuuccgaccgggcgcgugaagcacaccgaggaauguacaugcggauucgcuagcaacaaaacgaucgagugugccugcagagacaauucuuacaccgcuaagcggccuuuugucaaacugaacguggaaacagauaccgccgagauucgccuuaugugcacagagaccuaucuggacacgcccagaccugaugacggcuccaucacagggagcugugaaucugauggagacaagggcagcgggggaaucaaaggcggcuucguucaucaacggauggccuccaagauugggcgcugguacucuagaaccaugagcaaaaccaagcggaugggaaugggccucuaugugagauacgacggggaucccuggacagacuccagcgcucuggcgcugucuggagucaugguguccauggaggaacccggcugguacagcuuuggguucgagaucaaggauaaaaagugcgacgugccuuguauuggcaucgaaaugguccacgauggaggcaaagagaccuggcauucugccgcuacagccauuuauugccucaugggguccggacagcugcuuugggacacgguuaccggcguggauauggcccuguga

SEQ ID NO: 220684 - RNA, 1401 nt, Artificial Sequence
  derived and/or modified CDS sequence (opt5) from neuraminidase__InfluenzaB__ABL76412
augcugcccagcaccauccagacacucacgcuguuccuuaccuccggcggggugcugcucucucuguacgucagcgccucccuuucuuaucugcucuacagcgacauucugcugaaguuuuccccuacagagaucaccgcuccgacaaugccccucgauugcgccaacgcgucuaauguucaagcugugaacagaagcgccaccaaaggagugacacugcuuauuccugaacccgaguggaccuauccucggcuguccugucccggcagcacguuccagaaggcccuccugaucucuccucaccgcuuuggggaaaccaaaggaaauuccgcuccgcuuauuaucagagagcccuucaucgccugcggcccuaaggaauguaaacauuuugcucugacacacuacaccgcccagcccgggggauauuacaacggcacacggggcgaccgcaauaagcucagacaucugauuagcgucaagcuggggaaaaucccuaccguggagaacucuauuuuccacauggcggccugguccggaagcgcuugccaugauggcaaggaguggacguauaucgggguugacggacccgauucuaaugcccuccugaaaauuaaguacggcgaggcuuacacagacaccuaucacuccuacgccaacaauauccuucggacacaggagagcgcguguaacugcauugggggaaauuguuaucugaugaucaccgauggcuccgccucuggcaucagcgaaugccgcuuucucaaaauuagagaggggcggaucauuaaggagaucuucccgaccggacgcgugaagcacacagaagaguguacgugcggcuuugcuuccaacaaaaccauugaaugugccugcagagacaauagcuacacagcuaagcggccuuucgucaaacugaacguggagaccgauacagccgaaauccgccuuaugugcaccgagacguaucuggacacacccagaccugaugacgggucuaucaccggacccugugaguccaauggcgauaaggggagcggaggcauuaaaggcggguuuguucaucaacggauggccucuaagaucggacgcugguacagcagaaccauguccaaaacaaagcggaugggcauggggcucuaugugaaguacgacggagaccccuggaccgauucugacgcucuggcgcugagcggcgucaugguguccauggaagaaccugggugguacagcuucggcuuugaaauuaaagauaagaaaugcgacgugccguguaucggaauugagaugguccacgauggcgggaaggaaacauggcauucugccgcuacggccaucuauugccucaugggauccggccagcugcuuugggacaccguuacagggguggauauggcccuguga

SEQ ID NO: 220685 - RNA, 1401 nt, Artificial Sequence
  derived and/or modified CDS sequence (opt5) from neuraminidase__InfluenzaB__ABL76423
augcugcccagcaccauccagacacucacgcuguuccuuaccuccggcggggugcugcucucucuguacgucagcgccucccuuucuuaucugcucuacagcgacauucugcugaaguuuuccccuacagagaucaccgcuccgacaaugccccucgauugcgccaacgcgucuaauguucaagcugugaaccacagcgccaccaaaggagugacacugcuucugccugaacccgaguggaccuauccuagacucuccugucccggcagcacguuccagaaggcccugcuuauuucuccucaucgguuuggggaaaccaaaggaaauuccgcuccgcugaucauucgcgagcccuucaucgccugcggcccuaaggaauguaaacacuuugcucucacacauuacgccgcgcagcccgggggauauuacaacggcaccagaggcgaccggaauaagcugcgccaccugaucagcgucaagcucgggaaaauuccuacaguggagaacucuaucuuccauauggccgcuugguccggaagcgccugccacgauggcaaggaguggaccuauauugggguugacggacccgauucuaaugcucugcuuaaaaucaaguacggcgaagccuacacggacacauaucacuccuacgcgaacaauauucugagaacccaggagagcgccuguaacugcaucgggggaaauuguuaucucaugauuacagauggcuccgcuucuggcaucagcgaaugccgguuucugaaaauccgcgaggggagaauuaucaaggagauuuucccgaccggacgggugaagcauaccgaagaguguacaugcggcuuugccuccaacaaaacgaucgaaugugcuugccgcgacaauagcuacaccgccaagagaccuuucgucaaacuuaacguggagacagauaccgccgaaauucggcugaugugcacagagaccuaucucgacacgccccgcccugaugacgggucuaucacaggacccugugaguccaauggcgauaaggggagcggaggcaucaaaggcggguuuguucaccaaagaauggcuucuaagauuggacggugguacagccgcaccauguccaaaaccaagagaaugggcauggggcuguaugugaaguacgacggagaccccuggacagauucugacgcgcuggccuucagcggcgucaugguguccauggaggaaccugggugguacagcuuuggcuucgaaaucaaagauaagaaaugcgacgugccguguauuggaaucgagaugguccaugauggcgggaaggaaaccuggcacucugcugccacagccauuuauugccucaugggauccggccagcugcuuugggacacgguuaccgggguggauauggcucuguga

SEQ ID NO: 220686 - RNA, 1401 nt, Artificial Sequence
  derived and/or modified CDS sequence (opt5) from neuraminidase__InfluenzaB__ABL76434
augcugcccagcaccauccagacacucacgcuguuccuuaccuccggcggggugcugcucucucuguacgucagcgccucccuuucuuaucugcucuacagcgacauucugcugaaguuuuccccuacagagaucaccgcuccgacaaugccccucgauugcgccaacgcgucuaauguucaagcugugaacagaagcgccaccaaaggagugacacugcuucugccugaacccgaguggaccuauccucggcucuccugucccggcagcacguuccagaaggcccugcuuauuucuccucaccgcuuuggggaaaccaaaggaaauuccgcuccgcugaucauuagagagcccuucaucgccugcggcccuaaggaauguaaacauuuugcucucacacacuacgccgcgcagcccgggggauauuacaacggcacccggggcgaccgcaauaagcugagacaucugaucagcgucaagcucgggaaaauuccuacaguggagaacucuaucuuccacauggccgcuugguccggaagcgccugccaugauggcaaggaguggaccuauauugggguugacggacccgauaauaacgcucugcuuaaaaucaaguacggcgaagccuacacggacacauaucacucuuacgcgaauaacauucugcggacccaggaguccgccuguaauugcaucgggggaaacuguuaucucaugauuacagauggcagcgcuuccggcaucucugaaugccgcuuucugaaaaucagagaggggcggauuaucaaggagauuuucccgaccggacgcgugaagcacaccgaagaguguacaugcggcuuugccagcaauaaaacgaucgaaugugcuugcagagacaacuccuacaccgccaagcggccuuucgucaaacuuaauguggagacagauaccgccgaaauucgccugaugugcacagagaccuaucucgacacgcccagaccugaugacgggagcaucacaggacccugugagucuaacggcgauaagggguccggaggcaucaaaggcggguuuguucaucaacggauggcuagcaagauuggacgcugguacucuagaaccaugagcaaaaccaagcggaugggcauggggcuguaugugaaguacgacggagaccccugggcggauuccgacgcccuggcucucucuggcgucauggugagcauggaggaaccugggugguacuccuucggcuuugaaaucagagauaaaaagugcgacgugccguguauuggaaucgagaugguccacgauggcgggaaagaaacauggcauagcgccgccaccgcuauuuauugccugaugggaucuggccagcuucugugggacacaguuacggggguggauauggcccucuga

SEQ ID NO: 220687 - RNA, 1401 nt, Artificial Sequence
  derived and/or modified CDS sequence (opt5) from neuraminidase__InfluenzaB__ABL76456
augcugcccagcaccauccagacacucacgcuguuccuuaccuccggcggggugcugcucucucuguacgucagcgccucccuuucuuaucugcucuacagcgacauucugcugaaguuuuccccuacagagaucaccgcuccgacaaugccccucgauugcgccaacgcgucuaauguucaagcugugaacagaagcgccaccaaaggagugaagcugcuucugccugaacccgaguggacauauccucggcucuccugucccggcagcaccuuccagaaagcccugcuuauuucuccucaccgcuuuggggaaacgaagggaaauuccgcuccgcugaucauuagagagcccuucaucgccugcggcccuaaagaauguaagcauuuugcucucacccacuacgccgcgcagcccgggggauauuacaacggcacacggggcgaccgcaauaagcugagacaucugaucagcgucaaacucgggaagauuccuaccguggagaacucuaucuuccacauggccgcuugguccggaagcgccugccaugauggcaaagaguggacauauauugggguugacggacccgauaauaacgcucugcuuaagaucaaauacggcgaagccuacaccgacacguaucacucuuacgcgaauaacauucugcggacacaggaguccgccuguaauugcaucgggggaaacuguuaucucaugauuaccgauggcagcgcuuccggcgugucugaaugccgcuuucugaagaucagagaggggcggaucauuaaggagaucuucccgacaggacgcgucaaacacaccgaagaguguaccugcggcuuugccagcaauaagacaauugaaugugcuugcagagacaacuccuacacggccaaacggccuuucgugaaacuuaauguugagaccgauacagccgaaauccgccugaugugcaccgagacauaucucgacacccccagaccugaugacgggagcauuacgggacccugugagucuaacggcgauaagggguccggaggcaucaagggcggguuugugcaucaacggauggcuagcaaaaucggacgcugguacucuagaacaaugagcaagaccaagcggaugggcauggggcuguaugucaaauacgacggagaccccugggcggauuccgacgcccuggcucucucuggcgugauggugagcauggaggaaccugggugguacuccuucggcuuugaaauuaaggauaaaaagugcgacgucccguguaucggaauugagaugguucacgauggcgggaaagaaaccuggcauagcgccgccacagcuaucuauugccugaugggaucuggccagcuucugugggacaccgugacagggguggauauggcccucuga

SEQ ID NO: 220688 - RNA, 1401 nt, Artificial Sequence
  derived and/or modified CDS sequence (opt5) from neuraminidase__InfluenzaB__ABL76467
augcugcccagcaccauccagacacucacgcuguuccuuaccuccggcggggugcugcucucucuguacgucagcgccucccuuucuuaucugcucuacagcgacauucugcugaaguuuuccccuacagagaucaccgcuccgacaaugccccucgauugcgccaacgcgucuaauguucaagcugugaacagaagcgccaccaaaggagugacacugcuucugccugaacccgaguggaccuauccucggcucuccugucccggcagcacguuccagaaggcccugcuuauuucuccucaccgcuuuggggaaaccaaaggaaauuccgcuccgcugaucauuagagagcccuucaucgccugcggcccuaaggaauguaaacauuuugcucucacacacuacgccgcgcagcccgggggauauuacaacggcacccggggcgaccgcaauaagcugagacaucugaucagcgucaagcucgggaaaauuccuacaguggagaacucuaucuuccacauggccgcuugguccggaagcgccugccaugauggcaaggaguggaccuauauugggguugacggacccgauaauaacgcucugcuuaaaaucaaguacggcgaagccuacacggacacauaucacucuuacgcgaauaacauucugcggacccaggaguccgccuguaauugcaucgggggaaacuguuaucucaugauuacagauggcagcgcuuccggcaucucugaaugccgcuuucugaaaaucagagaggggcggauuaucaaggagauuuucccgaccggacgcgugaagcacaccgaagaguguacaugcggcuuugccagcaauaaaacgaucgaaugugcuugcagagacaacuccuacaccgccaagcggccuuucgucaaacuuaauguggagacagauaccgccgaaauucgccugaugugcacagagaccuaucucgacacgcccagaccugaugacgggagcaucacaggacccugugagucuaacggcgauaagggguccggaggcaucaaaggcggguuuguucaucaacggauggcuagcaagauuggacgcugguacucuagaaccaugagcaaaaccaagcggaugggcauggggcuguaugugaaguacgacggagaccccugggcggauuccgacgcccuggcucucucuggcgucauggugagcauggaggaaccugggugguacuccuucggcuuugaaaucaaagauaagaaaugcgacgugccguguauuggaaucgagaugguccacgauggcgggaaggaaacauggcauagcgccgccaccgcuauuuauugccugaugggaucuggccagcuucugugggacacaguuacggggguggauauggcccucuga

SEQ ID NO: 220689 - RNA, 1401 nt, Artificial Sequence
  derived and/or modified CDS sequence (opt5) from neuraminidase__InfluenzaB__ABL76478
augcugcccagcaccauccagacacucacgcuguuccuuaccuccggcggggugcugcucucucuguacgucagcgccucccuuucuuaucugcucuacagcgacauucugcugaaguuuuccccuacagagaucaccgcuccgacaaugccccucgauugcgccaacgcgucuaauguucaagcugugaacagaagcgccaccaaaggagugaagcugcuucugccugaacccgaguggacauauccucggcucuccugucccggcagcaccuuccagaaagcccugcuuauuucuccucaccgcuuuggggaaacgaagggaaauuccgcuccgcugaucauuagagagcccuucaucgccugcggcccuaaagaauguaagcauuuugcucucacccacuacgccgcgcagcccgggggauauuacaacggcacacggggcgaccgcaauaagcugagacaucugaucagcgucaaacucgggaagauuccuaccguggagaacucuaucuuccacauggccgcuugguccggaagcgccugccaugauggcaaagaguggacauauauugggguugacggacccgauaauaacgcucugcuuaagaucaaauacggcgaagccuacaccgacacguaucacucuuacgcgaauaacauucugcggacacaggaguccgccuguaauugcaucgggggaaacuguuaucucaugauuaccgauggcagcgcuuccggcgugucugaaugccgcuuucugaagaucagagaggggcggaucauuaaggagaucuucccgacaggacgcgucaaacacaccgaagaguguaccugcggcuuugccagcaauaagacaauugaaugugcuugcagagacaacuccuacacggccaaacggccuuucgugaaacuuaauguugagaccgauacagccgaaauccgccugaugugcaccaagacauaucucgacacccccagaccugaugacgggagcauuacgggacccugugagucuaacggcgauaagggguccggaggcaucaaaggcggguuugugcaucaacggauggcuagcaagaucggacgcugguacucuagaacaaugagcaagaccaaacggaugggcauggggcuguaugucaaguacgacggagaccccugggcggauuccgacgcccuggcucucucuggcgugauggugagcauggaggaaccugggugguacuccuucggcuuugagauuaaagauaagaaaugcgacgucccguguaucggaauugaaaugguucacgauggcgggaaggagaccuggcauagcgccgccacagcuaucuauugccugaugggaucuggccagcuucugugggacaccgugacagggguggauauggcccucuga

SEQ ID NO: 220690 - RNA, 1401 nt, Artificial Sequence
  derived and/or modified CDS sequence (opt5) from neuraminidase__InfluenzaB__ABL76522
augcugcccagcaccauccagacacucacgcuguuccuuaccuccggcggggugcugcucucucuguacgucagcgccucccuuucuuaucugcucuacagcgacauucugcugaaguuuuccccuacagagaucaccgcuccgacaaugccccucgauugcgccaacgcgucuaauguucaagcugugaacagaagcgccaccaaaggagugacacugcuucugccugaacccgaguggaccuauccucggcucuccugucccggcagcacguuccagaaggcccugcuuauuucuccucaccgcuuuggggaaaccaaaggaaauuccgcuccgcugaucauuagagagcccuucaucgccugcggcccuaacgaauguaagcauuuugcucucacacacuacgccgcgcagcccgggggauauuacaauggcacccggggcgaccgcaacaaacugagacaucugaucagcgucaagcucgggaagauuccuacaguggaaaauucuaucuuccacauggccgcuugguccggaagcgccugccaugauggcaaagaguggaccuauauugggguugacggacccgauaacaaugcucugcuuaagaucaaauacggcgaggccuacacggacacauaucacucuuacgcgaacaauauucugcggacccaggaguccgccuguaacugcaucgggggaaauuguuaucucaugauuacagauggcagcgcuuccggcgugucugaaugccgcuuucugaagaucagagaggggcggaucauuaaagagaucuucccgaccggacgcgucaagcacaccgaagaguguacaugcggcuuugccagcaacaagacgauugaaugugcuugcagagacaauuccuacaccgccaaacggccuuucgugaaacuuaacguugagacagauaccgccgaaauccgccugaugugcacagagaccuaucucgacacgcccagaccugaugacgggagcauuacaggacccugugagucuaacggcgauaagggguccggaggcaucaagggcggguuugugcaucaacggauggcuagcaaaaucggacgcugguacucuagaaccaugagcaagaccgaacggaugggcauggggcuguaugucaaauacgacggagaccccugggcggauuccgacgcccuggcucucucuggcgugauggugagcauggaggaaccugggugguacuccuucggcuuugagauuaaggauaagaaaugcgacgucccguguaucggaauugaaaugguucacgauggcgggaaggagacauggcauagcgccgccaccgcuaucuauugccugaugggaucuggccagcuucugugggacacagugacggggguggauauggcccucuga

SEQ ID NO: 220691 - RNA, 1401 nt, Artificial Sequence
  derived and/or modified CDS sequence (opt5) from neuraminidase__InfluenzaB__ABL76533
augcugcccagcaccauccagacacucacgcuguuccuuaccuccggcggggugcugcucucucuguacgucagcgccucccuuucuuaucugcucuacagcgacauucugcugaaguuuuccccuacagagaucaccgcuccgacaaugccccucgauugcgccaacgcgucuaauguucaagcugugaacagaagcgccaccaaaggagugacacugcuucugccugaacccgaguggaccuauccucggcucuccugucccggcagcacguuccagaaggcccugcuuauuucuccucaccgcuuuggggaaaccaaaggaaauuccgcuccgcugaucauuagagagcccuucaucgccugcggcccuaacgaauguaagcauuuugcucucacacacuacgccgcgcagcccgggggauauuacaauggcaaacggggcgaccgcaacaagcugagacaucugaucagcgucaagcucgggaaaauuccuaccguggaaaauucuaucuuccacauggccgcuugguccggaagcgccugccaugauggcaaggaguggacauauauugggguugacggacccgauaacaaugcucugcuuaaaaucaaguacggcgaggccuacaccgacacguaucacucuuacgcgaacaauauucugcggacacaggaguccgccuguaacugcaucgggggaaauuguuaucucaugauuaccgauggcagcgcuuccggcgugucugaaugccgcuuucugaaaaucagagaggggcggaucauuaaggagaucuucccgacaggacgcgucaagcacaccgaagaguguaccugcggcuuugccagcaacaaaacaauugaaugugcuugcagagacaauuccuacacggccaagcggccuuucgugaaacuuaacguugagaccgauacagccgaaauccgccugaugugcaccgagacauaucucgacacccccagaccugaugacgggagcauuacgggacccugugagucuaacggcgauaagggguccggaggcaucaaaggcggguuugugcaucaacggauggcuagcaagaucggacgcugguacucuagaacaaugagcaaaaccgaacggaugggcauggggcuguaugucaaguacgacggagaccccugggcggauuccgacgcccuggcucucucuggcgugauggugagcauggaggaaccugggugguacuccuucggcuuugagauuaaggauaaaaagugcgacgucccguguaucggaauugaaaugguucacgauggcgggaaagagaccuggcauagcgccgccacagcuaucuauugccugaugggaucuggccagcuucugugggacaccgugacagggguggauauggcccucuga

SEQ ID NO: 220692 - RNA, 1401 nt, Artificial Sequence
  derived and/or modified CDS sequence (opt5) from neuraminidase__InfluenzaB__ABL76544
augcugcccagcaccauccagacacucacgcuguuccuuaccuccggcggggugcugcucucucuguacgucagcgccucccuuucuuaucugcucuacagcgacauucugcugaaguuuuccccuacagagaucaccgcuccgacaaugccccucgauugcgccaacgcgucuaauguucaagcugugaacagaagcgccaccaaaggagugacacugcuucugccugaacccgaguggaccuauccucggcucuccugucccggcagcacguuccagaaggcccugcuuauuucuccucaccgcuuuggggaaaccaaaggaaauuccgcuccgcugaucauuagagagcccuucaucgccugcggcccuaacgaauguaagcauuuugcucucacacacuacgccgcgcagcccgggggauauuacaauggcacccggggcgagcgcaacaaacugagacaucugaucagcgucaagcucgggaagauuccuacaguggaaaauucuaucuuccacauggccgcuugguccggaagcgccugccaugacggcaaagaauggaccuauauugggguugauggacccgacaacaaugcucugcuuaagaucaaauacggcgaggccuacacggauacauaucacucuuacgcgaacaauauucugcggacccaggaauccgccuguaacugcaucgggggaaauuguuaucucaugauuacagacggcagcgcuuccggcgugucugagugccgcuuucugaagaucagagaggggcggaucauuaaagaaaucuucccgaccggacgcgucaagcacaccgaggaauguacaugcggcuuugccagcaacaagacgauugagugugcuugcagagauaauuccuacaccgccaaacggccuuucgugaaacuuaacguugaaacagacaccgccgagauccgccugaugugcacagagaccuaucucgauacgcccagaccugacgaugggagcauuacaggacccugugaaucuaacggcgacaagggguccggaggcaucaagggcggguuugugcaucaacggauggcuagcaaaaucggacgcugguacucuagaaccaugagcaagaccgagcggaugggcauggggcuguaugucaaauacgauggagaccccugggcggacuccgaugcccuggcucucucuggcgugauggugagcauggaggagccugggugguacuccuucggcuuugaaauuaaggacaagaaaugcgaugucccguguaucggaauugagaugguucacgacggcgggaaggagacauggcauagcgccgccaccgcuaucuauugccugaugggaucuggccagcuucugugggauacagugacggggguggacauggcccucuga

SEQ ID NO: 220693 - RNA, 1401 nt, Artificial Sequence; identical to SEQ ID NO: 220691
  derived and/or modified CDS sequence (opt5) from neuraminidase__InfluenzaB__ABL76566

SEQ ID NO: 220694 - RNA, 1401 nt, Artificial Sequence
  derived and/or modified CDS sequence (opt5) from neuraminidase__InfluenzaB__ABL76588
augcugcccagcaccauccagacacucacgcuguuccuuaccuccggcggggugcugcucucucuguacgucagcgccucccuuucuuaucugcucuacagcgacauucugcugaaguuuuccccuacagagaucaccgcuccgacaaugccccucgauuaugccaacgcgucuaauguucaagcugugaacagaagcgccaccaaaggagugacacugcuucugccugaacccgaguggaccuacccucggcucuccugccccggcagcacguuccagaaggcccugcuuauuucuccucaccgcuuuggggaaaccaaaggaaauuccgcuccgcugaucauuagagagcccuucaucgccuguggcccuaacgaaugcaagcauuuugcucucacacacuaugccgcgcagcccgggggauacuauaauggcacccggggcgaccgcaacaaacugagacaucugaucagcgucaagcucgggaagauuccuacaguggaaaauucuaucuuccacauggccgcuugguccggaagcgccugucaugauggcaaagaguggaccuacauugggguugacggacccgauaacaaugcucugcuuaagaucaaauacggcgaggccuauacggacacauaccacucuuaugcgaacaauauucugcggacccaggaguccgccugcaacuguaucgggggaaauugcuaccucaugauuacagauggcagcgcuuccggcgugucugaaugucgcuuucugaagaucagagaggggcggaucauuaaagagaucuucccgaccggacgcgucaagcacaccgaagagugcacauguggcuuugccagcaacaagacgauugaaugcgcuuguagagacaauuccuauaccgccaaacggccuuucgugaaacuuaacguugagacagauaccgccgaaauccgccugaugugcacagagaccuaccucgacacgcccagaccugaugacgggagcauuacaggacccugcgagucuaacggcgauaagggguccggaggcaucaagggcggguuugugcaucaacggauggcuagcaaaaucggacgcugguauucuagaaccaugagcaagaccgaacggaugggcauggggcuguacgucaaauacgacggagaccccugggcggauuccgacgcccuggcucucucuggcgugauggugagcauggaggaaccugggugguauuccuucggcuuugagauuaaggauaagaaaugugacgucccgugcaucggaauugaaaugguucacgauggcgggaaggagacauggcauagcgccgccaccgcuaucuacugucugaugggaucuggccagcuucugugggacacagugacggggguggauauggcccucuga

SEQ ID NO: 220695 - RNA, 1401 nt, Artificial Sequence; identical to SEQ ID NO: 220690
  derived and/or modified CDS sequence (opt5) from neuraminidase__InfluenzaB__ABL76599

SEQ ID NO: 220696 - RNA, 1401 nt, Artificial Sequence; identical to SEQ ID NO: 220690
  derived and/or modified CDS sequence (opt5) from neuraminidase__InfluenzaB__ABL76610

SEQ ID NO: 220697 - RNA, 1401 nt, Artificial Sequence
  derived and/or modified CDS sequence (opt5) from neuraminidase__InfluenzaB__ABL76621
augcugcccagcaccauccagacacucacgcuguuccuuaccuccggcggggugcugcucucucuguacgucagcgccucccuuucuuaucugcucuacagcgacauucugcugaaguuuuccccuacagagaucaccgcuccgacaaugccccucgauugcgccaacgcgucuaauguucaagcugugaacagaagcgccaccaaaggagugacacugcuucugccugaacccgaguggaccuauccucggcucuccugucccggcagcacguuccagaaggcccugcuuauuucuccucaccgcuuuggggaaaccaaaggaaauuccgcuccgcugaucauuagagagcccuucaucgccugcggcccuaaggaauguaaacauuuugcucucacacacuacgccgcgcagcccgggggauauuacaacggcacccggggcgaccgcaauaagcugagacaucugaucagcgucaagcucgggaaaauuccuacaguggagaacucuaucuuccacauggccgcuugguccggaagcgccugccaugauggcaaggaguggaccuauauugggguugacggacccgauaauaacgcucugcuuaaaaucaaguacggcgaagccuacacggacacauaucacucuuacgcgaauaacauucugcggacccaggaguccgccuguaauugcaucgggggaaacuguuaucucaugauuacagauggcagcgcuuccggcgugucugaaugccgcuuucugaaaaucagagaggggcggaucauuaaggagaucuucccgaccggacgcgucaagcacaccgaagaguguacaugcggcuuugccagcaauaaaacgauugaaugugcuugcagagacaacuccuacaccgccaagcggccuuucgugaaacuuaauguugagacagauaccgccgaaauccgccugaugugcacagagaccuaucucgacacgcccagaccugaugacgggagcauuacaggacccugugagucuaacggcgaaaagggguccggaggcaucaaaggcggguuugugcaucaacggauggcuagcaagaucggacgcugguacucuagaaccaugagcaaaaccaagcggaugggcauggggcuguaugucaaguacgauggagaccccugggcggacuccgaugcccuggcucucucuggcgugauggugagcauggaggaaccugggugguacuccuucggcuuugagauuaaagacaagaaaugcgauaucccguguauuggaaucgaaaugguccacgacggcgggaaggagacauggcauagcgccgccaccgcuauuuauugccugaugggaucuggccagcuucugugggauacaguuacggggguggacauggcccucuga

SEQ ID NO: 220698 - RNA, 1401 nt, Artificial Sequence
  derived and/or modified CDS sequence (opt5) from neuraminidase__InfluenzaB__ABL76632
augcugcccagcaccauccagacacucacgcuguuccuuaccuccggcggggugcugcucucucuguacgucagcgccucccuuucuuaucugcucuacagcgacauucugcugaaguuuucccaaacagagaucaccgcuccuauuaugccgcucgauugcgccaacgcgucuaauguucaggcugugaacagaagcgccacaaaaggagugacccugcuucugcccgaaccugaguggacauauccccggcucuccuguccuggcagcaccuuccagaaggcccugcuuaucucuccccaccgcuuuggggaaacgaaaggaaauuccgcuccucugauuaucagagagccguucaucgccugcggccccaccgaauguaagcauuuugcucucacacacuacgccgcgcagccugggggauauuacaacggcacccgggaggaccgcaauaaaaugagacaucugauuagcgucaagcugggcaagauccccacaguggagaacucuauuuuccacauggccgcuugguccgggagcgccugccaugauggaaaagaauggaccuauaucggcguugacgggccugauucuaaugcucuccugaagauuaaauacggagaggccuacacggacacauaucacuccuacgcgaagaacauccuucggacccaagaaagcgccuguaauugcauuggcggggauuguuaucugaugaucacagacggacccgcuuccggcaucucugagugccgcuuucucaaaauuagagagggccggaucauuaaggaaaucuucccgaccgggcgcgugaagcacaccgaggaauguacaugcggauuugccagcaacaaaacgauugagugugcuugcagagauaauuccuacaccgccaagcggccuuucgucaaacugaacguggaaacagacaccgccgagauccgccuuaugugcacagagaccuaucuggauacgcccagaccuaaugacggcagcaucacagggcccugugaaucugauggagacaagggcuccgggggaauuaaaggcggcuuuguucaucagcggauggcuagcaagaucgggcgcugguacucuagaaccaugagcaaaaccaagcggaugggaaugggccucuaugugaaguacgacggggaucccuggacagacuccgaggcgcuggcccugucuggagucauggugagcauggaggaaccuggcugguacuccuucggguuugaaauuaaagauaagaaaugcgacgugccguguaucggcauugagaugguccacgauggaggcaagaccacauggcauagcgcugccacggccguuuauugccucauggggucuggacagcugcuuugggacaccgugacaggcguggauauggcucuguga

SEQ ID NO: 220699 - RNA, 1401 nt, Artificial Sequence
  derived and/or modified CDS sequence (opt5) from neuraminidase__InfluenzaB__ABL76643
augcugcccagcaccauccagacacucacgcuguuccuuaccuccggcggggugcugcucucucuguacgucagcgccucccuuucuuaucugcucuacagcgacauucugcugaaguuuucccaaacagagaucaccgcuccuauuaugccgcucgauugcgccaacgcgucuaauguucaggcugugaacagaagcgccacaaaaggagugacccugcuucugcccgaaccugaguggacauauccccggcucuccuguccuggcagcaccuuccagaaggcccugcuuaucucuccccaccgcuuuggggaaacgaaaggaaauuccgcuccucugauuaucagagagccguucaucgccugcggccccaccgaauguaagcauuuugcucucacacacuacgccgcgcagccugggggauauuacaacggcacccgggaggaccgcaauaaacugagacaucugauuagcgucaagcucggcaagauccccacaguggagaacucuauuuuccacauggccgcuugguccgggagcgccugccaugauggaaaagaauggaccuauaucggcguugacgggccugauucuaaugcucugcuuaagauuaaauacggagaggccuacacggacacauaucacuccuacgcgaagaacauccugcggacccaagaaagcgccuguaauugcauuggcggggauuguuaucucaugaucacagacggacccgcuuccggcaucucugagugccgcuuucugaaaauuagagagggccggaucauuaaggaaaucuucccgaccgggcgcgugaagcacaccgaggaauguacaugcggauuugccagcaacaaaacgauugagugugcuugcagagauaauuccuacaccgccaagcggccuuucgucaaacuuaacguggaaacagacaccgccgagauccgccugaugugcacagagaccuaucucgauacgcccagaccuaaugacggcagcaucacagggcccugugaaucugauggagacaagggcuccgggggaauuaaaggcggcuuuguucaucagcggauggcuagcaagaucgggcgcugguacucuagaaccaugagcaaaaccaagcggaugggaaugggccuguaugugaaguacgacggggaucccuggacagacuccgaggcgcuggcccucucuggagucauggugagcauggaggaaccuggcugguacuccuucggguuugaaauuaaagauaagaaaugcgacgugccguguaucggcauugagaugguccacgauggaggcaagaccacauggcauagcgcugccacggccaucuauugccugauggggucuggacagcuucugugggacaccguuacaggcguggauauggcucucuga

SEQ ID NO: 220700 - RNA, 1401 nt, Artificial Sequence
  derived and/or modified CDS sequence (opt5) from neuraminidase__InfluenzaB__ABL76654
augcugcccagcaccauccagacacucacgcuguuccuuaccuccggcggggugcugcucucucuguacgucagcgccucccuuucuuaucugcucuacagcgacauucugcugaaguuuucccaaacagagaucaccgcuccuauuaugccgcucgauugcgccaacgcgucuaauguucaggcugugaacagaagcacaaccaaaggagugacacugcuucugcccgaaccugaguggaccuauccccggcucuccuguccuggcagcacguuccagaaggcccugcuuaucucuccccaccgcuuuggggaaaccaaaggaaauuccgccccucugauuaucagagagccguucaucgcuugcggccccacagaauguaagcauuuugcccucacccacuacgcugcccagccugggggauauuacaacggcacacgggaggaccgcaauaaacugagacaucugauuagcgucaagcucggcaagauccccaccguggagaacucuauuuuccacauggcggccugguccgggagcgcuugccaugauggaaaagaauggacguauaucggcguugacgggccugauucuaaugcccugcuuaagauuaaauacggagaggcuuacacagacaccuaucacuccuacgccaagaacauccugcggacacaagaaagcgcguguaauugcauuggcggggauuguuaucucaugaucaccgacggacccgccuccggcaucucugagugccgcuuucugaaaauuagagagggccggaucauuaaggaaaucuucccgaccgggcgcgugaagcacacagaggaauguacgugcggauuugcuagcaacaaaaccauugagugugccugcagagauaauuccuacacagcuaagcggccuuucgucaaacuuaacguggaaaccgacacagccgagauccgccugaugugcaccgagacguaucucgauacacccagaccuaaugacggcagcaucaccgggcccugugaaucugauggagacaagggcuccgggggaauuaaaggcggcuuuguucaucagcggauggccagcaagaucgggcgcugguacucuagaaccaugagcaaaacaaagcggaugggaaugggccuguaugugaaguacgacggggaucccuggaccgacuccgaggcucuggcgcucucuggagucauggugagcauggaggaaccuggcugguacuccuucggguuugaaauuaaagauaagaaaugcgacgugccguguaucggcauugagaugguccacgauggaggcaagacaacguggcauagcgccgcuaccgccaucuauugccugauggggucuggacagcuucugugggacacaguuaccggcguggauauggcccucuga

SEQ ID NO: 220701 - RNA, 1401 nt, Artificial Sequence
  derived and/or modified CDS sequence (opt5) from neuraminidase__InfluenzaB__ABL76665
augcugcccagcaccauccagacacucacgcuguuccuuaccuccggcggggugcugcucucucuguacgucagcgccucccuuucuuaucugcucuacagcgacauucugcugaaguuuucccaaacagagaucaccgcuccuauuaugccgcucgauugcgccaacgcgucuaauguucaggcugugaacagaagcgccacaaaaggagugacccugcuucugcccgaaccugaguggacauauccccggcucuccuguccuggcagcaccuuccagaaggcccugcuuaucucuccccaccgcuuuggggaaacgaaaggaaauuccgcuccucugauuaucagagagccguucaucgccugcggccccaccgaauguaagcauuuugcucucacacacuacgccgcgcagccugggggauauuacaacggcacccgggaggaccgcaauaaacugagacaucugauuagcgucaagcucggcaagauccccacaguggagaacucuauuuuccacauggccgcuugguccgggagcgccugccaugauggaaaagaauggaccuauaucggcguugacgggccugauucuaaugcucugcuuaagauuaaauacggagaggccuacacggacacauaucacuccuacgcgaagaacauccugcggacccaagaaagcgccuguaauugcauuggcggggauuguuaucucaugaucacagacggacccgcuuccggcaucucugagugccgcuuucugaaaauuagagagggccggaucauuaaggaaaucuucccgaccgggcgcgugaagcacaccgaggaauguacaugcggauuugccagcaacaaaacgauugagugugcuugcagagauaauuccuacaccgccaagcggccuuucgucaaacuuaacguggaaacagacaccgccgagauccgccugaugugcacagagaccuaucucgauacgcccagaccuaaugacggcagcaucacagggcccugugaauuugauggagacaagggcucugggggaauuaaaggcggcuucguucaucagcggauggcuuccaagaucgggcgcugguacagcagaaccaugucuaaaaccaagcggaugggaaugggccuguaugugaaguacgacggggaucccuggacagacagcgaggcgcuggcccucuccggagucauggugucuauggaggaaccuggcugguacagcuuuggguucgaaauuaaagauaagaaaugcgacgugccguguaucggcauugagaugguccacgauggaggcaagaccacauggcauuccgcugccacggccaucuauugccugauggggagcggacagcuucugugggacaccguuacaggcguggauauggcucucuga

SEQ ID NO: 220702 - RNA, 1401 nt, Artificial Sequence
  derived and/or modified CDS sequence (opt5) from neuraminidase__InfluenzaB__ABL76676
augcugcccagcaccauccagacacucacgcuguuccuuaccuccggcggggugcugcucucucuguacgucagcgccucccuuucuuaucugcucuacagcgacauucugcugaaguuuucccaaacaggaaucaccgcuccuauuaugccgcucgauugcgccaacgcgucuaauguucaggcugugaacagaagcgccacaaaaggcgugacccugcuucugcccgagccugaauggacauauccccggcucuccuguccugggagcaccuuccagaaggcccugcuuaucucuccccaccgcuuuggagagacgaaaggcaauuccgcuccucugauuaucagagaaccguucaucgccugcgggcccaaggaguguaaacauuuugcucucacccacuacgccgcgcagccuggaggcuauuacaacggcacacgggaagaccgcaauaagcugagacaucugauuagcgucaagcucgggaaaauccccaccguggagaacucuauuuuccacauggccgcuugguccggaagcgccugccaugauggccgggaguggacauauaucgggguugacggaccugauucuaaugcucugcuuaagauuaaauacggcgaagccuacaccgacacguaucacuccuacgcgaagaacauccugcgcacacaagagagcgccuguaauugcauugggggagauuguuaucucaugaucaccgacggccccgcuuccggcaucucugaaugcagauuucugaaaauucgggaggggcgcaucauuaaggagaucuucccgacaggaagagugaagcacaccgaagaguguaccugcggcuuugccagcaacaaaacaauugaaugugcuugccgggauaauuccuacacggccaagcgcccuuucgucaaacuuaacguggagaccgacacagccgaaaucagacugaugugcaccgagacauaucucgauacgccccggccuaaugacgggagcaucaccggacccugugagucuaacggcgauaagggguccggaggcauuaaaggcggguuuguucaucagcgcauggcuagcaagaucggaagaugguacucucggacaaugagcaaaaccaagagaaugggcauggggcuguaugugaaguacgacggagaccccuggaccgauuccgaagcgcuggcccucucuggcgucauggugagcauggaggaaccugggugguacuccuucggcuuugagauuaaagacaagaaaugcgaugugccguguaucggaauugaaaugguccacgacggcgggaagacaaccuggcauagcgcugccacagccaucuauugccugaugggaucuggccagcuucugugggauacgguuaccgggguggacauggcucucuga

SEQ ID NO: 220703 - RNA, 1401 nt, Artificial Sequence
  derived and/or modified CDS sequence (opt5) from neuraminidase__InfluenzaB__ABL76687
augcugcccagcaccauccagacacucacgcuguuccuuaccuccggcggggugcugcucucucuguacgucagcgccucccuuucuuaucugcucuacagcgacauucugcugaaguuuucccaaacagagaucaccgcuccuauuaugccgcucgauugcgccaacgcgucuaauguucaggcugugaacagaagcgccacaaaaggagugacccugcuucugcccgaaccugaguggacauauccccggcucuccuguccuggcagcaccuuccagaaggcccugcuuaucucuccccaccgcuuuggggaaacgaaaggaaauuccgcuccucugauuaucagagagccguucaucgccugcggccccaccgaauguaagcauuuugcucucacacacuacgccgcgcagccugggggauauuacaacggcacccgggaggaccgcaauaaacugagacaucugauuagcgucaagcucggcaagauccccacaguggagaacucuauuuuccacauggccgcuugguccgggagcgccugccaugauggaaaagaauggaccuauaucggcguugacgggccugauucuaaugcucugcuuaagauuaaauacggagaggccuacacggacacauaucacuccuacgcgaagaacauccugcggacccaagaaagcgccuguaauugcauuggcggggauuguuaucucaugaucacagacggacccgcuuccggcaucucugagugccgcuuucugaaaauuagagagggccggaucauuaaggaaaucuucccgaccgggcgcgugaagcacaccgaggaauguacaugcggauuugccagcaacaaaacgauugagugugcuugcagagauaauuccuacaccgccaagcggccuuucgucaaacuuaacguggaaacagacaccgccgagauccgccugaugugcacagagaccuaucucgauacgcccagaccuaaugacggcagcaucacagggcccugugaauuugauggagacaagggcucugggggaauuaaaggcggcuucguucaucagcggauggcuuccaagaucgggcgcugguacagcagaaccaugucuaaaaccaagcggaugggaaugggccuguaugugaaguacgacggggaucccuggacagacagcgaggcgcuggcccucuccggagucauggugccuauggaggaaccgggcugguacucuuuuggguucgaaauuaaagauaagaaaugcgacgugcccuguaucggcauugagaugguccacgauggaggcaagaccacauggcauagcgcugccacggccaucuauugccugaugggguccggacagcuucugugggacaccguuacaggcguggauauggcucucuga

SEQ ID NO: 220704 - RNA, 1401 nt, Artificial Sequence
  derived and/or modified CDS sequence (opt5) from neuraminidase__InfluenzaB__ABL76698
augcugcccagcaccauccagacacucacgcuguuccuuaccuccggcggggugcugcucucucuguacgucagcgccucccuuucuuaucugcucuacagcgacauucugcugaaguuuuccccuacagagaucaccgcuccgacaaugccccucgauugcgccaacgcgucuaauguucaagcugugaacagaagcgccaccaaaggaaugacacugcuucugccugaacccgaguggaccuauccucggcucuccugucccggcagcacguuccagaaggcccugcuuauuucuccucaccgcuuuggggaaaccagaggaaauuccgcuccgcugacaauccgggagcccuucauugccugcggcccuaaagaauguaagcauuuugcucucacccacuacgccgcgcagcccgggggauauuacaacggcacacgcgaggacagaaauaaacugcggcaucugaucagcgugaagcucggcaagaucccuaccgucgagaacucuauuuuccacauggccgcuugguccgggagcgccugccaugauggacgcgaauggacguauaucggcguggacgggcccgauucuaaugcucugauuaaaaucaaguacggagaggccuacacagacaccuaucacuccuacgcgaacaauauucuuagaacacaggaaagcgccuguaacugcaucggcggggauuguuaucugaugauuaccgacggauccgcuucuggcaucagcaaaugccgguuucucaagauccgcgagggcagaauuaucaaagagauuuucccgaccgggcggguugaacacacagaggaauguacgugcggauuugccuccaauaagaccaucgagugugcuugccgcgauaacagcuacacagccaagagaccuuucgugaaacugaaugucgaaaccgacacagccgagauucggcuuaugugcaccgagacguaucuggauacaccccgcccugacgauggcucuaucaccgggcccugugaauccaacggagacaagggcagagggggaaucaaaggcggcuuugugcaucaacggauggcuagcaagauugggagaugguacucucgcaccaugagcaaaacagagcggaugggaauggaacucuauguuaaguacgacggcgaucccuggaccgacuccgaggcgcuggccccuucuggggugauggucagcauggaggaaccgggaugguacuccuucggcuuugagaucaaagauaagaagugcgacgugcccuguauugggaucgaaauggugcacgauggcggcaaaaagacauggcauagcgcugccacggccauuuauugccugaugggaucugggcagcuccugugggacaccgucacaggaguugauauggcucuuuga

SEQ ID NO: 220705 - RNA, 1401 nt, Artificial Sequence
  derived and/or modified CDS sequence (opt5) from neuraminidase__InfluenzaB__ABL76720
augcugcccagcaccauccagacacucacgcuguuccuuaccuccggcggggugcugcucucucuguacgucagcgccucccuuucuuaucugcucuacagcgacauucugcugaaguuuuccccuacagagaucaccgcuccgacaaugccccucgauugcgccaacgcgucuaauguucaagcugugaacagaagcgccaccaaaggagugacacugcuucugccugaacccgaguggaccuauccucggcucuccugucccggcagcacguuccagaaggcccugcuuauuucuccucaccgcuuuggggaaaccaaaggaaauuccgcuccgcugaucauuagagagcccuucaucgccugcggcccuaacgaauguaagcauuuugcucucacacacuacgccgcgcagcccgggggauauuacaauggcacccggggcgaccgcaacaaacugagacaucugaucagcgucaagcucgggaagauuccuacaguggaaaauucuaucuuccacauggccgcuugguccggaagcgccugccaugauggcaaagaguggaccuauauugggguugacggacccgauaacaaugcucugcuuaagaucaaauacggcgaggccuacacggacacauaucacucuuacgcgaacaagauucugcggacccaggaguccgccuguaauugcaucgggggaaacuguuaucucaugauuacagauggcagcgcuuccggcgugucugaaugccgcuuucugaaaaucagagaggggcggaucauuaaggagaucuucccgaccggacgcgucaagcacaccgaagaguguacaugcggcuuugccagcaauaaaacgauugaaugugcuugcagagacaacuccuacaccgccaagcggccuuucgugaaacuuaauguugagacagauaccgccgaaauccgccugaugugcacagacaccuaucucgauacgcccagaccugacgaugggagcauuacaggacccugugagucuaacggcgacaagggguccggaggcaucaaaggcggguuugugcaucaacggauggcuagcaagaucggacgcugguacucuagaaccaugagcaaaaccgagcggaugggcauggggcuguaugucaaguacgacggagaucccugggcggacuccgaugcccuggcuuucucuggcgugauggugagcaugaaggaaccugggugguacuccuuuggcuucgagauuaaagacaagaaaugcgaugucccguguaucggaauugaaaugguucacgacggcgggaaggagacauggagaagcgccgccaccgcuaucuauugccucaugggaucuggccagcugcuuugggauacagugacggggguggacauggcccuguga

SEQ ID NO: 220706 - RNA, 1401 nt, Artificial Sequence
  derived and/or modified CDS sequence (opt5) from neuraminidase__InfluenzaB__ABL76731
augcugcccagcaccauccagacacucacgcuguuccuuaccuccggcggggugcugcucucucuguacgucagcgccucccuuucuuaucugcucuacagcgacauucugcugaaguuuuccccuacagagaucaccgcuccgacaaugccccucgauugcgccaacgcgucuaauguucacgcugugaacagaagcgccaccaaaggagugacacugcuucugccugaacccgaguggaccuauccucggcucuccugucccggcagcacguuccaaaaggcccugcuuauuucuccucaucgcuuuggggaaaccaaaggaaauuccgcuccgcugaucauuagagagcccuucaucgccugcggcccuaacgaauguaagcacuuugcuaucacacauuacgccgcgcagcccgggggauauuacaauggcacccggggcgaccgcaacaaacucagacaccugauuagcgucaagcuggggaagaucccuacaguggaaaauucuauuuuccauauggccgcuugguccggaagcgccugccacgauggcaaagaguggaccuauaucgggguugacggacccgauaacaaugcucuccugaagauuaaauacggcgaggccuacacggacacauaucacucuuacgcgaacaauauccuucggacccaggaguccgccuguaacugcauugggggaaauuguuaucugaugaucacagauggcagcgcuuccggcgugucugaaugccgcuuucucaagaucagagaggggcggauuaucaaagagauuuucccgaccggacgcgucaagcauaccgaagaguguacaugcggcuuugccagcaacaagacgaucgaaugugcuugcagagacaauuccuacaccgccaaacggccuuucgugaagcugaacguugagacagauaccgccgaaauucgccuuaugugcacagacaccuaucuggauacgcccagaccugacgaugggagcaucacaggacccugugagucuaacggcgacaaaggguccggaggcaucaagggcggguuugugcaccagcggauggcuagcaaaauuggacgcugguacucuagaaccaugagcaagaccgagcggaugggcauggggcucuaugucaaauacgacggagaucccugggcggacuccgaugcccuggcuuucucuggcgugauggugagcaugaaggaaccugggugguacuccuuuggcuucgagaucaaggacaaaaagugcgaugucccguguauuggaaucgaaaugguucaugacggcgggaaagagacauggcacagcgccgccaccgcuauuuauugccugaugggaucuggccaacuccugugggauacagugacggggguggacauggcccuuuga

SEQ ID NO: 220707 - RNA, 1401 nt, Artificial Sequence
  derived and/or modified CDS sequence (opt5) from neuraminidase__InfluenzaB__ABL76742
augcugcccagcaccauccagacacucacgcuguuccuuaccuccggcggggugcugcucucucuguacgucagcgccucccuuucuuaucugcucuacagcgacauucugcugaaguuuuccccuacagagaucaccgcuccgacaaugccccucgauugcgccaacgcgucuaauguucaagcugugaacagaagcgccaccaaaggagugacacugcuucugccugaacccgaguggaccuauccucggcucuccugucccggcagcacguuccagaaggcccugcuuauuucuccucaccgcuuuggggaaaccaaaggaaauuccgcuccgcugaucauuagagagcccuucaucgccugcggcccuaacgaauguaagcauuuugcucucacacacuacgccgcgcagcccgggggauauuacaauggcacccggggcgaccgcaacaaacugagacaucugaucagcgucaagcucgggaagauuccuacaguggaaaauucuaucuuccacauggccgcuugguccggaagcgccugccaugauggcaaagaguggaccuauauugggguugacggacccgauaacaaugcucugcuuaagaucaaauacggcgaggccuacacggacacauaucacucuuacgcgaacaagauucugcggacccaggaguccgccuguaauugcaucgggggaaacuguuaucucaugauuacagauggcagcgcuuccggcgugucugaaugccgcuuucugaaaaucagagaggggcggaucauuaaggagaucuucccgaccggacgcgucaagcacaccgaagaguguacaugcggcuuugccagcaauaaaacgauugaaugugcuugcagagacaacuccuacaccgccaagcggccuuucgugaaacuuaauguugagacagauaccgccgaaauccgccugaugugcacagacaccuaucucgauacgcccagaccugacgaugggagcauuacaggacccugugagucuaacggcgacaagggguccggaggcaucaaaggcggguuugugcaucaacggauggcuagcaagaucggacgcugguacucuagaaccaugagcaaaaccgagcggaugggcauggggcuguaugucaaguacgacggagaucccugggcggacuccgaugcccuggcuuucucuggcgugauggugagcaugaaggaaccugggugguacuccuuuggcuucgagauuaaagacaagaaaugcgaugucccguguaucggaauugaaaugguucacgacggcgggaaggagacauggcauagcgccgccaccgcuaucuauugccucaugggaucuggccagcugcuuugggauacagugacggggguggacauggcccuguga

SEQ ID NO: 220708 - RNA, 1401 nt, Artificial Sequence
  derived and/or modified CDS sequence (opt5) from neuraminidase__InfluenzaB__ABL76753
augcugcccagcaccauccagacacucacgcuguuccuuaccuccggcggggugcugcucucucuguacgucagcgccucccuuucuuaucugcucuacagcgacauucugcugaaguuuucccaaacagagaucaccgcuccuauuaugccgcucgauugcgccaacgcgucuaauguucaggcugugaacagaagcgccacaaaaggagugacccugcuucugcccgaaccugaguggacauauccccggcucuccuguccuggcagcaccuuccagaaggcccugcuuaucucuccccaccgcuuuggggaaacgaccggaaauuccgcuccucugauuaucagagagccguucaucgccugcggccccaaagaauguaagcauuuugcucucacacacuacgccgcgcagccugggggauauuacaacggcacccgggaggaccgcaauaaacugagacaucugauuagcgucaagcucggcaagauccccacaguggagaacucuauuuuccacauggccgcuugguccgggagcgccugccaugauggacgggaauggaccuauaucggcguugacgggccugauaauaacgcucugcuuaaaauuaaguacggagaggccuacacggacacauaucacucuuacgcgaaaaauauccugcgcacccaagaauccgccuguaacugcauuggcggggauuguuaucucaugaucacagacggacccgcuagcggcaucuccgagugcagauuucugaagauucgggagggccgcaucauuaaagaaaucuucccgaccgggagagugaagcacaccgaggaauguacaugcggauuugccucuaauaagacgauugagugugcuugccgggauaacagcuacaccgccaaacgcccuuucgucaaacuuaauguggaaacagacaccgccgagaucagacugaugugcacagagaccuaucucgauacgccccggccuaacgacggcuccaucacagggcccugugaaagcaauggagauaagggcucugggggaauuaagggcggcuuuguucaucagcgcauggcuuccaaaaucgggagaugguacagccggaccaugucuaagaccaaaagaaugggaaugggccuguaugugaaguacgacggggaccccuggacagauagcgaggcgcuggcccucuccggagucauggugucuauggaggaaccuggcugguacagcuucggguuugaaauuaaggacaaaaagugcgaugugccguguaucggcauugagaugguccacgacggaggcaaaaccacauggcauuccgcugccacggccaucuauugccugauggggagcggacagcuucugugggauaccguuacaggcguggacauggcucucuga

SEQ ID NO: 220709 - RNA, 1401 nt, Artificial Sequence; identical to SEQ ID NO: 220678
  derived and/or modified CDS sequence (opt5) from neuraminidase__InfluenzaB__ABL76764

SEQ ID NO: 220710 - RNA, 1401 nt, Artificial Sequence; identical to SEQ ID NO: 220678
  derived and/or modified CDS sequence (opt5) from neuraminidase__InfluenzaB__ABL76775

SEQ ID NO: 220711 - RNA, 1401 nt, Artificial Sequence
  derived and/or modified CDS sequence (opt5) from neuraminidase__InfluenzaB__ABL76797
augcugcccagcaccauccagacacucacgcuguuccuuaccuccggcggggugcugcucucucuguacgucagcgccucccuuucuuaucugcucuacagcgacauucugcugaaguuuuccccuacagagaucaccgcuccgacaaugccccucgauugcgccaacgcgucuaauguucaagcugugaacagaagcgccaccaaaggagugacacugcuucugccugaacccgaguggaccuauccucggcucuccugucccggcagcacguuccagaaggcccugcuuauuucuccucaccgcuuuggggaaaccaaaggaaauuccgcuccgcugaucauuagagagcccuucaucgccugcggcccuaaggaauguaaacauuuugcucucacacacuacgccgcgcagcccgggggauauuacaacggcacccgggaggaccgcaauaagcugagacaucugaucagcgucaagcucggcaaaauuccuacaguggagaacucuaucuuccacauggccgcuugguccgggagcgccugccaugauggaaaggaauggaccuauauuggcguugacgggcccgauucuaaugcucugcuuaaaaucaaguacggagaggccuacacggacacauaucacuccuacgcgaacaauauucugcggacccaggaaagcgccuguaacugcaucggcgggaauuguuaucucaugauuacagauggauccgcuucuggcaucagcgagugccgcuuucugaaaaucagagagggccggauuaucaaggaaauuuucccgaccgggcgcguggagcacaccgaagaguguacaugcggauuugccuccaacaagacgaucgaaugugcuugcagagacaauagcuacaccgccaaacggccuuucgucaaacuuaacguggagacagauaccgccgagauucgccugaugugcacagaaaccuaucucgacacgcccagaccugaugacggcucuaucacagggcccugugaguccaauggagauaagggcagcgggggaaucaagggcggcuuuguucaucaacggauggcuucuaaaauugggcgcugguacagcagaaccauguccaagaccaaacggaugggaaugggccuguaugugaaguacgacggggaccccuggacagauucugacgcgcuggcccucagcggagucaugguguccauggaggaaccuggcugguacagcuucggguuugaaaucaaggauaaaaagugcgacgugccguguauuggcaucgagaugguccacgauggaggcaaagagaccuggcauucugcugccacagccauuuauugccugaugggguccggacagcuucugugggacacgguuaccggcgugaacauggcucucuga

SEQ ID NO: 220712 - RNA, 1401 nt, Artificial Sequence
  derived and/or modified CDS sequence (opt5) from neuraminidase__InfluenzaB__ABL76819
augcugcccagcaccauccagacacucacgcuguuccuuaccuccggcggggugcugcucucucuguacgucagcgccucccuuucuuaucugcucuacagcgacauucugcugaaguuuuccccuacagagaucaccgcuccgacaaugccccucgauugcgccaacgcgucuaauguucaagcugugaacagaagcgccaccaaaggagugacacugcuucugccugaacccgaguggaccuauccucggcucuccugucccggcagcacguuccagaaggcccugcuuauuucuccucaccgcuuuggggaaaccaaaggaaauuccgcuccgcugaucauuagagagcccuucaucgccugcggcccuaaggaauguaaacauuuugcucucacacacuacgccgcgcagcccgggggauauuacaacggcacccgggaggaccgcaauaagcugagacaucugaucagcgucaagcucggcaaaauuccuacaguggagaacucuaucuuccacauggccgcuugguccgggagcgccugccaugauggaaaggaauggaccuauauuggcguugacgggcccgauucuaaugcucugcuuaaaaucaaguacggagaggccuacacggacacauaucacuccuacgcgaacaauauucugcggacccaggaaagcgccuguaacugcaucggcgggaauuguuaucucaugauuacagauggauccgcuucuggcaucagcgagugccgcuuucugaaaaucagagagggccggauuaucaaggaaauuuucccgaccgggcgcgugaagcacaccgaggaauguacaugcggauuugccuccaacaaaacgaucgagugugcuugcagagacaauagcuacaccgccaagcggccuuucgucaaacuuaacguggaaacagauaccgccgagauucgccugaugugcacagagaccuaucucgacacgcccagaccugaugacggcucuaucacagggcccugugaauccaauggagauaagggcagcgggggaaucaaaggcggcuuuguucaucaacggauggcuucuaagauugggcgcugguacagcagaaccauguccaaaaccaagcggaugggaaugggccuguaugugaaguacgacggggaccccuggacagauucugacgcgcuggcccucagcggagucaugguguccauggaggaaccuggcugguacagcuucggguuugagaucaaagauaagaaaugcgacgugccguguauuggcaucgaaaugguccacgauggaggcaaggagaccuggcauucugcugccacagccauuuauugccugaugggguccggacagcuucugugggacacgguuaccggcguggauauggcucucuga

SEQ ID NO: 220713 - RNA, 1401 nt, Artificial Sequence
  derived and/or modified CDS sequence (opt5) from neuraminidase__InfluenzaB__ABL76830
augcugcccagcaccauccagacacucacgcuguuccuuaccuccggcggggugcugcucucucuguacgucagcgccucccuuucuuaucugcucuacagcgacauucugcugaaguuuuccccuacaaaaaucaccgcuccgacaaugccccucgauugcgccaacgcgucuaauguucaagcugugaacagaagcgccaccaagggagugacacugcuucugccugagcccgaauggaccuauccucggcucuccugucccggcagcacguuccagaaagcccugcuuauuucuccucaccgcuuuggggagaccaagggaaauuccgcuccgcugaucauuagagaacccuucaucgccugcggcccuaaagaguguaagcauuuugcucucacacacuacgccgcgcagcccgggggauauuacaacggcacccggggcgaccgcaauaagcugagacaucugaucagcgucaaacucgggaagauuccuacaguggaaaacucuaucuuccacauggccgcuugguccggaagcgccugccaugauggcaaagaguggaccuauauugggguugacggacccgauaauaacgcucugcuuaagaucaaauacggcgaggccuacacggacacauaucacucuuacgcgaauaacauucugcggacccaggaauccgccuguaauugcaucgggggaaacuguuaucucaugauuacagauggcagcgcuuccggcgugucugagugccgcuuucugaagaucagagaagggcggaucauuaaggagaucuucccgaccggacgcgucaaacacaccgaggaauguacaugcggcuuugccagcaauaagacgauugagugugcuugcagagacaacuccuacaccgccaaacggccuuucgugaaacuuaauguugaaacagauaccgccgagauccgccugaugugcacaaagaccuaucucgacacgcccagaccugaugacgggagcauuacaggacccugugaaucuaacggcgauaagggguccggaggcaucaaaggcggguuugugcaucaacggauggcuagcaagaucggacgcugguacucuagaaccaugagcaagaccaaacggaugggcauggggcuguaugucaaguacgacggagaccccugggcggauuccgacgcccuggcucucucuggcgugauggugagcauggaggagccugggugguacuccuucggcuuugaaauuaaagauaagaaaugcgacgucccguguaucggaauugagaugguucacgauggcgggaaggaaacauggcauagcgccgccaccgcuaucuauugccugaugggaucuggccagcuucugugggacacagugacggggguggauauggcccucuga

SEQ ID NO: 220714 - RNA, 1401 nt, Artificial Sequence
  derived and/or modified CDS sequence (opt5) from neuraminidase__InfluenzaB__ABL76852
augcugcccagcaccauccagacacucacgcuguuccuuaccuccggcggggugcugcucucucuguacgucagcgccucccuuucuuaucugcucuacagcgacauucugcugaaguuuuccccuacagagaucaccgcuccgacaaugccccucgauugcgccaacgcgucuaauguucaagcugugaacagaagcgccaccaaaggagugacacugcuucugccugaacccgaguggaccuauccucggcucuccugucccggcagcacguuccagaaggcccugcuuauuucuccucaccgcuuuggggaaaccaaaggaaauuccgcuccgcugaucauuagagagcccuucaucgccugcggcccuaaggaauguaaacauuuugcucucacacacuacgccgcgcagcccgggggauauuacaacggcacccgggaggaccgcaauaagcugagacaucugaucagcgucaagcucggcaaaauuccuacaguggagaacucuaucuuccacauggccgcuugguccgggagcgccugccaugauggaaaggaauggaccuauauuggcguugacgggcccgauucuaaugcucugcuuaaaaucaaguacggagaggccuacacggacacauaucacuccuacgcgaacaauauucugcggacccaggaaagcgccuguaacugcaucggcgggaauuguuaucucaugauuacagauggauccgcuucuggcaucagcgagugccgcuuucugaaaaucagagagggccggauuaucaaggaaauuuucccgaccgggcgcgugaagcacaccgaggaauguacaugcggauuugccuccaacaaaacgaucgagugugcuugcagagacaauagcuacaccgccaagcggccuuucgucaaacuuaacguggaaacagauaccgccgagauucgccugaugugcacagagaccuaucucgacacgcccagaccugaugacggcucuaucacagggcccugugaauccaauggagauaagggcagcgggggaaucaaaggcggcuuuguucaucaacggauggagucuaagauugggcgcugguacagcagaaccauguccaaaaccaagcggaugggaaugggccuguaugugaaguacgacggggaccccuggacagauucugacgcucuggcgcucagcggagucaugguguccaucgaggaaccuggcugguacagcuucggguuugaaauuaaagauaagaaaugcgacgugccguguaucggcauugagaugguccacgauggaggcaaggagaccuggcauucugccgcuacagccaucuauugccugaugggguccggacagcuucugugggacacgguuaccggcguggauauggcccucuga

SEQ ID NO: 220715 - RNA, 1401 nt, Artificial Sequence
  derived and/or modified CDS sequence (opt5) from neuraminidase__InfluenzaB__ABL76863
augcugcccagcaccauccagacacucacgcuguuccuuaccuccggcggggugcugcucucucuguacgucagcgccucccuuucuuaucugcucuacagcgacauucugcugaaguuuuccccuacagagaucaccgcuccgacaaugccccucgauugcgccaacgcgucuaauguucaagcugugaacagaagcgccaccaaaggagugacacugcuucugccugaacccgaguggaccuauccucggcucuccugucccggcagcacguuccagaaggcccugcuuauuucuccucaccgcuuuggggaaaccaaaggaaauuccgcuccgcugaucauuagagagcccuucaucgccugcggcccuaaggaauguaaacauuuugcucucacacacuacgccgcgcagcccgggggauauuacaacggcacccgggaggaccgcaauaagcugagacaucugaucagcgucaagcucggcaaaauuccuacaguggagaacucuaucuuccacauggccgcuugguccgggagcgccugccaugauggaaaggaauggaccuauauuggcguugacgggcccgauucuaaugcucugcuuaaaaucaaguacggagaggccuacacggacacauaucacuccuacgcgaacaauauucugcggacccaggaaagcgccuguaacugcaucggcgggaauuguuaucucaugauuacagauggauccgcuucuggcaucagcgagugccgcuuucugaaaaucagagagggccggauuaucaaggaaauuuucccgaccgggcgcgugaagcacaccgaggaauguacaugcggauuugccuccaacaaaacgaucgagugugcuugcagagacaauagcuacaccgccaagcggccuuucgucaaacuuaacguggaaacagauaccgccgagauucgccugaugugcacagagaccuaucucgacacgcccagaccugaugacggcucuaucacagggcccugugaauccaauggagauaagggcagcgggggaaucaaaggcggcuuuguucaucaacggauggcuucuaagauugggcgcugguacagcagaaccauguccaaaaccaagcggaugggaaugggccuguaugugaaguacgacggggaccccuggacagauucugacgcgcuggcccucagcggagucaugguguccauggaggaaccuggcugguacagcuucggguuugagaucaaagauaagaaaugcgacgugccguguauuggcaucgaaaugguccacgauggaggcaaggagaccuggcauucugcugccacagccauuuauugccugaugggguccggacagcuucugugggacacgguuaccggcguggauauggcuauguga

SEQ ID NO: 220716 - RNA, 1401 nt, Artificial Sequence
  derived and/or modified CDS sequence (opt5) from neuraminidase__InfluenzaB__ABL76874
augcugcccagcaccauccagacacucacgcuguuccuuaccuccggcggggugcugcucucucuguacgucagcgccucccuuucuuaucugcucuacagcgacauucugcugaaguuuuccccuacagagaucaccgcuccgacaaugccccucgauugcgccaacgcgucuaauguucaagcugugaacagcuccgccaccaaaggagugacacugcuucugccugaacccgaguggaccuauccuagacucagcugucccggcucuacguuccagaaggcccugcuuauuuccccucaccgguuuggggaaaccaaaggaaauagcgcuccgcugaucauucgcgagcccuucaucgccugcggcccuaaggaauguaaacauuuugcucucacacacuacgccgcgcagcccgggggauauuacaacggcaccagaggcgaccggaauaagcugcgccaucugaucucugucaagcucgggaaaauuccuacaguggagaacuccaucuuccacauggccgcuuggagcggaucugccugccaugauggcaaggaguggaccuauauugggguugacggacccgauuccaaugcucugcuuaaaaucaaguacggcgaagccuacacggacacauaucacagcuacgcgaacaauauucugagaacccaggaguccgccuguaacugcaucgggggaaauuguuaucucaugauuacagauggcucugcuagcggcaucuccgaaugccgguuucugaaaauccgcgaggggagaauuaucaaggagauuuucccgaccggacgggugaagcacaccgaagaguguacaugcggcuuugccagcaacaaaacgaucgaaugugcuugccgcgacaauucuuacaccgccaagagaccuuucgucaaacuuaacguggagacagauaccgccgaaauuaagcugaugugcacagagaccuaucucgacacgccccggccugaugacggguccaucacaggacccugugagagcaauggcgauaaagggucuggaggcaucaagggcggguuuguucaucaacgcauggcuagcaaaauuggaagaugguacucccggaccaugucuaagaccaagcgcaugggcauggggcuguaugugaaauacgacggagaccccuggacagauagcgacgcgcuggcccucuccggcgucauggugagcauggaggaaccugggugguacucuuucggcuuugaaaucaaggauaaaaagugcgacgugccguguauuggaaucgagaugguccacgauggcgggaaagaaaccuggcauuccgcugccacagccauuuauugccugaugggaagcggccagcuucugugggacacgguuaccgggguggauauggcucucuga

SEQ ID NO: 220717 - RNA, 1401 nt, Artificial Sequence
  derived and/or modified CDS sequence (opt5) from neuraminidase__InfluenzaB__ABL76885
augcugcccagcaccauccagacacucacgcuguuccuuaccuccggcggggugcugcucucucuguacgucagcgccucccuuucuuaucugcucuacagcgacauucugcugaaguuuucccaaacagagaucaccgcuccuacaaugccgcucgauuaugccaacgcgucuaauguucaggcugugaacagaagcgccaccaaaggagugacacugcuucugcccgaaccugaguggaccuacccccggcucuccugcccuggcagcacguuccagaaggcccugcuuauuucuccccaccgcuuuggggaaaccaaaggaaauuccgcuccucugaucauuagagagccguucaucgccuguggccccaaggaaugcaaacauuuugcucucacacacuaugccgcgcagccugggggauacuauaacggcacccgggaggaccgcaauaagcugagacaucugaucagcgucaagcucggcaaaauucccacaguggagaacucuaucuuccacauggccgcuugguccgggagcgccugucaugauggacgggaauggaccuacauuggcguugacgggccugauucuaaugcucugcuuaagaucaaauacggagaggccuauacggacacauaccacuccuaugcgaagaacauucugcgcacccaagaaagcgccugcaauuguaucggcggggauugcuaccucaugauuacagacggauccgcuucuggcaucagcgaguguagauuucugaaaauccgggagggccgcauuaucaaggaaauuuuccccaccgggagagugaagcacaccgaggaaugcacauguggauuugccuccaacaaaacgaucgagugcgcuugucgggauaauagcuauaccgccaagcgcccguucgucaaacuuaacguggaaacagacaccgccgagauuagacugaugugcacagagaccuaccucgauacgccucggcccgacgauggcucuaucacagggccuugcgaauccaauggagacaagggcagcgggggaaucaaaggcggcuuuguucaucagcgcauggcuucuaagauugggagaugguauagccggaccauguccaaaaccaagagaaugggaaugggccuguacgugaaguacgacggggaucccuggacagacucugaggcgcuggcccucagcggagucaugguguccauggaggaacccggcugguauagcuucggguuugaaaucaaagauaagaaaugugacgugccuugcauuggcaucgagaugguccacgauggaggcaagaccacauggcauucugcugccacggccauuuacugucugaugggguccggacagcuucugugggacaccguuacaggcguggauauggcucucuga

SEQ ID NO: 220718 - RNA, 1401 nt, Artificial Sequence
  derived and/or modified CDS sequence (opt5) from neuraminidase__InfluenzaB__ABL76896
augcugcccagcaccauccagacacucacgcuguuccuuaccuccggcggggugcugcucucucuguacgucagcgccucccuuucuuaucugcucuacagcgacauucugcugaaguuuucccaaacagagaucaccgcuccuacaaugccgcucgauugcgccaacgcgucuaauguucaggcugugaacagaagcgccaccaaaggagugacacugcuucugcccgaaccugaguggauguauccccggcucuccuguccuggcagcaccuuccagaaggcccugcuuauuucuccccaccgcuuuggggaaacgaaaggaaauuccgcuccucugaucauuagagagccguucaucgccugcggccccaaggaauguaaacauuuugcucucacccacuacgccgcgcagccugggggauauuacaacggcacacgggaggaccgcaauaagcugagacaucugaucagcgucaagcucggcaaaauucccaccguggagaacucuaucuuccacauggccgcuugguccgggagcgccugccaugauggacgggaauggacauauauuggcguugacgggccugauucuaaugcucugcuuaagaucaaauacggagaggccuacaccgacacguaucacuccuacgcgaagaacauucugcgcacacaagaaagcgccuguaauugcaucggcggggauuguuaucucaugauuaccgacggauccgcuucuggcaucagcgagugcagauuucugaaaauccgggagggccgcauuaucaaggaaauuuuccccacagggagagugaagcacaccgaggaauguaccugcggauuugccuccaacaaaacaaucgagugugcuugccgggauaauagcuacacggccaagcgcccguucgucaaacuuaacguggaaaccgacacagccgagauuagacugaugugcaccgagacauaucucgauaccccucggcccgacgauggcucuaucacggggccuugugaauccaauggagacaagggcagcgggggaaucaaaggcggcuuuguucaucagcgcauggcuucuaagauugggagaugguacagccggacaauguccaaaaccaagagaaugggaaugggccuguaugugaaguacgacggggaucccuggaccgacucugaggcgcuggcccucagcggagucaugguguccauggaggaacccggcugguacagcuucggguuugaaaucaaagauaagaaaugcgacgugccuuguauuggcaucgagaugguccacgauggaggcaagacaaccuggcauucugcugccacagccauuuauugccugaugggguccggacagcuucugugggacgcuguuacgggcguggauauggcccucuga

SEQ ID NO: 220719 - RNA, 1401 nt, Artificial Sequence
  derived and/or modified CDS sequence (opt5) from neuraminidase__InfluenzaB__ABL76918
augcugcccagcaccauccagacacucacgcuguuccuuaccuccggcggggugcugcucucucuguacgucagcgccucccuuucuuaucugcucuacagcgacauucugcugaaguuuuccccuacagagaucaccgcuccgacaaugccccucgauugcgccaacgcgucuaauguucaagcugugaacagaagcgccaccaaaggagugacacugcuucugccugaacccgaguggaccuauccucggcucuccugucccggcagcacguuccagaaggcccugcuuauuucuccucaccgcuuuggggaaaccaaaggaaauuccgcuccgcugaucauuagagagcccuucaucgccugcggcccuaacgaauguaagcauuuugcucucacacacuacgccgcgcagcccgggggauauuacaauggcacccggggcgaccgcaacaaacugagacaucugaucagcgucaagcucgggaagauuccuacaguggaaaauucuaucuuccacauggccgcuugguccggaagcgccugccaugauggcaaagaguggaccuauauugggguugacggacccgauaacaaugcucugcuuaagaucaaauacggcgaggccuacacggacacauaucacucuuacgcgaacaauauucugcggacccaggaguccgccuguaacugcaucgggggaaauuguuaucucaugauuacagauggcagcgcuuccggcgugucugaaugccgcuuucugaagaucagagaggggcggaucauuaaagagaucuucccgaccggacgcgucaagcacaccgaagaguguacaugcggcuuugccagcaacaagacgauugaaugugcuugcagagacaauuccuacaccgccaaacggccuuucgugaaacuuaacguugagacagauaccgccgaaauccgccugaugugcacagagaccuaucucgacacgcccagaccugaugacgggagcauuacaggacccugugagucuaacggcgauaagggguccggaggcaucaagggcggguuugugcaucaacggauggcuagcaaaaucggacgcugguacucuagaaccaugagcaagaccgaacggaugggcauggggcuguaugucaaauacgacggagaccccugggcggauuccgacgcccuggcucucauuggcgugauggugucuauggaggaaccugggugguacagcuucggcuuugagaucaaggauaagaaaugcgacgucccguguauuggaaucgaaaugguucacgauggcgggaaggagacauggcauuccgccgccaccgcuauuuauugccugaugggaagcggccagcuucugugggacacagugacgggggugaauauggcccucuga

SEQ ID NO: 220720 - RNA, 1401 nt, Artificial Sequence
  derived and/or modified CDS sequence (opt5) from neuraminidase__InfluenzaB__ABL76962
augcugcccagcaccauccagacacucacgcuguuccuuaccuccggcggggugcugcucucucuguacgucagcgcccuucuguccuaucuccuguacucugacauucugcucaaguuuagcccuacaaaaaucauugcuccgaccaugucccuggauugcgccaacgcgucuaauguucaagcugugaaccacagcgccacagaggaaaugaccuuccuucugcccgagccugaauggacauaucccagacucuccugucagggaagcaccuuucagaaggcccugcuuaucucuccucaucgguucggcgaggcuaaaggaaauuccgcuccccugauuauccgcgaaccuuuuaucgccugcgggccgaaggaguguaaacacuucgcccucacgcauuacgcggcccagcccggcggguauuacaacggaaccagagaggaccggaauaagcugcgccaccugauuagcgugaaccucggcaagaucccuacagucgaaaauucuauuuuucauauggcugccugguccggcagcgcuugccacgaugggagagaguggaccuauaucggaguggacggccccgauucuaacgcccugauuaaaaucaaguacggggaagcguacacagacaccuaucacuccuacgccaauaacauucuucggacgcaagagagcgcuuguaauugcaucggaggcgauuguuaucugaugaucacagacggguccgccucuggaauuagcaaaugccgcuuccucaagaucagagagggccggauuaucaaagaaauuuuuccuaccggccgcguugagcauacagaagaguguaccugcggguucgcuuccaacaagaccaucgaaugugccugcagagauaauagcuacacagccaagcggcccuuugugaaacugaacgucgagacggacaccgcugagauccgccuuaugugcacagaaaccuaucuggauacaccgagaccugacgauggaucuauuaccggccccugugaguccaauggggacaagggaagcggcgggaucaaaggaggcuucgugcaccagcggauggcgucuaagauuggccgcugguacagcagaacgauguccaaaacaaagcggauggggauggaacucuauguuaaauacgacggagauccuuggaccgacucugaugcccuggcucccagcggcgugauggucuccauggaggaacccgggugguacagcuuuggauucgagaucaaggacaagaaaugcgaugugccuuguauuggcaucgagauggugcaugacgggggcaagaaaaccuggcacucugccgccacagcuaucuauugccugaugggauccggccagcuccugugggauaccgucacagggguugacauggcccuuuga

SEQ ID NO: 220721 - RNA, 1401 nt, Artificial Sequence; identical to SEQ ID NO: 220651
  derived and/or modified CDS sequence (opt5) from neuraminidase__InfluenzaB__ABL76973

SEQ ID NO: 220722 - RNA, 1401 nt, Artificial Sequence
  derived and/or modified CDS sequence (opt5) from neuraminidase__InfluenzaB__ABL76984
augcugcccagcaccauccagacacucacgcuguuccuuaccuccggcggggugcugcucucucuguacgucagcgccucccuuucuuaucugcucuacagcgacauucugcugaaguuuucccaaacagagaucaccgcuccuacaaugccgcucgauugcgccaacgcgucuaauguucaggcugugaaccugagcgccaccaaaggagugacacuucugcuccccgaaccugaguggaccuaucccagacuguccuguccuggcagcacguuccagaaggcccuucugauuucuccccaccgguuuggggaaaccaaaggaaauuccgcuccucucaucauucgcgagccguucaucgccugcggccccaaggaauguaaacauuuugcucugacacacuacgccgcgcagccugggggauauuacaacggcaccagagaggaccggaauaagcugcgccaucucaucagcgucaagcugggcaaaauucccacaguggagaacucuaucuuccacauggccgcuugguccgggagcgccugccaugauggaagagaauggaccuauauuggcguugacgggccugauucuaaugcccuucugaagaucaaauacggagaggcuuacacggacacauaucacuccuacgcgaacaauauucuccggacccaagaaagcgccuguaacugcaucggcgggaauuguuaucugaugauuacagauggauccgcuucuggcaucagcgagugccgcuuucuuaagaucagagagggccggauuaucaaagaaauuuuccccaccgggcgcguggagcacaccgaagaguguacaugcggauuugccuccaacaagacgaucgaaugugcuugcagagacaauagcuacaccgccaagcggccguucgucaaacugaacguggagacagauaccgccgagauucgccucaugugcacagaaaccuaucuggacacgccuagacccgaugacggcucuaucacagggccuugugaguccaauggagauaagggcagcgggggaaucaaaggcggcuuuguucaucagcggauggcuucuaagauugggcgcugguacagcagaaccauguccaaaaccaagcggaugggaaugggccuguaugugaaauacgacggggaccccuggacagauucugacgcgcucgcccugagcggagucaugguguccauggaggaacccggcugguacagcuucggguuugaaaucaaggauaagaaaugcgacgugccuuguauuggcaucgagaugguccacgauggaggcaagagaaccuggcauucugcugccacagccauuuauugccuuaugggguccggacagcugcucugggacacgguuaccggcguggauauggcucuguga

SEQ ID NO: 220723 - RNA, 1401 nt, Artificial Sequence; identical to SEQ ID NO: 220678
  derived and/or modified CDS sequence (opt5) from neuraminidase__InfluenzaB__ABL77006

SEQ ID NO: 220724 - RNA, 1401 nt, Artificial Sequence; identical to SEQ ID NO: 220722
  derived and/or modified CDS sequence (opt5) from neuraminidase__InfluenzaB__ABL77017

SEQ ID NO: 220725 - RNA, 1401 nt, Artificial Sequence
  derived and/or modified CDS sequence (opt5) from neuraminidase__InfluenzaB__ABL77028
augcugcccagcaccauccagacacucacgcuguuccuuaccuccggcggggugcugcucucucuguacgucagcgccucccuuucuuaucugcucuacagcgacauucugcugaaguuuuccccuacagagaucaccgcuccgacaaugccccucgauugcgccaacgcgucuaauguucaagcugugaacagaagcgccaccaaaggagugacacugcuucugccugaacccgaguggaccuauccucggcucuccugucccggcagcacguuccagaaggcccugcuuauuucuccucaccgcuuuggggaaaccaaaggaaauuccgcuccgcugaucauuagagagcccuucaucgccugcggcccuaaggaauguaaacauuuugcucucacacacuacgccgcgcagcccgggggauauuacaacggcacccgggaggaccgcaauaagcugagacaucugaucagcgucaagcucggcaaaauuccuacaguggagaacucuaucuuccacauggccgcuugguccgggagcgccugccaugauggaaaggaauggaccuauauuggcguugacgggcccgauucuaaugcucugcuuaaaaucaaguacggagaggccuacacggacacauaucacuccuacgcgaacaauauucugcggacccaggaaagcgccuguaacugcaucggcgggaauuguuaucucaugauuacagauggauccgcuucuggcaucagcgagugccgcuuucugaaaaucagagagggccggauuaucaaggaaauuuucccgaccgggcgcguggagcacaccgaagaguguacaugcggauuugccuccaacaagacgaucgaaugugcuugcagagacaauagcuacaccgccaaacggccuuucgucaaacuuaacguggagacagauaccgccgagauucgccugaugugcacagaaaccuaucucgacacgcccagaccugaugacggcucuaucacagggcccugugaguccaauggagauaagggcagcgggggaaucaagggcggcuuuguucaucaacggauggcuucuaaaauugggcgcugguacagcagaaccauguccaagaccaaacggaugggaaugggccuguaugugaaguacgacggggaccccuggacagauucugacgcgcuggcccucagcggagucaugguguccauggaggaaccuggcugguacagcuucggguuugaaaucaaggauaaaaagugcgacgugccguguauuggcaucgagaugguccacgauggaggcaaagagaccuggcauucugcugccacagccauuuauugccugaugggguccggacagcuucugugggacacgguuaccggcguggauauggcucucuga

SEQ ID NO: 220726 - RNA, 1401 nt, Artificial Sequence
  derived and/or modified CDS sequence (opt5) from neuraminidase__InfluenzaB__ABL77039
augcugcccagcaccauccagacacucacgcuguuccuuaccuccggcggggugcugcucucucuguacgucagcgccucccuuucuuaucugcucuacagcgacauucugcugaaguuuuccccuacagagaccacagcuccgaccaugccccucgauugcgccaacgcgucuaauguucaagcugugaacuguagcgccacaaaaggagugacccugcuucugccugaacccgaguggacguauccuagacucuccugccccggcagcaccuuccagaaggcccugcuuaucucuccucaccgguuuggggaaacaaaaggaaauuccgcuccgcugauuauccgcgagcccuucauugccuguggcccuaaggaaugcaaacauuuugcucucacccacuacgccgcgcagcccgggggauauuacaacggcacaagagaggaccggaauaagcugcgccaucugaucagcgucaagcucggcaaaaucccuaccguggagaacucuauuuuccacauggccgcuugguccgggagcgccugucaugauggaaaggaauggacguauaucggcguugacgggcccgauucuaaugcucugcuuaaaauuaaguacggagaggccuacacagacaccuaucacuccuacgcgaacaauauccugagaacacaggaaagcgccugcaacuguauuggcgggaauugcuaucucaugaucaccgauggauccgcuucuggcauuagcgagugucgguuucugaaaauccgcgagggcagaaucauuaaggaaaucuucccgaccgggcggguggagcacacagaagagugcacguguggauuugccuccaacaagaccauugaaugcgcuugccgcgacaauagcuacacagccaaaagaccuuucgucaaacuuaacguggagaccgauacagccgagauccggcugauguguaccgaaacguaucucgacacaccccgcccugaugacggcucuauuaccgggcccugcgaguccaauggagauaagggcagcgggggaaucaagggcggcuuuguucaucaaagaauggcuucuaaaaucgggcggugguacagccgcaccauguccaagacaaaaagaaugggaaugggccuguaugugaaguacgacggggaccccuggaccgauucugacgcgcuggcccucagcggagucaugguguccauggaggaaccuggcugguacagcuucggguuugaaauuaaggauaaaaagugugacgugccgugcaucggcauugagaugguccacgauggaggcaaagagacauggcauucugcugccacggccaucuauugucugaugggguccggacagcuucugugggacaccguuacaggcguggauauggcucucuga

SEQ ID NO: 220727 - RNA, 1401 nt, Artificial Sequence
  derived and/or modified CDS sequence (opt5) from neuraminidase__InfluenzaB__ABL77050
augcugcccagcaccauccagacacucacgcuguuccuuaccuccggcggggugcugcucucucuguacgucagcgccucccuuucuuaucugcucuacagcgacauucugcugaaguuuuccccuacagagaucaccgcuccggccaugccccucgauugcgcgaacgcuucuaauguucaagccgugaacagaagcgccacaaaaggagugacccugcuucugccugaacccgaguggacauauccucggcucuccugucccggcagcaccuuccagaaggcucugcuuauuucuccucaccgcuuuggggaaacgaaaggaaauuccgccccgcugaucauuagagagcccuucaucgcuugcggcccuaaggaauguaaacauuuugcccucacccacuacgcggcccagcccgggggauauuacaacggcacacgggaggaccgcaauaagcugagacaucugaucagcgucaagcucggcaaaauuccuaccguggagaacucuaucuuccacauggcugccugguccgggagcgcuugccaugauggaaaggaauggacauauauuggcguugacgggcccgauucuaaugcccugcuuaaaaucaaguacggagaggcguacaccgacacguaucacuccuacgccaacaauauucugcggacacaggaaagcgcuuguaacugcaucggcgggaauuguuaucucaugauuaccgauggauccgccucuggcaucagcgagugccgcuuucugaaaaucagagagggccggauuaucaaggaaauuuucccgacagggcgcgugaagcacaccgaggaauguaccugcggauuugcuuccaacaaaacaaucgagugugccugcagagacaauagcuacacggccaagcggccuuucgucaaacuuaacguggaaaccgauacagcugagauucgccugaugugcaccgagacauaucucgacacccccagaccugaugacggcucuaucacggggcccugugaauccaauggagauaagggcagcgggggaaucaaaggcggcuuuguucaucaacggauggcgucuaagauugggcgcugguacagcagaacaauguccaaaaccaagcggaugggaaugggccuguaugugaaguacgacggggaccccuggaccgauucugacgcccuggcucucagcggagucaugguguccauggaggaaccuggcugguacagcuucggguuugagaucaaagauaagaaaugcgacgugccguguauuggcaucgaaaugguccacgauggaggcaaggagacauggcauucugccgccaccgcuauuuauugccugaugggguccggacagcuucugugggacacaguuacgggcguggauauggcccucuga

SEQ ID NO: 220728 - RNA, 1401 nt, Artificial Sequence
  derived and/or modified CDS sequence (opt5) from neuraminidase__InfluenzaB__ABL77072
augcugcccagcaccauccagacacucacgcuguuccuuaccuccggcggggugcugcucucucuguacgucagcgcccuucuguccuaucuccuguacucugacauucugcucaaguuuagcccuacaaaaaucauugcuccgaccacaucccuggauucugccaacgcgagcaauuuccaagcuguuaaccacuccgccaccaaggagaugacauuucuucugcccgaaccugaguggaccuaucccagacucagcugccagggaucuacguuccagaaagcccugcuuaucuccccucaucgguuuggcgaagcuaaggggaauagcgcuccccugauuauccgcgagccuuucaucgccuguggaccgaaagaaugcaagcacuuugcccucacccauuacgcggcccagcccggcggguauuacaacggaacaagagaggaccggaauaagcugcgccaccugauuucugugaaccucggcaaaaucccuaccguggaaaauuccauuuuccauauggcugccuggagcggcucugcuugucacgaugggagagaguggacauauaucggagucgacggccccgauuccaacgcccugauuaagaucaaauacggggaggcguacaccgacacguaucacagcuacgccaauaacauucuucggacacaagaauccgcuugcaauuguaucggaggcgauugcuaucugaugaucaccgacgggucugccagcggaauuuccaagugucgcuuucucaaaaucagagagggccggauuaucaaggagauuuucccuacaggccgcguggaacauaccgaggaaugcaccuguggguuugcuagcaacaagacaaucgagugcgccuguagagauaauucuuacacggccaaacggcccuucguuaagcugaacguggaaaccgacacagcugagauccgccuuaugugcaccgagacauaucuggauaccccgagaccugacgauggauccauuacgggccccugcgaaagcaauggggacaaaggaucuggcgggaucaagggaggcuuuguccaccagcggauggcgagcaaaauuggccgcugguacuccagaacaaugucuaagaccaaacggauggggauggagcucuaugugaaguacgacggagauccuuggaccgacagcgaugcccuggcucccuccggcguuauggugagcaucaaggaaucugggugguacuccuucggauucgagauuaaagacaagaaaugugauguccccugcaucggcaucgaaauggugcaugacgggggcaagacaaccuggcacagcgccgccacagcuauuuauugucugaugggaucuggccagcuccugugggauacggugaccggggucgacauggcccuuuga

SEQ ID NO: 220729 - RNA, 1401 nt, Artificial Sequence; identical to SEQ ID NO: 220656
  derived and/or modified CDS sequence (opt5) from neuraminidase__InfluenzaB__ABL77083

SEQ ID NO: 220730 - RNA, 1401 nt, Artificial Sequence; identical to SEQ ID NO: 220656
  derived and/or modified CDS sequence (opt5) from neuraminidase__InfluenzaB__ABL77094

SEQ ID NO: 220731 - RNA, 1401 nt, Artificial Sequence
  derived and/or modified CDS sequence (opt5) from neuraminidase__InfluenzaB__ABL77105
augcugcccagcaccauccagacacucacgcuguuccuuaccuccggcggggugcugcucucucuguacgucagcgccucccuuucuuaucugcucuacagcgacauucugcugaaguuuuccucuacagagaucaccgcuccuacaaugccgcucgauugcgccaacgcgagcaauguucaagcugugaacagauccgccaccgaaggagugacacugcuucugcccgagccugaauggaccuauccccggcucagcuguccuggcucuacguuccagaaagcccugcuuauuagcccccaccgcuuuggggagaccaagggaaauuccgcuccucugaucauuagagaaccguucaucgccugcggccccaaagaguguaagcauuuugcucucacacacuacgccgcgcagccugggggauauuacaacggcacccgggaggaccgcaauaaacugagacaucugaucucugucaagcucggcaagauucccacaguggaaaacuccaucuuccacauggccgcuuggagcgggucugccugccaugauggaaaagaguggaccuauauuggcguugacgggccugauuccaaugcucugcuuaagaucaaauacggagaagccuacacggacacauaucacagcuacgcgaacaauauucugcggacccaggaguccgccuguaacugcaucggcgggaauuguuaucucaugauuacagauggaucugcuagcggcaucuccgagugccgcuuucugaagaucagagaaggccggauuaucaaagagauuuuccccaccgggcgcguggaacacaccgaggaauguacaugcggauuugccagcaacaagacgaucgagugugcuugcagagacaauucuuacaccgccaagcggccguucgucaaacuuaacguggagacagauaccgccgaaauucgccugaugugcacagagaccuaucucgacacgccuagacccgaugacggcuccaucacagggccuugugaaagcaauggagauaagggcucugggggaaucaaaggcggcuuuguucaucaacggauggcuagcaagauugggcgcugguacuccagaaccaugucuaaaaccaagcggaugggaaugggccuguaugugaaauacgacggggaccccuggacagauagcgacgcgcuggcccucuccggagucauggugagcauggaggaacccggcugguacucuuucggguuugagaucaaggauaagaaaugcgacgugccuuguauuggcaucgagaugguccacgauggaggcaaggaaaccuggcauuccgcugccacagccauuuauugccugauggggagcggacagcuucugugggacacgguuaccggcguggauauggcucucuga

SEQ ID NO: 220732 - RNA, 1401 nt, Artificial Sequence; identical to SEQ ID NO: 220656
  derived and/or modified CDS sequence (opt5) from neuraminidase__InfluenzaB__ABL77127

SEQ ID NO: 220733 - RNA, 1401 nt, Artificial Sequence
  derived and/or modified CDS sequence (opt5) from neuraminidase__InfluenzaB__ABL77138
augcugcccagcaccauccagacacucacgcuguuccuuaccuccggcggggugcugcucucucuguacgucagcgcccuucuguccuaucuccuguacucugacauucugcucaaguuuagcccuacaaaaaucauugcuccgaccacaucccuggauucugccaacgcgagcaauuuccaagcuguuaaccacuccgccaccaaggagaugacauuucuucugcccgaaccugaguggaccuaucccagacucagcugccagggaucuacguuccagaaagcccugcuuaucuccccucaucgguuuggcgaagcuaaggggaauagcgcuccccugauuauccgcgagccuuucaucgccuguggaccgaaagaaugcaagcacuuugcccucacccauuacgcggcccagcccggcggguauuacaacggaacaagagaggaccggaauaagcugcgccaccugauuucugugaaccucggcaaaaucccuaccguggaaaauuccauuuuccauauggcugccuggagcggcucugcuugucacgaugggagagaauggacauauaucggagucgacggccccgauuccaacgcccugauuaagaucaaauacggggaggcguacaccgacacguaucacagcuacgccaauaacauucuucggacacaagaauccgcuugcaauuguaucggaggcgauugcuaucugaugaucaccgacgggucugccagcggaauuuccaagugucgcuuucucaaaaucagagagggccggauuaucaaggagauuuucccuacaggccgcguggaacauaccgaggaaugcaccuguggguuugcuagcaacaagacaaucgagugcgccuguagagauaauucuuacacggccaaacggcccuucguuaagcugaacguggaaaccgacacagcugagauccgccuuaugugcaccgagacauaucuggauaccccgagaccugacgauggauccauuacgggccccugcgaaagcaauggggacaaaggaucuggcgggaucaagggaggcuuuguccaccagcggauggcgagcaaaauuggccgcugguacuccagaacaaugucuaagaccaaacggauggggauggagcucuaugugaaguacgacggagauccuuggaccgacagcgaugcccuggcucccuccggcguuauggugagcaucgaggagcccgggugguacucuuucggauucgaaauuaaggacaaaaagugugaugucccuugcaucggcaucgagauggugcaugacgggggcaaaacaaccugguauuccgccgccacagcuauuuacugucugaugggaagcggccagcuccugugggauacggugaccggggucgacauggcccuuuga

SEQ ID NO: 220734 - RNA, 1401 nt, Artificial Sequence; identical to SEQ ID NO: 220656
  derived and/or modified CDS sequence (opt5) from neuraminidase__InfluenzaB__ABL77149

SEQ ID NO: 220735 - RNA, 1401 nt, Artificial Sequence
  derived and/or modified CDS sequence (opt5) from neuraminidase__InfluenzaB__ABL77160
augcugcccagcaccauccagacacucacgcuguuccuuaccuccggcggggugcugcucucucuguacgucagcgccucccuuucuuaucugcucuacagcgacauucugcugaaguuuucccaaacaaaaaucaccgcuccuacaaugccgcucgauugcgccaacgcgucuaauguucaggcugugaacagaagcgccaccaagggagugacacugcuucugcccgagccugaauggaccuauccccggcucuccuguccuggcagcacguuccagaaagcccugcuuauuucuccccaccgcuuuggggagaccaagggaaauuccgcuccucugaucauuagagaaccguucaucgccugcggccccaaagaguguaagcauuuugcucucacacacuacgccgcgcagccugggggauauuacaacggcacccgggaagaccgcaauaagcugagacaucugaucagcgucaaacucggcaagauucccacaguggagaacucuaucuuccacauggccgcuugguccgggagcgccugccaugauggacgggaguggaccuauauuggcguugacgggccugauucuaaugcucugcuuaaaaucaaguacggagaagccuacacggacacauaucacuccuacgcgaaaaacauucugcgcacccaagagagcgccuguaauugcaucggcggggauuguuaucucaugauuacagacggauccgcuucuggcaucagcgaaugcagauuucugaagauccgggagggccgcauuaucaaggagauuuuccccaccgggagagugaaacacaccgaagaguguacaugcggauuugccuccaacaagacgaucgaaugugcuugccgggauaauagcuacaccgccaaacgcccguucgucaaacuuaacguggagacagacaccgccgaaauuagacugaugugcacagagaccuaucucgauacgccucggcccaaugacggcucuaucacagggccuugugaguccgauggagaccgcggcagcgggggaaucaagggcggcuuuguucaucagagaauggaaucuaagauugggcggugguacagcagaaccauguccaaaaccaagcgcaugggaaugggccuguaugugaaguacgacggggaucccuggacagacucugaggcucuggcgcucagcggagucaugguguccauggaggaacccggcugguacagcuucggguuugaaaucaaagauaagaaaugcgacgugccuuguauuggcaucgagaugguccacgauggaggcaagaccacauggcauucugccgcuacgaccauuuauugccugaugggguccggacagcuucugugggacacaguuaccggcguggauauggcccucuga

SEQ ID NO: 220736 - RNA, 1401 nt, Artificial Sequence; identical to SEQ ID NO: 220688
  derived and/or modified CDS sequence (opt5) from neuraminidase__InfluenzaB__ABL77171

SEQ ID NO: 220737 - RNA, 1401 nt, Artificial Sequence
  derived and/or modified CDS sequence (opt5) from neuraminidase__InfluenzaB__ABL77182
augcugcccagcaccauccagacacucacgcuguuccuuaccuccggcggggugcugcucucucuguacgucagcgcccuucuguccuaucuccuguacucugacauucugcucaaguuuagcccuacaaaaaucauugcuccgaccacaucccuggauucugccaacgcgagcaauuuccaagcuguuaaccacuccgccaccaaggagaugacauuucuucugcccgaaccugaguggaccuaucccagacucagcugccagggaucuacguuccagaaagcccugcuuaucuccccucaucgguuuggcgaagcuaaggggaauagcgcuccccugauuauccgcgagccuuucaucgccuguggaccgaaagaaugcaagcacuuugcccucacccauuacgcggcccagcccggcggguauuacaacggaacaagagaggaccggaauaagcugcgccaccugauuucugugaaccucggcaaaaucccuaccguggaaaauuccauuuuccauauggcugccuggagcggcucugcuugucacgaugggagagaauggacauauaucggagucgacggccccgauuccaacgcccugauuaagaucaaauacggggaggcguacaccgacacguaucacagcuacgccaauaacauucuucggacacaagaauccgcuugcaauuguaucggaggcgauugcuaucugaugaucaccgacgggucugccagcggaauuuccaagugucgcuuucucaaaaucagagagggccggauugugaaggagaucuucccuacaggccgcguugaacauaccgaggaaugcaccuguggguuugcuagcaacaagacaauugagugcgccuguagagauaauucuuacacggccaaacggcccuucgugaagcugaacgucgaaaccgacacagcugagauccgccuuaugugcaccgagacauaucuggauaccccgagaccugacgauggauccaucacgggccccugcgaaagcaauggggacaaaggaucuggcgggauuaagggaggcuuugugcaccagcggauggcgagcaaaaucggccgcugguacuccagaacaaugucuaagaccaaacggauggggauggagcucuauguuaaguacgacggagauccuuggaccgacagcgaugcccuggcucccuccggcgugauggucagcauugaggagcccgggugguacucuuucggauucgaaaucaaggacaaaaagugugaugugccuugcauuggcaucgagauggugcaugacgggggcaaaacaaccuggcacuccgccgccacagcuaucuauugucugaugggaagcggccagcuccugugggauacgauuaccggggucgacauggcccuuuga

SEQ ID NO: 220738 - RNA, 1401 nt, Artificial Sequence; identical to SEQ ID NO: 220663
  derived and/or modified CDS sequence (opt5) from neuraminidase__InfluenzaB__ABL77193

SEQ ID NO: 220739 - RNA, 1401 nt, Artificial Sequence
  derived and/or modified CDS sequence (opt5) from neuraminidase__InfluenzaB__ABL77204
augcugcccagcaccauccagacacucacgcuguuccuuaccuccggcggggugcugcucucucuguacgucagcgccucccuuucuuaucugcucuacagcgacauucugcugaaguuuuccccuacagagaucaccgcuccgacaaugccccucgauugcgccaacgcgucuaauguucaagcugugaacagaagcgccaccaaaggagugacacugcuuauuccugaacccgaguggaccuauccucggcuguccugucccggcagcacguuccagaaggcccuccugaucucuccucaccgcuuuggggaaaccaaaggaaauuccgcuccgcuuauuaucagagagcccuucaucgccugcggcccuaaggaauguaaacauuuugcucugacacacuacgccgcgcagcccgggggauauuacaacggcacccggggcgaccgcaauaagcucagacaucugauuagcgucaagcuggggaaaaucccuacaguggagaacucuauuuuccacauggccgcuugguccggaagcgccugccaugauggcaaggaguggaccuauaucgggguugacggacccgauaauucugcucuccugaaaauuaaguacggcgaagccuacacggacacauaucacuccuacgcgaacaauauccuucggacccaggagagcgccuguaacugcauugggggaaauuguuaucugaugaucacagauggcuccgcuucuggcgugagcgaaugccgcuuucucaaaaucagagaggggcggauuaucaaggagauuuucccgaccggacgcgucaagcacaccgaagaguguacaugcggcuuugccuccaacaaaacgaucgaaugugcuugcagagacaauagcuacaccgccaagcggccuuucgugaaacugaacguugagacagauaccgccgaaauucgccuuaugugcacagagaccuaucuggacacgcccagaccugaugacgggucuaucacaggacccugugaguccaauggcgauaaggggagcggaggcaucaaaggcggguuugugcaucaacggauggcuucuaagauuggacgcugguacagcagaaccauguccaaaaccaagcggaugggcauggggcucuaugucaaguacgacggagaccccugggcggauucugacgcccuggcucugagcggcgugaugguguccauggaggaaccugggugguacagcuucggcuuugaaaucaaagauaagaaaugcgacgucccguguauuggaaucgagaugguucacgauggcgggaaggaaacauggcauucugccgccaccgcuauuuauugccucaugggauccggccagcugcuuugggacacagugacggggguggauauggcccuguga

SEQ ID NO: 220740 - RNA, 1401 nt, Artificial Sequence
  derived and/or modified CDS sequence (opt5) from neuraminidase__InfluenzaB__ABL77215
augcugcccagcaccauccagacacucacgcuguuccuuaccuccggcggggugcugcucucucuguacgucagcgccucccuuucuuaucugcucuacagcgacauucugcugaaguuuccuuccacagagaucaccgcuccgacaaugccccucgauugcgccaacgcgucuaauguucaagcugugaacagaagcgccaccaaaggagugacacugcuucugccugaacccgaguggaccuauccucggcucuccugucccggcagcacguuccagaaggcccugcuuauuucuccucaccgcuuuggggaaaccaaaggaaauuccgcuccgcugaucauuagagagcccuucaucgccugcggcccuaaggaauguaaacauuuugcucucacacacuacgccgcgcagcccgggggauauuacaacggcacccggggcgaccgcaauaagcugagacaucugaucagcgucaagcucgggaaaauuccuacaguggagaacucuaucuuccacauggccgcuugguccggaagcgccugccaugauggcaaggaguggaccuauauugggguugacggacccgauaauaacgcucugcuuaaaaucaaguacggcgaagccuacacggacacauaucacucuuacgcgaauaacauucugcggacccaggaguccgccuguaauugcaucgggggaaacuguuaucucaugauuacagauggcagcgcuuccggcgugucugaaugccgcuuucugaaaaucagagaggggcggaucauuaaggagaucuucccgaccggacgcauuaagcacaccgaagaguguacaugcggcuuugccagcaauaaaacgaucgaaugugcuugcagagacaacuccuacaccgccaagcggccuuucgucaaacuuaauguggagacagauaccgccgaaauucgccugaugugcacagagaccuaucucgacacgcccagaccugaugacgggagcaucacaggacccugugagucuaacggcgauaagggguccggaggcaucaaaggcggguuuguucaucaacggauggcuagcaagauuggacgcugguacucuagaaccaugagcaaaaccaagcggaugggcauggggcuguaugugaaguacgacggagaccccugggcggauuccgacgcccuggcuuucucuggcgucauggugagcauggaggaaccugggugguacuccuuuggcuucgaaaucaaagauaagaaaugcgacgugccguguauuggaaucgagaugguccacgauggcgggaaggaaacauggcauagcgccgccaccgcuauuuauugccucaugggaucuggccagcugcuuugggacacaguuacgggggugaacauggcccuguga

SEQ ID NO: 220741 - RNA, 1401 nt, Artificial Sequence; identical to SEQ ID NO: 220699
  derived and/or modified CDS sequence (opt5) from neuraminidase__InfluenzaB__ABL77226

SEQ ID NO: 220742 - RNA, 1401 nt, Artificial Sequence
  derived and/or modified CDS sequence (opt5) from neuraminidase__InfluenzaB__ABL77237
augcugcccagcaccauccagacacucacgcuguuccuuaccuccggcggggugcugcucucucuguacgucagcgccucccuuucuuaucugcucuacagcgacauucugcugaaguuuuccccuacagagaucaccgcuccgacaaugccccucgauugcgccaacgcgucuaauguucaagcugugaacagaagcgccaccaaaggagugacacugcuucugccugaacccgaguggaccuauccucggcucuccugucccggcagcacguuccagaaggcccugcuuauuucuccucaccgcuuuggggaaaccaaaggaaauuccgcuccgcugaucauuagagagcccuucaucgccugcggcccuaacgaauguaagcauuuugcucucacacacuacgccgcgcagcccgggggauauuacaauggcacccggggcgaccgcaacaaacugagacaucugaucagcgucaagcucgggaagauuccuacaguggaaaauucuaucuuccacauggccgcuugguccggaagcgccugccaugauggcaaagaguggaccuauauugggguugacggacccgauaacaaugcucugcuuaagaucaaauacggcgaggccuacacggacacauaucacucuuacgcgaacaauauucugcggacccaggaguccgccuguaacugcaucgggggaaauuguuaucucaugauuacagauggcagcgcuuccggcgugucugaaugccgcuuucugaagaucagagaggggcggaucauuaaagagaucuucccgaccggacgcgucaagcacaccgaagaguguacaugcggcuuugccagcaacaagacgauugaaugugcuugcagagacaauuccuacaccgccaaacggccuuucgugaaacuuaacguugagacagauaccgccgaaauccgccugaugugcacagacaccuaucucgauacgcccagaccugacgaugggagcauuacaggacccugugagucuaacggcgacaagggguccggaggcaucaagggcggguuugugcaucaacggauggcuagcaaaaucggacgcugguacucuagaaccaugagcaagaccgagcggaugggcauggggcuguaugucaaauacgacggagaucccugggcggacuccgaugcccuggcuuucucuggcgugauggugagcaugaaggaaccugggugguacuccuuuggcuucgagauuaaggacaaaaagugcgaugucccguguaucggaauugaaaugguucacgacggcgggaaagagacauggcauagcgccgccaccgcuaucuauugccucaugggaucuggccagcugcuuugggauacagugacggggguggacauggcccuguga

SEQ ID NO: 220743 - RNA, 1401 nt, Artificial Sequence
  derived and/or modified CDS sequence (opt5) from neuraminidase__InfluenzaB__ABL77248
augcugcccagcaccauccagacacucacgcuguuccuuaccuccggcggggugcugcucucucuguacgucagcgcccuucuguccuaucuccuguacucugacauucugcucaaguuuagcccuacaaaaaucauugcuccgaccaugucccuggauugcgccaacgcgucuaauguucaagcugccaaccacagcgccacaaaggagaugaccuuccuucugcccgaaccugaguggacauaucccagacucuccugucagggaagcaccuuucagaaagcucugcuuaucucuccucaucgguucggcgaagccaagggaaauuccgcuccccugauuauccgcgagccuuuuaucgccugcgggccgaaagaauguaagcacuucgcgcucacgcauuacgccgcucagcccggcggguauuacaacggaaccagagaggaccggaauaagcugcgccaccugauuagcgugaaccucggcaaaaucccuacaguggaaaauucuauuuuucauauggccgcuugguccggcagcgccugccacgaugggagagaguggaccuauaucggagucgacggccccgauucuaacgcgcugauuaagaucaaauacggggaggccuacacagacaccuaucacuccuacgcuaauaacauucuucggacgcaagaaagcgccuguaauugcaucggaggcgauuguuaucugaugaucacagacggguccgcuucuggaauuagcaagugccgcuuccucaaaaucagagagggccggauuaucaaggagauuuuuccuaccggccgcguggaacauacagaggaauguaccugcggguucgccuccaacaagaccaucgagugugccugcagagauaauagcuacacagcuaaacggcccuuuguuaagcugaacguggaaacggacaccgcggagauccgccuuaugugcacagagaccuaucuggauacaccgagaccugacgauggaucuauuaccggccccugugaauccaauggggagaaaggacggggcgggaucaagggaggcuucguccaccagcgcauggccagcaaaauuggcagaugguacucucggacgaugagcaagacagaaagaauggggauggagcucuaugugaaauacgacggagacccuuggaccgauuccgacgcucuggcccccucuggcguuauggugagcaugaaggaacccgggugguacuccuuuggauucgagaucaaggauaaaaagugcgacgucccuuguauuggcaucgagauggugcaugaugggggcaaaaagaccuggcacagcgccgcuacagccaucuauugccugaugggaucuggccagcuccugugggacaccgugacaggggucgauauggcgcuuuga

SEQ ID NO: 220744 - RNA, 1401 nt, Artificial Sequence
  derived and/or modified CDS sequence (opt5) from neuraminidase__InfluenzaB__ABL77259
augcugcccagcaccauccagacacucacgcuguuccuuaccuccggcggggugcugcucucucuguacgucagcgccucccuuucuuaucugcucuacagcgacauucugcugaaguuuuccccuacagagaucaccgcuccgaaaguuccccucgauugcgccaacgcgucuaaugugcaagcugugaacagaagcgccacaaagggaaugacccugcuucuguccgaaccugaguggacauauccccggcucagcugucagggcucuaccuuccagaaagcccugcuuauuuccccucaccgcuuuggggaaacgagaggaaauagcgcuccccugaucauucgggagccuuucaucgccugcggcccgaaggaauguaaacauuuugcucucacccacuacgccgcgcagcccgggggauauuacaacggcacacgcgaggacagaaauaagcugcggcaucugaucucugucaagcucggcaaaauuccuaccguggagaacuccaucuuccacauggccgcuuggagcgggucugccugccaugauggacgcgaauggacauauauuggcguugacgggcccgauuccaaugcucugaucaagauuaaauacggagaggccuacaccgacacguaucacagcuacgcgaacaauauccuuagaacacaagaauccgccuguaacugcauuggcggggauuguuaucugaugaucaccgacggaucugcuagcggcaucuccaagugccgguuucucaaaauucgcgagggcagaaucauuaaggagaucuucccuacagggcggguggaacacaccgaggaauguaccugcggauuugccagcaauaagacaauugagugugcuugccgcgauaacucuuacacggccaaaagacccuucgucaagcugaauguggaaaccgacacagccgagauccggcuuaugugcaccgagacauaucuggauaccccgcgcccugacgauggcuccaucacggggcccugugaaagcaacggagacaaaggcagagggggaauuaagggcggcuuuguucaucagcggauggcuucuaaaaucgggagaugguacagccgcacaauguccaagaccgagcggaugggaauggaacucuaugugaaauacgacggcgauccuuggaccgacucugaugcgcuggcccccagcggggucaugguguccaugaaggagcccggaugguacagcuucggcuuugaaauuaaggacaaaaagugcgaugugccuuguaucgggauugagaugguccacgacggcggcaaaaagacauggcauucugcugccaccgccaucuauugccugaugggauccgggcagcuccugugggauacaguuacgggaguggacauggcucuuuga

SEQ ID NO: 220745 - RNA, 1401 nt, Artificial Sequence
  derived and/or modified CDS sequence (opt5) from neuraminidase__InfluenzaB__ABL77270
augcugcccagcaccauccagacacucacgcuguuccuuaccuccggcggggugcugcucucucuguacgucagcgccucccuuucuuaucugcucuacagcgacauucugcugaaguuuuccccuacagagaucaccgcuccgacaaugccccucgauugcgccaacgcgucuaauguucaagcugugaacagaagcgccaccaaaggaaugacacugcuucugccugaacccgaguggaccuauccucggcucuccugucccggcagcacguuccagaaggcccugcuuauuucuccucaccgcuuuggggaaaccagaggaaauuccgcuccgcugaucauucgggagcccuucaucgccugcggcccuaaagaauguaagcauuuugcucucacacacuacgccgcgcagcccgggggauauuacaacggcacccgcgaggacagaaauaaacugcggcaucugaucagcgugaagcucggcaagauuccuacagucgagaacucuaucuuccacauggccgcuugguccgggagcgccugccaugauggacgcgaauggaccuauauuggcguggacgggcccgauucuaaugcucugaucaaaauuaaguacggagaggccuacacggacacauaucacuccuacgcgaacaauauccuuagaacccaggaaagcgccuguaacugcauuggcggggauuguuaucugaugaucacagacggauccgcuucuggcaucagcaaaugccgguuucucaagauucgcgagggcagaaucauuaaagagaucuucccgaccgggcggguugaacacaccgaggaauguacaugcggauuugccuccaauaagacgauugagugugcuugccgcgauaacagcuacaccgccaagagaccuuucgugaaacugaaugucgaaacagacaccgccgagauccggcuuaugugcacagagaccuaucuggauacgccccgcccugacgauggcucuaucacagggcccugugaauccaacggagacaagggcagagggggaauuaaaggcggcuuugugcaucaacggauggcuagcaagaucgggagaugguacucucgcaccaugagcaaaaccgagcggaugggaauggaacucuauguuaaguacgacggcgaucccuggacagacuccgaggcgcuggccccuucuggggugauggucagcauggaggaaccgggaugguacuccuucggcuuugagauuaaagauaagaagugcgacgugcccuguaucgggauugaaauggugcacgauggcggcaaaaagaccuggcauagcgcugccacagccaucuauugccugaugggaucugggcagcuccugugggacacggucaccggaguugauauggcucuuuga

SEQ ID NO: 220746 - RNA, 1401 nt, Artificial Sequence
  derived and/or modified CDS sequence (opt5) from neuraminidase__InfluenzaB__ABL77281
augcugcccagcaccauccagacacucacgcuguuccuuaccuccggcggggugcugcucucucuguacgucagcguuucccuuucuuaucugcucuacagcgacauucugcugagauuuuccccuacagagaucaccgccccgacaaugccccucgauugcgcuaacgccucuaaugugcaagcggugaaccggagcgcuaccaagggaaugacacugcgccuuccugaacccgaguggaccuauccuagacuguccugucccggcagcacguuccagaaagcccuccugauuucuccucaccgguuuggggaaacccgcggaaauuccgccccgcuuaucauuagagagcccuucaucgcuugcggcccuaaggaauguaaacauuuugcccugacacacuacgcugcccagcccgggggauauuacaacggcacccgggaggaccgcaauaagcucagacaucugaucagcgucaaacugggcaagauuccuacaguggagaacucuaucuuccacauggcggccugguccgggagcgcuugccaugauggacgggaauggaccuauauuggcguugacgggcccgauucuaaugcccucaucaagauuaaauacggagaggcuuacacggacacauaucacuccuacgccaacaauauccugcgcacccaggaaagcgcguguaacugcauuggcggggauuguuaucuuaugaucacagacggauccgccucugagaucagcaagugcagauuucugaaaauucgggagggccgcaucauuaaggaaaucuucccgaccggcagaguggagcacaccgaagaguguacaugcggguuugcuuccaauaaaacgauugaaugugccugccgggauaacagcuacaccgcuaagcgcccuuucgucaagcucaauguggagacagacaccgccgagaucagacugaugugcacagaaaccuaucuugauacgccccggccugacgauggaucuaucacaggccccugugaguccaacggggacaaaggaagaggcgggauuaagggaggcuuuguucaucaacgcauggccagcaaaaucggccggugguacucuagaaccaugagcaagaccgaacgcauggggauggagcuguaugugaaauacgacggagaucccuggacagacuccgaagcucucgcgccuucuggcgucauggugagcauggaggagccggggugguacuccuucggauuugaaauuaaggauaaaaagugcgacgugcccuguaucggcauugagaugguccacgaugggggcaagaaaaccuggcauagcgccgcuacagccaucuauugccugaugggaucuggccagcugcucugggacacgguuaccgggguggauauggcccuguga

SEQ ID NO: 220747 - RNA, 1401 nt, Artificial Sequence
  derived and/or modified CDS sequence (opt5) from neuraminidase__InfluenzaB__ABL77292
augcugcccagcaccauccagacacucacgcuguuccuuaccuccggcggggugcugcucucucuguacgucagcgccucccuuucuuaucugcucuacagcggaguucugcugaaguuuuccccuacagagauuaccgcuccgacaaugccccucgacugcgccaacgcgucuaaugugcaagcugugaacagaagcgccaccaaaggcgucacacugcuucugccugaacccgaguggaccuauccucggcucuccugucccgggagcacguuccagaaggcccugcuuaucucuccucaccgcuuuggagaaaccagaggcaauuccgcuccgcugauuauccgggagcccuucauugccugcgggccuaaagaauguaagcauuuugcucucacacacuacgccgcgcagcccggaggcuauuacaacggcacccgcgaggauagaaauaaaaugcggcaucugaucagcgugaagcuggggaagaucccuacaguugagaacucuauuuuccacauggccgcuugguccggaagcgccugccaugacggccgcgaauggaccuauaucgggguggauggacccgacucuaaugcucucauuaaaaucaaguacggcgaggccuacacggauacauaucacuccuacgcgaacaauauucugagaacccaggaaagcgccuguaacugcaucgggggagacuguuaucuuaugauuacagauggcuccgcuucuggcaucagcaaaugccgguuucugaagauccgcgaggggagaauuaucaaagagauuuucccgaccggacgggucgaacacaccgaggaauguacaugcggcuuugccuccaauaagacgaucgagugugcuugccgcgacaacagcuacaccgccaagagaccuuucgugaaacucaauguugaaacagauaccgccgagauucggcugaugugcacagagaccuaucuugacacgccccgcccugaugacgggucuaucacaggacccugugaauccaacggcgauaaggggcugggaggcaucaaaggcggguuugugcaucaaagaauggcuagcaagauuggacggugguacucuagaaccaugagcaaaaccgagcgcaugggcauggaacucuaugucaaguacgacggggaccccuggacagauuccgacgcgcuggcccugucuggagugauggugagcauggaggaaccuggcugguacuccuucggguuugagaucaaagauaagaagugcgacgucccguguauuggcaucgagaugguucacgauggaggcaaaaagaccuggcauagcgcugccacagccauuuauugccucauggggucuggacagcugcuuugggacacggugaccggcguggauauggcucuguga

SEQ ID NO: 220748 - RNA, 1398 nt, Artificial Sequence
  derived and/or modified CDS sequence (opt5) from neuraminidase__InfluenzaB__ABL77303
augcugcccagcaccauccagacacucacgcuguuccuuaccuccggcggggugcugcucucucuguacgucagcgcccuucuguccuaucuccuguacucugacauucugcucaaguuuagcccuaaaaucauugcuccgacaaucucccuggauugcgccaacgcgucuaauguucaagcugugaaccacagcgccaccaaggagaugacauuccuucugcccgaaccugaguggaccuaucccagacucuccugucagggaagcauuuuucagaaagcccugcuuaucucuccucaucgguucggcgaagcuaagggaaauuccgcuccccugaucauucgcgagccuuuuaucgccugcgggccgaaagaauguaagcacuucgcccucacacauuacgcggcccagcccggcggguauuacaacggaaccagagaggaccggaauaagcugcgccaccugauuagcgugaaccucggcaaaaucccuacggucgaaaauucuauuuuucauauggcugccugguccggcagcgcuugccacgaugggagagaguggaccuauaucggaguggacggccccgauucuaacgcccugauuaagaucaaauacggggaggcguacacagacaccuaucacuccuacgccaauaacauccuucggacacaagaaagcgcuuguaauugcauuggaggcgauuguuaucugaugaucaccgacggguccgccucuggaauuagcaagugccgcuuccucaaaaucagagagggccggauuaucaaggagaucuuuccuacgggccgcguugaacauacagaggaauguaccugcggguucgcuuccaacaagacaauugagugugccugcagagauaauagcuacaccgccaaacggcccuuugugaagcugaacgucgaaaccgacacagcugagauccgccuuaugugcacggagaccuaucuggauacaccgagaccugacgauggaucuauuaccggccccugugaauccaauggggacaaaggacggggcggggugaagggaggcuucguucaccagcgcaucgcgagcaaaauuggcagaugguacucucggacaaugagcaagaccgagagaauggggauggaacucuaugugaaauacgacggagauccuuggacggacuccgaugcccuggcucccucuggcgucauggugagcauggaggaacccgggugguacuccuuuggauucgagaucaaggacaagaaaugcgaugugccuuguaucggcauugagaugguccaugacgggggcaagaaaacauggcacagcgccgccaccgcuaucuauugccugaugggaucuggccagcuccugugggauaccguuacagggguggacauggcccuuuga

SEQ ID NO: 220749 - RNA, 1398 nt, Artificial Sequence
  derived and/or modified CDS sequence (opt5) from neuraminidase__InfluenzaB__ABL77314
augcugcccagcaccauccagacacucacgcuguuccuuaccuccggcggggugcugcucucucuguacgucagcgcccuucuguccuaucuccuguacucugacguucugcucaaguuuagcccuaaaauuaucgcuccgacaaugucccuggauugcgccaacgcgucuaaugugcaagcugugaaccacagcgccaccgaggaaaugacauuccuucugcccgagccugaauggaccuaucccagacucuccugucagggaagcacauuucagaaggcccugcuuauuucuccucaucgguucggcgaggcuaaaggaaauuccgcuccccugaucauucgcgaaccuuuuaucgccugcgggccgaaggaguguaaacacuucgcccucacccauuacgcggcccagcccggcggguauuacaacggaacgagagaggaccggaauaagcugcgccaccugaucagcgucaaccucggcaagauuccuaccguggaaaauucuaucuuucauauggcugccugguccggcagcgcuugccacgaugggagagaguggacauauauuggaguugacggccccgauucuaacgcccugaucaaaauuaaguacggggaagcguacaccgacacauaucacuccuacgccaauaacauccuucggacccaagagagcgcuuguaauugcauuggaggcgauuguuaucugaugaucacggacggguccgccucuggaaucagcaaaugccgcuuccucaagauuagagagggccggaucauuaaagaaaucuuuccuacaggccgcguggagcauaccgaagaguguacaugcggguucgcuuccaacaagaccauugaaugugccugcagagauaauagcuacaccgccaagcggcccuuugucaaacugaacguggagacagacacggcugagauccgccuuaugugcaccgaaacauaucuggauaccccgagaccugacgauggaucuaucacaggccccugugaguccaauggggacaagggacacggcgggauuaaaggaggcuucguucaucagcggauggcgagcaagaucggccgcugguacucuagaaccaugagcaaaacgaagcggauggggauggaacucuaugugaaauacgacggagauccuuggacagacuccgaugcccuggcucccucuggcgucauggugagcauggaggaacccgggugguacuccuuuggauucgagauuagagacaagaagugcgaugugccuuguaucggcauugagaugguccacgacgggggcaaaaagaccuggcacagcgccgccaccgcuaucuauugccugaugggaucuggccagcuccugugggauacaguuaccgggguggacauggcccuuuga

SEQ ID NO: 220750 - RNA, 1401 nt, Artificial Sequence
  derived and/or modified CDS sequence (opt5) from neuraminidase__InfluenzaB__ABL77325
augcugcccagcaccauccagacacucacgcuguuccuuaccuccggcggggugcugcucucucuguacgucagcgcccuucuguccuauucucucuacagcgacauucugcugaaguuuuccccuacaaaaaccaucgcuccgacaaugucucucgauugcgccaacgcgagcaauguucaagcugugaaccacuccgccaccaagggaaugacacugcuucugcccgagccugaauggaccuaucccagacucagcugucagggcucuacguuccagaaagcccugcuuauuuccccucaucgguuuggggagaccaagggaaauagcgcuccccugaucauucgcgaaccuuucaucgccugcggcccgaaagaguguaagcacuuugcucucacacauuacgccgcgcagcccgggggauauuacaacggcaccagagaagaccggaauaagcugcgccaccugaucucugugucccucggcaaaauuccuacagucgagaacagcaucuuccauauggccgcuuggucuggguccgccugccacgauggaagagaguggaccuauauuggcguggacgggcccgauagcaaugcucugaucaagauuaaauacggagaagccuacacggacacauaucacuccuacgcgaacaauauccuucggacccaagagucugccuguaacugcauuggcggggauuguuaucugaugaucacagacggaagcgcuuccggcaucagcaagugccgcuuucucaaaauuagagaaggccggaucauuaaggagaucuucccuaccgggcgcguugaucauaccgaggaauguacaugcggauuugccucuaauaagacgauugagugugcuugcagagacaacuccuacaccgccaaacggcccuucgugaagcugaaugucgaaacagauaccgccgagauccgccuuaugugcacagaaaccuaucuggacacgccgagaccugaugacggcagcaucacagggcccugugagucuaacggagacaaaggccgcgggggaauuaagggcggcuuugugcaccagcggauggcuagcaaaaucgggagaugguacucccggaccaugucuaagaccgagagacucggaauggaacuguauguuaaauacgauggcgacccuuggacagauagcgacgcgcuggcccccuccggggugauggucagcgcugaggaacccggaugguacucuuucggcuuugagauuaaggauaagaaaugcgacgugccuuguaucgggauugaaauggugcaugauggcggaaagaaaaccuggcacuccgccgccacagcuaucuauugccucaugggcagcgggcagcugcuuugggacacggucaccggaguugauauggcccuguga

SEQ ID NO: 220751 - RNA, 1401 nt, Artificial Sequence
  derived and/or modified CDS sequence (opt5) from neuraminidase__InfluenzaB__ABL77336
augcugcccagcaccauccagacacucacgcuguuccuuaccuccggcggggugcugcucucucuguacgucagcgccucccuuucuuaucugcucuacagcgacauucugcugaaguuuuccccuacagagaucaccgcuccgcccaugccucucgauugcgccaacgcgucuaauguucaagcugugaacagaagcgccacaaaaggagugacccugcuucugcccgaaccugaguggacauauccccggcucuccuguccuggcagcaccuuccagaaggcccugcuuauuucuccgcaccgcuuuggggaaacgagaggaaauuccgcuccccugaucauucgggagccuuucaucgccugcggccccaaagaauguaagcauuuugcuaucacccacuacgccgcgcagccugggggauauuacaacggcacacgcgaggacagaaauaaacuccggcaucugauuagcgucaagcugggcaagauccccaccguggagaacucuauuuuccacauggccgcuugguccgggagcgccugccaugauggacgcgaauggacauauaucggcguugacgggccggauucuaaugcucuccugaaaauuaaguacggagaggccuacaccgacacguaucacuccuacgcgaacaauauccuuagaacacaggaaagcgccuguaacugcauuggcggggauuguuaucugaugaucaccgacggauccgcuucuggcaucagcaaaugccgguuucucaagauucgcgagggcagaaucauuaaagagaucuucccuacagggcggguggaacacaccgaggaauguaccugcggauuugccuccaauaagacaauugagugugcuugccgcgauaacagcuacacggccaagagacccuucgucaaacugaauguggaaaccgacacagccgagauccggcuuaugugcaccgagacauaucuggauaccccucgccccgacgauggcucuaucacggggcccugugaauccaacggagacaagggcagagggggaauuaaaggcggcuuuguucaucaacggauggcuagcaagaucgggagaugguacucucgcacaaugagcaaaaccgaccggaugggaauggagcucuaugugaaguacgauggcgacccuuggaccgauuccgacgcgcuggcccugucuggggucauggugagcauggaggaaccgggaugguacuccuucggcuuugaaauuaaagauaagaagugcgacgugcccuguaucgggauugagaugguccacgauggcggcaaaaagacauggcauagcgcugccaccacaaucuauugccucaugggaucugggcagcugcuuugggacacgguuaccggaguggauauggcccuguga

SEQ ID NO: 220752 - RNA, 1401 nt, Artificial Sequence
  derived and/or modified CDS sequence (opt5) from neuraminidase__InfluenzaB__ABL77347
augcugcccagcaccauccagacacucacgcuguuccuuaccuccggcggggugcugcucucucuguacgucagcgccucccuuucuuaucugcucuacagcgacauucugcugaaguuuuccccuacaaaaaucaccgcuccgacaaugccccucgauugcgccaacgcgucuaauguucaagcugugaaccacagcgccaccaagggagugacacugcuucugccugagcccgaauggaccuauccuagacucuccugucccggcagcacguuccagaaagcccugcuuauuucuccucaucgguuuggggagacccgcggaaauuccgcuccgcugaucauuagagaacccuucaucgccugcggcccuaaggaguguaaacacuuugcucucacacauuacgccgcgcagcccgggggauauuacaacggcacccgggaagaccgcaauaagcugagacaccugaucagcgucaagcucggcaaaauuccuacaguggagaacucuaucuuccauauggccgcuugguccgggagcgccugccacgauggacgggaguggaccuauauuggcguugacgggcccgauucuaaugcucugcuuaagaucaaauacggagaagccuacacggacacauaucacuccuacgcgaacaauauucugcgcacccaggagagcgccuguaacugcaucggcggggauuguuaucucaugauuacagacggauccgcuucuggcaucagcgaaugcagauuucugaagauccgggagggccgcauuaucaaagagauuuucccgaccgggagaguggaacauaccgaggaauguacaugcggauuugccuccaauaagacgaucgagugugcuugccgggauaacagcuacaccgccaagcgcccuuucgucaaacuuaauguggaaacagacaccgccgagauuagacugaugugcacagagaccuaucucgauacgccccggccugacgauggcucuaucacagggcccugugaauccaacggagacaagggcagcgggggaaucaaaggcggcuuuguucaccaacgcauggcuucuaagauugggagaugguacagccggaccauguccaaaaccaagagaaugggaaugggccuguaugugaaauacgacggggaucccuggacagacucugaugcgcuggcccucagcggagucaugguguccauggaggaaccuggcugguacagcuucggguuugagaucaaggacaagaaaugcgaugugccguguauuggcaucgaaaugguccaugacggaggcaagaaaaccuggcacucugcugccacagccauuuauugccugaugggguccggacagcuucugugggauacgguuaccggcguggacauggcucucuga

SEQ ID NO: 220753 - RNA, 1398 nt, Artificial Sequence
  derived and/or modified CDS sequence (opt5) from neuraminidase__InfluenzaB__ABL77380
augcugcccagcaccauccagacacucacgcuguuccuuaccuccggcggggugcugcucucucuguacgucagcgcccuucuguccuaucuccuguacucugacauucugcucaaguuuagcccuaaaaucauugcuccgacaaccucccuggauugcgccaacgcgucuaauguucaagcugugaaccacagcgccacaaaggagaugaaauuccuucccccugaacccgaguggaccuauccuagacuguccugucagggaagcacauuucagaaggcccuccugaucucuccccaucgguucggcgaagcuaaaggaaauuccgccccucuuauuauccgcgagccguuuaucgcuugcgggcccaaggaauguaagcacuucgcccugacccauuacgcggcccagccuggcggguauuacaacggaacgagagaggaccggaauaaacuccgccaccugauuagcgugaaccugggcaagauccccaccgucgaaaauucuauuuuucauauggcugccugguccggcagcgcuugccacgaugggagagaauggacauauaucggaguggacggcccugauucuaacgcccucauuaaaaucaaguacggggaggcguacaccgacacauaucacuccuacgccaauaacauucugcggacccaagaaagcgcuuguaauugcaucggaggcgauuguuaucuuaugaucacggacggguccgccucuggaauuagcaaaugccgcuuccugaagaucagagagggccggauuaucaaggagauuuuucccacaggccgcguugaacauaccgaggaauguacaugcggguucgcuuccaacaaaaccaucgagugugccugcagagauaauagcuacaccgccaagcggccguuugugaaacucaacgucgaaacagacacggcugagauccgccugaugugcaccgagacauaucuugauaccccuagacccgacgauggaucuauuacaggcccuugugaauccaauggggacaagggaagcggcggggugaaaggaggcuucguucaccagcggauggcgucuaagaucggccgcugguacagcagaaccauguccaaaacgaagcggauggggauggagcuguaugugaaguacgacggagaucccuggacagacucugaugcccucgcucccagcggcgucaugguguccauggaggagccugggugguacagcuuuggauucgaaauuaaagacaagaaaugcgaugugccguguaucggcauugagaugguccaugacgggggcaagagaaccuggcacucugccgccaccgcuaucuauugccugaugggauccggccagcugcucugggauacaguuaccggggugaacauggcccuguga

SEQ ID NO: 220754 - RNA, 1401 nt, Artificial Sequence
  derived and/or modified CDS sequence (opt5) from neuraminidase__InfluenzaB__ABL77391
augcugcccagcaccauccagacacucacgcuguuccuuaccuccggcggggugcugcucucucuguacgucagcgccucccuuucuuaucugcucuacagcgacauucugcugaaguuuuccccuacagagaucaccgcuccgacaaugccccucgauugcgccaacgcgucuaauguucaagcugugaacagaagcgccaccaaaggagugacacugcuucugccugaacccgaguggaccuauccucggcucuccugucccggcagcacguuccagaaggcccugcuuauuucuccucaccgcuuuggggaaaccaaaggaaauuccgcuccgcugaucauuagagagcccuucaucgccugcggcccuaaggaauguaaacauuuugcucucacacacuacgccgcgcagcccgggggauauuacaacggcacccggggcgaccgcaauaagcugagacaucugaucagcgucaagcucgggaaaauuccuacaguggagaacucuaucuuccacauggccgcuugguccggaagcgccugccaugauggcaaggaguggaccuauauugggguugacggacccgauaauaacgcucugcuuaaaaucaaguacggcgaagccuacacggacacauaucacucuuacgcgaauaacauucugcggacccaggaguccgccuguaauugcaucgggggaaacuguuaucucaugauuacagauggcagcgcuuccggcgugucugaaugccgcuuucugaaaaucagagaggggcggaucauuaaggagaucuucccgaccggacgcgucaagcacaccgaagaguguacaugcggcuuugccagcaauaaaacgauugaaugugcuugcagagacaacuccuacaccgccaagcggccuuucgugaaacuuaauguugagacagauaccgccgaaauccgccugaugugcacagagaccuaucucgacacgcccagaccugaugacgggagcauuacaggacccugugagucuaacggcgauaagggguccggaggcaucaaaggcggguuugugcaucaacggauggcuagcaagaucggacgcugguacucuagaaccaugagcaaaaccaagcggaugggcauggggcuguaugucaaguacgacggagaccccugggcggauuccgacgcccuggcucucucuggcgugauggugagcauggaggaaccugggugguacuccuucggcuuugaaauuaaagauaagaaaugcgacgucccguguaucggaauugagaugguucacgauggcgggaaggaaacauggcauagcgccgccaccgcuaucuauugccugaugggaucuggccagcuucugugggacacagugacggggguggauauggcccucuga

SEQ ID NO: 220755 - RNA, 1401 nt, Artificial Sequence
  derived and/or modified CDS sequence (opt5) from neuraminidase__InfluenzaB__ABL84344
augcugcccagcaccauccagacacucacgcuguuccuuaccuccggcggggugcugcucucucuguacgucagcgccucccuuucuuaucugcucuacagcgacauucugcugaaguuuuccucuacagagaucaccgcuccuacaaugccgcucaacugcgccaaugcgagcaacguucaagcugugaaucacuccgccaccaaaggagugacacugccccuuccugaacccgaguggaccuauccuagacugagcugucccggcucuacguuccagaaggcccuccugauuuccccucaucgguuuggggaaaccaaaggaaacagcgcuccgcuuaucauucgcgagcccuucaucgccugcggcccuaaggaauguaaacacuuugcucugacacauuacgccgcgcagcccgggggauauuacaauggcaccagagaggaucggaacaagcuccgccaccugaucucugucaagcugggcaaaauuccuacaguggaaaauuccaucuuccauauggccgcuuggagcgggucugccugccacgacggaagagaauggaccuauauuggcguugaugggcccgacuccaacgcucuccugaagaucaaauacggagaggccuacacggauacauaucacagcuacgcgaauaacauucuucggacccaggaauccgccuguaauugcaucggcggggacuguuaucugaugauuacagauggaucugcuagcggcguguccgagugccgcuuucucaagaucagagagggccggaucauuaaagaaaucuucccgaccgggcgcgucgagcauaccgaagaguguacaugcggauuugccagcaacaagacgauugaaugugcuugcagagacaauucuuacaccgccaagcggccuuucgugaaacugaacguugagacagauaccgccgagauccgccuuaugugcacagaaaccuaucuggacacgcccagaccugaugacggcuccauuacagggcccugugagagcaauggagauaagggcucugggggaaucaaaggcggcuuugugcaccaacggauggcuagcaagaucgggcgcugguacuccagaaccaugucuaaaaccaagcggaugggaaugggccucuaugucaaauacgacggggaccccuggauugauagcgacgcgcugacacuguccggagugauggugagcauggaggagccuggcugguacucuuucggguuugaaaucaaggauaagaaaugcgacgucccguguauuggcaucgagaugguucaugauggaggcaaggagaccuggcacuccgccgcuacagccauuuauugccucauggggagcggacagcugcuuugggacacggugaccggcguggauauggcccuguga

SEQ ID NO: 220756 - RNA, 1401 nt, Artificial Sequence
  derived and/or modified CDS sequence (opt5) from neuraminidase__InfluenzaB__ABN50397
augcugcccagcaccauccagacacucacgcuguuccuuaccuccggcggggugcugcucucucuguacgucagcgccucccuuucuuaucugcucuacagcgacauucugcugaaguuuuccccuacagagaucaccgcuccgacaaugccccucaacugcgccaaugcgucuaacguucaagcugugaauagaagcgccaccaaaggagugacacugcuucugccugaacccgaguggaccuauccucggcucuccugucccggcagcacguuccagaaggcccugcuuauuucuccucaccgcuuuggggaaaccaaaggaaacuccgcuccgcugaucauuagagagcccuucaucgccugcggcccuaaggaauguaaacauuuugcucucacacacuacgccgcgcagcccgggggauauuacaauggcacccgggaggaucgcaacaagcugagacaucugaucagcgucaagcucggcaaaauuccuacaguggaaaauucuaucuuccacauggccgcuugguccgggagcgccugccaugacggacgggaauggaccuauauuggcguugaugggcccgacucuaacgcucugcuuaagaucaaauacggagaggccuacacggauacauaucacuccuacgcgaauaacauucugcgcacccaggaaagcgccuguaauugcaucggcggggacuguuaucucaugauuacagauggauccgcuucuggcaucagcgagugcagauuucugaagauccgggagggccgcauuaucaaagaaauuuucccgaccgggagaguggagcacaccgaagaguguacaugcggauuugccuccaacaagacgaucgaaugugcuugccgggacaauagcuacaccgccaagcgcccuuucgucaaacuuaacguggagacagauaccgccgagauuagacugaugugcacagaaaccuaucucgacacgccccggccugaugacggcucuaucacagggcccugugaguccaauggagauaagggcagcgggggaaucaaaggcggcuuuguucaucaacgcauggcuucuaagauugggagaugguacagccggaccauguccaaaaccaagagaaugggaaugggccuguaugugaaauacgacggggaccccuggaucgauucugacgcgcugacacucagcggagucaugguguccauggaggagccuggcugguacagcuucggguuugaaauuaaggauaagaaaugcgacgugccguguaucggcauugagaugguccacgauggaggcaagaaaaccuggcauucugccgcuacagccaucuauugccugaugggguccggacagcuucugugggacacgguuaccggcguggauauggaccucuga

SEQ ID NO: 220757 - RNA, 1401 nt, Artificial Sequence
  derived and/or modified CDS sequence (opt5) from neuraminidase__InfluenzaB__ABN50408
augcugcccagcaccauccagacacucacgcuguuccuuaccuccggcggggugcugcucucucuguacgucagcgccucccuuucuuaucugcucuacagcgacauucugcugaaguuuuccccuacagagaucaccgcuccgacaaugccccucaacugcgccaaugcgucuaacguucaagcugugaauagaagcgccaccaaaggagugacacugccucuucccgaaccugaguggaccuauccccggcuguccuguccuggcagcacguuccagaaggcccuccugauuucuccgcaccgcuuuggggaaaccaaaggaaacuccgcuccccuuaucauuagagagccuuucaucgccugcggccccaaggaauguaaacauuuugcucugacacacuacgccgcgcagccugggggauauuacaauggcacccgggaggaucgcaacaagcucagacaucugaucagcgucaagcugggcaaaauucccacaguggaaaauucuaucuuccacauggccgcuugguccgggagcgccugccaugacggacgggaauggaccuauauuggcguugaugggccggacucuaacgcucuccugaagaucaaauacggagaggccuacacggauacauaucacuccuacgcgaauaacauucuucgcacccaggaaagcgccuguaauugcaucggcggggacuguuaucugaugauuacagauggauccgcuucuggcaucagcgagugcagauuucucaagauccgggagggccgcauuaucaaagaaauuuucccuaccgggagaguggagcacaccgaagaguguacaugcggauuugccuccaacaagacgaucgaaugugcuugccgggacaauagcuacaccgccaagcgccccuucgucaaacugaacguggagacagauaccgccgagauuagacuuaugugcacagaaaccuaucuggacacgccucggcccgaugacggcucuaucacagggcccugugaguccaauggagauaagggcagcgggggaaucaaaggcggcuuuguucaucaacgcauggcuucuaagauugggagaugguacagccggaccauguccaaaaccaagagaaugggaaugggccucuaugugaaauacgacggggacccuuggaucgauucugacgcgcugacacugagcggagucaugguguccauggaggagccgggcugguacagcuucggguuugaaauuaaggauaagaaaugcgacgugcccuguaucggcauugagaugguccacgauggaggcaagaaaaccuggcauucugccgcuacagccaucuauugccucaugggguccggacagcugcuuugggacacgguuaccggcguggauauggcccuguga

SEQ ID NO: 220758 - RNA, 1401 nt, Artificial Sequence
  derived and/or modified CDS sequence (opt5) from neuraminidase__InfluenzaB__ABN50419
augcugcccagcaccauccagacacucacgcuguuccuuaccuccggcggggugcugcucucucuguacgucagcgccucccuuucuuaucugcucuacagcgacauucugcugaaguuuuccccuacagagaucaccgcuccgacaaugccccucgauugcgccaacgcgucuaauguucaagcugugaacagaagcgccaccaaaggagugacacugcuucugccugaacccgaguggaccuauccucggcucuccugucccggcagcacguuccagaaggcccugcuuauuucuccucaccgcuuuggggaaaccaaaggaaauuccgcuccgcugaucauuagagagcccuucaucgccugcggcccuaaggaauguaaacauuuugcucucacacacuacgccgcgcagcccgggggauauuacaacggcacccggggcgaccgcaauaagcugagacaucugaucagcgucaagcucgggaaaauuccuacaguggagaacucuaucuuccacauggccgcuugguccggaagcgccugccaugauggcaaggaguggaccuauauugggguugacggacccgauucuaaugcucugcuuaaaaucaaguacggcgaagccuacacggacacauaucacuccuacgcgaacaauauucugcggacccaggagagcgccuguaacugcaucgggggaaauuguuaucucaugauuacagauggcuccgcuucuggcaucagcgaaugccgcuuucugaaaaucagagaggggcggauuaucaaggagauuuucccgaccggacgcgugaagcacaccgaagaguguacaugcggcuuugccuccaacaaaacgaucgaaugugcuugcagagacaauagcuacaccgccaagcggccuuucgucaaacuuaacguggagacagauaccgccgaaauucgccugaugugcacagagaccuaucucgacacgcccagaccugaugacgggucuaucacaggacugugugaguccaauggcgauaaggggagcggaggcaucaaaggcggguuuguucaucaacggauggcuucuaagauuggacgcugguacagcagaaccauguccaaaaccaagcggaugggcauggggcuguaugugaaguacgacggagaccccuggacagauucugacgcgcucgcccugagcggcgucaugguguccauggaggaacccgggugguacagcuucggcuuugaaaucaaagauaagaaaugcgacgugccuuguauuggaaucgagaugguccacgauggcgggaaggaaaccuggcauucugcugccacagccauuuauugccuuaugggauccggccagcugcucugggacacgguuaccgggguggauauggcucuguga

SEQ ID NO: 220759 - RNA, 1401 nt, Artificial Sequence
  derived and/or modified CDS sequence (opt5) from neuraminidase__InfluenzaB__ABN50430
augcugcccagcaccauccagacacucacgcuguuccuuaccuccggcggggugcugcucucucuguacgucagcgccucccuuucuuaucugcucuacagcgacauucugcugaaguuuuccccuacagagaucaccgcuccgacaaugccccucgauugcgccaacgcgucuaauguucaagcugugaacagaagcgccaccaaaggagugacacugcuucugccugaacccgaguggaccuauccucggcucuccugucccggcagcacguuccagaaggcccugcuuauuucuccucaccgcuuuggggaaaccaaaggaaauuccgcuccgcugaucauuagagagcccuucaucgccugcggcccuaaggaauguaaacauuuugcucucacacacuacgccgcgcagcccgggggauauuacaacggcacccggggcgaccgcaauaagcugagacaucugaucagcgucaagcucgggaaaauuccuacaguggagaacucuaucuuccacauggccgcuugguccggaagcgccugccaugauggcaaggaguggaccuauauugggguugacggacccgauucuaaugcucugcuuaaaaucaaguacggcgaagccuacacggacacauaucacuccuacgcgaacaauauucugcggacccaggagagcgccuguaacugcaucgggggaaauuguuaucucaugauuacagauggcuccgcuucuggcaucagcgaaugccgcuuucugaaaaucagagaggggcggauuaucaaggagauuuucccgaccggacgcgugaagcacaccgaagaguguacaugcggcuuugccuccaacaaaacgaucgaaugugcuugcagagacaauagcuacaccgccaagcggccuuucgucaaacuuaacguggagacagauaccgccgaaauucgccugaugugcacagagaccuaucucgacacgcccagaccugaugacgggucuaucacaggacccugugaguccaauggcgauaaggggagcggaggcaucaaaggcggguuuguucaucaacggauggcuucuaagauuggacgcugguacagcagaaccauguccaaaaccaagcggaugggcauggggcuguaugugaaguacgacggagaccccuggacagauucugacgcgcuggcccucagcggcgucaugguguccauggaggaaccugggugguacagcuucggcuuugaaaucaaagauaagaaaugcgacgugccguguauuggaaucgagaugguccacgauggcgggaaggaaaccuggcauucugcugccacagccauuuauugccugaugggauccggccagcuucugugggacacgguuaccgggguggauauggcucucuga

SEQ ID NO: 220760 - RNA, 1401 nt, Artificial Sequence; identical to SEQ ID NO: 220742
  derived and/or modified CDS sequence (opt5) from neuraminidase__InfluenzaB__ABN50463

SEQ ID NO: 220761 - RNA, 1401 nt, Artificial Sequence; identical to SEQ ID NO: 220656
  derived and/or modified CDS sequence (opt5) from neuraminidase__InfluenzaB__ABN50474

SEQ ID NO: 220762 - RNA, 1401 nt, Artificial Sequence
  derived and/or modified CDS sequence (opt5) from neuraminidase__InfluenzaB__ABN50485
augcugcccagcaccauccagacacucacgcuguuccuuaccuccggcggggugcugcucucucuguacgucagcgccucccuuucuuaucugcucuacagcgacauucugcugaaguuuuccccuacagagaucaccgcuccgacaaugccccucgauugcgccaacgcgucuaauguucaagcugugaacagaagcgccaccaaaggagugacacugcuucugccugaacccgaguggaccuauccucggcucuccugucccggcagcacguuccagaaggcccugcuuauuucuccucaccgcuuuggggaaaccaaaggaaauuccgcuccgcugaucauuagagagcccuucaucgccugcggcccuaaggaauguaaacauuuugcucucacacacuacgccgcgcagcccgggggauauuacaacggcacccggggcgaccgcaauaagcugagacaucugaucagcgucaagcucgggaaaauuccuacaguggagaacucuaucuuccacauggccgcuugguccggaagcgccugccaugauggcaaggaguggaccuauauugggguugacggacccgauucuaaugcucugcuuaaaaucaaguacggcgaagccuacacggacacauaucacuccuacgcgaacaauauucugcggacccaggagagcgccuguaacugcaucgggggaaauuguuaucucaugauuacagauggcuccgcuucuggcaucagcgaaugccgcuuucugaaaaucagagaggggcggauuaucaaggagauuuucccgaccggacgcgugaagcacaccgaagaguguacaugcggcuuugccuccaacaaaacgaucgaaugugcuugcagagacaauagcuacaccgccaagcggccuuucgucaaacuuaacguggagacagauaccgccgaaauucgccugaugugcacagagaccuaucucgacacgcccagaccugaugacgggucuaucacaggacccugugaguuuaauggcgauaagggguccggaggcaucaaaggcggguucguucaucaacggauggcuagcaagauuggacgcugguacucuagaaccaugagcaaaaccaagcggaugggcauggggcuguaugugaaguacgacggagaccccuggacagauuccgacgcgcuggcccucucuggcgucauggugagcauggaggaaccugggugguacuccuuuggcuucgaaaucaaagauaagaaaugcgacgugccguguauuggaaucgagaugguccacgauggcgggaaggaaaccuggcauagcgcugccacagccauuuauugccugaugggaucuggccagcuucugugggacacgguuaccgggguggauauggcucucuga

SEQ ID NO: 220763 - RNA, 1401 nt, Artificial Sequence
  derived and/or modified CDS sequence (opt5) from neuraminidase__InfluenzaB__ABN50496
augcugcccagcaccauccagacacucacgcuguuccuuaccuccggcggggugcugcucucucuguacgucagcgccucccuuucuuaucugcucuacagcgacauucugcugaaguuuccuuccacagagaucaccgcuccgacaaugccccucgauugcgccaacgcgucuaauguucaagcugugaacagaagcgccaccaaacgggugacacugcuucugccugaacccgaguggaccuauccucgccucuccugucccggaagcacguuccagaaggcccugcuuauuucuccucacagauuuggcgaaaccaaaggaaauuccgcuccgcugaucauucgggagcccuucaucgccugcgggccuaaggaauguaaacauuuugcucucacacacuacgccgcgcagcccggcggguauuacaacggaacccgcggcgacagaaauaagcugcggcaucugaucagcgucaagcucggcaaaauuccuacaguggagaacucuaucuuccacauggccgcuugguccgggagcgccugccaugauggaaaggaguggaccuauauuggcguugacgggcccgauaauaacgcucugcuuaaaaucaaguacggagaagccuacacggacacauaucacucuuacgcgaauaacauucugcgcacccaggaguccgccuguaauugcaucggcgggaacuguuaucucaugauuacagauggaagcgcuuccggcgugucugaaugcagauuucugaaaauccgggagggccgcaucauuaaggagaucuucccgaccgggagaauuaagcacaccgaagaguguacaugcggauuugccagcaauaaaacgaucgaaugugcuugccgggacaacuccuacaccgccaagcgcccuuucgucaaacuuaauguggagacagauaccgccgaaauuagacugaugugcacagagaccuaucucgacacgccccggccugaugacggcagcaucacagggcccugugagucuaacggagauaagggcuccgggggaaucaaaggcggcuuuguucaucaacgcauggcuagcaagauugggagaugguacucucggaccaugagcaaaaccaagagaaugggaaugggccuguaugugaaguacgacggggaccccugggcggauuccgacgcccuggcuuucucuggagucauggugagcauggaggaaccuggcugguacuccuuuggguucgaaaucaaagauaagaaaugcgacgugccguguauuggcaucgagaugguccacgauggaggcaaggaaacauggcauagcgccgccaccgcuauuuauugccucauggggucuggacagcugcuuugggacacaguuacgggcgugaacauggcccuguga

SEQ ID NO: 220764 - RNA, 1401 nt, Artificial Sequence
  derived and/or modified CDS sequence (opt5) from neuraminidase__InfluenzaB__ABN50507
augcugcccagcaccauccagacacucacgcuguuccuuaccuccggcggggugcugcucucucuguacgucagcgccucccuuucuuaucugcucuacagcgacauucugcugaaguuuuccccuacagagaucaccgcuccgacaaugccccucaacugcgccaaugcgucuaacguucaagcugugaauagaagcgccaccaaaggagugacacugccucuucccgaaccugaguggaccuauccccggcuguccuguccuggcagcacguuccagaaggcccuccugauuucuccgcaccgcuuuggggaaaccaaaggaaacuccgcuccccuuaucauuagagagccuuucaucgccugcggccccaaggaaugucggcauuuugcucugacacacuacgccgcgcagccugggggauauuacaauggcacccgcgaggauagaaacaaacuccggcaucugaucagcgucaagcugggcaagauucccacaguggaaaauucuaucuuccacauggccgcuugguccgggagcgccugccaugacggacgcgaauggaccuauauuggcguugaugggccggacucuaacgcucuccugaaaaucaaguacggagaggccuacacggauacauaucacuccuacgcgaauaacauucuuagaacccaggaaagcgccuguaauugcaucggcggggacuguuaucugaugauuacagauggauccgcuucuggcaucagcgagugccgguuucucaaaauccgcgagggcagaauuaucaaggaaauuuucccuaccgggcggguggagcacaccgaagaguguacaugcggauuugccuccaacaaaacgaucgaaugugcuugccgcgacaauagcuacaccgccaagagacccuucgucaagcugaacguggagacagauaccgccgagauucggcuuaugugcacagaaaccuaucuggacacgccucgccccgaugacggcucuaucacagggcccugugaguccaauggagauaaaggcagcgggggaaucaagggcggcuuuguucaucaaagaauggcuucuaaaauugggcggugguacagcagaaccauguccaagaccaaacgcaugggaaugggccucuaugugaaguacgacggggacccuuggaucgauucugacgcgcugacacugagcggagucaugguguccauggaggagccgggcugguacagcuucggguuugaaauuaaagauaagaagugcgacgugcccuguaucggcauugagaugguccacgauggaggcaaaaagaccuggcauucugccgcuacagccaucuauugccucaugggguccggacagcugcuuugggacacgguuaccggcguggauauggcccuguga

SEQ ID NO: 220765 - RNA, 1401 nt, Artificial Sequence; identical to SEQ ID NO: 220663
  derived and/or modified CDS sequence (opt5) from neuraminidase__InfluenzaB__ABN50518

SEQ ID NO: 220766 - RNA, 1401 nt, Artificial Sequence; identical to SEQ ID NO: 220663
  derived and/or modified CDS sequence (opt5) from neuraminidase__InfluenzaB__ABN50529

SEQ ID NO: 220767 - RNA, 1401 nt, Artificial Sequence; identical to SEQ ID NO: 220656
  derived and/or modified CDS sequence (opt5) from neuraminidase__InfluenzaB__ABN50540

SEQ ID NO: 220768 - RNA, 1401 nt, Artificial Sequence; identical to SEQ ID NO: 220688
  derived and/or modified CDS sequence (opt5) from neuraminidase__InfluenzaB__ABN50551

SEQ ID NO: 220769 - RNA, 1401 nt, Artificial Sequence
  derived and/or modified CDS sequence (opt5) from neuraminidase__InfluenzaB__ABN50562
augcugcccagcaccauccagacacucacgcuguuccuuaccuccggcggggcccugcucucucuguacgugagcgcccuucuguccuaucuccuguacucugacauucugcucaaguuuagcccuacaaaagucaucgccccgaccaugucccuggauuauacaaacgcgucuaauguucaagcugugaaccacagcgccaccgaggaaaugacauuccuucugcccgagccugaauggaccuaccccagacucuccugccagggaagcacguuucagaaggcccugcuuauuucuccucaucgguucggcgaggcuaaaggaaauuccgcuccccugaucauucgcgaaccuuuuaucgcuugugggccgaaggagugcaaacacuucgcccucacccauuaugcggcccagcccggcggguacuauaacggaacaagagaggaccggaauaagcugcgccaccugaucagcgugaaccucggcaagauuccuaccgucgaaaauucuaucuuucauauggcugccugguccggcagcgcuugucacgaugggagagaguggacauacauuggaguggacggccccgauucuaacgcccugaucaaaauuaaguacggggaagcguauaccgacacguaccacuccuaugccaauaacauccuucggacacaagagagcgcuugcaauuguauuggaggcgauugcuaccugaugaucaccgacggguccgccucuggaaucagccgcuguagauuccucaaaauucgggagggccgcaucauuaaggaaaucuuuccuacaggcagaguugagcauaccgaagagugcaccuguggguucgcuuccaacaaaacaauugaaugcgccugucgggauaauagcuauacggccaagcgccccuuugugaagcugaacgucgagaccgacacagcugagaucagacuuaugugcaccgaaacauaccuggauaccccgcggccugacgauggaucuaucacgggccccugcgaguccaauggggacaaaggaaacggcgggauuaagggaggcuucgugcaccagcgcauggcgagcagaaucggccggugguauucuagaacaaugagcaaaaccaagcgcauggggauggaacucuacguuaaauacgacggagauccuuggaccgacuccgaugcccuggcucccucuggcgugauggucagcauggaggaacccgggugguauuccuuuggauucgagauuaaggacaaaaagugugaugugccuugcaucggcauugagauggugcaugacgggggcaagaaaacauggcacagcgccgccaccgcuaucuacugucugaugggaucuggccagcuccugugggauacagucacggggguugacauggcccuuuga

SEQ ID NO: 220770 - RNA, 1401 nt, Artificial Sequence; identical to SEQ ID NO: 220759
  derived and/or modified CDS sequence (opt5) from neuraminidase__InfluenzaB__ABN50573

SEQ ID NO: 220771 - RNA, 1401 nt, Artificial Sequence
  derived and/or modified CDS sequence (opt5) from neuraminidase__InfluenzaB__ABN50584
augcugcccagcaccauccagacacucacgcuguuccuuaccuccggcggggugcugcucucucuguacgucagcgccucccuuucuuaucugcucuacagcgacauucugcugaaguuuuccccuacagagaucaccgcuucuacaaugccgcucgauugcgccaacgcgagcaauguucaagcugugaacagauccgccaccaaaggagugacacugcuucugcccgaaccugaguggaccuauccccggcucagcuguccuggcucuacguuccagaaggcccugcuuauuagcccccaccgcuuuggggaaaccaaaggaaauuccgcuccucugaucauuagagagccguucaucgccugcggccccaacgaauguaagcauuuugcucucacacacuacgccgcgcagccugggggauauuacaauggcacccggggcgaccgcaacaaacugagacaucugaucucugucaagcucgggaagauucccacaguggaaaauuccaucuuccacauggccgcuuggagcggaucugccugccaugauggcaaagaguggaccuauauugggguugacggaccugauaacaaugcucugcuuaagaucaaauacggcgaggccuacacggacacauaucacuccuacgcgaacaauauucugcggacccaggagagcgccuguaacugcaucgggggaaauuguuaucucaugauuacagauggcuccgcuucuggcgugagcgaaugccgcuuucugaagaucagagaggggcggaucauuaaagagaucuuccccaccggacgcgucaagcacaccgaagaguguacaugcggcuuugccuccaacaagacgauugaaugugcuugcagagacaauagcuacaccgccaaacggccguucgugaaacuuaacguugagucugauacagccgaaauccgccugaugugcaccgagacauaucucgacaccccuagacccgaugacggguccauuacgggaccuugugagagcaacggcgauaaggggucuggaggcaucaagggcggguuugugcaucaacggauggcuagcaaaaucggacgcugguacuccagaacaaugucuaagaccgaacggaugggcauggggcuguaugucaaauacgacggagaccccugggcggauagcgacgcccuggcucucuccggcgugauggugagcauggaggaacccgggugguacucuuucggcuuugagauuaaggauaagaaaugcgacgucccuuguaucggaauugaaaugguucacgauggcgggaaggagaccuggcauuccgccgccacagcuaucuauugccugaugggaagcggccagcuucugugggacaccgugacagggguggauauggcccucuga

SEQ ID NO: 220772 - RNA, 1401 nt, Artificial Sequence; identical to SEQ ID NO: 220656
  derived and/or modified CDS sequence (opt5) from neuraminidase__InfluenzaB__ABN50595

SEQ ID NO: 220773 - RNA, 1398 nt, Artificial Sequence
  derived and/or modified CDS sequence (opt5) from neuraminidase__InfluenzaB__ABN50606
augcugcccagcaccauccagacacucacgcuguuccuuaccuccggcggggugcugcucucucuguacgucagcgccucccuuucuuaucugcucuacagcgacauucugcugagauuuuccucuaagaucacagcuccuaccaugacacucgauugcgccaacgcgagcaauguucaagcugugaaccgguccgccaccaaagagaugacauuccugcuuccggaacccgaguggaccuauccucgccugagcugucagggaucuacguuucagaaggcccuccugauuucuccccacagauucggcgaagcucgggggaauagcgccccucuuaucauucgcgagcccuuuaucgcuugcggaccuaaagaauguaagcauuucgcccugacccacuacgcggcccagccgggcggguauuacaacggaacaagagaggaccggaauaaacuccgccaucugaucuccgugaagcugggcaagauucccaccgucgagaacuccaucuuucacauggcugccuggagcggcucugcuugccaugaugggagagaauggacauauauuggaguggacggcccugauuccaaugcccucaucaaaauuaaguacggggaggcguacaccgacacguaucacagcuacgccaacaauauccugcggacacaagaauccgcuuguaacugcauuggaggcgauuguuaucuuaugaucaccgacgggucugccagcggaaucuccgagugccgcuuccugaaaauuagagagggccggaucauuaaggaaaucuuucccacaggccgcguugagcacaccgaagaguguaccugcggguucgcuagcaauaaaacaauugaaugugccugcagagauaacucuuacacggccaagcggccuuuugugaagcucaaugucgagaccgacacagcugagauccgccugaugugcaccgaaacauaucuugauacccccagaccggacgauggauccaucacgggcccuugugagagcgacggggacaaaggacggggcgggauuaagggaggcuucgugcaucagagaauggcgucuaaaaucggccgcugguacagccggacaauguccaagaccgaaagaauggggauggagcuguauguuaaauacgauggagaccccuggaccgauucugacgcccucgcuccuagcggcgugauggucuccaugaaggaacccgggugguacagcuuuggauucgagauuaaagauaagaagugcgacgugcccuguaucggcauugagauggugcacgaugggggcaaaaagacauggcauucugccgccaccgcuaucuauugccugaugggauccggccagcugcucugggacacagucacggggguugauauggcccuguga

SEQ ID NO: 220774 - RNA, 1398 nt, Artificial Sequence
  derived and/or modified CDS sequence (opt5) from neuraminidase__InfluenzaB__ABN50628
augcugcccagcaccauccagacacucacgcuguuccuuaccuccggcggggugcugcucucucuguacgucagcgcccuucuguccuaucuccuguacucugacauucugcucaaguuuagcccuaaaaucauugcuccgacaaugucccuggauugcgccaacgcgucuaauguucaagcugugaaccacagcgccaccaaggagaugacauuccuucugcccgaaccugaguggaccuaucccagacucuccugucagggaagcacauuucagaaagcccugcuuaucucuccucaucgguucggcgaagcuaagggaaauuccgcuccccugauuauccgcgagccuuuuaucgccugcgggccgaaagaauguaagcacuucgcccucacccauuacgcggcccagcccggcggguauuacaacggaacgagagaggaccggaauaagcugcgccaccugauuagcgugaaccucggcaaaaucccuaccgucgaaaauucuauuuuucauauggcugccugguccggcagcgcuugccacgaugggagagaguggacauauaucggaguggacggccccgauucuaacgcccugauuaagaucaaauacggggaggcguacaccgacacauaucacuccuacgccaauaacauucuucggacccaagaaagcgcuuguaauugcaucggaggcgauuguuaucugaugaucacggacggguccgccucuggaauuagcaagugccgcuuccucaaaaucagagagggccggauuaucaaggagauuuuuccuacaggccgcguugaacauaccgaggaauguacaugcggguucgcuuccaacaagaccaucgagugugccugcagagauaauagcuacaccgccaaacggcccuuugugaagcugaacgucgaaacagacacggcugagauccgccuuaugugcaccgagacauaucuggauaccccgagaccugacgauggaucuauuacaggccccugugaauccaauggggacaaaggacggggcggggugaagggaggcuucguucaccagcgcauggcgagcaaaaucggcagaugguacucucggaccaugagcaagacggagagaauggggauggaacucuaugugaaauacgacggagauccuuggacagacuccgaugcccuggcucccucuggcgucauggugagcauggaggaacccgggugguacuccuuuggauucgagauuaaggacaagaaaugcgaugugccuuguaucggcauugagaugguccaugacgggggcaagaaaaccuggcacagcgccgccaccgcuaucuauugccugaugggaucuggccagcuccugugggauacaguuaccgggguggacauggcccuuuga

SEQ ID NO: 220775 - RNA, 1398 nt, Artificial Sequence
  derived and/or modified CDS sequence (opt5) from neuraminidase__InfluenzaB__ABN50639
augcugcccagcaccauccagacacucacgcuguuccuuaccuccggcggggugcugcucucucuguacgucagcgcccuucuguccuaucuccuguacucugacauucugcucaaguuuagcccuaaaaucauugcuccgacaaugucccuggauugcgccaacgcgucuaauguucaagcugugaaccacagcgccaccaaggagaugacauuccuucugcccgaaccugaguggaccuaucccagacucuccugucagggaagcacauuucagaaagcccugcuuaucucuccucaucgguucggcgaagcuaagggaaauuccgcuccccugauuauccgcgagccuuuuaucgccugcgggccgaaagaauguaagcacuucgcccucacccauuacgcggcccagcccggcggguauuacaacggaacgagagaggaccggaauaagcugcgccaccugauuagcgugaaacucggcaagaucccuaccgucgagaacucuauuuuucauauggcugccugguccggcagcgcuugccacgaugggagagaauggacauauaucggaguggacggccccgauucuaaugcccugguuaaaauuaaguacggggaggcguacaccgacacauaucacuccuacgccaacaauauccuucggacccaagaaagcgcuuguaacugcauuggaggcgauuguuaucugaugaucacggacggguccgccucuggaaucagcaaaugccgcuuccucaagauuagagagggccggaucauuaaggagaucuuuccuacaggccgcguggaacauaccgaggaauguacaugcggguucgcuuccaauaaaaccauugagugugccugcagagauaacagcuacaccgccaagcggcccuuugucaaacugaauguggaaacagacacggcugagauccgccuuaugugcaccgagacauaucuggauaccccgagaccugacgauggaucuaucacaggccccugugaauccaacggggacaagggacggggcgggguuaaaggaggcuucgugcaccagcgcauggcgagcaagauuggcagaugguacucucggaccaugagcaaaacggagagaauggggauggaacucuaugucaaguacgacggagauccuuggacagacuccgaugcccuggcucccucuggcgugauggugagcauggaggaacccgggugguacuccuuuggauucgagaucaaggacaaaaagugcgaugucccuuguauuggcaucgagaugguucaugacgggggcaaaaagaccuggcacagcgccgccaccgcuauuuauugccugaugggaucuggccagcuccugugggauacagugaccgggguggacauggcccuuuga

SEQ ID NO: 220776 - RNA, 1398 nt, Artificial Sequence
  derived and/or modified CDS sequence (opt5) from neuraminidase__InfluenzaB__ABN50650
augcugcccagcaccauccagacacucacgcuguuccuuaccuccggcggggugcugcucucucuguacgucagcgcccuucuguccuaucuccuguacucugacguucugcucaaguuuagcccuaaaauuaucgcuccgacaaugucccuggauugcgccaacgcgucuaaugugcaagcugugaaccacagcgccaccgaggaaaugacauuccuucugcccgagccugaauggaccuaucccagacucuccugucagggaagcacauuucagaaggcccugcuuauuucuccucaucgguucggcgaggcuaaaggaaauuccgcuccccugaucauucgcgaaccuuuuaucgccugcgggccgaaggaguguaaacacuucgcccucacccauuacgcggcccagcccggcggguauuacaacggaacgagagaggaccggaauaagcugcgccaccugaucagcgucaaccucggcaagauuccuaccguggaaaauucuaucuuucauauggcugccugguccggcagcgcuugccacgaugggagagaguggacauauauuggaguugacggccccgauucuaacgcccugaucaaaauuaaguacggggaagcguacaccgacacauaucacuccuacgccaauaacauccuucggacccaagagagcgcuuguaauugcauuggaggcgauuguuaucugaugaucacggacggguccgccucuggaaucagcaaaugccgcuuccucaagauuagagagggccggaucauuaaagaaaucuuuccuacaggccgcguggagcauaccgaagaguguacaugcggguucgcuuccaacaagaccauugaaugugccugcagagauaauagcuacaccgccaagcggcccuuugucaaacugaacguggagacagacacggcugagauccgccuuaugugcaccgaaacauaucuggauaccccgagaccugacgauggaucuaucacaggccccugugaguccaauggggacaagggacacggcgggauuaaaggaggcuucguucaucagcggauggcgagcaagaucggccgcugguacucuagaaccaugagcaaaacgaagcggauggggauggaacucuaugugaaauacgacggagauccuuggacagacuccgaugcccuggcucccucuggcgucauggugagcauggaggaacccgggugguacuccuuuggauucgagauuaaggacaagaaaugcgaugugccuuguaucggcauugagaugguccacgacgggggcaagaaaaccuggcacagcgccgccaccgcuaucuauugccugaugggaucuggccagcuccugugggauacaguuaccgggguggacauggcccuuuga

SEQ ID NO: 220777 - RNA, 1398 nt, Artificial Sequence
  derived and/or modified CDS sequence (opt5) from neuraminidase__InfluenzaB__ABN50661
augcugcccagcaccauccagacacucacgcuguuccuuaccuccggcggggugcugcucucucuguacgucagcgcccuucuguccuaucuccuguacucugacguucugcucaaguuuagcccuaaaaugauugcuccgacaaugucccuggauugcgccaacgcgucuaaugugcaagcugugaaccacagcgccaccgaggaaaugacauuccuucugcccgagccugaauggaccuaucccagacucuccugucagggaagcacauuucagaaggcccugcuuaucucuccucaucgguucggcgaggcuaaaggaaauuccgcuccccugauuauccgcgaaccuuuuauugccugcgggccgaaggaguguaaacacuucgcccucacccauuacgcggcccagcccggcggguauuacaacggaacgagagaggaccggaauaagcugcgccaccugaucagcgucaaccucggcaagaucccuaccguggaaaauucuauuuuucauauggcugccugguccggcagcgcuugccacgaugggagagaguggacauauaucggaguugacggccccgauucuaacgcccugauuaaaaucaaguacggggaagcguacaccgacacauaucacuccuacgccaauaacauucuucggacccaagagagcgcuuguaauugcaucggaggcgauuguuaucugaugauuacggacggguccgccucuggaaucagcaaaugccgcuuccucaagaucagagagggccggauuaucaaagaaauuuuuccuacaggccgcguggagcauaccgaagaguguacaugcggguucgcuuccaacaagaccaucgaaugugccugcagagauaauagcuacaccgccaagcggcccuuugucaaacugaacguggagacagacacggcugagauucgccuuaugugcaccgaaacauaucuggauaccccgagaccugacgauggaucuaucacaggccccugugaguccaauggggacaagggacacggcgggaucaaaggaggcuucguucaucagcggauggcgagcaagauuggccgcugguacucuagaaccaugagcaaaacgaagcggauggggauggaacucuaugugaaauacgacggagauccuuggacagacuccgaugcccuggcucccucuggcgucauggugagcauggaggaacccgggugguacuccuuuggauucgagaucaaggacaagaaaugcgaugugccuuguauuggcaucgagaugguccacgacgggggcaagaaaaccuggcacagcgccgccaccgcuauuuauugccugaugggaucuggccagcuccugugggauacaguuaccgggguggacauggcccuuuga

SEQ ID NO: 220778 - RNA, 1401 nt, Artificial Sequence
  derived and/or modified CDS sequence (opt5) from neuraminidase__InfluenzaB__ABN50683
augcugcccagcaccauccagacacucacgcuguuccuuaccuccggcggggugcugcucucucuguacgucagcgccucccuuucuuaucugcucuacagcgacauucugcugaaguuuuccccuacagagaucaccgcuccgacaaugccccucgauugcgccaacgcgucuaauguucaagcugugaacagaagcgccaccaaaggagugacacugcuucugccugaacccgaguggaccuauccucggcucuccugucccggcagcacguuccagaaggcccugcuuauuucuccucaccgcuuuggggaaaccagaggaaauuccgcuccgcugaucauucgggagcccuucaucgccugcggcccuaaagaauguaagcauuuugcucucacacacuacgccgcgcagcccgggggauauuacaacggcacccgcgaggacagaaauaaacugcggcaucugaucagcgucaagcucggcaagauuccuacaguggagaacucuaucuuccacauggccgcuugguccgggagcgccugccaugauggacgcgaauggaccuauauuggcguugacgggcccgauucuaaugcucugcuuaaaaucaaguacggagaggccuacacggacacauaucacuccuacgcgaacaauauucugagaacccaggaaagcgccuguaacugcaucggcggggauuguuaucucaugauuacagacggauccgcuucuggcaucagcaaaugccgguuucugaagauccgcgagggcagaauuaucaaagagauuuucccgaccgggcggguggaacacaccgaggaauguacaugcggauuugccuccaauaagacgaucgagugugcuugccgcgauaacagcuacaccgccaagagaccuuucgucaaacuuaauguggaaacagacaccgccgagauucggcugaugugcacagagaccuaucucgauacgccccgcccugacgauggcucuaucacagggcccugugaauccaacggagacaagggccucgggggaaucaaaggcggcuuuguucaucaaagaauggcuagcaagauugggcggugguacucuagaaccaugagcaaaaccaagcgcaugggaauggagcuguaugugaaauacgacggcgaucccuggacagacuccgaugcgcuggcccugucuggggucauggugccuauggaggaaccgggaugguacagcuucggcuuugaaaucaaggacaagaaaugcgaugugcccuguauugggaucgagaugguccacgacggcggaaagaaaaccuggcauuccgcugccacagccauuuauugccuuaugggcagcgggcagcugcucugggauacgguuaccggaguggacauggcucuguga

SEQ ID NO: 220779 - RNA, 1401 nt, Artificial Sequence
  derived and/or modified CDS sequence (opt5) from neuraminidase__InfluenzaB__ABN50694
augcugcccagcaccauccagacacucacgcuguuccuuaccuccggcggggugcugcucucucuguacgucagcgccucccuuucuuaucugcucuacagcgacauucugcugaaguuuuccccuacagagaucaccgcuccgacaaugccccucgauugcgccaacgcgucuaauguucaagcugugaacagaagcgccaccaaaggagugacacugcuucugccugaacccgaguggaccuauccucggcucuccugucccggcagcacguuccagaaggcccugcuuauuucuccucaccgcuuuggggaaaccagaggaaauuccgcuccgcugaucauucgggagcccuucaucgccugcggcccuaaagaauguaagcauuuugcucucacacacuacgccgcgcagcccgggggauauuacaacggcacccgcgaggacagaaauaaacugcggcaucugaucagcgucaagcucggcaagauuccuacaguggagaacucuaucuuccacauggccgcuugguccgggagcgccugccaugauggacgcgaauggaccuauauuggcguugacgggcccgauucuaaugcucugcuuaaaaucaaguacggagaggccuacacggacacauaucacuccuacgcgaacaauauucugagaacccaggaaagcgccuguaacugcaucggcggggauuguuaucucaugauuacagacggauccgcuucuggcaucagcaaaugccgguuucugaagauccgcgagggcagaauuaucaaagagauuuucccgaccgggcggguggaacacaccgaggaauguacaugcggauuugccuccaauaagacgaucgagugugcuugccgcgauaacagcuacaccgccaagagaccuuucgucaaacuuaauguggaaacagacaccgccgagauucggcugaugugcacagagaccuaucucgauacgccccgcccugacgauggcucuaucacagggcccugugaauccaacggagacaagggcagcgggggaaucaaaggcggcuuuguucaucaaagaauggcuucuaagauugggcggugguacagcagaaccauguccaaaaccaagcgcaugggaaugggccuguaugugaaauacgacggggaucccuggacagacucugaugcgcuggcccucagcggagucaugguguccauggaggaaccuggcugguacagcuucggguuugagaucaaggacaagaaaugcgaugugccguguauuggcaucgaaaugguccacgacggaggcaagaaaaccuggcauucugcugccacagccauuuauugccugaugggguccggacagcuucugugggauacgguuaccggcguggacauggcucucuga

SEQ ID NO: 220780 - RNA, 1398 nt, Artificial Sequence
  derived and/or modified CDS sequence (opt5) from neuraminidase__InfluenzaB__ABN50705
augcugcccagcaccauccagacacucacgcuguuccuuacccugggcggggugcuccugucccuuuacgucucugcccugcucagcuaucugcuguacuccgacguucuccugaaguuuucuccuaaaaugauugcuccgacaaugagccuugauugcgccaacgcguccaaugugcaagcugugaaccacucugccaccgaggaaaugacauuccugcuccccgagccugaauggaccuaucccagacugagcugucagggauccacauuucagaaggcccuucugaucagcccucaucgguucggcgaggcuaaaggaaauucugcuccccucauuauccgcgaaccuuuuauugccugcgggccgaaggaguguaaacacuucgcccugacccauuacgcggcccagcccggcggguauuacaacggaacgagagaggaccggaauaagcugcgccaccucaucuccgucaaccugggcaagaucccuaccguggaaaauagcauuuuucauauggcugccuggucuggcuccgcuugccacgaugggagagaguggacauauaucggaguugacggccccgauagcaacgcccuuauuaaaaucaaguacggggaagcguacaccgacacauaucacucuuacgccaauaacauucugcggacccaagaguccgcuuguaauugcaucggaggcgauuguuaucucaugauuacggacgggagcgccuccggaaucucuaaaugccgcuuccugaagaucagagagggccggauuaucaaagaaauuuuuccuacaggccgcguggagcauaccgaagaguguacaugcggguucgcuagcaacaagaccaucgaaugugccugcagagauaauuccuacaccgccaagcggcccuuugucaaacuuaacguggagacagacacggcugagauucgccugaugugcaccgaaacauaucucgauaccccgagaccugacgauggaagcaucacaggccccugugagucuaauggggacaagggacacggcgggaucaaaggaggcuucguucaucagcggauggcguccaagauuggccgcugguacagcagaaccaugucuaaaacgaagcggauggggauggaacuguaugugaaauacgacggagauccuuggacagacagcgaugcccuggcucccuccggcgucauggugucuauggaggaacccgggugguacagcuuuggauucgagaucaaggacaagaaaugcgaugugccuuguauuggcaucgagaugguccacgacgggggcaagaaaaccuggcacuccgccgccaccgcuauuuauugccucaugggaagcggccagcugcuuugggauacaguuaccgggguggacauggcccuguga

SEQ ID NO: 220781 - RNA, 1401 nt, Artificial Sequence
  derived and/or modified CDS sequence (opt5) from neuraminidase__InfluenzaB__ABN50716
augcugcccagcaccauccagacacucacgcuguuccuuaccuccggcggggugcugcucucucuguacgucagcgccucccuuucuuaucugcucuacagcggcauucugcugaaguuuuccccuacagagaucaccgcuccgacaaugccccucgacugcgccaacgcgucuaauguucaagcugugaacagaagcgccaccaaaggagugacacugcuucugccugaacccgaguggaccuauccucggcucuccugucccgggagcacguuccagaaggcccugcuuauuucuccucaccgcuuuggagaaaccagaggcaauuccgcuccgcugaucauucgggagcccuucaucgccugcgggccuaaagaauguaagcauuuugcucucacacacuacgccgcgcagcccggaggcuauuacaacggcacccgcgaggauagaaauaaacugcggcaucugaucagcgucaagcucgggaagauuccuacaguggagaacucuaucuuccacauggccgcuugguccggaagcgccugccaugacggccgcgaauggaccuauauugggguugauggacccgacucuaaugcucugcuuaaaaucaaguacggcgaggccuacacggauacauaucacuccuacgcgaacaauauucugagaacccaggaaagcgccuguaacugcaucgggggagacuguuaucucaugauuacagauggcuccgcuucuggcaucagcaaaugccgguuucugaagauccgcgaggggagaauuaucaaagagauuuucccgaccggacggguggaacacaccgaggaauguacaugcggcuuugccuccaauaagacgaucgagugugcuugccgcgacaacagcuacaccgccaagagaccuuucgucaaacuuaauguggaaacagauaccgccgagauucggcugaugugcacagagaccuaucucgacacgccccgcccugaugacgggucuaucacaggacccugugaauccaacggcgauaaggggagcggaggcaucaaaggcggguuuguucaucaaagaauggcuucuaagauuggacggugguacagcagaaccauguccaaaaccaagcgcaugggcauggggcuguaugugaaauacgacggagaccccuggacagauucugacgcgcuggcccucagcggcgucaugguguccauggaggaaccugggugguacagcuucggcuuugagaucaaggauaagaaaugcgacgugccguguauuggaaucgaaaugguccacgauggcgggaagaaaaccuggcauucugcugccacagccauuuauugccugaugggauccggccagcuucugugggacacgguuaccgggguggauauggcucucuga

SEQ ID NO: 220782 - RNA, 1401 nt, Artificial Sequence
  derived and/or modified CDS sequence (opt5) from neuraminidase__InfluenzaB__ABN50727
augcugcccagcaccauccagacacucacgcuguuccuuaccuccggcggggugcugcucucucuguacgucagcgccucccuuucuuaucugcucuacagcgacauucugcugaaguuuuccccuacagagaucaccgcuccgacaaugccccucgauugcgccaacgcgucuaauguucaagcugugaacagaagcgccaccaaaggagugacacugcuucugccugaacccgaguggaccuauccucggcucuccugucccggcagcacguuccagaaggcccugcuuauuucuccucaccgcuuuggggaaaccaaaggaaauuccgcuccgcugaucauuagagagcccuucaucgccugcggcccuaaggaauguaaacauuuugcucucacacacuacgccgcgcagcccgggggauauuacaacggcacccgggaggaccgcaauaagcugagacaucugaucagcgucaagcucggcaaaauuccuacaguggagaacucuaucuuccacauggccgcuugguccgggagcgccugccaugauggacgggaauggaccuauauuggcguugacgggcccgauucuaaugcucugcuuaagaucaaauacggagaggccuacacggacacauaucacuccuacgcgaacaauauucugcgcacccaggaaagcgccuguaacugcaucggcggggauuguuaucucaugauuacagacggauccgcuucuggcaucagcgagugcagauuucugaagauccgggagggccgcauuaucaaagaaauuuucccgaccgggagaguggagcacaccgaagaguguacaugcggauuugccuccaauaagacgaucgaaugugcuugccgggauaacagcuacaccgccaagcgcccuuucgucaaacuuaauguggagacagacaccgccgagauuagacugaugugcacagaaaccuaucucgauacgccccggccugacgauggcucuaucacagggcccugugaguccaacggagacaagggcagcgggggaaucaaaggcggcuuuguucaucaacgcauggcuucuaagauugggagaugguacagccggaccauguccaaaaccaagagaaugggaaugggccuguaugugaaauacgacggggaucccuggacagacucugaugcgcuggcccucagcggagucaugguguccauggaggaaccuggcugguacagcuucggguuugaaaucaaggacaagaaaugcgaugugccguguauuggcaucgagaugguccacgacggaggcaagaaaaccuggcauucugcugccacagccauuuauugccugaugggguccggacagcuucugugggauacgguuaccggcguggacauggcucucuga

SEQ ID NO: 220783 - RNA, 1401 nt, Artificial Sequence; identical to SEQ ID NO: 220725
  derived and/or modified CDS sequence (opt5) from neuraminidase__InfluenzaB__ABN50738

SEQ ID NO: 220784 - RNA, 1401 nt, Artificial Sequence
  derived and/or modified CDS sequence (opt5) from neuraminidase__InfluenzaB__ABN50749
augcugcccagcaccauccagacacucacgcuguuccuuaccuccggcggggugcugcucucucuguacgucagcgccucccuuucuuaucugcucuacagcgacauucugcugaaguuuuccccuacagagaucaccgcuccgacaaugccccucgauugcgccaacgcgucuaauguucaagcugugaacagaagcgccaccaaaggagugacacugcuucugccugaacccgaguggaccuauccucggcucuccugucccggcagcacguuccagaaggcccugcuuauuucuccucaccgcuuuggggaaaccaaaggaaauuccgcuccgcugaucauuagagagcccuucaucgccugcggcccuaaggaauguaaacauuuugcucucacacacuacgccgcgcagcccgggggauauuacaacggcacccggggcgaccgcaauaagcugagacaucugaucagcgucaagcucgggaaaauuccuacaguggagaacucuaucuuccacauggccgcuugguccggaagcgccugccaugauggcaaggaguggaccuauauugggguugacggacccgauucuaaugcucugcuuaaaaucaaguacggcgaagccuacacggacacauaucacuccuacgcgaacaauauucugcggacccaggagagcgccuguaacugcaucgggggaaauuguuaucucaugauuacagauggcuccgcuucuggcaucagcgaaugccgcuuucugaaaaucagagaggggcggauuaucaaggagauuuucccgaccggacgcgugaagcacaccgaagaguguacaugcggcuuugccuccaacaaaacgaucgaaugugcuugcagagacaauagcuacaccgccaagcggccuuucgucaaacuuaacguggagacagauaccgccgaaauucgccugaugugcacagagaccuaucucgacacgcccagaccugaugacgggucuaucacaggacccugugaguccaauggcgauaaggggagcggaggcaucaaaggcggguuuguucaucaacggauggcuucuaagauuggacgcugguacagcagaaccauguccaaaaccaagcggaugggcauggggcuguaugugaaguacgacggagaccccugggcggauucugacgcccuggcucucagcggcgucaugguguccauggaggaaccugggugguacagcuucggcuuugaaaucaaagauaagaaaugcgacgugccguguauuggaaucgagaugguccacgauggcgggaaggaaacauggcauucugccgccaccgcuauuuauugccugaugggauccggccagcuucugugggacacaguuacggggguggauauggcccucuga

SEQ ID NO: 220785 - RNA, 1398 nt, Artificial Sequence
  derived and/or modified CDS sequence (opt5) from neuraminidase__InfluenzaB__ABN51188
augcugcccagcaccauccagacacucacgcuguuccuuaccuccggcggggugcugcucucucuguacgucagcgcccuucuguccuaucuccuguacucugacauucugcucaaguuuagcccuaaaaucauugcuccgacaaugcugcuugauugcgccaacgcguccaauguucaagcugugaaccacucugccaccaaggagaugacauuccugcuccccgaaccugaguggaccuaucccagacugagcugucagggauccacauuucagaaagcccuucugaucagcccucaucgguucggcgaagcuaagggaaauucugcuccccucauuauccgcgagccuuuuaucgccugcgggccgaaagaauguaagcacuucgcccugacccauuacgcggcccagcccggcggguauuacaacggaacgagagaggaccggaauaagcugcgccaccucauuuccgugaaccugggcaaaaucccuaccgucgagaauagcauuuuucauauggcugccuggucuggcuccgcuugccacgaugggagagaauggacauauaucggaguggacggccccgauagcaacgcccuuauuaagaucaaauacggggaggcguacaccgacacauaucacucuuacgccaauaacauucugcggacccaagaauccgcuuguaauugcaucggaggcgauuguuaucucaugaucacggacgggagcgccuccggaauuucuaagugccgcuuccugaaaaucagagagggccggauuaucaaggagauuuuuccuacaggccgcguugaacauaccgaggaauguacaugcggguucgcuagcaacaagaccaucgagugugccugcagagauaauuccuacaccgccaaacggcccuuugugaaacuuaacgucgaaacagacacggcugagauccgccugaugugcaccgagacauaucucgauaccccgagaccugacgauggaagcauuacaggccccugugaaucuaauggggacaagggacggggcggggugaagggaggcuucguucaccagcgcauggcguccaaaaucggcagaugguacagccggaccaugucuaagacggagagaauggggauggaacuguaugugaaauacgacggagauccuuggacagacagcgaugcccuggcucccuccggcgucauggugucuauggaggaacccgggugguacagcuuuggauucgagauuaaggacaagaaaugcgaugugccuuguaucggcauugagaugguccaugacgggggcaagaaaaccuggcacuccgccgccaccgcuaucuauugccucaugggaagcggccagcugcuuugggauacaguuaccgggguggacauggcccuguga

SEQ ID NO: 220786 - RNA, 1398 nt, Artificial Sequence; identical to SEQ ID NO: 220774
  derived and/or modified CDS sequence (opt5) from neuraminidase__InfluenzaB__ABN51199

SEQ ID NO: 220787 - RNA, 1401 nt, Artificial Sequence
  derived and/or modified CDS sequence (opt5) from neuraminidase__InfluenzaB__ABN58665
augcugcccagcaccauccagacacucacgcuguuccuuaccuccggcggggugcugcucucucuguacgucagcgcccuucuguccuaucuccuguacucugacauucugcucaaguuuagcccuacaaaaaucauugcuccgaccaugucccuggauugcgccaacgcgucuaauguucaagcugugaaccacagcgccacagaggaaaugaccuuccuucugcccgagccugaauggacauaucccagacucuccugucagggaagcaccuuucagaaggcccugcuuaucucuccucaucgguucggcgaggcuaaaggaaauuccgcuccccugauuauccgcgaaccuuuuaucgccugcgggccgaaggaguguaaacacuucgcccucacgcauuacgcggcccagcccggcggguauuacaacggaaccagagaggaccggaauaagcugcgccaccugauuagcgugaaccucggcaagaucccuacagucgaaaauucuauuuuucauauggcugccugguccggcagcgcuugccacgaugggagagaguggaccuauaucggaguggacggccccgauucuaacgcccugauuaaaaucaaguacggggaagcguacacagacaccuaucacuccuacgccaauaacauucuucggacgcaagagagcgcuuguaauugcaucggaggcgauuguuaucugaugaucacagacggguccgccucuggaauuagcaaaugccgcuuccucaagaucagagagggccggauuaucaaagaaauuuuuccuaccggccgcguugagcauacagaagaguguaccugcggguucgcuuccaacaagaccaucgaaugugccugcagagauaauagcuacacagccaagcggcccuuugugaaacugaacgucgagacggacaccgcugagauccgccuuaugugcacagaaaccuaucuggauacaccgagaccugacgauggaucuauuaccggccccugugaguccaaugggggaaagggcagcgggggaaucaaaggcggcuucgugcaccagcggauggcgucuaagauugggcgcugguacagcagaacgauguccaaaacaaagcggaugggaauggaacucuauguuaaauacgacggcgacccuuggaccgauucugacgcccuggcucccagcggggugauggucuccauggaggaacccggaugguacagcuuuggcuucgagaucaaggauaagaaaugcgacgugccuuguauugggaucgagauggugcaugauggcggaaagaaaaccuggcacucugccgccacagcuaucuauugccugaugggcuccgggcagcuccugugggacaccgucacaggaguugauauggcccuuuga

SEQ ID NO: 220788 - RNA, 1401 nt, Artificial Sequence; identical to SEQ ID NO: 220675
  derived and/or modified CDS sequence (opt5) from neuraminidase__InfluenzaB__ABN59449

SEQ ID NO: 220789 - RNA, 1398 nt, Artificial Sequence; identical to SEQ ID NO: 220753
  derived and/or modified CDS sequence (opt5) from neuraminidase__InfluenzaB__ABR15999

SEQ ID NO: 220790 - RNA, 1401 nt, Artificial Sequence; identical to SEQ ID NO: 220782
  derived and/or modified CDS sequence (opt5) from neuraminidase__InfluenzaB__ABR16010

SEQ ID NO: 220791 - RNA, 1401 nt, Artificial Sequence
  derived and/or modified CDS sequence (opt5) from neuraminidase__InfluenzaB__ABR16021
augcugcccagcaccauccagacacucacgcuguuccuuaccuccggcggggugcugcucucucuguacgucagcgccucccuuucuuaucugcucuacagcgacauucugcugaaguuuuccccuacagagaucaccgcuccgacaaugccccucgauugcgccaacgcgucuaauguucaagcugugaacagaagcgccaccaaaggagugacacugcuucugccugaacccgaguggaccuauccucggcucuccugucccggcagcacguuccagaaggcccugcuuauuucuccucaccgcuuuggggaaaccaaaggaaauuccgcuccgcugaucauuagagagcccuucaucgccugcggcccuaacgaauguaagcauuuugcucucacacacuacgccgcgcagcccgggggauauuacaauggcacccggggcgaccgcaacaaacugagacaucugaucagcgucaagcucgggaagauuccuacaguggaaaauucuaucuuccacauggccgcuugguccggaagcgccugccaugauggcaaagaguggaccuauauugggguugacggacccgauaacaaugcucugcuuaagaucaaauacggcgaggccuacacggacacauaucacucuuacgcgaacaagauucugcggacccaggaguccgccuguaauugcaucgggggaaacuguuaucucaugauuacagauggcagcgcuuccggcgugucugaaugccgcuuucugaaaaucagaaaggggcggaucauuaaggagaucuucccgaccggacgcgucaaacacaccgaggaauguacaugcggcuuugccagcaauaagacgauugagugugcuugcagagacaacuccuacaccgccaaacggccuuucgugaaacuuaauguugaaacagauaccgccgagauccgccugaugugcacagacaccuaucucgauacgcccagaccugacgaugggagcauuacaggacccugugaaucuaacggcgacaagggguccggaggcaucaagggcggguuugugcaucaacggauggcuagcaaaaucggacgcugguacucuagaaccaugagcaagaccgagcggaugggcauggggcuguaugucaaguacgacggagaucccugggcggacuccgaugcccuggcuuucucuggcgugauggugagcaugaaagagccugggugguacuccuuuggcuucgaaauuaaggacaaaaagugcgaugucccguguaucggaauugagaugguucacgacggcgggaaagaaacauggcauagcgccgccaccgcuaucuauugccucaugggaucuggccagcugcuuugggauacagugacggggguggacauggcccuguga

SEQ ID NO: 220792 - RNA, 1401 nt, Artificial Sequence; identical to SEQ ID NO: 220707
  derived and/or modified CDS sequence (opt5) from neuraminidase__InfluenzaB__ACA64903

SEQ ID NO: 220793 - RNA, 1401 nt, Artificial Sequence
  derived and/or modified CDS sequence (opt5) from neuraminidase__InfluenzaB__ACA64914
augcugcccagcaccauccagacacucacgcuguuccuuaccuccggcggggugcugcucucucuguacgucagcgccucccuuucuuaucugcucuacagcgacauucugcugaaguuuucccaaacagagaucaccgcuccuauuaugccgcucgauugcgccaacgcgucuaauguucaggcugugaacagaagcgccgccaaaggagugacacugcuucugcccgaaccugaguggaccuauccccggcucuccuguccuggcagcacauuccagaaggcucugcuuaucucuccccaccgcuuuggggaaaccaaaggaaauuccgccccucugauuaucagagagccguucaucgcuugcggccccacggaauguaagcauuuugcccucacccacuacgcggcccagccugggggauauuacaacggcacacgggaggaccgcaauaaacugagacaucugauuagcgucaagcucggcaagauccccaccguggagaacucuauuuuccacauggcugccugguccgggagcgcuugccaugauggaaaagaauggacauauguuggcguggacgggccugauucuaaugcccugcuuaagaucaaauacggagaggcguacaccgacacguaucacuccuacgccaagaacauucugcggacacaagaaagcgcuuguaauugcaucggcggggauuguuaucucaugauuaccgacggacccgccuccggcaucucugagugccgcuuucugaaaaucagagagggccggauuaucaaggaaauuuucccgacagggcgcgucaagcacaccgaggaauguaccugcggauuugcuagcaacaaaacaaucgagugugccugcagagauaauuccuacacggccaagcggccuuucgugaaacuuaacguugaaaccgacacagcugagauucgccugaugugcaccgagacauaucucgauacccccagaccuaaugacggcagcaucacggggcccugugaaucugauggagacaagggcuccgggggaaucaaaggcggcuuugugcaucagcggauggcgagcaagauugggcgcugguacucuagaacaaugagcaaaaccaagcggaugggaaugggccuguaugucaaguacgacggggaucccuggaccgacuccgaggcccuggcucucucuggagugauggugagcauggaugaaccuggcugguacuccuucggguuugagaucaaagacaagaaaugcgaugucccguguauuggcaucgaaaugguucacgacggaggcaagacaaccuggcauagcgccgccacagcuauuuauugccugauggggucuggacagcuucugugggauacggugaccggcguggacauggcccucuga

SEQ ID NO: 220794 - RNA, 1401 nt, Artificial Sequence; identical to SEQ ID NO: 220707
  derived and/or modified CDS sequence (opt5) from neuraminidase__InfluenzaB__ACA64936

SEQ ID NO: 220795 - RNA, 1401 nt, Artificial Sequence
  derived and/or modified CDS sequence (opt5) from neuraminidase__InfluenzaB__ACA64969
augcugcccagcaccauccagacacucacgcuguuccuuaccuccggcggggugcugcucucucuguacgucagcgccucccuuucuuaucugcucuacagcgacauucugcugaaguuuuccccuacagagaucaccgcuccgacaaugccccucgauugcgccaacgcgucuaauguucaagcugugaacagaagcgccgccaaaggagugacccugcuucugccugaacccgaguggacauauccucggcucuccugucccggcagcaccuuccagaaggcucugcuuauuucuccucaccgcuuuggggaaacgaaaggaaauuccgccccgcugaucauuagagagcccuucaucgcuugcggcccuaacgaauguaagcauuuugcccucacccacuacgcggcccagcccgggggauauuacaauggcacacggggcgaccgcaacaaacugagacaucugaucagcgucaagcucgggaagauuccuaccguggaaaauucuaucuuccacauggcugccugguccggaagcgcuugccaugauggcaaagaguggacauauauugggguugacggacccgauaacaaugcccugcuuaagaucaaauacggcgaggcguacaccgacacguaucacucuuacgccaacaagauucugcggacacaggaguccgcuuguaauugcaucgggggaaacuguuaucucaugauuaccgauggcagcgccuccggcgugucugaaugccgcuuucugaaaaucagagaggggcggaucauuaaggagaucuucccgacaggacgcgucaagcacaccgaagaguguaccugcggcuuugcuagcaauaaaacaauugaaugugccugcagagacaacuccuacacggccaagcggccuuucgugaaacuuaauguugagaccgauacagcugaaauccgccugaugugcaccgacacauaucucgauacccccagaccugacgaugggagcauuacgggacccugugagucuaacggcgacaagggguccggaggcaucaaaggcggguuugugcaucaacggauggcgagcaagaucggacgcugguacucuagaacaaugagcaaaaccgagcggaugggcauggggcuguaugucaaguacgacggagaucccugggccgacuccgaugcucuggccuucucuggcgugauggugagcaugaaggaaccugggugguacuccuuuggcuucgagauuaaagacaagaaaugcgaugucccguguaucggaauugaaaugguucacgacggcgggaaggagaccuggcauagcgccgcuacagccaucuauugccucaugggaucuggccagcugcuuugggauaccgugacagggguggacauggcgcuguga

SEQ ID NO: 220796 - RNA, 1401 nt, Artificial Sequence
  derived and/or modified CDS sequence (opt5) from neuraminidase__InfluenzaB__ACA64980
augcugcccagcaccauccagacacucacgcuguuccuuaccuccggcggggugcugcucucucuguacgucagcgccucccuuucuuaucugcucuacagcgacauucugcugaaguuuuccccuacagagaucaccgcuccgacaaugucucucgauugcgccaacgcgagcaauguucaagcugugaacagauccgccaccaaaggagugacacugcuucugcccgaaccugaguggaccuauccccggcucagcuguccuggcucuacguuccagaaggcccugcuuauuagcccccaccgcuuuggggaaaccaaaggaaauuccgcuccucugaucauuagagagccguucaucgccugcggccccaacgaauguaagcauuuugcucucacacacuacgccgcgcagccugggggauauuacaauggcacccggggcgaccgcaacaaacugagacaucugaucucugucaagcucgggaagauucccacaguggaaaauuccaucuuccacauggccgcuuggagcggaucugccugccaugauggcaaagaguggaccuauauugggguugacggaccugauaacaaugcucugcuuaagaucaaauacggcgaggccuacacggacacauaucacuccuacgcgagcaagauucugcggacccaggaguccgccuguaacugcaucgggggaaauuguuaucucaugauuacagauggcucugcuagcggcguguccgaaugccgcuuucugaaaaucagagaggggcggaucauuaaggagaucuuccccaccggacgcgucaagcacaccgaagaguguacaugcggcuuugccagcaacaaaacgauugaaugugcuugcagagacaauucuuacaccgccaagcggccguucgugaaacuuaacguugagacagauaccgccgaaauccgccugaugugcacagacaccuaucucgauacgccuagacccgacgauggguccauuacaggaccuugugagagcaauggcgacaaggggucuggaggcaucaaaggcggguuugugcaucaacggauggcuagcaagaucggacgcugguacuccagaaccaugucuaaaaccgagcggaugggcauggggcuguaugucaaguacgacggagaucccugggcggacagcgaugcccuggcuuucuccggcgugauggugagcaugaaggaacccgggugguacucuuuuggcuucgagauuaaagacaagaaaugcgaugucccuuguaucggaauugaaaugguucacgacggcgggaaggagacauggcauuccgccgccaccgcuaucuauugccucaugggaagcggccagcugcuuugggauacagugacggggguggacauggcccuguga

SEQ ID NO: 220797 - RNA, 1401 nt, Artificial Sequence
  derived and/or modified CDS sequence (opt5) from neuraminidase__InfluenzaB__ACA64991
augcugcccagcaccauccagacacucacgcuguuccuuaccuccggcggggugcugcucucucuguacgucagcgccucccuuucuuaucugcucuacagcgacauucugcugaaguuuuccccuacagagaucaccgcuccgacaaugccccucgauugcgccaacgcgucuaauguucacgcugugaacagaagcgccaccaaaggagugacacugcuucugccugaacccgaguggaccuauccucggcucuccugucccggcagcacguuccaaaaggcccugcuuauuucuccucaucgcuuuggggaaaccaaaggaaauuccgcuccgcugaucauuagagagcccuucaucgccugcggcccuaacgaauguaagcacuuugcucucacacauuacgccgcgcagcccgggggauauuacaauggcacccggggcgaccgcaacaaacugagacaccugaucagcgucaagcucgggaagauuccuacaguggaaaauucuaucuuccauauggccgcuugguccggaagcgccugccacgauggcaaagaguggaccuauauugggguugacggacccgauaacaaugcucugcuuaagaucaaauacggcgaggccuacacggacacauaucacucuuacgcgaacaauauucugcggacccaggaguccgccuguaacugcaucgggggaaauuguuaucucaugauuacagauggcagcgcuuccggcgugucugaaugccgcuuucugaagaucagagaggggcggaucauuaaagagaucuucccgaccggacgcgucaagcauaccgaagaguguacaugcggcuuugccagcaacaagacgauugaaugugcuugcagagacaauuccuacaccgccaaacggccuuucgugaaacuuaacguugagacagauaccgccgaaauccgccugaugugcacagacaccuaucucgauacgcccagaccugacgaugggagcauuacaggacccugugagucuaacggcgacaagggguccggaggcaucaagggcggguuugugcaccagcggauggcuagcaaaaucggacgcugguacucuagaaccaugagcaagaccgagcggaugggcauggggcuguaugucaaauacgacggagaucccugggcggacuccgaugcccuggcuuucggcggggugauggugucuaugaaggaaccuggcugguacagcuuuggauucgagauuaaggacaaaaagugcgaugucccguguaucggcauugaaaugguucaugacgggggaaaagagacauggcacuccgccgccaccgcuaucuauugccucaugggcagcgggcaacugcuuugggauacagugacgggaguggacauggcccuguga

SEQ ID NO: 220798 - RNA, 1401 nt, Artificial Sequence; identical to SEQ ID NO: 220707
  derived and/or modified CDS sequence (opt5) from neuraminidase__InfluenzaB__ACA65013

SEQ ID NO: 220799 - RNA, 1401 nt, Artificial Sequence; identical to SEQ ID NO: 220707
  derived and/or modified CDS sequence (opt5) from neuraminidase__InfluenzaB__ACA65024

SEQ ID NO: 220800 - RNA, 1401 nt, Artificial Sequence
  derived and/or modified CDS sequence (opt5) from neuraminidase__InfluenzaB__ACA65035
augcugcccagcaccauccagacacucacgcuguuccuuaccuccggcggggugcugcucucucuguacgucagcgccucccuuucuuaucugcucuacagcgacauucugcugaaguuuuccccuacagagaucaccgcuccgacaaugccccucgauugcgccaacgcgucuaauguucaagcugugaacagaagcgccaccaaaggagugacacugcuucugccugaacccgaguggaccuauccucggcucuccugucccggcagcacguuccagaaggcccugcuuauuucuccucaccgcuuuggggaaaccaaaggaaauuccgcuccgcugaucauuagagagcccuucaucgccugcggcccuaacgaauguaagcauuuugcucucacacacuacgccgcgcagcccgggggauauuacaauggcacccggggcgaccgcaacaaacugagacaucugaucagcgucaagcucgggaagauuccuacaguggaaaauucuaucuuccacauggccgcuugguccggaagcgccugccaugauggcaaagaguggaccuauauugggguugacggacccgauaacaaugcucugcuuaagaucaaauacggcgaggccuacacggacacauaucacucuuacgcguccaagauucugcggacccaggagagcgccuguaacugcaucgggggaaauuguuaucucaugauuacagauggcuccgcuucuggcgugagcgaaugccgcuuucugaaaaucagagaggggcggaucauuaaggagaucuucccgaccggacgcgucaagcacaccgaagaguguacaugcggcuuugccuccaacaaaacgauugaaugugcuugcagagacaauagcuacaccgccaagcggccuuucgugaaacuuaacguugagacagauaccgccgaaauccgccugaugugcacagacaccuaucucgauacgcccagaccugacgaugggucuauuacaggacccugugaguccaauggcgacaaggggagcggaggcaucaaaggcggguuugugcaucaacggauggcuucuaagaucggacgcugguacagcagaaccauguccaaaaccgagcggaugggcauggggcuguaugucaaguacgacggagaucccugggcggacucugaugcccuggcuuucagcggcgugaugguguccaugaaggaaccugggugguacagcuuuggcuucgagauuaaagacaagaaaugcgaugucccguguaucggaauugaaaugguucacgacggcgggaaggagacauggcauucugccgccaccgcuaucuauugccucaugggauccggccagcugcuuugggauacagugacggggguggacauggcccuguga

SEQ ID NO: 220801 - RNA, 1401 nt, Artificial Sequence; identical to SEQ ID NO: 220707
  derived and/or modified CDS sequence (opt5) from neuraminidase__InfluenzaB__ACA65046

SEQ ID NO: 220802 - RNA, 1401 nt, Artificial Sequence
  derived and/or modified CDS sequence (opt5) from neuraminidase__InfluenzaB__ACA65057
augcugcccagcaccauccagacacucacgcuguuccuuaccuccggcggggugcugcucucucuguacgucagcgccucccuuucuuaucugcucuacagcgacauucugcugaaguuuuccccuacagagaucaccgcuccgacaaugccccucgauugcgccaacgcgucuaauguucaagcugugaacagaagcgccaccaaaggagugacacugcuucugccugaacccgaguggaccuauccucggcucuccugucccggcagcacguuccagaaggcccugcuuauuucuccucaccgcuuuggggaaaccaaaggaaauuccgcuccgcugaucauuagagagcccuucaucgccugcggcccuaacgaauguaagcauuuugcucucacacacuacgccgcgcagcccgggggauauuacaauggcacccggggcgaccgcaacaaacugagacaucugaucagcgucaagcucgggaagauuccuacaguggaaaauucuaucuuccacauggccgcuugguccggaagcgccugccaugauggcaaagaguggaccuauauugggguugacggacccgauaacaaugcucugcuuaagaucaaauacggcgaggccuacacggacacauaucacucuuacgcgaacaagauucugcggacccaggaguccgccuguaauugcaucgggggaaacuguuaucucaugauuacagauggcagcgcuuccggcgugucugaaugccgcuuucugaaaaucagagaggggcggaucauuaaggagaucuucccgaccggacgcgucaagcacaccgaagaguguacaugcggcuuugccagcaauaaaacgauugaaugugcuugcagagacaacuccuacaccgccaagcggccuuucgugaaacuuaauguugaggccgauacagcugaaauccgccugaugugcaccgacacauaucucgauacccccagaccugacgaugggagcauuacgggacccugugaguuuaacggcgacaaggggucuggaggcaucaaaggcggguucgugcaucaacggauggcguccaagaucggacgcugguacagcagaacaaugucuaaaaccgagcggaugggcauggggcuguaugucaaguacgacggagaucccugggccgacagcgaugcucuggccuuuuccggcgugauggugucuaugaaggaaccugggugguacagcuucggcuucgagauuaaagacaagaaaugcgaugucccguguaucggaauugaaaugguucacgacggcgggaaggagaccuggcauuccgccgcuacagccaucuauugccucaugggaagcggccagcugcuuugggauaccgugacagggguggacauggcgcuguga

SEQ ID NO: 220803 - RNA, 1401 nt, Artificial Sequence; identical to SEQ ID NO: 220707
  derived and/or modified CDS sequence (opt5) from neuraminidase__InfluenzaB__ACA65068

SEQ ID NO: 220804 - RNA, 1401 nt, Artificial Sequence; identical to SEQ ID NO: 220707
  derived and/or modified CDS sequence (opt5) from neuraminidase__InfluenzaB__ACA65079

SEQ ID NO: 220805 - RNA, 1401 nt, Artificial Sequence; identical to SEQ ID NO: 220707
  derived and/or modified CDS sequence (opt5) from neuraminidase__InfluenzaB__ACA65090

SEQ ID NO: 220806 - RNA, 1401 nt, Artificial Sequence; identical to SEQ ID NO: 220707
  derived and/or modified CDS sequence (opt5) from neuraminidase__InfluenzaB__ACA65101

SEQ ID NO: 220807 - RNA, 1401 nt, Artificial Sequence
  derived and/or modified CDS sequence (opt5) from neuraminidase__InfluenzaB__ACA96567
augcugcccagcaccauccagacacucacgcuguuccuuaccuccggcggggugcugcucucucuguacgucagcgccucccuuucuuaucugcucuacagcgacauucugcugaaguuuuccccuacagagaucaccgcuccgacaaugccccucgauugcgccaacgcgucuaauguucacgcugugaacagaagcgccaccaaaggagugacacugcuucugccugaacccgagugggccuauccucggcucuccugucccggcagcaccuuccaaaaggcucugcuuauuucuccucaucgcuuuggggaaacgaaaggaaauuccgccccgcugaucauuagagagcccuucaucgcuugcggcccuaacgaauguaagcacuuugcccucacccauuacgcggcccagcccgggggauauuacaauggcacacggggcgaccgcaacaaacugagacaccugaucagcgucaagcucgggaagauuccuaccguggaaaauucuaucuuccauauggcugccugguccggaagcgcuugccacgauggcaaagaguggacauauauugggguugacggacccgauaacaaugcccugcuuaagaucaaauacggcgaggcguacaccgacacguaucacucuuacgccaacaauauucugcggacacaggaguccgcuuguaacugcaucgggggaaauuguuaucucaugauuaccgauggcagcgccuccggcgugucugaaugccgcuuucugaagaucagagaggggcggaucauuaaagagaucuucccgacaggacgcgucaagcauaccgaagaguguaccugcggcuuugcuagcaacaagacaauugaaugugccugcagagacaauuccuacacggccaaacggccuuucgugaaacuuaacguugagaccgauacagcugaaauccgccugaugugcaccgacacauaucucgauacccccagaccugacgaugggagcauuacgggacccugugagucuaacggcgacaagggguccggaggcaucaagggcggguuugugcaccagcggauggcgagcaaaaucggacgcugguacucuagaacaaugagcaagaccgagcggaugggcauggggcuguaugucaaauacgacggagaucccugggccgacuccgaugcucuggccuucucuggcauuauggugagcaugaaggaaccugggugguacuccuuuggcuucgagaucaaggacaaaaagugcgaugugccguguauuggaaucgaaaugguccaugacggcgggaaagagaccuggcacagcgccgcuacagccauuuauugccucaugggaucuggccaacugcuuugggauaccguuacagggguggacauggcgcuguga

SEQ ID NO: 220808 - RNA, 1401 nt, Artificial Sequence; identical to SEQ ID NO: 220707
  derived and/or modified CDS sequence (opt5) from neuraminidase__InfluenzaB__ACA96578

SEQ ID NO: 220809 - RNA, 1401 nt, Artificial Sequence; identical to SEQ ID NO: 220795
  derived and/or modified CDS sequence (opt5) from neuraminidase__InfluenzaB__ACA96589

SEQ ID NO: 220810 - RNA, 1401 nt, Artificial Sequence; identical to SEQ ID NO: 220707
  derived and/or modified CDS sequence (opt5) from neuraminidase__InfluenzaB__ACA96600

SEQ ID NO: 220811 - RNA, 1401 nt, Artificial Sequence
  derived and/or modified CDS sequence (opt5) from neuraminidase__InfluenzaB__ACA96611
augcugcccagcaccauccagacacucacgcuguuccuuaccuccggcggggugcugcucucucuguacgucagcgccucccuuucuuaucugcucuacagcgacauucugcugaaguuuuccccuacagagaucaccgcuccgacaaugccccucgauuaugccaacgcgucuaauguucacgcugugaaccauagcgccaccaaaggagugacacugcuucugccugaacccgaguggaccuacccuagacucuccugccccggcagcacguuccaaaaggcccugcuuauuucuccucaccgguuuggggaaaccaaaggaaauuccgcuccgcugaucauucgcgagcccuucaucgccuguggcccuaacgaaugcaagcauuuugcucucacacacuaugccgcgcagcccgggggauacuauaauggcaccagaggcgaccggaacaaacugcgccaucugaucagcgucaagcucgggaagauuccuacaguggaaaauucuaucuuccacauggccgcuugguccggaagcgccugucacgauggcaaagaguggaccuacauugggguugacggacccgauaacaaugcucugcuuaagaucaaauacggcgaggccuauacggacacauaccauucuuaugcgaacaauauucugagaacccaggaguccgccugcaacuguaucgggggaaauugcuaccucaugauuacagauggcagcgcuuccggcgugucugaaugucgguuucugaagauccgcgaggggagaaucauuaaagagaucuucccgaccggacgggucaagcacaccgaagagugcacauguggcuuugccagcaacaagacgauugaaugcgcuugucgcgacaauuccuauaccgccaaaagaccuuucgugaaacuuaacguugagacagauaccgccgaaauccggcugaugugcacagacaccuaccucgauacgccccgcccugacgaugggagcauuacaggacccugcgagucuaacggcgacaagggguccggaggcaucaagggcggguuugugcaucagagaauggcuagcaaaaucggacggugguauucucgcaccaugagcaagaccgagagaaugggcauggggcuguacgucaaauacgacggagaucccugggcggacuccgaugcccuggcuuucucuggcgugauggugagcaugaaggaaccugggugguauuccuuuggcuucgagauuaaggacaaaaagugugaugucccgugcaucggaauugaaaugguucacgacggcgggaaagagacauggcacagcgccgccaccgcuaucuacugucucaugggaucuggccggcugcuuugggauacagugacggggguggacauggcccuguga

SEQ ID NO: 220812 - RNA, 1401 nt, Artificial Sequence
  derived and/or modified CDS sequence (opt5) from neuraminidase__InfluenzaB__ACA96622
augcugcccagcaccauccagacacucacgcuguuccuuaccuccggcggggugcugcucucucuguacgucagcgccucccuuucuuaucugcucuacagcgacauucugcugaaguuuuccccuacagagaucaccgcuccgacaaugccccucgauugcgccaacgcgucuaauguucacgcugugaacagaagcgccaccaaaggagugacacugcuucugccugaacccgaguggaccuauccucggcucuccugucccggcagcacguuccaaaaggcccugcuuauuucuccucaucgcuuuggggaaaccaaaggaaauuccgcuccgcugaucauuagagagcccuucaucgccugcggcccuaacgaauguaagcacuuugcucucacacauuacgccgcgcagcccgggggauauuacaauggcacccggggcgaccgcaacaaacugagacaccugaucagcgucaagcucgggaagauuccuacaguggaaaauucuaucuuccauauggccgcuugguccggaagcgccugccacgauggcaaagaguggaccuauauugggguugacggacccgauaacaaugcucugcuuaagaucaaauacggcgaggccuacacggacacauaucacucuuacgcgaacaauauucugcggacccaggaguccgccuguaacugcaucgggggaaauuguuaucucaugauuacagauggcagcgcuuccggcgugucugaaugccgcuuucugaagaucagagaggggcggaucauuaaagagaucuucccgaccggacgcgucaagcauaccgaagaguguacaugcggcuuugccagcaacaagacgauugaaugugcuugcagagacaauuccuacaccgccaaacggccuuucgugaaacuuaacguugagacagauaccgccgaaauccgccugaugugcacagacaccuaucucgauacgcccagaccugacgaugggagcauuaucggacccugugagucuaacggcgacaagggguccggaggcaucaagggcggguuugugcaccagcggauggcuagcaaaauuggacgcugguacucuagaacaaugagcaagaccgagcggaugggcauggggcuguaugucaaauacgacggagaucccugggcggacuccgaugcccuggcuuucucuggcgugauggugagcaugaaggaaccugggugguacuccuuuggcuucgagaucaaggacaaaaagugcgaugucccguguauuggaaucgaaaugguucaugacggcgggaaagagaccuggcacagcgccgccacagcuauuuauugccucaugggaucuggccaacugcuuugggauaccgugacagggguggacauggcccuguga

SEQ ID NO: 220813 - RNA, 1401 nt, Artificial Sequence; identical to SEQ ID NO: 220795
  derived and/or modified CDS sequence (opt5) from neuraminidase__InfluenzaB__ACA96633

SEQ ID NO: 220814 - RNA, 1401 nt, Artificial Sequence
  derived and/or modified CDS sequence (opt5) from neuraminidase__InfluenzaB__ACA96644
augcugcccagcaccauccagacacucacgcuguuccuuaccuccggcggggugcugcucucucuguacgucagcgccucccuuucuuaucugcucuacagcgacauucugcugaaguuuuccccuacagagaucaccgcuccgacaaugccccucgauugcgccaacgcgucuaauguucaagcugugaacagaagcgccaccaaaggagugacacugcuucugccugaacccgaguggaccuauccucggcucuccugucccggcagcacguuccagaaggcccugcuuauuucuccucaccgcuuuggggaaaccaaaggaaauuccgcuccgcugaucauuagagagcccuucaucgccugcggcccuaacgaauguaagcauuuugcucucacacacuacgccgcgcagcccgggggauauuacaauggcacccggggcgaccgcaacaaacugagacaucugaucagcauuaagcucgggaagaucccuacagucgaaaauucuauuuuccacauggccgcuugguccggaagcgccugccaugauggcaaagaguggaccuauaucgggguggacggacccgauaacaaugcucugcuuaagauuaaauacggcgaggccuacacggacacauaucacucuuacgcgaacaagauccugcggacccaggaguccgccuguaauugcauugggggaaacuguuaucucaugaucacagauggcagcgcuuccggcguuucugaaugccgcuuucugaaaaucagagaggggcggauuaucaaggagauuuucccgaccggacgcgugaagcacaccgaagaguguacaugcggcuuugccagcaauaaaacgaucgaaugugcuugcagagacaacuccuacaccgccaagcggccuuucgucaaacuuaauguggagacagauaccgccgaaauucgccugaugugcacagacaccuaucucgauacgcccagaccugacgaugggagcaucacaggacccugugagucuaacggcgacaagggguccggaggcaucaaaggcggguuuguucaucaacggauggcuagcaagauuggacgcugguacucuagaaccaugagcaaaaccgagcggaugggcauggggcuguaugugaaguacgacggagaucccugggcggacuccgaugcccuggcuuucucuggcgucaugaucagcaugaaggaaccugggugguacuccuuuggcuucgagauuaaagacaagaaaugcgaugugccguguaucggaauugaaauggugcacgacggcgggaaggagacauggcauagcgccgccaccgcuaucuauugccucaugggaucuggccagcugcuuugggauacagucacggggguugacauggcccuguga

SEQ ID NO: 220815 - RNA, 1401 nt, Artificial Sequence
  derived and/or modified CDS sequence (opt5) from neuraminidase__InfluenzaB__ACA96655
augcugcccagcaccauccagacacucacgcuguuccuuaccuccggcggggugcugcucucucuguacgucagcgccucccuuucuuaucugcucuacagcgacauucugcugaaguuuucccaaacagagaucaccgcuccuauuaugccgcucgauugcgccaacgcgucuaauguucaggcugugaacagaagcgccacaaaaggagugacccugcuucugcccgaaccugaguggacauauccccggcucuccuguccuggcagcaccuuccagaaggcccugcuuaucucuccccaccgcuuuggggaaacgaaaggaaauuccgcuccucugauuaucagagagccguucaucgccugcggccccaaggaauguaaacauuuugcucucacccacuacgccgcgcagccugggggauauuacaacggcacacgggaggaccgcaauaagcugagacaucugauuagcgucaagcucggcaaaauccccaccguggagaacucuauuuuccacauggccgcuugguccgggagcgccugccaugauggacgggaauggacauauaucggcguugacgggccugauucuaaugcucugcuuaagauuaaauacggagaggccuacaccgacacguaucacuccuacgcgaagaacauccugcgcacacaagaaagcgccuguaauugcauuggcggggauuguuaucucaugaucaccgacggacccgcuuccggcaucucugagugcagauuucugaaaauucgggagggccgcaucauuaaggaaaucuucccgacagggagagugaagcacaccgaggaauguaccugcggauuugccagcaacaaaacaauugagugugcuugccgggauaauuccuacacggccaagcgcccuuucgucaaacuuaacguggaaaccgacacagccgagaucagacugaugugcaccgagacauaucucgauacgccccggccuaaugacggcagcaucaccgggcccugugaaucuaacggagauaagggcuccgggggaauuaaaggcggcuuuguucaucagcgcauggcuagcaagaucgggagaugguacucucggacaaugagcaaaaccaagagaaugggaaugggccuguaugugaaguacgacggggaccccuggaccgauuccgaggcgcuggcccucucuggagucauggugagcauggaggaaccuggcugguacuccuucggguuugaaauuaaagacaagaaaugcgaugugccguguaucggcauugagaugguccacgacggaggcaagacaaccuggcauagcgcugccacagccaucuauugccugauggggucuggacagcuucugugggauacgguuaccggcguggacauggcucucuga

SEQ ID NO: 220816 - RNA, 1401 nt, Artificial Sequence
  derived and/or modified CDS sequence (opt5) from neuraminidase__InfluenzaB__ACA96666
augcugcccagcaccauccagacacucacgcuguuccuuaccuccggcggggugcugcucucucuguacgucagcgccucccuuucuuaucugcucuacagcgacauucugcugaaguuuuccccuacagagaucaccgcuccgacaaugccccucgauugcgccaacgcgucuaauguucaagcugugaacagaagcgccaccaaaggagugacacugcuucugccugaacccgaguggaccuauccucggcucuccugucccggcagcacguuccagaaggcccugcuuauuucuccucaccgcuuuggggaaaccaaaggaaauuccgcuccgcugaucauuagagagcccuucaucgccugcggcccuaacgaauguaagcauuuugcucucacacacuacgccgcgcagcccgggggauauuacaauggcacccgggaggaccgcaacaaacugagacaucugaucagcgucaagcucggcaagauuccuacaguggaaaauucuaucuuccacauggccgcuugguccgggagcgccugccaugauggaaaagaguggaccuauauuggcguugacgggcccgauaacaaugcucugcuuaagaucaaauacggagaggccuacacggacacauaucacucuuacgcgaacaagauucugcggacccaggaauccgccuguaauugcaucggcgggaacuguuaucucaugauuacagauggaagcgcuuccggcgugucugagugccgcuuucugaaaaucagagagggccggaucauuaaggaaaucuucccgaccgggcgcgucaagcacaccgaggaauguacaugcggauuugccagcaauaaaacgauugagugugcuugcagagacaacuccuacaccgccaagcggccuuucgugaaacuuaauguugaaacagauaccgccgagauccgccugaugugcacagacaccuaucucgauacgcccagaccugacgauggcagcauuacagggcccugugagucuaacggagaccggggcuccgggggaaucaagggcggcuuugugcaucaacgcauggcuagcaaaaucgggagaugguacucucggaccaugagcaagaccgaaagaaugggaaugggccuguaugucaaauacgacggggaucccugggcggacuccgaugcccuggcuuucucuggagugauggugagcaugaaggagccuggcugguacuccuuuggguucgaaauuaaggacaaaaagugcgaugucccguguaucggcauugagaugguucacgacgauggaaaagaaacauggcauagcgccgccaccgcuaucuauugccucaugggcucugggcagcugcuuugggacacagugacgggaguggauauggcccuguga

SEQ ID NO: 220817 - RNA, 1401 nt, Artificial Sequence
  derived and/or modified CDS sequence (opt5) from neuraminidase__InfluenzaB__ACD56581
augcugcccagcaccauccagacacucacgcuguuccuuaccuccggcggggugcugcucucucuguacgucagcgccucccuuucuuaucugcucuacagcgacauucugcugaaguuuuccacaaccgagaucacagcuccuaccaugccgcucgauugcgccaacgcgucuaauguucaagcugugaacagaagcgccacaaaaggagugacccugcuucugcccgaaccugaguggacguauccccggcucuccuguccuggcagcaccuuccagaaggcccugcuuauuucuccccaccgcuuuggggaaacaaaaggaaauuccgcuccucugaucauuagagagccguucaucgccugcggccccaaggaauguaaacauuuugcucucacccacuacgccgcgcagccugggggauauuacaacggcacacgggaggaccgcaauaagcugagacaucugaucagcgucaagcucggcaaaauucccaccguggagaacucuaucuuccacauggccgcuugguccgggagcgccugccaugauggaaaggaauggacguauauuggcguugacgggccugauucuaaugcucugcuuaaaaucaaguacggagaggccuacacagacaccuaucacuccuacgcgaacaauauucugcggacacaggaaagcgccuguaacugcaucggcgggaauuguuaucucaugauuaccgauggauccgcuucuggcaucagcgagugccgcuuucugaaaaucagagagggccggauuaucaaggaaauuuuccccaccgggcgcgugaagcacacagaggaauguacgugcggauuugccuccaacaaaaccaucgagugugcuugcagagacaauagcuacacagccaagcggccguucgucaaacuuaacguggaaaccgauacagccgagauucgccugaugugcaccgagacguaucucgacacaccuagacccgaugacggcucuaucaccgggccuugugaauccaauggaaacaagggcagcgggggaaucaaaggcggcuuuguucaucaacggauggcuucuaagauugggcgcugguacagcagaaccauguccaaaacaaagcggaugggaaugggccuguaugugaaguacgauggggaccccuggaccgacucugaugcgcuggcccucagcggagucaugguguccauggaggaacccggcugguacagcuucggguuugagaucaaagacaagaaaugcgaugugccuuguauuggcaucgaaaugguccacgacggaggcaaggagacauggcauucugcugccacggccauuuauugccugaugggguccggacagcuucugugggauaccguuacaggcguggacauggcucucuga

SEQ ID NO: 220818 - RNA, 1401 nt, Artificial Sequence
  derived and/or modified CDS sequence (opt5) from neuraminidase__InfluenzaB__ACF33793
augcugcccagcaccauccagacacucacgcuguuccuuaccuccggcggggugcugcucucucuguacgucagcgccucccuuucuuaucugcucuacagcgacauucugcugaaguuuuccccuacagagaucaccgcuccgacaaugccccucgauugcgccaacgcgucuaauguucaagcugugaacagaagcgccaccaaaggagugacacugcuucugccugaacccgaguggaccuauccucggcucuccugucccggcagcacguuccagaaggcccugcuuauuucuccucaccgcuuuggggaaaccaaaggaaauuccgcuccgcugaucauuagagagcccuucaucgccugcggcccuaacgaauguaagcauuuugcucucacacacuacgccgcgcagcccgggggauauuacaauggcacccggggcgaccgcaacaaacugagacaucugaucagcgucaagcucgggaagauuccuacaguggaaaauucuaucuuccacauggccgcuugguccggaagcgccugccaugauggcaaagaguggaccuauauugggguugacggacccgauaacaaugcucugcuuaagaucaaauacggcgaggccuacacggacacauaucacucuuacgcgaacaauauucugcggacccaggaguccgccuguaacugcaucgggggaaauuguuaucucaugauuacagauggcagcgcuuccggcgugucugaaugccgcuuucugaagaucagagaggggcggaucauuaaagagaucuucccgaccggacgcgucaagcacaccgaagaguguacaugcggcuuugccagcaacaagacgauugaaugugcuugcagagacaauuccuacaccgccaaacggccuuucgugaaacuuaacguugagacagauaccgccgaaauccgccugaugugcacagacaccuaucucgauauucccagaccugacgaugggagcaucacgggacccugugagucuaacggcgacaagggguccggaggcaucaagggcggguuugugcaucaacggauggcuagcaaaauuggacgcugguacucuagaacaaugagcaagaccgagcggaugggcauggggcuguaugucaaauacgacggagaucccugggcggacuccgaugcccuggcuuucucuggcgugauggugagcaugaaggaaccugggugguacuccuuuggcuucgagaucaaggacaaaaagugcgaugucccguguauuggaaucgaaaugguucacgacggcgggaaagagaccuggcauagcgccgccacagcuauuuauugccucaugggaucuggccagcugcuuugggauaccgugacagggguggacauggcccuguga

SEQ ID NO: 220819 - RNA, 1401 nt, Artificial Sequence
  derived and/or modified CDS sequence (opt5) from neuraminidase__InfluenzaB__ACF33795
augcugcccagcaccauccagacacucacgcuguuccuuaccuccggcggggugcugcucucucuguacgucagcgccucccuuucuuaucugcucuacagcgacauucugcugaaguuuccuuccacagagaucaccgcuccgacaaugccccucgauugcgccaacgcgucuaauguucaagcugugaacagaagcgccaccaaaggagugacacugcuucugccugaacccgaguggaccuauccucggcucuccugucccggcagcacguuccagaaggcccugcuuauuucuccucaccgcuuuggggaaaccaaaggaaauuccgcuccgcugaucauuagagagcccuucaucgccugcggcccuaaggaauguaaacauuuugcucucacacacuacgccgcgcagcccgggggauauuacaacggcacccggggcgaccgcaauaagcugagacaucugaucagcgucaagcucgggaaaauuccuacaguggagaacucuaucuuccacauggccgcuugguccggaagcgccugccaugauggcaaggaguggaccuauauugggguugacggacccgauaauaacgcucugcuuaaaaucaaguacggcgaagccuacacggacacauaucacucuuacgcgaauaacauucugcggacccaggaguccgccuguaauugcaucgggggaaacuguuaucucaugauuacagauggcagcgcuuccggcgugucugaaugccgcuuucugaaaaucagagaggggcggaucauuaaggagaucuucccgaccggacgcauuaagcacaccgaagaguguacaugcggcuuugccagcaauaaaacgaucgaaugugcuugcagagacaacuccuacaccgccaagcggccuuucgucaaacuuaauguggagacagauaccgccgaaauucgccugaugugcacagagaccuaucucgacacgcccagaccugaugacgggagcaucacaggacccugugagucuaacggcgauaagggguccggaggcaucaaaggcggguuuguucaucaacggauggcuagcaagauuggacgcugguacucuagaaccaugagcaaaaccgaaaagaugggcauggggcuguaugugaaguacgacggagagcccugggcggacuccgaugcccugacauucucuggcgucauggugagcauggaggaaccugggugguacuccuuuggcuucgaaaucaaagacaagaaaugcgaugugccguguauuggaaucgagaugguccacgacggcgggaaggagaccuggcauagcgcugccacagccauuuauugccucaugggaucuggccagcugcuuugggauacgguuaccggggugaacauggcucuguga

SEQ ID NO: 220820 - RNA, 1401 nt, Artificial Sequence
  derived and/or modified CDS sequence (opt5) from neuraminidase__InfluenzaB__ACF33797
augcugcccagcaccauccagacacucacgcuguuccuuaccuccggcggggugcugcucucucuguacgucagcgccucccuuucuuaucugcucuacagcgacauucugcugaaguuuuccccuacagagaucaccgcuccgacaaugccccucgauugcgccaacgcgucuaauguucaagcugugaacagaagcgccaccaaaggagugacacugcuucugccugaacccgaguggaccuauccucggcucuccugucccggcagcacguuccagaaggcccugcuuauuucuccucaccgcuuuggggaaaccaaaggaaauuccgcuccgcugaucauuagagagcccuucaucgccugcggcccuaacgaauguaagcauuuugcucucacacacuacgccgcgcagcccgggggauauuacaauggcacccggggcgaccgcaacaaacugagacaucugaucagcgucaagcucgggaagauuccuacaguggaaaauucuaucuuccacauggccgcuugguccggaagcgccugccaugauggcaaagaguggaccuauauugggguugacggacccgauaacaaugcucugcuuaagaucaaauacggcgaggccuacacggacacauaucacucuuacgcgaacaauacccugcggacacaggaguccgccuguaacugcauugggggaaauuguuaucucaugaucaccgauggcagcgcuuccggcgugucugaaugccgcuuucugaagauuagagaggggcggaucaucaaagagauuuucccgaccggacgcgucaagcacacagaagaguguacgugcggcuuugccagcaacaagaccaucgaaugugcuugcagagacaauuccuacacagccaaacggccuuucgugaaacuuaacguugagaccgauacagccgaaauucgccugaugugcaccgagacguaucucgacacacccagaccugaugacgggagcaucaccggacccugugagucuaacggcgauaagggguccggaggcauuaagggcggguuugugcaucaacggauggcuagcaaaaucggacgcugguacucuagaaccaugagcaagacagaacggaugggcauggggcuguaugucaaauacgacggagaccccugggcggauuccgacgcccuggcucucaucggcgugauggugucuauggaggaaccugggugguacagcuucggcuuugagauuaaggauaagaaaugcgacgucccguguaucggaauugaaaugguucacgauggcgggaaggagaccuggcauuccgccgccacagcuaucuauugccugaugggaagcggccagcuucugugggacacggugaccggggugaauauggcccucuga

SEQ ID NO: 220821 - RNA, 1401 nt, Artificial Sequence; identical to SEQ ID NO: 220800
  derived and/or modified CDS sequence (opt5) from neuraminidase__InfluenzaB__ACF41662

SEQ ID NO: 220822 - RNA, 1401 nt, Artificial Sequence
  derived and/or modified CDS sequence (opt5) from neuraminidase__InfluenzaB__ACF54140
augcugcccagcaccauccagacacucacgcuguuccuuaccuccggcggggugcugcucucucuguacgucagcgccucccuuucuuaucugcucuacagcgacauucugcugaaguuuuccccuacagagaucaccgcuccgacaaugccccucgauugcgccaacgcgucuaauguucaagcugugaacagaagcgccaccaaaggagugacacugcuucugccugaacccgaguggaccuauccucggcucuccugucccggcagcacguuccagaaggcccugcuuauuucuccucaccgcuuuggggaaaccaaaggaaauuccgcuccgcugaucauuagagagcccuucaucgccugcggcccuaacgaauguaagcauuuugcucucacacacuacgccgcgcagcccgggggauauuacaauggcaccaaaggcgaccggaacaagcugcgccaucugaucagcgucaagcucgggaaaauuccuacaguggaaaauucuaucuuccacauggccgcuugguccggaagcgccugccaugauggcaaggaguggaccuauauugggguugacggacccgauaacaaugcucugcuuaaaaucaaguacggcgaggccuacacggacacauaucacucuuacgcgaacaaaauucugagaacccaggaguccgccuguaauugcaucgggggaaacuguuaucucaugauuacagauggcagcgcuuccggcgugucugaaugccgguuucugaagauccgcgaggggagaaucauuaaggagaucuucccgaccggacgggucaaacacaccgaagaguguacaugcggcuuugccagcaauaagacgauugaaugugcuugccgcgacaacuccuacaccgccaaaagaccuuucgugaaacuuaauguugagacagauaccgccgaaauccggcugaugugcacagacaccuaucucgauacgccccgcccugacgaugggagcauuacaggacccugugagucuaacggcgacagaggguccggaggcaucaagggcggguuugugcaucaacggauggcuagcaagaucggacgcugguacucuagaaccaugagcaaaaccgagcggaugggcauggggcuguaugucaaguacgacggagaucccugggcggacuccgaugcccuggcuuucucuggcgugauggugagcaugaaggaaccugggugguacuccuuuggcuucgagauuaaagacaagaaaugcgaugucccguguaucggaauugaaaugguucacgacggcgggaaggagacauggcauagcgccgccaccgcuaucuauugccucaugggaucuggccagcugcuuugggauacagugacggggguggacauggcccuguga

SEQ ID NO: 220823 - RNA, 1401 nt, Artificial Sequence
  derived and/or modified CDS sequence (opt5) from neuraminidase__InfluenzaB__ACF54151
augcugcccagcaccauccagacacucacgcuguuccuuaccuccggcggggugcugcucucucuguacgucagcgccucccuuucuuaucugcucuacagcgacauucugcugaaguuuccuuccacagagaucaccgcuccgacaaugccccucgauugcgccaacgcgucuaauguucaagcugugaacagaagcgccaccaaaggagugacacugcuucugccugaacccgaguggaccuauccucggcucuccugucccggcagcacguuccagaaggcccugcuuauuucuccucaccgcuuuggggaaaccaaaggaaauuccgcuccgcugaucauuagagagcccuucaucgccugcggcccuaaggaauguaaacauuuugcucucacacacuacgccgcgcagcccgggggauauuacaacggcacccggggcaaucgcaacaagcugagacaucugaucagcgucaagcucgggaaaauuccuacaguggaaaauucuaucuuccacauggccgcuugguccggaagcgccugccaugacggcaaggaguggaccuauauugggguugauggacccgacaacaaugcucugcuuaaaaucaaguacggcgaagccuacacggauacauaucacucuuacgcgaacaauauucugcggacccaggaguccgccuguaacugcaucgggggaaauuguuaucucaugauuacagacggcagcgcuuccggcgugucugaaugccgcuuucugaaaaucagagaggggcggaucauuaaggagaucuucccgaccggacgcauuaagcacaccgaagaguguacaugcggcuuugccagcaacaaaacgaucgaaugugcuugcagagauaauuccuacaccgccaagcggccuuucgucaaacuuaacguggagacagacaccgccgaaauucgccugaugugcacagagaccuaucucgauacgcccagaccugacgaugggagcaucacaggacccugugagucuaacggcgacaagggguccggaggcaucaaaggcggguuuguucaucaacggauggcuagcaagauuggacgcugguacucuagaaccaugagcaaaaccaagcggaugggcauggggcuguaugugaaguacgauggagaccccugggcggacuccgaugcccuggcuuucucuggcgucauggugagcauggaggagccugggugguacuccuuuggcuucgaaaucaaagacaagaaaugcgaugugccguguauuggaaucgagaugguccacgacggcgggaaggaaacauggcauagcgccgccaccgcuauuuauugccucaugggaucuggccagcugcuuugggauacaguuacgggggugaauauggcccuguga

SEQ ID NO: 220824 - RNA, 1401 nt, Artificial Sequence
  derived and/or modified CDS sequence (opt5) from neuraminidase__InfluenzaB__ACF54162
augcugcccagcaccauccagacacucacgcuguuccuuaccuccggcggggugcugcucucucuguacgucagcgccucccuuucuuaucugcucuacagcgacauucugcugaaguuuucccaaacagagaucaccgcuccuauuaugccgcucgauugcgccaacgcgucuaauguucaggcugugaacagaagcgccacaaaaggagugacccugcuucugcccgaaccugaguggacauauccccggcucuccuguccuggcagcaccuuccagaaggcccugcuuaucucuccccaccgcuuuggggaaacgaaaggaaauuccgcuccucugauuaucagagagccguucaucgccugcggccccaaggaauguaaacauuuugcucucacccacuacgccgcgcagccugggggauauuacaacggcacacgggaggaccgcaauaagcugagacaucugauuagcgucaagcucggcaaaauccccaccguggagaacucuauuuuccacauggccgcuugguccgggagcgccugccaugauggaaaggaauggacauauaucggcguugacgggccugauucuaaugcucugcuuaaaauuaaguacggagaggccuacaccgacacguaucacuccuacgcgaaaaacauccugcggacacaagaaagcgccuguaauugcauuggcggggauuguuaucucaugaucaccgacggacccgcuuccggcaucucugagugccgcuuucugaagauuagagagggccggaucauuaaggaaaucuucccgacagggcgcgugaaacacaccgaggaauguaccugcggauuugccagcaacaagacaauugagugugcuugcagagauaauaacuacacggccaaacggccuuucgucaaacuuaauguggaaaccgacacagccgagauccgccugaugugcaccgagacauaucucgauacccccagaccuaacgacggcuccaucacggggcccugugaaagcgauggagacaagggcucugggggaauuaagggcggcuuuguucaucagcggauggcuuccaaaaucgggcgcugguacagcagaacaaugucuaagaccaagcggaugggaauggagcuguaugugaaauacgacggcgaucccuggaccgacagcgaagcgcuggcccucuccggggucauggugucuauggaggaaccuggaugguacagcuucggcuuugagauuaaggauaaaaagugcgacgugccguguaucgggauugagaugguccacgauggcggaaaaacaaccuggcauuccgcugccacagccaucuauugccugaugggcagcgggcagcuucugugggacacgguuaccggaguggauauggcucucuga

SEQ ID NO: 220825 - RNA, 1401 nt, Artificial Sequence
  derived and/or modified CDS sequence (opt5) from neuraminidase__InfluenzaB__ACF54184
augcugcccagcaccauccagacacucacgcuguuccuuaccuccggcggggugcugcucucucuguacgucagcgccucccuuucuuaucugcucuacagcgacauucugcugaaguuuuccacaaccgagaucacagcuccuaccaugccgcucgauugcgccaacgcgucuaauguucaagcugugaacagaagcgccacaaaaggagugacccugcuucugcccgaaccugaguggacguauccccggcucuccuguccuggcagcaccuuccagaaggcccugcuuauuucuccccaccgcuuuggggaaacaaaaggaaauuccgcuccucugaucauuagagagccguucaucgccugcggccccaaggaauguaaacauuuugcucucacccacuacgccgcgcagccugggggauauuacaacggcacaaaggaggaccggaauaagcugcgccaucugaucagcgucaaacucggcaagauucccaccguggagaacucuaucuuccacauggccgcuugguccgggagcgccugccaugauggaaaagaauggacguauauuggcguugacgggccugauucuaaugcucugcuuaagaucaaauacggagaggccuacacagacaccuaucacuccuacgcgaacaauauucugagaacacaggaaagcgccuguaacugcaucggcgggaauuguuaucucaugauuaccgauggauccgcuucuggcaucagcgagugccgguuucugaagauccgcgagggcagaauuaucaaggaaauuuuccccaccgggcgggugaaacacacagaggaauguacgugcggauuugccuccaacaagaccaucgagugugcuugccgcgacaauagcuacacagccaaaagaccguucgucaaacuuaacguggaaaccgauacagccgagauucggcugaugugcaccgagacguaucucgacacaccucgccccgaugacggcucuaucaccgggccuugugaauccaauggaaacaagggcagcgggggaaucaagggcggcuuuguucaucaaagaauggcuucuaaaauugggcggugguacagccgcaccauguccaagacaaagagaaugggaaugggccuguaugugaaauacgauggggaccccuggaccgacucugaugcgcuggcccucagcggagucaugguguccauggaggaacccggcugguacagcuucggguuugagaucaaggacaaaaagugcgaugugccuuguauuggcaucgaaaugguccacgacggaggcaaagagacauggcauucugcugccacggccauuuauugccugaugggguccggacagcuucugugggauaccguuacaggcguggacauggcucucuga

SEQ ID NO: 220826 - RNA, 1401 nt, Artificial Sequence
  derived and/or modified CDS sequence (opt5) from neuraminidase__InfluenzaB__ACF54206
augcugcccagcaccauccagacacucacgcuguuccuuaccuccggcggggugcugcucucucuguacgucagcgccucccuuucuuaucugcucuacagcgacauucugcugaaguuuuccacaaccgagacaaccgcuccuacaaugccgcucgauugcgccaacgcgucuaauguucaagcugugaacagaagcgccaccaaaggagugacgcugcuucugcccgaaccugaguggaccuauccccggcucuccuguccuggcagcacauuccagaaggcccugcuuaucucuccccaccgcuuuggggaaaccaaaggaaauuccgcuccucugauuaucagagagccguucauugccugcggccccaaggaauguaaacauuuugcucucacacacuacgccgcgcagccugggggauauuacaacggcacccgggaggaccgcaauaagcugagacaucugaucagcgucaagcucggcaaaauccccacgguggagaacucuauuuuccacauggccgcuugguccgggagcgccugccaugauggaaaggaauggacauauaucggcguugacgggccugauucuaaugcucugcuuaaaauuaaguacggagaggccuacaccgacacauaucacuccuacgcgaacaauauccugcggacccaggaaagcgccuguaacugcauuggcgggaauuguuaucucaugaucaccgauggauccgcuucuggcauuagcgagugccgcuuucugaaaaucagagagggccggaucauuaaggaaaucuuccccacagggcgcgugaagcacacggaggaauguaccugcggauuugccuccaacaaaacaauugagugugcuugcagagacaauagcuacaccgccaagcggccguucgucaaacuuaacguggaaacagauaccgccgagauccgccugaugugcacggagacauaucucgacaccccuagacccgaugacggcucuauuaccgggccuugugaauccaauggaaacaagggcagcgggggaaucaaaggcggcuuuguucaucaacggauggcuucuaagaucgggcgcugguacagcagaacaauguccaaaaccaagcggaugggaaugggccuguaugugaaguacgauggggaccccuggacagacucugaugcgcuggcccucagcggagucaugguguccauggaggaacccggcugguacagcuucggguuugagauuaaagacaagaaaugcgaugugccuuguaucggcauugaaaugguccacgacggaggcaaggagacguggcauucugcugccaccgccaucuauugccugaugggguccggacagcuucugugggauacaguuaccggcguggacauggcucucuga

SEQ ID NO: 220827 - RNA, 1401 nt, Artificial Sequence
  derived and/or modified CDS sequence (opt5) from neuraminidase__InfluenzaB__ACF54217
augcugcccagcaccauccagacacucacgcuguuccuuaccuccggcggggugcugcucucucuguacgucagcgccucccuuucuuaucugcucuacagcgacauucugcugaaguuuucccaaacagagaucaccgcuccuauuaugccgcucgauugcgccaacgcgucuaauguucaggcugugaaccacagcgccacaaaaggagugacccugcuucugcccgaaccugaguggacauaucccagacucuccuguccuggcagcaccuuccagaaggcccugcuuaucucuccccaucgguuuggggaaacgaaaggaaauuccgcuccucugauuauccgcgagccguucaucgccugcggccccaaggaauguaaacacuuugcucucacccauuacgccgcgcagccugggggauauuacaacggcacaagagaggaccggaauaagcugcgccaccugauuagcgucaagcucggcaaaauccccaccguggagaacucuauuuuccauauggccgcuugguccgggagcgccugccacgauggaagagaauggacauauaucggcguugacgggccugauucuaaugcucugcuuaagauuaaauacggagaggccuacaccgacacguaucacuccuacgcgaagaacauccugcggacacaagaaagcgccuguaauugcauuggcggggauuguuaucucaugaucaccgacggacccgcuuccggcaucucugagugccgcuuucugaaaauuagagagggccggaucauuaaggaaaucuucccgacagggcgcgugaagcauaccgaggaauguaccugcggauuugccagcaacaaaacaauugagugugcuugcagagauaauuccuacacggccaagcggccuuucgucaaacuuaacguggaaaccgacacagccgagauccgccugaugugcaccgagacauaucucgauacccccagaccuaaugacggcagcaucacggggcccugugaaucuaacggagauaagggcuccgggggaauuaaaggcggcuuuguucaccagcggauggcuagcaagaucgggcgcugguacucuagaacaaugagcaaaaccaagcggaugggaaugggccuguaugugaaguacgacggggaccccuggaccgauuccgaggcgcuggcccucucuggagucauggugagcauggaggaaccuggcugguacuccuucggguuugaaauuaaagacaagaaaugcgaugugccguguaucggcauugagaugguccaugacggaggcaagacaaccuggcacagcgcugccacagccaucuauugccugauggggucuggacagcuucugugggauacgguuaccggcguggacauggcucucuga

SEQ ID NO: 220828 - RNA, 1401 nt, Artificial Sequence; identical to SEQ ID NO: 220719
  derived and/or modified CDS sequence (opt5) from neuraminidase__InfluenzaB__ACF54228

SEQ ID NO: 220829 - RNA, 1401 nt, Artificial Sequence; identical to SEQ ID NO: 220740
  derived and/or modified CDS sequence (opt5) from neuraminidase__InfluenzaB__ACF54239

SEQ ID NO: 220830 - RNA, 1401 nt, Artificial Sequence
  derived and/or modified CDS sequence (opt5) from neuraminidase__InfluenzaB__ACF54261
augcugcccagcaccauccagacacucacgcuguuccuuaccuccggcggggugcugcucucucuguacgucagcgccucccuuucuuaucugcucuacagcgacauucugcugaaguuuuccccuacagagaucaccgcuccgacaaugccccucgauugcgccaacgcgucuaauguucaagcugugaacagaagcgccaccaaaggagugacacugcuucugccugaacccgaguggaccuauccucggcucuccugucccggcagcacguuccagaaggcccugcuuauuucuccucaccgcuuuggggaaaccaaaggaaauuccgcuccgcugaucauuagagagcccuucaucgccugcggcccuaaggaauguaaacauuuugcucucacacacuacgccgcgcagcccgggggauauuacaacggcacccgggaggaccgcaauaagcugagacaucuggucagcgugaagcucggcaaaaucccuacaguugagaacucuauuuuccacauggccgcuugguccgggagcgccugccaugauggaaaggaauggaccuauaucggcguggacgggcccgauucuaaugcucugcuuaaaauuaaguacggagaggccuacacggacacauaucacuccuacgcgaacaauauccugcggacccaggaaagcgccuguaacugcauuggcgggaauuguuaucucaugaucacagauggauccgcuucuggcauuagcgagugccgcuuucugaaaaucagagagggccggaucauuaaggaaaucuucccgaccgggcgcgucaagcacaccgaggaauguacaugcggauuugccuccaacaaaacgauugagugugcuugcagagacaauagcuacaccgccaagcggccuuucgugaaacuuaacguugaaacagauaccgccgagauccgccugaugugcacagagaccuaucucgacacgcccagaccugaugacggcucuauuacagggcccugugaauccaauggagauaagggcagcgggggaaucaaaggcggcuuugugcaucaacggauggcuucuaagaucgggcgcugguacagcagaaccauguccaaaaccaagcggaugggaaugggccuguaugucaaguacgacggggaccccuggacagauucugacgcgcuggcccucagcggagugaugguguccauggaggaaccuggcugguacagcuucggguuugagauuaaagauaagaaaugcgacgucccguguaucggcauugaaaugguucacgauggaggcaaggagaccuggcauucugcugccacagccaucuauugccugaugggguccggacagcuucugugggacacggugaccggcguggauauggcucucuga

SEQ ID NO: 220831 - RNA, 1401 nt, Artificial Sequence
  derived and/or modified CDS sequence (opt5) from neuraminidase__InfluenzaB__ACF54272
augcugcccagcaccauccagacacucacgcuguuccuuaccuccggcggggugcugcucucucuguacgucagcgccucccuuucuuaucugcucuacagcgacauucugcugaaguuuuccacaaccgagaucacagcuccuaccaugccgcucgauugcgccaacgcgucuaauguucaagcugugaacagaagcgccacaaaaggagugacccugcuucugcccgaaccugaguggacguauccccggcucuccuguccuggcagcaccuuccagaaggcccugcuuauuucuccccaccgcuuuggggaaacaaaaggaaauuccgcuccucugaucauuagagagccguucaucgccugcggccccaaggaauguaaacauuuugcucucacccacuacgccgcgcagccugggggauauuacaacggcacacgggaggaccgcaauaagcugagacaucugaucagcgucaagcucggcaaaauucccaccguggagaacucuaucuuccacauggccgcuugguccgggagcgccugccaugauggaaaggaauggacguauauuggcguugacgggccugauucuaaugcucugcuuaaaaucaaguacggagaggccuacacagacaccuaucacuccuacgcgaacaauauucugcggacacaggaaagcgccuguaacugcaucggcgggaauuguuaucucaugauuaccgauggauccgcuucuggcaucagcgagugccgcuuucugaaaaucagagagggccggauuaucaaggaaauuuuccccaccgggcgcgugaagcacacagaggaauguacgugcggauuugccuccaacaaaaccaucgagugugcuugcagagacaauagcuacacagccaagcggccguucgucaaacuuaacguggaaaccgauacagccgagauucgccugaugugcaccgagacguaucucgacacaccuagacccgaugacggcucuaucaccgggccuugugaauccaauggagauaagggcagcgggggaaucaaaggcggcuuuguucaucaacggauggcuucuaagauugggcgcugguacagcagaaccauguccaaaacaaagcggaugggaaugggccuguaugugaaguacgacggggaccccuggaccgauucugacgcgcuggcccucagcggagucaugguguccauggaggaacccggcugguacagcuucggguuugagaucaaagauaagaaaugcgacgugccuuguauuggcaucgaaaugguccacgauggaggcaaggagacauggcauucugcugccacggccauuuauugccugaugggguccggacagcuucugugggacaccguuacaggcguggauauggcucucuga

SEQ ID NO: 220832 - RNA, 1401 nt, Artificial Sequence
  derived and/or modified CDS sequence (opt5) from neuraminidase__InfluenzaB__ACF54283
augcugcccagcaccauccagacacucacgcuguuccuuaccuccggcggggugcugcucucucuguacgucagcgccucccuuucuuaucugcucuacagcgacauucugcugaaguuuuccacaaccgagaucacagcuccuaccaugccgcucgauugcgccaacgcgucuaauguucaagcugugaacagaagcgccacaaaaggagugacccugcuucugcccgaaccugaguggacguauccccggcucuccuguccuggcagcaccuuccagaaggcccugcuuauuucuccccaccgcuuuggggaaacaaaaggaaauuccgcuccucugaucauuagagagccguucaucgccugcggccccaaggaauguaaacauuuugcucucacccacuacgccgcgcagccugggggauauuacaacggcacacgggaggaccgcaauaagcugagacaucuggucagcgugaagcucggcaaaauccccaccguugagaacucuauuuuccacauggccgcuugguccgggagcgccugccaugauggaaaggaauggacguauaucggcguggacgggccugauucuaaugcucugcuuaaaauuaaguacggagaggccuacacagacaccuaucacuccuacgcgaacaauauccugcggacacaggaaagcgccuguaacugcauuggcgggaauuguuaucucaugaucaccgauggauccgcuucuggcauuagcgagugccgcuuucugaaaaucagagagggccggaucauuaaggaaaucuuccccaccgggcgcgucaagcacacagaggaauguacgugcggauuugccuccaacaaaaccauugagugugcuugcagagacaauagcuacacagccaagcggccguucgugaaacuuaacguugaaaccgauacagccgagauccgccugaugugcaccgagacguaucucgacacaccuagacccgaugacggcucuauuaccgggccuugugaauccaauggagauaagggcagcgggggaaucaaaggcggcuuugugcaucaacggauggcuucuaagaucgggcgcugguacagcagaaccauguccaaaacaaagcggaugggaaugggccuguaugucaaguacgacggggaccccuggaccgauucugacgcgcuggcccucagcggagugaugguguccauggaggaacccggcugguacagcuucggguuugagauuaaagauaagaaaugcgacgucccuuguaucggcauugaaaugguucacgauggaggcaaggagacauggcauucugcugccacggccaucuauugccugaugggguccggacagcuucugugggacaccgugacaggcguggauauggcucucuga

SEQ ID NO: 220833 - RNA, 1401 nt, Artificial Sequence
  derived and/or modified CDS sequence (opt5) from neuraminidase__InfluenzaB__ACF54294
augcugcccagcaccauccagacacucacgcuguuccuuaccuccggcggggugcugcucucucuguacgucagcgccucccuuucuuaucugcucuacagcgacauucugcugaaguuuuccacaaccgagaucacagcuccuaccauuccgcucgauugcgccaacgcgucuaauguucaagcugugaacagaagcgccacaaaaggagugaccuuccugcuucccgaaccugaguggacguauccccggcuguccuguccuggcagcaccuuucagaaggcccuccugaucucuccccaccgcuucggggaaacaaaaggaaauuccgcuccucuuauuaucagagagccguuuaucgccugcggccccaaggaauguaaacauuucgcucugacccacuacgccgcgcagccugggggauauuacaacggcacacgggaggaccgcaauaagcucagacaucugauuagcgucaagcugggcaaaauccccaccguggagaacucuauuuuucacauggccgcuugguccgggagcgccugccaugauggaaaggaauggacguauaucggcguugacgggccugauucuaaugcucuccugaaaauuaaguacggagaggccuacacagacaccuaucacuccuacgcgaacaauauccuucggacacaggaaagcgccuguaacugcauuggcgggaauuguuaucugaugaucaccgauggauccgcuucuggcaucagcgagugccgcuuccucaaaauuagagagggccggaucauuaaggaaaucuuucccaccgggcgcgugaagcacacagaggaauguacgugcggauucgccuccaacaaaaccauugagugugcuugcagagacaauagcuacacagccaagcggccguuugucaaacugaacguggaaaccgauacagccgagauccgccuuaugugcaccgagacguaucuggacacaccuagacccgaugacggcucuaucaccgggccuugugaauccaauggaaacaagggcagcgggggaauuaaaggcggcuucguucaucaacggauggcuucuaagaucgggcgcugguacagcagaaccauguccaaaacaaagcggaugggaaugggccucuaugugaaguacgauggggaccccuggaccgacucugaugcgcuggcccugagcggagucaugguguccauggaggaacccggcugguacagcuuuggguucgagauuaaagacaagaaaugcgaugugccuuguaucggcauugaaaugguccacgacggaggcaaggagacauggcauucugcugccacggccaucuauugccucaugggguccggacagcugcuuugggauaccguuacaggcguggacauggcucuguga

SEQ ID NO: 220834 - RNA, 1401 nt, Artificial Sequence
  derived and/or modified CDS sequence (opt5) from neuraminidase__InfluenzaB__ACF54305
augcugcccagcaccauccagacacucacgcuguuccuuaccuccggcggggugcugcucucucuguacgucagcgccucccuuucuuaucugcucuacagcgacauucugcugaaguuuuccacaaccgagaucacagcuccuaccaugccgcucgauugcgccaacgcgucuaauguucaagcugugaacagaagcgccacaaaaggagugaccuuccugcuucccgaaccugaguggacguauccccggcuguccuguccuggcagcaccuuucagaaggcccuccugauuucuccccaccgcuucggggaaacaaaaggaaauuccgcuccucuuaucauuagagagccguuuaucgccugcggccccaaggaauguaaacauuucgcucugacccacuacgccgcgcagccugggggauauuacaacggcacacgggaggaccgcaauaagcucagacaucugaucagcgucgagcugggcaagauucccaccguggaaaacucuaucuuucacauggccgcuugguccgggagcgccugccaugauggaaaagaguggacguauauuggcguugacgggccugauucuaaugcucuccugaagaucaaauacggagaagccuacacagacaccuaucacuccuacgcgaacaauauucuucggacacaggagagcgccuguaacugcaucggcgggaauuguuaucugaugauuaccgauggauccgcuucuggcaucagcgagugccgcuuccucaagaucagagaaggccggauuaucaaagagauuuuucccaccgggcgcgugaagcacacagaagaguguacgugcggauucgccuccaacaagaccaucgaaugugcuugcagagacaauagcuacacagccaaacggccguuugucaagcugaacguggagaccgauacagccgagauucgccuuaugugcaccgaaacguaucuggacacaccuagacccgaugacggcucuaucaccgggccuugugaguccaauggaaacaaaggcagcgggggaaucaagggcggcuucguucaucaacggauggcuucuaaaauugggcgcugguacagcagaaccauguccaagacaaaacggaugggaaugggccucuaugugaaguacgauggggaccccuggaccgacucugaugcgcuggcccugagcggagucaugguguccauggaggaacccggcugguacagcuuuggguucgaaaucaaggacaaaaagugcgaugugccuuguauuggcaucgagaugguccacgacggaggcaaagagacauggcauucugcugccacggccauuuauugccucaugggguccggacagcugcuuugggauaccguuacaggcguggacauggcucuguga

SEQ ID NO: 220835 - RNA, 1401 nt, Artificial Sequence
  derived and/or modified CDS sequence (opt5) from neuraminidase__InfluenzaB__ACF54316
augcugcccagcaccauccagacacucacgcuguuccuuaccuccggcggggugcugcucucucuguacgucagcgccucccuuucuuaucugcucuacagcgacauucugcugaaguuuuccccuacagagaucaccgcuccgacaaugccccucgauugcgccaacgcgucuaauguucaagcugugaacagaagcgccaccaaaggagugacacugcuucugccugaacccgaguggaccuauccucggcucuccugucccggcagcacguuccagaaggcccugcuuauuucuccucaccgcuuuggggaaaccaaaggaaauuccgcuccgcugaucauuagagagcccuucaucgccugcggcccuaacgaauguaagcauuuugcucucacacacuacgccgcgcagcccgggggauauuacaauggcacccggggcgaccgcaacaaacugagacaucugaucagcgucaagcucgggaagauuccuacaguggaaaauucuaucuuccacauggccgcuugguccggaagcgccugccaugauggcaaagaguggaccuauauugggguugacggacccgauaacaaugcucugcuuaagaucaaauacggcgaggccuacacggacacauaucacucuuacgcgaacaauauucugcggacccaggaguccgccuguaacugcaucgggggaaauuguuaucucaugauuacagauggcagcgcuuccggcgugucugaaugccgcuuucugaagaucagagaggggcggaucauuaaagagaucuucccgaccggacgcgucaagcacaccgaagaguguacaugcggcuuugccagcaacaagacgauugaaugugcuugcagagacaauuccuacaccgccaaacggccuuucgugaaacuuaacguugagacagauaccgccgaaauccgccugaugugcacagagaccuaucucgacacgcccagaccugaugacgggagcauuacaggacccugugagucuaacggcgauaagggguccggaggcaucaagggcggguuugugcaucaacggauggcuagcaaaaucggacgcugguacucuagaaccaugagcaagaccgaacggaugggcauggggcuguaugucaaauacgacggagaccccugggcggauuccgacgcccuggcucucauuggcgugauggugucuauggaggaaccugggugguacagcuucggcuuugagaucaaggauaagaauugcgacgucccguguauuggaaucgaaaugguucacgauggcgggaaagagacauggcauuccgccgccaccgcuauuuauugccugaugggaagcggccagcuucugugggacacagugacgggggugaacauggcccucuga

SEQ ID NO: 220836 - RNA, 1404 nt, Artificial Sequence
  derived and/or modified CDS sequence (opt5) from neuraminidase__InfluenzaB__ACF54338
augcugcccagcaccauccagacacucacgcuguuccuuaccuccggcggggugcugcucucucuguacgucagcgccucccuuucuuaucugcucuacagcgacauucugcugaaguuuccuuccacagagaucaccgcuccgacaaugccccucgauugcgccaacgcgucuaauguucaagcugugaacagaagcgccaccaaaggagugacacugcuucugcucccugaacccgaguggaccuauccucggcuguccugucccggcagcacguuccagaaggcccuucugauuucuccucaccgcuuuggggaaaccaaaggaaauuccgcuccgcucaucauuagagagcccuucaucgccugcggcccuaaggaauguaaacauuuugcucugacacacuacgccgcgcagcccgggggauauuacaacggcacccggggcgaccgcaauaagcugagacaucucaucagcgucaagcuggggaaaauuccuacaguggagaacucuaucuuccacauggccgcuugguccggaagcgccugccaugauggcaaggaguggaccuauauugggguugacggacccgauaauaacgcucugcuuaaaaucaaguacggcgaagccuacacggacacauaucacucuuacgcgaauaacauucuccggacccaggaguccgccuguaauugcaucgggggaaacuguuaucugaugauuacagauggcagcgcuuccggcgugucugaaugccgcuuucuuaaaaucagagaggggcggaucauuaaggagaucuucccgaccggacgcauuaagcacaccgaagaguguacaugcggcuuugccagcaauaaaacgaucgaaugugcuugcagagacaacuccuacaccgccaagcggccuuucgucaaacugaauguggagacagauaccgccgaaauucgccucaugugcacagagaccuaucuggacacgcccagaccugaugacgggagcaucacaggacccugugagucuaacggcgggaagggauccggcggcaucaaagggggauuuguucaucaacggauggcuagcaagauuggccgcugguacucuagaaccaugagcaaaaccgaacggaaggggaugggacuguaugugaaguacgauggcgaccccugggcggacuccgaugcccucgucuucucuggggugauggugagcauggaggaaccuggcugguacuccuuuggauucgagaucaaagacaagaaaugcgaugucccguguauuggcaucgaaaugguucacgacgggggaaaggagacauggcauagcgcugccaccgccauuuauugccugaugggcucugggcagcuucugugggauacagugacgggagugaacauggcucucuga

SEQ ID NO: 220837 - RNA, 1401 nt, Artificial Sequence
  derived and/or modified CDS sequence (opt5) from neuraminidase__InfluenzaB__ACF54349
augcugcccagcaccauccagacacucacgcuguuccuuaccuccggcggggugcugcucucucuguacgucagcgccucccuuucuuaucugcucuacagcgacauucugcugaaguuuucccaaacagagaucaccgcuccuauuaugccgcucgauugcgccaacgcgucuaauguucaggcugugaacagaagcgccgccaaaggagugacacugcuucugcccgaaccugaguggaccuauccccggcucuccuguccuggcagcacauuccagaaggcucugcuuaucaauccccaccgcuuuggggaaaccaaaggaaacucugccccucugauuaucagagagccguucaucgcuugcggccccacggaauguaagcauuuugcccucacccacuacgcggcccagccugggggauauuacaauggcacacgggaggaccgcaacaaacugagacaucugauuuccgucaagcucggcaagauccccaccguggagaauagcauuuuccacauggcugccuggucuggguccgcuugccaugauggaaaagaauggacauauaucggcguugacgggccugauagcaacgcccugcuuaagauuaaauacggagaggcguacaccgacacguaucacucuuacgccaagaauauccugcggacacaagaauccgcuuguaacugcauuggcggggauuguuaucucaugaucaccgacggaagcgccuccggcaucucugagugccgcuuucugaaaauuagagagggccggaucauuaaggaaaucuuccccacagggcgcgugaagcacaccgaggaauguaccugcggauuugcuagcaauaaaacaauugagugugccugcagagauaacuccuacacggccaagcggccguucgucaaacuuaauguggaaaccgacacagcugagauccgccugaugugcaccgagacauaucucgauaccccuagacccaacgacggcagcaucacggggccuugugaaucugauggagacaagggcuccgggggaauuaaaggcggcuuuguucaucagcggauggcgagcaagaucgggcgcugguacucuagaacaaugagcaaaaccaagcggaugggaaugggccuguaugugaaguacgacggggaucccuggaccgacuccgaggcccuggcucucucuggagucauggugagcauggaggaacccggcugguacuccuucggguuugaaauuaaagauaagaaaugcgacgugccuuguaucggcauugagaugguccacgauggaggcaagacaaccuggcauagcgccgccacagcuaucuauugccugauggggucuggacagcuucugugggacacgguuaccggcguggauauggcccucuga

SEQ ID NO: 220838 - RNA, 1401 nt, Artificial Sequence
  derived and/or modified CDS sequence (opt5) from neuraminidase__InfluenzaB__ACF54371
augcugcccagcaccauccagacacucacgcuguuccuuaccuccggcggggugcugcucucucuguacgucagcgccucccuuucuuaucugcucuacagcgacauucugcugaaguuuucccaaacagagaucaccgcuccuauuaugccgcucgauugcgccaacgcgucuaauguucaggcugugaacagaagcgccgccaaaggagugacacugcuucugcccgaaccugaguggaccuauccccggcucuccuguccuggcagcacauuccagaaggcucugcuuaucucuccccaccgcuuuggggaaaccaaaggaaauuccgccccucugauuaucagagagccguucaucgcuugcggccccacggaauguaagcauuuugcccucacccacuacgcggcccagccugggggauauuacaacggcacacgggaggaccgcaauaaacugagacaucugauuagcgucaagcucggcaagauccccaccguggagaacucuauuuuccacauggcugccugguccgggagcgcuugccaugauggaaaagaauggacauauaucggcguugacgggccugauucuaaugcccugcuuaagauuaaauacggagaggcguacaccgacacguaucacuccuacgccaagaacauccugcggacacaagaaagcgcuuguaauugcauuggcggggauuguuaucucaugaucaccgacggacccgccuccggcaucucugagugccgcuuucugaaaauuagagagggccggaucauuaaggaaaucuucccgacagggcgcgugaagcacaccgaggaauguaccugcggauuugcuagcaacaaaacaauugagugugccugcagagauaauuccuacacggccaagcggccuuucgucaaacuuaacguggaaaccgacacagcugagauccgccugaugugcaccgagacauaucucgauacccccagaccuaaugacggcagcaucacggggcccugugaaucugauggagacaagggcuccgggggaauuaaaggcggcuuuguucaucagcggauggcgagcaagaucgggcgcugguacucuagaacaaugagcaaaaccaagcggaugggaaugggccuguaugugaaguacgacggggaucccuggaccgacuccgaggcccuggcucucucuggagucauggugagcauggaggaaccuggcugguacuccuucggguuugaaauuaaagauaagaaaugcgacgugccguguaucggcauugagaugguccacgauggaggcaagacaaccuggcauagcgccgccacagcuaucuauugccugacggggucuggacagcuucugugggacaccguuacaggcguggauauggcccucuga

SEQ ID NO: 220839 - RNA, 1401 nt, Artificial Sequence
  derived and/or modified CDS sequence (opt5) from neuraminidase__InfluenzaB__ACI22549
augcugcccagcaccauccagacacucacgcuguuccuuaccuccggcggggugcugcucucucuguacgucagcgccucccuuucuuaucugcucuacagcgacauucugcugaaguuuuccccuacagagaucaccgcuagaacaaugccgcucgauugcgccaacgcgucuaauguucaagcugugaaccggagcgccaccaaaggagugacacugcuucugcccgaaccugaguggaccuauccccgccucuccuguccuggcagcacguuccagaaggcccugcuuauuucuccccacagauuuggggaaaccaaaggaaauuccgcuccucugaucauucgggagccguucaucgccugcggccccaacgaauguaagcauuuugcucucacacacuacgccgcgcagccugggggauauuacaauggcacccgcggcgacagaaacaaacugcggcaucugaucagcgucaagcucgggaagauucccacaguggaggauucuaucuuccacauggccgcuugguccggaagcgccugccaugacggcaaagaguggaccuauauugggguugauggaccugacaauaacgcucugcuuaagaucaaauacggcgaagccuacacggauacauaucacucuuacgcgaauaacauucugcgcacccaggaguccgccuguaauugcaucgggggaaacuguuaucucaugauuacagacggcagcgcuuccggcgugucugaaugcagauuucugaagauccgggaggggcgcaucauuaaagagaucuuccccaccggaagagucaagcacaccgaagaguguacaugcggcuuugccagcaauaagacgauugaaugugcuugccgggauaacuccuacaccgccaaacgcccguucgugaaacuuaauguugagacagacaccgccgaaaucagacugaugugcacagagaccuaucucgauacgccucggcccgacgaugggagcauuacaggaccuugugagucuaacggcgacaagggguccggaggcaucaagggcggguuugugcaucaacgcauggcuagcaaaaucggaagaugguacucucggaccaugagcaagaccgaaagaaugggcauggggcuguaugucaaauacgacggagaucccugggcggacuccgaugcccuggcucucauuggcgugauggugucuauggaggaacccgggugguacagcuucggcuuugagaucaaggacaagaacugcgaugucccuuguauuggaaucgaaaugguucacgacggcgggaaagagacauggcauuccgccgccaccgcuauuuauugccugaugggaagcggccagcuucugugggauacagugacgggggugaauauggcccucuga

SEQ ID NO: 220840 - RNA, 1401 nt, Artificial Sequence
  derived and/or modified CDS sequence (opt5) from neuraminidase__InfluenzaB__ACI22551
augcugcccagcaccauccagacacucacgcuguuccuuaccuccggcggggugcugcucucucuguacgucagcgccucccuuucuuaucugcucuacagcgacauucugcugaaguuuuccccuacagagaucaccgcucucacaaugccgcuggauugcgccaacgcgucuaauguucaagcugugaacagaagcgccaccaaaggagugacacuucugcuccccgaaccugaguggaccuauccccggcuguccuguccuggcagcacguuccagaaggcccuucugauuucuccccaccgcuuuggggaaaccaaaggaaauuccgcuccucucaucauuagagagccguucaucgccugcggccccaacgaauguaagcauuuugcucugacacacuacgccgcgcagccugggggauauuacaauggcacccggggcgaccgcaacaaacugagacaucucaucagcgucaagcuggggaagauucccacaguggaaaauucuaucuuccacauggccgcuugguccggaagcgccugccaugauggcaaagaguggaccuauauugggguugacggaccugauaacaaugcccuucugaagaucaaauacggcgaggcuuacacggacacauaucacucuuacgcgaacaauauucuccggacccaggaguccgccuguaacugcaucgggggaaauuguuaucugaugauuacagauggcagcgcuuccggcgugucugaaugccgcuuucuuaagaucagagaggggcggaucauuaaagagaucuuccccaccggacgcgucaagcacaccgaagaguguacaugcggcuuugccagcaacaagacgauugaaugugcuugcagagacaauuccuacaccgccaaacggccguucgugaagcugaacguugagacagauaccgccgaaauccgccucaugugcacagagaccuaucuggacacgccuagacccgaugacgggagcauuacaggaccuugugagucuaacggcgauaaaggguccggaggcaucaagggcggguuugugcaucaacggauggcuagcaaaaucggacgcugguacucuagaaccaugagcaagaccgaacggaugggcauggggcuguaugucaaauacgacggagaccccugggcggauuccgacgcccucgcucugauuggcgugauggugucuauggaggaacccgggugguacagcuucggcuuugagaucaaggauaagaauugcgacgucccuuguauuggaaucgaaaugguucacgauggcgggaaagagacauggcauuccgccgccaccgcuauuuauugccuuaugggaagcggccagcugcucugggacacagugacgggggugaacauggcccuguga

SEQ ID NO: 220841 - RNA, 1401 nt, Artificial Sequence; identical to SEQ ID NO: 220840
  derived and/or modified CDS sequence (opt5) from neuraminidase__InfluenzaB__ACI22555

SEQ ID NO: 220842 - RNA, 1401 nt, Artificial Sequence; identical to SEQ ID NO: 220707
  derived and/or modified CDS sequence (opt5) from neuraminidase__InfluenzaB__ACI22557

SEQ ID NO: 220843 - RNA, 1401 nt, Artificial Sequence
  derived and/or modified CDS sequence (opt5) from neuraminidase__InfluenzaB__ACI22559
augcugcccagcaccauccagacacucacgcuguuccuuaccuccggcggggugcugcucucucuguacgucagcgccucccuuucuuaucugcucuacagcgacauucugcugaaguuuccuuccacagagaucaccgcuccgacaaugccccucgauugcgccaacgcgucuaauguucaagcugugaaccugagcgccaccaaaggagugacacuucugcucccugaacccgaguggaccuauccuagacuguccugucccggcagcacguuccagaaggcccuucugauuucuccucaccgguuuggggaaaccaaaggaaauuccgcuccgcucaucauucgcgagcccuucaucgccugcggcccuaaggaauguaaacauuuugcucugacacacuacgccgcgcagcccgggggauauuacaacggcaccagaggcgaccggaauaagcugcgccaucucaucagcgucaagcuggggaaaauuccuacaguggagaacucuaucuuccacauggccgcuugguccggaagcgccugccaugauggcaaggaguggaccuauauugggguugacggacccgauaauaacgcucugcuuaaaaucaaguacggcgaagccuacacggacacauaucacucuuacgcgaauaacauucucagaacccaggaguccgccuguaauugcaucgggggaaacuguuaucugaugauuacagauggcagcgcuuccggcgugucugaaugccgguuucuuaaaauccgcgaggggagaaucauuaaggagaucuucccgaccggacggauuaagcacaccgaagaguguacaugcggcuuugccagcaauaaaacgaucgaaugugcuugccgcgacaacuccuacaccgccaagagaccuuucgucaaacugaauguggagacagauaccgccgaaauucggcucaugugcacagagaccuaucuggacacgccccgcccugaugacgggagcaucacaggacccugugagucuaacggcgggaagggauccggcggcaucaaagggggauuuguucaucaaagaauggcuagcaagauuggccggugguacucucgcaccaugagcaaaaccgaaagaaaggggaugggacuguaugugaaguacgauggcgaccccugggcggacuccgaugcccucgcuuucucuggggucauggugagcauggaggaaccuggcugguacuccuuuggauucgagaucaaagacaagaaaugcgaugugccguguauuggcaucgaaaugguccacgacgggggaaaggagacauggcauagcgccgccaccgcuauuuauugccugaugggcucugggcagcuucugugggauacaguuacgggagugaacauggcccucuga

SEQ ID NO: 220844 - RNA, 1401 nt, Artificial Sequence
  derived and/or modified CDS sequence (opt5) from neuraminidase__InfluenzaB__ACI22561
augcugcccagcaccauccagacacucacgcuguuccuuaccuccggcggggugcugcucucucuguacgucagcgccucccuuucuuaucugcucuacagcgacauucugcugaaguuuuccccuacagagaucaccgcuccgacaaugccccucgauugcgccaacgcgucuaauguucaagcugugaacagaagcgccaccaaaggaggcacacugcuucugccugaacccgaguggaccuauccucggcucuccugucccgggagcacguuccagaaggcccugcuuauuucuccucaccgcuuuggagaaaccaaaggcaauuccgcuccgcugaucauuagagagcccuucaucgccugcgggccuaacgaauguaagcauuuugcucucacacacuacgccgcgcagcccggaggcuauuacaauggcacccgcggggaccggaacaaacugagacaucugaucagcgugaagcucggaaagauuccuacagucgaaaauucuaucuuccacauggccgcuugguccggcagcgccugccaugaugggaaagaguggaccuauauuggaguggacggccccgauaacaaugcucugcuuaagaucaaauacggggaggccuacacggacacauaucacucuuacgcgaacaagauucugcggacccaggaguccgccuguaauugcaucggaggcaacuguuaucucaugauuacagauggcagcgcuuccgggguuucugaaugccgcuuucugaaaaucagagagggacggaucauuaaggagaucuucccgaccggccgcgugaagcacaccgaagaguguacaugcggguuugccagcaauaaaacgauugaaugugcuugcagagacaacuccuacaccgccaagcggccuuucgucaaacuuaauguggagacagauaccgccgaaauccgccugaugugcacagacaccuaucucgauacgcccagaccugacgauggaagcauuacaggccccugugagucuaacggggacaagggauccggcggcaucaaagggggauuuguucaucaacggauggcuagcaagaucggccgcugguacucuagaaccaugagcaaaaccgagcggauggggaugggacuguaugugaaguacgacggcgaucccugggcggacuccgaugcccuggcuuucucuggggucauggugagcaugaaggaaccuggcugguacuccuuuggauucgagauuaaagacaagaaaugcgaugugccguguaucggcauugaaaugguccacgacgggggaaaggagacauggcauagcgccgccaccgcuaucuauugccucaugggcucugggcagcugcuuugggauacaguuacgggaguggacauggcccuguga

SEQ ID NO: 220845 - RNA, 1401 nt, Artificial Sequence; identical to SEQ ID NO: 220707
  derived and/or modified CDS sequence (opt5) from neuraminidase__InfluenzaB__ACI22563

SEQ ID NO: 220846 - RNA, 1401 nt, Artificial Sequence
  derived and/or modified CDS sequence (opt5) from neuraminidase__InfluenzaB__ACI22565
augcugcccagcaccauccagacacucacgcuguuccuuaccuccggcggggugcugcucucucuguacgucagcgccucccuuucuuaucugcucuacagcgacauucugcugaaguuuccuuccacagagaucaccgcuccgacaaugccccucgauugcgccaacgcgucuaauguucaagcugugaaccacagcgccaccaaaggagugacacugcuucugccugaacccgaguggaccuauccuagacucuccugucccggcagcacguuccagaaggcccugcuuauuucuccucaucgguuuggggaaaccaaaggaaauuccgcuccgcugaucauucgcgagcccuucaucgccugcggcccuaaggaauguaaacacuuugcucucacacauuacgccgcgcagcccgggggauauuacaacggcaccagaggcgaccggaauaagcugcgccaccugaucagcgucaagcucgggaaaauuccuacaguggagaacucuaucuuccauauggccgcuugguccggaagcgccugccacgauggcaaggaguggaccuauauugggguugacggacccgauaauaacgcucugcuuaaaaucaaguacggcgaagccuacacggacacauaucacucuuacgcgaauaacauucugagaacccaggaguccgccuguaauugcaucgggggaaacuguuaucucaugauuacagauggcagcgcuuccggcgugucugaaugccgguuucugaaaauccgcgaggggagaaucauuaaggagaucuucccgaccggacggauuaagcauaccgaagaguguacaugcggcuuugccagcaauaaaacgaucgaaugugcuugccgcgacaacuccuacaccgccaagagaccuuucgucaaacuuaauguggagacagauaccgccgaaauucggcugaugugcacagagaccuaucucgacacgccccgcccugaugacgggagcaucacaggacccugugagucuaacggcgggaagggauccggcggcaucaaagggggauuuguucaccaaagaauggcuagcaagauuggccggugguacucucgcaccaugagcaaaaucgaaagaaaggggaugggacuguaugugaaguacgauggcgaccccugggcggacuccgaugcccuggcuuucucuggggucauggugagcauggaggaaccuggcugguacuccuuuggauucgagauucgggacaaaaagugcgaugugccguguaucggcauugaaaugguccaugacgggggaaaagagaccuggcacagcgccgccacagcuaucuauugccucaugggcucugggcagcugcuuugggauaccguuacaggagugaacauggcccuguga

SEQ ID NO: 220847 - RNA, 1401 nt, Artificial Sequence; identical to SEQ ID NO: 220707
  derived and/or modified CDS sequence (opt5) from neuraminidase__InfluenzaB__ACI22567

SEQ ID NO: 220848 - RNA, 1401 nt, Artificial Sequence; identical to SEQ ID NO: 220707
  derived and/or modified CDS sequence (opt5) from neuraminidase__InfluenzaB__ACI22569

SEQ ID NO: 220849 - RNA, 1401 nt, Artificial Sequence
  derived and/or modified CDS sequence (opt5) from neuraminidase__InfluenzaB__ACJ53908
augcugcacagcaccauccagacacucacgcuguuccuuaccuccggcggggugcugcucucucuguacgucagcgccucccuuucuuaucugcucuacagcgacauucugcugaaguuuucccaaacagagaucaccgcucccauuaugccucucgauugcgccaacgcgucuagcguucaggcugugaauagauccgccgccaaaggagugacacugcuucugccggaacccgaguggaccuauccucggcucagcugucccggcucuacauuccagaaggcucugcuuaucuccccucaucgcuuuggggaaaccaaaggaaacagcgcuccccugauuaucagagagccuuucaucgccugcggcccgacggaauguaagcacuuugcccucacccauuacgcggcccagcccgggggauauuacaauggcacacgggaggaccgcaacaaacugagacaccugauuucugucaagcucggcaagaucccuaccguggaaaauuccauuuuccauauggcugccuggagcgggucugcuugccacgauggaaaagaauggacauauaucggcguugacgggcccgauuccaacgcccugcuuaagauuaaauacggagaggcguacaccgacacguaucacagcuacgccaagaauauccugcggacacaagaauccgcuuguaacugcauuggcggggauuguuaucucaugaucaccgacggaccugccucuggcaucagcgagugccgcuuucugaaaauuagagagggccggaucauuaaggaaaucuuccccacagggcgcgugaagcauaccgaggaauguaccugcggauuugcuuccaauaaaacaauugagugugccugcagagauaacagcuacacggccaagcggccguucgucaaacuuaauguggaaaccgacacagcugagauccgccugaugugcaccgagacauaucucgauaccccuagacccaacgacggcucuaucacggggccuugugaauccgauggagacaagggcagcgggggaauuaaaggcggcuuuguucaccagcggauggcgucuaagaucgggcgcugguacagcagaacaauguccaaaaccaagcggaugggaaugggccuguaugugaaguacgacggggaucccuggaccgacucugaggcccuggcucucagcggagucaugguguccauggaggagcccggcugguacagcuucggguuugaaauuaaagauaagaaaugcgacgugccuuguaucggcauugagaugguccaugauggaggcaagacaaccuggcacucugccgccacagcuaucuauugccugaugggguccggacagcuucugugggacacgguuaccggcguggauauggcccucuga

SEQ ID NO: 220850 - RNA, 1401 nt, Artificial Sequence; identical to SEQ ID NO: 220725
  derived and/or modified CDS sequence (opt5) from neuraminidase__InfluenzaB__ACN32560

SEQ ID NO: 220851 - RNA, 1401 nt, Artificial Sequence; identical to SEQ ID NO: 220795
  derived and/or modified CDS sequence (opt5) from neuraminidase__InfluenzaB__ACN32582

SEQ ID NO: 220852 - RNA, 1401 nt, Artificial Sequence; identical to SEQ ID NO: 220707
  derived and/or modified CDS sequence (opt5) from neuraminidase__InfluenzaB__ACN32593

SEQ ID NO: 220853 - RNA, 1401 nt, Artificial Sequence
  derived and/or modified CDS sequence (opt5) from neuraminidase__InfluenzaB__ACN32604
augcugcccagcaccauccagacacucacgcuguuccuuaccuccggcggggugcugcucucucuguacgucagcgccucccuuucuuaucugcucuacagcgacauucugcugaaguuuuccccuacagagaucaccgcuccgacaaugccccucgauugcgccaacgcgucuaauguucacgcugugaacagaagcgccaccaaaggagugacacugcuucugccugaacccgaguggaccuauccucggcucuccugucccggcagcacguuccaaaaggcccugcuuauuucuccucaucgcuuuggggaaaccaaaggaaauuccgcuccgcugaucauuagagagcccuucaucgccugcggcccuaacgaauguaagcacuuugcucucacacauuacgccgcgcagcccgggggauauuacaauggcacccggggcgaccgcaacaaacugagacaccugaucagcgucaagcucgggaagauuccuacaguggaaaauucuaucuuccauauggccgcuugguccggaagcgccugccacgauggcaaagaguggaccuauauugggguugacggacccgauaacaaugcucugcuuaagaucaaauacggcgaggccuacacggacacauaucacucuuacgcgaacaauauucugcggacccaggaguccgccuguaacugcaucgggggaaauuguuaucucaugauuacagauggcagcgcuuccggcgugucugaaugccgcuuucugaagaucagagaggggcggaucauuaaagagaucuucccgaccggacgcgucaagcauaccgaagaguguacaugcggcuuugccagcaacaagacgauugaaugugcuugcagagacaauuccuacaccgccaaacggccuuucgugaaacuuaacguugagacagauaccgccgaaauccgccugaugugcacagacaccuaucucgauacgcccagaccugacgaugggagcauuacaggacccugugaguuuaacggcgacaaggggucuggaggcaucaagggcggguucgugcaccagcggauggcuuccaaaaucggacgcugguacagcagaaccaugucuaagaccgagcggaugggcauggggcuguaugucaaauacgacggagaucccugggcggacagcgaugcccuggcuuuuuccggcgugauggugucuaugaaggaaccugggugguacagcuucggcuucgagauuaaggacaaaaagugcgaugucccguguaucggaauugaaaugguucaugacggcgggaaagagacauggcacuccgccgccaccgcuaucuauugccucaugggaagcggccaacugcuuugggauacagugacggggguggacauggcccuguga

SEQ ID NO: 220854 - RNA, 1401 nt, Artificial Sequence; identical to SEQ ID NO: 220707
  derived and/or modified CDS sequence (opt5) from neuraminidase__InfluenzaB__ACN32615

SEQ ID NO: 220855 - RNA, 1401 nt, Artificial Sequence
  derived and/or modified CDS sequence (opt5) from neuraminidase__InfluenzaB__ACN32775
augcugcccagcaccauccagacacucacgcuguuccuuaccuccggcggggugcugcucucucuguacgucagcgccucccuuucuuaucugcucuacagcgacauucugcugaaguuuuccccuacagagaucaacgcuccgaccaugccccucgauugcgccaaugcgucuaacguucacgcugugaauagaagcgccacaaaaggagugacccugcuucugccugaacccgaguggacauauccucggcucuccugucccggcagcaccuuccaaaaggcccugcuuauuucuccucaucgcuuuggggaaacgaaaggaaacuccgcuccgcugaucauuagagagcccuucaucgccugcggcccuaaugaauguaagcacuuugcucucacccauuacgccgcgcagcccgggggauauuacaacggcacacggggcgaccgcaauaaacugagacaccugaucagcgucaagcucgggaagauuccuaccguggagaacucuaucuuccauauggccgcuugguccggaagcgccugccacgauggcaaagaguggacauauauugggguugacggacccgauaauaacgcucugcuuaagaucaaauacggcgaagccuacaccgacacguaucacucuuacgcgaauaacauucugcggacacaggaguccgccuguaauugcaucgggggaaacuguuaucucaugauuaccgauggcagcgcuuccggcaucucugaaugccgcuuucugaagaucagagaggggcggauuaucaaagagauuuucccgacaggacgcgugaagcauaccgaagaguguaccugcggcuuugccagcaauaaguccaucgaaugugcuugcagagacaacagcuacacagccaaacggccuuucgucaaacuuaacguggagacggauaccgccgaaauucgccugaugugcacagacaccuaucucgauacacccagaccugacgaugggucuaucaccggacccugugaguccaauggcgacaaggggagcggaggcaucaagggcggguuuguucaccagcggauggcuucuaaaauuggacgcugguacagcagaacgauguccaagacagagcggaugggcauggggcuguaugugaaauacgacggagaucccugggcggacucugaugcccuggcuuucagcggcgucaugguguccaugaaggaaccugggugguacagcuuuggcuucgagaucaaggacaaaaagugcgaugugccguguauuggaaucgaaaugguccaugacggcgggaaagagaccuggcacucugccgccaccgcuauuuauugccucaugggauccggccaacugcuuugggauacaguuaccgggguggacauggcccuguga

SEQ ID NO: 220856 - RNA, 1401 nt, Artificial Sequence; identical to SEQ ID NO: 220707
  derived and/or modified CDS sequence (opt5) from neuraminidase__InfluenzaB__ACN32786

SEQ ID NO: 220857 - RNA, 1401 nt, Artificial Sequence
  derived and/or modified CDS sequence (opt5) from neuraminidase__InfluenzaB__ACO05928
augcugcccagcaccauccagacacucacgcuguuccuuaccuccggcggggugcugcucucucuguacgucagcgccucccuuucuuaucugcucuacagcgacauucugcugaaguuuccuuccacagagaucaccgcuccgacaaugccccucgauugcgccaacgcgucuaauguucaagcugugaacagaagcgccaccaaaggagugacacugcuucugccugaacccgaguggaccuauccucggcucuccugucccggcagcacguuccagaaggcccugcuuauuucuccucaccgcuuuggggaaaccaaaggaaauuccgcuccgcugaucauuagagagcccuucaucgccugcggcccuaaggaauguaaacauuuugcucucacacacuacgccgcgcagcccgggggauauuacaacggcacccggggcgaccgcaauaagcugagacaucugaucagcgucaagcucgggaaaauuccuacaguggagaacucuaucuuccacauggccgcuugguccggaagcgccugccaugauggcaaggaguggaccuauauugggguugacggacccgauaauaacgcucugcuuaaaaucaaguacggcgaagccuacacggacacauaucacucuuacgcgaauaacauucugcggacccaggaguccgccuguaauugcaucgggggaaacuguuaucucaugauuacagauggcagcgcuuccggcgugucugaaugccgcuuucugaaaaucagagaggggcggaucauuaaggagaucuucccgaccggacgcauuaagcacaccgaagaguguacaugcggcuuugccagcaauaaaacgaucgaaugugcuugcagagacaacuccuacaccgccaagcggccuuucgucaaacuuaauguggagacagauaccgccgaaauucgccugaugugcacagagaccuaucucgacacgcccagaccugaugacgggagcaucacaggacccugugagucuaacggcgauaagggguccggaggcaucaaaggcggguuuguucaucaacggauggcuagcaagauuggacgcugguacucuagaaccaugagcaaaaccaagcggaugggcauggggcuguaugugaaguacgacggagaccccugggcggauuccgacgcccuggcuuucucuggcgucauggugccuauggaggaaccggggugguacagcuuuggcuucgaaaucaaagauaagaaaugcgacgugcccuguauuggaaucgagaugguccacgauggcgggaaggaaacauggcauuccgccgccaccgcuauuuauugccucaugggaagcggccagcugcuuugggacacaguuacgggggugaacauggcccuguga

SEQ ID NO: 220858 - RNA, 1401 nt, Artificial Sequence; identical to SEQ ID NO: 220719
  derived and/or modified CDS sequence (opt5) from neuraminidase__InfluenzaB__ACO05950

SEQ ID NO: 220859 - RNA, 1401 nt, Artificial Sequence
  derived and/or modified CDS sequence (opt5) from neuraminidase__InfluenzaB__ACO05961
augcugcccagcaccauccagacacucacgcuguuccuuaccuccggcggggugcugcucucucuguacgucagcgccucccuuucuuaucugccuuacagcgacauucuccugaaguuuccguccacagagaucaccgcucccacaaugccucuggauugcgccaacgcgucuaauguucaagcugugaacagaagcgccaccaaaggagugacacuccugcuucccgaaccugaguggaccuauccccggcuguccuguccuggcagcacguuccagaaggcccuccugauuucuccgcaccgcuuuggggaaaccaaaggaaauuccgcuccccuuaucauuagagagccuuucaucgccugcggccccaaggaauguaaacauuuugcucugacacacuacgccgcgcagccugggggauauuacaacggcacccggggcgaccgcaauaagcucagacaucugaucagcgucaagcuggggaaaauucccacaguggagaacucuaucuuccacauggccgcuugguccggaagcgccugccaugauggcaaggaguggaccuauauugggguugacggaccggauaauaacgcucuccugaaaaucaaguacggcgaagccuacacggacacauaucacucuuacgcgaauaacauucuucggacccaggaguccgccuguaauugcaucgggggaaacuguuaucugaugauuacagauggcagcgcuuccggcgugucugaaugccgcuuucucaaaaucagagaggggcggaucauuaaggagaucuucccuaccggacgcauuaagcacaccgaagaguguacaugcggcuuugccagcaauaaaacgaucgaaugugcuugcagagacaacuccuacaccgccaagcggcccuucgucaaacugaauguggagacagauaccgccgaaauucgccuuaugugcacagagaccuaucuggacacgccuagacccgaugacgggagcaucacaggacccugugagucuaacggcgauaagggguccggaggcaucaaaggcggguuuguucaucaacggauggcuagcaagauuggacgcugguacucuagaaccaugagcaaaaccaagcggaugggcauggggcucuaugugaaguacgacggagacccuugggcggauuccgacgcccuggcuuucucuggcgucauggugagcauggaggaaccggggugguacuccuuuggcuucgaaaucaaagauaagaaaugcgacgugcccuguauuggaaucgagaugguccacgauggcgggaaggaaacauggcauagcgccgccaccgcuauuuauugccugaugggaucuggccagcuccugugggacacaguuacgggggugaacauggcccuuuga

SEQ ID NO: 220860 - RNA, 1401 nt, Artificial Sequence
  derived and/or modified CDS sequence (opt5) from neuraminidase__InfluenzaB__ACO05972
augcugcccagcaccauccagacacucacgcuguuccuuaccuccggcggggugcugcucucucuguacgucagcgccucccuuucuuaucugcucuacagcgacauucugcugaaguuuucccaaacagagaucaccgcuccuauuaugccgcucgauugcgccaacgcgucuaauguucaggcugugaacagaagcgccgccaaaggagugacacugcuucugcccgaaccugaguggaccuauccccggcucuccuguccuggcagcacauuccagaaggcucugcuuaucucuccccaccgcuuuggggaaaccaaaggaaauuccgccccucugauuaucagagagccguucaucgcuugcggccccacggaauguaagcauuuugcccucacccacuacgcggcccagccugggggauauuacaacggcacacgggaggaccgcaauaaacugagacaucugauuagcgucaagcucggcaagauccccaccguggagaacucuauuuuccacauggcugccugguccgggagcgcuugccaugauggaaaagaauggacauauaucggcguugacgggccugauucuaaugcccugcuuaagauuaaauacggagaggcguacaccgacacguaucacuccuacgccaagaacauccugcggacacaagaaagcgcuuguaauugcauuggcggggauuguuaucucaugaucaccgacggacccgccuccggcaucucugagugccgcuuucugaaaauuagagagggccggaucauuaaggaaaucuucccgacagggcgcgugaagcacaccgaggaauguaccugcggauuugcuagcaacaaaacaauugagugugccugcagagauaauuccuacacggccaagcggccuuucgucaaacuuaacguggaaaccgacacagcugagauccgccugaugugcaccgagacauaucucgauacccccagaccuaaugacggcagcaucacggggcccugugaaucugauggagacaagggcuccgggggaauuaaaggcggcuuuguucaucagcggauggcgagcaagaucgggcgcugguacucuagaacaaugagcaaaaccaagcggaugggaaugggccuguaugugaaguacgacggggaucccuggaccgacuccgaggcccuggcucucucuggagucauggugagcauggaggaaccuggcugguacuccuucggguuugaaauuaaagauaagaaaugcgacgugccguguaucggcauugagaugguccacgauggaggcaagacaaccuggcauagcgccgccacagcuaucuauugccugauggggucuggacagcuucugugggacacgguuaccggcguggauauggcccucuga

SEQ ID NO: 220861 - RNA, 1401 nt, Artificial Sequence; identical to SEQ ID NO: 220860
  derived and/or modified CDS sequence (opt5) from neuraminidase__InfluenzaB__ACO05983

SEQ ID NO: 220862 - RNA, 1401 nt, Artificial Sequence; identical to SEQ ID NO: 220860
  derived and/or modified CDS sequence (opt5) from neuraminidase__InfluenzaB__ACO05994

SEQ ID NO: 220863 - RNA, 1401 nt, Artificial Sequence
  derived and/or modified CDS sequence (opt5) from neuraminidase__InfluenzaB__ACO06005
augcugcccagcaccauccagacacucacgcuguuccuuaccuccggcggggugcugcucucucuguacgucagcgccucccuuucuuaucugcucuacagcgacauucugcugaaguuuuccccuacagagaucaccgcuccgacaaugccccucgauugcgccaacgcgucuaauguucaagcugugaacagaagcgccaccaaaggagugacacugcuucugccugaacccgaguggaccuauccucggcucuccugucccggcagcacguuccagaaggcccugcuuauuucuccucaccgcuuuggggaaaccaaaggaaauuccgcuccgcugaucauuagagagcccuucaucgccugcggcccuaacgaauguaagcauuuugcucucacacacuacgccgcgcagcccgggggauauuacaauggcacccggggcgaccgcaacaaacugagacaucugaucagcgucaagcucgggaagauuccuacaguggaaaauucuaucuuccacauggccgcuugguccggaagcgccugccaugauggcaaagaguggaccuauauugggguugacggacccgauaacaaugcucugcuuaagaucaaauacggcgaggccuacacggacacauaucacucuuacgcgaacaagauucugcggacccaggaguccgccuguaauugcaucgggggaaacuguuaucucaugauuacagauggcagcgcuuccggcgugucugaaugccgcuuucugaaaaucagagaggggcggaucauuaaggagaucuucccgaccggacgcgucaagcacaccgaagaguguacaugcggcuuugccagcaauaaaacgauugaaugugcuugcagagacaacuccuacaccgccaagcggccuuucgugaaacuuaauguugagacagauaccgccgaaauccgccugaugugcacagacaccuaucucgauacgcccagaccugacgaugggagcauuacaggacccugugagucuaacggcgaccggggguccggaggcaucaagggcggguuugugcaucaacgcauggcuagcaaaaucggaagaugguacucucggaccaugagcaagaccgagagaaugggcauggggcuguaugucaaauacgacggagaucccugggcggacuccgaugcccuggcuuucucuggcgugauggugagcaugaaggaaccugggugguacuccuuuggcuucgagauuaaggacaaaaagugcgaugucccguguaucggaauugaaaugguucacgacggcgggaaagagacauggcauagcgccgccaccgcuaucuauugccucaugggaucuggccagcugcuuugggauacagugacggggguggacauggcccuguga

SEQ ID NO: 220864 - RNA, 1401 nt, Artificial Sequence
  derived and/or modified CDS sequence (opt5) from neuraminidase__InfluenzaB__ACO06027
augcugcccagcaccauccagacacucacgcuguuccuuaccuccggcggggugcugcucucucuguacgucagcgccucccuuucuuaucugcucuacagcgacauucugcugaaguuuucccaaacagagaucaccgcuccuauuaugccgcucgauugcgccaacgcgucuaauguucaggcugugaacagaagcgccgccaaaggagugacacugcuucugcccgaaccugaguggaccuauccccggcucuccuguccuggcagcacauuccagaaggcucugcuuaucucuccccaccgcuuuggggaaaccaaaggaaauuccgccccucugauuaucagagagccguucaucgcuugcggccccacggaauguaagcauuuugcccucacccacuacgcggcccagccugggggauauuacaacggcacacgggaggaccgcaauaaacugagacaucugauuagcgucaagcucggcaagauccccaccguggagaacucuauuuuccacauggcugccugguccgggagcgcuugccaugauggaaaagaauggacauauaucggcguugacgggccugauucuaaugcccugcuuaagauuaaauacggagaggcguacaccgacacguaucacuccuacgccaagaacauccugcggacacaagaaagcgcuuguaauugcauuggcggggauuguuaucucaugaucaccgacggacccgccuccggcaucucugagugccgcuuucugaaaauuagagagggccggaucauuaaggaaaucuucccgacagggcgcgugaagcacaccgaggaauguaccugcggauuugcuagcaacaaaacaauugagugugccugcagagauaauuccuacacggccaagcggccuuucgucaaacuuaacguggaaaccgacacagcugagauccgccugaugugcaccgagacauaucucgauacccccagaccuaaugacggcagcaucacggggcccugugaaucugauggagacaagggcuccgggggaauuaaaggcggcuuuguucaucagcggauggcgagcaagaucgggcgcugguacucuagaacaaugagcaaaaccaagcggaugggaaugggccuguaugugaaguacgacggggaucccuggaccgacuccgaggcccuggcucucucuggagucauggugagcauggaggaaccuggcugguacuccuucggguuugaaauuaaagauaagaaaugcgacgugccguguaucggcauugagaugguccacgauggaggcaagacaaccuggcauagcgccgccacagcuaucuauugccugauggggucuggacagcuucugugggacacgguuaccggcguggauaugacacucuga

SEQ ID NO: 220865 - RNA, 1401 nt, Artificial Sequence
  derived and/or modified CDS sequence (opt5) from neuraminidase__InfluenzaB__ACO06066
augcugcccagcaccauccagacacucacgcuguuccuuaccuccggcggggugcugcucucucuguacgucagcgccucccuuucuuaucugcucuacagcgacauucugcugaaguuuucccaaacagagaucaccgcuccuauuaugccgcucgauugcgccaacgcgucuaauguucaggcugugaacagaagcguggccaaaggagucacacugcuucugcccgaaccugaguggaccuauccccggcucuccuguccuggcagcacauuccagaaggcccugcuuaucucuccccaccgcuuuggggaaaccaaaggaaauuccgcuccucugauuaucagagagccguucaucgccugcggccccacggaauguaagcauuuugcucucacccacuacgccgcgcagccugggggauauuacaacggcacacgggaggaccgcaauaaacugagacaucugauuagcgugaagcucggcaagauccccaccguugagaacucuauuuuccacauggccgcuugguccgggagcgccugccaugauggaaaagaauggacauauaucggcguggacgggccugauucuaaugcucugcuuaagauuaaauacggagaggccuacaccgacacguaucacuccuacgcgaagaacauccugcggacacaagaaagcgccuguaauugcauuggcggggauuguuaucucaugaucaccgacggacccgcuuccggcaucucugagugccgcuuucugaaaauuagagagggccggaucauuaaggaaaucuucccgacagggcgcgucaagcacaccgaggaauguaccugcggauuugccagcaacaaaacaauugagugugcuugcagagauaauuccuacacggccaagcggccuuucgugaaacuuaacguugaaaccgacacagccgagauccgccugaugugcaccgagacauaucucgauacccccagaccuaaugacggcagcaucacggggcccugugaaucugauggagacaagggcuccgggggaauuaaaggcggcuuugugcaucagcggauggcuagcaagaucgggcgcugguacucuagaacaaugagcaaaaccaagcggaugggaaugggccuguaugucaaguacgacggggaucccuggaccgacuccgaggcgcuggcccucucuggagugauggugagcauggaggaaccuggcugguacuccuucggguuugaaauuaaagauaagaaaugcgacgucccguguaucggcauugagaugguucacgauggaggcaagacaaccuggcauagcgcugccacagccaucuauugccugauggggucuggacagcuucugugggacacggugaccggcguggauaugacacucuga

SEQ ID NO: 220866 - RNA, 1401 nt, Artificial Sequence
  derived and/or modified CDS sequence (opt5) from neuraminidase__InfluenzaB__ACO94665
augcugcccagcaccauccagacacucacgcuguuccuuaccuccggcggggugcugcucucucuguacgucagcgccucccuuucuuaucugcucuacagcgacauucugcugaaguuuuccccuacagagaucaccgcuucuacaaugccgcucgauugcgccaacgcgagcaauguucaagcugugaacagauccgccaccaaaggagugacacugcuucugcccgaaccugaguggaccuauccccggcucagcuguccuggcucuacguuccagaaggcccugcuuauuagcccccaccgcuuuggggaaaccaaaggaaauuccgcuccucugaucauuagagagccguucaucgccugcggccccaacgaauguaagcauuuugcucucacacacuacgccgcgcagccugggggauauuacaauggcacccggggcgaccgcaacaaacugagacaucugaucucugucaagcucgggaagauucccacaguggaaaauuccaucuuccacauggccgcuuggagcggaucugccugccaugauggcaaagaguggaccuauauugggguugacggaccugauaacaaugcucugcuuaagaucaaauacggcgaggccuacacggacacauaucacuccuacgcgaacaagauucugcggacccaggagagcgccuguaauugcaucgggggaaacuguuaucucaugauuacagauggcuccgcuucuggcgugagcgaaugccgcuuucugaaaaucagagaggggcggaucauuaaggagaucuuccccaccggacgcgucaagcacaccgaagaguguacaugcggcuuugccuccaauaaaacgauugaaugugcuugcagagacaacagcuacaccgccaagcggccguucgugaaacuuaauguugagacagauaccgccgaaauccgccugaugugcacagacaccuaucucgauacgccuagacccgacgaugggucuauuacaggaccuugugaguccaacggcgacaaggggagcggaggcaucaaaggcggguuugugcaucaacggauggcuucuaagaucggacgcugguacagcagaaccauguccaaaaccgagcggaugggcauggggcuguaugucaaguacgacggagaucccugggcggacucugaugcccuggcuuucagcggcgugaugguguccaugaaggaacccgggugguacagcuuuggcuucgagauuaaagacaagaaaugcgaugucccuuguaucggaauugaaaugguucacgacggcgggaaggagacauggcauucugccgccaccgcuaucuauugccucaugggauccggccagcugcuuugggauacagugacggggguggacauggcccuguga

SEQ ID NO: 220867 - RNA, 1401 nt, Artificial Sequence; identical to SEQ ID NO: 220707
  derived and/or modified CDS sequence (opt5) from neuraminidase__InfluenzaB__ACQ45607

SEQ ID NO: 220868 - RNA, 1401 nt, Artificial Sequence
  derived and/or modified CDS sequence (opt5) from neuraminidase__InfluenzaB__ACQ45610
augcugcccagcaccauccagacacucacgcuguuccuuaccuccggcggggugcugcucucucuguacgucagcgccucccuuucuuaucugcucuacagcgacauucugcugaaguuuuccccuacagagaucaccgcuccgacaguuccccucgauugcgccaacgcgucuaaugugcaagcugugaacagaagcgccaccaaaggagucacacugcuucugccugaacccgaguggaccuauccucggcucuccugucccggcagcacguuccagaaggcccugcuuauuucuccucaccgcuuuggggaaaccaaaggaaauuccgcuccgcugaucauuagagagcccuucaucgccugcggcccuaacgaauguaagcauuuugcucucacacacuacgccgcgcagcccgggggauauuacaauggcacccggggcgaccgcaacaaacugagacaucugaucagcgugaagcucgggaagauuccuacaguugaaaauucuaucuuccacauggccgcuugguccggaagcgccugccaugauggcaaagaguggaccuauauugggguggacggacccgauaacaaugcucugcuuaagaucaaauacggcgaggccuacacggacacauaucacucuuacgcgaacaagauucugcggacccaggaguccgccuguaauugcaucgggggaaacuguuaucucaugauuacagauggcagcgcuuccggcgucucugaaugccgcuuucugaaaaucagagaggggcggaucauuaaggagaucuucccgaccggacgcgugaaguacaccgaagaguguacaugcggcuuugccagcaauaaaacgauugaaugugcuugcagagacaacuccuauaccgccaagcggccuuucguuaaacuuaauguggagacagauaccgccgaaauccgccugaugugcacagacaccuaccucgauacgcccagaccugacgaugggagcauuacaggacccugugagucuaacggcgacaagggguccggaggcaucaaaggcggguuuguccaccaacggauggcuagcaagaucggacgcugguauucuagaaccaugagcaaaaccgagcggaugggcauggggcuguacgugaaguacgacggagaucccugggcggacuccgaugcccuggcuuucucuggcgugauggucagcaugaaggaaccugggugguauuccuuuggcuucgagauuaaagacaagaaaugcgauguuccguguaucggaauugaaauggugcaugacggcgggaaggagacauggcacagcgccgccaccgcuaucuacugccucaugggaucuggccagcugcuuugggauacagugacgggggucgacauggcccuguga

SEQ ID NO: 220869 - RNA, 1401 nt, Artificial Sequence; identical to SEQ ID NO: 220707
  derived and/or modified CDS sequence (opt5) from neuraminidase__InfluenzaB__ACQ45613

SEQ ID NO: 220870 - RNA, 1401 nt, Artificial Sequence; identical to SEQ ID NO: 220863
  derived and/or modified CDS sequence (opt5) from neuraminidase__InfluenzaB__ACR15626

SEQ ID NO: 220871 - RNA, 1401 nt, Artificial Sequence; identical to SEQ ID NO: 220863
  derived and/or modified CDS sequence (opt5) from neuraminidase__InfluenzaB__ACR15637

SEQ ID NO: 220872 - RNA, 1401 nt, Artificial Sequence; identical to SEQ ID NO: 220834
  derived and/or modified CDS sequence (opt5) from neuraminidase__InfluenzaB__ACR15648

SEQ ID NO: 220873 - RNA, 1401 nt, Artificial Sequence; identical to SEQ ID NO: 220863
  derived and/or modified CDS sequence (opt5) from neuraminidase__InfluenzaB__ACR15659

SEQ ID NO: 220874 - RNA, 1401 nt, Artificial Sequence; identical to SEQ ID NO: 220863
  derived and/or modified CDS sequence (opt5) from neuraminidase__InfluenzaB__ACR15670

SEQ ID NO: 220875 - RNA, 1401 nt, Artificial Sequence; identical to SEQ ID NO: 220688
  derived and/or modified CDS sequence (opt5) from neuraminidase__InfluenzaB__ACR15681

SEQ ID NO: 220876 - RNA, 1401 nt, Artificial Sequence
  derived and/or modified CDS sequence (opt5) from neuraminidase__InfluenzaB__ACR15692
augcugcccagcaccauccagacacucacgcuguuccuuaccuccggcggggugcugcucucucuguacgucagcgccucccuuucuuaucugcucuacagcgacauucugcugaaguuuuccccuacagagaucaccgcuccgacaaugccccucggaugcgccaacgcgucuaauguucaagcugugaacagaagcgccaccaaaggcgugacacugcuucugccugaacccgaguggaccuauccucggcucuccugucccgggagcacguuccagaaggcccugcuuauuucuccucaccgcuuuggagaaaccaaaggcaauuccgcuccgcugaucauuagagagcccuucaucgccugcgggccuaaggaauguaaacauuuugcucucacacacuacgccgcgcagcccggaggcuauuacaacggcacccgcggggaucggaauaagcugagacaucugaucagcgucaagcucggaaaaauuccuacaguggagaacucuaucuuccacauggccgcuugguccggcagcgccugccaugacgggaaggaguggaccuauauuggaguugauggccccgacaauaacgcucugcuuaaaaucaaguacggggaagccuacacggauacauaucacucuuacgcgaauaacauucugcggacccaggaguccgccuguaauugcaucggaggcaacuguuaucucaugauuacagacggcagcgcuuccgggaucucugaaugccgcuuucugaaaaucagagagggacggauuaucaaggagauuuucccgaccggccgcgugaagcacaccgaagaguguacaugcggguuugccagcaauaaaacgaucgaaugugcuugcagagauaacuccuacaccgccaagcggccuuucgucaaacuuaauguggagacagacaccgccgaaauucgccugaugugcacagagaccuaucucgauacgcccagaccugacgauggaagcaucacaggccccugugagucuaacggggacaagggauccggcggcaucaaagggggauuuguucaucaacggauggcuagcaagauuggccgcugguacucuagaaccaugagcaaaaccaagcggauggggaugggacuguaugugaaguacgauggcgaccccugggcggacaacgaugcccuggcucucuccggggucauggugucuauggaggaaccuggcugguacagcuucggauuugaaaucaaagacaagaaaugcgaugugccguguauuggcaucgagaugguccacgacgggggaaaggaaacauggcauuccgccgccaccgcuauuuauugccugaugggcagcgggcagcuucugugggauacaguuacgggaguggacauggcccucuga

SEQ ID NO: 220877 - RNA, 1401 nt, Artificial Sequence; identical to SEQ ID NO: 220864
  derived and/or modified CDS sequence (opt5) from neuraminidase__InfluenzaB__ACR15703

SEQ ID NO: 220878 - RNA, 1401 nt, Artificial Sequence; identical to SEQ ID NO: 220864
  derived and/or modified CDS sequence (opt5) from neuraminidase__InfluenzaB__ACR15714

SEQ ID NO: 220879 - RNA, 1401 nt, Artificial Sequence; identical to SEQ ID NO: 220779
  derived and/or modified CDS sequence (opt5) from neuraminidase__InfluenzaB__ACR15725

SEQ ID NO: 220880 - RNA, 1401 nt, Artificial Sequence; identical to SEQ ID NO: 220740
  derived and/or modified CDS sequence (opt5) from neuraminidase__InfluenzaB__ACR15736

SEQ ID NO: 220881 - RNA, 1401 nt, Artificial Sequence; identical to SEQ ID NO: 220863
  derived and/or modified CDS sequence (opt5) from neuraminidase__InfluenzaB__ACR39340

SEQ ID NO: 220882 - RNA, 1401 nt, Artificial Sequence
  derived and/or modified CDS sequence (opt5) from neuraminidase__InfluenzaB__ADL28399
augcugcccagcaccauccagacacucacgcuguuccuuaccuccggcggggugcugcucucucuguacgucagcgccucccuuucuuaucugcucuacagcgacauucugcugaaguuuuccccuacagagaucaccgcuccgacaaugccccucgauugcgccaacgcgucuaauguucaagcugugaacagaagcgccaccaaaggagugacacugcuucugccugaacccgaguggaccuauccucggcucuccugucccggcagcacguuccagaaggcccugcuuauuucuccucaccgcuuuggggaaaccaaaggaaauuccgcuccgcugaucauuagagagcccuucaucgccugcggcccuaacgaauguaagcauuuugcucucacacacuacgccgcgcagcccgggggauauuacaauggcacccggggcgaccgcaacaaacugagacaucugaucagcgucaagcucgggaagauuccuacaguggaaaauucuaucuuccacauggccgcuugguccggaagcgccugccaugauggcaaagaguggaccuauauugggguugacggacccgauaacaaugcucugcuuaagaucaaauacggcgaggccuacacggacacauaucacucuuacgcgaacaauauucugcggacccaggaguccgccuguaacugcaucgggggaaauuguuaucucaugauuacagauggcagcgcuuccggcgugucugaaugccgcuuucugaagaucagagaggggcggaucauuaaagagaucuucccgaccggacgcgucaagcacaccgaagaguguacaugcggcuuugccagcaacaagauuaucgaaugugcuugcagagacuccagcuacacggccaaacggccuuucgugaaacuuaauguugagaccgauacagccgaaauucgccugaugugcaccgagacauaucucgacacccccagaccuaacgaugggucuaucacgggacccugugaguccaacggcgacaaggggagcggaggcaucaagggcggguuugugcaucaacggauggcuucuaaaauuggacgcugguacagcagaacaauguccaagaccgaacggaugggcauggggcuguaugucaaauacgauggagaccccugggcggacucugaugcccuggcucucagcggcgugaugguguccauggaggaaccugggugguacagcuucggcuuugagaucaaggacaagaaaugcgaugucccguguauuggaaucgaaaugguucacgacggcgggaaggagaccuggcauucugccgccacagcuauuuauugccugaugggauccggccagcuucugugggauaccgugacagggguggacauggcccucuga

SEQ ID NO: 220883 - RNA, 1401 nt, Artificial Sequence; identical to SEQ ID NO: 220860
  derived and/or modified CDS sequence (opt5) from neuraminidase__InfluenzaB__ADN32822

SEQ ID NO: 220884 - RNA, 1401 nt, Artificial Sequence
  derived and/or modified CDS sequence (opt5) from neuraminidase__InfluenzaB__ADR02756
augcugcccagcaccauccagacacucacgcuguuccuuaccuccggcggggugcugcucucucuguacgucagcgccucccuuucuuaucugcucuacagcgacauucugcugaaguuuucccaaacagagaucaccgcuccuauuaucccgcucgauugcgccaacgcgucuaauguucaggcugugaacagaagcgccgccaaaggagugacacugcuucugcccgaaccugaguggaccuauccccggcucuccuguccuggcagcacauuccagaaggcucugcuuauuucuccccaccgcuuuggggaaaccaaaggaaauuccgccccucugaucaucagagagccguucauugcuugcggccccacggaauguaagcauuuugcccucacccacuacgcggcccagccugggggauauuacaacggcacacgggaggaccgcaauaaacugagacaucugaucagcgucaagcucggcaagauucccaccguggagaacucuaucuuccacauggcugccugguccgggagcgcuugccaugauggaaaagaauggacauauauuggcguugacgggccugauucuaaugcccugcuuaagaucaaauacggagaggcguacaccgacacguaucacuccuacgccaagaacauucugcggacacaagaaagcgcuuguaauugcaucggcggggauuguuaucucaugaucaccgacggacccgccuccggcauuucugagugccgcuuucugaaaaucagagagggccggauuaucaaggaaauuuucccgacagggcgcgugaagcacaccgaggaauguaccugcggauuugcuagcaacaaaacaaucgagugugccugcagagauaauuccuacacggccaagcggccuuucgucaaacuuaacguggaaaccgacacagcugagauccgccugaugugcaccgagacauaucucgauacccccagaccuaaugacggcagcauuacggggcccugugaaucugauggagacaagggcuccgggggaaucaaaggcggcuuuguucaucagcggauggcgagcaagauugggcgcugguacucuagaacaaugagcaaaaccaagcggaugggaaugggccuguaugugaaguacgacggggaucccuggaccgacuccgaggcccuggcucucucuggagucauggugagcauggaggaaccuggcugguacuccuucggguuugaaaucaaagauaagaaaugcgacgugccguguauuggcaucgagaugguccacgauggaggcaagacaaccuggcauagcgccgccacagcuaucuauugccugauggggucuggacagcuucugugggacacgguuaccggcguggauauggcccucuga

SEQ ID NO: 220885 - RNA, 1401 nt, Artificial Sequence
  derived and/or modified CDS sequence (opt5) from neuraminidase__InfluenzaB__AEA51353
augcugcccagcaccauccagacacucacgcuguuccuuaccuccggcggggugcugcucucucuguacgucagcgccucccuuucuuaucugcucuacagcgacauucugcugaaguuuuccagaacagagaucaccgcuccuauuaugccgcucgauugcgccaacgcgucuaauguucaagcugugaaccggagcgccacaaaaggagugacccugcuucugcccgaaccugaguggacauauccccgccucuccuguccuggcagcaccuuccagaaggcccugcuuaucucuccccacagauuuggggaaacgaaaggaaauuccgcuccucugauuauccgggagccguucaucgccugcggccccaaggaauguaaacauuuugcucucacccacuacgccgcgcagccugggggauauuacaacggcacacgcgaggacagaaauaagcugcggcaucugauuagcgucaagcucggcaaaauccccaccguggagaacucuauuuuccacauggccgcuugguccgggagcgccugccaugauggacgcgaauggacauauaucggcguugacgggccugauucuaaugcucugcuuaagauuaaauacggaggcgccuuuaccgacacguaccacuccuaugcgaagaacauccugagcccccaggaguccgccuguaauugcauugggggagauuguuaccucaugaucacagacggcccggcuucuggcaucagcgaaugcagauuccugaaaauucgggaggggcgcaucauuaaggagaucuuuccuaccggaagagugaagcacacagaagaguguaccugcggcuucgccuccaacaaaaccauugaaugugcuugccgggauaauagcuauacagccaagcgccccuuugucaaacuuaacguggagacggacaccgccgaaaucagacugaugugcacagagaccuaccucgauacaccucggcccaaugacgggucuaucaccggacccugugaguccaacggcgauaaggggagcggaggcauuaaaggcggguucguucaucaacgcauggcuucuaagaucggaagaugguauagccggacgauguccaaaacaaagagaaugggcauggggcuguacgugaaguaugacggagacccuuggaccgauucugaagcgcuggcccucagcggcgucaugguguccauggaggaaccggggugguacagcuuuggcuucgagauuaaagacaagaaaugcgaugugcccuguaucggaauugaaaugguccacgacggcgggaagaccacauggcauucugcugccaccgccaucuacugccugaugggauccggccagcuucugugggauacaguuacgggggugaauaugacccucuga

SEQ ID NO: 220886 - RNA, 1401 nt, Artificial Sequence
  derived and/or modified CDS sequence (opt5) from neuraminidase__InfluenzaB__AEA51355
augcugcccagcaccauccagacacucacgcuguuccuuaccuccggcggggugcugcucucucuguacgucagcgccucccuuucuuaucugcucuacagcgacauucugcugaaguuuuccccuacagagaucaccgcuccgacaaugccccucgauugcgccaacaccucuaauguucaagcggugaacagaagcgcuacaaaaggagugacccugcuucugccugaacccgaguggacguauccucggcucuccugucccggcagcaccuuccagaaggcccugcuuauuucuccucaccgcuuuggggaaacaaaaggaaauuccgccccgcugaucauuagagagcccuucaucgcuugcggcccuaacgaauguaagcauuuugcccucacccacuacgcugcccagcccgggggauauuacaauggcacacggggcgaccgcaacaaacugagacaucugaucagcgucaagcucgggaagauuccuaccguggaaaauucuaucuuccacauggcggccugguccggaagcgcuugccaugauggcaaagaguggacguauauugggguugacggacccgauaacaaugcccugcuuaagaucacauacggcgaggcuuacccggggaccuaucacucuuacgccauuaaaaacccucggacacaggaguccgcgcccaauuguuuuggaggccacagcuucccuaucauuacccaugccccucccuccggcgugugggaaccccgcuuucugaagaucagagaggggcggaucauuaacgagaucuucccgaccggacgcgucaaacccccugaagagugcacauguggcuuugcuucuaauaacacgauugaaugcgccuguagagacaauaacugcaccgcuaagcggcccuucgugaaguuucacguugagagcgauccugccgaaauccgcgccauguguacagacaccuaucucgauucccccagaccggacgaugggagcauuacaggaccuugcgacucuaacggcgauaaaggguccggaggcaucaagggcggguucgugcaucaacggauggagagcaaaaucggacgcugguacucuagaaccaugagcaagacggagcggaugggcauggggcuguaugucaaauacgacggagaccccugggcugauuccgacgcgcuugccaauucuggcgugauggugagcaugaacgaaccuggguccagcucuuucggcuuugagauuaaggauaaaaagugcgacguccccuguaucggaauugaaaugguucacgauggcgggaaggagacauggcacuccgcugccaccgccaucuauugccugaugggaagcggccagcuccugugggacaccgugacagggguggauauggcucuguga

SEQ ID NO: 220887 - RNA, 1401 nt, Artificial Sequence
  derived and/or modified CDS sequence (opt5) from neuraminidase__InfluenzaB__AEA51357
augcugcccagcaccauccagacacucacgcuguuccuuaccuccggcggggugcugcucucucuguacgucagcgccucccuuucuuaucugcucuacagcgacauucugcugaaguuuuccagaacagagaucaccgcuccuauuaugccgcucgauugcgccaacgcgucuaauguucaagcugugaaccggagcgccacaaaaggagugacccugcuucugcccgaaccugaguggacauauccccgccucuccuguccuggcagcaccuuccagaaggcccugcuuaucucuccccacagauuuggggaaacgaaaggaaauuccgcuccucugauuauccgggagccguucaucgccugcggccccaaggaauguaaacauuuugcucucacccacuacgccgcgcagccugggggauauuacaacggcacacgcgaggacagaaauaagcugcggcaucugauuagcgucaagcucggcaaaauccccaccguggagaacucuauuuuccacauggccgcuugguccgggagcgccugccaugauggacgcgaauggacauauaucggcguugacgggccugauucuaaugcucugcuuaagauuaaauuuggagaggccuacaccgacacguaccacuccuaugcgaagaacauccugggcacacaggaaagcgccuguaauugcauugggggagauuguaaccucaugaucaccgacggccccgcuuccggcaucucugagagcagauuccugaaaauuggggagggacggaucauuaaggaaaucuuuccgacaggccgcgugaagcacaccgaggaaugcaccuguggguucgccuccaauaaaacaauugagugcgcuuguagagauaacagcuacacggccaagcggccuuuugucaaacuuaauguggaaaccgacacagccgagauccgccugaugugcaccgagacauaucucgauacccccagaccuaacgacggaucuaucacgggccccugcgaauccaauggggauaagggaagcggcggcauuaaagggggauucguucaucaacggauggcuucuaagaucggccgcugguacagcagaacaauguccaaaaccgagcggauggggaugggacuguaugugaaguacgacggcgaccccugggcggauucugacgcccuggcuuuuagcggggucaugguguccaugaaggaaccuggcugguauagcuucggauucgagauuaaagauaagaaaugugacgugccgugcaucggcauugaaaugguccacgaugggggaaaggagaccuggcauucugccgccacagcuaucuacugucucaugggcuccgggcagcugcuuugggacaccguuacaggagugaacauggcccuguga

SEQ ID NO: 220888 - RNA, 1401 nt, Artificial Sequence
  derived and/or modified CDS sequence (opt5) from neuraminidase__InfluenzaB__AEA51359
augcugcccagcaccauccagacacucacgcuguuccuuaccuccggcggggugcugcucucucuguacgucagcgccucccuuucuuaucugcucuacagcgacauucugcugaaguuuuccagaacagagaucaccgcuccuauuaugccgcucgauugcgccaacgcgucuaauguucaagcugugaaccggagcgccacaaaaggagugacccugcuucugcccgaaccugaguggacauauccccgccucuccuguccuggcagcaccuuccagaaggcccugcuuaucucuccccacagauuuggggaaacgaaaggaaauuccgcuccucugauuauccgggagccguucaucgccugcggccccaaggaauguaaacauuuugcucucacccacuacgccgcgcagccugggggauauuacaacggcacacgcgaggacagaaauaagcugcggcaucugauuagcgucaagcucggcaaaauccccaccguggagaacucuauuuuccacauggccgcuugguccgggagcgccugccaugauggacgcgaauggacauauaucggcguugacgggccugauucuaaugcucugcuuaagauuaaauacggagaggccuacaccgacacguaucacuccuacgcgaagaacauccugagaacacaggaaagcgccuguaauugcauuggcggggauuguuaucucaugaucaccgacggacccgcuuccggcaucucugagugccgguuucugaaaauucgcgagggcagaaucauuaaggaaaucuucccgacagggcgggugaagcacaccgaggaauguaccugcggauuugccagcaacaaaacaauugagugugcuugccgcgauaauuccuacacggccaagagaccuuucgucaaacuuaacguggaaaccgacacagccgagauccggcugaugugcaccgagacauaucucgauacgccccgcccuaaugacggcagcaucaccgggcccugugaaucugauggagacaagggcuccgggggaauuaaaggcggcuuuguucaucaaagaauggcuagcaagaucgggcggugguacucuagaacaaugagcaaaaccaagcgcaugggaaugggccuguaugugaaguacgacggggaucccuggaccgacuccgaggcgcuggcccucucuggagucauggugagcauggaggaaccuggcugguacuccuucggguuugaaauuaaagauaagaaaugcgacgugccguguaucggcauugagaugguccacgauggaggcaagacaaccuggcauagcgcugccacagccaucuauugccugauggggucuggacagcuucugugggacacgguuaccggcguggauauggcucucuga

SEQ ID NO: 220889 - RNA, 1401 nt, Artificial Sequence
  derived and/or modified CDS sequence (opt5) from neuraminidase__InfluenzaB__AEA51365
augcugcccagcaccauccagacacucacgcuguuccuuaccuccggcggggugcugcucucucuguacgucagcgccucccuuucuuaucugcucuacagcgacauucugcugaaguuuuccagaacagagaucaccgcuccuauuaugccgcucgauugcgccaacgcgucuaauguucaagcugugaaccggagcgccacaaaaggagugacccugcuucugcccgaaccugaguggacauauccccgccucuccuguccuggcagcaccuuccagaaggcccugcuuaucucuccccacagauuuggggaaacgaaaggaaauuccgcuccucugauuauccgggagccguucaucgccugcggccccaaggaauguaaacauuuugcucucacccacuacgccgcgcagccugggggauauuacaacggcacacgcgaggacagaaauaagcugcggcaucugauuagcgucaagcucggcaaaauccccaccguggagaacucuauuuuccacauggccgcuugguccgggagcgccugccaugauggacgcgaauggacauauaucggcguugacgggccugauucuaaugcucugcuuaagauuaaauacggagaggccuacaccgacacguaucacuccuacgcgaagaacauccugagaacacaggaaagcgccuguaauugcauuggcggggauuguuaucucaugaucaccgacggacccgcuuccggcaucucugagugccgguuucugaaaauucgcgagggcagaaucauuaaggaaaucuucccgacagggcgggugaagcacaccgaggaauguaccugcggauuugccagcaacaaaacaauugagugugcuugccgcgauaauuccuacacggccaagagaccuuucgucaaacuuaacguggaaaccgacacagccgagauccggcugaugugcaccgagacauaucucgauacgccccgcccuaaugacggcagcaucaccgggcccugugaaucuaacggagauaagggcuccgggggaauuaaaggcggcuuuguucaucaaagaauggcuagcaagaucgggcggugguacucuagaacaaugagcaaaaccaagcgcaugggaaugggccuguaugugaaguacgacggggaccccuggaccgauuccgaggcgcuggcccucucuggagucauggugagcauggaggaaccuggcugguacuccuucggguuugaaauuaaagacaagaaaugcgaugugccguguaucggcauugagaugguccacgacggaggcaagacaaccuggcauagcgcugccacagccaucuauugccugauggggucuggacagcuucugugggauacgguuaccggcgugaauaugacacucuga

SEQ ID NO: 220890 - RNA, 1401 nt, Artificial Sequence; identical to SEQ ID NO: 220889
  derived and/or modified CDS sequence (opt5) from neuraminidase__InfluenzaB__AEA51367

SEQ ID NO: 220891 - RNA, 1401 nt, Artificial Sequence; identical to SEQ ID NO: 220889
  derived and/or modified CDS sequence (opt5) from neuraminidase__InfluenzaB__AEA51371

SEQ ID NO: 220892 - RNA, 1401 nt, Artificial Sequence
  derived and/or modified CDS sequence (opt5) from neuraminidase__InfluenzaB__AEA51373
augcugcccagcaccauccagacacucacgcuguuccuuaccuccggcggggugcugcucucucuguacgucagcgccucccuuucuuaucugcucuacagcgacauucugcugaaguuuuccccuacagagaucaccgcuccgacaaugccccucgauugcgccaacgcgucuaauguucaagcugugaacagaagcgccaccaaaggagugacacugcuucugccugaacccgaguggaccuauccucggcucuccugucccggcagcacguuccagaaggcccugcuuauuucuccucaccgcuuuggggaaaccaaaggaaauuccgcuccgcugaucauuagagagcccuucaucgccugcggcccuaacgaauguaagcauuuugcucucacacacuacgccgcgcagcccgggggauauuacaauggcacccggggcgaccgcaacaaacugagacaucugaucagcgucaagcucgggaagauuccuacaguggaaaauucuaucuuccacauggccgcuugguccggaagcgccugccaugauggcaaagaguggaccuauauugggguugacggacccgauaacaaugcucugcuuaaggugaaauacggcgaagccuacacggacacauaucacucuuacgcgaacaagauccugcggacccaggaguccgccuguaauugcauugggggaaacuguuaucucaugaucacagauggcagcgcuuccggcgucucugaaugccgcuuucugaaaauuagagaggggcggaucaucaaggagauuuucccgaccggacgcgugaagcacaccgaagaguguacaugcggcuuugccagcaauaaaacgaucgaaugugcuugcagagacaacuccuacaccgccaagcggccuuucguuaaacuuaauguggagacagauaccgccgaaauucgccugaugugcacagacaccuaucucgauacgcccagaccugacgaugggagcaucacaggacccugugagucuaacggcgacaagggguccggaggcauuaaaggcggguuuguccaucaacggauggcuagcaagaucggacgcugguacucuagaaccaugagcaaaaccaagcggaugggcauggggcuguaugugaaguacgacggagaucccuggacagacuccgaggcgcuggcccucucuggcgugauggucagcauggaggagccugggugguacuccuucggcuuugaaaucaaagauaagaaaugcgacguuccguguauuggaaucgagauggugcacgauggcgggaaggaaaccuggcauagcgcugccacagccauuuauugccugaugggaucuggccagcuucugugggacacggugaccggggucaacaugacacucuga

SEQ ID NO: 220893 - RNA, 1401 nt, Artificial Sequence
  derived and/or modified CDS sequence (opt5) from neuraminidase__InfluenzaB__AEA51377
augcugcccagcaccauccagacacucacgcuguuccuuaccuccggcggggugcugcucucucuguacgucagcgccucccuuucuuaucugcucuacagcgacauucugcugaaguuuuccccuacagagaucaccgcuccgacaaugccccucgauugcgccaacgcgucuaauguucaagcugugaacagaagcgccaccaaaggagugacacugcuucugccugaacccgaguggaccuauccucggcucuccugucccggcagcacguuccagaaggcccugcuuauuucuccucaccgcuuuggggaaaccaaaggaaauuccgcuccgcugaucauuagagagcccuucaucgccugcggcccuaacgaauguaagcauuuugcucucacacacuacgccgcgcagcccgggggauauuacaauggcacccggggcgaccgcaacaaacugagacaucugaucagcgucaagcucgggaagauuccuacaguggaaaauucuaucuuccacauggccgcuugguccggaagcgccugccaugauggcaaagaguggaccuauauugggguugacggacccgauaacaaugcucugcuuaaggugaaauacggcgaggccuacacggacacauaucacucuuacgcgaacaagauccugcggacccaggaguccgccuguaauugcauugggggaaacuguuaucucaugaucacagauggcagcgcuuccggcgucucugaaugccgcuuucugaaaauuagagaggggcggaucaucaaggagauuuucccgaccggacgcgugaagcacaccgaagaguguacaugcggcuuugccagcaauaaaacgaucgaaugugcuugcagagacaacuccuacaccgccaagcggccuuucguuaaacuuaauguggagacagauaccgccgaaauucgccugaugugcacagacaccuaucucgauacgcccagaccugacgaugggagcaucacaggacccugugagucuaacggcgacaagggguccggaggcauuaaaggcggguuuguccaucaacggauggagagcaagaucggacgcugguacucuagaaccaugagcaaaaccgaacggaugggcauggggcuguaugugaaguacgacggagaucccugggcugacuccgaugcgcuggccuucucuggcgugauggucagcaugaaggagccugggugguacuccuuuggcuucgaaaucaaagacaagaaaugcgauguuccguguauuggaaucgagauggugcacgacggcgggaaggaaacauggcauagcgcugccaccgccauuuauugccucaugggaucuggccagcugcuuugggauacagugacgggggucgacauggcucuguga

SEQ ID NO: 220894 - RNA, 1401 nt, Artificial Sequence; identical to SEQ ID NO: 220893
  derived and/or modified CDS sequence (opt5) from neuraminidase__InfluenzaB__AEA51379

SEQ ID NO: 220895 - RNA, 1401 nt, Artificial Sequence
  derived and/or modified CDS sequence (opt5) from neuraminidase__InfluenzaB__AEA51381
augcugcccagcaccauccagacacucacgcuguuccuuaccuccggcggggugcugcucucucuguacgucagcgccucccuuucuuaucugcucuacagcgacauucugcugaaguuuuccccuacagagaucaccgcuccgacaaugccccucgauugcgccaacgcgucuaauguucaagcugugaacagaagcgccaccaaaggagugacacugcuucugccugaacccgaguggaccuauccucggcucuccugucccggcagcacguuccagaaggcccugcuuauuucuccucaccgcuuuggggaaaccaaaggaaauuccgcuccgcugaucauuagagagcccuucaucgccugcggcccuaacgaauguaagcauuuugcucucacacacuacgccgcgcagcccgggggauauuacaauggcacccggggcgaccgcaacaaacugagacaucugaucagcgucaagcucgggaagauuccuacaguggagaauagcaucuuccacauggccgcuugguccggaagcgccugccaugauggcaaagaguggaccuauauugggguugacggacccgauaacaaugcucugcuuaaggugaaauacggcgaagccuacacggacacauaucacucuuacgcgaacaagauccugcggacccaggaguccgccuguaauugcauugggggaaacuguuaucucaugaucacagauggcagcgcuuccggcgucucugaaugccgcuuucugaaaauuagagaggggcggaucaucaaggagauuuucccgaccggacgcgugaagcacaccgaagaguguacaugcggcuuugccagcaauaaaacgaucgaaugugcuugcagagacaacuccuacaccgccaagcggccuuucguuaaacuuaauguggagacagauaccgccgaaauucgccugaugugcacagacaccuaucucgauacgcccagaccuaacgacgggagcaucacaggacccugugagucugauggcgacaagggguccggaggcauuaaaggcggguuuguccaucaacggaugaagucuaaaaucggacgcugguacucuagaaccaugagcaagaccgagcggaugggcauggggcuguaugugaaguacgacggagaucccugggcugacuccgaugcgcuggccuucucuggcgugauggucagcguuaaagaaccugggugguacuccuuuggcuucgagaucaaggacaaaaagugcgaugugccguguauuggaaucgaaauggugcacgacggcgggaaagagacauggcauagcgcugccaccgccauuuauugccucaugggaucuggccagcugcuuugggauacagucacggggguggacauggcucuguga

SEQ ID NO: 220896 - RNA, 1401 nt, Artificial Sequence; identical to SEQ ID NO: 220893
  derived and/or modified CDS sequence (opt5) from neuraminidase__InfluenzaB__AEA51383

SEQ ID NO: 220897 - RNA, 1401 nt, Artificial Sequence
  derived and/or modified CDS sequence (opt5) from neuraminidase__InfluenzaB__AEG20998
augcugcccagcaccauccagacacucacgcuguuccuuaccuccggcggggugcugcucucucuguacgucagcgccucccuuucuuaucugcucuacagcgacauucugcugaaguuuuccagaacagagaucaccgcuccuauucuccggcuggccugcgcgaacgcuucuaauguucaagccgugaaccgcagcgccacaaaaggagugacccuucugcucccggaacccgaguggacauauccuagacuguccugucccggcagcaccuuccagaaggcccuucugaucucuccucaccgguuuggggaaacgaaaggaaauuccgcuccccucauuauccgcgagccuuucaucgcuugcggcccgaaggaauguaaacauuuugcccugacccacuacgcggcccagcccgggggauauuacaacggcacaagagaggaucggaauaagcugcgccaucucauuagcgucaagcugggcaaaaucccuaccguggagaacucuauuuuccacauggcugccugguccgggagcgcuugccaugacggaagagaauggacauauaucggcguugaugggcccgacucuaaugcccuucugaagauuaaauacggaggcgcguuuaccgauacguaccacuccuaugccaagaacauccucagcccucaggaguccgcuuguaauugcauugggggagacuguuaccugaugaucacagauggccccgccucuggcaucagcgaaugccgguuccuuaaaauucgcgaggggagaaucauuaaggagaucuuuccgaccggacgggugaagcacacagaagaguguaccugcggcuucgcuuccaacaaaaccauugaaugugccugccgcgacaauagcuauacagccaagagaccuuuugucaaacugaacguggagacggauaccgcugaaauccggcucaugugcacagagaccuaccuggacacaccccgcccuaaugaugggucuaucaccggacccugugaguccaacggcgacaaggggagcggaggcauuaaaggcggguucguucaucaaagaauggcgucuaagaucggacggugguauagcagaacgauguccaaaacaaagcgcaugggcauggggcuguacgugaaguaugauggagaccccuggaccgacucugaagcccucgcucugagcggcgucaugguguccauggaggaaccugggugguacagcuuuggcuucgagauuaaagauaagaaaugcgacgugccguguaucggaauugaaaugguccacgauggcgggaagaccacauggcauucugccgccaccgcuaucuacugccuuaugggauccggccagcugcucugggacacaguuacgggggugaauaugacccuguga

SEQ ID NO: 220898 - RNA, 1401 nt, Artificial Sequence
  derived and/or modified CDS sequence (opt5) from neuraminidase__InfluenzaB__AEG20999
augcugcccagcaccauccagacacucacgcuguuccuuaccuccggcggggugcugcucucucugagcgucuccgccucucuuagcuaccugcucuauuccgacauucugcugaaguuuucuagaacagagaucaccgcuccuauuaugccgcucgauugcgccaacgcgagcaauguucaagcugugaaccgguccgccacaaaaggagugacccugcuucugcccgaaccugaguggacauacccccgccucagcuguccuggcucuaccuuccagaaggcccugcuuaucagcccccacagauuuggggaaacgaaaggaaauuccgcuccucugauuauccgggagccguucaucgccugcggccccaaggaauguaaacauuuugcucucacccacuaugccgcgcagccugggggauacuauaacggcacacgcgaggacagaaauaagcugcggcaucugauuucugucaagcucggcaaaauccccaccguggagaacuccauuuuccacauggccgcuuggagcgggucugccugccaugauggacgcgaauggacauacaucggcguugacgggccugauuccaaugcucugcuuaagauuaaauauggaggcgccuuuaccgacacguaccacagcuacgcgaagaacauccugucuccccaggaguccgccuguaauugcauugggggagauuguuaucucaugaucacagacggcccggcuagcggcaucuccgaaugcagauuccugaaaauucgggaggggcgcaucauuaaggagaucuuuccuaccggaagagugaagcacacagaagaguguaccugcggcuucgccagcaacaaaaccauugaaugugcuugccgggauaauucuuacacagccaagcgccccuuugucaaacuuaacguggagacggacaccgccgaaaucagacugaugugcacagagaccuaucucgauacaccucggcccaaugacggguccaucaccggacccugugagagcaacggcgauaaggggucuggaggcauuaaaggcggguucguucaucaacgcauggcuagcaagaucggaagaugguacucccggacgaugucuaaaacaaagagaaugggcauggggcuguaugugaaguacgacggagacccuuggaccgauagcgaagcgcuggcccucuccggcgucauggugagcauggaggaaccggggugguauucuuuuggcuucgagauuaaagacaagaaaugcgaugugcccuguaucggaauugaaaugguccacgacggcgggaagaccacauggcauuccgcugccaccgccaucuacugccugaugggaagcggccagcuucugugggauacaguuacgggggugaauaugacccucuga

SEQ ID NO: 220899 - RNA, 1401 nt, Artificial Sequence
  derived and/or modified CDS sequence (opt5) from neuraminidase__InfluenzaB__AEG21000
augcugcccagcaccauccagacacucacgcuguuccuuaccuccggcggggugcugcucucucuguacgucagcgccucccuuucuuaucugcucuacagcgacauucugcugaaguuuuccagaacagagaucaccgcugccauucucauccuggauugcgcgaacgcuucuaauguucaagccgugaaccggagcgccacaaaaggagugacccuucugcucccugaaccggaguggacauauccccgccuguccuguccuggcagcaccuuccagaaggcccuucugauuucuccccacagauuuggggaaacgaaaggaaauuccgcuccucucaucauccgggagcccuucauugcuugcggcccuaaggaauguaaacauuuugcccugacccacuacgcggcccagcccgggggauauuacaacggcacacgcgaggacagaaauaagcugcggcaucucaucagcgucaagcugggcaaaauuccgaccguggagaacucuaucuuccacauggcugccugguccgggagcgcuugccaugauggacgcgaauggacauauauuggcguugacgggccugauucuaaugcccuucugaagaucaaauacggaggcgcguuuaccgacacguaccacuccuaugccaagaacauucucagcccccaggaguccgcuuguaauugcaucgggggagauuguuaccugaugaucacagacggcccugccucuggcauuagcgaaugcagauuccuuaaaauccgggaggggcgcauuaucaaggagauuuuucccaccggaagagugaagcacacagaagaguguaccugcggcuucgcuuccaacaaaaccaucgaaugugccugccgggauaauagcuauacagccaagcgcccguuugucaaacugaacguggagacggacaccgcugaaaucagacucaugugcacagagaccuaccuggauacaccucggcccaaugacgggucuauuaccggaccuugugaguccaacggcgauaaggggagcggaggcaucaaaggcggguucguucaucaacgcauggcgucuaagauuggaagaugguauagccggacgauguccaaaacaaagagaaugggcauggggcuguacgugaaguaugacggagaccccuggaccgauucugaagcccucgcucugagcggcgucaugguguccauggaggaacccgggugguacagcuuuggcuucgagaucaaagacaagaaaugcgaugugccuuguauuggaaucgaaaugguccacgacggcgggaagaccacauggcauucugccgccaccgcuaucuacugccuuaugggauccggccagcugcucugggauacaguuacgggggugaauaugacccuguga

SEQ ID NO: 220900 - RNA, 1401 nt, Artificial Sequence
  derived and/or modified CDS sequence (opt5) from neuraminidase__InfluenzaB__AEG21002
augcugcccagcaccauccagacacucacgcuguuccuuaccuccggcggggugcugcucucucuguacgucagcgccucccuuucuuaucugcucuacagcgacauucugcugaaguuuuccagaacagagaucaccgcuccuauuaugccgcucgauugcgccaacgcgucuaauguucaagcugugaaccggagcgccacaaaaggagugacccugcuucugcccgaaccugaguggacauauccccgccucuccuguccuggcagcaccuuccagaaggcccugcuuaucucuccccacagauuuggggaaacgaaaggaaauuccgcuccucugauuauccgggagccguucaucgccugcggccccaaggaauguaaacauuuugcucucacccacuacgccgcgcagccugggggauauuacaacggcacacgcgaggacagaaauaagcugcggcaucugauuagcgucaagcucggcaaaauccccaccguggagaacucuauuuuccacauggccgcuugguccgggagcgccugccaugauggacgcgaauggacauauaucggcguugacgggccugauucuaaugcucugcuuaagauuaaauacggagaggccuacaccgacacguaucacuccuacgcgaagaacauccugagaacacaggaaagcgccuguaauugcauuggcggggauuguuaucucaugaucaccgacggacccgcuuccggcaucucugagugccgguuucugaaaauucgcgagggcagaaucauuaaggaaaucuucccgacagggcgggugcgccacaccgaggaauguaccugcggauuugccagcaacaagacaauugagugugcuugcagagauaauuccuacacggccaaacggccuuucgucaaacuuaacguggaaaccgacacagccgagauccgccugaugugcaccgagacauaucucgauacccccagaccuaaugacggcagcaucacggggcccugugaaucuaacggagauaagggcuccgggggaauuaagggcggcuuuguucaucaacggauggcuagcaaaaucgggagaugguacucucgcacaaugagcaagaccaaacggaugggaaugggccuguaugugaaguacgacggggaccccuggaccgauuccgaggcgcuggcccucucuggagucauggugagcauggaggaaccuggcugguacuccuucggguuugaaauuaaggacaaaaagugcgaugugccguguaucggcauugagaugguccacgacggaggcaaaacaaccuggcauagcgcugccacagccaucuauugccugauggggucuggacagcuucugugggauacgguuaccggcgugaauaugacacucuga

SEQ ID NO: 220901 - RNA, 1401 nt, Artificial Sequence
  derived and/or modified CDS sequence (opt5) from neuraminidase__InfluenzaB__AEG21003
augcugcccagcaccauccagacacucacgcuguuccuuaccuccggcggggugcugcucucucuguacgucagcgccucccuuucuuaucugcucuacagcgacauucugcugaaguuuuccagaacagagaucaccgcuccuauuaugccgcucgauugcgccaacgcgucuaauguucaagcugugaaccggagcgccacaaaaggagugacccugcuucugcccgaaccugaguggacauauccccgccucuccuguccuggcagcaccuuccagaaggcccugcuuaucucuccccacagauuuggggaaacgaaaggaaauuccgcuccucugauuauccgggagccguucaucgccugcggccccaaggaauguaaacauuuugcucucacccacuacgccgcgcagccugggggauauuacaacggcacacgcgaggacagaaauaagcugcggcaucugauuagcgucaagcucggcaaaauccccaccguggagaacucuauuuuccacauggccgcuugguccgggagcgccugccaugauggacgcgaauggacauauaucggcguugacgggccugauucuaaugcucugcuuaagauuaaauacggagaggccuacaccgacacguaucacuccuacgcgaagaacauccugagaacacaggaaagcgccuguaauugcauuggcggggauuguuaucucaugaucaccgacggacccgcuuccggcaucucugagugccgguuucugaaaauucgcgagggcagaaucauuaaggaaaucuucccgacagggcgggugaagcacaccgaggaauguaccugcggauuugccagcaacaaaacaauugagugugcuugccgcgauaauuccuacacggccaagagaccuuucgucaaacuuaacguggaaaccgacacagccgagauccggcugaugugcaccgagacauaucucgauacgccccgcccuaaugacggcagcaucaccgggcccugugaaucugauggagacaagggcuccgggggaauuaaaggcggcuuuguucaucaaagaauggcuagcaagaucgggcggugguacucuagaacaaugagcaaaaccaagcgcaugggaaugggccuguaugugaaguacgacggggaucccuggaccgacuccgaggcgcuggcccucucuggagucauggugagcauggaggaaccuggcugguacuccuucggguuugaaauuaaagauaagaaaugcgacgugccguguaucggcauugagaugguccacgauggaggcaagacaaccuggcauagcgcugccacagccaucuauugccugauggggucuggacagcuucugugggacacgguuaccggcgugaacaugacacucuga

SEQ ID NO: 220902 - RNA, 1401 nt, Artificial Sequence
  derived and/or modified CDS sequence (opt5) from neuraminidase__InfluenzaB__AEG21004
augcugcccagcaccauccagacacucacgcuguuccuuaccuccggcggggugcugcucucucuguacgucagcgccucccuuucuuaucugcucuacagcgacauucugcugaaguuuuccccuacagagaucaccgcuccgacaaugccccucgauugcgccaacgcgucuaauguucaagcugugaacagaagcgccaccaaaggagugacacugcuucugccugaacccgaguggaccuauccucggcucuccugucccggcagcacguuccagaaggcccugcuuauuucuccucaccgcuuuggggaaaccaaaggaaauuccgcuccgcugaucauuagagagcccuucaucgccugcggcccuaacgaauguaagcauuuugcucucacacacuacgccgcgcagcccgggggauauuacaauggcacccggggcgaccgcaacaaacugagacaucugaucagcgucaagcucgggaagauuccuacaguggaaaauucuaucuuccacauggccgcuugguccggaagcgccugccaugauggcaaagaguggaccuauauugggguugacggacccgauaacaaugcucugcuuaaggugaaauacggcgaggccuacacggacacauaucacucuuacgcgaacaagauccugcggacccaggaguccgccuguaauugcauugggggaaacuguuaucucaugaucacagauggcagcgcuuccggcgucucugaaugccgcuuucugaaaauuagagaggggcggaucaucaaggagauuuucccgaccggacgcgugaagcacaccgaagaguguacaugcggcuuugccagcaauaaaacgaucgaaugugcuugcagagacaacuccuacaccgccaagcggccuuucguuaaacuuaauguggagacagauaccgccgaaauucgccugaugugcacagacaccuaucucgauacgcccagaccugacgaugggagcaucacaggacccugugagucuaacggcgacaagggagggggcggcauuaaagggggauuuguccaucaacggauggaguccaagaucggccgcugguacagcagaaccaugucuaaaaccgaacggauggggaugggacuguaugugaaguacgacggcgaucccugggcugacagcgaugcgcuggccuucuccggggugauggucucuaugaaggagccuggcugguacagcuuuggauucgaaaucaaagacaagaaaugcgauguuccguguauuggcaucgagauggugcacgacgggggaaaggaaacauggcauuccgcugccaccgccauuuauugccucaugggcagcgggcagcugcuuugggauacagugacgggagucgacauggcucuguga

SEQ ID NO: 220903 - RNA, 1401 nt, Artificial Sequence
  derived and/or modified CDS sequence (opt5) from neuraminidase__InfluenzaB__AEG21005
augcugcccagcaccauccagacacucacgcuguuccuuaccuccggcggggugcugcucucucuguacgucagcgccucccuuucuuaucugcucuacagcgacauucugcugaaguuuuccccuacagagaucaccgcuccgacaaugccccucgauugcgccaacgcgucuaauguucaagcugugaacagaagcgccaccaaaggagugacacugcuucugccugaacccgaguggaccuauccucggcucuccugucccggcagcacguuccagaaggcccugcuuauuucuccucaccgcuuuggggaaaccaaaggaaauuccgcuccgcugaucauuagagagcccuucaucgccugcggcccuaacgaauguaagcauuuugcucucacacacuacgccgcgcagcccgggggauauuacaauggcacccggggcgaccgcaacaaacugagacaucugaucagcgucaagcucgggaagauuccuacaguggaaaauucuaucuuccacauggccgcuugguccggaagcgccugccaugauggcaaagaguggaccuauauugggguugacggacccgauaacaaugcucugcuuaaggugaaauacggcgaggccuacacggacacauaucacucuuacgcgaacaagauccugcggacccaggaguccgccuguaauugcauugggggaaacuguuaucucaugaucacagauggcagcgcuuccggcgucucugaaugccgcuuucugaaaauuagagaggggcggaucaucaaggagauuuucccgaccggacgcgugaagcacaccgaagaguguacaugcggcuuugccagcaauaaaacgaucgaaugugcuugcagagacaacuccuacaccgccaagcggccuuucguuaaacuuaauguggagacagauaccgccgaaauucgccugaugugcacagacaccuaucucgauacgcccagaccugacgaugggagcaucacaggacccugugagucuaacggcgacaagggagggggcggcauuaaagggggauuuguccaucaacggauggaguccaagaucggccgcugguacagcagaaccaugucuaaaaccgaacggauggggaugggacuguaugugaaguacgacggcgaucccugggcugacagcgaugcgcuggccuucuccggggugauggucucuaugaaggagccuggcugguacagcuuuggauucgaaaucaaagacaagaaaugcgauguuccguguauuggcaucgagauggugcacgacgggggaaaggaaacauggcauuccgcugccaccgccauuuauugccucaugggcagcgggcagcugcuuugggauacagugacgggagucaacaugacccuguga

SEQ ID NO: 220904 - RNA, 1401 nt, Artificial Sequence; identical to SEQ ID NO: 220889
  derived and/or modified CDS sequence (opt5) from neuraminidase__InfluenzaB__AEG21006

SEQ ID NO: 220905 - RNA, 1401 nt, Artificial Sequence; identical to SEQ ID NO: 220893
  derived and/or modified CDS sequence (opt5) from neuraminidase__InfluenzaB__AEG21007

SEQ ID NO: 220906 - RNA, 1401 nt, Artificial Sequence
  derived and/or modified CDS sequence (opt5) from neuraminidase__InfluenzaB__AEG21008
augcugcccagcaccauccagacacucacgcuguuccuuaccuccggcggggugcugcucucucuguacgucagcgccucccuuucuuaucugcucuacagcgacauucugcugaaguuuuccccuacagagaucaccgcuccgacaaugccccucgauugcgccaacgcgucuaauguucaagcugugaacagaagcgccaccaaaggagugacacugcuucugccugaacccgaguggaccuauccucggcucuccugucccggcagcacguuccagaaggcccugcuuauuucuccucaccgcuuuggggaaaccaaaggaaauuccgcuccgcugaucauuagagagcccuucaucgccugcggcccuaacgaauguaagcauuuugcucucacacacuacgccgcgcagcccgggggauauuacaauggcacccggggcgaccgcaacaaacugagacaucugaucagcgucaagcucgggaagauuccuacaguggaaaauucuaucuuccacauggccgcuugguccggaagcgccugccaugauggcaaagaguggaccuauauugggguugacggacccgauaacaaugcucugcuuaaggugaaauacggcgaggccuacacggacacauaucacucuuacgcgaacaagauccugcggacccaggaguccgccuguaauugcauugggggaaacuguuaucucaugaucacagauggcagcgcuuccggcgucucugaaugccgcuuucugaaaauuagagaggggcggaucaucaaggagauuuucccgaccggacgcgugaagcacaccgaagaguguacaugcggcuuugccagcaauaaaacgaucgaaugugcuugcagagacaacuccuacaccgccaagcggccuuucguuaaacuuaauguggagacagauaccgccgaaauucgccugaugugcacagacaccuaucucgauacgcccagaccugacgaugggagcaucacaggacccugugagucuaacggcgacaagggguccggaggcauuaaaggcggguuuguccaucaacggauggcuagcaagaucggacgcugguacucuagaaccaugagcaaaaccaagcggaugggcauggggcuguaugugaaguacgacggagaucccugggcggacuccgaugcccuggcuuucucuggcgugauggucagcaugaaagagccugggugguacuccuuuggcuucgaaaucaaggacaaaaagugcgauguuccguguauuggaaucgagauggugcacgacggcgggaaagaaacauggcauagcgccgccaccgcuauuuauugccucaugggaucuggccagcugcuuugggauacagugacgggggucgacauggcccuguga

SEQ ID NO: 220907 - RNA, 1401 nt, Artificial Sequence; identical to SEQ ID NO: 220893
  derived and/or modified CDS sequence (opt5) from neuraminidase__InfluenzaB__AEG21009

SEQ ID NO: 220908 - RNA, 1401 nt, Artificial Sequence; identical to SEQ ID NO: 220893
  derived and/or modified CDS sequence (opt5) from neuraminidase__InfluenzaB__AEG21010

SEQ ID NO: 220909 - RNA, 1401 nt, Artificial Sequence; identical to SEQ ID NO: 220893
  derived and/or modified CDS sequence (opt5) from neuraminidase__InfluenzaB__AEG21011

SEQ ID NO: 220910 - RNA, 1401 nt, Artificial Sequence; identical to SEQ ID NO: 220893
  derived and/or modified CDS sequence (opt5) from neuraminidase__InfluenzaB__AEG21012

SEQ ID NO: 220911 - RNA, 1401 nt, Artificial Sequence
  derived and/or modified CDS sequence (opt5) from neuraminidase__InfluenzaB__AEG21013
augcugcccagcaccauccagacacucacgcuguuccuuaccuccggcggggugcugcucucucuguacgucagcgccucccuuucuuaucugcucuacagcgacauucugcugaaguuuuccccuacagagaucaccgcuccgacaaugccccucgauugcgccaacgcgucuaauguucaagcugugaacagaagcgccaccaaaggagugacacugcuucugccugaacccgaguggaccuauccucggcucuccugucccggcagcacguuccagaaggcccugcuuauuucuccucaccgcuuuggggaaaccaaaggaaauuccgcuccgcugaucauuagagagcccuucaucgccugcggcccuaacgaauguaagcauuuugcucucacacacuacgccgcgcagcccgggggauauuacaauggcacccggggcgaccgcaacaaacugagacaucugaucagcgucaagcucgggaagauuccuacaguggagaauagcaucuuccacauggccgcuugguccggaagcgccugccaugauggcaaagaguggaccuauauugggguugacggacccgauaacaaugcucugcuuaaggugaaauacggcgaagccuacacggacacauaucacucuuacgcgaacaagauccugcggacccaggaguccgccuguaauugcauugggggaaacuguuaucucaugaucacagauggcagcgcuuccggcgucucugaaugccgcuuucugaaaauuagagaggggcggaucaucaaggagauuuucccgaccggacgcgugaagcacaccgaagaguguacaugcggcuuugccagcaauaaaacgaucgaaugugcuugcagagacaacuccuacaccgccaagcggccuuucguuaaacuuaauguggagacagauaccgccgaaauucgccugaugugcacagacaccuaucucgauacgcccagaccuaacgacgggagcaucacaggacccugugagucugauggcgacaagggguccggaggcauuaaaggcggguuuguccaucaacggaugaagucuaaaaucggacgcugguacucuagaaccaugagcaagaccgagcggaugggcauggggcuguaugugaaguacgacggagaucccugggcugacuccgaugcgcuggccuucucuggcgugauggucagcaugaaagaaccugggugguacuccuuuggcuucgagaucaaggacaaaaagugcgauguuccguguauuggaaucgaaauggugcacgacggcgggaaagagacauggcauagcgcugccaccgccauuuauugccucaugggaucuggccagcugcuuugggauacagugacgggggucgacauggcucuguga

SEQ ID NO: 220912 - RNA, 1401 nt, Artificial Sequence
  derived and/or modified CDS sequence (opt5) from neuraminidase__InfluenzaB__AEN68957
augcugcccagcaccauccagacacucacgcuguuccuuaccuccggcggggugcugcucucucuguacgucagcgccucccuuucuuaucugcucuacagcgacauucugcugaaguuuuccagaacagagaucccugcuccgauuaugccccucgauugcgccaacgcgucuaauguucaagcugugaaccggagcgccaccaaaggagugacacugcuucugccugaacccgaguggaccuauccucgccucuccugucccggcagcacauuccagaaggcccugcuuaucucuccucacagauuuggggaaaccaaaggaaauuccgcuccgcugauuauccgggagcccuucaucgccugcggcccuaaggaauguaaacauuuugcucucacgcacuacgccgcgcagcccgggggauauuacaacggcacccgcgaggacagaaauaagaugcggcaucugauuagcgucaagcugggcaaaaucccuacaguggagaacucuauuuuccacauggccgcuugguccgggagcgccugccaugauggacgcgaauggaccuauaucggcguugacgggcccgauucuaaugcucuccugaagauuaaauacggagaggccuacacagacaccuaucacuccuacgcgaagaacauccuuagaacgcaggaaagcgccuguaauugcauuggcggggauuguuaucugaugaucacagacggaccggcuuccggcaucucugagugccgguuucucaaaauucgcgagggcagaaucauuaaggaaaucuucccuaccgggcgggugaaguacacagaggaauguaccugcggauuugccagcaacaaaaccauuggcugugcuugccgcgauaauuccuauacagccaagagacccuucgucaaacugaacguggagacggacaccgccgaaauccggcuuaugugcacagagaccuaccuggauacaccucgccccaaugacgggagcaucaccggacccugugagucuaacggcgauaagggguccggaggcauuaaaggcggguuuguucaccaaagaauggcuagcaagaucggacggugguauucuagaacgaugagcaaaacaaagcgcaugggcauggggcucuacgugaaguacgacggagacccuuggaccgauuccgaagcgcuggcccugucuggcgucauggugagcauggaggaaccggggugguauuccuucggcuuugagauuaaagacaagaaaugcgaugugcccuguaucggaauugaaaugguccaugacggcgggaagaccacauggcacagcgcugccaccgccaucuacugccucaugggaucuggccagcugaugugggauacaguuacgggggugaauaugacccuuuga

SEQ ID NO: 220913 - RNA, 1401 nt, Artificial Sequence
  derived and/or modified CDS sequence (opt5) from neuraminidase__InfluenzaB__AEO80071
augcugcccagcaccauccagacacucacgcuguuccuuaccuccggcggggugcugcucucucuguacgucagcgccucccuuucuuaucugcucuacagcgacauucugcugaaguuuuccccuacagagaucaccgcuccgacaaugccccucgauugcgccaacgcgucuaauguucacgcugugaacagaagcgccaccaaaggagugacacugcuucugccugaacccgaguggaccuauccucggcucuccugucccggcagcacguuccaaaaggcccugcuuauuucuccucaucgcuuuggggaaaccaaaggaaauuccgcuccgcugaucauuagagagcccuucaucgccugcggcccuaacgaauguaagcacuuugcucucacacauuacgccgcgcagcccgggggauauuacaauggcacccggggcgaccgcaacaaacugagacaccugaucagcgucaagcucgggaagauuccuacaguggaaaauucuaucuuccauauggccgcuugguccggaagcgccugccacgauggcaaagaguggaccuauauugggguugacggacccgauaacaaugcucugcuuaagaucaaauacggcgaggccuacacggacacauaucacucuuacgcgaacaauauucugcggacccaggaguccgccuguaacugcaucgggggaaauuguuaucucaugauuacagauggcagcgcuuccggcgugucugaaugccgcuuucugaagaucagagaggggcggaucauuaaagagaucuucccgaccggacgcgucaagcauaccgaagaguguacaugcggcuuugccagcaacaagacgauugaaugugcuugcagagacaauuccuacaccgccaaacggccuuucgugaaacuuaacguugagacagauaccgccgaaauccgccugaugugcacagacaccuaucucgauacgcccagaccugacgaugggagcauuacaggacccugugagucuaacggcgacaagggguccggaggcaucaagggcggguuugugcaccagcggauggcuagcaaaaucggacgcugguacucuagaaccaugagcaagaccgagcggaugggcauggggcuguaugucaaauacgacggagaucccugggcggacuccgaugcccuggcuuucucuggcgugauggugagcaugaaggaaccugggugguacuccuuuggcuucgagauuaaggacaaaaagugcgaugucccguguaucggaauugaaaugguucaugacggcgggaaagagacauggcacagcgccgccaccgcuaucuauugccucaugggaucuggccaacugcuuugggauacagugacggggguggacauggcccuguga

SEQ ID NO: 220914 - RNA, 1401 nt, Artificial Sequence
  derived and/or modified CDS sequence (opt5) from neuraminidase__InfluenzaB__AEO80082
augcugcccagcaccauccagacacucacgcuguuccuuaccuccggcggggugcugcucucucuguacgucagcgccucccuuucuuaucugcucuacagcgacauucugcugaaguuuucccaaacaggaaucaccgcuccuauuaugccgcucgauugcgccaacgcgucuaauguucaggcugugaacagaagcgccacaaaaggcgugacccugcuucugcccgagccugaauggacauauccccggcucuccuguccugggagcaccuuccagaaggcccugcuuaucucuccccaccgcuuuggagagacgaaaggcaauuccgcuccucugauuaucagagaaccguucaucgccugcgggcccaccgaguguaaguacuuugcucucacacauuaugccgcgcagccuggaggcuacuauaacggcacccgggaagaccgcaauaaacugagacaccugauuagcgucaagcucgggaagauccccacaguggagaacucuauuuuccauauggccgcuugguccggaagcgccugccacgauggcaaagaguggaccuacaucgggguugacggaccugauucuaaugcucugcuuaagauuaaauacggcgaagccuauacggacacauaccauuccuaugcgaagaacauccugcggacccaagagagcgccuguaauugcauugggggagauuguuaccucaugaucacagacggccccgcuuccggcaucucugaaugccgcuuucugaaaauuagagaggggcggaucauuaaggagaucuucccgaccggacgcgugaagcacaccgaagaguguacaugcggcuuugccagcaacaaaacgauugaaugugcuugcagagauaauuccuauaccgccaagcggccuuucgucaaacuuaacguggagacagacaccgccgaaauccgccugaugugcacagagaccuaccucgauacgcccagaccuaaugacgggagcaucacaggacccugugagucugauggcgacaagggguccggaggcauuaaaggcggguuuguucaccagcggauggcuagcaagaucggacgcugguauucuagaaccaugagcaaaaccaagcggaugggcauggggcuguacgugaaguacgacggagaucccuggacagacuccgaagcgcuggcccucucuggcgucauggugagcauggaggaaccugggugguauuccuucggcuuugagauuaaagauaagaaaugcgacgugccguguaucggaauugaaaugguccaugauggcgggaagaccacauggcacagcgcugccacggccaucuacugccugaugggaucuggccagcuucugugggacaccguuacagggguggauauggcucucuga

SEQ ID NO: 220915 - RNA, 1401 nt, Artificial Sequence; identical to SEQ ID NO: 220754
  derived and/or modified CDS sequence (opt5) from neuraminidase__InfluenzaB__AEO80090

SEQ ID NO: 220916 - RNA, 1401 nt, Artificial Sequence; identical to SEQ ID NO: 220699
  derived and/or modified CDS sequence (opt5) from neuraminidase__InfluenzaB__AEO80101

SEQ ID NO: 220917 - RNA, 1401 nt, Artificial Sequence; identical to SEQ ID NO: 220795
  derived and/or modified CDS sequence (opt5) from neuraminidase__InfluenzaB__AEO80149

SEQ ID NO: 220918 - RNA, 1401 nt, Artificial Sequence; identical to SEQ ID NO: 220707
  derived and/or modified CDS sequence (opt5) from neuraminidase__InfluenzaB__AEO80158

SEQ ID NO: 220919 - RNA, 1401 nt, Artificial Sequence; identical to SEQ ID NO: 220707
  derived and/or modified CDS sequence (opt5) from neuraminidase__InfluenzaB__AEO80167

SEQ ID NO: 220920 - RNA, 1401 nt, Artificial Sequence; identical to SEQ ID NO: 220795
  derived and/or modified CDS sequence (opt5) from neuraminidase__InfluenzaB__AEO80176

SEQ ID NO: 220921 - RNA, 1401 nt, Artificial Sequence
  derived and/or modified CDS sequence (opt5) from neuraminidase__InfluenzaB__AEO80187
augcugcccagcaccauccagacacucacgcuguuccuuaccuccggcggggugcugcucucucuguacgucagcgccucccuuucuuaucugcucuacagcgacauucugcugaaguuuuccccuacagagaucaccgcuccgacaaugccccucggaugcgccaacgcgucuaauguucaagcugugaacagaagcgccaccaaaggcgugacacugcuucugccugaacccgaguggaccuauccucggcucuccugucccgggagcacguuccagaaggcccugcuuauuucuccucaccgcuuuggagaaaccaaaggcaauuccgcuccgcugaucauuagagagcccuucaucgccugcgggccuaacgaauguaagcauuuugcucucacacacuacgccgcgcagcccggaggcuauuacaauggcacccgcggggaucggaacaaacugagacaucugaucagcgucaagcucggaaagauuccuacaguggaaaauucuaucuuccacauggccgcuugguccggcagcgccugccaugacgggaaagaguggaccuauauuggaguugauggccccgacaacaaugcucugcuuaagaucaaauacggggaggccuacacggauacauaucacucuuacgcgaacaagauucugcggacccaggaguccgccuguaauugcaucggaggcaacuguuaucucaugauuacagacggcagcgcuuccggggugucugaaugccgcuuucugaaaaucagagagggacggaucauuaaggagaucuucccgaccggccgcgucaagcacaccgaagaguguacaugcggguuugccagcaauaaaacgauugaaugugcuugcagagauaacuccuacaccgccaagcggccuuucgugaaacuuaauguugagacagacaccgccgaaauccgccugaugugcacagauaccuaucucgacacgcccagaccugaugacggaagcauuacaggccccugugagucuaacggggaucggggauccggcggcaucaaagggggauuugugcaucaacgcauggcuagcaagaucggcagaugguacucucggaccaugagcaagaccgagagaauggggaugggacuguaugucaaauacgacggcgaccccugggcggauuccgacgcccuggcuuucucuggggugauggugagcaugaaggaaccuggcugguacuccuuuggauucgagauuaaggauaaaaagugcgacgucccguguaucggcauugaaaugguucacgaugggggaaaagagacauggcauagcgccgccaccgcuaucuauugccucaugggcucugggcagcugcuuugggacacagugacgggaguggauauggcccuguga

SEQ ID NO: 220922 - RNA, 1401 nt, Artificial Sequence
  derived and/or modified CDS sequence (opt5) from neuraminidase__InfluenzaB__AEO80198
augcugcccagcaccauccagacacucacgcuguuccuuaccuccggcggggugcugcucucucuguacgucagcgccucccuuucuuaucugcucuacagcgacauucugcugaaguuuuccccuacagagaucaccgcuccgacaaugccccucgauugcgccaacgcgucuaauguucaagcugugaacagaagcgccaccaaaggagugacacugcuucugccugaacccgaguggaccuauccucggcucuccugucccggcagcacguuccagaaggcccugcuuauuucuccucaccgcuuuggggaaaccaaaggaaauuccgcuccgcugaucauuagagagcccuucaucgccugcggcccuaacgaauguaagcauuuugcucucacacacuacgccgcgcagcccgggggauauuacaauggcacccggggcgaccgcaacaaacugagacaucugaucagcgucaagcucgggaagauuccuacaguggaaaauucuaucuuccacauggccgcuugguccggaagcgccugccaugauggcaaagaguggaccuauauugggguugacggacccgauaacaaugcucugcuuaagaucaaauacggcgaggccuacacggacacauaucacucuuacgcgaacaagauucugcggacccaggaguccgccuguaauugcaucgggggaaacuguuaucucaugauuacagauggcagcgcuuccggcgugucugaaugccgcuuucugaaaaucagagaggggcggaucauuaaggagaucuucccgaccggacgcgucaagcacaccgaagaguguacaugcggcuuugccagcaauaaaacgauugaaugugcuugcagagacaacuccuacaccgccaagcggccuuucgugaaacuuaauguugagacagauaccgccgaaauccgccugaugugcacagacaccuaucucgauacgcccagaccugacgaugggagcauuacaggacccugugagucuaacggcgaccggggguccggaggcaucaagggcggguuugugcaucaacgcauggcuagcaaaaucggaagaugguacucucggaccaugagcaagaccgagagaaugggcauggggcuguaugucaaauacgacggagaucccugggcggacuccgaugcccuggcuuuccgcggcgugauggugucuaugaaggaaccugggugguacagcuuuggcuucgagauuaaggacaaaaagugcgaugucccguguaucggaauugaaaugguucacgacggcgggaaagagacauggcauuccgccgccaccgcuaucuauugccucaugggaagcggccagcugcuuugggauacagugacggggguggacauggcccuguga

SEQ ID NO: 220923 - RNA, 1401 nt, Artificial Sequence; identical to SEQ ID NO: 220863
  derived and/or modified CDS sequence (opt5) from neuraminidase__InfluenzaB__AEO80209

SEQ ID NO: 220924 - RNA, 1401 nt, Artificial Sequence
  derived and/or modified CDS sequence (opt5) from neuraminidase__InfluenzaB__AEO80220
augcugcccagcaccauccagacacucacgcuguuccuuaccuccggcggggugcugcucucucuguacgucagcgccucccuuucuuaucugcucuacagcgacauucugcugaaguuuuccccuacagagaucaccgcuccgacaaugccccucgauugcgccaacgcgucuaauguucaagcugugaacagaagcgccaccaaaggacugacacuucugcucccugaacccgaguggaccuauccucggcuguccugucccggcagcacguuccagaaggcccuucugauuucuccucaccgcuuuggggaaaccaaaggaaauuccgcuccgcucaucauuagagagcccuucaucgccugcggcccuaacgaauguaagcauuuugcucugacacacuacgccgcgcagcccgggggauauuacaauggcacccggggcgaccgcaacaaacugagacaucucaucagcgugaagcuggggaagauuccuacagucgagaccucuaucuuccacauggccgcuugguccggaagcgccugccaugauggcaaagaguggacguauauugggguggacggacccgauaauaacgcucugcuuaagaucaaauacggcgaagccuacacagacaccuaucacucuuacgcgaauaagauucuccggacacaggaguccgccuguaacugcaucgggggaaauuguuaucugaugauuaccgauggcagcgcuuccggcguuucugaaugccgcuuucuuaaaaucagagaggggcggaucauuaaggagaucuucccgaccggacgcgugaagcacacagaagaguguacgugcggcuuugccagcaacaaaaccauugaaugugcuugcagagacaauuccuacacagccaagcggccuuucgucaaacugaacguggagaccgauacagccgaaauccgccucaugugcaccgacacguaucuggauacacccagaccugacgaugggagcauuaccggacccugugagucuaauggcgaccggggguccggaggcaucaagggcggguuuguucaucaacgcauggcuagcaaaaucggaagaugguacucucggaccaugagcaagacagagagaaugggcauggggcuguaugugaaauacgacggagaucccugggcggacuccgaugcccucgcuuucucuggcgucauggugagcaugaaggaaccugggugguacuccuuuggcuucgagauuaaggacaaaaagugcgaugugccguguaucggaauugaaaugguccacgacggcgggaaagagaccuggcauagcgccgccacagcuaucuauugccugaugggaucuggccagcuucugugggauacgguuaccgggguggacauggcccucuga

SEQ ID NO: 220925 - RNA, 1401 nt, Artificial Sequence; identical to SEQ ID NO: 220860
  derived and/or modified CDS sequence (opt5) from neuraminidase__InfluenzaB__AEO80231

SEQ ID NO: 220926 - RNA, 1401 nt, Artificial Sequence; identical to SEQ ID NO: 220863
  derived and/or modified CDS sequence (opt5) from neuraminidase__InfluenzaB__AEO80242

SEQ ID NO: 220927 - RNA, 1401 nt, Artificial Sequence; identical to SEQ ID NO: 220707
  derived and/or modified CDS sequence (opt5) from neuraminidase__InfluenzaB__AEP20182

SEQ ID NO: 220928 - RNA, 1401 nt, Artificial Sequence
  derived and/or modified CDS sequence (opt5) from neuraminidase__InfluenzaB__AEP20193
augcugcccagcaccauccagacacucacgcuguuccuuaccuccggcggggugcugcucucucuguacgucagcgccucccuuucuuaucugcucuacagcgacauucugcugaaguuuuccccuacagagaucaccgcuccgacaaugccccucgauugcgccaacgcgucuaauguucacgcugugaacagaagcgccaccaaaggagugacacugcuucugccugaacccgaguggaccuauccucggcucuccugucccggcagcacguuccaaaaggcccugcuuauuucuccucaucgcuuuggggaaaccaaaggaaauuccgcuccgcugaucauuagagagcccuucaucgccugcggcccuaacgaauguaagcacuuugcucucacacauuacgccgcgcagcccgggggauauuacaauggcacccggggcgaccgcaacaaacugagacaccugaucagcgucaagcucgggaagauuccuacaguggaaaauucuaucuuccauauggccgcuugguccggaagcgccugccacgauggcaaagaguggaccuauauugggguugacggacccgauaacaaugcucugcuuaagaucaaauacggcgaggccuacacggacacauaucacucuuacgcgaacaauauucugcggacccaggaguccgccuguaacugcaucgggggaaauuguuaucucaugauuacagauggcagcgcuuccggcgugucugaaugccgcuuucugaagaucagagaggggcggaucauuaaagagaucuucccgaccggacgcgucaagcauaccgaagaguguacaugcggcuuugccagcaacaagacgauugaaugugcuugcagagacaauuccuacaccgccaaacggccuuucgugaaacuuaacguugagacagauaccgccgaaauccgccugaugugcacagacaccuaucucgauacgcccagaccugacgaugggagcauuacaggacccugugagucuaacggcgacaagggguccggaggcaucaagggcggguuugugcaccagcggauggcuagcaaaaucggacgcugguacucuagaaccaugagcaagaccgagcggaugggcauggggcuguaugucaaauacgacggagaucccugggcggacuccgaugcccuggcuuucucuggcgugauggugagcgucaaggaaccugggugguacuccuuuggcuucgagauuaaggacaaaaagugcgauguuccguguaucggaauugaaauggugcaugacggcgggaaagagacauggcacagcgccgccaccgcuaucuauugccucaugggaucuggccaacugcuuugggauacagugacgggggucgacauggcccuguga

SEQ ID NO: 220929 - RNA, 1401 nt, Artificial Sequence
  derived and/or modified CDS sequence (opt5) from neuraminidase__InfluenzaB__AEP20204
augcugcccagcaccauccagacacucacgcuguuccuuaccuccggcggggugcugcucucucuguacgucagcgccucccuuucuuaucugcucuacagcgacauucugcugaaguuuuccccuacagagaucaccgcuccgacaaugccccucgauugcgccaacgcgucuaauguucaagcugugaacagaagcgccaccaaaggagugacacugcuucugccugaacccgaguggaccuauccucggcucuccugucccggcagcacguuccagaaggcccugcuuauuucuccucaccgcuuuggggaaaccaaaggaaauuccgcuccgcugaucauuagagagcccuucaucgccugcggcccuaacgaauguaagcauuuugcucucacacacuacgccgcgcagcccgggggauauuacaauggcacccggggcgaccgcaacaaacugagacaucugaucagcgucaagcucgggaagauuccuacaguggaaaauucuaucuuccacauggccgcuugguccggaagcgccugccaugauggcaaagaguggaccuauauugggguugacggacccgauaacaaugcucugcuuaagaucaaauacggcgaggccuacacggacacauaucacucuuacgcgaacaagauucugcggacccaggaguccgccuguaauugcaucgggggaaacuguuaucucaugauuacagauggcagcgcuuccggcgugucugaaugccgcuuucugaaaaucagagaggggcggaucauuaaggagaucuucccgaccggacgcgucaagcacaccgaagaguguacaugcggcuuugccagcaauaaaacgauugaaugugcuugcagagacaacuccuacaccgccaagcggccuuucgugaaacuuaauguugagacagauaccgccgaaauccgccugaugugcacagacaccuaucucgauacgcccagaccugacgaugggagcauuacaggacccugugagucuaacggcgacaagggguccggaggcaucaaaggcggguuugugcaucaacggauggcuagcaagaucggacgcugguacucuagaaccaugagcaaaaccgagcggaugggcauggggcuguaugucaaguacgacggagaucccugggcggacuccgaugcccuggcuuucucuggcgugauggugagcauuaaggaaccugggugguacuccuuuggcuucgagaucaaagacaagaaaugcgaugucccguguauuggaaucgaaaugguucacgacggcgggaaggagacauggcauagcgccgccaccgcuauuuauugccucaugggaucuggccagcugcuuugggauacagugacggggguggacauggcccuguga

SEQ ID NO: 220930 - RNA, 1401 nt, Artificial Sequence; identical to SEQ ID NO: 220759
  derived and/or modified CDS sequence (opt5) from neuraminidase__InfluenzaB__AEP20215

SEQ ID NO: 220931 - RNA, 1401 nt, Artificial Sequence
  derived and/or modified CDS sequence (opt5) from neuraminidase__InfluenzaB__AEP20237
augcugcccagcaccauccagacacucacgcuguuccuuaccuccggcggggugcugcucucucuguacgucagcgccucccuuucuuaucugcucuacagcgacauucugcugaaguuuuccccuacagagaucaccgcuccgacaaugccccucgauugcgccaacgcgucuaauguucaagcugugaacagaagcgccaccaaaggagugacacugcuucugccugaacccgaguggaccuauccucggcucuccugucccggcagcacguuccagaaggcccugcuuauuucuccucaccgcuuuggggaaaccaaaggaaauuccgcuccgcugaucauuagagagcccuucaucgccugcggcccuaaggaauguaaacauuuugcucucacacacuacgccgcgcagcccgggggauauuacaacggcacccggggcgaccgcaauaagcugagacaucugaucagcgucaagcucgggaaaauuccuacaguggagaacucuaucuuccacauggccgcuugguccggaagcgccugccaugauggcaaggaguggaccuauauugggguugacggacccgauucuaaugcucugcuuaaaaucaaguacggcgaagccuacacggacacauaucacuccuacgcgaacaauauucugcggacccaggagagcgccuguaacugcaucgggggaaauuguuaucucaugauuacagauggcuccgcuucuggcaucagcgaaugccgcuuucugaaaaucagagaggggcggauuaucaaggagauuuucccgaccggacgcgugaagcacaccgaagaguguacaugcggcuuugccuccaacaaaacgaucgaaugugcuugcagagacaauagcuacaccgccaagcggccuuucgucaaacuuaacguggagacagaugccgcugaaauucgccugaugugcaccgagacauaucucgacacccccagaccugaugacgggucuaucacgggacccugugaguccaauggcgauaaggggagcggaggcaucaaaggcggguuuguucaucaacggauggcgucuaagauuggacgcugguacagcagaacaauguccaaaaccaagcggaugggcauggggcuguaugugaaguacgacggagaccccuggaccgauucugacgcccuggcucucagcggcgucaugguguccauggaggaaccugggugguacagcuucggcuuugaaaucaaagauaagaaaugcgacgugccguguauuggaaucgagaugguccacgauggcgggaaggaaacauggcauucugccgccaccgcuauuuauugccugaugggauccggccagcuucugugggacacaguuacggggguggauauggcccucuga

SEQ ID NO: 220932 - RNA, 1401 nt, Artificial Sequence; identical to SEQ ID NO: 220759
  derived and/or modified CDS sequence (opt5) from neuraminidase__InfluenzaB__AEP20248

SEQ ID NO: 220933 - RNA, 1401 nt, Artificial Sequence
  derived and/or modified CDS sequence (opt5) from neuraminidase__InfluenzaB__AEP20259
augcugcccagcaccauccagacacucacgcuguuccuuaccuccggcggggugcugcucucucuguacgucagcgccucccuuucuuaucugcucuacagcgacauucugcugaaguuuuccccuacagagaucaccgcuccgacaaugccccucgauugcgccaacgcgucuaauguucaagcugugaacagaagcgccaccaaaggagugacacugcuucugccugaacccgaguggaccuauccucggcucuccugucccggcagcacguuccagaaggcccugcuuauuucuccucaccgcuuuggggaaaccaaaggaaauuccgcuccgcugaucauuagagagcccuucaucgccugcggcccuaacgaauguaagcauuuugcucucacacacuacgccgcgcagcccgggggauauuacaauggcacccggggcgaccgcaacaaacugagacaucugaucagcgucaagcucgggaagauuccuacaguggaaaauucuaucuuccacauggccgcuugguccggaagcgccugccaugauggcaaagaguggaccuauauugggguugacggacccgauaacaaugcucugcuuaagaucaaauacggcgaggccuacacggacacauaucacucuuacgcgaacaauauucugcggacccaggaguccgccuguaacugcaucgggggaaauuguuaucucaugauuacagauggcagcgcuuccggcgugucugaaugccgcuuucugaagaucagagaggggcggaucauuaaagagaucuucccgaccggacgcgucaagcacaccgaagaguguacaugcggcuuugccagcaacaagauuaucgaaugugcuugcagagacaauuccuacacggccaaacggccuuucgugaaacuuaacguugagaccgauacagccgaaauucgccugaugugcaccgagacauaucucgacacccccagaccugaugacgggagcaucacgggacccugugagucuaacggcgauaagggguccggaggcaucaagggcggguuugugcaucaacggauggcuagcaaaauuggacgcugguacucuagaacaaugagcaagaccgaacggaugggcauggggcuguaugucaaauacgacggagaccccugggcggauuccgacgcccuggcucucucuggcgugauggugagcauggaggaaccugggugguacuccuucggcuuugagaucaaggauaagaaaugcgacgucccguguauuggaaucgaaaugguucacgauggcgggaaggagaccuggcauagcgccgccacagcuauuuauugccugaugggaucuggccagcuucugugggacaccgugacagggguggauauggcccucuga

SEQ ID NO: 220934 - RNA, 1401 nt, Artificial Sequence
  derived and/or modified CDS sequence (opt5) from neuraminidase__InfluenzaB__AEP20281
augcugcccagcaccauccagacacucacgcuguuccuuaccuccggcggggugcugcucucucuguacgucagcgccucccuuucuuaucugcucuacagcgacauucugcugaaguuuuccccuacagagaucaccgcuccgacaaugccccucgauugcgccaacgcgucuaauguucaagcugugaacagaagcaccacaaaaggagugacccugcuucugccugaacccgaguggacguauccucggcucuccugucccggcagcaccuuccagaaggcccugcuuauuucuccucaccgcuuuggggaaacaaaaggaaauuccgccccgcugaucauuagagagcccuucaucgcuugcggcccuaacgaauguaagcauuuugcccucacccacuacgcugcccagcccgggggauauuacaauggcacacggggcgaccgcaacaaacugagacaucugaucagcgucaagcucgggaagauuccuaccguggaaaauucuaucuuccacauggcggccugguccggaagcgcuugccaugauggcaaagaguggacguauauugggguugacggacccgauaacaaugcccugcuuaagaucaaauacggcgaggcuuacacagacaccuaucacucuuacgccaacaauauucugcggacacaggaguccgcguguaacugcaucgggggaaauuguuaucucaugauuaccgauggcagcgccuccggcgugucugaaugccgcuuucugaagaucagagaggggcggaucauuaaagagaucuucccgaccggacgcgucaagcacacagaagaguguacgugcggcuuugcuagcaacaagaccauugaaugugccugcagagacaauuccuacacagcuaaacggccuuucgugaaacuuaacguugagaccgauacagccgaaauccgccugaugugcaccgagacguaucucgacacacccagaccugaugacgggagcauuaccggacccugugagucuaacggcgauaagggguccggaggcaucaagggcggguuugugcaucaacggauggccagcaaaaucggacgcugguacucuagaaccaugagcaagacagaacggaugggcauggggcuguaugucaaauacgacggagaccccugggcugauuccgacgcgcuggcccucucuggcgugauggugagcauggaggaaccugggugguacuccuucggcuuugagauuaaggauaagaaaugcgacgucccguguaucggaauugaaaugguucacgauggcgggaaggagaccuggcauagcgcugccacagccaucuauugccugaugggaucuggccagcuucugugggacacggugaccgggguggauauggcucucuga

SEQ ID NO: 220935 - RNA, 1401 nt, Artificial Sequence; identical to SEQ ID NO: 220707
  derived and/or modified CDS sequence (opt5) from neuraminidase__InfluenzaB__AEP20292

SEQ ID NO: 220936 - RNA, 1401 nt, Artificial Sequence; identical to SEQ ID NO: 220699
  derived and/or modified CDS sequence (opt5) from neuraminidase__InfluenzaB__AEP20303

SEQ ID NO: 220937 - RNA, 1401 nt, Artificial Sequence
  derived and/or modified CDS sequence (opt5) from neuraminidase__InfluenzaB__AEP20314
augcugcccagcaccauccagacacucacgcuguuccuuaccuccggcggggugcugcucucucuguacgucagcgccucccuuucuuaucugcucuacagcgacauucugcugaaguuuucccaaacaggaaucaccgcuccuauuaugccgcucgauugcgccaacgcgucuaauguucaggcugugaacagaagcgccacaaaaggcgugacccugcuucugcccgagccugaauggacauauccccggcucuccuguccugggagcaccuuccagaaggcccugcuuaucucuccccaccgcuuuggagagacgaaaggcaauuccgcuccucugauuaucagagaaccguucaucgccugcgggcccaaggaguguaaacauuuugcucucacccacuacgccgcgcagccuggaggcuauuacaacggcacacgggaagaccgcaauaagcugagacaucugauuagcgucaagcucgggaaaauccccaccguggagaacucuauuuuccacauggccgcuugguccggaagcgccugccaugauggccgggaguggacauauaucgggguugacggaccugauucuaaugcucugcuuaagauuaaauacggcgaagccuacaccgacacguaucacuccuacgcgaagaacauccugcgcacacaagagagcgccuguaauugcauugggggagauuguuaucucaugaucaccgacggccccgcuuccggcaucucugaaugcagauuucugaaaauucgggaggggcgcaucauuaaggagaucuucccgacaggaagagugaagcacaccgaagaguguaccugcggcuuugccagcaacaaaacaauugaaugugcuugccgggauaauuccuacacggccaagcgcccuuucgucaaacuuaacguggagaccgacacagccgaaaucagacugaugugcaccgagacauaucucgauacgccccggccuaaugacgggagcaucaccggacccugugagucuaacggcgauaagggguccggaggcauuaaaggcggguuuguucaucagcgcauggcuagcaagaucggaagaugguacucucggacaaugagcaaaaccaagagaaugggcauggggcuguaugugaaguacgacggagaccccuggaccgauuccgaagcgcuggcccucucuggcgucaugauuagcauggaggaaccugggugguacuccuucggcuuugagaucaaagacaagaaaugcgaugugccguguauuggaaucgaaauggugcacgacggcgggaagacaaccuggcauagcgcugccacagccaucuauugccugaugggaucuggccagcuucugugggauacggucaccgggguugacauggcucucuga

SEQ ID NO: 220938 - RNA, 1401 nt, Artificial Sequence
  derived and/or modified CDS sequence (opt5) from neuraminidase__InfluenzaB__AEP20336
augcugcccagcaccauccagacacucacgcuguuccuuaccuccggcggggugcugcucucucuguacgucagcgccucccuuucuuaucugcucuacagcgacauucugcugaaguuuuccccuacagagaucaccgcuccgacaaugccccucgauugcgccaacgcgucuaauguucaagcugugaacagaagcgccaccaaaggagugacacugcuucugccugaacccgaguggaccuauccucggcucuccugucccggcagcacguuccagaaggcccugcuuauuucuccucaccgcuuuggggaaaccaaaggaaauuccgcuccgcugaucauuagagagcccuucaucgccugcggcccuaacgaauguaagcauuuugcucucacacacuacgccgcgcagcccgggggauauuacaauggcacccggggcgaccgcaacaaacugagacaucugaucagcgucaagcucgggaagauuccuacaguggaaaauucuaucuuccacauggccgcuugguccggaagcgccugccaugauggcaaagaguggaccuauauugggguugacggacccgauaacaaugcucugcuuaagaucaaauacggcgaggccuacacggacacauaucacucuuacgcgaacaauauucugcggacccaggaguccgccuguaacugcaucgggggaaauuguuaucucaugauuacagauggcagcgcuuccggcgugucugaaugccgcuuucugaagaucagagaggggcggaucauuaaagagaucuucccgaccggacgcgucaagcacaccgaagaguguacaugcggcuuugccagcaacaagacgauugaaugugcuugcagagacaauuccuacaccgccaaacggccuuucgugaaacuuaacguugagacagauaccgccgaaauccgccugaugugcacagagaccuaucucgacacgcccagaccugaugacgggagcauuacaggacccugugagucuaacggcgauaagggguccggaggcaucaagggcggguuugugcaucaacggauggcuagcaaaaucggacgcugguacucuagaaccaugagcaagaccgaacggaugggcauggggcuguaugucaaauacgacggagaccccugggcggauuccgacgcccugacacucucuggcgugauggugagcauggaggaaccugggugguacuccuucggcuuugagauuaaggauaagaaaugcgacgucccguguaucggaauugaaaugguucacgauggcgggaaggagaccuggcauagcgcugccacaucuaucuauugccugaugggauccggccagcuucugugggacacggugaccgggguggauauggcccucuga

SEQ ID NO: 220939 - RNA, 1401 nt, Artificial Sequence
  derived and/or modified CDS sequence (opt5) from neuraminidase__InfluenzaB__AEP20347
augcugcccagcaccauccagacacucacgcuguuccuuaccuccggcggggugcugcucucucuguacgucagcgccucccuuucuuaucugcucuacagcgacauucugcugaaguuuucccaaacagagaucaccgcuccuauuaugccgcucgauugcgccaacgcgucuaauguucaggcugugaacagaagcgccacaaaaggagugacccugcuucugcccgaaccugaguggacauauccccggcucuccuguccuggcagcaccuuccagaaggcccugcuuaucucuccccaccgcuuuggggaaacgaaaggaaauuccgcuccucugauuaucagagagccguucaucgccugcggccccaccgaauguaagcauuuugcucucacacacuacgccgcgcagccugggggauauuacaacggcacccgggaggaccgcaauaaacugagacaucugauuagcgucaagcucggcaagauccccacaguggagaacucuauuuuccacauggccgcuugguccgggagcgccugccaugauggaaaagaauggaccuauaucggcguugacgggccugauucuaaugcucugcuuaagauuaaauacggagaggccuacacggacacauaucacuccuacgcgaagaacauccugcggacccaagaaagcgccuguaauugcauuggcggggauuguuaucucaugaucacagacggacccgcuuccggcaucucugagugccgcuuucugaaaauuagagagggccggaucauuaaggaaaucuucccgaccgggcgcgugaagcacaccgaggaauguacaugcggauuugccagcaacaaaacgauugagugugcuugcagagauaauuccuacaccgccaagcggccuuucgucaaacuuaacguggaaacagacaccgccgagauccgccugaugugcacagagaccuaucucgauacgcccagaccuaaugacggcagcaucacagggcccugugaaucugauggagacaagggcuccgggggaauuaaaggcggcuuuguucaucagcggauggcuagcaagaucgggcgcugguacucuagaaccaugagcaaaaccaagcggaugggaaugggccuguaugugaaguacgacggggaucccuggacagacuccgaggcgcuggcccucucuggagucauggugccuauggaggaaccgggcugguacagcuucggguuugaaauuaaagauaagaaaugcgacgugcccuguaucggcauugagaugguccacgauggaggcaagaccacauggcauuccgcugccacggccaucuauugccugauggggagcggacagcuucugugggacaccguuacaggcguggauauggcucucuga

SEQ ID NO: 220940 - RNA, 1401 nt, Artificial Sequence; identical to SEQ ID NO: 220939
  derived and/or modified CDS sequence (opt5) from neuraminidase__InfluenzaB__AEP20358

SEQ ID NO: 220941 - RNA, 1401 nt, Artificial Sequence; identical to SEQ ID NO: 220939
  derived and/or modified CDS sequence (opt5) from neuraminidase__InfluenzaB__AEP20369

SEQ ID NO: 220942 - RNA, 1401 nt, Artificial Sequence; identical to SEQ ID NO: 220939
  derived and/or modified CDS sequence (opt5) from neuraminidase__InfluenzaB__AEP20380

SEQ ID NO: 220943 - RNA, 1401 nt, Artificial Sequence
  derived and/or modified CDS sequence (opt5) from neuraminidase__InfluenzaB__AEP20391
augcugcccagcaccauccagacacucacgcuguuccuuaccuccggcggggugcugcucucucuguacgucagcgccucccuuucuuaucugcucuacagcgacauucugcugaaguuuuccccuacagagaucaccgcuccgacaaugccccucgauugcgccaacgcgucuaauguucaagcugugaacagaagcgccaccaaaggagugacacugcuucugccugaacccgaguggaccuauccucggcucuccugucccggcagcacguuccagaaggcccugcuuauuucuccucaccgcuuuggggaaaccaaaggaaauuccgcuccgcugaucauuagagagcccuucaucgccugcggcccuaacgaauguaagcauuuugcucucacacacuacgccgcgcagcccgggggauauuacaauggcacccggggcgaccgcaacagacugcggcaucugaucagcgucaaacucgggaagauuccuacaguggaaaauucuaucuuccacauggccgcuugguccggaagcgccugccaugauggcaaggaguggaccuauauugggguugacggacccgauaacaaugcucugcuuaaaaucaaguacggcgaggccuacacggacacauaucacucuuacgcgaacaauauucugcgcacccaggaguccgccuguaacugcaucgggggaaauuguuaucucaugauuacagauggcagcgcuuccggcgugucugaaugcagauuucugaaaauccgggaggggcgcaucauuaaggagaucuucccgaccggaagagucaaacacaccgaagaguguacaugcggcuuugccagcaacaagacgauugaaugugcuugccgggacaauuccuacaccgccaagcgcccuuucgugaaacuuaacguugagacagauaccgccgaaaucagacugaugugcacagacaccuaucucgauacgccccggccugacgaugggagcauuacaggacccugugagucuaacggcgacaagggguccggaggcaucaaaggcggguuugugcaucaacgcauggcuagcaaggucggaagaugguacucucggaccaugagcaaaaccgagagaaugggcauggggcuguaugugaaguacgacggagaucccugggcggacuccgaugcccuggcuuucucuggcgugauggucagcaugaaagaaccugggugguacuccuuuggcuucgagaucaaggacaagaaaugcgauguuccguguauuggaaucgaaauggugcacgacggcgggaaggagacauggcauagcgccgccaccgcuauuuauugccucaugggaucuggccagcugcuuugggauacagugacgggggucgacauggcccuguga

SEQ ID NO: 220944 - RNA, 1401 nt, Artificial Sequence
  derived and/or modified CDS sequence (opt5) from neuraminidase__InfluenzaB__AEP20413
augcugcccagcaccauccagacacucacgcuguuccuuaccuccggcggggugcugcucucucuguacgucagcgcccuucuguccuaucuccuguacucugacauucugcucaaguuuagcccuacagagaucauugcuccgaccaugucccuggauugcgccaacgcgucuaauguucaagcugugaacagaagcgccacaaaaggagugaccuuccuucugcccgaaccugaguggacauauccccggcucuccuguccuggcagcaccuuucagaaggcccugcuuaucucuccccaccgcuucggggaaacgaaaggaaauuccgcuccucugauuaucagagagccguuuaucgccugcggccccaacgaauguaagcauuucgcucucacccacuacgccgcgcagccugggggauauuacaauggcacacggggcgaccgcaacaaacugagacaucugauuagcgucaagcucgggaagauccccaccguggaaaauucuauuuuucacauggccgcuugguccggaagcgccugccaugauggcaaagaguggacauauaucgggguugacggaccugauaacgacgcucugcuuaaggugaaauacggcgaggccuacaccgauacguaucacucuuacgcgaauaagauucugcggacacaggaguccgccuguaacugcaucgggggaaauuguuaucucaugauuaccgacggcagcgcuuccggcgucucugaaugccgcuuccugaaaaucagagaggggcggaucauuaaggagaucuuucccacaggacgcgugaagcacaccgaagaguguaccugcggcuucgccagcaacaaaacaauugaaugugcuugcagagauaauuccuacacggccaagcggccguuuguuaaacuuaacguggagaccgacacagccgaaauccgccugaugugcaccgauacauaucucgacaccccuagacccgaugacgggagcauuacgggaccuugugagucuaauggcgacaagggguccggaggcaucaaaggcggguucguccaucaacggauggagagcaagaucggacgcugguacucuagaacaaugagcaaaaccgaacggaugggcauggggcuguaugugaaguacaacggagaucccugggcugacuccgaugcgcuggccuuuucuggcgugauggucagcaugaaggagcccgggugguacuccuucggcuucgaaauuaaagacaagaaaugcgauguuccuuguaucggaauugagauggugcacgacggcgggaaggaaaccuggcauagcgcugccacagccaucuauugccucaugggaucuggccagcugcuuugggauaccgugacaggggucgacauggcucuguga

SEQ ID NO: 220945 - RNA, 1401 nt, Artificial Sequence; identical to SEQ ID NO: 220944
  derived and/or modified CDS sequence (opt5) from neuraminidase__InfluenzaB__AEP20435

SEQ ID NO: 220946 - RNA, 1401 nt, Artificial Sequence; identical to SEQ ID NO: 220939
  derived and/or modified CDS sequence (opt5) from neuraminidase__InfluenzaB__AEQ39031

SEQ ID NO: 220947 - RNA, 1401 nt, Artificial Sequence
  derived and/or modified CDS sequence (opt5) from neuraminidase__InfluenzaB__AEQ39275
augcugcccagcaccauccagacacucacgcuguuccuuaccuccggcggggugcugcucucucuguacgucagcgccucccuuucuuaucugcucuacagcgacauucugcugaaguuuuccccuaaagagaucacagcuccgaccaugccccucgauugcgccaacgcgucuaauguucaagcugugaaccacagcgccacaaagggagugacccugcuucugccugaacccgaguggacauauccuagacucuccugucccggcagcaccuuccagaaagcccugcuuauuucuccucaucgguuuggggaaacgaagggaaauuccgcuccgcugaucauucgcgagcccuucaucgccugcggcccuaacgaauguaaacacuuugcucucacccauuacgccgcgcagcccgggggauauuacaauggcacaagaggcgaccggaacaagcugcgccaccugaucagcgucaagcucgggaaaauuccuaccguggaaaauucuaucuuccauauggccgcuugguccggaagcgccugccacgauggcaaggaguggacauauauugggguugacggacccgauaacaaugcucugcuuaaagugaaguacggcgaggccuacaccgacacguaucacucuuacgcgaacaaaauccugagaacacaggaguccgccuguaauugcauugggggaaacuguuaucucaugaucaccgauggcagcgcuuccggcgucucugaaugccgguuucugaagauucgcgaggggagaaucaucaaggagauuuucccgacaggacgggugaaacauaccgaagaguguaccugcggcuuugccagcaauaagacaaucgaaugugcuugccgcgacaacuccuacacggccaaaagaccuuucguuaaacuuaauguggagaccgauacagccgaaauucggcugaugugcaccgacacauaucucgauacgccccgcccugacgaugggagcaucaccggacccugugagucuaacggcgacaagggguccggaggcauuaagggcggguuuguccaccaaagaauggagagcaaaaucggacggugguacucucgcacaaugagcaagaccgaaagaaugggcauggggcuguaugugaaguacgacggagaucccugggcugacuccgaugcgcuggccuucucuggcgugauggucagcaugaaagagccugggugguacuccuuuggcuucgaaaucaaggacaaaaagugcgauguuccguguauuggaaucgagauggugcaugacggcgggaaagaaaccuggcacagcgcugccacagccauuuauugccucaugggaucuggccagcugcuuugggauaccgugacaggggucgacauggcucuguga

SEQ ID NO: 220948 - RNA, 1401 nt, Artificial Sequence; identical to SEQ ID NO: 220947
  derived and/or modified CDS sequence (opt5) from neuraminidase__InfluenzaB__AEQ39286

SEQ ID NO: 220949 - RNA, 1401 nt, Artificial Sequence; identical to SEQ ID NO: 220947
  derived and/or modified CDS sequence (opt5) from neuraminidase__InfluenzaB__AEQ39297

SEQ ID NO: 220950 - RNA, 1401 nt, Artificial Sequence; identical to SEQ ID NO: 220947
  derived and/or modified CDS sequence (opt5) from neuraminidase__InfluenzaB__AEQ39308

SEQ ID NO: 220951 - RNA, 1401 nt, Artificial Sequence; identical to SEQ ID NO: 220947
  derived and/or modified CDS sequence (opt5) from neuraminidase__InfluenzaB__AEQ39319

SEQ ID NO: 220952 - RNA, 1401 nt, Artificial Sequence
  derived and/or modified CDS sequence (opt5) from neuraminidase__InfluenzaB__AEQ39330
augcugcccagcaccauccagacacucacgcuguuccuuaccuccggcggggugcugcucucucuguacgucagcgccucccuuucuuaucugcucuacagcgacauucugcugaaguuuuccccuaaagagaucacagcuccgaccaugccccucgauugcgccaacgcgucuaauguucaagcugugaaccacagcgccacaaagggagugacccugcuucugccugaacccgaguggacauauccuagacucuccugucccggcagcaccuuccagaaagcccugcuuauuucuccucaucgguuuggggaaacgaagggaaauuccgcuccgcugaucauucgcgagcccuucaucgccugcggcccuaacgaauguaaacacuuugcucucacccauuacgccgcgcagcccgggggauauuacaauggcacaagaggcgaccggaacaagcugcgccaccugaucagcgucaagcucgggaaaauuccuaccguggaaaauucuaucuuccauauggccgcuugguccggaagcgccugccacgauggcaaggaguggacauauauugggguugacggacccgauaacaaugcucugcuuaaagugaaguacggcgaggccuacaccgacacguaucacucuuacgcgaacaaaauccugagaacacaggaguccgccuguaauugcauugggggaaacuguuaucucaugaucaccgauggcagcgcuuccggcgucucugaaugccgguuucugaagauucgcgaggggagaaucaucaaggagauuuucccgacaggacgggugaaacauaccgaagaguguaccugcggcuuugccagcaauaagacaaucgaaugugcuugccgcgacaacuccuacacggccaaaagaccuuucguuaaacuuaauguggagaccgauacagccgaaauucggcugaugugcaccgacacauaucucgauacgccccgcccugacgaugggagcaucaccggacccugugagucuaacggcgacaagggguccggaggcauuaagggcggguuuguccaccaaagaauggagagcaaaaucggacggugguacucucgcacaaugagcaagaccgaaagaaugggcauggggcuguaugugaaguacgacggagaucccugggcugacuccgaugcgcuggccuucucuggcgugauggucagcaugaaagagccugggugguacuccuuuggcuucgaaaucaaggacaaaaagugcgauguuccguguauuggaaucgagauggugcaugacggcgggaaagaaaccuggcacagcgcugccacagccauuuauugccucaugggaucuggccagcugcuuugggauaccgugacaggggucgacaucgcucuguga

SEQ ID NO: 220953 - RNA, 1401 nt, Artificial Sequence; identical to SEQ ID NO: 220947
  derived and/or modified CDS sequence (opt5) from neuraminidase__InfluenzaB__AEQ39341

SEQ ID NO: 220954 - RNA, 1401 nt, Artificial Sequence; identical to SEQ ID NO: 220947
  derived and/or modified CDS sequence (opt5) from neuraminidase__InfluenzaB__AEQ39352

SEQ ID NO: 220955 - RNA, 1401 nt, Artificial Sequence; identical to SEQ ID NO: 220947
  derived and/or modified CDS sequence (opt5) from neuraminidase__InfluenzaB__AEQ39363

SEQ ID NO: 220956 - RNA, 1401 nt, Artificial Sequence; identical to SEQ ID NO: 220913
  derived and/or modified CDS sequence (opt5) from neuraminidase__InfluenzaB__AEQ39374

SEQ ID NO: 220957 - RNA, 1401 nt, Artificial Sequence
  derived and/or modified CDS sequence (opt5) from neuraminidase__InfluenzaB__AEQ39385
augcugcccagcaccauccagacacucacgcuguuccuuaccuccggcggggugcugcucucucuguacgucagcgccucccuuucuuaucugcucuacagcgacauucugcugaaguuuuccccuacagagaucaccgcuccgacaaugccccucgauugcgccaacgcgucuaauguucaagcugugaacagaagcgccaccaaaggagugacacugcuucugccugaacccgaguggaccuauccucggcucuccugucccggcagcacguuccagaaggcccugcuuauuucuccucaccgcuuuggggaaaccaaaggaaauuccgcuccgcugaucauuagagagcccuucaucgccugcggcccuaaggaauguaaacauuuugcucucacacacuacgccgcgcagcccgggggauauuacaacggcacccggggcgaccgcaauaagcugagacaucugaucagcgucaagcucgggaaaauuccuacaguggagaacucuaucuuccacauggccgcuugguccggaagcgccugccaugauggcaaggaguggaccuauauugggguugacggacccgauucuaaugcucugcuuaaaaucaaguacggcgaagccuacacggacacauaucacuccuacgcgaacaauauucugcggacccaggagagcgccuguaacugcaucgggggaaauuguuaucucaugauuacagauggcuccgcuucuggcaucagcgaaugccgcuuucugaaaaucagagaggggcggauuaucaaggagauuuucccgaccggacgcgugaagcacaccgaagaguguacaugcggcuuugccuccaacaaaacgaucgaaugugcuugcagagacaauagcuacaccgccaagcggccuuucgucaaacuuaacguggagacagauaccgccgaaauucgccugaugugcacagagaccuaucucgacacgcccagaccugaugacgggucuaucacaggacccugugaguccaauggcgauaaggggagcggaggcaucaaaggcggguuuguucaucaacggaugaccucuaagauuggacgcugguacagcagaaccauguccaaaacaaagcggaugggcauggggcuguaugugaaguacgacggagaccccuggaccgauucugacgcucuggcgcucagcggcgucaugguguccauggaggaaccugggugguacagcuucggcuuugaaaucaaagauaagaaaugcgacgugccguguauuggaaucgagaugguccacgauggcgggaaggaaacauggcauucugccgcuacggccauuuauugccugaugggauccggccagcuucugugggacaccguuacagggguggauauggcccucuga

SEQ ID NO: 220958 - RNA, 1401 nt, Artificial Sequence
  derived and/or modified CDS sequence (opt5) from neuraminidase__InfluenzaB__AEQ39444
augcugcccagcaccauccagacacucacgcuguuccuuaccuccggcggggugcugcucucucuguacgucagcgccucccuuucuuaucugcucuacagcgacauucugcugaaguuuucccaaacagagaucauugcuccuaucaugccgcucgauugcgccaacgcgucuaauguucaggcugugaacagaagcgccaccaaaggagugacacugcuucugcccgaaccugaguggaccuauccccggcucuccuguccuggcagcacauuccagaaggcccugcuuauuucuccccaccgcuuuggggaaaccaaaggaaauuccgcuccucugaucaucagagagccguucauugccugcggccccacggaauguaagcauuuugcucucacccacuacgccgcgcagccugggggauauuacaacggcacacgggaggaccgcaauaaacugagacaucugaucagcgucaagcucggcaagauucccaccguggagaacucuaucuuccacauggccgcuugguccgggagcgccugccaugauggaaaagaauggacauauauuggcguugacgggccugauucuaaugcucugcuuaagaucaaauacggagaggccuacaccgacacguaucacuccuacgcgaagaacauucugcggacacaagaaagcgccuguaauugcaucggcggggauuguuaucucaugaucaccgacggacccgcuuccggcauuucugagugccgcuuucugaaaaucagagagggccggauuaucaaggaaauuuucccgacagggcgcgugaagcacaccgaggaauguaccugcggauuugccagcaacaaaacaaucgagugugcuugcagagauaauuccuacacggccaagcggccuuucgucaaacuuaacguggaaaccgacacagccgagauccgccugaugugcaccgagacauaucucgauacccccagaccuaaugacggcagcauuacggggcccugugaaucugauggagacaagggcuccgggggaaucaaaggcggcuuuguucaucagcggauggcuagcaagauugggcgcugguacucuagaacaaugagcaaaaccaagcggaugggaaugggccuguaugugaaguacgacggggaucccuggaccgacuccgaggcgcuggcccucucuggagucauggugagcauggaggaaccuggcugguacuccuucggguuugaaaucaaagauaagaaaugcgacgugccguguauuggcaucgagaugguccacgauggaggcaagacaaccuggcauagcgcugccacagccaucuauugccugauggggucuggacagcuucugugggacacgguuaccggcguggauauggcucucuga

SEQ ID NO: 220959 - RNA, 1401 nt, Artificial Sequence; identical to SEQ ID NO: 220860
  derived and/or modified CDS sequence (opt5) from neuraminidase__InfluenzaB__AEQ39455

SEQ ID NO: 220960 - RNA, 1401 nt, Artificial Sequence
  derived and/or modified CDS sequence (opt5) from neuraminidase__InfluenzaB__AEQ39466
augcugcccagcaccauccagacacucacgcuguuccuuaccuccggcggggugcugcucucucuguacgucagcgccucccuuucuuaucugcucuacagcgacauucugcugaaguuuuccccuacagagaucaccgcuccgacaaugccccucgauugcgccaacgcgucuaauguucaagcugugaacagaagcgccaccaaaggagugacacugcuucugccugaacccgaguggaccuauccucggcucuccugucccggcagcacguuccagaaggcccugcuuauuucuccucaccgcuuuggggaaaccaaaggaaauuccgcuccgcugaucauuagagagcccuucaucgccugcggcccuaacgaauguaagcauuuugcucucacacacuacgccgcgcagcccgggggauauuacaauggcacccggggcgaccgcaacaaacugagacaucugaucagcgucaagcucgggaagauuccuacaguggaaaauucuaucuuccacauggccgcuugguccggaagcgccugccaugauggcaaagaguggaccuauauugggguugacggacccgauaacaaugcucugcuuaagaucaaauacggcgaggccuacacggacacauaucacucuuacgcgaacaauauucugcggacccaggaguccgccuguaacugcaucgggggaaauuguuaucucaugauuacagauggcagcgcuuccggcgugucugaaugccgcuuucugaagaucagagaggggcggaucauuaaagagaucuucccgaccggacgcgucaagcacaccgaagaguguacaugcggcuuugccagcaacaagacgauugaaugugcuugcagagacaauuccuacaccgccaaacggccuuucgugaaacuuaacguugagacagauaccgccgaaauccgccugaugugcacagacaccuaucucgauacgcccagaccugacgaugggagcauuacaggacccugugagucuaacggcgacaagggguccggaggcaucaagggcggguuugugcaucaacggauggcuagcaaagucggacgcugguacucuagaaccaugagcaagaccgagcggaugggcauggggcuguaugugaaauacgacggagaucccugggcggacuccgaugcccuggcuuucucuggcgugauggucagcaugaaggaaccugggugguacuccuuuggcuucgagaucaaggacaaaaagugcgauguuccguguauuggaaucgaaauggugcacgacggcgggaaagagacauggcauagcgccgccaccgcuauuuauugccucaugggaucuggccagcugcuuugggauacagugacgggggucgacauggcccuguga

SEQ ID NO: 220961 - RNA, 1401 nt, Artificial Sequence; identical to SEQ ID NO: 220947
  derived and/or modified CDS sequence (opt5) from neuraminidase__InfluenzaB__AEQ39477

SEQ ID NO: 220962 - RNA, 1401 nt, Artificial Sequence
  derived and/or modified CDS sequence (opt5) from neuraminidase__InfluenzaB__AEQ39488
augcugcccagcaccauccagacacucacgcuguuccuuaccuccggcggggugcugcucucucuguacgucagcgccucccuuucuuaucugcucuacagcgacauucugcugaaguuuuccccuacagagaucaccgcuccgacaaugccccucgauugcgccaacgcgucuaauguucaagcugugaacagaagcgccaccaaaggagugacacugcuucugccugaacccgaguggaccuauccucggcucuccugucccggcagcacguuccagaaggcccugcuuauuucuccucaccgcuuuggggaaaccaaaggaaauuccgcuccgcugaucauuagagagcccuucaucgccugcggcccuaacgaauguaagcauuuugcucucacacacuacgccgcgcagcccgggggauauuacaauggcacccggggcgaccgcaacaaacugagacaucugaucagcgucaagcucgggaagauuccuacaguggaaaauucuaucuuccacauggccgcuugguccggaagcgccugccaugauggcaaagaguggaccuauauugggguugacggacccgauaacaaugcucugcuuaaggugaaauacggcgaggccuacacggacacauaucacucuuacgcgaacaagauccugcggacccaggaguccgccuguaauugcauugggggaaacuguuaucucaugaucacagauggcagcgcuuccggcgucucugaaugccgcuuucugaaaauuagagaggggcggaucaucaaggagauuuucccgaccggacgcgugaagcacaccgaagaguguacaugcggcuuugccagcaauaaaacgaucgaaugugcuugcagagacaacuccuacaccgccaagcggccuuucguuaaacuuaauguggagacagauaccgccgaaauucgccugaugugcacagacaccuaucucgauacgcccagaccuaacgacgggagcaucacaggacccugugagucuaacggcgauaagggguccggaggcauuaaaggcggguuuguccaucaacggauggagagccgcaucggaagaugguacucucggaccaugagcaagaccgaaagaaugggcauggggcuguaugugaaauacgacggagaccccuggacagauuccgacgcucuggcguucucuggcgugauggucagcaugaaggagccugggugguacuccuuuggcuucgaaaucaaggauaaaaagugcgacguuccguguauuggaaucgagauggugcacgauggcgggaaagaaaccuggcauagcgccgcuacagccauuuauugccucaugggaucuggccagcugcuuugggacacggugaccggggucgauauggcccuguga

SEQ ID NO: 220963 - RNA, 1401 nt, Artificial Sequence; identical to SEQ ID NO: 220913
  derived and/or modified CDS sequence (opt5) from neuraminidase__InfluenzaB__AEQ39499

SEQ ID NO: 220964 - RNA, 1401 nt, Artificial Sequence; identical to SEQ ID NO: 220759
  derived and/or modified CDS sequence (opt5) from neuraminidase__InfluenzaB__AEQ39510

SEQ ID NO: 220965 - RNA, 1401 nt, Artificial Sequence
  derived and/or modified CDS sequence (opt5) from neuraminidase__InfluenzaB__AEQ49685
augcugcccagcaccauccagacacucacgcuguuccuuaccuccggcggggugcugcucucucuguacgucagcgccucccuuucuuaucugcucuacagcgacauucugcugaaguuuuccccuacagagaucaccgcuccgacaaugccccucgauugcgccaacgcgucuaauguucaagcugugaacagaagcgccaccaaaggagugacacugcuucugccugaacccgaguggaccuauccucggcucuccugucccggcagcacguuccagaaggcccugcuuauuucuccucaccgcuuuggggaaaccaaaggaaauuccgcuccgcugaucauuagagagcccuucaucgccugcggcccuaacgaauguaagcauuuugcucucacacacuacgccgcgcagcccgggggauauuacaauggcacccggggcgaccgcaacaaacugagacaucugaucagcgucaagcucgggaagauuccuacaguggaaaauucuaucuuccacauggccgcuugguccggaagcgccugccaugauggcaaagaguggaccuauauugggguugacggacccgauaacaaugcucugcuuaaggugaaauacggcgaggccuacacggacacauaucacucuuacgcgaacaagauccugcggacccaggaguccgccuguaauugcauugggggaaacuguuaucucaugaucacagauggcagcgcuuccggcgucucugaaugccgcuuucugaaaauuagagaggggcggaucaucaaggagauuuucccgaccggacgcgugaagcacaccgaagaguguacaugcggcuuugccagcaauaaaacgaucgaaugugcuugcagagacaacuccuacaccgccaagcggccuuucguuaaacuuaauguggagacagauaccgccgaaauucgccugaugugcacagacaccuaucucgauacgcccagaccuaacgacgggagcaucacaggacccugugagucugauggcgacaagggguccggaggcauuaaaggcggguuuguccaucaacggauggagagcaagaucggacgcugguacucuagaaccaugagcaaaaccgaacggaugggcauggggcuguaugugaaguacgacggagaucccugggcugacuccgaugcgcuggccuucucuggcgugauggucagcaugaaggagccugggugguacuccuuuggcuucgaaaucaaagacaagaaaugcgauguuccguguauuggaaucgagauggugcacgacggcgggaaggaaacauggcauagcgcugccaccgccauuuauugccucaugggaucuggccagcugcuuugggauacagugacgggggucgacauggaucuguga

SEQ ID NO: 220966 - RNA, 1401 nt, Artificial Sequence
  derived and/or modified CDS sequence (opt5) from neuraminidase__InfluenzaB__AEQ49686
augcugcccagcaccauccagacacucacgcuguuccuuaccuccggcggggugcugcucucucuguacgucagcgccucccuuucuuaucugcucuacagcgacauucugcugaaguuuuccccuacagagaucaccgcuccgacaaugccccucgauugcgccaacgcgucuaauguucaagcugugaacagaagcgccaccaaaggagugacacugcuucugccugaacccgaguggaccuauccucggcucuccugucccggcagcacguuccagaaggcccugcuuauuucuccucaccgcuuuggggaaaccaaaggaaauuccgcuccgcugaucauuagagagcccuucaucgccugcggcccuaacgaauguaagcauuuugcucucacacacuacgccgcgcagcccgggggauauuacaauggcacccggggcgaccgcaacaaacugagacaucugaucagcgucaagcucgggaagauuccuacaguggaaaauucuaucuuccacauggccgcuugguccggaagcgccugccaugauggcaaagaguggaccuauauugggguugacggacccgauaacgacgcucugcuuaaggugaaauacggcgaggccuacacggauacauaucacucuuacgcgaauaagauccugcggacccaggaguccgccuguaacugcauugggggaaauuguuaucucaugaucacagacggcagcgcuuccggcgucucugaaugccgcuuucugaaaauuagagaggggcggaucaucaaggagauuuucccgaccggacgcgugaagcacaccgaagaguguacaugcggcuuugccagcaacaaaacgaucgaaugugcuugcagagauaauuccuacaccgccaagcggccuuucguuaaacuuaacguggagacagacaccgccgaaauucgccugaugugcacagauaccuaucucgacacgcccagaccugaugacgggagcaucacaggacccugugagucuaauggcgacaagggguccggaggcauuaaaggcggguuuguccaucaacggauggagagcaagaucggacgcugguacucuagaaccaugagcaaaaccgaacggaugggcauggggcuguaugugaaguacgauggagaccccugggcugauuccgacgcgcuggccuucucuggcgugauggucagcaugaaggagccugggugguacuccuuuggcuucgaaaucaaagauaagaaaugcgacguuccguguauuggaaucgagauggugcacgauggcgggaaggaaacauggcauagcgcugccaccgccauuuauugccucaugggaucuggccagcugcuuugggacacagugacgggggucgauauggcucuguga

SEQ ID NO: 220967 - RNA, 1401 nt, Artificial Sequence
  derived and/or modified CDS sequence (opt5) from neuraminidase__InfluenzaB__AEQ49687
augcugcccagcaccauccagacacucacgcuguuccuuaccuccggcggggugcugcucucucuguacgucagcgcccuucuguccuaucuccuguacucugacauucugcucaaguuuagcccuacagagaucaccgcuccgacaaugucccuggauugcgccaacgcgucuaauguucaagcugugaacagaagcgccaccaaaggagugacauuccuucugcccgaaccugaguggaccuauccccggcucuccuguccuggcagcacguuucagaaggcccugcuuauuucuccccaccgcuucggggaaaccaaaggaaauuccgcuccucugaucauuagagagccguuuaucgccugcggccccaacgaauguaagcauuucgcucucacacacuacgccgcgcagccugggggauauuacaauggcacccggggcgaccgcaacaaacugagacaucugaucagcgucaagcucgggaagauucccacaguggaaaauucuaucuuucacauggccgcuugguccggaagcgccugccaugauggcaaagaguggaccuauauugggguugacggaccugauaacgacgcucugcuuaaggugaaauacggcgaggccuacacggauacauaucacucuuacgcgaauaagauccugcggacccaggaguccgccuguaacugcauugggggaaauuguuaucucaugaucacagacggcagcgcuuccggcgucucugaaugccgcuuccugaaaauuagagaggggcggaucaucaaggagauuuuucccaccggacgcgugaagcacaccgaagaguguacaugcggcuucgccagcaacaaaacgaucgaaugugcuugcagagauaauuccuacaccgccaagcggccguuuguuaaacuuaacguggagacagacaccgccgaaauucgccugaugugcacagauaccuaucucgacacgccuagacccgaugacgggagcaucacaggaccuugugagucuaauggcgacaagggguccggaggcauuaaaggcggguucguccaucaacggauggagagcaagaucggacgcugguacucuagaaccaugagcaaaaccgaacggaugggcauggggcuguaugugaaguacgauggagaccccugggcugauuccgacgcgcuggccuuuucuggcgugauggucagcaugaaggagcccgggugguacuccuucggcuucgaaaucaaagauaagaaaugcgacguuccuuguauuggaaucgagauggugcacgauggcgggaaggaaacauggcauagcgcugccaccgccauuuauugccucaugggaucuggccagcugcuuugggacacagugacgggggucgauauggcucuguga

SEQ ID NO: 220968 - RNA, 1401 nt, Artificial Sequence
  derived and/or modified CDS sequence (opt5) from neuraminidase__InfluenzaB__AEQ49688
augcugcccagcaccauccagacacucacgcuguuccuuaccuccggcggggugcugcucucucuguacgucagcgccucccuuucuuaucugcucuacagcgacauucugcugaaguuuuccagaacagagaucaccgcuccuauuaugccgcucggaugcgccaacgcgucuaauguucaagcugugaaccggagcgccacaaaaggcgugacccugcuucugcccgaaccugaguggacauauccccgccucuccuguccugggagcaccuuccagaaggcccugcuuaucucuccccacagauuuggagaaacgaaaggcaauuccgcuccucugauuauccgggagccguucaucgccugcgggcccaaggaauguaaacauuuugcucucacccacuacgccgcgcagccuggaggcuauuacaacggcacacgcgaggauagaaauaagcugcggcaucugauuagcgucaagcucgggaaaauccccaccguggagaacucuauuuuccacauggccgcuugguccggaagcgccugccaugacggccgcgaauggacauauaucgggguugauggaccugacucuaaugcucugcuuaagauuaaauacggcgaggccuacaccgauacguaucacuccuacgcgaagaacauccugagaacacaggaaagcgccuguaauugcauugggggagacuguuaucucaugaucaccgauggccccgcuuccggcaucucugagugccgguuucugaaaauucgcgaggggagaaucauuaaggaaaucuucccgacaggacgggugaagcacaccgaggaauguaccugcggcuuugccagcaacaaaacaauugagugugcuugccgcgacaauuccuacacggccaagagaccuuucgucaaacuuaacguggaaaccgauacagccgagauccggcugaugugcaccgagacauaucucgacacgccccgcccuaaugaugggagcaucaccggacccugugaaucuaacggcgacaagggguccggaggcauuaaaggcggguuuguucaucaaagaauggcuagcaagaucggacggugguacucuagaacaaugagcaaaaccaagcgcaugggcauggggcuguaugugaaguacgauggagaccccuggaccgacuccgaggcgcuggcccucucuggcgucauggugagcauggaggaaccugggugguacuccuucggcuuugaaauuaaagauaagaaaugcgacgugccguguaucggaauugagaugguccacgauggcgggaagacaaccuggcauagcgcugccacagccaucuauugccugaugggaucuggccagcuucugugggacacgguuaccggggugaauaugacacucuga

SEQ ID NO: 220969 - RNA, 1401 nt, Artificial Sequence
  derived and/or modified CDS sequence (opt5) from neuraminidase__InfluenzaB__AEQ49691
augcugcccagcaccauccagacacucacgcuguuccuuaccuccggcggggugcugcucucucuguacgucagcgcccuucuguccuaucuccuguacucugacauucugcucaaguuuagcccuacagagaucaccgcuccgacaaugucccuggauugcgccaacgcgucuaauguucaagcugugaacagaagcgccaccaaaggagugacauuccuucugcccgaaccugaguggaccuauccccggcucuccuguccuggcagcacguuucagaaggcccugcuuauuucuccccaccgcuucggggaaaccaaaggaaauuccgcuccucugaucauuagagagccguuuaucgccugcggccccaacgaauguaagcauuucgcucucacacacuacgccgcgcagccugggggauauuacaauggcacccggggcgaccgcaacaaacugagacaucugaucagcgucaagcucgggaagauucccacaguggaaaauucuaucuuucacauggccgcuugguccggaagcgccugccaugauggcaaagaguggaccuauauugggguugacggaccugauaacgacgcucugcuuaaggugaaauacggcgaggccuacacggauacauaucacucuuacgcgaauaagauccugcggacccaggaguccgccuguaacugcauugggggaaauuguuaucucaugaucacagacggcagcgcuuccggcgucucugaaugccgcuuccugaaaauuagagaggggcggaucaucaaggagauuuuucccaccggacgcgugaagcacaccgaagaguguacaugcggcuucgccagcaacaaaacgaucgaaugugcuugcagagauaauuccuacaccgccaagcggccguuuguuaaacuuaacguggagacagacaccgccgaaauucgccugaugugcacagauaccuaucucgacacgccuagacccgaugacgggagcaucacaggaccuugugagucuaauggcgaccggggguccggaggcauuaagggcggguucguccaucaacgcauggagagcaaaaucggaagaugguacucucggaccaugagcaagaccgaaagaaugggcauggggcuguaugugaaauacgauggagaccccugggcugauuccgacgcgcuggccuuuucuggcgugauggucagcaugaaggagcccgggugguacuccuucggcuucgaaaucaaggauaaaaagugcgacguuccuuguauuggaaucgagauggugcacgauggcgggaaagaaacauggcauagcgcugccaccgccauuuauugccucaugggaucuggccagcugcuuugggacacagugacgggggucgauauggcucuguga

SEQ ID NO: 220970 - RNA, 1401 nt, Artificial Sequence
  derived and/or modified CDS sequence (opt5) from neuraminidase__InfluenzaB__AEQ49692
augcugcccagcaccauccagacacucacgcuguuccuuaccuccggcggggugcugcucucucuguacgucagcgccucccuuucuuaucugcucuacagcgacauucugcugaaguuuuccccuacagagaccacagcuccgaccaugucucucgauugcgccaacgcgagcaauguucaagcugugaacagauccgccacaaaaggagugaccuuccugcuucccgaaccugaguggacguauccccggcugagcuguccuggcucuaccuuucagaaggcccuccugaucagcccccaccgcuucggggaaacaaaaggaaauuccgcuccucuuauuaucagagagccguuuauugccugcggccccaacgaauguaagcauuucgcucugacccacuacgccgcgcagccugggggauauuacaauggcacacggggcgaccgcaacaaacucagacaucugaucucugucaagcuggggaagauccccaccguggaaaauuccauuuuucacauggccgcuuggagcggaucugccugccaugauggcaaagaguggacguauaucgggguugacggaccugauaacgacgcucuccugaaggugaaauacggcgaggccuacacagauaccuaucacuccuacgcgaauaagauucuucggacacaggagagcgccuguaacugcaucgggggaaauuguuaucugaugauuaccgacggcuccgcuucuggcgucagcgaaugccgcuuccucaaaaucagagaggggcggauuaucaaggagaucuuucccaccggacgcgugaagcacacagaagaguguacgugcggcuucgccuccaacaaaaccauugaaugugcuugcagagauaauagcuacacagccaagcggccguuuguuaaacugaacguggagaccgacacagccgaaauccgccuuaugugcaccgauacguaucuggacacaccuagacccgaugacgggucuauuaccggaccuugugaguccaauggcgacaaggggagcggaggcaucaaaggcggguucguccaucaacggauggagucuaagauuggacgcugguacagcagaaccauguccaaaacagaacggaugggcauggggcucuaugugaaguacgauggagaccccugggcugauucugacgcgcuggccuuuagcggcgugauggucuccaugaaggagcccgggugguacagcuucggcuucgaaaucaaagauaagaaaugcgacguuccuuguaucggaauugagauggugcacgauggcgggaaggaaaccuggcauucugcugccacagccaucuauugccugaugggauccggccagcuccugugggacacggugaccggggucgauauggcucuuuga

SEQ ID NO: 220971 - RNA, 1401 nt, Artificial Sequence
  derived and/or modified CDS sequence (opt5) from neuraminidase__InfluenzaB__AEQ49693
augcugcccagcaccauccagacacucacgcuguuccuuaccuccggcggggugcugcucucucuguacgucagcgccucccuuucuuaucugcucuacagcgacauucugcugaaguuuuccccuacagagaucaccgcuccgacaaugccccucgauugcgccaacgcgucuaauguucaagcugugaacagaagcgccaccaaaggagugacacugcuucugccugaacccgaguggaccuauccucggcucuccugucccggcagcacguuccagaaggcccugcuuauuucuccucaccgcuuuggggaaaccaaaggaaauuccgcuccgcugaucauuagagagcccuucaucgccugcggcccuaacgaauguaagcauuuugcucucacacacuacgccgcgcagcccgggggauauuacaauggcacccggggcgaccgcaacaaacugagacaucugaucagcgucaagcucgggaagauuccuacaguggaaaauucuaucuuccacauggccgcuugguccggaagcgccugccaugauggcaaagaguggaccuauauugggguugacggacccgauaacaaugcucugcuuaaggugaaauacggcgaggccuacacggacacauaucacucuuacgcgaacaagauccugcggacccaggaguccgccuguaauugcauugggggaaacuguuaucucaugaucacagauggcagcgcuuccggcgucucugaaugccgcuuucugaaaauuagagaggggcggaucaucaaggagauuuucccgaccggacgcgugaagcacaccgaagaguguacaugcggcuuugccagcaauagaacgaucgaaugugcuugccgggacaacuccuacaccgccaaacgcccuuucguuaaacuuaauguggagacagauaccgccgaaauuagacugaugugcacagacaccuaucucgauacgccccggccuaacgacgggagcaucacaggacccugugagucugauggcgacaagggguccggaggcauuaagggcggguuuguccaucaacgcauggagagcaaaaucggaagaugguacucucggaccaugagcaagaccgaaagaaugggcauggggcuguaugugaaauacgacggagaucccugggcugacuccgaugcgcuggccuucucuggcgugauggucagcaugaaggagccugggugguacuccuuuggcuucgaaaucaaggacaaaaagugcgauguuccguguauuggaaucgagauggugcacgacggcgggaaagaaacauggcauagcgcugccaccgccauuuauugccucaugggaucuggccagcugcuuugggauacagugacgggggucgacauggcucuguga

SEQ ID NO: 220972 - RNA, 1401 nt, Artificial Sequence
  derived and/or modified CDS sequence (opt5) from neuraminidase__InfluenzaB__AEQ49695
augcugcccagcaccauccagacacucacgcuguuccuuaccuccggcggggugcugcucucucuguacgucagcgccucccuuucuuaucugcucuacagcgacauucugcugaaguuuuccccuacagagaucaccgcuccgacaaugccccucgauugcgccaacgcgucuaauguucaagcugugaacagaagcgccaccaaaggagugacacugcuucugccugaacccgaguggaccuauccucggcucuccugucccggcagcacguuccagaaggcccugcuuauuucuccucaccgcuuuggggaaaccaaaggaaauuccgcuccgcugaucauuagagagcccuucaucgccugcggcccuaacgaauguaagcauuuugcucucacacacuacgccgcgcagcccgggggauauuacaauggcacccggggcgaccgcaacaaacugagacaucugaucagcgucaagcucgggaagauuccuacaguggaaaauucuaucuuccacauggccgcuugguccggaagcgccugccaugauggcaaagaguggaccuauauugggguugacggacccgauaacaaugcucugcuuaaggugaaauacggcgaggccuacacggacacauaucacucuuacgcgaacaagauccugcggacccaggaguccgccuguaauugcauugggggaaacuguuaucucaugaucacagauggcagcgcuuccggcgucucugaaugccgcuuucugaaaauuagagaggggcggaucaucaaggagauuuucccgaccggacgcgugaagcacaccgaagaguguacaugcggcuuugccagcaauaaaacgaucgaaugugcuugcagagacaacuccuacaccgccaagcggccuuucguuaaacuuaauguggagacagauaccgccgaaauucgccugaugugcacagacaccuaucucgauacgcccagaccuaacgacgggagcaucacaggacccugugagucugauggcgacaagggguccggaggcauuaaaggcggguuuguccaucaacggauggagagcaagaucggacgcugguacucuagaaccaugagcaaaaccgaacggaugggcauggggcuguaugugaaguacgacggagaucccugggcugacuccgaugcgcuggccuucucuggcgugauggucagcaugaaggagccugggugguacuccuuuggcuucgaaaucaaagacaagaaaugcgauguuccguguauuggaaucgagauggugcacgacggcgggaaggaaacauggcauagcgcugccaccgccauuuauugccucaugggaucuggccagcugcuuugggauacagugacgggggucgacauggcucuguga

SEQ ID NO: 220973 - RNA, 1401 nt, Artificial Sequence
  derived and/or modified CDS sequence (opt5) from neuraminidase__InfluenzaB__AEQ49697
augcugcccagcaccauccagacacucacgcuguuccuuaccuccggcggggugcugcucucucuguacgucagcgccucccuuucuuaucugcucuacagcgacauucugcugaaguuuuccccuacagagaucaccgcuccgacaaugucucucgauugcgccaacgcgagcaauguucaagcugugaacagauccgccaccaaaggagugacauuccugcuucccgaaccugaguggaccuauccccggcugagcuguccuggcucuacguuucagaaggcccuccugauuagcccccaccgcuucggggaaaccaaaggaaauuccgcuccucuuaucauuagagagccguuuaucgccugcggccccaacgaauguaagcauuucgcucugacacacuacgccgcgcagccugggggauauuacaauggcacccggggcgaccgcaacaaacucagacaucugaucucugucaagcuggggaagauucccacaguggaaaauuccaucuuucacauggccgcuuggagcggaucugccugccaugauggcaaagaguggaccuauauugggguugacggaccugauaacgacgcucuccugaaggugaaauacggcgaggccuacacggauacauaucacuccuacgcgaauaagauccuucggacccaggagagcgccuguaacugcauugggggaaauuguuaucugaugaucacagacggcuccgcuucuggcgucagcgaaugccgcuuccucaaaauuagagaggggcggaucaucaaggagauuuuucccaccggacgcgugaagcacaccgaagaguguacaugcggcuucgccuccaacaaaacgaucgaaugugcuugcagagauaauagcuacaccgccaagcggccguuuguuaaacugaacguggagacagacaccgccgaaauucgccuuaugugcacagauaccuaucuggacacgccuagacccgaugacgggucuaucacaggaccuugugaguccaauggcgacaaggggagcggaggcauuaaaggcggguucguccaucaacggauggagucuaagaucggacgcugguacagcagaaccauguccaaaaccgaacggaugggcauggggcucuaugugaaguacgauggagaccccugggcugauucugacgcgcuggccuuuagcggcgugauggucuccaugaaggagcccgggugguacagcuucggcuucgaaaucaaagauaagaaaugcgacguuccuuguauuggaaucgagauggugcacgauggcgggaaggaaacauggcauucugcugccaccgccauuuauugccugaugggauccggccagcuccugugggacacagugacgggggucgauauggcucuuuga

SEQ ID NO: 220974 - RNA, 1401 nt, Artificial Sequence; identical to SEQ ID NO: 220973
  derived and/or modified CDS sequence (opt5) from neuraminidase__InfluenzaB__AEQ49698

SEQ ID NO: 220975 - RNA, 1401 nt, Artificial Sequence; identical to SEQ ID NO: 220973
  derived and/or modified CDS sequence (opt5) from neuraminidase__InfluenzaB__AEQ49699

SEQ ID NO: 220976 - RNA, 1401 nt, Artificial Sequence; identical to SEQ ID NO: 220973
  derived and/or modified CDS sequence (opt5) from neuraminidase__InfluenzaB__AEQ49700

SEQ ID NO: 220977 - RNA, 1401 nt, Artificial Sequence; identical to SEQ ID NO: 220970
  derived and/or modified CDS sequence (opt5) from neuraminidase__InfluenzaB__AEQ49701

SEQ ID NO: 220978 - RNA, 1401 nt, Artificial Sequence; identical to SEQ ID NO: 220973
  derived and/or modified CDS sequence (opt5) from neuraminidase__InfluenzaB__AEQ49702

SEQ ID NO: 220979 - RNA, 1401 nt, Artificial Sequence; identical to SEQ ID NO: 220970
  derived and/or modified CDS sequence (opt5) from neuraminidase__InfluenzaB__AEQ49703

SEQ ID NO: 220980 - RNA, 1401 nt, Artificial Sequence; identical to SEQ ID NO: 220973
  derived and/or modified CDS sequence (opt5) from neuraminidase__InfluenzaB__AEQ49705

SEQ ID NO: 220981 - RNA, 1401 nt, Artificial Sequence
  derived and/or modified CDS sequence (opt5) from neuraminidase__InfluenzaB__AEQ49706
augcugcccagcaccauccagaugcucacacuguuccuuacgcugggcggggugcuccugucccuuuacgucucugccagccuguccuaucuccuguaccuggacauucuccugaaguuuccuccgaccgagaucacagcucccaccaugccucuugauugcgccaacgcgucuaauguucaagcugugaacagaagcgccacaaaaggagugaccuuccugcuccccgaaccugaguggacauauccccggcuguccuguccuggcucuaccuuucagaaggcccuucugauuagcccgcaccgcuucggggaaacgaaaggaaauuccgcuccccucaucauuagagagccuuuuaucgccugcggccccaaggaauguaaacauuucgcucugacccacuacgccgcgcagccugggggauauuacaacggcacacggggcgaccgcaauaagcugagacaucucaucagcgucaagcuggggaaaauucccaccguggagaacucuaucuuucacauggccgcuugguccggaagcgccugccaugauggcaaggaguggacauauauugggguugacggaccggauaauaacgcucugcuuaaaaucaaguacggcgaagccuucaccgacacguaccacucuuaugcgaauaacauucuccggacacaggaguccgccuguaauugcaucgggggaaacuguuaccugaugauuaccgauggcagcgcuucuggcguguccgaaugccgcuuucuuaaaaucagagaggggcggaucauuaaggagaucuucccuacaggacgcgucaagcacaccgaagaguguaccugcggcuuugccagcaauaaaacaauugaaugugcuugcagagacaacuccuauacggccaagcggcccuucgugaaacugaauguugagaccgauacagccgaaauccgccucaugugcaccgacacauaccuggauaccccuagacccgacgaugggucuauuacgggacccugugagagcaacggcgacaagggguccggaggcaucaaaggcggguuugugcaucaacggauggcuagcaagaucggacgcugguauucuagaacaauguccaaaaccgagcggaugggcauggggcuguacgucaaguaugacggagauccuugggcggacagcgaugcccucgcuuucucuggcgugauggugagcaugaaggaaccggggugguacuccuucggcuuugagauuaaagacaagaaaugcgauguccccuguaucggaauugaaaugguucacgacggcgggaaggagaccuggcauucugccgccacagcuaucuacugccugaugggaagcggccagcuucugugggauaccgugacaggggugaacauggcccucuga

SEQ ID NO: 220982 - RNA, 1401 nt, Artificial Sequence; identical to SEQ ID NO: 220973
  derived and/or modified CDS sequence (opt5) from neuraminidase__InfluenzaB__AEQ49707

SEQ ID NO: 220983 - RNA, 1401 nt, Artificial Sequence; identical to SEQ ID NO: 220973
  derived and/or modified CDS sequence (opt5) from neuraminidase__InfluenzaB__AEQ49708

SEQ ID NO: 220984 - RNA, 1401 nt, Artificial Sequence
  derived and/or modified CDS sequence (opt5) from neuraminidase__InfluenzaB__AEQ49709
augcugcccagcaccauccagacacucacgcuguuccuuaccuccggcggggugcugcucucucuguacgucagcgcccuucuguccuaucuccuguacucugacauucugcucaaguuuagcccuacagagaucaccgcuccgacaaugucccuggauugcgccaacgcgucuaauguucaagcugugaacagaagcgccaccaaaggagugacauuccuucugcccgaaccugaguggaccuauccccggcucuccuguccuggcagcacguuucagaaggcccugcuuauuucuccccaccgcuucggggaaaccaaaggaaauuccgcuccucugaucauuagagagccguuuaucgccugcggccccaacgaauguaagcacuucgcucucacacacuacgccgcgcagccugggggauauuacaauggcacccggggcgaccgcaacaaacugagacaucugaucagcgucaagcucgggaagauucccacaguggaaaauucuaucuuucacauggccgcuugguccggaagcgccugccaugauggcaaagaguggaccuauauugggguugacggaccugauaacgacgcucugcuuaaggugaaauacggcgaggccuacacggauacauaucacucuuacgcgaauaagauccugcggacccaggaguccgccuguaacugcauugggggaaauuguuaucucaugaucacagacggcagcgcuuccggcgucucugaaugccgcuuccugaaaauuagagaggggcggaucaucaaggagauuuuucccaccggacgcgugaagcacaccgaagaguguacaugcggcuucgccagcaacaaaacgaucgaaugugcuugcagagauaauuccuacaccgccaagcggccguuuguuaaacuuaacguggagacagacaccgccgaaauucgccugaugugcacagauaccuaucucgacacgccuagacccgaugacgggagcaucacaggaccuugugagucuaauggcgacaagggguccggaggcauuaaaggcggguucguccaucaacggauggagagcaagaucggacgcugguacucuagaaccaugagcaaaaccgaacggaugggcauggggcuguaugugaaguacgauggagaccccugggcugauuccgacgcgcuggccuuuucuggcgugauggucagcaugaaggagcccgggugguacuccuucggcuucgaaaucaaagauaagaaaugcgacguuccuuguauuggaaucgagauggugcacgauggcgggaaggaaacauggcauagcgcugccaccgccauuuauugccucaugggaucuggccaucugcuuugggacacagugacgggggucgauauggcucuguga

SEQ ID NO: 220985 - RNA, 1401 nt, Artificial Sequence; identical to SEQ ID NO: 220947
  derived and/or modified CDS sequence (opt5) from neuraminidase__InfluenzaB__AEQ49710

SEQ ID NO: 220986 - RNA, 1401 nt, Artificial Sequence; identical to SEQ ID NO: 220944
  derived and/or modified CDS sequence (opt5) from neuraminidase__InfluenzaB__AER27042

SEQ ID NO: 220987 - RNA, 1401 nt, Artificial Sequence; identical to SEQ ID NO: 220972
  derived and/or modified CDS sequence (opt5) from neuraminidase__InfluenzaB__AER27053

SEQ ID NO: 220988 - RNA, 1401 nt, Artificial Sequence; identical to SEQ ID NO: 220944
  derived and/or modified CDS sequence (opt5) from neuraminidase__InfluenzaB__AER27064

SEQ ID NO: 220989 - RNA, 1401 nt, Artificial Sequence; identical to SEQ ID NO: 220947
  derived and/or modified CDS sequence (opt5) from neuraminidase__InfluenzaB__AET43128

SEQ ID NO: 220990 - RNA, 1401 nt, Artificial Sequence; identical to SEQ ID NO: 220947
  derived and/or modified CDS sequence (opt5) from neuraminidase__InfluenzaB__AET43139

SEQ ID NO: 220991 - RNA, 1401 nt, Artificial Sequence
  derived and/or modified CDS sequence (opt5) from neuraminidase__InfluenzaB__AET43150
augcugcccagcaccauccagacacucacgcuguuccuuaccuccggcggggugcugcucucucuguacgucagcgccucccuuucuuaucugcucuacagcgacauucugcugaaguuuuccccuaaagagaucacagcuccgaccaugccccucgauugcgccaacgcgucuaauguucaagcugugaaccacagcgccacaaagggagugacccugcuucugccugaacccgaguggacauauccuagacucuccugucccggcagcaccuuccagaaagcccugcuuauuucuccucaucgguuuggggaaacgaagggaaauuccgcuccgcugaucauucgcgagcccuucaucgccugcggcccuaacgaauguaaacacuuugcucucacccauuacgccgcgcagcccgggggauauuacaauggcacaagaggcgaccggaacaagcugcgccaccugaucagcgucaagcucgggaaaauuccuaccguggaaaauucuaucuuccauauggccgcuugguccggaagcgccugccacgauggcaaggaguggacauauauugggguugacggacccgauaacaaugcucugcuuaaagugaaguacggcgaggccuacaccgacacguaucacucuuacgcgaacaaaauccugagaacacaggaguccgccuguaauugcauugggggaaacuguuaucucaugaucaccgauggcagcgcuuccggcgucucugaaugccgguuucugaagauucgcgaggggagaaucaucaaggagauuuucccgacaggacgggugaaacauaccgaagaguguaccugcggcuuugccagcaauaagacaaucgaaugugcuugccgcgacaacuccuacacggccaaaagaccuuucguuaaacuuaauguggagaccgauacagccgaaauucggcugaugugcaccgacacauaucucgauacgccccgcccugacgaugggagcaucaccggacccugugagucuaacggcgacaagggguccggaggcauuaagggcggguuuguccaccaaagaauggagagcaaaaucggacggugguacucucgcacaaugagcaagaccgaaagaaugggcauggggcuguaugugaaguacgacggagaucccugggcugacuccgaugcgcugaccuucucuggcgugauggucagcaugaaagagccugggugguacuccuuuggcuucgaaaucaaggacaaaaagugcgauguuccguguauuggaaucgagauggugcaugacggcgggaaagaaacauggcacagcgccgcuaccgccauuuauugccucaugggaucuggccagcugcuuugggauacagugacgggggucgacauggcccuguga

SEQ ID NO: 220992 - RNA, 1401 nt, Artificial Sequence; identical to SEQ ID NO: 220947
  derived and/or modified CDS sequence (opt5) from neuraminidase__InfluenzaB__AET43161

SEQ ID NO: 220993 - RNA, 1401 nt, Artificial Sequence; identical to SEQ ID NO: 220947
  derived and/or modified CDS sequence (opt5) from neuraminidase__InfluenzaB__AET43172

SEQ ID NO: 220994 - RNA, 1401 nt, Artificial Sequence; identical to SEQ ID NO: 220947
  derived and/or modified CDS sequence (opt5) from neuraminidase__InfluenzaB__AET43183

SEQ ID NO: 220995 - RNA, 1401 nt, Artificial Sequence; identical to SEQ ID NO: 220947
  derived and/or modified CDS sequence (opt5) from neuraminidase__InfluenzaB__AET43194

SEQ ID NO: 220996 - RNA, 1401 nt, Artificial Sequence; identical to SEQ ID NO: 220947
  derived and/or modified CDS sequence (opt5) from neuraminidase__InfluenzaB__AET43216

SEQ ID NO: 220997 - RNA, 1401 nt, Artificial Sequence; identical to SEQ ID NO: 220947
  derived and/or modified CDS sequence (opt5) from neuraminidase__InfluenzaB__AET43227

SEQ ID NO: 220998 - RNA, 1401 nt, Artificial Sequence
  derived and/or modified CDS sequence (opt5) from neuraminidase__InfluenzaB__AET50947
augcugcccagcaccauccagacacucacgcuguuccuuaccuccggcggggugcugcucucucuguacgucagcgccucccuuucuuaucugcucuacagcgacauucugcugaaguuuuccccuaaagagaucacagcuccgaccaugccccucgauugcgccaacgcgucuaauguucaagcugugaaccacagcgccacaaagggagugacccugcuucugccugaacccgaguggacauauccuagacucuccugucccggcagcaccuuccagaaagcccugcuuauuucuccucaucgguuuggggaaacgaagggaaauuccgcuccgcugaucauucgcgagcccuucaucgccugcggcccuaacgaauguaaacacuuugcucucacccauuacgccgcgcagcccgggggauauuacaauggcacaagaggcgaccggaacaagcugcgccaccugaucagcgucaagcucgggaaaauuccuaccguggaaaauucuaucuuccauauggccgcuugguccggaagcgccugccacgauggcaaggaguggacauauauugggguugacggacccgauaacaaugcucugcuuaaagugaaguacggcgaggccuacaccgacacguaucacucuuacgcgaacaaaauccugagaacacaggaguccgccuguaauugcauugggggaaacuguuaucucaugaucaccgauggcagcgcuuccggcgucucugaaugccgguuucugaagauucgcgaggggagaaucaucaaggagauuuucccgacaggacgggugaaacauaccgaagaguguaccugcggcuuugccagcaauaagacaaucgaaugugcuugccgcgacaacuccuacacggccaaaagaccuuucguuaaacuuaauguggagaccgauacagccgaaauucggcugaugugcaccgacacauaucucgauacgccccgcccugacgaugggagcaucaccggacccugugagucuaacggcgacaagggguccggaggcauuaagggcggguuuguccaccaaagaauggagagcaaaaucggacggugguacucucgcacaaugagcaagaccgaaagaaugggcauggggcuguaugugaaguacgacggagaucccugggcugacuccgaugcgcuggccuucucuggcgugaugaucagcaugaaagagccugggugguacuccuuuggcuucgaaauuaaggacaaaaagugcgaugucccguguaucggaauugagaugguucaugacggcgggaaagaaaccuggcacagcgcugccacagccaucuauugccucaugggaucuggccagcugcuuugggauaccgugacagggguggacauggcucuguga

SEQ ID NO: 220999 - RNA, 1401 nt, Artificial Sequence
  derived and/or modified CDS sequence (opt5) from neuraminidase__InfluenzaB__AET50958
augcugcccagcaccauccagacacucacgcuguuccuuaccuccggcggggugcugcucucucuguacgucagcgccucccuuucuuaucugcucuacagcgacauucugcugaaguuuuccccuaaagagaucacagcuccgaccaugccccucgauugcgccaacgcgucuaauguucaagcugugaaccacagcgccacaaagggagugacccugcuucugccugaacucgaguggacauaucccagacuguccuguccuggcagcaccuuccagaaagcccuucugauuucuccccaucgguuuggggaaacgaagggaaauuccgcuccucucaucauucgcgagccguucaucgccugcggccccaacgaauguaaacacuuugcucugacccauuacgccgcgcagccugggggauauuacaauggcacaagaggcgaccggaacaagcugcgccaccucaucagcgucaagcuggggaaaauucccaccguggaaaauucuaucuuccauauggccgcuugguccggaagcgccugccacgauggcaaggaguggacauauauugggguugacggaccugauaacaaugcccuucugaaagugaaguacggcgaggcuuacaccgacacguaucacucuuacgcgaacaaaauccucagaacacaggaguccgccuguaauugcauugggggaaacuguuaucugaugaucaccgauggcagcgcuuccggcgucucugaaugccgguuucuuaagauucgcgaggggagaaucaucaaggagauuuuccccacaggacgggugaaacauaccgaagaguguaccugcggcuuugccagcaauaagacaaucgaaugugcuugccgcgacaacuccuacacggccaaaagaccguucguuaagcugaauguggagaccgauacagccgaaauucggcucaugugcaccgacacauaucuggauaccccucgccccgacgaugggagcaucacgggaccuugugagucuaacggcgacaaaggguccggaggcauuaagggcggguuuguccaccaaagaauggagagcaaaaucggacggugguacucucgcacaaugagcaagaccgaaagaaugggcauggggcuguaugugaaguacgacggagaucccugggcugacuccgaugcgcucgccuucucuggcgugauggucagcaugaaagagcccgggugguacuccuuuggcuucgaaaucaaggacaaaaagugcgauguuccuuguauuggaaucgagauggugcaugacggcgggaaagaaaccuggcacagcgcugccacagccauuuauugccugaugggaucuggccagcuucugugggauaccgugacaggggucgacauggcucucuga

SEQ ID NO: 221000 - RNA, 1401 nt, Artificial Sequence; identical to SEQ ID NO: 220947
  derived and/or modified CDS sequence (opt5) from neuraminidase__InfluenzaB__AET50969

SEQ ID NO: 221001 - RNA, 1401 nt, Artificial Sequence; identical to SEQ ID NO: 220947
  derived and/or modified CDS sequence (opt5) from neuraminidase__InfluenzaB__AET50980

SEQ ID NO: 221002 - RNA, 1401 nt, Artificial Sequence; identical to SEQ ID NO: 220947
  derived and/or modified CDS sequence (opt5) from neuraminidase__InfluenzaB__AET74259

SEQ ID NO: 221003 - RNA, 1401 nt, Artificial Sequence; identical to SEQ ID NO: 220947
  derived and/or modified CDS sequence (opt5) from neuraminidase__InfluenzaB__AET74270

SEQ ID NO: 221004 - RNA, 1401 nt, Artificial Sequence; identical to SEQ ID NO: 220998
  derived and/or modified CDS sequence (opt5) from neuraminidase__InfluenzaB__AET74281

SEQ ID NO: 221005 - RNA, 1401 nt, Artificial Sequence; identical to SEQ ID NO: 220947
  derived and/or modified CDS sequence (opt5) from neuraminidase__InfluenzaB__AET74292

SEQ ID NO: 221006 - RNA, 1401 nt, Artificial Sequence; identical to SEQ ID NO: 220947
  derived and/or modified CDS sequence (opt5) from neuraminidase__InfluenzaB__AET74303

SEQ ID NO: 221007 - RNA, 1401 nt, Artificial Sequence; identical to SEQ ID NO: 220947
  derived and/or modified CDS sequence (opt5) from neuraminidase__InfluenzaB__AET74314

SEQ ID NO: 221008 - RNA, 1401 nt, Artificial Sequence; identical to SEQ ID NO: 220947
  derived and/or modified CDS sequence (opt5) from neuraminidase__InfluenzaB__AET74333

SEQ ID NO: 221009 - RNA, 1401 nt, Artificial Sequence
  derived and/or modified CDS sequence (opt5) from neuraminidase__InfluenzaB__AET74344
augcugcccagcaccauccagacacucacgcuguuccuuaccuccggcggggugcugcucucucuguacgucagcgccucccuuucuuaucugcucuacagcgacauucugcugaaguuuuccccuaaagagaucacagcuccgaccaugccccucgauugcgccaacgcgucuaauguucaagcugugaaccacagcgccacaaagggagugacccugcuucugccugaacccgaguggacauauccuagacucuccugucccggcagcaccuuccagaaagcccugcuuauuucuccucaucgguuuggggaaacgaagggaaauuccgcuccgcugaucauucgcgagcccuucaucgccugcggcccuaacgaauguaaacacuuugcucucacccauuacgccgcgcagcccgggggauauuacaauggcacaagaggcgaccggaacaagcugcgccaccugaucagcgucaagcucgggaaaauuccuaccguggaaaauucuaucuuccauauggccgcuugguccggaagcgccugccacgauggcaaggaguggacauauauugggguugacggacccgauaacaaugcucugcuuaaagugaaguacggcgaggccuacaccgacacguaucacucuuacgcgaacaaaauccugagaacacaggaguccgccuguaauugcauugggggaaacuguuaucucaugaucaccgauggcagcgcuuccggcgucucugaaugccgguuucugaagauucgcgaggggagaaucaucaaggagauuuucccgacaggacgggugaaacauaccgaagaguguaccugcggcuuugccagcaauaagacaaucgaaugugcuugccgcgacaacuccuacacggccaaaagaccuuucguuaaacuuaauguggaggccgauaccgcugaaauucggcugaugugcacagacaccuaucucgauacaccccgcccugacgaugggagcaucaccggacccugugagucuaacggcgacaagggguccggaggcauuaagggcggguuuguccaccaaagaauggagagcaaaaucggacggugguacucucgcacgaugagcaagacagaaagaaugggcauggggcuguaugugaaguacgacggagaucccugggcggacuccgaugcccuggcuuucucuggcgugauggucagcaugaaagagccugggugguacuccuuuggcuucgaaaucaaggacaaaaagugcgauguuccguguauuggaaucgagauggugcaugacggcgggaaagaaaccuggcacagcgccgccaccgcuauuuauugccucaugggaucuggccagcugcuuugggauacagugaccggggucgacauggcccuguga

SEQ ID NO: 221010 - RNA, 1401 nt, Artificial Sequence; identical to SEQ ID NO: 220947
  derived and/or modified CDS sequence (opt5) from neuraminidase__InfluenzaB__AET74355

SEQ ID NO: 221011 - RNA, 1404 nt, Artificial Sequence
  derived and/or modified CDS sequence (opt5) from neuraminidase__InfluenzaB__AEY75594
augcugcccagcaccauccagaugcucacacuguuccuuacguccggcggggugcugcucucucuguacgucagcgccucccuuucuuaucugcucuacagcgacauucugcugaaguuuuccccuaccgagaucacagcuccgaccaugccccucgauugcgccaacgcgucuaauguucacgcugugaacagaagcgccacaaaaggagugaccuuccugcuucugccugaacccgaguggacauauccucggcucuccugucccggcagcaccuuucaaaaggcccugcuuauuucuccucaucgcuucggggaaacgaaaggaaauuccgcuccgcugaucauuagagagcccuuuaucgccugcggcccuaacgaauguaagcacuucgcucucacccauuacgccgcgcagcccgggggauauuacaauggcacacggggcgaccgcaacaaacugagacaccugaucagcgucaagcucgggaagauuccuaccguggaaaauucuaucuuucauauggccgcuugguccggaagcgccugccacgauggcaaagaguggacauauauugggguugacggacccgauaacaaugcucugcuuaagaucaaauacggcgaggccuacaccgacacguaucacucuuacgcgaacaauauucugcggacacaggaguccgccuguaacugcaucgggggaaauuguuaucucaugauuaccgauggcagcgcuuccggcgugucugaaugccgcuuccugaagaucagagaggggcggaucauuaaagagaucuuuccgacaggacgcgucaagcauaccgaagaguguaccugcggcuucgccagcaacaagacaauugaaugugcuugcagagacaauuccuacacggccaaacggccuuuugugaaacuuaacguugagaccgauacagccgaaauccgccugaugugcaccgacacauaucucgauacccccagaccugacgaugggagcauuacgggacccugugagucuaacggcgacaagggguccggaggcacaaagggcggguucgugcaccagcggauggcuagcaaaaucggacgcugguacucuagaaccaugagcaagaccgagcggaaaggcauggggcuguaugucaaguacgacggagaucccuggacagacuccgaugcgcuggccuuuagaggcgugauggugucuaugaaggaaccugggugguacagcuucggcuucgagaucaaagacaagaaaugcgaugucccguguauuggaaucgaaaugguucaugacggcgggaaggagaccuggcacuccgcugccacagccauuuauugccucaugggaagcggccaacugcuuugggauacggugaccgggguggacauggcucuguga

SEQ ID NO: 221012 - RNA, 1401 nt, Artificial Sequence
  derived and/or modified CDS sequence (opt5) from neuraminidase__InfluenzaB__AFA45223
augcugcccagcaccauccagacacucacgcuguuccuuaccuccggcggggugcugcucucucuguacgucagcgcccuucuguccuaucuccuguacucugacauucugccuaaguuuagcccgacagagaucaccgcucccacaaugucccucgauugcgccaacgcgucuaauguucaagcugugaacagaagcgccaccaaaggagugacauuccugcuuuccgaaccugaguggaccuauccccggcugagcuguccuggcucuacguuucagaaggcccuccugauuagcccccaccgcuucggggaaaccaaaggaaauuccgcuccucuuaucauuagagagccguuuaucgccugcggccccaacgaauguaagcauuucgcucugacacacuacgccgcgcagccugggggauauuacaauggcacccggggcgaccgcaacaaacucagacaucugaucucugucaagcuggggaagauucccacaguggaaaauuccaucuuucacauggccgcuuggagcggaucugccugccaugauggcaaagaguggaccuauauugggguugacggaccugauaacgacgcucuccugaaggugaaauacggcgaggccuacacggauacauaucacuccuacgcgaauaagauccuucggacccaggagagcgccuguaacugcauugggggaaauuguuaucugaugaucacagacggcuccgcuucuggcgucagcgaaugccgcuuccucaaaauuagagaggggcggaucaucaaggagauuuuucccaccggacgcgugaagcacaccgaagaguguacaugcggcuucgccuccaacaaaacgaucgaaugugcuugcagagauaauagcuacaccgccaagcggccguuuguuaaacugaacguggagacagacaccgccgaaauucgccuuaugugcacagauaccuaucuggacacgccuagacccgaugacgggucuaucacaggaccuugugaguccaauggcgacaaggggagcggaggcauuaaaggcggguucguccaucaacggauggagucuaagaucggacgcugguacagcagaaccauguccaaaaccgaacggaugggcauggggcucuaugugaaguacgauggagaccccugggcugauucugacgcgcuggccuuuagcggcgugauggucuccaugaaggagcccgggugguacagcuucggcuucgaaaucaaagauaagaaaugcgacguuccuuguauuggaaucgagauggugcacgauggcgggaaggaaacauggcauucugcugccaccgccauuuauugccugaugggauccggccagcuccugugggacacagugacgggggucgauauggcucuuuga

SEQ ID NO: 221013 - RNA, 1401 nt, Artificial Sequence
  derived and/or modified CDS sequence (opt5) from neuraminidase__InfluenzaB__AFA45226
augcugcccagcaccauccagacacucacgcuguuccuuaccuccggcggggugcugcucucucuguacgucagcgccucccuuucuuaucugcucuacagcgacauucugcugaaguuuuccccuacagagaccacagcuccgaccaugucucucgauugcgccaacgcgagcaauguucaagcugugaacagauccgccacaaaaggagugaccuuccugcuucccgaaccugaguggacguauccccggcugagcuguccuggcucuaccuuucagaaggcccuccugaucagcccccaccgcuucggggaaacaaaaggaaauuccgcuccucuuauuaucagagagccguuuauugccugcggccccaacgaauguaagcauuucgcucugacccacuacgccgcgcagccugggggauauuacaauggcacacggggcgaccgcaacaaacucagacaucugaucucugucaagcuggggaaggugcccaccguugaaaauuccaucuuucacauggccgcuuggagcggaucugccugccaugauggcaaagaguggacguauauugggguggacggaccugauaacgacgcucuccugaaggucaaauacggcgaggccuacacagauaccuaucacuccuacgcgaauaagauccuucggacacaggagagcgccuguaacugcauugggggaaauuguuaucugaugaucaccgacggcuccgcuucuggcgugagcgaaugccgcuuccucaaaauuagagaggggcggaucauuaaggagaucuuucccaccggacgcguuaagcacacagaagaguguacgugcggcuucgccuccaacaaaaccaucgaaugugcuugcagagauaauagcuacacagccaagcggccguuugugaaacugaacgucgagaccgacacagccgaaauucgccuuaugugcaccgauacguaucuggacacaccuagacccgaugacgggucuaucaccggaccuugugaguccaauggcgacaaggggagcggaggcauuaaaggcggguucgugcaucaacggauggagucuaagaucggacgcugguacagcagaaccauguccaaaacagaacggaugggcauggggcucuaugugaaguacgauggagaccccugggcugauucugacgcgcuggccuuuagcggcgucaugguuuccaugaaggagcccgggugguacagcuucggcuucgaaauuaaagauaagaaaugcgacgugccuuguaucggaaucgagauggugcacgauggcgggaagggaaccuggcauucugcugccacagccauuuauugccugaugggcuccgggcagcuccugugggacacggucaccggaguggauauggcucuuuga

SEQ ID NO: 221014 - RNA, 1401 nt, Artificial Sequence
  derived and/or modified CDS sequence (opt5) from neuraminidase__InfluenzaB__AFA45229
augcugcccagcaccauccagacacucacgcuguuccuuaccuccggcggggugcugcucucucuguacgucagcgcccuucuguccuaucuccuguacucugacauucugcucaaguuuagcccuacagagaucaccgcuccgacaaugccccuggauugcgccaacgcguccaauguucaagcugugaacagaucugccaccaaaggagugacauuccuucugccugaacccgaguggaccuauccucggcucagcugucccggcuccacguuucagaaggcccugcuuauuagcccucaccgcuucggggaaaccaaaggaaauucugcuccgcugaucauuagagagcccuuuaucgccugcggcccuaacgaauguaagcauuucgcucucacacacuacgccgcgcagcccgggggauauuacaauggcacccggggcgaccgcaacaaacugagacaucugaucuccgucaagcucgggaagauuccuacaguggagaauagcaucuuucacauggccgcuuggucuggauccgccugccaugauggcaaagaguggaccuauauugggguugacggacccgauaacgacgcucugcuuaaggugaaauacggcgaagccuacacggauacauaucacagcuacgcgaauaagauccugcggacccaggagucugccuguaacugcauugggggaaauuguuaucucaugaucacagacggcuccgcuagcggcgucuccgaaugccgcuuccugaaaauuagagaggggcggaucaucaaggagauuuuuccgaccggacgcgugaagcacaccgaagaguguacaugcggcuucgccucuaacaaaacgaucgaaugugcuugcagagauaauagcuacaccgccaagcggccuuuuguuaaacuuaacguggagacagacaccgccgaaauucgccugaugugcacagauaccuaucucgacacgcccagaccugaugacggguccaucacaggacccugugagagcaauggcgacaaggggucuggaggcauuaaaggcggguucguccaucaacggauggaguccaagaucggacgcugguacagcagaaccaugucuaaaaccgaacggaugggcauggggcuguaugugaaguacgauggagaccccugggcugauagcgacgcgcuggccuuuuccggcgugauggucucuaugaaggagccugggugguacagcuucggcuucgaaaucaaagauaagaaaugcgacguuccguguauuggaaucgagauggugcacgauggcgggaaggaaacauggcauuccgcugccaccgccauuuauugccucaugggaagcggccagcugcuuugggacacagugacgggggucgauauggcucuguga

SEQ ID NO: 221015 - RNA, 1401 nt, Artificial Sequence; identical to SEQ ID NO: 220967
  derived and/or modified CDS sequence (opt5) from neuraminidase__InfluenzaB__AFA45235

SEQ ID NO: 221016 - RNA, 1401 nt, Artificial Sequence
  derived and/or modified CDS sequence (opt5) from neuraminidase__InfluenzaB__AFA45238
augcugcccagcaccauccagacacucacgcuguuccuuaccuccggcggggugcugcucucucuguacgucagcgccucccuuucuuaucugcucuacagcgacauucugcugaaguuuuccccuacaaaaaccacagcuccgaccaugucucucgauugcgccaacgcgagcaauguucaagcugugaacagauccgccacaaagggagugaccuuccugcuucccgagccugaauggacguauccccggcugagcuguccuggcucuaccuuucagaaagcccuccugaucagcccccaccgcuucggggagacaaagggaaauuccgcuccucuuauuaucagagaaccguuuauugccugcggccccaacgaguguaaacauuucgcucugacccacuacgccgcgcagccugggggauauuacaauggcacacggggcgaccgcaacaagcucagacaucugaucucugucaagcuggggaaaauccccaccguggaaaauuccauuuuucacauggccgcuuggagcggaucugccugccaugauggcaaggaguggacguauaucgggguugacggaccugauaacgacgcucuccugaaagugaaguacggcgaggccuacacagauaccuaucacuccuacgcgaauaaaauucuucggacacaggaaagcgccuguaacugcaucgggggaaauuguuaucugaugauuaccgacggcuccgcuucuggcgucagcgagugccgcuuccucaagaucagagaagggcggauuaucaaggagaucuuucccaccggacgcgugaaacacacagaggaauguacgugcggcuucgccuccaacaagaccauugagugugcuugcagagauaauagcuacacagccaaacggccguuuguuaagcugaacguggaaaccgacacagccgagauccgccuuaugugcaccgauacguaucuggacacaccuagacccgaugacgggucuauuaccggaccuugugaauccaauggcgacaaagggagcggaggcaucaagggcggguucguccaucaacggauggagucuaaaauuggacgcugguacagcagaaccauguccaagacagagcggaugggcauggggcucuaugugaaguacgauggagaccccugggcugauucugacgcgcuggccuuuagcggcgugauggucuccaugaaagaacccgggugguacagcuucggcuucgagaucaaggauaaaaagugcgacguuccuuguaucggaauugaaauggugcacgauggcgggaaagagaccuggcauucugcugccacagccaucuauugccugaugggauccggccagcuccugugggacacggugaccggggucgauauggcucuuuga

SEQ ID NO: 221017 - RNA, 1401 nt, Artificial Sequence
  derived and/or modified CDS sequence (opt5) from neuraminidase__InfluenzaB__AFA45241
augcugcccagcaccauccagacacucacgcuguuccuuaccuccggcggggugcugcucucucuguacgucagcgccucccuuucuuaucugcucuacagcgacauucugcugaaguuuuccccuacagagaucaccgcuccgacaaugccccucgauugcgccaacgcgucuaauguucaagcugugaacagaagcgccaccaaaggagugauuuuccugcuuccugaacccgaguggacauauccucggcuguccugucccggcagcaccuuucagaaggcccuccugaucucuccucaccgcuucggggaaacgaaaggaaauuccgcuccgcuuauuaucagagagcccuuuaucgccugcggcccuaacgaauguaagcauuucgcucugacccacuacgccgcgcagcccgggggauauuacaauggcacacggggcgaccgcaacaaacucagacaucugauuagcgucaagcuggggaagaucccuaccguggaaaauucuauuuuucacauggccgcuugguccggaagcgccugccaugauggcaaagaguggacauauaucgggguugacggacccgauaacaaugcucuccugaaggugaaauacggcgaggccuacaccgacacguaucacucuuacgcgaacaagauucuucggacacaggaguccgccuguaauugcaucgggggaaacuguuaucugaugauuaccgauggcagcgcuuccggcgucucugaaugccgcuuccucaaaaucagagaggggcggaucauuaaggagaucuuuccgacaggacgcgugaagcacaccgaagaguguaccugcggcuucgccagcaauaaaacaauugaaugugcuugcagagacaacuccuacacggccaagcggccuuuuguuaaacugaauguggagaccgauacagccgaaauccgccuuaugugcaccgacacauaucuggauacccccagaccugacgaugggagcauuacgggacccugugagucuaacggcgacaagggguccggaggcaucaaaggcggguucguccaucaacggauggagagcaagaucggacgcugguacucuagaacaaugagcaaaaccgaacggaugggcauggggcucuaugugaaguacgacggagaucccugggcugacuccgaugcgcugaccuuuucuggcgugauggucagcaugaaggagccugggugguacuccuucggcuucgaaauuaaagacaagaaaugcgauguuccguguaucggaauugagauggugcacgacggcgggaaggaaacauggcauagcgccgcuaccgccaucuauugccugaugggaucuggccagcuccugugggauacagugacgggggucgacauggcccuuuga

SEQ ID NO: 221018 - RNA, 1401 nt, Artificial Sequence
  derived and/or modified CDS sequence (opt5) from neuraminidase__InfluenzaB__AFA45244
augcugcccagcaccauccagacacucacgcuguuccuuaccuccggcggggugcugcucucucuguacgucagcgccucccuuucuuaucugcucuacagcgacauucugcugaaguuuuccccuacagagaccacagcuccgaccaugucucucgauugcgccaacgcgagcaauguucaagcugugaacagauccgccacaaaaggagugaccuuccugcuucccgaaccugaguggacguauccccggcugagcuguccuggcucuaccuuucagaaggcccuccugaucagcccccaccgcuucggggaaacaaaaggaaauuccgcuccucuuauuaucagagagccguuuauugccugcggccccaacgaauguaagcauuucgcucugacccacuacgccgcgcagccugggggauauuacaauggcacacggggcgaccgcaacaaacucagacaucugaucucugucaagcuggggaagauccccaccguggaaaauuccauuuuucacauggccgcuuggagcggaucugccugccaugauggcaaagaguggacguauaucgggguugacggaccugauaacgacgcucuccugaaggugaaauacggcgaggccuacacagauaccuaucacuccuacgcgaauaagauucuucggacacaggagagcgccuguaacugcaucgggggaaauuguuaucugaugauuaccgacggcuccgcuucuggcgucagcgaaugccgcuuccucaaaaucagagaggggcggauuaucaaggagaucuuucccaccggacgcgugaagcacacagaagaguguacgugcggcuucgccuccaacaaaaccauugaaugugcuugcagagauaauagcuacacagccaagcggccguuuguuaaacugaacguggagaccgacacagccgaaauccgccuuaugugcaccgauacguaucuggacacaccuagacccgaugacgggucuauuaccggaccuugugaguccaauggcgacaaggggagcggaggcaucaaaggcggguucguccaucaacggauggagucuaagauuggacgcugguacagcagaaccauguccaaaacagaacggaugggcauggggcucuaugugaaguacgauggagaccccugggcugauucugacgcgcuggccuuuagcggcgugauggucuccaugaaggagcccgggugguacagcuucggcuucgaaaucaaagauaagaaaugcgacguuccuuguaucggaauugagauggugcacgauggcgggaagaaaaccuggcauucugcugccacagccaucuauugccugaugggauccggccagcuccugugggacacggugaccggggucgauauggcucuuuga

SEQ ID NO: 221019 - RNA, 1401 nt, Artificial Sequence
  derived and/or modified CDS sequence (opt5) from neuraminidase__InfluenzaB__AFA45247
augcugcccagcaccauccagacacucacgcuguuccuuaccuccggcggggugcugcucucucuguacgucagcgccucccuuucuuaucugcucuacagcgacauucugcugaaguuuuccacaaccgagaucacagcuccuaccaugccgcucgauugcgccaacgcgucuaauguucaagcugugaacagaagcgccacaaaaggagugacccugcuucugcccgaaccugaguggacguauccccggcucuccuguccuggcagcaccuuccagaaggcccugcuuauuucuccccaccgcuuuggggaaacaaaaggaaauuccgcuccucugaucauuagagagccguucaucgccugcggccccaacgaauguaagcauuuugcucucacccacuacgccgcgcagccugggggauauuacaauggcacacggggcgaccgcaacaaacugagacaucugaucagcgucaagcucgggaagauucccaccguggaaaauucuaucuuccacauggccgcuugguccggaagcgccugccaugauggcaaagaguggacguauauugggguugacggaccugauaacaaugcucugcuuaaggugaaauacggcgaggccuacacagacaccuaucacucuuacgcgaacaagauccugcggacacaggaguccgccuguaauugcauugggggaaacuguuaucucauggucaccgauggcagcgcuuccggcgugucugaaugccgcuuucugaaaaucagagaggggcggauuaucaaggagaucuuccccaccggacgcguuaagcacacagaagaguguacgugcggcuuugccagcaauaaaaccauugaaugugcuugcagagacaacuccuacacagccaagcggccguucgugaaacuuaaugucgagaccgauacagccgaaauccgccugaugugcaccgacacguaucucgauacaccuagacccgacgaugggagcauuaccggaccuugugagucuaacggcgacaagggguccggaggcaucaaaggcggguuugugcaucaacggauggagagcaagauuggacgcugguacucuagaaccaugagcaaaacagaacggaugggcauggggcuguaugugaaguacgacggagaucccugggcugacuccgaugcgcuggucuucucuggcguuauggugagcaugaaggagcccgggugguacuccuuuggcuucgaaaucaaagacaagaaaugcgaugugccuuguaucggaauugagaugguccacgacggcgggaaggaaaccuggcauagcgccgcuacagccaucuauugccucaugggaucuggccagcugcuuugggauacggugaccgggguugacauggcccuguga

SEQ ID NO: 221020 - RNA, 1401 nt, Artificial Sequence; identical to SEQ ID NO: 220970
  derived and/or modified CDS sequence (opt5) from neuraminidase__InfluenzaB__AFA45250

SEQ ID NO: 221021 - RNA, 1401 nt, Artificial Sequence
  derived and/or modified CDS sequence (opt5) from neuraminidase__InfluenzaB__AFA45253
augcugcccagcaccauccagacacucacgcuguuccuuaccuccggcggggugcugcucucucuguacgucagcgcccuucuguccuaucuccuguacucugacauucugcucaaguuuagcccuacagagaucaccgcuccgacaaugucccuggauugcgccaacgcgucuaauguucaagcugugaacagaagcgccaccaaaggagugacauuccuucugcccgaaccugaguggaccuauccccggcucuccuguccuggcagcacguuucagaaggcccugcuuauuucuccccaccgcuucggggaaaccaaaggaaauuccgcuccucugaucauuagagagccguuuaucgccugcggccccaacgaauguaagcauuucgcucucacacacuacgccgcgcagccugggggauauuacaauggcacccggggcgaccgcaacaaacugagacaucugaucagcgucaagcucgggaagauucccacaguggaaaauucuaucuuucacauggccgcuugguccggaagcgccugccaugauggcaaagaguggaccuauauugggguugacggaccugauaacgacgcucugcuuaaggugaaauacggcgaggccuacacggauacauaucacucuuacgcgaauaagauccugcggacccaggaguccgccuguaacugcauugggggaaauuguuaucucaugaucacagacggcagcgcuuccggcgucucugaaugccgcuuccugaaaauuagagaggggcggaucaucaaggagauuuuucccaccggacgcgugaagcacaccgaagaguguacaugcggcuucgccagcaacaaaacgaucgaauguguuugcagagauaauuccuacaccgcuaagcggccguuugugaaacuuaacgucgagacagacaccgccgaaauucgccugaugugcacagauaccuaucucgacacgccuagacccgaugacgggagcaucacaggaccuugugagucuaauggcgacaagggguccggaggcauuaaaggcggguucgugcaucaacggauggagagcaagaucggacgcugguacucuagaaccaugagcaaaaccgaacggaugggcauggggcuguaugugaaguacgauggagaccccugggccgauuccgacgcucuggcguuuucuggcgucaugguuagcaugaaggagcccgggugguacuccuucggcuucgaaaucaaagauaagaaaugcgacgugccuuguauuggaaucgagauggugcacgauggcgggaaggaaacauggcauagcgccgcuaccgccauuuauugccucaugggaucuggccagcugcuuugggacacagucacggggguggauauggcccuguga

SEQ ID NO: 221022 - RNA, 1401 nt, Artificial Sequence
  derived and/or modified CDS sequence (opt5) from neuraminidase__InfluenzaB__AFB77645
augcugcccagcaccauccagacacucacgcuguuccuuaccuccggcggggugcugcucucucuguacgucagcgccucccuuucuuaucugcucuacagcgacauucugcugaaguuuuccccuacagagaucaccgcuccggccaugccccucgauugcgcgaacgcuucuaauguucaagccgugaacagaagcgccacaaaaggagugacccugcuucugccugaacccgaguggacauauccucggcucuccugucccggcagcaccuuccagaaggcucugcuuauuucuccucaccgcuuuggggaaacgaaaggaaauuccgccccgcugaucauuagagagcccuucaucgcuugcggcccuaacgaauguaagcauuuugcccucacccacuacgcggcccagcccgggggauauuacaauggcacacggggcgaccgcaacaaacugagacaucugaucagcgucaagcucgggaagauuccuaccguggaaaauucuaucuuccacauggcugccugguccggaagcgcuugccaugauggcaaagaguggacauauauugggguugacggacccgauaacaaugcccugcuuaaggugaaauacggcgaggcguacaccgacacguaucacucuuacgccaacaagauccugcggacacaggaguccgcuuguaauugcauugggggaaacuguuaucucaugaucaccgauggcagcgccuccggcgucucugaaugccgcuuucugaaaauuagagaggggcggaucaucaaggagauuuucccgacaggacgcgugaagcacaccgaagaguguaccugcggcuuugcuagcaauaaaacaaucgaaugugccugcagagacaacuccuacacggccaagcggccuuucguuaaacuuaauguggagaccgauacagcugaaauucgccugaugugcaccgacacauaucucgauacccccagaccuaacgacgggagcaucacgggacccugugagucugauggcgacaagggguccggaggcauuaaaggcggguuuguccaucaacggauggagagcaagaucggacgcugguacucuagaacaaugagcaaaaccgaacggaugggcauggggcuguaugugaaguacgacggagaucccugggcggacuccgaugcccugguguucucuggcgucaugguuagcaugaaggagccugggugguacuccuuuggcuucgaaaucaaagacaagaaaugcgaugugccguguauuggaaucgagauggugcacgacggcgggaaggaaaccuggcauagcgcugccacagccauuuauugccucaugggaucuggccagcugcuuugggauaccgucacagggguggacauggcucuguga

SEQ ID NO: 221023 - RNA, 1401 nt, Artificial Sequence
  derived and/or modified CDS sequence (opt5) from neuraminidase__InfluenzaB__AFB77647
augcugcccagcaccauccagacacucacgcuguuccuuaccuccggcggggugcugcucucucuguacgucagcgccucccuuucuuaucugcucuacagcgacauucugcugaaguuuuccccuacagagaucaccgcuccggccauuccccucgauugcgcgaacgcuucuaauguucaagccgugaacagaagcgccacaaaaggagugacccugcuucugccugaacccgaguggacauauccucggcucuccugucccggcagcaccuuccagaaggcucugcuuaucucuccucaccgcuuuggggaaacgaaaggaaauuccgccccgcugauuaucagagagcccuucaucgcuugcggcccuaacgaauguaagcauuuugcccucacccacuacgcggcccagcccgggggauauuacaauggcacacggggcgaccgcaacaaacugagacaucugauuagcgucaagcucgggaagaucccuaccguggaaaauucuauuuuccacauggcugccugguccggaagcgcuugccaugauggcaaagaguggacauauaucgggguugacggacccgauaacaaugcccugcuuaaggugaaauacggcgaggcguacaccgacacguaucacucuuacgccaacaagauucugcggacacaggaguccgcuuguaauugcaucgggggaaacuguuaucucaugauuaccgauggcagcgccuccggcgucucugaaugccgcuuucugaaaaucagagaggggcggaucauuaaggagaucuucccgacaggacgcgugaagcacaccgaagaguguaccugcggcuuugcuagcaauaaaacaauugaaugugccugcagagacaacuccuacacggccaagcggccuuucguuaaacuuaauguggagaccgauacagcugaaauccgccugaugugcaccgacacauaucucgauacccccagaccuaacgacgggagcauuacgggacccugugagucugauggcgacaagggguccggaggcaucaaaggcggguuuguccaucaacggauggagagcaagaucggacgcugguacucuagaacaaugagcaaaaccgaacggaugggcauggggcuguaugugaaguacgacggagaucccugggcggacuccgaugcccuggcuuucucuggcgugauggucagcaugaaggagccugggugguacuccuuuggcuucgaaauuaaagacaagaaaugcgauguuccguguaucggaauugagauggugcacgacggcgggaaggaaaccuggcauagcgccgccacagcuaucuauugccucaugggaucuggccagcugcuuugggauaccgugacaggggucgacauggcccuguga

SEQ ID NO: 221024 - RNA, 1401 nt, Artificial Sequence
  derived and/or modified CDS sequence (opt5) from neuraminidase__InfluenzaB__AFB77649
augcugcccagcaccauccagacacucacgcuguuccuuaccuccggcggggugcugcucucucuguacgucagcgccucccuuucuuaucugcucuacagcgacauucugcugaaguuuuccccuacagagaucaccgcuccggccaugccccucgauugcgcgaacgcuucuaauguucaagccgugaacagaagcgccacaaaaggagugacccugcuucugccugaacccgaguggacauauccucggcucuccugucccggcagcaccuuccagaaggcucugcuuauuucuccucaccgcuuuggggaaacgaaaggaaauuccgccccgcugaucauuagagagcccuucaucgcuugcggcccuaacgaauguaagcauuuugcccucacccacuacgcggcccagcccgggggauauuacaauggcacacggggcgaccgcaacaaacugagacaucugaucagcgucaagcucgggaagauuccuaccguggaaaauucuaucuuccacauggcugccugguccggaagcgcuugccaugauggcaaagaguggacauauauugggguugacggacccgauaacaaugcccugcuuaaggugaaauacggcgaggcguacaccgacacguaucacucuuacgccaacaagauccugcggacacaggaguccgcuuguaauugcauugggggaaacuguuaucucaugaucaccgauggcagcgccuccggcgucucugaaugccgcuuucugaaaauuagagaggggcggaucaucaaggagauuuucccgacaggacgcaucaagcacaccgaagaguguaccugcggcuuugcuagcaauaaaacaauugaaugugccugcagagacaacuccuacacggccaagcggccuuucgugaaacuuaauguugagaccgauacagcugaaauccgccugaugugcaccgacacauaucucgauacccccagaccuaacgacgggagcauuacgggacccugugagucugauggcgacaagggguccggaggcaucaaaggcggguuugugcaucaacggauggagagcaagaucggacgcugguacucuagaacaaugagcaaaaccgaacggaugggcauggggcuguaugucaaguacgacggagaucccugggcggacuccgaugcccuggcuuucucuggcgugauggugagcaugaaggagccugggugguacuccuuuggcuucgaaauuaaagacaagaaaugcgaugucccguguaucggaauugagaugguucacgacggcgggaaggaaaccuggcauagcgccgccacagcuaucuauugccucaugggaucuggccagcugcuuugggauaccgugacagggguggacauggcccuguga

SEQ ID NO: 221025 - RNA, 1401 nt, Artificial Sequence
  derived and/or modified CDS sequence (opt5) from neuraminidase__InfluenzaB__AFB77651
augcugcccagcaccauccagacacucacgcuguuccuuaccuccggcggggugcugcucucucuguacgucagcgccucccuuucuuaucugcucuacagcgacauucugcugaaguuuuccccuacagagaucaccgcuccggccaugccccucgauugcgcgaacgcuucuaauguucaagccgugaacagaagcgccacaaaaggagugacccugcuucugccugaacccgaguggacauauccucggcucuccugucccggcagcaccuuccagaaggcucugcuuauuucuccucaccgcuuuggggaaacgaaaggaaauuccgccccgcugaucauuagagagcccuucaucgcuugcggcccuaacgaauguaagcauuuugcccucacccacuacgcggcccagcccgggggauauuacaauggcacacggggcgaccgcaacaaacugagacaucugaccagcgucaagcucgggaagaucccuacaguggaaaauucuauuuuccacauggcugccugguccggaagcgcuugccaugauggcaaagaguggaccuauaucgggguugacggacccgauaacaaugcccugcuuaaggugaaauacggcgaggcguacacggacacauaucacucuuacgccaacaagauucugcggacccaggaguccgcuuguaauugcaucgggggaaacuguuaucucaugauuacagauggcagcgccuccggcgucucugaaugccgcuuucugaaaaucagagaggggcggauuaucaaggagaucuucccgaccggacgcgugaagcacaccgaagaguguacaugcggcuuugcuagcaauaaaacgauugaaugugccugcagagacaacuccuacaccgccaagcggccuuucguuaaacuuaauguggagacagauaccgcugaaauccgccugaugugcacagacaccuaucucgauacgcccagaccuaacgacgggagcauuacaggacccugugagucugauggcgacaagggguccggaggcaucaaaggcggguuuguccaucaacggauggagagcaagauuggacgcugguacucuagaaccaugagcaaaaccgaacggaugggcauggggcuguaugugaaguacgacggagaucccugggcggacuccgaugcccuggcuuucucuggcgugauggucagcaugaaggagccugggugguacuccuuuggcuucgaaaucaaagacaagaaaugcgauguuccguguaucggaauugagauggugcacgacggcgggaaggaaacauggcauagcgccgccaccgcuaucuauugccucaugggaucuggccagcugcuuugggauacagugacgggggucgacauggcccuguga

SEQ ID NO: 221026 - RNA, 1401 nt, Artificial Sequence
  derived and/or modified CDS sequence (opt5) from neuraminidase__InfluenzaB__AFE00364
augcugcccagcaccauccagaugcucacacuguuccuuacguccggcggggugcugcucucucuguacgucagcgccucccuuucuuaucugcucuacagcgacauucugcugaaguuuuccccuaccgagaucacagcuccgaccaugccccucgauugcgccaacgcgucuaauguucacgcugugaacagaagcgccacaaaaggagugaccuuccugcuuccugaacccgaguggacauauccucggcuguccugucccggcagcaccuuucaaaaggcccuccugauuucuccucaucgcuucggggaaacgaaaggaaauuccgcuccgcuuaucauuagagagcccuuuaucgccugcggcccuaacgaauguaagcacuucgcucugacccauuacgccgcgcagcccgggggauauuacaauggcacacggggcgaccgcaacagacuccggcaccugaucagcgucaaacuggggaagauuccuaccguggaaaauucuaucuuucauauggccgcuugguccggaagcgccugccacgauggcaaggaguggacauauauugggguugacggacccgauaacaaugcucuccugaaaaucaaguacggcgaggccuacaccgacacguaucacucuuacgcgaacaauauucuucgcacacaggaguccgccuguaacugcaucgggggaaauuguuaucugaugauuaccgauggcagcgcuuccggcgugucugaaugcagauuccucaaaauccgggaggggcgcaucauuaaggagaucuuuccgacaggaagagucaaacauaccgaagaguguaccugcggcuucgccagcaacaagacaauugaaugugcuugccgggacaauuccuacacggccaagcgcccuuuugugaaacugaacguugagaccgauacagccgaaaucagacuuaugugcaccgacacauaucuggauacgccccggccugacgaugggagcauuaccggacccugugagucuaacggcgacaagggguccggaggcaucaaaggcggguucgugcaccagcgcauggcuagcaagaucggaagaugguacucucggacaaugagcaaaaccgagagaaagggcauggggcucuaugucaaauacgacggagaucccuggaccgacuccgaugcgcuggccuuucgcggcgugauggugucuaugaaggaaccugggugguacagcuucggcuucgagauuaaggacaaaaagugcgaugucccguguaucggaauugaaaugguucaugacggcgggaaagagacauggcacuccgcugccaccgccaucuauugccugaugggaagcggccaacuccugugggauacagugacggggguggacauggcucuuuga

SEQ ID NO: 221027 - RNA, 1401 nt, Artificial Sequence
  derived and/or modified CDS sequence (opt5) from neuraminidase__InfluenzaB__AFF18536
augcugcccagcaccauccagaugcucacacuguuccuuacguccggcggggugcugcucucucuguacgucagcgccucccuuucuuaucugcucuacagcgacauucugcugaaguuuuccccuaccgagaucacagcuccgaccaugccccucgauugcgccaacgcgucuaauguucacgcugugaacagaagcgccacaaaaggagugaccuuccugcuuccugaacccgaguggacauauccucggcuguccugucccggcagcaccuuucaaaaggcccuccugauuucuccucaucgcuucggggaaacgaaaggaaauuccgcuccgcuuaucauuagagagcccuuuaucgccugcggcccuaacgaaugucggcacuucgcucugacccauuacgccgcgcagcccgggggauauuacaauggcacacgcggcgacagaaacaagcuccggcaccugaucagcgucaaacuggggaagauuccuaccguggaaaauucuaucuuucauauggccgcuugguccggaagcgccugccacgauggcaaggaguggacauauauugggguugacggacccgauaacaaugcucuccugaaaaucaaguacggcgaggccuacaccgacacguaucacucuuacgcgaacaauauucuucgcacacaggaguccgccuguaacugcaucagagggaauuguuaucugaugauuaccgauggaagcgcuuccggcgugucugaaugccgguuccucaaaauccgcgagggcagaaucauuaaggagaucuuuccgacagggcgggucaaacauaccgaagaguguaccugcggauucgccagcaacaagacaauugaaugugcuugccgcgacaauuccuacacggccaagagaccuuuugugaaacugaacguugagaccgauacagccgaaauccggcuuaugugcaccgacacauaucuggauacgccccgcccugacgauggcagcauuaccgggcccugugagucuaacggagacaagggcuccgggggaaucaaaggcggcuucgugcaccagagaauggcuagcaagaucgggcggugguacucuagaacaaugagcaaaaccgagcgcaagggaaugggccucuaugucaaauacgacggggaucccuggaccgacuccgaugcgcuggccuuucggggagugauggugucuaugaaggaaccuggcugguacagcuucggguucgagauuaaggacaaaaagugcgaugucccguguaucggcauugaaaugguucaugacggaggcaaagagacauggcacuccgcugccaccgccaucuauugccugauggggagcggacaacuccugugggauacagugacgggcguggacauggcucuuuga

SEQ ID NO: 221028 - RNA, 1401 nt, Artificial Sequence
  derived and/or modified CDS sequence (opt5) from neuraminidase__InfluenzaB__AFF18545
augcugcccagcaccauccagaugcucacacuguuccuuacguccggcggggugcugcucucucuguacgucagcgccucccuuucuuaucugcucuacagcgacauucugcugaaguuuuccccuaccgagaucacagcuccgaccaugccccucgauugcgccaacgcgucuaauguucacgcugugaacagaagcgccacaaaaggagugaccuuccugcuuccugaacccgaguggacauauccucggcuguccugucccggcagcaccuuucaaaaggcccuccugauuucuccucaucgcuucggggaaacgaaaggaaauuccgcuccgcuuaucauuagagagcccuuuaucgccugcggcccuaacgaauguaagcacuucgcucugacccauuacgccgcgcagcccgggggauauuacaauggcacacggggcgaccgcaacaaacucagacaccugaucagcgucaagcuggggaagauuccuaccguggaaaauucuaucuuucauauggccgcuugguccggaagcgccugccacgauggcaaagaguggacauauauugggguugacggacccgauaacaaugcucuccugaagaucaaauacggcgaggccuacaccgacacguaucacucuuacgcgaacaauauucuucggacacaggaguccgccuguaacugcaucgggggaaauuguuaucugaugauuaccgauggcagcgcuuccggcgugucugaaugccgcuuccucaagaucagagaggggcggaucauuaaagagaucuuuccgacaggacgcgucaagcauaccgaagaguguaccugcggcuucgccagcaacaagacaauugaaugugcuugcagagacaauuccuacacggccaaacggccuuuugugaagcugaacguugagaccgauacagccgaaauccgccuuaugugcaccgacacauaucuggauacccccagaccugacgaugggagcauuacgggacccugugagucuaacggcgacaaaggguccggaggcaucaagggcggguucgugcaccagcggauggcuagcaaaaucggacgcugguacucuagaacaaugagcaagaccgagcggaaaggcauggggcucuaugucaaguacgacggagaucccuggaccgacuccgaugcgcuggccuuuagaggcgugauggugucuaugaaggaaccugggugguacagcuucggcuucgagauuaaagacaagaaaugcgaugucccguguaucggaauugaaaugguucaugacggcgggaaggagacauggcacuccgcugccaccgccaucuauugccugaugggaagcggccaacuccugugggauacagugacggggguggacauggcucuuuga

SEQ ID NO: 221029 - RNA, 1401 nt, Artificial Sequence; identical to SEQ ID NO: 220889
  derived and/or modified CDS sequence (opt5) from neuraminidase__InfluenzaB__AFH34933

SEQ ID NO: 221030 - RNA, 1401 nt, Artificial Sequence; identical to SEQ ID NO: 220889
  derived and/or modified CDS sequence (opt5) from neuraminidase__InfluenzaB__AFH34939

SEQ ID NO: 221031 - RNA, 1401 nt, Artificial Sequence; identical to SEQ ID NO: 220827
  derived and/or modified CDS sequence (opt5) from neuraminidase__InfluenzaB__AFH57869

SEQ ID NO: 221032 - RNA, 1401 nt, Artificial Sequence
  derived and/or modified CDS sequence (opt5) from neuraminidase__InfluenzaB__AFH57891
augcugcccagcaccauccagacacucacgcuguuccuuaccuccggcggggugcugcucucucuguacgucagcgccucccuuucuuaucugcucuacagcgacauucugcugaaguuuucccaaacagagaucaccgcuccuauuaugccgcucgauuaugccaacgcgucuaauguucaggcugugaaccacagcgccgccaaaggagugacacugcuucugcccgaaccugaguggaccuaccccagacucuccugcccuggcagcacauuccagaaggcucugcuuaucucuccccaucgguuuggggaaaccaaaggaaauuccgccccucugauuauccgcgagccguucaucgcuuguggccccacggaaugcaagcacuuugcccucacccauuaugcggcccagccugggggauacuauaacggcacaagagaggaccggaauaaacugcgccaccugauuagcgucaagcucggcaagauccccaccguggagaacucuauuuuccauauggcugccugguccgggagcgcuugucacgauggaaaagaauggacauacaucggcguugacgggccugauucuaaugcccugcuuaagauuaaauacggagaggcguauaccgacacguaccacuccuaugccaagaacauccugagaacacaagaaagcgcuugcaauuguauuggcggggauugcuaccucaugaucaccgacggacccgccuccggcaucucugagugucgguuucugaaaauucgcgagggcagaaucauuaaggaaaucuucccgacagggcgggugaagcauaccgaggaaugcaccuguggauuugcuagcaacaaaacaauugagugcgccugucgcgauaauuccuauacggccaagagaccuuucgucaaacuuaacguggaaaccgacacagcugagauccggcugaugugcaccgagacauaccucgauacgccccgcccuaaugacggcagcaucaccgggcccugcgaaucugauggagacaagggcuccgggggaauuaaaggcggcuuuguucaccagagaauggcgagcaagaucgggcggugguauucucgcacaaugagcaaaaccaagagaaugggaaugggccuguacgugaaguacgacggggaucccuggaccgacuccgaggcccuggcucucucuggagucauggugagcauggaggaaccuggcugguauuccuucggguuugaaauuaaagauaagaaaugugacgugccgugcaucggcauugagaugguccaugauggaggcaagacaaccuggcacagcgccgccacagcuaucuacugucugauggggucuggacagcuucugugggacacgguuaccggcguggauauggcccucuga

SEQ ID NO: 221033 - RNA, 1401 nt, Artificial Sequence
  derived and/or modified CDS sequence (opt5) from neuraminidase__InfluenzaB__AFH57913
augcugcccagcaccauccagacacucacgcuguuccuuaccuccggcggggugcugcucucucuguacgucagcgccucccuuucuuaucugcucuacagcgacauucugcugaaguuuuccccuacagagaucaccgcuccgacaaugccccucgauugcgccaacgcgucuaauguucaagcugugaacagaagcgccaccaaaggagugacacugcuucugccugaacccgaguggaccuauccucggcucuccugucccggcagcacguuccagaaggcccugcuuauuucuccucaccgcuuuggggaaaccaaaggaaauuccgcuccgcugaucauuagagagcccuucaucgccugcggcccuaacgaauguaagcauuuugcucucacacacuacgccgcgcagcccgggggauauuacaauggcacccggggcgaccgcaacaaacugagacaucugaucagcgucaagcucgggaagauuccuacaguggaaaauucuaucuuccacauggccgcuugguccggaagcgccugccaugauggcaaagaguggaccuauauugggguugacggacccgauaacaaugcucugcuuaaggugaaauacggcgaggccuacacggacacauaucacucuuacgcgaacaagauccugcggacccaggaguccgccuguaauugcauugggggaaacuguuaucucaugaucacagauggcagcgcuuccggcgucucugaaugccgcuuucugaaaauuagagaggggcggaucaucaaggagauuuucccgaccggacgcgugaagcacaccgaagaguguacaugcggcuuugccagcaauaaaacgaucgaaugugcuugcagagacaacuccuacaccgccaagcggccuuucguuaaacuuaauguggagacagauaccgccgaaauucgccugaugugcacagacaccuaucucgauacgcccagaccuaacgacgggagcaucacaggacccugugagucuaacggcgauaagggguccggaggcauuaaaggcggguuuguccaucaacggauggagagcaagaucggacgcugguacucuagaaccaugagcaaaaccgaacggaugggcauggggcuguaugugaaguacgacggagaccccugggcugauuccgacgcgcuggccuucucuggcgugauggucagcaugaaggagccugggugguacuccuuuggcuucgaaaucaaagauaagaaaugcgacguuccguguauuggaaucgagauggugcacgauggcgggaaggaaacauggcauagcgcugccaccgccauuuauugccucaugggaucuggccagcugcuuugggacacagugacgggggucgauauggcucuguga

SEQ ID NO: 221034 - RNA, 1401 nt, Artificial Sequence; identical to SEQ ID NO: 220889
  derived and/or modified CDS sequence (opt5) from neuraminidase__InfluenzaB__AFH57935

SEQ ID NO: 221035 - RNA, 1401 nt, Artificial Sequence; identical to SEQ ID NO: 220889
  derived and/or modified CDS sequence (opt5) from neuraminidase__InfluenzaB__AFH57946

SEQ ID NO: 221036 - RNA, 1401 nt, Artificial Sequence; identical to SEQ ID NO: 220889
  derived and/or modified CDS sequence (opt5) from neuraminidase__InfluenzaB__AFH57957

SEQ ID NO: 221037 - RNA, 1401 nt, Artificial Sequence; identical to SEQ ID NO: 220967
  derived and/or modified CDS sequence (opt5) from neuraminidase__InfluenzaB__AFH57968

SEQ ID NO: 221038 - RNA, 1401 nt, Artificial Sequence
  derived and/or modified CDS sequence (opt5) from neuraminidase__InfluenzaB__AFH57979
augcugcccagcaccauccagacacucacgcuguuccuuaccuccggcggggugcugcucucucuguacgucagcgcccuucuguccuaucuccuguacucugacauucugcucaaguuuagcccuacagagaucaccgcuccgacaaugucccuggauugcgccaacgcgucuaauguucaagcugugaacagaagcgccaccaaaggagugauuuuccuucugcccgaaccugaguggacauauccccggcucuccuguccuggcagcaccuuucagaaggcccugcuuaucucuccccaccgcuucggggaaacgaaaggaaauuccgcuccucugauuaucagagagccguuuaucgccugcggccccaacgaauguaagcauuucgcucucacccacuacgccgcgcagccugggggauauuacaauggcacacggggcgaccgcaacaaacugagacaucugauuagcgucaagcucgggaagauccccaccguggaaaauucuauuuuucacauggccgcuugguccggaagcgccugccaugauggcaaagaguggacauauaucgggguugacggaccugauaacgacgcucugcuuaaggugaaauacggcgaggccuacaccgauacguaucacucuuacgcgaauaagauucugcggacacaggaguccgccuguaacugcaucgggggaaauuguuaucucaugauuaccgacggcagcgcuuccggcgucucugaaugccgcuuccugaaaaucagagaggggcggaucauuaaggagaucuuucccacaggacgcgugaagcacaccgaagaguguaccugcggcuucgccagcaacaaaacaauugaaugugcuugcagagauaauuccuacacggccaagcggccguuuguuaaacuuaacguggagaccgacacagccgaaauccgccugaugugcaccgauacauaucucgacaccccuagacccgaugacgggagcauuacgggaccuugugagucuaauggcgacaagggguccggaggcaucaaaggcggguucguccaucaacggauggagagcaagaucggacgcugguacucuagaacaaugagcaaaaccgaacggaugggcauggggcuguaugugaaguacgauggagaccccugggcugauuccgacgcgcuggccuuuucuggcgugauggucagcaugaaggagcccgggugguacuccuucggcuucgaaauuaaagauaagaaaugcgacguuccuuguaucggaauugagauggugcacgauggcgggaaggaaaccuggcauagcgcugccacagccaucuauugccucaugggaucuggccagcugcuuugggacaccgugacaggggucgauauggcucuguga

SEQ ID NO: 221039 - RNA, 1401 nt, Artificial Sequence; identical to SEQ ID NO: 220656
  derived and/or modified CDS sequence (opt5) from neuraminidase__InfluenzaB__AFH58253

SEQ ID NO: 221040 - RNA, 1401 nt, Artificial Sequence; identical to SEQ ID NO: 220719
  derived and/or modified CDS sequence (opt5) from neuraminidase__InfluenzaB__AFH58264

SEQ ID NO: 221041 - RNA, 1401 nt, Artificial Sequence; identical to SEQ ID NO: 220860
  derived and/or modified CDS sequence (opt5) from neuraminidase__InfluenzaB__AFH58275

SEQ ID NO: 221042 - RNA, 1401 nt, Artificial Sequence; identical to SEQ ID NO: 220860
  derived and/or modified CDS sequence (opt5) from neuraminidase__InfluenzaB__AFH58286

SEQ ID NO: 221043 - RNA, 1401 nt, Artificial Sequence; identical to SEQ ID NO: 221033
  derived and/or modified CDS sequence (opt5) from neuraminidase__InfluenzaB__AFH58297

SEQ ID NO: 221044 - RNA, 1401 nt, Artificial Sequence
  derived and/or modified CDS sequence (opt5) from neuraminidase__InfluenzaB__AFH58308
augcugcccagcaccauccagacacucacgcuguuccuuaccuccggcggggugcugcucucucuguacgucagcgccucccuuucuuaucugcucuacagcgacauucugcugaaguuuuccagaacagagaccacagcuccuaucaugccgcucgauugcgccaacgcgucuaauguucaagcugugaaccggagcgccaccaaaggagugacacugcuucugcccgaaccugaguggaccuauccccgccucuccuguccuggcagcacguuccagaaggcccugcuuauuucuccccacagauuuggggaaaccaaaggaaauuccgcuccucugaucauucgggagccguucaucgccugcggccccaaggaauguaaacauuuugcucucacacacuacgccgcgcagccugggggauauuacaacggcacccgcgaggacagaaauaagcugcggcaucugaucagcgucaagcucggcaaaauucccacaguggagaacucuaucuuccacauggccgcuugguccgggagcgccugccaugauggacgcgaauggaccuauauuggcguugacgggccugauucuaaugcucugcuuaagaucaaauacggagaggccuacacggacacauaucacuccuacgcgaagaacauucugagaacccaggaaagcgccuguaauugcaucggcggggauuguuaucucaugauuacagacggacccgcuuccggcaucucugagugccgguuucugaaaauccgcgagggcagaauuaucaaggaaauuuucccgaccgggcgggugaagcacaccgaggaauguacaugcggauuugccagcaacaaaacgaucgagugugcuugccgcgauaauuccuacaccgccaagagaccuuucgucaaacuuaacguggaaacagacaccgccgagauucggcugaugugcacagagaccuaucucgauacgccccgcccuaaugacggcagcaucacagggcccugugaaucuaacggagauaagggcuccgggggaaucaaaggcggcuuuguucaucaaagaauggcuagcaagauugggcggugguacucuagaaccaugagcaaaaccaagcgcaugggaaugggccuguaugugaaguacgacggggaccccuggacagauuccgaggcgcuggcccucucuggagucauggugagcauggaggaaccuggcugguacuccuucggguuugaaaucaaagacaagaaaugcgaugugccguguauuggcaucgagaugguccacgacggaggcaagaccacauggcauagcgcugccacggccauuuauugccugauggggucuggacagcuucugugggauaccguuacaggcguggacauggcucucuga

SEQ ID NO: 221045 - RNA, 1401 nt, Artificial Sequence; identical to SEQ ID NO: 221044
  derived and/or modified CDS sequence (opt5) from neuraminidase__InfluenzaB__AFH58319

SEQ ID NO: 221046 - RNA, 1401 nt, Artificial Sequence
  derived and/or modified CDS sequence (opt5) from neuraminidase__InfluenzaB__AFH58341
augcugcccagcaccauccagacacucacgcuguuccuuaccuccggcggggugcugcucucucuguacgucagcgccucccuuucuuaucugcucuacagcgacauucugcugaaguuuuccagaacagagaucaccgcuccuauuaugccgcucgauugcgccaacgcgucuaauguucaagcugugaaccggagcgccacaaaaggagugacccugcuucugcccgaaccugaguggacauauccccgccucuccuguccuggcagcaccuuccagaaggcccugcuuaucucuccccacagauuuggggaaacgaaaggaaauuccgcuccucugauuauccgggagccguucaucgccugcggccccaaggaauguaaacauuuugcucucacccacuacgccgcgcagccugggggauauuacaacggcacacgcgaggacagaaauaagcugcggcaucugauuagcguccgccucggcaagauccccaccguggagaacucuauuuuccacauggccgcuugguccgggagcgccugccaugauggaagagaauggacauauaucggcguugacgggccugauucuaaugcucugcuuaaaauuaaguacggagaggccuacaccgacacguaucacuccuacgcgaaaaacauccugcggacacaggaaagcgccuguaauugcauuggcggggauuguuaucucaugaucaccgacggacccgcuuccggcaucucugagugccgcuuucugaagauuagagagggccggaucauuaaagaaaucuucccgacagggcgcgugaagcacaccgaggaauguaccugcggauuugccagcaacaagacaauugagugugcuugcagagauaauuccuacacggccaaacggccuuucgucaaacuuaacguggaaaccgacacagccgagauccgccugaugugcaccgagacauaucucgauacccccagaccuaaugacggcagcaucacggggcccugugaaucuaacggagauaagggcuccgggggaauuaagggcggcuuuguucaucaacggauggcuagcaaaaucgggagaugguacucucgcacaaugagcaagaccaaacggaugggaaugggccuguaugugaaguacgacggggaccccuggaccgauuccgaggcgcuggcccucucuggagucauggugagcauggaggaaccuggcugguacuccuucggguuugaaauuaaggacaaaaagugcgaugugccguguaucggcauugagaugguccacgacggaggcaaaacaaccuggcauagcgcugccacagccaucuauugccugauggggucuggacagcuucugugggauacgguuaccggcgugaauaugacacucuga

SEQ ID NO: 221047 - RNA, 1401 nt, Artificial Sequence
  derived and/or modified CDS sequence (opt5) from neuraminidase__InfluenzaB__AFH58363
augcugcccagcaccauccagacacucacgcuguuccuuaccuccggcggggugcugcucucucuguacgucagcgccucccuuucuuaucugcucuacagcgacauucugcugaaguuuccuuccacagagaucaccgcuccgacaaugccccucgauugcgccaacgcgucuaauguucaagcugugaacagaagcgccaccaaaggagugacauuccugcuuccugaacccgaguggaccuauccucggcuguccugucccggcagcacguuucagaaggcccuccugauuucuccucaccgcuucggggaaaccaaaggaaauuccgcuccgcuuaucauuagagagcccuuuaucgccugcggcccuaaggaauguaaacauuucgcucugacacacuacgccgcgcagcccgggggauauuacaacggcacccggggcgaccgcaauaagcucagacaucugaucagcgucaagcuggggaaaauuccuacaguggagaacucuaucuuucacauggccgcuugguccggaagcgccugccaugauggcaaggaguggaccuauauugggguugacggacccgauaauaacgcucuccugaaaaucaaguacggcgaagccuacacggacacauaucacucuuacgcgaauaacauucuucggacccaggaguccgccuguaauugcaucgggggaaacuguuaucugaugauuacagauggcagcgcuuccggcgugucugaaugccgcuuccucaaaaucagagaggggcggaucauuaaggagaucuuuccgaccggacgcauuaagcacaccgaagaguguacaugcggcuucgccagcaauaaaacgaucgaaugugcuugcagagacaacuccuacaccgccaagcggccuuuugucaaacugaauguggagacagauaccgccgaaauucgccuuaugugcacagagaccuaucuggacacgcccagaccugaugacgggagcaucacaggacccugugagucuaacggcgggaagggauccggcggcaucaaagggggauucguucaucaacggauggcuagcaagauuggccgcugguacucuagaaccaugagcaaaaccgaacggaaggggaugggacucuaugugaaguacgauggcgaccccugggcggacuccgaugcccuggcuuuuucuggggucauggugagcauggaggaaccuggcugguacuccuucggauucgagaucaaagacaagaaaugcgaugugccguguauuggcaucgaaaugguccacgacgggggaaaggagacauggcauagcgccgccaccgcuauuuauugccugaugggcucugggcagcuccugugggauacaguuacgggagugaacauggcccuuuga

SEQ ID NO: 221048 - RNA, 1401 nt, Artificial Sequence; identical to SEQ ID NO: 221047
  derived and/or modified CDS sequence (opt5) from neuraminidase__InfluenzaB__AFH58374

SEQ ID NO: 221049 - RNA, 1401 nt, Artificial Sequence; identical to SEQ ID NO: 221033
  derived and/or modified CDS sequence (opt5) from neuraminidase__InfluenzaB__AFH58385

SEQ ID NO: 221050 - RNA, 1401 nt, Artificial Sequence; identical to SEQ ID NO: 221033
  derived and/or modified CDS sequence (opt5) from neuraminidase__InfluenzaB__AFH58396

SEQ ID NO: 221051 - RNA, 1401 nt, Artificial Sequence; identical to SEQ ID NO: 221033
  derived and/or modified CDS sequence (opt5) from neuraminidase__InfluenzaB__AFH58407

SEQ ID NO: 221052 - RNA, 1401 nt, Artificial Sequence; identical to SEQ ID NO: 221033
  derived and/or modified CDS sequence (opt5) from neuraminidase__InfluenzaB__AFH58418

SEQ ID NO: 221053 - RNA, 1401 nt, Artificial Sequence
  derived and/or modified CDS sequence (opt5) from neuraminidase__InfluenzaB__AFH58429
augcugcccagcaccauccagacacucacgcuguuccuuaccuccggcggggugcugcucucucuguacgucagcgccucccuuucuuaucugcucuacagcgacauucugcugaaguuuuccccuacagagaucaccgcuccgacaaugccccucgauugcgccaacgcgucuaauguucaagcugugaacagaagcgccaccaaaggagugacacugcuucugccugaacccgaguggaccuauccucggcucuccugucccggcagcacguuccagaaggcccugcuuauuucuccucaccgcuuuggggaaaccaaaggaaauuccgcuccgcugaucauuagagagcccuucaucgccugcggcccuaacgaauguaagcauuuugcucucacacacuacgccgcgcagcccgggggauauuacaauggcacccggggcgaccgcaacaaacugagacaucugaucagcgucaagcucgggaagauuccuacaguggaaaauucuaucuuccacauggccgcuugguccggaagcgccugccaugauggcaaagaguggaccuauauugggguugacggacccgauaacaaugcucugcuuaaggugaaauacggcgaggccuacacggacacauaucacucuuacgcgaacaagauccugcggacccaggaguccgccuguaauugcauugggggaaacuguuaucucaugaucacagauggcagcgcuuccggcgucucugaaugccgcuuucugaaaauuagagaggggcggaucaucaaggagauuuucccgaccggacgcgugaagcacaccgaagaguguacaugcggcuuugccagcaaugaaacgaucgagugugcuugcagagacaacuccuacaccgccaaacggccuuucguuaaacuuaauguggaaacagauaccgccgagauucgccugaugugcacagacaccuaucucgauacgcccagaccuaacgacgggagcaucacaggacccugugagucuaacggcgauaagggguccggaggcauuaagggcggguuuguccaucaacggauggaaagcaaaaucggacgcugguacucuagaaccaugagcaagaccgagcggaugggcauggggcuguaugugaaauacgacggagaccccugggcugauuccgacgcgcuggccuucucuggcgugauggucagcaugaaggaaccugggugguacuccuuuggcuucgagaucaaggauaaaaagugcgacguuccguguauuggaaucgaaauggugcacgauggcgggaaagagacauggcauagcgcugccaccgccauuuauugccucaugggaucuggccagcugcuuugggacacagugacgggggucgauauggcucuguga

SEQ ID NO: 221054 - RNA, 1401 nt, Artificial Sequence
  derived and/or modified CDS sequence (opt5) from neuraminidase__InfluenzaB__AFH58440
augcugcccagcaccauccagacacucacgcuguuccuuaccuccggcggggugcugcucucucuguacgucagcgccucccuuucuuaucugcucuacagcgacauucugcugaaguuuuccccuacagagaucaccgcuccgacaaugccccucgauugcgccaacgcgucuaauguucaagcugugaacagaagcgccaccaaaggagugacacugcuucugccugaacccgaguggaccuauccucggcucuccugucccggcagcacguuccagaaggcccugcuuauuucuccucaccgcuuuggggaaaccaaaggaaauuccgcuccgcugaucauuagagagcccuucaucgccugcggcccuaacgaauguaagcauuuugcucucacacacuacgccgcgcagcccgggggauauuacaauggcacccggggcgaccgcaacaaacugagacaucugaucagcgucaagcucgggaagauuccuacaguggaaaauucuaucuuccacauggccgcuugguccggaagcgccugccaugauggcaaagaguggaccuauauugggguugacggacccgauaacaaugcucugcuuaaggugaaauacggcgaggccuacacggacacauaucacucuuacgcgaacaagauccugcggacccaggaguccgccuguaauugcauugggggaaacuguuaucucaugaucacagauggcagcgcuuccggcgucucugaaugccgcuuucugaaaauucaagaggggagaaucaucaaggagauuuucccgaccggacgggugaagcacaccgaagaguguacaugcggcuuugccagcaauaaaacgaucgaaugugcuugccgcgacaacuccuacaccgccaagagaccuuucguuaaacuuaauguggagacagauaccgccgaaauucggcugaugugcacagacaccuaucucgauacgccccgcccuaacgacgggagcaucacaggacccugugagucuaacggcgauaagggguccggaggcauuaaaggcggguuuguccaucagagaauggagagcaagaucggacggugguacucucgcaccaugagcaaaaccgaaagaaugggcauggggcuguaugugaaguacgacggagaccccugggcugauuccgacgcgcuggccuucucuggcgugauggucagcaugaaggagccugggugguacuccuuuggcuucgaaaucaaagauaagaaaugcgacguuccguguauuggaaucgagauggugcacgauggcgggaaggaaacauggcauagcgcugccaccgccauuuauugccucaugggaucuggccagcugcuuugggacacagugacgggggucgauauggcucuguga

SEQ ID NO: 221055 - RNA, 1401 nt, Artificial Sequence
  derived and/or modified CDS sequence (opt5) from neuraminidase__InfluenzaB__AFH58462
augcugcccagcaccauccagacacucacgcuguuccuuaccuccggcggggugcugcucucucuguacgucagcgccucccuuucuuaucugcucuacagcgacauucugcugaaguuuuccccuacagagaucaccgcuccgacaaugccccucgauugcgccaacgcgucuaauguucaagcugugaacagaagcgccaccaaaggagugacauuccugcuuccugaacccgaguggaccuauccucggcuguccugucccggcagcacguuucagaaggcccuccugauuucuccucaccgcuucggggaaaccaaaggaaauuccgcuccgcuuaucauuagagagcccuuuaucgccugcggcccuaacgaauguaagcauuucgcucugacacacuacgccgcgcagcccgggggauauuacaauggcacccggggcgaccgcaacaaacucagacaucugaucagcgucaagcuggggaagauuccuacaguggaaaauucuaucuuucacauggccgcuugguccggaagcgccugccaugauggcaaagaguggaccuauauugggguugacggacccgauaacaaugcucuccugaaggugaaauacggcgaggccuacacggacacauaucacucuuacgcgaacaagauccuucggacccaggaguccgccuguaauugcauugggggaaacuguuaucugaugaucacagauggcagcgcuuccggcgucucugaaugccgcuuccucaaaauuagagaggggcggaucaucaaggagauuuuuccgaccggacgcgugaagcacaccgaagaguguacaugcggcuucgccagcaauaaaacgaucgaaugugcuugcagagacaacuccuacaccgccaagcggccuuuuguuaaacugaauguggagacagauaccgccgaaauucgccuuaugugcacagacaccuaucuggauacgcccagaccugacgaugggagcaucacaggacccugugagucuaacggcgacgagggguccggaggcauuaagggcggguucguccaucaacggauggaaagcaaaaucggacgcugguacucuagaaccaugagcaagaccgagcggaugggcauggggcucuaugugaaauacgacggagaucccugggcugacuccgaugcgcuggccuuuucuggcgugauggucagcaugaaggaaccugggugguacuccuucggcuucgagaucaaggacaaaaagugcgauguuccguguauuggaaucgaaauggugcacgacggcgggaaagagacauggcauagcgcugccaccgccauuuauugccugaugggaucuggccagcuccugugggauacagugacgggggucgacaugacccuuuga

SEQ ID NO: 221056 - RNA, 1401 nt, Artificial Sequence; identical to SEQ ID NO: 221055
  derived and/or modified CDS sequence (opt5) from neuraminidase__InfluenzaB__AFH58473

SEQ ID NO: 221057 - RNA, 1401 nt, Artificial Sequence; identical to SEQ ID NO: 220889
  derived and/or modified CDS sequence (opt5) from neuraminidase__InfluenzaB__AFH58484

SEQ ID NO: 221058 - RNA, 1401 nt, Artificial Sequence; identical to SEQ ID NO: 220889
  derived and/or modified CDS sequence (opt5) from neuraminidase__InfluenzaB__AFH58495

SEQ ID NO: 221059 - RNA, 1401 nt, Artificial Sequence; identical to SEQ ID NO: 220889
  derived and/or modified CDS sequence (opt5) from neuraminidase__InfluenzaB__AFH58506

SEQ ID NO: 221060 - RNA, 1401 nt, Artificial Sequence
  derived and/or modified CDS sequence (opt5) from neuraminidase__InfluenzaB__AFH58517
augcugcccagcaccauccagacacucacgcuguuccuuaccuccggcggggugcugcucucucuguacgucagcgcccuucuguccuaucuccuguacucugacauucugcucaaguuuagcccuacagagaucaccgcuccgacaaugucccuggauugcgccaacgcgucuaauguucaagcugugaacagaagcgccaccaaaggagugacauuccuucugcccgaaccugaguggaccuauccccggcucuccuguccuggcagcacguuucagaaggcccugcuuauuucuccccaccgcuucggggaaaccaaaggaaauuccgcuccucugaucauuagagagccguuuaucgccugcggccccaacgaauguaagcauuucgcucucacacacuacgccgcgcagccugggggauauuacaauggcacccggggcgaccgcaacaaacugagacaucugaucagcgucaagcucgggaagauucccacaguggaaaauucuaucuuucacauggccgcuugguccggaagcgccugccaugauggcaaagaguggaccuauauugggguugacggaccugauaacgacgcucugcuuaaggugaaauacggcgaggccuacacggauacauaucacucuuacgcgaauaagauccugcggacccaggaguccgccuguaacugcauugggggaaauuguuaucucaugaucacagacggcagcgcuuccggcgucucugaaugccgcuuccugaaaauuagagaggggcggaucaucaaggagauuuuucccaccggacgcgugaagcacaccgaagaguguacaugcggcuucgccagcaacaaaacgaucgaaugugcuugcagagauaauuccuacaccgccaagcggccguuuguuaaacuuaacguggagacagacaccgccgaaauucgccugaugugcacagauaccuaucucgacacgccuagacccgaugacgggagcaucacaggaccuugugagucuaauggcgacaagggguccggaggcauuaaaggcggguucguccaucaacggauggagagcaagaucggacgcugguacucuagaaccaugagcaaaaccgaacggaugggcauggggcuguaugugaaguacgauggagaccccugggcugauuccgacgcgcuggccuuuucuggcgugauggucagcaugaaggagcccgggugguacuccuucggcuucgaaaucaaagauaagaaaugcgacguuccuuguauuggaaucgagauggugcacgauggcgggaaggaaacauggcauagcgcugccaccgccauuuauugccucaugggaucuggcagacugcuuugggacacagugacgggggucgauauggcucuguga

SEQ ID NO: 221061 - RNA, 1401 nt, Artificial Sequence; identical to SEQ ID NO: 220967
  derived and/or modified CDS sequence (opt5) from neuraminidase__InfluenzaB__AFH58528

SEQ ID NO: 221062 - RNA, 1401 nt, Artificial Sequence
  derived and/or modified CDS sequence (opt5) from neuraminidase__InfluenzaB__AFH58539
augcugcccagcaccgugcagacacucacgcugcuucugaccuccggcgggguccuccugucucuuuacguuagcgccucccugucuuaucuccuguacagcgacgugcugcucaaguucuccucuacaaaaaccacagcuccuaccaugagccuggagugcacaaacgccuccaaugcgcaaaccgugaaccacagcgcuacgaaggaaaugaccuuuccgcccccugagcccgaauggacauauccuagacuuucuugucagggauccaccuuccagaaagcccugcucaucagcccccaucgguuuggcgagauuaagggaaauucugccccucugaucauucgcgaaccguucgucgcuugcgggcccaaagaguguagacacuuugcccuuacacauuacgcugcccagccuggcggguauuacaacggaacccggaaggaucgcaauaagcugagacaccucguguccguuaaacugggcaagauccccacgguggagaacagcauuuuccauauggcggccuggucuggcuccgcuugccacgacgggcgggaauggacauauaucggagucgauggcccugacaaugaugcccuggugaaaaucaaguacggggaggcuuacaccgacacauaucacagcuacgcccauaacauucuccgcacccaagaauccgcguguaauugcaucggaggcgauuguuaucugaugauuaccgacgggucugccagcggaaucuccaaaugcagauuucuuaagauucgggagggccgcaucauuaaggagauccugcccacaggcagaguugaacacacggaggaauguaccugcggguucgcuagcaacaaaacaaucgagugugccugccgggauaauucuuacaccgcuaagcgcccguuugugaaacucaacgucgaaacagacaccgccgagauuagacugaugugcacgaagacauaucuugauaccccucggcccgacgauggauccaucgccggcccuugugagagcaauggggacaaauggcugggaggcauuaaagggggauucgugcaucagcgcauggcuucuaagaucggcagaugguacagccggaccauguccaagacaaacagaaugggcauggaacucuaugugaaguacgacggggaucccuggaccgacucugaugcgcugacacugagcggagucaugguuuccauugaggaacccggcugguacagcuuuggguucgagaucaaagacaagaaaugcgaugugccuuguaucggaauugaaauggugcacgacggcgggaaggauacguggcacucugccgcuaccgccaucuauugccucaugggcuccggacagcugcuuugggacacagccaccggcgucgauauggcucuguga

SEQ ID NO: 221063 - RNA, 1401 nt, Artificial Sequence
  derived and/or modified CDS sequence (opt5) from neuraminidase__InfluenzaB__AFH58550
augcugcccagcaccauccagacacucacgcuguuccuuaccuccggcggggugcugcucucucuguacgucagcgccucccuuucuuaucugcucuacagcgacauucugcugaaguuuuccccuacagagaucaccgcuccgacaaugccccucgauugcgccaacgcgucuaauguucaagcugugaacagaagcgccaccaaagaaaugacacugcuucugccugagcccgaauggaccuauccucggcucuccugucccggaagcacguuccagaaggcccugcuuauuucuccucaccgcuuuggcgagaccagaggaaauuccgcuccgcugacaauccgggaacccuucauugccugcgggccuaaagaguguaagcauuuugcucucacccacuacgccgcgcagcccggcggguauuacaacggaacacgcgaggacagaaauaaacugcggcaucugaucagcgugaagcucggcaagaucccuaccgucgaaaacucuauuuuccacauggccgcuugguccggcagcgccugccaugaugggcgcgaguggacguauaucggaguggacggccccgauucuaaugcucugauuaaaaucaaguacggggaagccuacacagacaccuaucacuccuacgcgaacaauauucuuagaacacaggagagcgccuguaacugcaucggaggcgauuguuaucugaugauuaccgacggguccgcuucuggaaucagcaaaugccgguuucucaagauccgcgagggcagaauuaucaaagaaauuuucccgaccggccggguugagcacacagaagaguguacgugcggguuugccuccaauaagaccaucgaaugugcuugccgcgauaacagcuacacagccaagagaccuuucgugaaacugaaugucgagaccgacacagccgagauucggcuuaugugcaccgaaacguaucuggauacaccccgcccugacgauggaucuaucaccggccccugugaguccaacggggacaagggaagaggcgggaucaaaggaggcuuugugcaucaacggauggcuagcaagauuggcagaugguacucucgcaccaugagcaaaacagaacggauggggauggagcucuauguuaaguacgacggagaucccuggaccgacuccgaagcgcuggccccuucuggcgugauggucagcauggaggagccggggugguacuccuucggauuugaaaucaaagauaagaagugcgacgugcccuguauuggcaucgagauggugcacgaugggggcaaaaagacauggcauagcgcugccacggccauuuauugccugaugggaucuggccagcuccugugggacaccgucacagggguugauauggcucuuuga

SEQ ID NO: 221064 - RNA, 1401 nt, Artificial Sequence; identical to SEQ ID NO: 221063
  derived and/or modified CDS sequence (opt5) from neuraminidase__InfluenzaB__AFH58561

SEQ ID NO: 221065 - RNA, 1401 nt, Artificial Sequence
  derived and/or modified CDS sequence (opt5) from neuraminidase__InfluenzaB__AFJ69969
augcugcccagcaccauccagacacucacgcuguuccuuaccuccggcggggugcugcucucucuguacgucagcgccucccuuucuuaucugcucuacagcgacauucugcugaaguuuuccccuacagagaucaccgcuccgacaaugccccucgauugcgccaacgcgucuaauguucaagcugugaacagaagcgccaccaaaggagugacacugcuucugccugaacccgaguggaccuauccucggcucuccugucccggcagcacguuccagaaggcccugcuuauuucuccucaccgcuuuggggaaaccaaaggaaauuccgcuccgcugaucauuagagagcccuucaucgccugcggcccuaacgaauguaagcauuuugcucucacacacuacgccgcgcagcccgggggauauuacaauggcacccggggcgaccgcaacaaacugagacaucugaucagcgucaagcucgggaagauuccuacaguggaaaauucuaucuuccacauggccgcuugguccggaagcgccugccaugauggcaaagaguggaccuauauugggguugacggacccgauaacaaugcucugcuuaaggugaaauacggcgaggccuacacggacacauaucacucuuacgcgaacaagauccugcggacccaggaguccgccuguaauugcauugggggaaacuguuaucucaugaucacagauggcagcgcuuccggcgucucugaaugccgcuuucugaaaauuagagaggggcggaucaucaaggagauuuucccgaccggacgcgugaagcacaccgaagaguguacaugcggcuuugccagcaauaaaacgaucgaaugugcuugcagagacaacuccuacaccgccaagcggccuuucguuaaacuuaauguggagacagauaccgccgaaauucgccugaugugcacagacaccuaucucgauacgcccagaccuaacgacgggagcaucacaggacccugugagucuaacggcgauaagggguccggaggcauuaaaggcggguuuguccaucaacggauggagagcaagaucggacgcugguacucuagaaccaugagcaaaaccgaacggaugggcauggggcuguaugugaaguacgacggagaccccuggacagauuccgacgcucuggcguucucuggcgugauggucagcaugaaggagccugggugguacuccuuuggcuucgaaaucaaagauaagaaaugcgacguuccguguauuggaaucgagauggugcacgauggcgggaaggaaaccuggcauagcgccgcuacagccauuuauugccucaugggaucuggccagcugcuuugggacacggugaccggggucgauauggcccuguga

SEQ ID NO: 221066 - RNA, 1401 nt, Artificial Sequence; identical to SEQ ID NO: 221028
  derived and/or modified CDS sequence (opt5) from neuraminidase__InfluenzaB__AFJ69971

SEQ ID NO: 221067 - RNA, 1401 nt, Artificial Sequence
  derived and/or modified CDS sequence (opt5) from neuraminidase__InfluenzaB__AFJ69973
augcugcccagcaccauccagaugcucacacuguuccuuacguccggcggggugcugcucucucuguacgucagcgccucccuuucuuaucugcucuacagcgacauucugcugaaguuuuccccuaccgagaucacagcuccgaccaugccccucgauugcgccaacgcgucuaauguucacgcugugaacagaagcgccacaaaaggagugaccuuccugcuuccugaacccgaguggacauauccucggcuguccugucccggcagcaccuuucaaaaggcccuccugauuucuccucaucgcuucggggaaacgaaaggaaauuccgcuccgcuuaucauuagagagcccuuuaucgccugcggcccuaacgaauguaagcacuucgcucugacccauuacgccgcgcagcccgggggauauuacaauggcacacggggcgaccgcaacaaacucagacaccugaucagcgucaagcuggggaagauuccuaccguggaaaauucuaucuuucauauggccgcuugguccggaagcgccugccacgauggcaaagaguggacauauauugggguugacggacccgauaacaaugcucuccugaagaucaaauacggcgaggccuacaccgacacguaucacucuuacgcgaacaauauucuucggacacaggaguccgccuguaacugcaucgggggaaauuguuaucugaugauuaccgauggcagcgcuuccggcgugucugccugccgcuuccucaagaucagagaagggcggaucauuaaagagaucuuuccgacaggacgcgucaagcauaccgaggaauguaccugcggcuucgcuagcaacaagacaauugagugugccugcagagacaauuccuacacggccaaacggccuuuugugaagcugaacguugaaaccgauacagcugagauccgccuuaugugcaccgacacauaucuggauacccccagaccugacgaugggagcauuacgggacccugugaaucuaacggcgacaaaggguccggaggcaucaagggcggguucgugcaccagcggauggcgagcaaaaucggacgcugguacucuagaacaaugagcaagaccgagcggaaaggcauggggcucuaugucaaguacgacggagaucccuggaccgacuccgaugcccuggcuuuuagaggcgugauggugucuaugaaggagccugggugguacagcuucggcuucgaaauuaaagacaagaaaugcgaugucccguguaucggaauugagaugguucaugacggcgggaaggaaacauggcacuccgccgccaccgcuaucuauugccugaugggaagcggccaacuccugugggauacagugacggggguggacauggcccuuuga

SEQ ID NO: 221068 - RNA, 1401 nt, Artificial Sequence; identical to SEQ ID NO: 220889
  derived and/or modified CDS sequence (opt5) from neuraminidase__InfluenzaB__AFJ69975

SEQ ID NO: 221069 - RNA, 1401 nt, Artificial Sequence
  derived and/or modified CDS sequence (opt5) from neuraminidase__InfluenzaB__AFJ69979
augcugcccagcaccauccagacacucacgcuguuccuuaccuccggcggggugcugcucucucuguacgucagcgccucccuuucuuaucugcucuacagcgacauucugcugaaguuuuccccuacagagaucaccgcuccgacaaugccccucgauugcgccaacaccucuaauguucaagcggugaaccacagcgcuacaaaaggagugacccugcuucugccugaacccgaguggacguauccuagacucuccugucccggcagcaccuuccagaaggcccugcuuauuucuccucaucgguuuggggaaacaaaaggaaauuccgccccgcugaucauucgcgagcccuucaucgcuugcggcccuaacgaauguaagcacuuugcccucacccauuacgcugcccagcccgggggauauuacaauggcacaagaggcgaccggaacaaacugcgccaccugaucagcgucaagcucgggaagauuccuaccguggaaaauucuaucuuccauauggcggccugguccggaagcgcuugccacgauggcaaagaguggacguauauugggguugacggacccgauaacaaugcccugcuuaaggugaaauacggcgaggcuuacacagacaccuaucacucuuacgccaacaagauccugagaacacaggaguccgcguguaauugcauugggggaaacuguuaucucaugaucaccgauggcagcgccuccggcgucucugaaugccgguuucugaaaauucgcgaggggagaaucaucaaggagauuuucccgaccggacgggugaagcauacagaagaguguacgugcggcuuugcuagcaauaaaaccaucgaaugugccugccgcgacaacuccuacacagcuaagagaccuuucguuaaacuuaauguggagaccgauacagccgaaauucggcugaugugcaccgacacguaucucgauacaccccgcccugacgaugggagcaucaccggacccugugagucuaacggcgacaagggguccggaggcauuaaaggcggguuuguccaccaaagaauggagagcaagaucggacggugguacucucgcaccaugagcaaaacagaaagaaugggcauggggcuguaugugaaguacgacggagaucccugggccgacuccgaugcucuggcguucucuggcgugauggucagcaugaaggagccugggugguacuccuuuggcuucgaaaucaaagacaagaaaugcgauguuccguguauuggaaucgagauggugcaugacggcgggaaggaaaccuggcacagcgccgcuacagccauuuauugccucaugggaucuggccagcugcuuugggauacggugaccggggucgacauggcccuguga

SEQ ID NO: 221070 - RNA, 1401 nt, Artificial Sequence; identical to SEQ ID NO: 221028
  derived and/or modified CDS sequence (opt5) from neuraminidase__InfluenzaB__AFJ69981

SEQ ID NO: 221071 - RNA, 1401 nt, Artificial Sequence
  derived and/or modified CDS sequence (opt5) from neuraminidase__InfluenzaB__AFJ69983
augcugcccagcaccauccagaugcucacacuguuccuuacguccggcggggugcugcucucucuguacgucagcgccucccuuucuuaucugcucuacagcgacauucugcugaaguuuuccccuaccgagaucacagcuccgaccaugccccucgauugcgccaacgcgucuaauguucacgcugugaacagaagcgccacaaaaggagugaccuuccugcuuccugaacccgaguggacauauccucggcuguccugucccggcagcaccuuucaaaaggcccuccugauuucuccucaucgcuucggggaaacgaaaggaaauuccgcuccgcuuaucauuagagagcccuuuaucgccugcggcccuaacgaauguaagcacuucgcucugacccauuacgccgcgcagcccgggggauauuacaauggcacacggggcgaccgcaacaaacucagacaccugaucagcgucaagcuggggaagauuccuaccguggaaaauucuaucuuucauauggccgcuugguccggaagcgccugccacgauggcaaagaguggacauauauugggguugacggacccgauaacaaugcucuccugaagaucaaauacggcgaggccuacaccgacacguaucacucuuacgcgaacaauauucuucggacacaggaguccgccuguaacugcaucgggggaaauuguuaucugaugauuaccgauggcagcgcuuccggcgugucugaaugccgcuuccucaagaucagagaggggcggaucauuaaagagauccugccgacaggacgcgucaagcauaccgaagaguguaccugcggcuuugccagcaacaagacaauugaaugugcuugcagagacaauuccuacacggccaaacggccuuucgugaaacuuaacguugagaccgauacagccgaaauccgccugaugugcaccgacacauaucucgauacccccagaccugacgaugggagcauuacgggacccugugagucuaacggcgggaagggauccggcggcaucaaagggggauuugugcaccagcggauggcuagcaagaucggccgcugguacucuagaacaaugagcaagaccgagcggaaagggaugggacuguaugucaaguacgacggcgaccccuggaccgauuccgacgcgcuggccuucagaggggugauggugucuaugaaggaaccuggcugguacagcuuuggauucgagauuaaagauaagaaaugcgacgucccguguaucggcauugaaaugguucaugaugggggaaaggagacauggcacuccgcugccaccgccaucuauugccucaugggcagcgggcaacugcuuugggacacagugacgggaguggauauggcucuguga

SEQ ID NO: 221072 - RNA, 1401 nt, Artificial Sequence
  derived and/or modified CDS sequence (opt5) from neuraminidase__InfluenzaB__AFJ69987
augcugcccagcaccauccagacacucacgcuguuccuuaccuccggcggggugcugcucucucuguacgucagcgccucccuuucuuaucugcucuacagcgacauucugcugaaguuuuccccuacagagaucaccgcuccgacaaugccccucgauugcgccaacgcgucuaauguucaagcugugaacagaagcgccaccaaaggagugacacugcuucugccugaacccgaguggaccuauccucggcucuccugucccggcagcacguuccagaaggcccugcuuauuucuccucaccgcuuuggggaaaccaaaggaaauuccgcuccgcugaucauuagagagcccuucaucgccugcggcccuaacgaauguaagcauuuugcucucacacacuacgccgcgcagcccgggggauauuacaauggcacccggggcgaccgcaacaaacugagacaucugaucagcgucaagcucgggaagauuccuacaguggaaaauucuaucuuccacauggccgcuugguccggaagcgccugccaugauggcaaagaguggaccuauauugggguugacggacccgauaacaaugcucugcuuaaggugaaauacggcgaggccuacacggacacauaucacucuuacgcgaacaagauccugcggacccaggaguccgccuguaauugcauugggggaaacuguuaucucaugaucacagauggcagcgcuuccggcgucucugaaugccgcuuucugaaaauuagagaggggcggaucaucaaggagauuuucccgaccggacgcgugaagcacaccgaagaguguacaugcggcuuugccagcaauaaaacgaucgaaugugcuugcagagacaaccgguacaccgccaagcgcccuuucguuaaacuuaauguggagacagauaccgccgaaauuagacugaugugcacagacaccuaucucgauacgccccggccuaacgacggguccaucacaggacccugugagagcgauggcgacaaggggucuggaggcaccaaaggcggguuuguccaucaacgcaugaaguccaaaauuggaagaugguacagccggaccaugucuaagacagagagaaugggcauggggcuguaugugaaguacgacggagaucccugggcugacagcgaugcgcugaccuucuccggcgugauggucucuaugaaagaaccugggugguacagcuuuggcuucgagaucaaggacaaaaagugcgauguuccguguaucggaauugaaauggugcacgacggcgggaaagagacauggcauuccgccgcuacggccaucuauugccucaugggaagcggccagcugcuuugggauaccgugacaggggucgacauggcccuguga

SEQ ID NO: 221073 - RNA, 1401 nt, Artificial Sequence
  derived and/or modified CDS sequence (opt5) from neuraminidase__InfluenzaB__AFJ76228
augcugcccagcaccauccagacacucacgcuguuccuuaccuccggcggggugcugcucucucuguacgucagcgccucccuuucuuaucugcucuacagcggcauucugcugaaguuuuccccuacagagaucaccgcuccgacaaugccccucaacugcgccaaugcgucuaacguucaagcugugaauagaagcgccaccaaaggagugacacugcuucugccugaacccgaguggaccuauccucggcucuccugucccgggagcacguuccagaaggcccugcuuauuucuccucaccgcuuuggagaaaccaaaggcaacuccgcuccgcugaucauuagagagcccuucaucgccugcgggccuaaggaauguaaacauuuugcucucacacacuacgccgcgcagcccggaggcuauuacaauggcacccgggaggaccgcaacaagcugagacaucugaucagcgucaagcucgggaaaauuccuacaguggaaaauucuaucuuccacauggccgcuugguccggaagcgccugccaugauggccgggaauggaccuauauugggguugacggacccgauucuaacgcucugcuuaagaucaaauacggcgaggccuacacggacacauaucacuccuacgcgaauaacauucugcgcacccaggaaagcgccuguaauugcaucgggggagauuguuaucucaugauuacagacggcuccgcuucuggcaucagcgagugcagauuucugaagauccgggaggggcgcauuaucaaagaaauuuucccgaccggaagaguggagcacaccgaagaguguacaugcggcuuugccuccaacaagacgaucgaaugugcuugccgggauaauagcuacaccgccaagcgcccuuucgucaaacuuaacguggagacagacaccgccgagauuagacugaugugcacagaaaccuaucucgauacgccccggccugacgaugggucuaucacaggacccugugaguccaauggcgacaaggggagcggaggcaucaaaggcggguuuguucaucaacgcauggcuucuaagauuggaagaugguacagccggaccauguccaaaaccaagagaaugggcauggggcuguaugugaaauacgauggagaccccuggaucgacucugaugcgcugacacucagcggcgucaugguguccauggaggagccugggugguacagcuucggcuuugaaauuaaggacaagaaaugcgaugugccguguaucggaauugagaugguccacgacggcgggaagaaaaccuggcauucugccgcuacagccaucuauugccugaugggauccggccagcuucugugggauacgguuaccgggguggacauggcccucuga

SEQ ID NO: 221074 - RNA, 1401 nt, Artificial Sequence; identical to SEQ ID NO: 220740
  derived and/or modified CDS sequence (opt5) from neuraminidase__InfluenzaB__AFJ76261

SEQ ID NO: 221075 - RNA, 1401 nt, Artificial Sequence
  derived and/or modified CDS sequence (opt5) from neuraminidase__InfluenzaB__AFJ76283
augcugcccagcaccauccagacacucacgcuguuccuuaccuccggcggggugcugcucucucuguacgucagcgccucccuuucuuaucugcucuacagcgacauucugcugaaguuuccuccgacagagaucaccgcucccacaaugccucucgauugcgccaacgcguccaauguucaagcugugaacagaucugccaccaaaggagugacacugcuucugcccgaaccugaguggaccuauccccggcucagcuguccuggcuccacguuccagaaggcccugcuuauuagcccgcaccgcuuuggggaaaccaaaggaaauucugcuccccugaucauuagagagccuuucaucgccugcggccccaaggaauguaaacauuuugcucucacacacuacgccgcgcagccugggggauauuacaacggcacccggggcgaccgcaauaagcugagacaucugaucuccgucaagcucgggaaaauucccacaguggagaacagcaucuuccacauggccgcuuggucuggauccgccugccaugauggcaaggaguggaccuauauugggguugacggaccggauaauaacgcucugcuuaaaaucaaguacggcgaagccuacacggacacauaucacagcuacgcgaauaacauucugcggacccaggagucugccuguaauugcaucgggggaaacuguuaucucaugauuacagauggcuccgcuagcggcguguccgaaugccgcuuucugaaaaucagagaggggcggaucauuaaggagaucuucccuaccggacgcauuaagcacaccgaagaguguacaugcggcuuugccucuaauaaaacgaucgaaugugcuugcagagacaacagcuacaccgccaagcggcccuucgucaaacuuaauguggagacagauaccgccgaaauucgccugaugugcacagagaccuaucucgacacgccuagacccgaugacggguccaucacaggacccugugagagcaacggcgauaaggggucuggaggcaucaaaggcggguuuguucaucaacggauggcuuccaagauuggacgcugguacagcagaaccaugucuaaaaccgaacggaugggcauggggcuguaugugaaguacgacggagacccuugggcggauagcgacgcccugacauucuccggcgucauggugucuauggaggaaccggggugguacagcuuuggcuucgagaucaaggauaaaaagugcgacgugcccuguauuggaaucgaaaugguccacgauggcgggaaagagaccuggcauuccgcugccacagccauuuauugccucaugggaagcggccagcugcuuugggacacgguuaccggggugaacauggcucuguga

SEQ ID NO: 221076 - RNA, 1401 nt, Artificial Sequence
  derived and/or modified CDS sequence (opt5) from neuraminidase__InfluenzaB__AFJ76305
augcugcccagcaccauccagacacucacgcuguuccuuaccuccggcggggugcugcucucucuguacgucagcgccucccuuucuuaucugcucuacagcgacauucugcugaaguuuccuuccacagagaucaccgcuccgacaaugccccucgauugcgccaacgcgucuaauguucaagcugugaacagaagcgccaccaaaggagugacacugcuucugccugaacccgaguggaccuauccucggcucuccugucccggcagcacguuccagcgcgcccugcuuauuucuccucacagauuuggggaaaccaagggaaauuccgcuccgcugaucauucgggagcccuucaucgccugcggcccuaaagaauguaagcauuuugcucucacacacuacgccgcgcagcccgggggauauuacaacggcacccgcggcgacagaaauaaacugcggcaucugaucagcgucaagcucgggaagauuccuacaguggagaacucuaucuuccacauggccgcuugguccggaagcgccugccaugauggcaaagaguggaccuauauugggguugacggacccgauaauaacgcucugcuuaagaucaaauacggcgaagccuacacggacacauaucacucuuacgcgaauaacauucugcgcacccaggaguccgccuguaauugcaucgggggaaacuguuaucucaugauuacagauggcagcgcuuccggcgugucugaaugcagauuucugaagauccgggaggggcgcaucauuaaagagaucuucccgaccggaagaauuaagcacaccgaagaguguacaugcggcuuugccagcaauaagacgaucgaaugugcuugccgggacaacuccuacaccgccaaacgcccuuucgucaaacuuaauguggagacagauaccgccgaaauuagacugaugugcacagagaccuaucucgacacgccccggccugaugacgggagcaucacaggacccugugagucuaacggcgauaagggguccggaggcaucaagggcggguuuguucaucaacgcauggcuagcaaaauuggaagaugguacucucggaccaugagcaagaccgaaagaaugggcauggggcuguaugugaaauacgacggagaccccugggcggauuccgacgcccugacauucucuggcgucauggugagcauggaggaaccugggugguacuccuuuggcuucgagaucaaggauaagaaaugcgacgugccguguauuggaaucgaaaugguccacgauggcgggaaggagaccuggcauagcgcugccacagccauuuauugccucaugggaucuggccagcugcuuugggacacgguuaccgggguggauauggcucuguga

SEQ ID NO: 221077 - RNA, 1401 nt, Artificial Sequence
  derived and/or modified CDS sequence (opt5) from neuraminidase__InfluenzaB__AFJ76316
augcugcccagcaccauccagacacucacgcuguuccuuaccuccggcggggugcugcucucucuguacgucagcgccucccuuucuuaucugcucuacagcgacauucugcugaaguuuccuuccacagagaucaccgcuccgacaaugccccucgauugcgccaacgcgucuaauguucaagcugugaacagaagcgccaccaaaggagugacacugcuucugccugaacccgaguggaccuauccucggcucuccugucccggcagcacguuccagaaggcccugcuuauuucuccucaccgcuuuggggaaaccaaaggaaauuccgcuccgcugaucauuagagagcccuucaucgccugcggcccuaaggaauguaaacauuuugcucucacacacuacgccgcgcagcccgggggauauuacaacggcacccggggcgaccgcaauaagcugagacaucugaucagcgucaagcucgggaaaauuccuacaguggagaacucuaucuuccacauggccgcuugguccggaagcgccugccaugauggcaaggaguggaccuauauugggguugacggacccgauaauaacgcucugcuuaaaaucaaguacggcgaagccuacacggacacauaucacucuuacgcgaauaacauucugcggacccaggaguccgccuguaauugcaucgggggaaacuguuaucucaugauuacagauggcagcgcuuccggcgugucugaaugccgcuuucugaaaaucagagaggggcggaucauuaaggagaucuucccgaccggacgcauuaagcacaccgaagaguguacaugcggcuuugccagcaauaaaacgaucgaaugugcuugcagagacaacuccuacaccgccaagcggccuuucgucaaacuuaauguggagacagauaccgccgaaauucgccugaugugcacagagaccuaucucgacacgcccagaccugaugacgggagcaucacaggacccugugagucuaacggcgauaagggguccggaggcaucaaaggcggguuuguucaucaacggauggcuagcaagauuggacgcugguacucuagaaccaugagcaaaaccgaacggaugggcauggggcuguaugugaaguacgacggagaccccugggcggauuccgacgcccugacauucucuggcgucauggugagcauggaggaaccugggugguacuccuuuggcuucgagaucaaggauaaaaagugcgacgugccguguauuggaaucgaaaugguccacgauggcgggaaagagaccuggcauagcgcugccacagccauuuauugccucaugggaucuggccagcugcuuugggacacgguuaccggggugaacauggcucuguga

SEQ ID NO: 221078 - RNA, 1401 nt, Artificial Sequence; identical to SEQ ID NO: 220740
  derived and/or modified CDS sequence (opt5) from neuraminidase__InfluenzaB__AFJ76338

SEQ ID NO: 221079 - RNA, 1401 nt, Artificial Sequence
  derived and/or modified CDS sequence (opt5) from neuraminidase__InfluenzaB__AFJ77331
augcugcccagcaccauccagacacucacgcuguuccuuaccuccggcggggugcugcucucucuguacgucagcgccucccuuucuuaucugcucuacagcgacauucugcugaaguuuucccaaacagagaucaccgcuccuauuaugccgcucgauugcgccaacgcgucuaauguucaggcugugaaccacagcgccgccaaaggagugacacugcuucugcccgaaccugaguggaccuaucccagacucuccuguccuggcagcacauuccagaaggcucugcuuaucucuccccaucgguuuggggaaaccaaaggaaauuccgccccucugauuauccgcgagccguucaucgcuugcggccccacggaauguaagcacuuugcccucacccauuacgcggcccagccugggggauauuacaacggcacaagagaggaccggaauaaacugcgccaccugauuagcgucaagcucggcaagauccccaccguggagaacucuauuuuccauauggcugccugguccgggagcgcuugccacgauggaaaagaauggacauauaucggcguugacgggccugauucuaaugcccugcuuaagauuaaauacggagaggcguacaccgacacguaucacuccuacgccaagaacauccugagaacacaagaaagcgcuuauaauuguauuggcggggauugcuaccucaugaucaccgacggacccgccuccggcaucucugagugucgguuucugaaaauucgcgagggcagaaucauuaaggaaaucuucccgacagggcgggugaagcauaccgaggaaugcaccuguggauuugcuagcaacaaaacaauugagugcgccugucgcgauaauuccuauacggccaagagaccuuucgucaaacuuaacguggaaaccgacacagcugagauccggcugaugugcaccgagacauaccucgauacgccccgcccuaaugacggcagcaucaccgggcccugcgaaucugauggagacaagggcuccgggggaauuaaaggcggcuuuguucaccagagaauggcgagcaagaucgggcggugguauucucgcacaaugagcaaaaccaagagaaugggaaugggccuguacgugaaguacgacggggaucccuggaccgacuccgaggcccuggcucucucuggagucauggugagcauggaggaaccuggcugguauuccuucggguuugaaauuaaagauaagaaaugugacgugccgugcaucggcauugagaugguccaugauggaggcaagacaaccuggcacagcgccgccacagcuaucuacugucugauggggucuggacagcuucugugggacacgguuaccggcguggauauggcccucuga

SEQ ID NO: 221080 - RNA, 1401 nt, Artificial Sequence; identical to SEQ ID NO: 220815
  derived and/or modified CDS sequence (opt5) from neuraminidase__InfluenzaB__AFJ77351

SEQ ID NO: 221081 - RNA, 1401 nt, Artificial Sequence; identical to SEQ ID NO: 220707
  derived and/or modified CDS sequence (opt5) from neuraminidase__InfluenzaB__AFJ77362

SEQ ID NO: 221082 - RNA, 1401 nt, Artificial Sequence; identical to SEQ ID NO: 220860
  derived and/or modified CDS sequence (opt5) from neuraminidase__InfluenzaB__AFJ77384

SEQ ID NO: 221083 - RNA, 1401 nt, Artificial Sequence; identical to SEQ ID NO: 220782
  derived and/or modified CDS sequence (opt5) from neuraminidase__InfluenzaB__AFJ80132

SEQ ID NO: 221084 - RNA, 1401 nt, Artificial Sequence
  derived and/or modified CDS sequence (opt5) from neuraminidase__InfluenzaB__AFJ80143
augcugcccagcaccauccagacacucacgcuguuccuuaccuccggcggggugcugcucucucuguacgucagcgccucccuuucuuaucugcucuacagcgacauucugcugaaguuuuccccuacagagaucaccgcuccgacaaugccccucgauugcgccaacgcgucuaauguucaagcugugaacagaagcgccaccaaaggagugacacugcuucugccugaacccgaguggaccuauccucggcucuccugucccggcagcacguuccagaaggcccugcuuauuucuccucaccgcuuuggggaaaccaaaggaaauuccgcuccgcugaucauuagagagcccuucaucgccugcggcccuaaggaauguaaacauuuugcucucacacacuacgccgcgcagcccgggggauauuacaacggcacccgggaggaccgcaauaagcugagacaucugaucagcgucaagcucggcaaaauuccuacaguggagaacucuaucuuccacauggccgcuugguccgggagcgccugccaugauggacgggaauggaccuauauuggcguugacgggcccgauucuaaugcucugcuuaagaucaaauacggagaggccuacacggacacauaucacuccuacgcgaacaauauucugcgcacccaggaaagcgccuguaacugcaucggcgggaauuguuaucucaugauuacagauggauccgcuucuggcaucagcgagugcagauuucugaagauccgggagggccgcauuaucaaagaaauuuucccgaccgggagaguggagcacaccgaagaguguacaugcggauuugccuccaacaagacgaucgaaugugcuugccgggacaauagcuacaccgccaagcgcccuuucgucaaacuuaacguggagacagauaccgccgagauuagacugaugugcacagaaaccuaucucgacacgccccggccugaugacggcucuaucacagggcccugugaguccaauggagauaagggcagcgggggaaucaaaggcggcuuuguucaucaacgcauggcuucuaagauugggagaugguacagccggaccauguccaaaaccaagagaaugggaaugggccuguaugugaaauacgacggggaccccuggacagauucugacgcgcuggcccucagcggagucaugguguccauggaggaaccuggcugguacagcuucggguuugaaaucaaggauaagaaaugcgacgugccguguauuggcaucgagaugguccacgauggaggcaagaaaaccuggcauucugcugccacagccauuuauugccugaugggguccggacagcuucugugggacacgguuaccggcguggauauggcucucuga

SEQ ID NO: 221085 - RNA, 1401 nt, Artificial Sequence
  derived and/or modified CDS sequence (opt5) from neuraminidase__InfluenzaB__AFJ80154
augcugcccagcaccauccagacacucacgcuguuccuuaccuccggcggggugcugcucucucuguacgucagcgccucccuuucuuaucugcucuacagcgacauucugcugaaguuuuccccuacagagaucaccgcuccgacaaugccccucgauugcgccaacgcgucuaauguucaagcugugaacagaagcgccaccaaaggagugacacugcuucugccugaacccgaguggaccuauccucggcucuccugucccggcagcacguuccagaaggccauucugaucucuccucaccgcuuuggggaaaccaaaggaaauuccgcuccgcuuauuaucagagagcccuucaucgccugcggcccuaaggaauguaaacauuuugcucugacacacuacgccgcgcagcccgggggauauuacaacggcacccgggaggaccgcaauaagcucagacaucugauuagcgucaagcugggcaaaaucccuacaguggagaacucuauuuuccacauggccgcuugguccgggagcgccugccaugauggacgggaauggaccuauaucggcguugacgggcccgauucuaaugcucuccugaagauuaaauacggagaggccuacacggacacauaucacuccuacgcgaacaauauccuucgcacccaggaaagcgccuguaacugcauuggcgggaauuguuaucugaugaucacagauggauccgcuucuggcaucagcgagugcagauuucucaagauucgggagggccgcaucauuaaagaaaucuucccgaccgggagaguggagcacaccgaagaguguacaugcggauuugccuccaacaagacgauugaaugugcuugccgggacaauagcuacaccgccaagcgcccuuucgucaaacugaacguggagacagauaccgccgagaucagacuuaugugcacagaaaccuaucuggacacgccccggccugaugacggcucuaucacagggcccugugaguccaauggagauaagggcagcgggggaauuaaaggcggcuuuguucaucaacgcauggcuucuaagaucgggagaugguacagccggaccauguccaaaaccaagagaaugggaaugggccucuaugugaaauacgacggggaccccuggacagauucugacgcgcuggcccugagcggagucaugguguccauggaggaaccuggcugguacagcuucggguuugaaauuaaggauaagaaaugcgacgugccguguaucggcauugagaugguccacgauggaggcaagaaaaccuggcauucugcugccacagccaucuauugccucaugggguccggacagcugcuuugggacacgguuaccggcguggauauggcucuguga

SEQ ID NO: 221086 - RNA, 1401 nt, Artificial Sequence
  derived and/or modified CDS sequence (opt5) from neuraminidase__InfluenzaB__AFJ80165
augcugcccagcaccauccagacacucacgcuguuccuuaccuccggcggggugcugcucucucuguacgucagcgccucccuuucuuaucugcucuacagcgacauucugcugaaguuuuccccuacagagaucaccgcuccgacaauuccccucgauugcgccaacgcgucuaauguucaagcugugaacagaagcgccaccaaaggagugacacugcuucugccugaacccgaguggaccuauccucggcucuccugucccggcagcacguuccagaaggcccugcuuaucucuccucaccgcuuuggggaaauuaaaggaaauuccgcuccgcugaucaucagagagcccuucauugccugcggcccuaaggaauguaaacauuuugcucucacccacuacgccgcgcagcccgggggauauuacaacggcacacgggaggaccgcaauaagcugagacaucugaucagcgucaagcucggcaaaauuccuaccguggagaacucuaucuuccacauggccgcuugguccgggagcgccugccaugauggaaaggaauggacauauauuggcguugacgggcccgauucuaaugcucugcuuaaaaucaaguacggagaggccuacaccgacacguaucacuccuacgcgaacaauauucugcggacacaggaaagcgccuguaacugcaucggcgggaauuguuaucucaugaucaccgauggauccgcuucuggcauuagcgagugccgcuuucugaaaaucagagagggccggauuaucaaggaaauuuucccgacagggcgcguggagcacaccgaagaguguaccugcggauuugccuccaacaagacaaucgaaugugcuugcagagacaauagcuacacggccaaacggccuuucgucaaacuuaacguggagaccgauacagccgagauccgccugaugugcaccgaaacauaucucgacacccccagaccugaugacggcucuauuacggggcccugugaguccaauggagauaagggcagcgggggaaucaagggcggcuuuguucaucaacggauggcuucuaaaauugggcgcugguacagcagaacaauguccaagaccaaacggaugggaaugggccuguaugugaaguacgacggggaccccuggaccgauucugacgcgcuggcccucagcggagucaugguguccauggaggaaccuggcugguacagcuucggguuugaaaucaaggauaaaaagugcgacauuccguguaucggcaucgagauggugcacgauggaggcaaagagacauggcauucugcugccaccgccauuuauugccugaugggguccggacagcuucugugggacacagucacgggcguugauauggcucucuga

SEQ ID NO: 221087 - RNA, 1401 nt, Artificial Sequence
  derived and/or modified CDS sequence (opt5) from neuraminidase__InfluenzaB__AFJ80176
augcugcccagcaccauccagacacucacgcuguuccuuaccuccggcggggugcugcucucucuguacgucagcgccucccuuucuuaucugcucuacagcgacauucugcugaaguuuuccccuacagagaucaccguuccgacaaugccccucgauugcgcuaacgccucuaaugugcaagcggugaacagaagcgcuaccaaaggagucacacugcuucugccugaacccgaguggaccuauccucggcucuccugucccggcagcacguuccagaaggcccugcuuauuucuccucaccgcuuuggggaaaccaaaggaaauuccgccccgcugaucauuagagagcccuucaucgcuugcggcccuaaggaauguaaacauuuugcccucacacacuacgcugcccagcccgggggauauuacaacggcacccgggaggaccgcaauaagcugagacaucugaucagcgugaagcucggcaaaauuccuacaguugagaacucuaucuuccacauggcggccugguccgggagcgcuugccaugauggacgggaauggaccuauauuggcguggacgggcccgauucuaaugcccugcuuaagaucaaauacggagaggcuuacacggacacauaucacuccuacgccaacaauauucugcgcacccaggaaagcgcguguaacugcaucggcgggaauuguuaucucaugauuacagauggauccgccucuggcaucagcgagugcagauuucugaagauccgggagggccgcauuaucaaagaaauuuucccgaccgggagagucgagcacaccgaagaguguacaugcggauuugcuuccaacaagacgaucgaaugugccugccgggacaauagcuacaccgcuaagcgcccuuucgugaaacuuaacguugagacagauaccgccgagauuagacugaugugcacagaaaccuaucucgacacgccccggccugaugacggcucuaucacagggcccugugaguccaauggagauaagggcagcgggggaaucaaaggcggcuuugugcaucaacgcauggccucuaagauugggagaugguacagccggaccauguccaaaaccaagagaaugggaaugggccuguaugucaaauacgacggggaccccuggacagauucugacgcucuggcgcucagcggagugaugguguccauggaggaaccuggcugguacagcuucggguuugaaaucaaggauaagaaaugcgacgucccguguauuggcaucgagaugguucacgauggaggcaagaaaaccuggcauucugccgcuacagccauuuauugccugaugggguccggacagcuucugugggacacggugaccggcguggauauggcccucuga

SEQ ID NO: 221088 - RNA, 1401 nt, Artificial Sequence
  derived and/or modified CDS sequence (opt5) from neuraminidase__InfluenzaB__AFJ80187
augcugcccagcaccauccagacacucacgcuguuccuuaccuccggcggggugcugcucucucuguacgucagcgccucccuuucuuaucugcucuacagcggcauucugcugaaguuuuccccuacagagaucaccgcuccgacaaugccccucaacugcgccaaugcgucuaacuuccaagcuguuaauagaagcgccaccaaaggagugacacugcuucugccugaacccgaguggaccuauccucggcucuccugucccgggagcacguuucagaaggcccugcuuauuucuccucaccgcuucggagaaaccaaaggcaacuccgcuccgcugaucauuagagagcccuuuaucgccugcgggccuaaggaauguaaacauuucgcucucacacacuacgccgcgcagcccggaggcuauuacaauggcacccgggaggaccgcaacaagcugagacaucugaucagcgugaagcucgggaaaauuccuacagucgaaaauucuaucuuucacauggccgcuugguccggaagcgccugccaugauggccgggaauggaccuauauugggguggacggacccgauucuaacgcucugcuuaagaucaaauacggcgaggccuacacggacacauaucacuccuacgcgaauaacauucugcgcacccaggaaagcgccuguaauugcaucgggggagauuguuaucucaugauuacagacggcuccgcuucuggcaucagcgagugcagauuccugaagauccgggaggggcgcauuaucaaagaaauuuuuccgaccggaagaguugagcacaccgaagaguguacaugcggcuucgccuccaacaagacgaucgaaugugcuugccgggauaauagcuacaccgccaagcgcccuuuugugaaacuuaacgucgagacagacaccgccgagauuagacugaugugcacagaaaccuaucucgauacgccccggccugacgaugggucuaucacaggacccugugaguccaauggcgacaaggggagcggaggcaucaaaggcggguucgugcaucaacgcauggcuucuaagauuggaagaugguacagccggaccauguccaaaaccaagagaaugggcauggggcuguauguuaaauacgauggagaccccuggaucgacucugaugcgcugacacucagcggcgugauggucuccauggaggagccugggugguacagcuuuggcuucgaaauuaaggacaagaaaugcgaugugccguguaucggaauugagauggugcacgacggcgggaagaaaaccuggcauucugccgcuacagccaucuauugccugaugggauccggccagcuucugugggauacggucaccgggguugacauggcccucuga

SEQ ID NO: 221089 - RNA, 1401 nt, Artificial Sequence; identical to SEQ ID NO: 221084
  derived and/or modified CDS sequence (opt5) from neuraminidase__InfluenzaB__AFJ80198

SEQ ID NO: 221090 - RNA, 1401 nt, Artificial Sequence; identical to SEQ ID NO: 220712
  derived and/or modified CDS sequence (opt5) from neuraminidase__InfluenzaB__AFJ80220

SEQ ID NO: 221091 - RNA, 1401 nt, Artificial Sequence
  derived and/or modified CDS sequence (opt5) from neuraminidase__InfluenzaB__AFJ80231
augcugcccagcaccauccagacacucacgcuguuccuuaccuccggcggggugcugcucucucuguacgucagcgccucccuuucuuaucugcucuacagcggcauucugcugaaguuuucccucacagagaucaccgcuccuacaaugccgcugaacugcgccaaugcgucuaacguucaagcugugaauagaagcgccaccaaaggagugacacuuuuccugcccgaaccugaguggaccuauccccggcucuccuguccugggagcacguuucagaaggcccugcuuauuucuccccaccgcuucggagaaaccaaaggcaacuccgcuccucugaucauuagagagccguuuaucgccugcgggcccaaggaauguaaacauuucgcucucacacacuacgccgcgcagccuggaggcuauuacaauggcacccgggaggaccgcaacaagcugagacaucugaucagcgucgagcucgggaagauucccacaguggaaaauucuaucuuucacauggccgcuugguccggaagcgccugccaugauggcaaagaguggaccuauauugggguugacggaccugauucuaacgcucugcuuaagaucaaauacggcgaagccuacacggacacauaucacuccuacgcgaauaacauucugcggacccaggagagcgccuguaauugcaucgggggagauuguuaucucaugauuacagacggcuccgcuucuggcaucagcgagugccgcuuccugaagaucagagaagggcggauuaucaaagagauuuuucccaccggacgcguggaacacaccgaggaauguacaugcggcuucgccuccaacaagacgaucgagugugcuugcagagauaauagcuacaccgccaagcggccguuugucaaacuuaacguggagacagacaccgccgaaauucgccugaugugcacagagaccuaucucgauacgccuagacccgacgaugggucuaucacaggaccuugugaauccaauggcgacaaggggagcggaggcaucaaaggcggguucguucaucaacggauggcuucuaagauuggacgcugguacagcagaaccauguccaaaaccaagcggaugggcauggggcuguaugugaaauacgauggagaccccuggaucgacucugaugcgcugacacucagcggcgucaugguguccauggaggaacccgggugguacagcuuuggcuucgagauuaaggacaagaaaugcgaugugccuuguaucggaauugagaugguccacgacggcgggaagaaaaccuggcauucugccgcuacagccaucuauugccugaugggauccggccagcuucugugggauacgguuaccgggguggacauggcccucuga

SEQ ID NO: 221092 - RNA, 1401 nt, Artificial Sequence
  derived and/or modified CDS sequence (opt5) from neuraminidase__InfluenzaB__AFJ80242
augcugcccagcaccauccagacacucacgcuguuccuuaccuccggcggggugcugcucucucuguacgucagcgcccuucuguccuaucuccuguacucugacauucugcucaaguuuagcccuacaaaaguuaucgcuccgaccaugucccuggauugcgccaacgcgucuaaugugcaagcugugaaccacagcgccacagaggaaaugaccuuccuucugcccgagccugaauggacauaucccagacucuccugucagggaagcaccuuucagaaggcccugcuuauuucuccucaucgguucggcgaggcuaaaggaaauuccgcuccccugaucauucgcgaaccuuuuaucgccugcgggccgaaggaguguaaacacuucgcccucacgcauuacgcggcccagcccggcggguauuacaacggaaccagagaggaccggaauaagcugcgccaccugaucagcgucaaccucggcaagauuccuacaguggaaaauucuaucuuucauauggcugccugguccggcagcgcuugccacgaugggagagaguggaccuauauuggaguugacggccccgauucuaacgcccugaucaaaauuaaguacggggaagcguacacagacaccuaucacuccuacgccaauaacauccuucggacgcaagagagcgcuuguaauugcauuggaggcgauuguuaucugaugaucacagacggguccgccucuggaaucagccgcugcagauuccucaaaauucgggagggccgcaucauuaaggaaaucuuuccuaccggcagaguggagcauacagaagaguguaccugcggguucgcuuccaacaaaaccauugaaugugccugccgggauaauagcuacacagccaagcgccccuuugucaagcugaacguggagacggacaccgcugagaucagacuuaugugcacagaaaccuaucuggauacaccgcggccugacgauggaucuaucaccggccccugugaguccaauggggacaaaggaaacggcgggauuaagggaggcuucguucaccagcgcauggcgagcagaaucggccggugguacucuagaacgaugagcaaaacaaagcgcauggggauggaacucuaugugaaauacgacggagauccuuggaccgacuccgaugcccuggcucccucuggcgucauggugagcauggaggaacccgggugguacuccuuuggauucgagauuaaggacaaaaagugcgaugugccuuguaucggcauugagaugguccaugacgggggcaagaccacauggcacagcgccgccaccgcuaucuauugccugaugggaucuggccagcuccugugggauacaguuacggggguggacauggcccuuuga

SEQ ID NO: 221093 - RNA, 1401 nt, Artificial Sequence
  derived and/or modified CDS sequence (opt5) from neuraminidase__InfluenzaB__AFJ80660
augcugcccagcaccauccagacacucacgcuguuccuuaccuccggcggggugcugcucucucuguacgucagcgccucccuuucuuaucugcucuacagcgacauucugcugaaguuuuccccuacagagaucaccgcuccgacaaugccccucgauugcgccaacgcgucuaauguucaagcugugaacagaagcgccaccaaaggagugacacugcuucugccugaacccgaguggaccuauccucggcucuccugucccggcagcacguuccagaaggcccugcuuauuucuccucaccgcuuuggggaaaccaaaggaaauuccgcuccgcugaucauuagagagcccuucaucgccugcggcccuaaggaauguaaacauuuugcucucacacacuacgccgcgcagcccgggggauauuacaacggcacccgggaggaccgcaauaagcugagacaucugaucagcgucaagcucggcaaaauuccuacaguggagaacucuaucuuccacauggccgcuugguccgggagcgccugccaugauggacgggaauggaccuauauuggcguugacgggcccgauucuaaugcucugcuuaagaucaaauacggagaggccuacacggacacauaucacuccuacgcgaacaauauucugcgcacccaggaaagcgccuguaacugcaucggcggggauuguuaucucaugauuacagacggauccgcuucuggcaucagcgagugcagauuucugaagauccgggagggccgcauuaucaaagaaauuuucccgaccgggagaguggagcacaccgaagaguguacaugcggauuugccuccaauaagacgaucgaaugugcuugccgggauaacagcuacaccgccaagcgcccuuucgucaaacuuaauguggagacagacaccgccgagauuagacugaugugcacagaaaccuaucucgauacgccccggccugacgauggcucuaucacagggcccugugaguccaacggagacaagggcagcgggggaaucaaaggcggcuuuguucaucaacgcaugaccucuaagauugggagaugguacagccggaccauguccaaaacaaagagaaugggaaugggccuguaugugaaauacgacggggaucccuggaccgacucugaugcucuggcgcucagcggagucaugguguccauggaggaaccuggcugguacagcuucggguuugaaaucaaggacaagaaaugcgaugugccguguauuggcaucgagaugguccacgacggaggcaagaaaacauggcauucugccgcuacggccauuuauugccugaugggguccggacagcuucugugggauaccguuacaggcguggacauggcccucuga

SEQ ID NO: 221094 - RNA, 1401 nt, Artificial Sequence; identical to SEQ ID NO: 221091
  derived and/or modified CDS sequence (opt5) from neuraminidase__InfluenzaB__AFJ80671

SEQ ID NO: 221095 - RNA, 1401 nt, Artificial Sequence; identical to SEQ ID NO: 221091
  derived and/or modified CDS sequence (opt5) from neuraminidase__InfluenzaB__AFJ80682

SEQ ID NO: 221096 - RNA, 1401 nt, Artificial Sequence
  derived and/or modified CDS sequence (opt5) from neuraminidase__InfluenzaB__AFJ80693
augcugcccagcaccauccagacacucacgcuguuccuuaccuccggcggggugcugcucucucuguacgucagcgccucccuuucuuaucugcucuacagcggcauucugcugaaguuuuccccuacagagaucaccgcuccgacaaugccccucaacugcgccaaugcgucuaacguucaagcugugaauagaagcgccaccaaaggagugacacugcuucugccugaacccgaguggaccuauccucggcucuccugucccgggagcacguuccagaaggcccugcuuauuucuccucaccgcuuuggagaaaccaaaggcaacuccgcuccgcugaucauuagagagcccuucaucgccugcgggccuaaggaauguaaacauuuugcucucacacacuacgccgcgcagcccggaggcuauuacaauggcacccgggaggaccgcaacaagcugagacaucugaucagcgucaagcucgggaaaauuccuacaguggaaaauucuaucuuccacauggccgcuugguccggaagcgccugccaugauggccgggaauggaccuauauugggguugacggacccgauucuaacgcucugcuuaagaucaaauacggcgaggccuacacggacacauaucacuccuacgcgaauaacauucugcgcacccaggaaagcgccuguaauugcaucgggggagauuguuaucucaugauuacagacggcuccgcuucuggcaucagcgagugcagauuucugaagauccgggaggggcgcauuaucaaagaaauuuucccgaccggaagaguggagcacaccgaagaguguacaugcggcuuugccuccaacaagacgaucgaaugugcuugccgggauaauagcuacaccgccaagcgcccuuucgucaaacuuaacguggagacagacaccgccgagauuagacugaugugcacagaaaccuaucucgauacgccccggccugacgaugggucuaucacaggacccugugagucccauggcgacaaggggagcggaggcaucaaaggcggguuuguucaccaacgcauggcuucuaagauuggaagaugguacagccggaccauguccaaaaccaagagaaugggcauggggcuguaugugaaauacgauggagaccccuggaucgacucuggcgcgcugacacucagcggggucaugguguccauggaggagccuggcugguacagcuucggauuugaaauuaaggauaagaaaugcgacgugccguguaucggcauugagaugguccaugaugggggaaagaaaaccuggcacucugccgcuacagccaucuauugccugaugggcuccgggcagcuucugugggacacgguuaccggaguggauauggcccucuga

SEQ ID NO: 221097 - RNA, 1401 nt, Artificial Sequence
  derived and/or modified CDS sequence (opt5) from neuraminidase__InfluenzaB__AFJ80726
augcugcccagcaccauccagacacucacgcuguuccuuaccuccggcggggugcugcucucucuguacgucagcgccucccuuucuuaucugcucuacagcgacauucugcugaaguuuucccaaacagagaucaccgcuccuacaaugccgcucgauugcgccaacgcgucuaauguucaggcugugaacagaagcgccaccaaaggagugacacugcuucugcccgaaccugaguggaccuauccccggcucuccuguccuggcagcacguuccagaaggcccugcuuauuucuccccaccgcuuuggggaaaccaaaggaaauuccgcuccucugaucauuagagagccguucaucgccugcggccccaaggaauguaaacauuuugcucucacacacuacgccgcgcagccugggggauauuacaacggcacccgggaggaccgcaauaagcugagacaucugaucagcgucaagcucggcaaaauucccacaguggagaacucuaucuuccacauggccgcuugguccgggagcgccugccaugauggacgggaauggaccuauauuggcguugacgggccugauucuaaugcucugcuuaagaucaaauacggagaggccuacacggacacauaucacuccuacgcgaagaacauucugcgcacccaagaaagcgccuguaauugcaucggcggggauuguuaucucaugauuacagacggauccgcuucuggcaucagcgagugcagauuucugaaaauccgggagggccgcauuaucaaggaaauuuuccccaccgggagagugaagcacaccgaggaauguacaugcggauuugccuccaacaaaacgaucgagugugcuugccgggauaauagcuacaccgccaagcgcccguucgucaaacuuaacguggaaacagacaccgccgagauuagacugaugugcacagagaccuaucucgauacgccucggcccaaugacggcucuaucacagggccuugugaauccaacggagaucgcggcgggggaggcaucaagggcggguuuguucaucagagaauggcuagcaaaauuggacggugguacucuagaaccaugagcaagaccaaacgcaugggcauggggcuguaugugaaguacgacggagaccccuggacagauuccgaggcgcuggcccucucuggcgucauggugcccauggaggaaccugggugguacagcuucggcuuugaaaucaaggacaaaaagugcgaugugccguguauuggaaucgagaugguccacgacggcgggaaaaccacauggcauuccgcugccacggccauuuauugccugaugggaagcggccagcuucugugggauaccguuacagggguggacauggcucucuga

SEQ ID NO: 221098 - RNA, 1401 nt, Artificial Sequence
  derived and/or modified CDS sequence (opt5) from neuraminidase__InfluenzaB__AFJ80737
augcugcccagcaccauccagacacucacgcuguuccuuaccuccggcggggugcugcucucucuguacgucagcgccucccuuucuuaucugcucuacagcgacauucugcugaaguuuucccaaacagagaucaccgcuccuauuaugccgcucgauugcgccaacgcgucuaauguucaggcugugaacagaagcgccacaaaaggagugacccugcuucugcccgaaccugaguggacauauccccggcucuccuguccuggcagcaccuuccagaaggcccugcuuaucucuccccaccgcuuuggggaaacgaaaggaaauuccgcuccucugauuaucagagagccguucaucgccugcggccccaaggaauguaaacauuuugcucucacccacuacgccgcgcagccugggggauauuacaacggcacacgggaggaccgcaauaagcugagacaucugauuagcgucaagcucggcaaaauccccaccguggagaacucuauuuuccacauggccgcuugguccgggagcgccugccaugauggacgggaauggacauauaucggcguugacgggccugauucuaaugcucugcuuaagauuaaauacggagaggccuacaccgacacguaucacuccuacgcgaagaacauccugcgcacacaagaaagcgccuguaauugcauuagaggcgauuguuaucucaugaucaccgacgggcccgcuuccggaaucucugagugccgguuucugaaaauucgcgagggcagaaucauuaaggaaaucuucccgacaggccgggugaagcacaccgaggaauguaccugcggguuugccagcaacaaaacaauugagugugcuugccgcgauaauuccuacacggccaagagaccuuucgucaaacuuaacguggaaaccgacacagccgagauccggcugaugugcaccgagacauaucucgauacgccccgcccuaaugacggaagcaucaccggccccugugaaucuaacggggauaagggauccggcgggauuaaaggaggcuuuguucaucagagaauggcuagcaagaucggccggugguacucuagaacaaugagcaaaaccaagcgcauggggaugggacuguaugugaaguacgacggcgaccccuggaccgauuccgaggcgcuggcccucucuggggucauggugagcauggaggaaccuggaugguacuccuucggcuuugaaauuaaagacaagaaaugcgaugugccguguaucgggauugagaugguccacgacggcggaaagacaaccuggcauagcgcugccacagccaucuauugccugaugggcucugggcagcuucugugggauacgguuaccggaguggacauggcucucuga

SEQ ID NO: 221099 - RNA, 1401 nt, Artificial Sequence; identical to SEQ ID NO: 220740
  derived and/or modified CDS sequence (opt5) from neuraminidase__InfluenzaB__AFJ80759

SEQ ID NO: 221100 - RNA, 1401 nt, Artificial Sequence
  derived and/or modified CDS sequence (opt5) from neuraminidase__InfluenzaB__AFJ80770
augcugcccagcaccauccagacacucacgcuguuccuuaccuccggcggggugcugcucucucuguacgucagcgccucccuuucuuaucugcucuacagcgacauucugcugaaguuuucccaaacagagaucaccgcuccuacaaugccgcucgauugcgccaacgcgucuaauguucaggcugugaacagaagcgccaccaaaggagugacacugcuucugcccgaaccugaguggaccuauccccggcucuccuguccuggcagcacguuccagaaggcccugcuuauuucuccccaccgcuuuggggaaaccaaaggaaauuccgcuccucugaucauuagagagccguucaucgccugcggccccaacgaauguaagcauuuugcucucacacacuacgccgcgcagccugggggauauuacaauggcacccgggaggaccgcaacaaacugagacaucugaucagcgucaagcucggcaagauucccacaguggaaaauucuaucuuccacauggccgcuugguccgggagcgccugccaugauggacgggaauggaccuauauuggcguugacgggccugauucuaacgcucugcuuaaaaucaaguacggagaggccuacacggacacauaucacuccuacgcgaaaaauauucugcgcacccaagaaagcgccuguaacugcaucggcggggauuguuaucucaugauuacagacggacccgcuuccggcaucucugagugcagauuucugaagauccgggagggccgcauuaucaaagaaauuuucccgaccgggagagugaagcacaccgaggaauguacaugcggauuugccagcaauaagacgaucgagugugcuugccgggauaacuccuacaccgccaaacgcccuuucgucaaacuugacguggaaacagauaccgccgagauuagacugaugugcacagagaccuaucucgacacgccccggccuaaugauggcagcaucacagggcccugugaaucuaacggagacaagggcuccgggggaaucaagggcggcuuuguucaucagcgcauggcuagcaaaauugggagaugguacucucggacccugagcaagaccaaaagaaugggaaugggccuguaugugaaguacgacggggaucccuggacagacuccgaggcgcucgcccugucuggagucauggugagcauggaggagccuggcugguacuccuucggguuugaaaucaaggauaaaaagugcgacgugccguguauuggcaucgagaugguccacgauggaggcaaaaccacauggcauagcgcugccacggccauuuauugccuuauggggucuggacagcugcucugggacaccguuacaggcguggauauggcucuguga

SEQ ID NO: 221101 - RNA, 1401 nt, Artificial Sequence; identical to SEQ ID NO: 220740
  derived and/or modified CDS sequence (opt5) from neuraminidase__InfluenzaB__AFJ80785

SEQ ID NO: 221102 - RNA, 1401 nt, Artificial Sequence; identical to SEQ ID NO: 220740
  derived and/or modified CDS sequence (opt5) from neuraminidase__InfluenzaB__AFJ80796

SEQ ID NO: 221103 - RNA, 1401 nt, Artificial Sequence
  derived and/or modified CDS sequence (opt5) from neuraminidase__InfluenzaB__AFJ80807
augcugcccagcaccauccagacacucacgcuguuccuuaccuccggcggggugcugcucucucuguacgucagcguuucccuuucuuaucugcucuacagcgacauucugcugaaguuuccuuccacagagaucaccgccccgacaaugccccucgauugcgcuaacgccucuaaugugcaagcggugaacagaagcgcuaccaaaggagucacacugcuucugccugaacccgaguggaccuauccucggcucuccugucccggcagcacguuccagaaggcccugcuuauuucuccucaccgcuuuggggaaaccaaaggaaauuccgccccgcugaucauuagagagcccuucaucgcuugcggcccuaaggaauguaaacauuuugcccucacacacuacgcugcccagcccgggggauauuacaacggcacccggggcgaccgcaauaagcugagacaucugaucagcgugaagcucgggaaaauuccuacaguugagaacucuaucuuccacauggcggccugguccggaagcgcuugccaugauggcaaggaguggaccuauauugggguggacggacccgauaauaacgcccugcuuaaaaucaaguacggcgaggcuuacacggacacauaucacucuuacgccaauaacauucugcggacccaggaguccgcguguaauugcaucgggggaaacuguuaucucaugauuacagauggcagcgccuccggcgucucugaaugccgcuuucugaaaaucagagaggggcggaucauuaaggagaucuucccgaccggacgcauuaagcacaccgaagaguguacaugcggcuuugcuagcaauaaaacgaucgaaugugccugcagagacaacuccuacaccgcuaagcggccuuucgugaaacuuaauguugagacagauaccgccgaaauucgccugaugugcacagagaccuaucucgacacgcccagaccugaugacgggagcaucacaggacccugugagucuaacggcgauaagggguccggaggcaucaaaggcggguuugugcaucaacggauggccagcaagauuggacgcugguacucuagaaccaugagcaaaaccaagcggaugggcauggggcuguaugucaaguacgacggagaccccugggcugauuccgacgcgcuggccuucucuggcgugauggugagcauggaagaaccugggugguacuccuuuggcuucgaaaucaaagauaagaaaugcgacgucccguguauuggaaucgagaugguucacgauggcgggaaggaaacauggcauagcgcugccaccgccauuuauugccucaugggaucuggccagcugcuuugggacacagugacgggggugaacauggcucuguga

SEQ ID NO: 221104 - RNA, 1401 nt, Artificial Sequence; identical to SEQ ID NO: 220740
  derived and/or modified CDS sequence (opt5) from neuraminidase__InfluenzaB__AFJ80818

SEQ ID NO: 221105 - RNA, 1401 nt, Artificial Sequence; identical to SEQ ID NO: 220740
  derived and/or modified CDS sequence (opt5) from neuraminidase__InfluenzaB__AFJ80829

SEQ ID NO: 221106 - RNA, 1401 nt, Artificial Sequence; identical to SEQ ID NO: 221077
  derived and/or modified CDS sequence (opt5) from neuraminidase__InfluenzaB__AFJ80840

SEQ ID NO: 221107 - RNA, 1401 nt, Artificial Sequence; identical to SEQ ID NO: 221077
  derived and/or modified CDS sequence (opt5) from neuraminidase__InfluenzaB__AFJ80851

SEQ ID NO: 221108 - RNA, 1401 nt, Artificial Sequence
  derived and/or modified CDS sequence (opt5) from neuraminidase__InfluenzaB__AFJ80862
augcugcccagcaccauccagacacucacgcuguuccuuaccuccggcggggugcugcucucucuguacgucagcgccucccuuucuuaucugcucuacagcgacauucugcugaaguuuccuuccacagagaucaccgcuccgacaaugccccucgauugcgccaacgcgucuaauguucaagcuaugaacagaagcgccaccaaaggagugacacugcuucugccugaaaccgaguggacguauccccggcucuccuguccuggcagcaccuuccagaaggcccugcuuauuucuccccaccgcuuuggggaaacaaaaggaaauuccgcuccucugaucauuagagagccguucaucgccugcggccccaaggaauguaaacauuuugcucucacccacuacgccgcgcagccugggggauauuacaacggcacacggggcgaccgcaauaagcugagacaucugaucagcgugaagcucgggaaaauucccaccgucgagaacucuaucuuccacauggccgcuugguccggaagcgccugccaugauggcaaggaguggacguauauugggguggacggaccugauaauaacgcucugcuuaaaaucaaguacggcgaagccuacacagacaccuaucacucuuacgcgaauaacauucugcggacacaggaguccgccuguaauugcaucgggggaaacuguuaucucaugauuaccgauggcagcgcuuccggcguuucugaaugccgcuuucugaaaaucagagaggggcggaucauuaaggagaucuuccccaccggacgcauuaagcacacagaagaguguacgugcggcuuugccagcaauaaaaccaucgaaugugcuugcagagacaacuccuacacagccaagcggccguucgugaaacuuaaugucgagaccgauacagccgaaauucgccugaugugcaccgagacguaucucgacacaccuagacccgaugacgggagcaucaccggaccuugugagucuaacggcgauaagggguccggaggcaucaaaggcggguuugugcaucaacggauggcuagcaagauuggacgcugguacucuagaaccaugagcaaaacagaacggaugggcauggggcuguauguuaaguacgacggagaccccugggcggauuccgacgcccugaccuucucuggcgugauggucagcauggaggaacccgggugguacuccuuuggcuucgagaucaaggauaaaaagugcgacgugccuuguauuggaaucgaaauggugcacgauggcgggaaagagacauggcauagcgcugccacggccauuuauugccucaugggaucuggccagcugcuuugggacaccgucacagggguuaacauggcucuguga

SEQ ID NO: 221109 - RNA, 1401 nt, Artificial Sequence
  derived and/or modified CDS sequence (opt5) from neuraminidase__InfluenzaB__AFJ80873
augcugcccagcaccauccagacacucacgcuguuccuuaccuccggcggggugcugcucucucuguacgucagcgccucccuuucucaucugcucuauagcgggauucugcugaaguuuccuuccacagagaucaccgcuccgacaaugccccucgacugcgccaacgcgucuaauguucaagcugugaacagaagcgccaccaaaggcgugacacugcuuccucccgaaccugaguggaccuacccccggcuguccuguccugggagcacguuccagaaggcccuccugauuucuccgcaccgcuuuggagaaaccaaaggcaauuccgcuccccuuaucauuagagagccuuucaucgccugcgggcccaaggaauguaaacacuuugcucugacacauuaugccgcgcagccuggaggcuacuauaacggcacccggggagaucgcaauaagcucagacaccugaucagcgucaagcugggaaaaauucccacaguggagaacucuaucuuccauauggccgcuugguccggcagcgccugccacgacgggaaggaguggaccuacauuggaguugauggcccggacaauaacgcucuccugaaaaucaaguauggggaagccuacacggauacauaccacucuuaugcgaauaacauucuucggacccaggaguccgccuguaauugcaucggaggcaacuguuaccugaugauuacagacggcagcgcuuccggggugucugaaugccgcuuucucaaaaucagagagggacggaucauuaaggagaucuucccuaccggccgcauuaagcauaccgaagaguguacaugcggguuugccagcaauaaaacgaucgaaugugcuugcagagauaacuccuauaccgccaagcggcccuucgucaaacugaauguggagacagacaccgccgaaauucgccuuaugugcacagagaccuaccuggauacgccuagacccgacgauggaagcaucacaggccccugugagucuaacggggacaagggauccggcggcaucaaagggggauuuguucaccaacggauggcuagcaagauuggccgcugguauucuagaaccaugagcaaaaccgaacggauggggaugggacucuacgugaaguaugauggcgacccuugggcggacuccgaugcccugacauucucuggggucauggugagcauggaggaaccgggcugguacuccuuuggauucgagaucaaggacaaaaagugcgaugugcccuguauuggcaucgaaaugguccaugacgggggaaaagagaccuggcacagcgcugccacagccauuuacugccugaugggcucugggcagcuccugugggauacgguuaccggagugaacauggcucuuuga

SEQ ID NO: 221110 - RNA, 1401 nt, Artificial Sequence
  derived and/or modified CDS sequence (opt5) from neuraminidase__InfluenzaB__AFJ80884
augcugcccagcaccauccagacacucacgcuguuccuuaccuccggcggggugcugcucucucuguacgucagcgccucccuuucuuaucugcucuacagcgacauucugcugaaguuuccuuccacagagaucaccgcuccgacaaugccccucgauugcgccaacgcgucuaauguucaagcugugaacagaagcgccaccaaaggagugacacugcuucugccugaacccgaguggaccuauccucggcucuccugucccggcagcacguuccagaaggcccugcuuauuucuccucaccgcuuuggggaaaccaaaggaaauuccgcuccgcugaucauuagagagcccuucaucgccugcggcccuaaggaauguaaacauuuugcucucacacacuacgccgcgcagcccgggggauauuacaacggcacccggggcgaccgcaauaagcugagacaucugaucagcgucaagcucgggaaaauuccuacaguggagaacucuaucuuccacauggccgcuugguccggaagcgccugccaugauggcaaggaguggaccuauauugggguugacggacccgauaauaacgcucugcuuaaaaucaaguacggcgaagccuacacggacacauaucacucuuacgcgaauaacauucugcggacccaggaguccgccuguaauugcaucgggggaaacuguuaucucaugauuacagauggcagcgcuuccggcgugucuaaaugccgcuuucugaagaucagagaagggcggaucauuaaggagaucuucccgaccggacgcauuaaacacaccgaggaauguacaugcggcuuugccagcaauaagacgaucgagugugcuugcagagacaacuccuacaccgccaaacggccuuucgucaaacuuaauguggaaacagauaccgccgagauucgccugaugugcacagaaaccuaucucgacacgcccagaccugaugacgggagcaucacaggacccugugagucuaacggcgauaagggguccggaggcaucaagggcggguuuguucaucaacggauggcuagcaaaauuggacgcugguacucuagaaccaugagcaagaccgagcggaugggcauggggcuguaugugaaguacgacggagaccccugggcggauuccgacgcccugacauucucuggcgucauggugagcauggaggaaccugggugguacuccuuuggcuucgaaaucaaagauaagaaaugcgacgugccguguauuggaaucgagaugguccacgauggcgggaaggaaaccuggcauagcgcugccacagccauuuauugccucaugggaucuggccagcugcuuugggacacgguuaccggggugaacauggcucuguga

SEQ ID NO: 221111 - RNA, 1401 nt, Artificial Sequence; identical to SEQ ID NO: 221076
  derived and/or modified CDS sequence (opt5) from neuraminidase__InfluenzaB__AFJ80895

SEQ ID NO: 221112 - RNA, 1401 nt, Artificial Sequence
  derived and/or modified CDS sequence (opt5) from neuraminidase__InfluenzaB__AFJ80917
augcugcccagcaccauccagacacucacgcuguuccuuaccuccggcggggugcugcucucucuguacgucagcgccucccuuucuuaucugcucuacagcgacauucugcugaaguuuccuuccacagagaucaccgcuccgacaaugccccucgauugcgccaacgcgucuaauguucaagcugugaacagaagcgccaccaaaggagugacacugcuucugccugaacccgaguggaccuauccucggcucuccugucccggcagcacguuccagaaggcccugcuuauuucuccucaccgcuuuggggaaaccaaaggaaauuccgcuccgcugaucauuagagagcccuucaucgccugcggcccuaaggaauguaaacauuuugcucucacacacuacgccgcgcagcccgggggauauuacaacggcacccggggcgaccgcaauaagcugagacaucugaucagcgucaagcucgggaaaauuccuacaguggagaacucuaucuuccacauggccgcuugguccggaagcgccugccaugauggcaaggaguggaccuauauugggguugacggacccgauaauaacgcucugcuuaaaaucaaguacggcgaagccuacacggacacauaucacucuuacgcgaauaacauucugcggacccaggaguccgccuguaauugcaucgggggaaacuguuaucucaugauuacagauggcagcgcuuccggcgugucugaaugccgcuuucugaaaaucagagaggggcggaucauuaaggagaucuucccgaccggacgcauuaagcacaccgaagaguguacaugcggcuuugccagcaauaaaacgaucgaauguaccugcagagacaacuccuacacagcuaagcggccuuucgucaaacuuaauguggagaccgauacagccgaaauucgccugaugugcaccgagacguaucucgacacacccagaccugaugacgggagcaucaccggacccugugagucuaacggcgauaagggguccggaggcaucaaaggcggguuuguucaucaacggauggccagcaagauuggacgcugguacucuagaaccaugagcaaaacagaacggaugggcauggggcuguaugugaaguacgacggagaccccugggcugauuccgacgcgcugaccuucucuggcgucauggugagcauggaggaaccugggugguacuccuuuggcuucgagaucaaggauaaaaagugcgacgugccguguauuggaaucgaaaugguccacgauggcgggaaagagacauggcauagcgccgcuacggccauuuauugccucaugggaucuggccagcugcuuugggacaccguuacaggggugaacauggcccuguga

SEQ ID NO: 221113 - RNA, 1401 nt, Artificial Sequence
  derived and/or modified CDS sequence (opt5) from neuraminidase__InfluenzaB__AFJ80928
augcugcccagcaccauccagacacucacgcuguuccuuaccuccggcggggugcugcucucucuguacgucagcgccucccuuucuuaucugcucuacagcgacauucugcugaaguuuccuuccacagagaucaccgcuccgacaaugccccucgauugcgccaacgcgucuaauguucaagcugugaacagaagcgccaccaaaggagugacacugcuucugccugaacccgaguggaccuauccucggcucuccugucccggcagcacguuccagaaggcccugcuuauuucuccucaccgcuuuggggaaaccaaaggaaauuccgcuccgcugaucauuagagagcccuucaucgccugcgaaccuaaggaguguaaacauuuugcucucacacacuacgccgcgcagcccggcggguauuacaacggaacccggggcgaccgcaauaagcugagacaucugaucagcgucaagcucggcaaaauuccuacaguggagaacucuaucuuccacauggccgcuugguccgggagcgccugccaugauggaaaggaauggaccuauauuggcguugacgggcccgauaauaacgcucugcuuaaaaucaaguacggagaggccuacacggacacauaucacucuuacgcgaauaacauucugcggacccaggaauccgccuguaauugcaucggcgggaacuguuaucucaugauuacagauggaagcgcuuccggcgugucugagugccgcuuucugaaaaucagagagggccggaucauuaaggaaaucuucccgaccgggcgcauuaagcacaccgaggaauguacaugcggauuugccagcaauaaaacgaucgagugugcuugcagagacaacuccuacaccgccaagcggccuuucgucaaacuuaauguggaaacagauaccgccgagauucgccugaugugcacagagaccuaucucgacacgcccagaccugaugacggcagcaucacagggcccugugaaucuaacggagauaagggcuccgggggaaucaaaggcggcuuuguucaucaacggauggcuagcaagauugggcgcugguacucuagaaccaugagcaaaaccgagcggaugggaaugggccuguaugugaaguacgacggggaccccugggcggauuccgacgcccugacauucucuggagucauggugagcauggaggaaccuggcugguacuccuuuggguucgaaaucaaggauaaaaagugcgacgugccguguauuggcaucgagaugguccacgauggaggcaaagagaccuggcauagcgcugccacagccauuuauugccucauggggucuggacagcugcuuugggacacgguuaccggcgugaacauggcucuguga

SEQ ID NO: 221114 - RNA, 1401 nt, Artificial Sequence
  derived and/or modified CDS sequence (opt5) from neuraminidase__InfluenzaB__AFJ80939
augcugcccagcaccauccagacacucacgcuguuccuuaccuccggcggggugcugcucucucuguacgucagcgccucccuuucuuaucugcucuacagcgacauucugcugaaguuuccuccgacagagguuaccgcucccacaaugccucucgauugcgccaacgcguccaaugugcaagcugugaacagaucugccaccaaaggagucacacugcuucugcccgaaccugaguggaccuauccccggcucagcuguccuggcuccacguuccagaaggcccugcuuaucagcccgcaccgcuuuggggaaaccaaaggaaauucugcuccccugauuaucagagagccuuucauugccugcggccccaaggaauguaaacauuuugcucucacacacuacgccgcgcagccugggggauauuacaacggcacccggggcgaccgcaauaagcugagacaucugaucuccgugaagcucgggaaaauccccacaguugagaacagcauuuuccacauggccgcuuggucuggauccgccugccaugauggcaaggaguggaccuauaucgggguggacggaccggauaauaacgcucugcuuaaaauuaaguacggcgaagccuacacggacacauaucacagcuacgcgaauaacauccugcggacccaggagucugccuguaauugcauugggggaaacuguuaucucaugaucacagauggcuccgcuagcggcgucuccgaaugccgcuuucugaaaauuagagaggggcggaucaucaaggagauuuucccuaccggacgcaucaagcacaccgaagaguguacaugcggcuuugccucuaauaaaacgauugaaugugcuugcagagacaacagcuacaccgccaagcggcccuucgugaaacuuaauguugagacagauaccgccgaaauccgccugaugugcacagagaccuaucucgacacgccuagacccgaugacggguccauuacaggacccugugagagcaacggcgauaaggggucuggaggcaucaaaggcggguuugugcaucaacggauggcuuccaagaucggacgcugguacagcagaaccaugucuaaaaccgaacggaugggcauggggcuguaugucaaguacgacggagacccuugggcggauagcgacgcccugacauucuccggcgugauggugucuauggaggaaccggggugguacagcuuuggcuucgagauuaaggauaaaaagugcgacguccccuguaucggaauugaaaugguucacgauggcgggaaagagaccuggcauuccgcugccacagccaucuauugccucaugggaagcggccagcugcuuugggacacggugaccggggugaacauggcucuguga

SEQ ID NO: 221115 - RNA, 1401 nt, Artificial Sequence
  derived and/or modified CDS sequence (opt5) from neuraminidase__InfluenzaB__AFJ80950
augcugcccagcaccauccagacacucacgcuguuccuuaccuccggcggggugcugcucucucuguacgucagcgccucccuuucuuaucugcucuacagcgacauucugcugaaguuuucccaaacagagaucaccgcuccuauuaugccgcucgauugcgccaacgcgucuaauguucaggcugugaacagaagcgccgccaaaggagugacacugcuucugcccgaaccugaguggaccuauccccggcucuccuguccuggcagcacauuccagaaggcucugcuuaucucuccccaccgcuuuggggaaaccaaaggaaauuccgccccucugauuaucagagagccguucaucgcuugcggccccacggaauguaagcauuuugcccucacccacuacgcggcccagccugggggauauuacaacggcacacgggaggaccgcaauaaacugagacaucugauuagcgucaagcucggcaagauccccaccguggagaacucuauuuuccacauggcugccugguccgggagcgcuugccaugauggaaaagaauggacauauaucggcguugacgggccugauucuaaugcccugcuuaagauuaaauacggagaggcguacaccgacacguaucacuccuacgccaagaacauccugcggacacaagaaagcgcuuguaauugcauuggcggggauuguuaucucaugaucaccgacggacccgccuccggcaucucugagugccgcuuucugaaaauuagagagggccggaucauuaaggaaaucuucccgacagggcgcgugaagcacaccgaggaauguaccugcggauuugcuagcaacaaaacaauugagugugccugcagagauaauuccuacacggccaagcggccuuucgucaaacuuaacguggaaaccgacacagcugagauccgccugaugugcaccgagacauaucucgauacccccagaccuaaugacggcagcaucacggggcccugugaaucugauggagacaagggcaacgggggaauuaaaggcggcuuuguucaucagcggauggcguccaagaucgggcgcugguacagcagaacaaugucuaaaaccaagcggaugggaaugggccuguaugugaaguacgacggggaucccuggaccgacagcgaggcccuggcucucuccggagucauggugucuauggaggaaccuggcugguacagcuucggguuugaaauuaaagauaagaaaugcgacgugccguguaucggcauugagaugguccacgauggaggcaagacaaccuggcauuccgccgccacagcuaucuauugccugauggggagcggacagcuucugugggacacgguuaccggcguggauauggcccucuga

SEQ ID NO: 221116 - RNA, 1401 nt, Artificial Sequence; identical to SEQ ID NO: 221077
  derived and/or modified CDS sequence (opt5) from neuraminidase__InfluenzaB__AFJ80961

SEQ ID NO: 221117 - RNA, 1401 nt, Artificial Sequence; identical to SEQ ID NO: 220860
  derived and/or modified CDS sequence (opt5) from neuraminidase__InfluenzaB__AFJ80972

SEQ ID NO: 221118 - RNA, 1401 nt, Artificial Sequence; identical to SEQ ID NO: 220860
  derived and/or modified CDS sequence (opt5) from neuraminidase__InfluenzaB__AFJ80983

SEQ ID NO: 221119 - RNA, 1401 nt, Artificial Sequence; identical to SEQ ID NO: 220815
  derived and/or modified CDS sequence (opt5) from neuraminidase__InfluenzaB__AFJ80994

SEQ ID NO: 221120 - RNA, 1401 nt, Artificial Sequence; identical to SEQ ID NO: 220860
  derived and/or modified CDS sequence (opt5) from neuraminidase__InfluenzaB__AFJ81005

SEQ ID NO: 221121 - RNA, 1401 nt, Artificial Sequence; identical to SEQ ID NO: 220860
  derived and/or modified CDS sequence (opt5) from neuraminidase__InfluenzaB__AFJ84364

SEQ ID NO: 221122 - RNA, 1401 nt, Artificial Sequence
  derived and/or modified CDS sequence (opt5) from neuraminidase__InfluenzaB__AFJ90399
augcugcccagcaccauccagacacucacgcuguuccuuaccuccggcggggugcugcucucucuguacgucagcgccucccuuucuuaucugcucuacagcgacauucugcugaaguuuccuuccacagagaucaccgcuccgcccaugccucucgauugcgccaacgcgucuaauguucaagcugugaacagaagcgccacaaaaggagugacccugcuucugcccgaaccugaguggacauauccccggcucuccuguccuggcagcaccuuccagcgcgcccugcuuauuucuccgcacagauuuggggaaacgaagggaaauuccgcuccccugaucauucgggagccuuucaucgccugcggcccccgcgaauguaaacauuuugcucucacccacuacgccgcgcagccugggggauauuacaacggcacaagaggcgaccggaauaagcugcgccaucugaucagcgucaaacucgggaagauucccaccguggagaacucuaucuuccacauggccgcuugguccggaagcgccugccaugauggcaaggaguggacauauauugggguugacggaccggauaauaacgcucugcuuaaaaucaaguacggcgaagccuacaccgacacguaucacucuuacgcgaauaacauucugagaacacaggaguccgccuguaauugcaucgggggaaacuguuaucucaugauuaccgauggcagcgcuuccggcgugucugaaugccgguuucugaaaauccgcgaggggagaaucauuaaggagaucuucccuacaggacggauuaaacacaccgaagaguguaccugcggcuuugccagcaauaagacaaucgaaugugcuugccgcgacaacuccuacacggccaagagacccuucgucaaacuuaauguggagaccgauacagccgaaauucggcugaugugcaccgagacauaucucgacaccccucgccccgaugacgggagcaucacgggacccugugagucuaacggcgauaagggguccggaggcaucaaaggcggguuuguucaucaaagaaugacaagcaagauuggacggugguacucuagaaccaugagcaaaaccgaacgcaugggcauggggcuguaugugaaguacgacggagacccuugggcugauuccgacgcgcugacauucucuggcgucauggugagcauggaggaaccggggugguacuccuuuggcuucgagaucaaagauaagaagugcgacgugcccuguauuggaaucgaaaugguccacgauggcgggaaagagaccuggcauagcgccgcuacagccauuuauugccucaugggaucuggccagcugcuuugggacacgguuaccggggugaacauggcccuguga

SEQ ID NO: 221123 - RNA, 1401 nt, Artificial Sequence
  derived and/or modified CDS sequence (opt5) from neuraminidase__InfluenzaB__AFJ90410
augcugcccagcaccauccagacacucacgcuguuccuuaccuccggcggggugcugcucucucuguacgucagcgccucccuuucuuaucugcucuacagcgacauucugcugaaguuuucccaaacagagaucaccgcuccuauuaugccgcucgauugcgccaacgcgucuaauguucaggcugugaacagaagcgccgccaaaggagugacacugcuucugcccaagccugaauggaccuauccccggcucuccuguccuggcagcacauuccagaaagcucugcuuaucucuccccaccgcuuuggggagaccaagggaaauuccgccccucugauuaucagagaaccguucaucgcuugcggccccacggaguguaaacauuuugcccucacccacuacgcggcccagccugggggauauuacaacggcacacgggaagaccgcaauaaccugagacaucugauuagcgucaagcucggcaagauccccaccguggaaaauucuauuuuccacauggcugccugguccgggagcgcuugccaugauggaaaagaguggacauauaucggcguugacgggccugauucuaacgcccugcuuaagauuaaauacggagaggcguacaccgacacguaucacuccuacgccaagaauauccugcggacacaagagagcgcuuguaacugcauuggcggggauuguuaucucaugaucaccgacggacccgccuccggcaucucugaaugccgcuuucugaaaauuagagagggccggaucauuaaggagaucuucccgacagggcgcgugaagcacaccgaagaguguaccugcggauuugcuagcaauaaaacaauugaaugugccugcagagauaacuccuacacggccaagcggccuuucgucaaacuuaauguggagaccgacacagcugaaauccgccugaugugcaccgagacauaucucgauacccccagaccuaacgacggcagcaucacggggcccugugagucugauggagacaagggcuccgggggaauuaaaggcggcuuuguucaucagcggauggcgagcaagaucgggcgcugguacucuagaacaaugagcaaaaccaagcggaugggaaugggccuguaugugaaguacgacggggaucccuggaccgacuccgaagcccuggcucucucuggagucauggugagcauggaggaaccuggcugguacuccuucggguuugagauuaaagauaagaaaugcgacgugccguguaucggcauugaaaugguccacgauggaggcaagacaaccuggcauagcgccgccacagcuaucuauugccugauggggucuggacagcuucugugggacacgguuaccggcguggauauggcccucuga

SEQ ID NO: 221124 - RNA, 1401 nt, Artificial Sequence
  derived and/or modified CDS sequence (opt5) from neuraminidase__InfluenzaB__AFJ90432
augcugcccagcaccauccagacacucacgcuguuccuuaccuccggcggggugcugcucucucuguacgucagcacaucccuuucuuaucugcucuacagcgacauucugcugaaguuuucccaaaccgagaucacagccccuauuaugccgcucgauugcgcuaacgccucuaauguucaggcggugaacagaagcgcugccaaaggagugacccugcuucugcccgaaccugaguggacauauccccggcucuccuguccuggcagcaccuuccagaaggcccugcuuaucucuccccaccgcuuuggggaaacgaaaggaaauuccgcuccucugauuaucagagagccguucaucgccugcggccccaccgaauguaagcauuuugcucucacacacuacgccgcgcagccugggggauauuacaacggcacccgggaggaccgcaauaaacugagacaucugauuagcgucaagcucggcaagauccccacaguggagaacucuauuuuccacauggccgcuugguccgggagcgccugccaugauggaaaagaauggaccuauaucggcguugacgggccugauucuaaugcucugcuuaagauuaaauacggagaggccuacacggacacauaucacuccuacgcgaagaacauccugcggacccaagaaagcgccuguaauugcauuggcggggauuguuaucucaugaucacagacggacccgcuuccggcaucucugagugccgcuuucugaaaauuagagagggccggaucauuaaggaaaucuucccgaccgggcgcgugaagcacaccgaggaauguacaugcggauuugccagcaacaaaacgauugagugugcuugcagagauaauuccuacaccgccaagcggccuuucgucaaacuuaacguggaaacagacaccgccgagauccgccugaugugcacagagaccuaucucgauacgcccagaccuaaugacggcagcaucacagggcccugugaaucugauggagacaagggcuccgggggaauuaaaggcggcuuuguucaucagcggauggcuagcaagaucgggcgcugguacucuagaaccaugagcaaaaccaagcggaugggaaugggccuguaugugaaguacgacggggaucccuggacagacuccgaggcgcuggcccucucuggagucauggugagcauggaggaaccuggcugguacuccuucggguuugaaauuaaagauaagaaaugcgacgugccguguaucggcauugagaugguccacgauggaggcaagaccacauggcauagcgcugccacggccaucuauugccugauggggucuggacagcuucugugggacaccguuacaggcguggauauggcucucuga

SEQ ID NO: 221125 - RNA, 1401 nt, Artificial Sequence; identical to SEQ ID NO: 221044
  derived and/or modified CDS sequence (opt5) from neuraminidase__InfluenzaB__AFJ90443

SEQ ID NO: 221126 - RNA, 1401 nt, Artificial Sequence
  derived and/or modified CDS sequence (opt5) from neuraminidase__InfluenzaB__AFJ90454
augcugcccagcaccauccagacacucacgcuguuccuuaccuccggcggggugcugcucucucuguacgucagcgccucccuuucuuaucugcucuacagcgacauucugcugaaguuuucccaaacagagaucaccgcuccuauuguuccgcucgauugcgccaacgcgucuaaugugcaggcugugaacagaagcgccgccaaaggagucacacugcuucugcccgaaccugaguggaccuauccccggcucuccuguccuggcagcacauuccagaaggcucugcuuaucucuccccaccgcuuuggggaaaccaaaggaaauuccgccccucugauuaucagagagccguucaucgcuugcggccccacggaauguaagcauuuugcccucacccacuacgcggcccagccuggggaguauuacaacggaacacgggaggaccgcaauaaacugagacaucugauuagcgugaagcucggcaagauccccaccguugaaaacucuauuuuccacauggcugccugguccggcagcgcuugccaugaugggaaagaguggacauauaucggaguggacggcccugauucuaaugcccugcuuaagauuaaauacggggaagcguacaccgacacguaucacuccuacgccaagaacauccugcggacacaagagagcgcuuguaauugcauuggaggcgauuguuaucucaugaucaccgacgggcccgccuccggaaucucugagugccgcuuucugaaaauuagagaaggccggaucauuaaggagaucuucccgacaggccgcgucaagcacaccgaagaguguaccugcggguuugcuagcaacaaaacaauugaaugugccugcagagauaauuccuacacggccaagcggccuuucgugaaacuuaacguugagaccgacacagcugagauccgccugaugugcaccgaaacauaucucgauacccccagaccuaaugacggaagcaucacgggccccugugagucugauggggacaagggauccggcgggauuaaaggaggcuuugugcaucagcggauggcgagcaagaucggccgcugguacucuagaacaaugagcaaaaccaagcggauggggaugggacuguaugucaaguacgacggcgaucccuggaccgacuccgaagcccuggcucucucuggggugauggugagcauggaggaaccuggaugguacuccuucggcuuugagauuaaagauaagaaaugcgacgucccguguaucgggauugagaugguucacgauggcggaaagacaaccuggcauagcgccgccacagcuaucuauugccugaugggcucugggcagcuucugugggacacggugaccggaguggauauggcccucuga

SEQ ID NO: 221127 - RNA, 1401 nt, Artificial Sequence
  derived and/or modified CDS sequence (opt5) from neuraminidase__InfluenzaB__AFJ91042
augcugcccagcaccauccagacacucacgcuguuccuuaccuccggcggggugcugcucucucuguacgucagcgccucccuuucuuaucugcucuacagcgacauucugcugaaguuuucccaaacagagaucaccgcuccuauuaugccgcucgauugcgccaacgcgucuaauguucaggcugugaacagaagcgccgccaaaggagugacacugcuuauccccgaaccugaguggaccuauccccggcuguccuguccuggcagcacauuccagaaggcucuccugauuucuccccaccgcuuuggggaaaccaaaggaaauuccgccccucuuaucaucagagagccguucauugcuugcggccccacggaauguaagcauuuugcccugacccacuacgcggcccagccugggggauauuacaacggcacacgggaggaccgcaauaaacucagacaucugaucagcgucaagcugggcaagauucccaccguggagaacucuaucuuccacauggcugccugguccgggagcgcuugccaugauggaaaagaauggacauauauuggcguugacgggccugauucuaaugcccuccugaagaucaaauacggagaggcguacaccgacacguaucacuccuacgccaagaacauucuucggacacaagaaagcgcuuguaauugcaucggcggggauuguuaucugaugaucaccgacggacccgccuccggcauuucugagugccgcuuucucaaaaucagagagggccggauuaucaaggaaauuuucccgacagggcgcgugaagcacaccgaggaauguaccugcggauuugcuagcaacaaaacaaucgagugugccugcagagauaauuccuacacggccaagcggccuuucgucaaacugaacguggaaaccgacacagcugagauccgccuuaugugcaccgagacauaucuggauacccccagaccuaaugacggcagcauugcggggcccugugaaucugauggagacaagggcuccgggggaaucaaaggcggcuuuguucaucagcggaugacgagcaagauugggcgcugguacucuagaacaaugagcaaaaccaagcggaugggaaugggccucuaugugaaguacgacggggaucccuggaccgacuccgaggcccuggcucugucuggagucauggugagcauggaggaaccuggcugguacuccuucggguuugaaaucaaagauaagaaaugcgacgugccguguauuggcaucgagaugguccacgauggaggcaagacaaccuggcauagcgccgccacagcuaucuauugccucauggggucuggacagcugcuuugggacacgguuaccggcguggauauggcccuguga

SEQ ID NO: 221128 - RNA, 1401 nt, Artificial Sequence
  derived and/or modified CDS sequence (opt5) from neuraminidase__InfluenzaB__AFJ91053
augcugcccagcaccauccagacacucacgcuguuccuuaccuccggcggggugcugcucucucuguacgucagcgccucccuuucuuaucugcucuacagcgacauucugcugaaguuuucccaaacagagaucaccgcuccuauuaugccgcucgauugcgccaacgcgucuaauguucaggcugugaacagaagcgccgccaaagaagugacacugcuucugcccgagccugaauggaccuauccccggcucuccuguccuggaagcacauuccagaaggcucugcuuaucucuccccaccgcuuuggcgagaccaaaggaaauuccgccccucugauuaucagagaaccguucaucgcuugcgggcccacggaguguaagcauuuugcccucacccacuacgcggcccagccuggcggguauuacaacggaacacgggaggaccgcaauaaacugagacaucugauuagcgucaagcucggcaagauccccaccguggaaaacucuauuuuccacauggcugccugguccggcagcgcuugccaugaugggaaagaguggacauauaucggaguugacggcccugauucuaaugcccugcuuaagauuaaauacggggaagcguacaccgacacguaucacuccuacgccaagaacauccugcggacacaagagagcgcuuguaauugcauuggaggcgauuguuaucucaugaucaccgacgggcccgccuccggaaucucugagugccgcuuucugaaaauuagagaaggccggaucauuaaggagaucuucccgacaggccgcgugaagcacaccgaagaguguaccugcggguuugcuagcaacaaaacaauugaaugugccugcagagauaauuccuacacggccaagcggccuuucgucaaacuuaacguggagaccgacacagcugagauccgccugaugugcaccgaaacauaucucgauacccccagaccuaaugacggaagcaucacgggccccugugagucugauggggacaagggauccggcgggauuaaaggaggcuuuguucaucagcggauggcgagcaagaucggccgcugguacucuagaacaaugagcaaaaccaagcggauggggaugggacuguaugugaaguacgacggcgaucccuggaccgacuccgaagcccuggcucucucuggggucauggugagcauggaggaaccuggaugguacuccuucggcuuugagauuaaagauaagaaaugcgacgugccguguaucgggauugagaugguccacgauggcggaaagacaaccuggcauagcgccgccacagcuaucuauugccugaugggcucugggcagcuucugugggacacgguuaccggaguggauauggcccucuga

SEQ ID NO: 221129 - RNA, 1401 nt, Artificial Sequence
  derived and/or modified CDS sequence (opt5) from neuraminidase__InfluenzaB__AFJ91075
augcugcccagcaccauccagacacucacgcuguuccuuaccuccggcggggugcugcucucucuguacgucagcgccucccuuucuuaucugcucuacagcgacauucugcugaaguuuucccaaacagagaucaccgcuccuauuaugccgcucgauugcgccaacgcgucuaauguucaggcugugaacagaagcgccgccaaaggagugacacugcuucugcccgaaccugaguggaccuauccccggcucuccuguccuggcagcacauuccagaaggcucugcuuaucucuccccaccgcuuuggggaaaccaaaggaaauuccgccccucugauuaucagagagccguucaucgcuugcggccccacggaauguaagcauuuugcccucacccacuacgcggcccagccugggggauauuacaacggcacacgggaggaccgcaauaaacugagacaucugauuagcgucaagcucggcaagauccccaccguggagaacucuauuuuccacauggcugccugguccgggagcgcuugccaugauggaaaagaauggacauauaucggcguugacgggccugauucuaauacccugcuuaagauuaaauacggagaggccuacacggacacauaucacuccuacgcgaagaacauccugcggacccaagaaagcgccuguaauugcauuggcggggauuguuaucucaugaucacagacggacccgcuuccggcaucucugagugccgcuuucugaaaauuagagagggccggaucauuaaggaaaucuucccgaccgggcgcgugaagcacaccgaggaauguacaugcggauuugccagcaacaaaacgauugagugugcuugcagagauaauuccuacaccgccaagcggccuuucgucaaacuuaacguggaaacagacaccgccgagauccgccugaugugcacagagaccuaucucgauacgcccagaccuaaugacggcagcaucacagggcccugugaaucugauggagacaagggcuccgggggaauuaaaggcggcuuuguucaucagcggauggcuagcaagaucgggcgcugguacucuagaaccaugagcaaaaccaagcggaugggaaugggccuguaugugaaguacgacggggaucccuggacagacuccgaggcgcuggcccucucuggagucauggugagcauggaggaaccuggcugguacuccuucggguuugaaauuaaagauaagaaaugcgacgugccguguaucggcauugagaugguccacgauggaggcaagaccacauggcauagcgcugccacggccaucuauugccugauggggucuggacagcuucugugggacaccguuacaggcguggauauggcucucuga

SEQ ID NO: 221130 - RNA, 1401 nt, Artificial Sequence; identical to SEQ ID NO: 220889
  derived and/or modified CDS sequence (opt5) from neuraminidase__InfluenzaB__AFJ91086

SEQ ID NO: 221131 - RNA, 1401 nt, Artificial Sequence; identical to SEQ ID NO: 220889
  derived and/or modified CDS sequence (opt5) from neuraminidase__InfluenzaB__AFJ91097

SEQ ID NO: 221132 - RNA, 1401 nt, Artificial Sequence; identical to SEQ ID NO: 220889
  derived and/or modified CDS sequence (opt5) from neuraminidase__InfluenzaB__AFJ91108

SEQ ID NO: 221133 - RNA, 1401 nt, Artificial Sequence; identical to SEQ ID NO: 220889
  derived and/or modified CDS sequence (opt5) from neuraminidase__InfluenzaB__AFJ91119

SEQ ID NO: 221134 - RNA, 1401 nt, Artificial Sequence; identical to SEQ ID NO: 220740
  derived and/or modified CDS sequence (opt5) from neuraminidase__InfluenzaB__AFJ91707

SEQ ID NO: 221135 - RNA, 1401 nt, Artificial Sequence
  derived and/or modified CDS sequence (opt5) from neuraminidase__InfluenzaB__AFK09801
augcugcccagcaccauccagacacucacgcuguuccuuaccuccggcggggugcugcucucucuguacgucagcgccucccuuucuuaucugcucuacagcgacauucugcugaaguuuucccaaacagagaucaccgcuccuacaaugccgcucgauugcgccaacgcgucuaauguucaggcugugaacagaagcgccaccaaaggagugacacugcuucugcccgaaccugaguggaccuauccccggcucuccuguccuggcagcacguuccagaaggcccugcuuauuucuccccaccgcuuuggggaaaccaaaggaaauuccgcuccucugaucauuagagagccguucaucgccugcggccccaaggaauguaaacauuuugcucucacacacuacgccgcgcagccugggggauauuacaacggcacccgggaggaccgcaauaagcugagacaucugaucagcgucaagcucggcaaaauucccacaguggagaacucuaucuuccacauggccgcuugguccgggagcgccugccaugauggacgggaauggaccuauauuggcguugacgggccugauucuaaugcucugcuuaagaucaaauacggagaggccuacacggacacauaucacuccuacgcgaagaacauucugcgcacccaagaaagcgccuguaauugcaucggcggggauuguuaucucaugauuacagacggauccgcuucuggcaucagcgagugcagauuucugaaaauccgggagggccgcauuaucaaggaaauuuuccccaccgggagagugaagcacaccgaggaauguacaugcggauuugccuccaacaaaacgaucgagugugcuugccgggauaauagcuacaccgccaagcgcccguucgucaaacuuaacguggaaacagacaccgccgagauuagacugaugugcacagagaccuaucucgauacgccucggcccaaugacggcucuaucacagggccuugugaauccaacggagaucgcggcagcgggggaaucaagggcggcuuuguucaucagagaauggcuucuaaaauugggcggugguacagcagaaccauguccaagaccaaacgcaugggaaugggccuguaugugaaguacgacggggaccccuggacagauucugaggcgcuggcccucagcggagucauggugcccauggaggaaccuggcugguacuccuucggguuugaaaucaaggacaaaaagugcgaugugccguguauuggcaucgagaugguccacgacggaggcaaaaccacauggcauagcgcugccacggccauuuauugccugauggggucuggacagcuucugugggauaccguuacaggcguggacauggcucucuga

SEQ ID NO: 221136 - RNA, 1401 nt, Artificial Sequence; identical to SEQ ID NO: 220864
  derived and/or modified CDS sequence (opt5) from neuraminidase__InfluenzaB__AFN54669

SEQ ID NO: 221137 - RNA, 1401 nt, Artificial Sequence; identical to SEQ ID NO: 220864
  derived and/or modified CDS sequence (opt5) from neuraminidase__InfluenzaB__AFN54680

SEQ ID NO: 221138 - RNA, 1401 nt, Artificial Sequence; identical to SEQ ID NO: 220889
  derived and/or modified CDS sequence (opt5) from neuraminidase__InfluenzaB__AFN54691

SEQ ID NO: 221139 - RNA, 1401 nt, Artificial Sequence; identical to SEQ ID NO: 220889
  derived and/or modified CDS sequence (opt5) from neuraminidase__InfluenzaB__AFN54702

SEQ ID NO: 221140 - RNA, 1401 nt, Artificial Sequence; identical to SEQ ID NO: 220889
  derived and/or modified CDS sequence (opt5) from neuraminidase__InfluenzaB__AFN54713

SEQ ID NO: 221141 - RNA, 1401 nt, Artificial Sequence; identical to SEQ ID NO: 220889
  derived and/or modified CDS sequence (opt5) from neuraminidase__InfluenzaB__AFN54724

SEQ ID NO: 221142 - RNA, 1401 nt, Artificial Sequence; identical to SEQ ID NO: 220889
  derived and/or modified CDS sequence (opt5) from neuraminidase__InfluenzaB__AFN54735

SEQ ID NO: 221143 - RNA, 1401 nt, Artificial Sequence; identical to SEQ ID NO: 220889
  derived and/or modified CDS sequence (opt5) from neuraminidase__InfluenzaB__AFN54746

SEQ ID NO: 221144 - RNA, 1401 nt, Artificial Sequence; identical to SEQ ID NO: 220889
  derived and/or modified CDS sequence (opt5) from neuraminidase__InfluenzaB__AFN54757

SEQ ID NO: 221145 - RNA, 1401 nt, Artificial Sequence; identical to SEQ ID NO: 220889
  derived and/or modified CDS sequence (opt5) from neuraminidase__InfluenzaB__AFN54768

SEQ ID NO: 221146 - RNA, 1401 nt, Artificial Sequence; identical to SEQ ID NO: 220889
  derived and/or modified CDS sequence (opt5) from neuraminidase__InfluenzaB__AFN54779

SEQ ID NO: 221147 - RNA, 1401 nt, Artificial Sequence; identical to SEQ ID NO: 220889
  derived and/or modified CDS sequence (opt5) from neuraminidase__InfluenzaB__AFN54790

SEQ ID NO: 221148 - RNA, 1401 nt, Artificial Sequence; identical to SEQ ID NO: 220889
  derived and/or modified CDS sequence (opt5) from neuraminidase__InfluenzaB__AFN54801

SEQ ID NO: 221149 - RNA, 1401 nt, Artificial Sequence; identical to SEQ ID NO: 220889
  derived and/or modified CDS sequence (opt5) from neuraminidase__InfluenzaB__AFN54812

SEQ ID NO: 221150 - RNA, 1401 nt, Artificial Sequence
  derived and/or modified CDS sequence (opt5) from neuraminidase__InfluenzaB__AFN54834
augcugcccagcaccauccagacacucacgcuguuccuuaccuccggcggggugcugcucucucuguacgucagcgccucccuuucuuaucugcucuacagcgacauucugcugaaguuuuccagaacagagaucaccgcuccuauuaugccgcucgauugcgccaacgcgucuaauguucaagcugugaaccggagcgccacaaaaggagugacccugcuucugcccgaaccugaguggacauauccccgccucuccuguccuggcagcaccuuccagaaggcccugcuuaucucuccccacagauuuggggaaacgaaaggaaauuccgcuccucugauuauccgggagccguucaucgccugcggccccaaggaauguaaacauuuugcucucacccacuacgccgcgcagccugggggauauuacaacggcacacgcgaggacagaaauaagcugcggcaucugauuagcgucaagcucggcaaaauccccaccguggagaacucuauuuuccacauggccgcuugguccgggagcgccugccaugauggacgcgaauggaucuauauuggcguugacgggccugauucuaaugcucugcuuaagaucaaauacggagaggccuacacagacaccuaucacuccuacgcgaagaacauucugagaacgcaggaaagcgccuguaauugcaucggcggggauuguuaucucaugaucacagacggacccgcuuccggcauuucugagugccgguuucugaaaauccgcgagggcagaauuaucaaggaaauuuucccgaccgggcgggugaagcacacagaggaauguaccugcggauuugccagcaacaaaaccaucgagugugcuugccgcgauaauuccuacacagccaagagaccuuucgucaaacuuaacguggaaacggacaccgccgagauccggcugaugugcacagagaccuaucucgauacaccccgcccuaaugacggcagcauuaccgggcccugugaaucuaacggagauaagggcuccgggggaaucaaaggcggcuuuguucaucaaagaauggcuagcaagauugggcggugguacucuagaacgaugagcaaaacaaagcgcaugggaaugggccuguaugugaaguacgacggggaccccuggaccgauuccgaggcgcuggcccucucuggagucauggugagcauggaggaaccuggcugguacuccuucggguuugaaaucaaagacaagaaaugcgaugugccguguauuggcaucgagaugguccacgacggaggcaagaccacauggcauagcgcugccaccgccaucuauugccugauggggucuggacagcuucugugggauacaguuacgggcgugaauaugacccucuga

SEQ ID NO: 221151 - RNA, 1401 nt, Artificial Sequence; identical to SEQ ID NO: 220889
  derived and/or modified CDS sequence (opt5) from neuraminidase__InfluenzaB__AFN54845

SEQ ID NO: 221152 - RNA, 1401 nt, Artificial Sequence
  derived and/or modified CDS sequence (opt5) from neuraminidase__InfluenzaB__AFN54856
augcugcccagcaccauccagacacucacgcuguuccuuaccuccggcggggugcugcucucucuguacgucagcgccucccuuucuuaucugcucuacagcgacauucugcugaaguuuuccagaacagagaucaccgcuccuauuaugccgcucgauugcgccaacgcgucuaauguucaagcugugaaccggagcgccacaaaaggagugacccugcuucugcccgaaccugaguggacauauccccgccucuccuguccuggcagcaccuuccagaaggcccugcuuaucucuccccacagauuuggggaaacgaaaggaaauuccgcuccucugauuauccgggagccguucaucgccugcggccccaaggaauguaaacauuuugcucucacccacuacgccgcgcagccugggggauauuacaacggcacacgcgaggacagaaauaagcugcggcaucugauuagcgucaagcucggcaaaauccccaccguggagaacucuauuuuccacauggccgcuugguccgggagcgccugccaugauggacgcgaauggacauauaucggcguugacgggccugauucuaaugcucugcuuaagauuaaauacggagaggccuacaccgacacguaucacuccuacgcgaagaacauccugagaacacaggaaagcgccuguaauugcauuggcggggauuguuaucucaugaucaccgacggacccgcuuccggcgugucugagugccgguuucugaaaauccgcgagggcagaauuaucaaggaaauuuucccgacagggcgggucaagcacaccgaggaauguaccugcggauuugccagcaacaaaacaaucgagugugcuugccgcgauaauuccuacacggccaagagaccuuucgugaaacuuaacguugaaaccgacacagccgagauucggcugaugugcaccgagacauaucucgauacgccccgcccuaaugacggcagcaucaccgggcccugugaaucuaacggagauaagggcuccgggggaaucaaaggcggcuuugugcaucaaagaauggcuagcaagauugggcggugguacucuagaacaaugagcaaaaccaagcgcaugggaaugggccuguaugucaaguacgacggggaccccuggaccgauuccgaggcgcuggcccucucuggagugauggugagcauggaggaaccuggcugguacuccuucggguuugaaaucaaagacaagaaaugcgaugucccguguauuggcaucgagaugguucacgacggaggcaagacaaccuggcauagcgcugccacagccauuuauugccugauggggucuggacagcuucugugggauacggcuaccggcgugaauaugacacucuga

SEQ ID NO: 221153 - RNA, 1401 nt, Artificial Sequence; identical to SEQ ID NO: 220889
  derived and/or modified CDS sequence (opt5) from neuraminidase__InfluenzaB__AFN54867

SEQ ID NO: 221154 - RNA, 1401 nt, Artificial Sequence
  derived and/or modified CDS sequence (opt5) from neuraminidase__InfluenzaB__AFU34598
augcugcccagcaccauccagacacucacgcuguuccuuaccuccggcggggugcugcucucucuguacgucagcgccucccuuucuuaucugcucuacagcgacauucugcugaaguuuuccccuacagagaucaccgcuccgacaaugucucucgauugcgccaacgcgagcaauguucaagcugugaacagauccgccaccaaaggagugacauuccugcuucccgaaccugaguggaccuauccccggcugagcuguccuggcucuacguuucagaaggcccuccugauuagcccccaccgcuucggggaaaccaaaggaaauuccgcuccucuuaucauuagagagccguuuaucgccugcggccccaacgaauguaagcauuucgcucugacacacuacgccgcgcagccugggggauauuacaauggcacccggggcgaccgcaacaaacucagacaucugaucucugucaagcuggggaagauucccacaguggaaaauuccaucuuucacauggccgcuuggagcggaucugccugccaugauggcaaagaguggaccuauauugggguugacggaccugauaacaaugcucuccugaaggugaaauacggcgaggccuacacggacacauaucacuccuacgcgaacaagauccuucggacccgcgagagcgccuguaauugcauugggggaaacuguuaucugaugaucacagauggcuccgcuucuggcgucagcgaaugcagauuccucaaaauucggguggggcgcaucaucaaggagauuuuucccaccggaagaguuaagcacaccgaggaauguacaugcggcuucgccuccaauaaaacgaucgagugugcuugccgggacaacagcuacaccgccaagcgcccguuugugaaacugaaugucgaaacagauaccgccgagauuagacuuaugugcacagacaccuaucuggauacgccucggcccgacgaugggucuaucacaggaccuugugaauccaacggcgacaaggggagcggaggcauuaaaggcggguucgugcaucagcgcauggagucuaagaucggaagaugguacagccggaccauguccaaaaccgagagaaugggcauggggcucuaugugaaguacgacggagaucccugggcugacucugaugcgcuggccuuuagcggcgucaugguuuccaugaaggaacccgggugguacagcuucggcuucgagaucaaagacaagaaaugcgaugugccuuguauuggaaucgaaauggugcacgacggcgggaaggagacauggcauucugcugccaccgccauuuauugccugaugggauccggccaacuccugugggauacagucacggggguggacguugcucuuuga

SEQ ID NO: 221155 - RNA, 1401 nt, Artificial Sequence
  derived and/or modified CDS sequence (opt5) from neuraminidase__InfluenzaB__AFU34609
augcugcccagcaccauccagacacucacgcuguuccuuaccuccggcggggugcugcucucucuguacgucagcgcccuucuguccuaucuccuguacucugacauucugcucaaguuuagcccuacagagaucaccgcuccgacaaugucccuggauugcgccaacgcgucuaauguucaagcugugaacagaagcgccacccggggagugacauuccuucugcccgaaccugagugggccuauccccgccucuccuguccuggcagcaccuuucagaaagcucugcuuauuucuccccacagauucggggaaacgaagggaaauuccgccccucugaucauucgggagccguuuaucgcuugcggccccaacgaauguaaacauuucgcccucacccacuacgcggcccagccugggggauauuacaauggcacacgcggcgacagaaacaagcugcggcaucugaucagcgucaaacucgggaagauucccaccguggaaaauucuaucuuucacauggcugccugguccggaagcgcuugccaugauggcaaggaguggacauauauugggguugacggaccugauaacgacgcccugcuuaaagugaaguacggcgaggcguacaccgauacguaucacucuuacgccaauaaaauccugcgcacacaggaguccgcuuguaacugcauugggggaaauuguuaucucaugaucaccgacggcagcgccuccggcgucucugaaugcagauuccugaagauucgggaggggcgcaucaucaaagagauuuuucccacaggaagagugaagcacaccgaagaguguaccugcggcuucgcuagcaacaagacaaucgaaugugccugccgggauaauuccuacacggccaaacgcccguuuguuaaacuuaacguggagaccgacacagcugaaauuagacugaugugcaccgauacauaucucgacaccccucggcccgaugacgggagcaucacgggaccuugugagucuaauggcgacaagggguccggaggcauuaagggcggguucguccaucaacgcauggagagcaaaaucggaagaugguacucucggacaaugagcaagaccgaaagaaugggcauggggcuguaugugaaauacgauggagaccccugggcggauuccgacgcccuggcuuuuucuggcgugauggucagcaugaaggagcccgggugguacuccuucggcuucgaaaucaaggauaaaaagugcgacguuccuuguauuggaaucgagauggugcacgauggcgggaaagaaaccuggcauagcgccgccacagcuauuuauugccucaugggaucuggccagcugcuuugggacaccgugacaggggucgauauggcccuguga

SEQ ID NO: 221156 - RNA, 1401 nt, Artificial Sequence
  derived and/or modified CDS sequence (opt5) from neuraminidase__InfluenzaB__AFU34620
augcugcccagcaccauccagacacucacgcuguuccuuaccuccggcggggugcugcucucucuguacgucagcgcccuucuguccuaucuccuguacucugacauucugcucaaguuuagcccuacagagaucaccgcuccgacaaugucccuggauugcgccaacgcgucuaauguucaagcugugaacagaagcgccacccggggagugacauuccuucugcccgaaccugaguggaccuauccccgccucuccuguccuggcagcacguuucagaaagcccugcuuauuucuccccacagauucggggaaaccaagggaaauuccgcuccucugaucauucgggagccguuuaucgccugcggccccaacgaauguaaacauuucgcucucacacacuacgccgcgcagccugggggauauuacaauggcacccgcggcgacagaaacaagcugcggcaucugaucagcgucaaacucgggaagauucccacaguggaaaauucuaucuuucacauggccgcuugguccggaagcgccugccaugauggcaaggaguggaccuauauugggguugacggaccugauaacgacgcucugcuuaaagugaaguacggcgaggccuacacggauacauaucacucuuacgcgaauaaaauccugcgcacccaggaguccgccuguaacugcauugggggaaauuguuaucucaugaucacagacggcagcgcuuccggcgucucugaaugcagauuccugaagauucgggaggggcgcaucaucaaagagauuuuucccaccggaagagugaagcacaccgaagaguguacaugcggcuucgccagcaacaagacgaucgaaugugcuugccgggauaauuccuacaccgccaaacgcccguuuguuaaacuuaacguggagacagacaccgccgaaauuagacugaugugcacagauaccuaucucgacacgccucggcccgaugacgggagcaucacaggaccuugugagucuaauggcgacaagggguccggaggcauuaagggcggguucguccaucaacgcauggagagcaaaaucggaagaugguacucucggaccaugagcaagaccgaaagaaugggcauggggcuguaugugaaauacgauggagaccccugggcugauuccgacgcgcuggccuuuucuggcgugauggucagcaugaaggagcccgggugguacuccuucggcuucgaaaucaaggauaaaaagugcgacguuccuuguauuggaaucgagauggugcacgauggcgggaaagaaacauggcauagcgcugccaccgccauuuauugccucaugggaucuggccagcugcuuugggacacagugacgggggucgauauggcucuguga

SEQ ID NO: 221157 - RNA, 1401 nt, Artificial Sequence
  derived and/or modified CDS sequence (opt5) from neuraminidase__InfluenzaB__AFU34631
augcugcccagcaccauccagacacucacgcuguuccuuaccuccggcggggugcugcucucucuguacgucagcgcccuucuguccuaucuccuguacucugacauucugcucaaguuuagcccuacagagaucaccgcuccgacaaugucccuggauugcgccaacgcgucuaauguucaagcugugaacagaagcgccacccggggagugacauuccuucugcccgaaccugaguggaccuauccccgccucuccuguccuggcagcacguuucagaaagcccugcuuauuucuccccacagauucggggaaaccaagggaaauuccgcuccucugaucauucgggagccguuuaucgccugcggccccaacgaauguaaacauuucgcucucacacacuacgccgcgcagccugggggauauuacaauggcacccgcggcgacagaaacaagcugcggcaucugaucagcgucaaacucgggaagauucccacaguggaaaauucuaucuuucacauggccgcuugguccggaagcgccugccaugauggcaaggaguggaccuauauugggguugacggaccugauaacgacgcucugcuuaaagugaaguacggcgaggccuacacggauacauaucacucuuacgcgaauaaaauccugcgcacccaggaguccgccuguaacugcauuagagggaauuguuaucucaugaucacagacggaagcgcuuccggcgucucugaaugccgguuccugaagauucgcgagggcagaaucaucaaagagauuuuucccaccgggcgggugaagcacaccgaagaguguacaugcggauucgccagcaacaagacgaucgaaugugcuugccgcgauaauuccuacaccgccaaaagaccguuuguuaaacuuaacguggagacagacaccgccgaaauucggcugaugugcacagauaccuaucucgacacgccucgccccgaugacggcagcaucacagggccuugugagucuaauggagacaagggcuccgggggaauuaagggcggcuucguccaucaaagaauggagagcaaaaucgggcggugguacucuagaaccaugagcaagaccgaacgcaugggaaugggccuguaugugaaauacgauggggaccccugggcugauuccgacgcgcuggccuuuucuggagugauggucagcaugaaggagcccggcugguacuccuucggguucgaaaucaaggauaaaaagugcgacguuccuuguauuggcaucgagauggugcacgauggaggcaaagaaacauggcauagcgcugccaccgccauuuauugccucauggggucuggacagcugcuuugggacacagugacgggcgucgauauggcucuguga
